United States Patent Application Publication US 2014/0004565 A1 - sequence listing, part 104

SEQ ID NO: 2591122 - RNA, 19 nt, Artificial Sequence
  Description of Artificial Sequence: Synthetic oligonucleotide
cugggauccucuuggcggu

SEQ ID NO: 2591123 - RNA, 19 nt, Artificial Sequence
  Description of Artificial Sequence: Synthetic oligonucleotide
uagaugcuacaggcagcaa

SEQ ID NO: 2591124 - RNA, 19 nt, Artificial Sequence
  Description of Artificial Sequence: Synthetic oligonucleotide
accaggguucacagaggga

SEQ ID NO: 2591125 - RNA, 19 nt, Artificial Sequence
  Description of Artificial Sequence: Synthetic oligonucleotide
caacugugaguagcaggca

SEQ ID NO: 2591126 - RNA, 19 nt, Artificial Sequence
  Description of Artificial Sequence: Synthetic oligonucleotide
cugucauacuggucacucu

SEQ ID NO: 2591127 - RNA, 19 nt, Artificial Sequence
  Description of Artificial Sequence: Synthetic oligonucleotide
acacuugcugcuggugauu

SEQ ID NO: 2591128 - RNA, 19 nt, Artificial Sequence
  Description of Artificial Sequence: Synthetic oligonucleotide
gaacugcaugguggaagaa

SEQ ID NO: 2591129 - RNA, 19 nt, Artificial Sequence
  Description of Artificial Sequence: Synthetic oligonucleotide
ccuugggaucucaaacaca

SEQ ID NO: 2591130 - RNA, 19 nt, Artificial Sequence
  Description of Artificial Sequence: Synthetic oligonucleotide
ggacccaguccugcuuggg

SEQ ID NO: 2591131 - RNA, 19 nt, Artificial Sequence
  Description of Artificial Sequence: Synthetic oligonucleotide
gcaguaguggaugcauuaa

SEQ ID NO: 2591132 - RNA, 19 nt, Artificial Sequence
  Description of Artificial Sequence: Synthetic oligonucleotide
cagcgucuggcugggccag

SEQ ID NO: 2591133 - RNA, 19 nt, Artificial Sequence
  Description of Artificial Sequence: Synthetic oligonucleotide
gauccucuuggcgguaaau

SEQ ID NO: 2591134 - RNA, 19 nt, Artificial Sequence
  Description of Artificial Sequence: Synthetic oligonucleotide
gcauuaacugcagacucau

SEQ ID NO: 2591135 - RNA, 19 nt, Artificial Sequence
  Description of Artificial Sequence: Synthetic oligonucleotide
aaaccacgucaugcaucua

SEQ ID NO: 2591136 - RNA, 19 nt, Artificial Sequence
  Description of Artificial Sequence: Synthetic oligonucleotide
aggcaguaguggaugcauu

SEQ ID NO: 2591137 - RNA, 19 nt, Artificial Sequence
  Description of Artificial Sequence: Synthetic oligonucleotide
ggucagcacagaucucucu

SEQ ID NO: 2591138 - RNA, 19 nt, Artificial Sequence
  Description of Artificial Sequence: Synthetic oligonucleotide
auacagggaaggggauauu

SEQ ID NO: 2591139 - RNA, 19 nt, Artificial Sequence
  Description of Artificial Sequence: Synthetic oligonucleotide
gucuggacccaguccugcu

SEQ ID NO: 2591140 - RNA, 19 nt, Artificial Sequence
  Description of Artificial Sequence: Synthetic oligonucleotide
ccacgucaugcaucuaaga

SEQ ID NO: 2591141 - RNA, 19 nt, Artificial Sequence
  Description of Artificial Sequence: Synthetic oligonucleotide
caggucacacuaguucacu

SEQ ID NO: 2591142 - RNA, 19 nt, Artificial Sequence
  Description of Artificial Sequence: Synthetic oligonucleotide
guguaugucuggacccagu

SEQ ID NO: 2591143 - RNA, 19 nt, Artificial Sequence
  Description of Artificial Sequence: Synthetic oligonucleotide
gggucagcacagaucucuc

SEQ ID NO: 2591144 - RNA, 19 nt, Artificial Sequence
  Description of Artificial Sequence: Synthetic oligonucleotide
cagacucaugggucaaguu

SEQ ID NO: 2591145 - RNA, 19 nt, Artificial Sequence
  Description of Artificial Sequence: Synthetic oligonucleotide
ugggauccucuuggcggua

SEQ ID NO: 2591146 - RNA, 19 nt, Artificial Sequence
  Description of Artificial Sequence: Synthetic oligonucleotide
gcagacucaugggucaagu

SEQ ID NO: 2591147 - RNA, 19 nt, Artificial Sequence
  Description of Artificial Sequence: Synthetic oligonucleotide
gcaggcacagaagcguucu

SEQ ID NO: 2591148 - RNA, 19 nt, Artificial Sequence
  Description of Artificial Sequence: Synthetic oligonucleotide
cugcagacucaugggucaa

SEQ ID NO: 2591149 - RNA, 19 nt, Artificial Sequence
  Description of Artificial Sequence: Synthetic oligonucleotide
ccagccucuucucugggau

SEQ ID NO: 2591150 - RNA, 19 nt, Artificial Sequence
  Description of Artificial Sequence: Synthetic oligonucleotide
caaaggugcugugcuguuu

SEQ ID NO: 2591151 - RNA, 19 nt, Artificial Sequence
  Description of Artificial Sequence: Synthetic oligonucleotide
cacugucauacuggucacu

SEQ ID NO: 2591152 - RNA, 19 nt, Artificial Sequence
  Description of Artificial Sequence: Synthetic oligonucleotide
gcgucuggcugggccagca

SEQ ID NO: 2591153 - RNA, 19 nt, Artificial Sequence
  Description of Artificial Sequence: Synthetic oligonucleotide
agcuggcuucggagagaau

SEQ ID NO: 2591154 - RNA, 19 nt, Artificial Sequence
  Description of Artificial Sequence: Synthetic oligonucleotide
caggcacagaagcguucuu

SEQ ID NO: 2591155 - RNA, 19 nt, Artificial Sequence
  Description of Artificial Sequence: Synthetic oligonucleotide
cgucuggcugggccagcac

SEQ ID NO: 2591156 - RNA, 19 nt, Artificial Sequence
  Description of Artificial Sequence: Synthetic oligonucleotide
cggagagaauaggcagguc

SEQ ID NO: 2591157 - RNA, 19 nt, Artificial Sequence
  Description of Artificial Sequence: Synthetic oligonucleotide
gggccagcacauagaugcu

SEQ ID NO: 2591158 - RNA, 19 nt, Artificial Sequence
  Description of Artificial Sequence: Synthetic oligonucleotide
aaaggguacacccacaugc

SEQ ID NO: 2591159 - RNA, 19 nt, Artificial Sequence
  Description of Artificial Sequence: Synthetic oligonucleotide
aauauaaaggguaaaaccg

SEQ ID NO: 2591160 - RNA, 19 nt, Artificial Sequence
  Description of Artificial Sequence: Synthetic oligonucleotide
acacccauaauauauaggc

SEQ ID NO: 2591161 - RNA, 19 nt, Artificial Sequence
  Description of Artificial Sequence: Synthetic oligonucleotide
ucucgauuaauauaaaggg

SEQ ID NO: 2591162 - RNA, 19 nt, Artificial Sequence
  Description of Artificial Sequence: Synthetic oligonucleotide
uaauauauaggccacggag

SEQ ID NO: 2591163 - RNA, 19 nt, Artificial Sequence
  Description of Artificial Sequence: Synthetic oligonucleotide
uuagaauuguuguugaccc

SEQ ID NO: 2591164 - RNA, 19 nt, Artificial Sequence
  Description of Artificial Sequence: Synthetic oligonucleotide
aauauguuccaggaaaggg

SEQ ID NO: 2591165 - RNA, 19 nt, Artificial Sequence
  Description of Artificial Sequence: Synthetic oligonucleotide
ucagucagcacgcagauac

SEQ ID NO: 2591166 - RNA, 19 nt, Artificial Sequence
  Description of Artificial Sequence: Synthetic oligonucleotide
aauaccgcaacaacaaaac

SEQ ID NO: 2591167 - RNA, 19 nt, Artificial Sequence
  Description of Artificial Sequence: Synthetic oligonucleotide
ugauguauccagcacaccc

SEQ ID NO: 2591168 - RNA, 19 nt, Artificial Sequence
  Description of Artificial Sequence: Synthetic oligonucleotide
aaaaccguugugugcauuc

SEQ ID NO: 2591169 - RNA, 19 nt, Artificial Sequence
  Description of Artificial Sequence: Synthetic oligonucleotide
ucgauuaauauaaagggua

SEQ ID NO: 2591170 - RNA, 19 nt, Artificial Sequence
  Description of Artificial Sequence: Synthetic oligonucleotide
uaccgcaacaacaaaaccc

SEQ ID NO: 2591171 - RNA, 19 nt, Artificial Sequence
  Description of Artificial Sequence: Synthetic oligonucleotide
uuguuguugacccaaagaa

SEQ ID NO: 2591172 - RNA, 19 nt, Artificial Sequence
  Description of Artificial Sequence: Synthetic oligonucleotide
uagaugguccagaauaccg

SEQ ID NO: 2591173 - RNA, 19 nt, Artificial Sequence
  Description of Artificial Sequence: Synthetic oligonucleotide
agaagguacauauggcggc

SEQ ID NO: 2591174 - RNA, 19 nt, Artificial Sequence
  Description of Artificial Sequence: Synthetic oligonucleotide
gaagaagacagccuggaug

SEQ ID NO: 2591175 - RNA, 19 nt, Artificial Sequence
  Description of Artificial Sequence: Synthetic oligonucleotide
aguucauuagaauuguugu

SEQ ID NO: 2591176 - RNA, 19 nt, Artificial Sequence
  Description of Artificial Sequence: Synthetic oligonucleotide
ggagagaucagucagcacg

SEQ ID NO: 2591177 - RNA, 19 nt, Artificial Sequence
  Description of Artificial Sequence: Synthetic oligonucleotide
aucucgauuaauauaaagg

SEQ ID NO: 2591178 - RNA, 19 nt, Artificial Sequence
  Description of Artificial Sequence: Synthetic oligonucleotide
caauaggacagcaggaugg

SEQ ID NO: 2591179 - RNA, 19 nt, Artificial Sequence
  Description of Artificial Sequence: Synthetic oligonucleotide
agagaugagcuuccuaagc

SEQ ID NO: 2591180 - RNA, 19 nt, Artificial Sequence
  Description of Artificial Sequence: Synthetic oligonucleotide
agauauagcuguucaguac

SEQ ID NO: 2591181 - RNA, 19 nt, Artificial Sequence
  Description of Artificial Sequence: Synthetic oligonucleotide
auuucgauggccuuguagu

SEQ ID NO: 2591182 - RNA, 19 nt, Artificial Sequence
  Description of Artificial Sequence: Synthetic oligonucleotide
uguuguugacccaaagaag

SEQ ID NO: 2591183 - RNA, 19 nt, Artificial Sequence
  Description of Artificial Sequence: Synthetic oligonucleotide
gacccaaagaagaugaucc

SEQ ID NO: 2591184 - RNA, 19 nt, Artificial Sequence
  Description of Artificial Sequence: Synthetic oligonucleotide
ugagccaauauguuccagg

SEQ ID NO: 2591185 - RNA, 19 nt, Artificial Sequence
  Description of Artificial Sequence: Synthetic oligonucleotide
acccauaauauauaggcca

SEQ ID NO: 2591186 - RNA, 19 nt, Artificial Sequence
  Description of Artificial Sequence: Synthetic oligonucleotide
agcuguucaguacuucucc

SEQ ID NO: 2591187 - RNA, 19 nt, Artificial Sequence
  Description of Artificial Sequence: Synthetic oligonucleotide
acaagcgccauguucgcgc

SEQ ID NO: 2591188 - RNA, 19 nt, Artificial Sequence
  Description of Artificial Sequence: Synthetic oligonucleotide
aauuguuguugacccaaag

SEQ ID NO: 2591189 - RNA, 19 nt, Artificial Sequence
  Description of Artificial Sequence: Synthetic oligonucleotide
aauaggacagcaggauggc

SEQ ID NO: 2591190 - RNA, 19 nt, Artificial Sequence
  Description of Artificial Sequence: Synthetic oligonucleotide
aaguucauuagaauuguug

SEQ ID NO: 2591191 - RNA, 19 nt, Artificial Sequence
  Description of Artificial Sequence: Synthetic oligonucleotide
uggaugaccagaucaauga

SEQ ID NO: 2591192 - RNA, 19 nt, Artificial Sequence
  Description of Artificial Sequence: Synthetic oligonucleotide
aauauauaggccacggaga

SEQ ID NO: 2591193 - RNA, 19 nt, Artificial Sequence
  Description of Artificial Sequence: Synthetic oligonucleotide
aaggguaaaaccguugugu

SEQ ID NO: 2591194 - RNA, 19 nt, Artificial Sequence
  Description of Artificial Sequence: Synthetic oligonucleotide
accgcaacaacaaaacccc

SEQ ID NO: 2591195 - RNA, 19 nt, Artificial Sequence
  Description of Artificial Sequence: Synthetic oligonucleotide
cauaauauauaggccacgg

SEQ ID NO: 2591196 - RNA, 19 nt, Artificial Sequence
  Description of Artificial Sequence: Synthetic oligonucleotide
ugauccuggcuccugagcc

SEQ ID NO: 2591197 - RNA, 19 nt, Artificial Sequence
  Description of Artificial Sequence: Synthetic oligonucleotide
cagauaccgaagaagacag

SEQ ID NO: 2591198 - RNA, 19 nt, Artificial Sequence
  Description of Artificial Sequence: Synthetic oligonucleotide
agagagaugagcuuccuaa

SEQ ID NO: 2591199 - RNA, 19 nt, Artificial Sequence
  Description of Artificial Sequence: Synthetic oligonucleotide
gagaagguacauauggcgg

SEQ ID NO: 2591200 - RNA, 19 nt, Artificial Sequence
  Description of Artificial Sequence: Synthetic oligonucleotide
auaccgcaacaacaaaacc

SEQ ID NO: 2591201 - RNA, 19 nt, Artificial Sequence
  Description of Artificial Sequence: Synthetic oligonucleotide
uuugggguauaucaucucu

SEQ ID NO: 2591202 - RNA, 19 nt, Artificial Sequence
  Description of Artificial Sequence: Synthetic oligonucleotide
ggagaagguacauauggcg

SEQ ID NO: 2591203 - RNA, 19 nt, Artificial Sequence
  Description of Artificial Sequence: Synthetic oligonucleotide
aaaggguaaaaccguugug

SEQ ID NO: 2591204 - RNA, 19 nt, Artificial Sequence
  Description of Artificial Sequence: Synthetic oligonucleotide
cucaucucgauuaauauaa

SEQ ID NO: 2591205 - RNA, 19 nt, Artificial Sequence
  Description of Artificial Sequence: Synthetic oligonucleotide
agaucaaugaaggucagga

SEQ ID NO: 2591206 - RNA, 19 nt, Artificial Sequence
  Description of Artificial Sequence: Synthetic oligonucleotide
uaucaucucucugucauag

SEQ ID NO: 2591207 - RNA, 19 nt, Artificial Sequence
  Description of Artificial Sequence: Synthetic oligonucleotide
uaccgaagaagacagccug

SEQ ID NO: 2591208 - RNA, 19 nt, Artificial Sequence
  Description of Artificial Sequence: Synthetic oligonucleotide
cuguguaucccagauauag

SEQ ID NO: 2591209 - RNA, 19 nt, Artificial Sequence
  Description of Artificial Sequence: Synthetic oligonucleotide
aauuugggguauaucaucu

SEQ ID NO: 2591210 - RNA, 19 nt, Artificial Sequence
  Description of Artificial Sequence: Synthetic oligonucleotide
aaaaccccgacaggaaagg

SEQ ID NO: 2591211 - RNA, 19 nt, Artificial Sequence
  Description of Artificial Sequence: Synthetic oligonucleotide
uguaucccagauauagcug

SEQ ID NO: 2591212 - RNA, 19 nt, Artificial Sequence
  Description of Artificial Sequence: Synthetic oligonucleotide
acaacaaaaccccgacagg

SEQ ID NO: 2591213 - RNA, 19 nt, Artificial Sequence
  Description of Artificial Sequence: Synthetic oligonucleotide
uaggccacggagaagguac

SEQ ID NO: 2591214 - RNA, 19 nt, Artificial Sequence
  Description of Artificial Sequence: Synthetic oligonucleotide
uguguaucccagauauagc

SEQ ID NO: 2591215 - RNA, 19 nt, Artificial Sequence
  Description of Artificial Sequence: Synthetic oligonucleotide
auagaugguccagaauacc

SEQ ID NO: 2591216 - RNA, 19 nt, Artificial Sequence
  Description of Artificial Sequence: Synthetic oligonucleotide
aguugcacaggauggagca

SEQ ID NO: 2591217 - RNA, 19 nt, Artificial Sequence
  Description of Artificial Sequence: Synthetic oligonucleotide
aaccguugugugcauuccg

SEQ ID NO: 2591218 - RNA, 19 nt, Artificial Sequence
  Description of Artificial Sequence: Synthetic oligonucleotide
auauauaggccacggagaa

SEQ ID NO: 2591219 - RNA, 19 nt, Artificial Sequence
  Description of Artificial Sequence: Synthetic oligonucleotide
aaaccguugugugcauucc

SEQ ID NO: 2591220 - RNA, 19 nt, Artificial Sequence
  Description of Artificial Sequence: Synthetic oligonucleotide
uauguuccaggaaagggua

SEQ ID NO: 2591221 - RNA, 19 nt, Artificial Sequence
  Description of Artificial Sequence: Synthetic oligonucleotide
uaagcugccguucuugcuc

SEQ ID NO: 2591222 - RNA, 19 nt, Artificial Sequence
  Description of Artificial Sequence: Synthetic oligonucleotide
aaggguacacccacaugcc

SEQ ID NO: 2591223 - RNA, 19 nt, Artificial Sequence
  Description of Artificial Sequence: Synthetic oligonucleotide
uccagaauaccgcaacaac

SEQ ID NO: 2591224 - RNA, 19 nt, Artificial Sequence
  Description of Artificial Sequence: Synthetic oligonucleotide
aggaaguucauuagaauug

SEQ ID NO: 2591225 - RNA, 19 nt, Artificial Sequence
  Description of Artificial Sequence: Synthetic oligonucleotide
gauauagcuguucaguacu

SEQ ID NO: 2591226 - RNA, 19 nt, Artificial Sequence
  Description of Artificial Sequence: Synthetic oligonucleotide
uauaaaggguaaaaccguu

SEQ ID NO: 2591227 - RNA, 19 nt, Artificial Sequence
  Description of Artificial Sequence: Synthetic oligonucleotide
cacaggauggagcaauagg

SEQ ID NO: 2591228 - RNA, 19 nt, Artificial Sequence
  Description of Artificial Sequence: Synthetic oligonucleotide
agaugguccagaauaccgc

SEQ ID NO: 2591229 - RNA, 19 nt, Artificial Sequence
  Description of Artificial Sequence: Synthetic oligonucleotide
cauagaugguccagaauac

SEQ ID NO: 2591230 - RNA, 19 nt, Artificial Sequence
  Description of Artificial Sequence: Synthetic oligonucleotide
acauauggcggcgaguccg

SEQ ID NO: 2591231 - RNA, 19 nt, Artificial Sequence
  Description of Artificial Sequence: Synthetic oligonucleotide
aaugaaggucaggaacuuc

SEQ ID NO: 2591232 - RNA, 19 nt, Artificial Sequence
  Description of Artificial Sequence: Synthetic oligonucleotide
gauguccucaucucgauua

SEQ ID NO: 2591233 - RNA, 19 nt, Artificial Sequence
  Description of Artificial Sequence: Synthetic oligonucleotide
auggcggcgaguccgcugc

SEQ ID NO: 2591234 - RNA, 19 nt, Artificial Sequence
  Description of Artificial Sequence: Synthetic oligonucleotide
caaaaccccgacaggaaag

SEQ ID NO: 2591235 - RNA, 19 nt, Artificial Sequence
  Description of Artificial Sequence: Synthetic oligonucleotide
augauccuggcuccugagc

SEQ ID NO: 2591236 - RNA, 19 nt, Artificial Sequence
  Description of Artificial Sequence: Synthetic oligonucleotide
gagagaugagcuuccuaag

SEQ ID NO: 2591237 - RNA, 19 nt, Artificial Sequence
  Description of Artificial Sequence: Synthetic oligonucleotide
aggguaaaaccguugugug

SEQ ID NO: 2591238 - RNA, 19 nt, Artificial Sequence
  Description of Artificial Sequence: Synthetic oligonucleotide
auauaaaggguaaaaccgu

SEQ ID NO: 2591239 - RNA, 19 nt, Artificial Sequence
  Description of Artificial Sequence: Synthetic oligonucleotide
auaauauauaggccacgga

SEQ ID NO: 2591240 - RNA, 19 nt, Artificial Sequence
  Description of Artificial Sequence: Synthetic oligonucleotide
caauuugggguauaucauc

SEQ ID NO: 2591241 - RNA, 19 nt, Artificial Sequence
  Description of Artificial Sequence: Synthetic oligonucleotide
uacuucucccagcagguac

SEQ ID NO: 2591242 - RNA, 19 nt, Artificial Sequence
  Description of Artificial Sequence: Synthetic oligonucleotide
cacacccauaauauauagg

SEQ ID NO: 2591243 - RNA, 19 nt, Artificial Sequence
  Description of Artificial Sequence: Synthetic oligonucleotide
gaagguacauauggcggcg

SEQ ID NO: 2591244 - RNA, 19 nt, Artificial Sequence
  Description of Artificial Sequence: Synthetic oligonucleotide
aggauggagcaauaggaca

SEQ ID NO: 2591245 - RNA, 19 nt, Artificial Sequence
  Description of Artificial Sequence: Synthetic oligonucleotide
caaagaagaugauccuggc

SEQ ID NO: 2591246 - RNA, 19 nt, Artificial Sequence
  Description of Artificial Sequence: Synthetic oligonucleotide
auauguuccaggaaagggu

SEQ ID NO: 2591247 - RNA, 19 nt, Artificial Sequence
  Description of Artificial Sequence: Synthetic oligonucleotide
aaccccgacaggaaaggcg

SEQ ID NO: 2591248 - RNA, 19 nt, Artificial Sequence
  Description of Artificial Sequence: Synthetic oligonucleotide
auuugggguauaucaucuc

SEQ ID NO: 2591249 - RNA, 19 nt, Artificial Sequence
  Description of Artificial Sequence: Synthetic oligonucleotide
uaguugcacaggauggagc

SEQ ID NO: 2591250 - RNA, 19 nt, Artificial Sequence
  Description of Artificial Sequence: Synthetic oligonucleotide
ugucaagcaauuuggggua

SEQ ID NO: 2591251 - RNA, 19 nt, Artificial Sequence
  Description of Artificial Sequence: Synthetic oligonucleotide
uggagcaauaggacagcag

SEQ ID NO: 2591252 - RNA, 19 nt, Artificial Sequence
  Description of Artificial Sequence: Synthetic oligonucleotide
uguugacccaaagaagaug

SEQ ID NO: 2591253 - RNA, 19 nt, Artificial Sequence
  Description of Artificial Sequence: Synthetic oligonucleotide
ugggguauaucaucucucu

SEQ ID NO: 2591254 - RNA, 19 nt, Artificial Sequence
  Description of Artificial Sequence: Synthetic oligonucleotide
gggacaagcgccauguucg

SEQ ID NO: 2591255 - RNA, 19 nt, Artificial Sequence
  Description of Artificial Sequence: Synthetic oligonucleotide
aaaccccgacaggaaaggc

SEQ ID NO: 2591256 - RNA, 19 nt, Artificial Sequence
  Description of Artificial Sequence: Synthetic oligonucleotide
gagccaauauguuccagga

SEQ ID NO: 2591257 - RNA, 19 nt, Artificial Sequence
  Description of Artificial Sequence: Synthetic oligonucleotide
gagaucagucagcacgcag

SEQ ID NO: 2591258 - RNA, 19 nt, Artificial Sequence
  Description of Artificial Sequence: Synthetic oligonucleotide
uccucaucucgauuaauau

SEQ ID NO: 2591259 - RNA, 19 nt, Artificial Sequence
  Description of Artificial Sequence: Synthetic oligonucleotide
agucagcacgcagauaccg

SEQ ID NO: 2591260 - RNA, 19 nt, Artificial Sequence
  Description of Artificial Sequence: Synthetic oligonucleotide
ucccgcagagagaugagcu

SEQ ID NO: 2591261 - RNA, 19 nt, Artificial Sequence
  Description of Artificial Sequence: Synthetic oligonucleotide
aagcaauuugggguauauc

SEQ ID NO: 2591262 - RNA, 19 nt, Artificial Sequence
  Description of Artificial Sequence: Synthetic oligonucleotide
gagagaucagucagcacgc

SEQ ID NO: 2591263 - RNA, 19 nt, Artificial Sequence
  Description of Artificial Sequence: Synthetic oligonucleotide
guauccagcacacccauaa

SEQ ID NO: 2591264 - RNA, 19 nt, Artificial Sequence
  Description of Artificial Sequence: Synthetic oligonucleotide
cugggauaaaguugucaag

SEQ ID NO: 2591265 - RNA, 19 nt, Artificial Sequence
  Description of Artificial Sequence: Synthetic oligonucleotide
cagaauaccgcaacaacaa

SEQ ID NO: 2591266 - RNA, 19 nt, Artificial Sequence
  Description of Artificial Sequence: Synthetic oligonucleotide
ugaugggagggcauuucga

SEQ ID NO: 2591267 - RNA, 19 nt, Artificial Sequence
  Description of Artificial Sequence: Synthetic oligonucleotide
gugggauguccucaucucg

SEQ ID NO: 2591268 - RNA, 19 nt, Artificial Sequence
  Description of Artificial Sequence: Synthetic oligonucleotide
aguugucaagcaauuuggg

SEQ ID NO: 2591269 - RNA, 19 nt, Artificial Sequence
  Description of Artificial Sequence: Synthetic oligonucleotide
gaauaccgcaacaacaaaa

SEQ ID NO: 2591270 - RNA, 19 nt, Artificial Sequence
  Description of Artificial Sequence: Synthetic oligonucleotide
uugggguauaucaucucuc

SEQ ID NO: 2591271 - RNA, 19 nt, Artificial Sequence
  Description of Artificial Sequence: Synthetic oligonucleotide
ucaggaacuuccagcuccc

SEQ ID NO: 2591272 - RNA, 19 nt, Artificial Sequence
  Description of Artificial Sequence: Synthetic oligonucleotide
gcauagaugguccagaaua

SEQ ID NO: 2591273 - RNA, 19 nt, Artificial Sequence
  Description of Artificial Sequence: Synthetic oligonucleotide
gaagacagccuggaugacc

SEQ ID NO: 2591274 - RNA, 19 nt, Artificial Sequence
  Description of Artificial Sequence: Synthetic oligonucleotide
gguaaaaccguugugugca

SEQ ID NO: 2591275 - RNA, 19 nt, Artificial Sequence
  Description of Artificial Sequence: Synthetic oligonucleotide
aggguacacccacaugccg

SEQ ID NO: 2591276 - RNA, 19 nt, Artificial Sequence
  Description of Artificial Sequence: Synthetic oligonucleotide
cauuagaauuguuguugac

SEQ ID NO: 2591277 - RNA, 19 nt, Artificial Sequence
  Description of Artificial Sequence: Synthetic oligonucleotide
auaaaggguaaaaccguug

SEQ ID NO: 2591278 - RNA, 19 nt, Artificial Sequence
  Description of Artificial Sequence: Synthetic oligonucleotide
gaaaggguacacccacaug

SEQ ID NO: 2591279 - RNA, 19 nt, Artificial Sequence
  Description of Artificial Sequence: Synthetic oligonucleotide
uuguugacccaaagaagau

SEQ ID NO: 2591280 - RNA, 19 nt, Artificial Sequence
  Description of Artificial Sequence: Synthetic oligonucleotide
gauguauccagcacaccca

SEQ ID NO: 2591281 - RNA, 19 nt, Artificial Sequence
  Description of Artificial Sequence: Synthetic oligonucleotide
ucagcacgcagauaccgaa

SEQ ID NO: 2591282 - RNA, 19 nt, Artificial Sequence
  Description of Artificial Sequence: Synthetic oligonucleotide
auaggucugaugggagggc

SEQ ID NO: 2591283 - RNA, 19 nt, Artificial Sequence
  Description of Artificial Sequence: Synthetic oligonucleotide
agcacgcagauaccgaaga

SEQ ID NO: 2591284 - RNA, 19 nt, Artificial Sequence
  Description of Artificial Sequence: Synthetic oligonucleotide
guguaucccagauauagcu

SEQ ID NO: 2591285 - RNA, 19 nt, Artificial Sequence
  Description of Artificial Sequence: Synthetic oligonucleotide
cacgcagauaccgaagaag

SEQ ID NO: 2591286 - RNA, 19 nt, Artificial Sequence
  Description of Artificial Sequence: Synthetic oligonucleotide
guacauauggcggcgaguc

SEQ ID NO: 2591287 - RNA, 19 nt, Artificial Sequence
  Description of Artificial Sequence: Synthetic oligonucleotide
uguucgcgcggccuggccc

SEQ ID NO: 2591288 - RNA, 19 nt, Artificial Sequence
  Description of Artificial Sequence: Synthetic oligonucleotide
uagaauuguuguugaccca

SEQ ID NO: 2591289 - RNA, 19 nt, Artificial Sequence
  Description of Artificial Sequence: Synthetic oligonucleotide
uauauaggccacggagaag

SEQ ID NO: 2591290 - RNA, 19 nt, Artificial Sequence
  Description of Artificial Sequence: Synthetic oligonucleotide
auaggacagcaggauggcc

SEQ ID NO: 2591291 - RNA, 19 nt, Artificial Sequence
  Description of Artificial Sequence: Synthetic oligonucleotide
caacaaaaccccgacagga

SEQ ID NO: 2591292 - RNA, 19 nt, Artificial Sequence
  Description of Artificial Sequence: Synthetic oligonucleotide
agaucagucagcacgcaga

SEQ ID NO: 2591293 - RNA, 19 nt, Artificial Sequence
  Description of Artificial Sequence: Synthetic oligonucleotide
gguauaucaucucucuguc

SEQ ID NO: 2591294 - RNA, 19 nt, Artificial Sequence
  Description of Artificial Sequence: Synthetic oligonucleotide
uacauauggcggcgagucc

SEQ ID NO: 2591295 - RNA, 19 nt, Artificial Sequence
  Description of Artificial Sequence: Synthetic oligonucleotide
acacccacaugccggugac

SEQ ID NO: 2591296 - RNA, 19 nt, Artificial Sequence
  Description of Artificial Sequence: Synthetic oligonucleotide
guaguugcacaggauggag

SEQ ID NO: 2591297 - RNA, 19 nt, Artificial Sequence
  Description of Artificial Sequence: Synthetic oligonucleotide
gauggagcaauaggacagc

SEQ ID NO: 2591298 - RNA, 19 nt, Artificial Sequence
  Description of Artificial Sequence: Synthetic oligonucleotide
gucauaggcauagaugguc

SEQ ID NO: 2591299 - RNA, 19 nt, Artificial Sequence
  Description of Artificial Sequence: Synthetic oligonucleotide
gauacugauggugggaugu

SEQ ID NO: 2591300 - RNA, 19 nt, Artificial Sequence
  Description of Artificial Sequence: Synthetic oligonucleotide
acgcagauaccgaagaaga

SEQ ID NO: 2591301 - RNA, 19 nt, Artificial Sequence
  Description of Artificial Sequence: Synthetic oligonucleotide
ccaaccugggauaaaguug

SEQ ID NO: 2591302 - RNA, 19 nt, Artificial Sequence
  Description of Artificial Sequence: Synthetic oligonucleotide
cuccugagccaauauguuc

SEQ ID NO: 2591303 - RNA, 19 nt, Artificial Sequence
  Description of Artificial Sequence: Synthetic oligonucleotide
ccaauauguuccaggaaag

SEQ ID NO: 2591304 - RNA, 19 nt, Artificial Sequence
  Description of Artificial Sequence: Synthetic oligonucleotide
ugaccagaucaaugaaggu

SEQ ID NO: 2591305 - RNA, 19 nt, Artificial Sequence
  Description of Artificial Sequence: Synthetic oligonucleotide
uaggcauagaugguccaga

SEQ ID NO: 2591306 - RNA, 19 nt, Artificial Sequence
  Description of Artificial Sequence: Synthetic oligonucleotide
augggagggcauuucgaug

SEQ ID NO: 2591307 - RNA, 19 nt, Artificial Sequence
  Description of Artificial Sequence: Synthetic oligonucleotide
ugugcauuccgugguucag

SEQ ID NO: 2591308 - RNA, 19 nt, Artificial Sequence
  Description of Artificial Sequence: Synthetic oligonucleotide
augauguauccagcacacc

SEQ ID NO: 2591309 - RNA, 19 nt, Artificial Sequence
  Description of Artificial Sequence: Synthetic oligonucleotide
agguacauauggcggcgag

SEQ ID NO: 2591310 - RNA, 19 nt, Artificial Sequence
  Description of Artificial Sequence: Synthetic oligonucleotide
agcgccauguucgcgcggc

SEQ ID NO: 2591311 - RNA, 19 nt, Artificial Sequence
  Description of Artificial Sequence: Synthetic oligonucleotide
uccuaagcugccguucuug

SEQ ID NO: 2591312 - RNA, 19 nt, Artificial Sequence
  Description of Artificial Sequence: Synthetic oligonucleotide
cgugguucagccaaccugg

SEQ ID NO: 2591313 - RNA, 19 nt, Artificial Sequence
  Description of Artificial Sequence: Synthetic oligonucleotide
cauuccgugguucagccaa

SEQ ID NO: 2591314 - RNA, 19 nt, Artificial Sequence
  Description of Artificial Sequence: Synthetic oligonucleotide
agaauaccgcaacaacaaa

SEQ ID NO: 2591315 - RNA, 19 nt, Artificial Sequence
  Description of Artificial Sequence: Synthetic oligonucleotide
auaaaguugucaagcaauu

SEQ ID NO: 2591316 - RNA, 19 nt, Artificial Sequence
  Description of Artificial Sequence: Synthetic oligonucleotide
gucucuugucaggagagug

SEQ ID NO: 2591317 - RNA, 19 nt, Artificial Sequence
  Description of Artificial Sequence: Synthetic oligonucleotide
acccaaagaagaugauccu

SEQ ID NO: 2591318 - RNA, 19 nt, Artificial Sequence
  Description of Artificial Sequence: Synthetic oligonucleotide
caaccugggauaaaguugu

SEQ ID NO: 2591319 - RNA, 19 nt, Artificial Sequence
  Description of Artificial Sequence: Synthetic oligonucleotide
gugacaugauguauccagc

SEQ ID NO: 2591320 - RNA, 19 nt, Artificial Sequence
  Description of Artificial Sequence: Synthetic oligonucleotide
uauagcuguucaguacuuc

SEQ ID NO: 2591321 - RNA, 19 nt, Artificial Sequence
  Description of Artificial Sequence: Synthetic oligonucleotide
auguauccagcacacccau

SEQ ID NO: 2591322 - RNA, 19 nt, Artificial Sequence
  Description of Artificial Sequence: Synthetic oligonucleotide
cauauggcggcgaguccgc

SEQ ID NO: 2591323 - RNA, 19 nt, Artificial Sequence
  Description of Artificial Sequence: Synthetic oligonucleotide
ggguaaaaccguugugugc

SEQ ID NO: 2591324 - RNA, 19 nt, Artificial Sequence
  Description of Artificial Sequence: Synthetic oligonucleotide
agauaccgaagaagacagc

SEQ ID NO: 2591325 - RNA, 19 nt, Artificial Sequence
  Description of Artificial Sequence: Synthetic oligonucleotide
aucccagauauagcuguuc

SEQ ID NO: 2591326 - RNA, 19 nt, Artificial Sequence
  Description of Artificial Sequence: Synthetic oligonucleotide
ccagaauaccgcaacaaca

SEQ ID NO: 2591327 - RNA, 19 nt, Artificial Sequence
  Description of Artificial Sequence: Synthetic oligonucleotide
uuccaggaaaggguacacc

SEQ ID NO: 2591328 - RNA, 19 nt, Artificial Sequence
  Description of Artificial Sequence: Synthetic oligonucleotide
caagcgccauguucgcgcg

SEQ ID NO: 2591329 - RNA, 19 nt, Artificial Sequence
  Description of Artificial Sequence: Synthetic oligonucleotide
ugguucagccaaccuggga

SEQ ID NO: 2591330 - RNA, 19 nt, Artificial Sequence
  Description of Artificial Sequence: Synthetic oligonucleotide
uugcacaggauggagcaau

SEQ ID NO: 2591331 - RNA, 19 nt, Artificial Sequence
  Description of Artificial Sequence: Synthetic oligonucleotide
caugccggugacaugaugu

SEQ ID NO: 2591332 - RNA, 19 nt, Artificial Sequence
  Description of Artificial Sequence: Synthetic oligonucleotide
uccugguucccgcugucuc

SEQ ID NO: 2591333 - RNA, 19 nt, Artificial Sequence
  Description of Artificial Sequence: Synthetic oligonucleotide
cagccaaccugggauaaag

SEQ ID NO: 2591334 - RNA, 19 nt, Artificial Sequence
  Description of Artificial Sequence: Synthetic oligonucleotide
gcagauaccgaagaagaca

SEQ ID NO: 2591335 - RNA, 19 nt, Artificial Sequence
  Description of Artificial Sequence: Synthetic oligonucleotide
ggguauaucaucucucugu

SEQ ID NO: 2591336 - RNA, 19 nt, Artificial Sequence
  Description of Artificial Sequence: Synthetic oligonucleotide
accgaagaagacagccugg

SEQ ID NO: 2591337 - RNA, 19 nt, Artificial Sequence
  Description of Artificial Sequence: Synthetic oligonucleotide
cccauaauauauaggccac

SEQ ID NO: 2591338 - RNA, 19 nt, Artificial Sequence
  Description of Artificial Sequence: Synthetic oligonucleotide
auguucgcgcggccuggcc

SEQ ID NO: 2591339 - RNA, 19 nt, Artificial Sequence
  Description of Artificial Sequence: Synthetic oligonucleotide
gacaagcgccauguucgcg

SEQ ID NO: 2591340 - RNA, 19 nt, Artificial Sequence
  Description of Artificial Sequence: Synthetic oligonucleotide
cuguucaguacuucuccca

SEQ ID NO: 2591341 - RNA, 19 nt, Artificial Sequence
  Description of Artificial Sequence: Synthetic oligonucleotide
auacugauggugggauguc

SEQ ID NO: 2591342 - RNA, 19 nt, Artificial Sequence
  Description of Artificial Sequence: Synthetic oligonucleotide
cagaucaaugaaggucagg

SEQ ID NO: 2591343 - RNA, 19 nt, Artificial Sequence
  Description of Artificial Sequence: Synthetic oligonucleotide
caggaaguucauuagaauu

SEQ ID NO: 2591344 - RNA, 19 nt, Artificial Sequence
  Description of Artificial Sequence: Synthetic oligonucleotide
ggguacacccacaugccgg

SEQ ID NO: 2591345 - RNA, 19 nt, Artificial Sequence
  Description of Artificial Sequence: Synthetic oligonucleotide
gaugggagggcauuucgau

SEQ ID NO: 2591346 - RNA, 19 nt, Artificial Sequence
  Description of Artificial Sequence: Synthetic oligonucleotide
ugucaggagaguggagaga

SEQ ID NO: 2591347 - RNA, 19 nt, Artificial Sequence
  Description of Artificial Sequence: Synthetic oligonucleotide
auaccgaagaagacagccu

SEQ ID NO: 2591348 - RNA, 19 nt, Artificial Sequence
  Description of Artificial Sequence: Synthetic oligonucleotide
cacggagaagguacauaug

SEQ ID NO: 2591349 - RNA, 19 nt, Artificial Sequence
  Description of Artificial Sequence: Synthetic oligonucleotide
uugacccaaagaagaugau

SEQ ID NO: 2591350 - RNA, 19 nt, Artificial Sequence
  Description of Artificial Sequence: Synthetic oligonucleotide
uauccagcacacccauaau

SEQ ID NO: 2591351 - RNA, 19 nt, Artificial Sequence
  Description of Artificial Sequence: Synthetic oligonucleotide
gauccuggcuccugagcca

SEQ ID NO: 2591352 - RNA, 19 nt, Artificial Sequence
  Description of Artificial Sequence: Synthetic oligonucleotide
guugugugcauuccguggu

SEQ ID NO: 2591353 - RNA, 19 nt, Artificial Sequence
  Description of Artificial Sequence: Synthetic oligonucleotide
acugauggugggauguccu

SEQ ID NO: 2591354 - RNA, 19 nt, Artificial Sequence
  Description of Artificial Sequence: Synthetic oligonucleotide
uccgugguucagccaaccu

SEQ ID NO: 2591355 - RNA, 19 nt, Artificial Sequence
  Description of Artificial Sequence: Synthetic oligonucleotide
ucuguguaucccagauaua

SEQ ID NO: 2591356 - RNA, 19 nt, Artificial Sequence
  Description of Artificial Sequence: Synthetic oligonucleotide
ugcuccugguucccgcugu

SEQ ID NO: 2591357 - RNA, 19 nt, Artificial Sequence
  Description of Artificial Sequence: Synthetic oligonucleotide
accugggauaaaguuguca

SEQ ID NO: 2591358 - RNA, 19 nt, Artificial Sequence
  Description of Artificial Sequence: Synthetic oligonucleotide
aggcauagaugguccagaa

SEQ ID NO: 2591359 - RNA, 19 nt, Artificial Sequence
  Description of Artificial Sequence: Synthetic oligonucleotide
aagguacauauggcggcga

SEQ ID NO: 2591360 - RNA, 19 nt, Artificial Sequence
  Description of Artificial Sequence: Synthetic oligonucleotide
cagcacgcagauaccgaag

SEQ ID NO: 2591361 - RNA, 19 nt, Artificial Sequence
  Description of Artificial Sequence: Synthetic oligonucleotide
gcuguucaguacuucuccc

SEQ ID NO: 2591362 - RNA, 19 nt, Artificial Sequence
  Description of Artificial Sequence: Synthetic oligonucleotide
ugugugcauuccgugguuc

SEQ ID NO: 2591363 - RNA, 19 nt, Artificial Sequence
  Description of Artificial Sequence: Synthetic oligonucleotide
agccaauauguuccaggaa

SEQ ID NO: 2591364 - RNA, 19 nt, Artificial Sequence
  Description of Artificial Sequence: Synthetic oligonucleotide
acaugccggugacaugaug

SEQ ID NO: 2591365 - RNA, 19 nt, Artificial Sequence
  Description of Artificial Sequence: Synthetic oligonucleotide
cguugugugcauuccgugg

SEQ ID NO: 2591366 - RNA, 19 nt, Artificial Sequence
  Description of Artificial Sequence: Synthetic oligonucleotide
cauaggcauagauggucca

SEQ ID NO: 2591367 - RNA, 19 nt, Artificial Sequence
  Description of Artificial Sequence: Synthetic oligonucleotide
cagucagcacgcagauacc

SEQ ID NO: 2591368 - RNA, 19 nt, Artificial Sequence
  Description of Artificial Sequence: Synthetic oligonucleotide
cagcacacccauaauauau

SEQ ID NO: 2591369 - RNA, 19 nt, Artificial Sequence
  Description of Artificial Sequence: Synthetic oligonucleotide
cagcggggcugcuuguggg

SEQ ID NO: 2591370 - RNA, 19 nt, Artificial Sequence
  Description of Artificial Sequence: Synthetic oligonucleotide
uucagccaaccugggauaa

SEQ ID NO: 2591371 - RNA, 19 nt, Artificial Sequence
  Description of Artificial Sequence: Synthetic oligonucleotide
ucaggagaguggagagauc

SEQ ID NO: 2591372 - RNA, 19 nt, Artificial Sequence
  Description of Artificial Sequence: Synthetic oligonucleotide
ccauaauauauaggccacg

SEQ ID NO: 2591373 - RNA, 19 nt, Artificial Sequence
  Description of Artificial Sequence: Synthetic oligonucleotide
ugucucuugucaggagagu

SEQ ID NO: 2591374 - RNA, 19 nt, Artificial Sequence
  Description of Artificial Sequence: Synthetic oligonucleotide
agcguccagucccgcagag

SEQ ID NO: 2591375 - RNA, 19 nt, Artificial Sequence
  Description of Artificial Sequence: Synthetic oligonucleotide
guuccaggaaaggguacac

SEQ ID NO: 2591376 - RNA, 19 nt, Artificial Sequence
  Description of Artificial Sequence: Synthetic oligonucleotide
gggguauaucaucucucug

SEQ ID NO: 2591377 - RNA, 19 nt, Artificial Sequence
  Description of Artificial Sequence: Synthetic oligonucleotide
auguccucaucucgauuaa

SEQ ID NO: 2591378 - RNA, 19 nt, Artificial Sequence
  Description of Artificial Sequence: Synthetic oligonucleotide
uugugugcauuccgugguu

SEQ ID NO: 2591379 - RNA, 19 nt, Artificial Sequence
  Description of Artificial Sequence: Synthetic oligonucleotide
ccggugacaugauguaucc

SEQ ID NO: 2591380 - RNA, 19 nt, Artificial Sequence
  Description of Artificial Sequence: Synthetic oligonucleotide
cguccagucccgcagagag

SEQ ID NO: 2591381 - RNA, 19 nt, Artificial Sequence
  Description of Artificial Sequence: Synthetic oligonucleotide
uuccgugguucagccaacc

SEQ ID NO: 2591382 - RNA, 19 nt, Artificial Sequence
  Description of Artificial Sequence: Synthetic oligonucleotide
gugcauuccgugguucagc

SEQ ID NO: 2591383 - RNA, 19 nt, Artificial Sequence
  Description of Artificial Sequence: Synthetic oligonucleotide
accguugugugcauuccgu

SEQ ID NO: 2591384 - RNA, 19 nt, Artificial Sequence
  Description of Artificial Sequence: Synthetic oligonucleotide
cagucccgcagagagauga

SEQ ID NO: 2591385 - RNA, 19 nt, Artificial Sequence
  Description of Artificial Sequence: Synthetic oligonucleotide
auuccgugguucagccaac

SEQ ID NO: 2591386 - RNA, 19 nt, Artificial Sequence
  Description of Artificial Sequence: Synthetic oligonucleotide
cccagauauagcuguucag

SEQ ID NO: 2591387 - RNA, 19 nt, Artificial Sequence
  Description of Artificial Sequence: Synthetic oligonucleotide
aggagaguggagagaucag

SEQ ID NO: 2591388 - RNA, 19 nt, Artificial Sequence
  Description of Artificial Sequence: Synthetic oligonucleotide
guccagaauaccgcaacaa

SEQ ID NO: 2591389 - RNA, 19 nt, Artificial Sequence
  Description of Artificial Sequence: Synthetic oligonucleotide
gaauuguuguugacccaaa

SEQ ID NO: 2591390 - RNA, 19 nt, Artificial Sequence
  Description of Artificial Sequence: Synthetic oligonucleotide
augccggugacaugaugua

SEQ ID NO: 2591391 - RNA, 19 nt, Artificial Sequence
  Description of Artificial Sequence: Synthetic oligonucleotide
uaaaaccguugugugcauu

SEQ ID NO: 2591392 - RNA, 19 nt, Artificial Sequence
  Description of Artificial Sequence: Synthetic oligonucleotide
guucagccaaccugggaua

SEQ ID NO: 2591393 - RNA, 19 nt, Artificial Sequence
  Description of Artificial Sequence: Synthetic oligonucleotide
gauggugggauguccucau

SEQ ID NO: 2591394 - RNA, 19 nt, Artificial Sequence
  Description of Artificial Sequence: Synthetic oligonucleotide
gucaggagaguggagagau

SEQ ID NO: 2591395 - RNA, 19 nt, Artificial Sequence
  Description of Artificial Sequence: Synthetic oligonucleotide
ucaagcaauuugggguaua

SEQ ID NO: 2591396 - RNA, 19 nt, Artificial Sequence
  Description of Artificial Sequence: Synthetic oligonucleotide
ccgugguucagccaaccug

SEQ ID NO: 2591397 - RNA, 19 nt, Artificial Sequence
  Description of Artificial Sequence: Synthetic oligonucleotide
gagggcauuucgauggccu

SEQ ID NO: 2591398 - RNA, 19 nt, Artificial Sequence
  Description of Artificial Sequence: Synthetic oligonucleotide
agacagccuggaugaccag

SEQ ID NO: 2591399 - RNA, 19 nt, Artificial Sequence
  Description of Artificial Sequence: Synthetic oligonucleotide
gguccagaauaccgcaaca

SEQ ID NO: 2591400 - RNA, 19 nt, Artificial Sequence
  Description of Artificial Sequence: Synthetic oligonucleotide
uuccuaagcugccguucuu

SEQ ID NO: 2591401 - RNA, 19 nt, Artificial Sequence
  Description of Artificial Sequence: Synthetic oligonucleotide
agggcauuucgauggccuu

SEQ ID NO: 2591402 - RNA, 19 nt, Artificial Sequence
  Description of Artificial Sequence: Synthetic oligonucleotide
ggaaguucauuagaauugu

SEQ ID NO: 2591403 - RNA, 19 nt, Artificial Sequence
  Description of Artificial Sequence: Synthetic oligonucleotide
cccgcugucucuugucagg

SEQ ID NO: 2591404 - RNA, 19 nt, Artificial Sequence
  Description of Artificial Sequence: Synthetic oligonucleotide
guucccgcugucucuuguc

SEQ ID NO: 2591405 - RNA, 19 nt, Artificial Sequence
  Description of Artificial Sequence: Synthetic oligonucleotide
gccuuguaguugcacagga

SEQ ID NO: 2591406 - RNA, 19 nt, Artificial Sequence
  Description of Artificial Sequence: Synthetic oligonucleotide
auauagcuguucaguacuu

SEQ ID NO: 2591407 - RNA, 19 nt, Artificial Sequence
  Description of Artificial Sequence: Synthetic oligonucleotide
gucccgcagagagaugagc

SEQ ID NO: 2591408 - RNA, 19 nt, Artificial Sequence
  Description of Artificial Sequence: Synthetic oligonucleotide
agagaucagucagcacgca

SEQ ID NO: 2591409 - RNA, 19 nt, Artificial Sequence
  Description of Artificial Sequence: Synthetic oligonucleotide
cgauuaauauaaaggguaa

SEQ ID NO: 2591410 - RNA, 19 nt, Artificial Sequence
  Description of Artificial Sequence: Synthetic oligonucleotide
ggacaagcgccauguucgc

SEQ ID NO: 2591411 - RNA, 19 nt, Artificial Sequence
  Description of Artificial Sequence: Synthetic oligonucleotide
agcuuccuaagcugccguu

SEQ ID NO: 2591412 - RNA, 19 nt, Artificial Sequence
  Description of Artificial Sequence: Synthetic oligonucleotide
cuuccuaagcugccguucu

SEQ ID NO: 2591413 - RNA, 19 nt, Artificial Sequence
  Description of Artificial Sequence: Synthetic oligonucleotide
ugccggugacaugauguau

SEQ ID NO: 2591414 - RNA, 19 nt, Artificial Sequence
  Description of Artificial Sequence: Synthetic oligonucleotide
guucgcgcggccuggccca

SEQ ID NO: 2591415 - RNA, 19 nt, Artificial Sequence
  Description of Artificial Sequence: Synthetic oligonucleotide
gucagcacgcagauaccga

SEQ ID NO: 2591416 - RNA, 19 nt, Artificial Sequence
  Description of Artificial Sequence: Synthetic oligonucleotide
cucugucauaggcauagau

SEQ ID NO: 2591417 - RNA, 19 nt, Artificial Sequence
  Description of Artificial Sequence: Synthetic oligonucleotide
gccggugacaugauguauc

SEQ ID NO: 2591418 - RNA, 19 nt, Artificial Sequence
  Description of Artificial Sequence: Synthetic oligonucleotide
gccauguucgcgcggccug

SEQ ID NO: 2591419 - RNA, 19 nt, Artificial Sequence
  Description of Artificial Sequence: Synthetic oligonucleotide
ccgcaacaacaaaaccccg

SEQ ID NO: 2591420 - RNA, 19 nt, Artificial Sequence
  Description of Artificial Sequence: Synthetic oligonucleotide
agccaaccugggauaaagu

SEQ ID NO: 2591421 - RNA, 19 nt, Artificial Sequence
  Description of Artificial Sequence: Synthetic oligonucleotide
gggcauuucgauggccuug

SEQ ID NO: 2591422 - RNA, 19 nt, Artificial Sequence
  Description of Artificial Sequence: Synthetic oligonucleotide
agucccgcagagagaugag

SEQ ID NO: 2591423 - RNA, 19 nt, Artificial Sequence
  Description of Artificial Sequence: Synthetic oligonucleotide
cauguucgcgcggccuggc

SEQ ID NO: 2591424 - RNA, 19 nt, Artificial Sequence
  Description of Artificial Sequence: Synthetic oligonucleotide
ccucaucucgauuaauaua

SEQ ID NO: 2591425 - RNA, 19 nt, Artificial Sequence
  Description of Artificial Sequence: Synthetic oligonucleotide
ccaggaaaggguacaccca

SEQ ID NO: 2591426 - RNA, 19 nt, Artificial Sequence
  Description of Artificial Sequence: Synthetic oligonucleotide
augguccagaauaccgcaa

SEQ ID NO: 2591427 - RNA, 19 nt, Artificial Sequence
  Description of Artificial Sequence: Synthetic oligonucleotide
cgcagauaccgaagaagac

SEQ ID NO: 2591428 - RNA, 19 nt, Artificial Sequence
  Description of Artificial Sequence: Synthetic oligonucleotide
auccuggcuccugagccaa

SEQ ID NO: 2591429 - RNA, 19 nt, Artificial Sequence
  Description of Artificial Sequence: Synthetic oligonucleotide
ccguugugugcauuccgug

SEQ ID NO: 2591430 - RNA, 19 nt, Artificial Sequence
  Description of Artificial Sequence: Synthetic oligonucleotide
gcgagcacggccagcgucc

SEQ ID NO: 2591431 - RNA, 19 nt, Artificial Sequence
  Description of Artificial Sequence: Synthetic oligonucleotide
gguacacccacaugccggu

SEQ ID NO: 2591432 - RNA, 19 nt, Artificial Sequence
  Description of Artificial Sequence: Synthetic oligonucleotide
gcggcgaguccgcugcucc

SEQ ID NO: 2591433 - RNA, 19 nt, Artificial Sequence
  Description of Artificial Sequence: Synthetic oligonucleotide
cgcaacaacaaaaccccga

SEQ ID NO: 2591434 - RNA, 19 nt, Artificial Sequence
  Description of Artificial Sequence: Synthetic oligonucleotide
ggcgagcacggccagcguc

SEQ ID NO: 2591435 - RNA, 19 nt, Artificial Sequence
  Description of Artificial Sequence: Synthetic oligonucleotide
gaaguucauuagaauuguu

SEQ ID NO: 2591436 - RNA, 19 nt, Artificial Sequence
  Description of Artificial Sequence: Synthetic oligonucleotide
gggagggcauuucgauggc

SEQ ID NO: 2591437 - RNA, 19 nt, Artificial Sequence
  Description of Artificial Sequence: Synthetic oligonucleotide
ggagaguggagagaucagu

SEQ ID NO: 2591438 - RNA, 19 nt, Artificial Sequence
  Description of Artificial Sequence: Synthetic oligonucleotide
ggagggcauuucgauggcc

SEQ ID NO: 2591439 - RNA, 19 nt, Artificial Sequence
  Description of Artificial Sequence: Synthetic oligonucleotide
gccaaccugggauaaaguu

SEQ ID NO: 2591440 - RNA, 19 nt, Artificial Sequence
  Description of Artificial Sequence: Synthetic oligonucleotide
cagccuggaugaccagauc

SEQ ID NO: 2591441 - RNA, 19 nt, Artificial Sequence
  Description of Artificial Sequence: Synthetic oligonucleotide
ccgcagagagaugagcuuc

SEQ ID NO: 2591442 - RNA, 19 nt, Artificial Sequence
  Description of Artificial Sequence: Synthetic oligonucleotide
caagcaauuugggguauau

SEQ ID NO: 2591443 - RNA, 19 nt, Artificial Sequence
  Description of Artificial Sequence: Synthetic oligonucleotide
guaaaaccguugugugcau

SEQ ID NO: 2591444 - RNA, 19 nt, Artificial Sequence
  Description of Artificial Sequence: Synthetic oligonucleotide
ccacggagaagguacauau

SEQ ID NO: 2591445 - RNA, 19 nt, Artificial Sequence
  Description of Artificial Sequence: Synthetic oligonucleotide
aggucugaugggagggcau

SEQ ID NO: 2591446 - RNA, 19 nt, Artificial Sequence
  Description of Artificial Sequence: Synthetic oligonucleotide
guacacccacaugccggug

SEQ ID NO: 2591447 - RNA, 19 nt, Artificial Sequence
  Description of Artificial Sequence: Synthetic oligonucleotide
auauggcggcgaguccgcu

SEQ ID NO: 2591448 - RNA, 19 nt, Artificial Sequence
  Description of Artificial Sequence: Synthetic oligonucleotide
cccgacaggaaaggcgagc

SEQ ID NO: 2591449 - RNA, 19 nt, Artificial Sequence
  Description of Artificial Sequence: Synthetic oligonucleotide
aucagucagcacgcagaua

SEQ ID NO: 2591450 - RNA, 19 nt, Artificial Sequence
  Description of Artificial Sequence: Synthetic oligonucleotide
ccgacaggaaaggcgagca

SEQ ID NO: 2591451 - RNA, 19 nt, Artificial Sequence
  Description of Artificial Sequence: Synthetic oligonucleotide
ccauguucgcgcggccugg

SEQ ID NO: 2591452 - RNA, 19 nt, Artificial Sequence
  Description of Artificial Sequence: Synthetic oligonucleotide
aggccacggagaagguaca

SEQ ID NO: 2591453 - RNA, 19 nt, Artificial Sequence
  Description of Artificial Sequence: Synthetic oligonucleotide
gcacgcagauaccgaagaa

SEQ ID NO: 2591454 - RNA, 19 nt, Artificial Sequence
  Description of Artificial Sequence: Synthetic oligonucleotide
ggcauuucgauggccuugu

SEQ ID NO: 2591455 - RNA, 19 nt, Artificial Sequence
  Description of Artificial Sequence: Synthetic oligonucleotide
cccgcagcaccuggcaggg

SEQ ID NO: 2591456 - RNA, 19 nt, Artificial Sequence
  Description of Artificial Sequence: Synthetic oligonucleotide
aggggacaagcgccauguu

SEQ ID NO: 2591457 - RNA, 19 nt, Artificial Sequence
  Description of Artificial Sequence: Synthetic oligonucleotide
gggauacugauggugggau

SEQ ID NO: 2591458 - RNA, 19 nt, Artificial Sequence
  Description of Artificial Sequence: Synthetic oligonucleotide
ggcauagaugguccagaau

SEQ ID NO: 2591459 - RNA, 19 nt, Artificial Sequence
  Description of Artificial Sequence: Synthetic oligonucleotide
gguacauauggcggcgagu

SEQ ID NO: 2591460 - RNA, 19 nt, Artificial Sequence
  Description of Artificial Sequence: Synthetic oligonucleotide
ccccauaggucugauggga

SEQ ID NO: 2591461 - RNA, 19 nt, Artificial Sequence
  Description of Artificial Sequence: Synthetic oligonucleotide
caaugaaggucaggaacuu

SEQ ID NO: 2591462 - RNA, 19 nt, Artificial Sequence
  Description of Artificial Sequence: Synthetic oligonucleotide
guacuucucccagcaggua

SEQ ID NO: 2591463 - RNA, 19 nt, Artificial Sequence
  Description of Artificial Sequence: Synthetic oligonucleotide
uucgcgcggccuggcccag

SEQ ID NO: 2591464 - RNA, 19 nt, Artificial Sequence
  Description of Artificial Sequence: Synthetic oligonucleotide
gcauuccgugguucagcca

SEQ ID NO: 2591465 - RNA, 19 nt, Artificial Sequence
  Description of Artificial Sequence: Synthetic oligonucleotide
ccagcacacccauaauaua

SEQ ID NO: 2591466 - RNA, 19 nt, Artificial Sequence
  Description of Artificial Sequence: Synthetic oligonucleotide
gucaagcaauuugggguau

SEQ ID NO: 2591467 - RNA, 19 nt, Artificial Sequence
  Description of Artificial Sequence: Synthetic oligonucleotide
gggauguccucaucucgau

SEQ ID NO: 2591468 - RNA, 19 nt, Artificial Sequence
  Description of Artificial Sequence: Synthetic oligonucleotide
ccccgacaggaaaggcgag

SEQ ID NO: 2591469 - RNA, 19 nt, Artificial Sequence
  Description of Artificial Sequence: Synthetic oligonucleotide
cgacaggaaaggcgagcac

SEQ ID NO: 2591470 - RNA, 19 nt, Artificial Sequence
  Description of Artificial Sequence: Synthetic oligonucleotide
gccacggagaagguacaua

SEQ ID NO: 2591471 - RNA, 19 nt, Artificial Sequence
  Description of Artificial Sequence: Synthetic oligonucleotide
gcuccugguucccgcuguc

SEQ ID NO: 2591472 - RNA, 19 nt, Artificial Sequence
  Description of Artificial Sequence: Synthetic oligonucleotide
gucugaugggagggcauuu

SEQ ID NO: 2591473 - RNA, 19 nt, Artificial Sequence
  Description of Artificial Sequence: Synthetic oligonucleotide
ccugguucccgcugucucu

SEQ ID NO: 2591474 - RNA, 19 nt, Artificial Sequence
  Description of Artificial Sequence: Synthetic oligonucleotide
ccacccgcagcaccuggca

SEQ ID NO: 2591475 - RNA, 19 nt, Artificial Sequence
  Description of Artificial Sequence: Synthetic oligonucleotide
cggccagcguccagucccg

SEQ ID NO: 2591476 - RNA, 19 nt, Artificial Sequence
  Description of Artificial Sequence: Synthetic oligonucleotide
ggucugaugggagggcauu

SEQ ID NO: 2591477 - RNA, 19 nt, Artificial Sequence
  Description of Artificial Sequence: Synthetic oligonucleotide
gcuccugagccaauauguu

SEQ ID NO: 2591478 - RNA, 19 nt, Artificial Sequence
  Description of Artificial Sequence: Synthetic oligonucleotide
cagguacaggaaguucauu

SEQ ID NO: 2591479 - RNA, 19 nt, Artificial Sequence
  Description of Artificial Sequence: Synthetic oligonucleotide
ggcggcgaguccgcugcuc

SEQ ID NO: 2591480 - RNA, 19 nt, Artificial Sequence
  Description of Artificial Sequence: Synthetic oligonucleotide
gcgcggccuggcccagcgg

SEQ ID NO: 2591481 - RNA, 19 nt, Artificial Sequence
  Description of Artificial Sequence: Synthetic oligonucleotide
gcguccagucccgcagaga

SEQ ID NO: 2591482 - RNA, 19 nt, Artificial Sequence
  Description of Artificial Sequence: Synthetic oligonucleotide
ggccagcguccagucccgc

SEQ ID NO: 2591483 - RNA, 19 nt, Artificial Sequence
  Description of Artificial Sequence: Synthetic oligonucleotide
cccgcagagagaugagcuu

SEQ ID NO: 2591484 - RNA, 19 nt, Artificial Sequence
  Description of Artificial Sequence: Synthetic oligonucleotide
cgaagaagacagccuggau

SEQ ID NO: 2591485 - RNA, 19 nt, Artificial Sequence
  Description of Artificial Sequence: Synthetic oligonucleotide
ggccacggagaagguacau

SEQ ID NO: 2591486 - RNA, 19 nt, Artificial Sequence
  Description of Artificial Sequence: Synthetic oligonucleotide
cggugacaugauguaucca

SEQ ID NO: 2591487 - RNA, 19 nt, Artificial Sequence
  Description of Artificial Sequence: Synthetic oligonucleotide
auuguauuuaucuguaccc

SEQ ID NO: 2591488 - RNA, 19 nt, Artificial Sequence
  Description of Artificial Sequence: Synthetic oligonucleotide
ugaaggaucacucagugcc

SEQ ID NO: 2591489 - RNA, 19 nt, Artificial Sequence
  Description of Artificial Sequence: Synthetic oligonucleotide
ucacauauuucucauaugc

SEQ ID NO: 2591490 - RNA, 19 nt, Artificial Sequence
  Description of Artificial Sequence: Synthetic oligonucleotide
aacaacaucucccaaagcu

SEQ ID NO: 2591491 - RNA, 19 nt, Artificial Sequence
  Description of Artificial Sequence: Synthetic oligonucleotide
uuuaucuguacccaucagg

SEQ ID NO: 2591492 - RNA, 19 nt, Artificial Sequence
  Description of Artificial Sequence: Synthetic oligonucleotide
uagaaguuauuucagaucu

SEQ ID NO: 2591493 - RNA, 19 nt, Artificial Sequence
  Description of Artificial Sequence: Synthetic oligonucleotide
aacuuaagcaugcuggauc

SEQ ID NO: 2591494 - RNA, 19 nt, Artificial Sequence
  Description of Artificial Sequence: Synthetic oligonucleotide
uuuuaaguagcacuguuga

SEQ ID NO: 2591495 - RNA, 19 nt, Artificial Sequence
  Description of Artificial Sequence: Synthetic oligonucleotide
auugcuagaaguuauuuca

SEQ ID NO: 2591496 - RNA, 19 nt, Artificial Sequence
  Description of Artificial Sequence: Synthetic oligonucleotide
aauucauccagcucugaag

SEQ ID NO: 2591497 - RNA, 19 nt, Artificial Sequence
  Description of Artificial Sequence: Synthetic oligonucleotide
uaaacaacaucucccaaag

SEQ ID NO: 2591498 - RNA, 19 nt, Artificial Sequence
  Description of Artificial Sequence: Synthetic oligonucleotide
ugaauuuacgcaccgacug

SEQ ID NO: 2591499 - RNA, 19 nt, Artificial Sequence
  Description of Artificial Sequence: Synthetic oligonucleotide
uccaauaccauucucugug

SEQ ID NO: 2591500 - RNA, 19 nt, Artificial Sequence
  Description of Artificial Sequence: Synthetic oligonucleotide
auggauuucacauauuucu

SEQ ID NO: 2591501 - RNA, 19 nt, Artificial Sequence
  Description of Artificial Sequence: Synthetic oligonucleotide
uuuugucccaacuucaggc

SEQ ID NO: 2591502 - RNA, 19 nt, Artificial Sequence
  Description of Artificial Sequence: Synthetic oligonucleotide
acuacaguaaacaacaucu

SEQ ID NO: 2591503 - RNA, 19 nt, Artificial Sequence
  Description of Artificial Sequence: Synthetic oligonucleotide
uucauaacaggauuuguug

SEQ ID NO: 2591504 - RNA, 19 nt, Artificial Sequence
  Description of Artificial Sequence: Synthetic oligonucleotide
uaaguagcacuguugagag

SEQ ID NO: 2591505 - RNA, 19 nt, Artificial Sequence
  Description of Artificial Sequence: Synthetic oligonucleotide
ugugcaaaauugcugauuc

SEQ ID NO: 2591506 - RNA, 19 nt, Artificial Sequence
  Description of Artificial Sequence: Synthetic oligonucleotide
uguuccaauaccauucucu

SEQ ID NO: 2591507 - RNA, 19 nt, Artificial Sequence
  Description of Artificial Sequence: Synthetic oligonucleotide
uaaaauuauguucauugua

SEQ ID NO: 2591508 - RNA, 19 nt, Artificial Sequence
  Description of Artificial Sequence: Synthetic oligonucleotide
uccaguuuuauuuggaagu

SEQ ID NO: 2591509 - RNA, 19 nt, Artificial Sequence
  Description of Artificial Sequence: Synthetic oligonucleotide
uuaaguagcacuguugaga

SEQ ID NO: 2591510 - RNA, 19 nt, Artificial Sequence
  Description of Artificial Sequence: Synthetic oligonucleotide
cauuguauuuaucuguacc

SEQ ID NO: 2591511 - RNA, 19 nt, Artificial Sequence
  Description of Artificial Sequence: Synthetic oligonucleotide
ugugaauuuacgcaccgac

SEQ ID NO: 2591512 - RNA, 19 nt, Artificial Sequence
  Description of Artificial Sequence: Synthetic oligonucleotide
uucucugugaauuuacgca

SEQ ID NO: 2591513 - RNA, 19 nt, Artificial Sequence
  Description of Artificial Sequence: Synthetic oligonucleotide
auguucauuguauuuaucu

SEQ ID NO: 2591514 - RNA, 19 nt, Artificial Sequence
  Description of Artificial Sequence: Synthetic oligonucleotide
uauuuaucuguacccauca

SEQ ID NO: 2591515 - RNA, 19 nt, Artificial Sequence
  Description of Artificial Sequence: Synthetic oligonucleotide
aaauugcugauucccacug

SEQ ID NO: 2591516 - RNA, 19 nt, Artificial Sequence
  Description of Artificial Sequence: Synthetic oligonucleotide
uuaaaauuauguucauugu

SEQ ID NO: 2591517 - RNA, 19 nt, Artificial Sequence
  Description of Artificial Sequence: Synthetic oligonucleotide
aauuauguucauuguauuu

SEQ ID NO: 2591518 - RNA, 19 nt, Artificial Sequence
  Description of Artificial Sequence: Synthetic oligonucleotide
ugaagauuauuaaaauuau

SEQ ID NO: 2591519 - RNA, 19 nt, Artificial Sequence
  Description of Artificial Sequence: Synthetic oligonucleotide
uguucauuguauuuaucug

SEQ ID NO: 2591520 - RNA, 19 nt, Artificial Sequence
  Description of Artificial Sequence: Synthetic oligonucleotide
aucuguacccaucaggaag

SEQ ID NO: 2591521 - RNA, 19 nt, Artificial Sequence
  Description of Artificial Sequence: Synthetic oligonucleotide
cucagugccaucuugauca

SEQ ID NO: 2591522 - RNA, 19 nt, Artificial Sequence
  Description of Artificial Sequence: Synthetic oligonucleotide
aaaauugcugauucccacu

SEQ ID NO: 2591523 - RNA, 19 nt, Artificial Sequence
  Description of Artificial Sequence: Synthetic oligonucleotide
uaccucuccagacagagga

SEQ ID NO: 2591524 - RNA, 19 nt, Artificial Sequence
  Description of Artificial Sequence: Synthetic oligonucleotide
aauggauuucacauauuuc

SEQ ID NO: 2591525 - RNA, 19 nt, Artificial Sequence
  Description of Artificial Sequence: Synthetic oligonucleotide
aaacaacaucucccaaagc

SEQ ID NO: 2591526 - RNA, 19 nt, Artificial Sequence
  Description of Artificial Sequence: Synthetic oligonucleotide
ugcaaaauugcugauuccc

SEQ ID NO: 2591527 - RNA, 19 nt, Artificial Sequence
  Description of Artificial Sequence: Synthetic oligonucleotide
auucccacuguuccaauac

SEQ ID NO: 2591528 - RNA, 19 nt, Artificial Sequence
  Description of Artificial Sequence: Synthetic oligonucleotide
ucugaaggaucacucagug

SEQ ID NO: 2591529 - RNA, 19 nt, Artificial Sequence
  Description of Artificial Sequence: Synthetic oligonucleotide
ugugguuauccauucaugu

SEQ ID NO: 2591530 - RNA, 19 nt, Artificial Sequence
  Description of Artificial Sequence: Synthetic oligonucleotide
aguuuuauuuggaaguggg

SEQ ID NO: 2591531 - RNA, 19 nt, Artificial Sequence
  Description of Artificial Sequence: Synthetic oligonucleotide
aguaugaagauuauuaaaa

SEQ ID NO: 2591532 - RNA, 19 nt, Artificial Sequence
  Description of Artificial Sequence: Synthetic oligonucleotide
cacucauuaauucauccag

SEQ ID NO: 2591533 - RNA, 19 nt, Artificial Sequence
  Description of Artificial Sequence: Synthetic oligonucleotide
ucugugaauuuacgcaccg

SEQ ID NO: 2591534 - RNA, 19 nt, Artificial Sequence
  Description of Artificial Sequence: Synthetic oligonucleotide
uucagaucuucuauucucc

SEQ ID NO: 2591535 - RNA, 19 nt, Artificial Sequence
  Description of Artificial Sequence: Synthetic oligonucleotide
agauuauuaaaauuauguu

SEQ ID NO: 2591536 - RNA, 19 nt, Artificial Sequence
  Description of Artificial Sequence: Synthetic oligonucleotide
guacccaucaggaaguugg

SEQ ID NO: 2591537 - RNA, 19 nt, Artificial Sequence
  Description of Artificial Sequence: Synthetic oligonucleotide
acaggauuuguugacgagc

SEQ ID NO: 2591538 - RNA, 19 nt, Artificial Sequence
  Description of Artificial Sequence: Synthetic oligonucleotide
ucauaacaggauuuguuga

SEQ ID NO: 2591539 - RNA, 19 nt, Artificial Sequence
  Description of Artificial Sequence: Synthetic oligonucleotide
uucuccgcuaacuuaagca

SEQ ID NO: 2591540 - RNA, 19 nt, Artificial Sequence
  Description of Artificial Sequence: Synthetic oligonucleotide
gaauuuacgcaccgacugg

SEQ ID NO: 2591541 - RNA, 19 nt, Artificial Sequence
  Description of Artificial Sequence: Synthetic oligonucleotide
uccugugcaaaauugcuga

SEQ ID NO: 2591542 - RNA, 19 nt, Artificial Sequence
  Description of Artificial Sequence: Synthetic oligonucleotide
uuccaguuuuauuuggaag

SEQ ID NO: 2591543 - RNA, 19 nt, Artificial Sequence
  Description of Artificial Sequence: Synthetic oligonucleotide
gcuaacuuaagcaugcugg

SEQ ID NO: 2591544 - RNA, 19 nt, Artificial Sequence
  Description of Artificial Sequence: Synthetic oligonucleotide
uggguuuucugcaagugcu

SEQ ID NO: 2591545 - RNA, 19 nt, Artificial Sequence
  Description of Artificial Sequence: Synthetic oligonucleotide
uuacgcaccgacuggacag

SEQ ID NO: 2591546 - RNA, 19 nt, Artificial Sequence
  Description of Artificial Sequence: Synthetic oligonucleotide
uuucagaucuucuauucuc

SEQ ID NO: 2591547 - RNA, 19 nt, Artificial Sequence
  Description of Artificial Sequence: Synthetic oligonucleotide
uuaagcaugcuggaucagg

SEQ ID NO: 2591548 - RNA, 19 nt, Artificial Sequence
  Description of Artificial Sequence: Synthetic oligonucleotide
auuuugucccaacuucagg

SEQ ID NO: 2591549 - RNA, 19 nt, Artificial Sequence
  Description of Artificial Sequence: Synthetic oligonucleotide
uuuaaguagcacuguugag

SEQ ID NO: 2591550 - RNA, 19 nt, Artificial Sequence
  Description of Artificial Sequence: Synthetic oligonucleotide
uaguaugaagauuauuaaa

SEQ ID NO: 2591551 - RNA, 19 nt, Artificial Sequence
  Description of Artificial Sequence: Synthetic oligonucleotide
uuuguugacgagcccuggg

SEQ ID NO: 2591552 - RNA, 19 nt, Artificial Sequence
  Description of Artificial Sequence: Synthetic oligonucleotide
agaucuucuauucuccgcu

SEQ ID NO: 2591553 - RNA, 19 nt, Artificial Sequence
  Description of Artificial Sequence: Synthetic oligonucleotide
uccgcuaacuuaagcaugc

SEQ ID NO: 2591554 - RNA, 19 nt, Artificial Sequence
  Description of Artificial Sequence: Synthetic oligonucleotide
ucagaucuucuauucuccg

SEQ ID NO: 2591555 - RNA, 19 nt, Artificial Sequence
  Description of Artificial Sequence: Synthetic oligonucleotide
ugguuauccauucauguuu

SEQ ID NO: 2591556 - RNA, 19 nt, Artificial Sequence
  Description of Artificial Sequence: Synthetic oligonucleotide
acauauuucucauaugcuu

SEQ ID NO: 2591557 - RNA, 19 nt, Artificial Sequence
  Description of Artificial Sequence: Synthetic oligonucleotide
cauaacaggauuuguugac

SEQ ID NO: 2591558 - RNA, 19 nt, Artificial Sequence
  Description of Artificial Sequence: Synthetic oligonucleotide
cauuaauucauccagcucu

SEQ ID NO: 2591559 - RNA, 19 nt, Artificial Sequence
  Description of Artificial Sequence: Synthetic oligonucleotide
ucaguuaccucuccagaca

SEQ ID NO: 2591560 - RNA, 19 nt, Artificial Sequence
  Description of Artificial Sequence: Synthetic oligonucleotide
uauugcuagaaguuauuuc

SEQ ID NO: 2591561 - RNA, 19 nt, Artificial Sequence
  Description of Artificial Sequence: Synthetic oligonucleotide
cuagaaguuauuucagauc

SEQ ID NO: 2591562 - RNA, 19 nt, Artificial Sequence
  Description of Artificial Sequence: Synthetic oligonucleotide
aacaggauuuguugacgag

SEQ ID NO: 2591563 - RNA, 19 nt, Artificial Sequence
  Description of Artificial Sequence: Synthetic oligonucleotide
ucuguacccaucaggaagu

SEQ ID NO: 2591564 - RNA, 19 nt, Artificial Sequence
  Description of Artificial Sequence: Synthetic oligonucleotide
acuuaagcaugcuggauca

SEQ ID NO: 2591565 - RNA, 19 nt, Artificial Sequence
  Description of Artificial Sequence: Synthetic oligonucleotide
aagcaccaaauucaucuug

SEQ ID NO: 2591566 - RNA, 19 nt, Artificial Sequence
  Description of Artificial Sequence: Synthetic oligonucleotide
uugcuagaaguuauuucag

SEQ ID NO: 2591567 - RNA, 19 nt, Artificial Sequence
  Description of Artificial Sequence: Synthetic oligonucleotide
ucacucauuaauucaucca

SEQ ID NO: 2591568 - RNA, 19 nt, Artificial Sequence
  Description of Artificial Sequence: Synthetic oligonucleotide
caaagcaccaaauucaucu

SEQ ID NO: 2591569 - RNA, 19 nt, Artificial Sequence
  Description of Artificial Sequence: Synthetic oligonucleotide
aauuuugucccaacuucag

SEQ ID NO: 2591570 - RNA, 19 nt, Artificial Sequence
  Description of Artificial Sequence: Synthetic oligonucleotide
ucugugguuauccauucau

SEQ ID NO: 2591571 - RNA, 19 nt, Artificial Sequence
  Description of Artificial Sequence: Synthetic oligonucleotide
uguuucucugugaauuuac

SEQ ID NO: 2591572 - RNA, 19 nt, Artificial Sequence
  Description of Artificial Sequence: Synthetic oligonucleotide
auaacaggauuuguugacg

SEQ ID NO: 2591573 - RNA, 19 nt, Artificial Sequence
  Description of Artificial Sequence: Synthetic oligonucleotide
caugcucacuccucaaugg

SEQ ID NO: 2591574 - RNA, 19 nt, Artificial Sequence
  Description of Artificial Sequence: Synthetic oligonucleotide
gaaguuauuucagaucuuc

SEQ ID NO: 2591575 - RNA, 19 nt, Artificial Sequence
  Description of Artificial Sequence: Synthetic oligonucleotide
guugagaguaguuucuuuc

SEQ ID NO: 2591576 - RNA, 19 nt, Artificial Sequence
  Description of Artificial Sequence: Synthetic oligonucleotide
auucuccgcuaacuuaagc

SEQ ID NO: 2591577 - RNA, 19 nt, Artificial Sequence
  Description of Artificial Sequence: Synthetic oligonucleotide
ugagaguaguuucuuucca

SEQ ID NO: 2591578 - RNA, 19 nt, Artificial Sequence
  Description of Artificial Sequence: Synthetic oligonucleotide
cacuguuccaauaccauuc

SEQ ID NO: 2591579 - RNA, 19 nt, Artificial Sequence
  Description of Artificial Sequence: Synthetic oligonucleotide
guuccaauaccauucucug

SEQ ID NO: 2591580 - RNA, 19 nt, Artificial Sequence
  Description of Artificial Sequence: Synthetic oligonucleotide
auauuucucauaugcuucu

SEQ ID NO: 2591581 - RNA, 19 nt, Artificial Sequence
  Description of Artificial Sequence: Synthetic oligonucleotide
uaagcaugcuggaucaggu

SEQ ID NO: 2591582 - RNA, 19 nt, Artificial Sequence
  Description of Artificial Sequence: Synthetic oligonucleotide
aucuugaucagccaaccau

SEQ ID NO: 2591583 - RNA, 19 nt, Artificial Sequence
  Description of Artificial Sequence: Synthetic oligonucleotide
aguuauuucagaucuucua

SEQ ID NO: 2591584 - RNA, 19 nt, Artificial Sequence
  Description of Artificial Sequence: Synthetic oligonucleotide
uuccugugcaaaauugcug

SEQ ID NO: 2591585 - RNA, 19 nt, Artificial Sequence
  Description of Artificial Sequence: Synthetic oligonucleotide
uaacaggauuuguugacga

SEQ ID NO: 2591586 - RNA, 19 nt, Artificial Sequence
  Description of Artificial Sequence: Synthetic oligonucleotide
ucagguuccuuccaguuuu

SEQ ID NO: 2591587 - RNA, 19 nt, Artificial Sequence
  Description of Artificial Sequence: Synthetic oligonucleotide
gacuacaguaaacaacauc

SEQ ID NO: 2591588 - RNA, 19 nt, Artificial Sequence
  Description of Artificial Sequence: Synthetic oligonucleotide
aauuuacgcaccgacugga

SEQ ID NO: 2591589 - RNA, 19 nt, Artificial Sequence
  Description of Artificial Sequence: Synthetic oligonucleotide
uguauuuaucuguacccau

SEQ ID NO: 2591590 - RNA, 19 nt, Artificial Sequence
  Description of Artificial Sequence: Synthetic oligonucleotide
ucauuaauucauccagcuc

SEQ ID NO: 2591591 - RNA, 19 nt, Artificial Sequence
  Description of Artificial Sequence: Synthetic oligonucleotide
uggauuucacauauuucuc

SEQ ID NO: 2591592 - RNA, 19 nt, Artificial Sequence
  Description of Artificial Sequence: Synthetic oligonucleotide
auucauguuucucugugaa

SEQ ID NO: 2591593 - RNA, 19 nt, Artificial Sequence
  Description of Artificial Sequence: Synthetic oligonucleotide
uuguauuuaucuguaccca

SEQ ID NO: 2591594 - RNA, 19 nt, Artificial Sequence
  Description of Artificial Sequence: Synthetic oligonucleotide
uuuacgcaccgacuggaca

SEQ ID NO: 2591595 - RNA, 19 nt, Artificial Sequence
  Description of Artificial Sequence: Synthetic oligonucleotide
ccaaccaucuucauaacag

SEQ ID NO: 2591596 - RNA, 19 nt, Artificial Sequence
  Description of Artificial Sequence: Synthetic oligonucleotide
uccuuccaguuuuauuugg

SEQ ID NO: 2591597 - RNA, 19 nt, Artificial Sequence
  Description of Artificial Sequence: Synthetic oligonucleotide
cuccaaagcaccaaauuca

SEQ ID NO: 2591598 - RNA, 19 nt, Artificial Sequence
  Description of Artificial Sequence: Synthetic oligonucleotide
uuuucaauuuugucccaac

SEQ ID NO: 2591599 - RNA, 19 nt, Artificial Sequence
  Description of Artificial Sequence: Synthetic oligonucleotide
uuugucccaacuucaggca

SEQ ID NO: 2591600 - RNA, 19 nt, Artificial Sequence
  Description of Artificial Sequence: Synthetic oligonucleotide
ucuauucuccgcuaacuua

SEQ ID NO: 2591601 - RNA, 19 nt, Artificial Sequence
  Description of Artificial Sequence: Synthetic oligonucleotide
cuucuucacucauuaauuc

SEQ ID NO: 2591602 - RNA, 19 nt, Artificial Sequence
  Description of Artificial Sequence: Synthetic oligonucleotide
guuaccucuccagacagag

SEQ ID NO: 2591603 - RNA, 19 nt, Artificial Sequence
  Description of Artificial Sequence: Synthetic oligonucleotide
guaaacaacaucucccaaa

SEQ ID NO: 2591604 - RNA, 19 nt, Artificial Sequence
  Description of Artificial Sequence: Synthetic oligonucleotide
ucuucuauucuccgcuaac

SEQ ID NO: 2591605 - RNA, 19 nt, Artificial Sequence
  Description of Artificial Sequence: Synthetic oligonucleotide
ucacucagugccaucuuga

SEQ ID NO: 2591606 - RNA, 19 nt, Artificial Sequence
  Description of Artificial Sequence: Synthetic oligonucleotide
uggacagccgauccagugc

SEQ ID NO: 2591607 - RNA, 19 nt, Artificial Sequence
  Description of Artificial Sequence: Synthetic oligonucleotide
ucaggcagacuacaguaaa

SEQ ID NO: 2591608 - RNA, 19 nt, Artificial Sequence
  Description of Artificial Sequence: Synthetic oligonucleotide
uugacuucaguuaccucuc

SEQ ID NO: 2591609 - RNA, 19 nt, Artificial Sequence
  Description of Artificial Sequence: Synthetic oligonucleotide
cuccuagccacucgcagcg

SEQ ID NO: 2591610 - RNA, 19 nt, Artificial Sequence
  Description of Artificial Sequence: Synthetic oligonucleotide
ucuccgcuaacuuaagcau

SEQ ID NO: 2591611 - RNA, 19 nt, Artificial Sequence
  Description of Artificial Sequence: Synthetic oligonucleotide
ucucccaaagcuuccugug

SEQ ID NO: 2591612 - RNA, 19 nt, Artificial Sequence
  Description of Artificial Sequence: Synthetic oligonucleotide
gacagaggagaguagagcu

SEQ ID NO: 2591613 - RNA, 19 nt, Artificial Sequence
  Description of Artificial Sequence: Synthetic oligonucleotide
uuguugacgagcccugggu

SEQ ID NO: 2591614 - RNA, 19 nt, Artificial Sequence
  Description of Artificial Sequence: Synthetic oligonucleotide
aaagcaccaaauucaucuu

SEQ ID NO: 2591615 - RNA, 19 nt, Artificial Sequence
  Description of Artificial Sequence: Synthetic oligonucleotide
acuucaggcagacuacagu

SEQ ID NO: 2591616 - RNA, 19 nt, Artificial Sequence
  Description of Artificial Sequence: Synthetic oligonucleotide
caacaucucccaaagcuuc

SEQ ID NO: 2591617 - RNA, 19 nt, Artificial Sequence
  Description of Artificial Sequence: Synthetic oligonucleotide
aauugcugauucccacugu

SEQ ID NO: 2591618 - RNA, 19 nt, Artificial Sequence
  Description of Artificial Sequence: Synthetic oligonucleotide
auccauucauguuucucug

SEQ ID NO: 2591619 - RNA, 19 nt, Artificial Sequence
  Description of Artificial Sequence: Synthetic oligonucleotide
acucagugccaucuugauc

SEQ ID NO: 2591620 - RNA, 19 nt, Artificial Sequence
  Description of Artificial Sequence: Synthetic oligonucleotide
cacuguugagaguaguuuc

SEQ ID NO: 2591621 - RNA, 19 nt, Artificial Sequence
  Description of Artificial Sequence: Synthetic oligonucleotide
uucucauaugcuucuucac

SEQ ID NO: 2591622 - RNA, 19 nt, Artificial Sequence
  Description of Artificial Sequence: Synthetic oligonucleotide
cucugugaauuuacgcacc

SEQ ID NO: 2591623 - RNA, 19 nt, Artificial Sequence
  Description of Artificial Sequence: Synthetic oligonucleotide
cuauucuccgcuaacuuaa

SEQ ID NO: 2591624 - RNA, 19 nt, Artificial Sequence
  Description of Artificial Sequence: Synthetic oligonucleotide
cuggguuuucugcaagugc

SEQ ID NO: 2591625 - RNA, 19 nt, Artificial Sequence
  Description of Artificial Sequence: Synthetic oligonucleotide
cagaucuucuauucuccgc

SEQ ID NO: 2591626 - RNA, 19 nt, Artificial Sequence
  Description of Artificial Sequence: Synthetic oligonucleotide
uauucuccgcuaacuuaag

SEQ ID NO: 2591627 - RNA, 19 nt, Artificial Sequence
  Description of Artificial Sequence: Synthetic oligonucleotide
caauuuugucccaacuuca

SEQ ID NO: 2591628 - RNA, 19 nt, Artificial Sequence
  Description of Artificial Sequence: Synthetic oligonucleotide
uuaccucuccagacagagg

SEQ ID NO: 2591629 - RNA, 19 nt, Artificial Sequence
  Description of Artificial Sequence: Synthetic oligonucleotide
acucgcagcgacaugauca

SEQ ID NO: 2591630 - RNA, 19 nt, Artificial Sequence
  Description of Artificial Sequence: Synthetic oligonucleotide
cuaacuuaagcaugcugga

SEQ ID NO: 2591631 - RNA, 19 nt, Artificial Sequence
  Description of Artificial Sequence: Synthetic oligonucleotide
guuauuucagaucuucuau

SEQ ID NO: 2591632 - RNA, 19 nt, Artificial Sequence
  Description of Artificial Sequence: Synthetic oligonucleotide
aaguuauuucagaucuucu

SEQ ID NO: 2591633 - RNA, 19 nt, Artificial Sequence
  Description of Artificial Sequence: Synthetic oligonucleotide
aucuucauaacaggauuug

SEQ ID NO: 2591634 - RNA, 19 nt, Artificial Sequence
  Description of Artificial Sequence: Synthetic oligonucleotide
ucagccaaccaucuucaua

SEQ ID NO: 2591635 - RNA, 19 nt, Artificial Sequence
  Description of Artificial Sequence: Synthetic oligonucleotide
caguuuuauuuggaagugg

SEQ ID NO: 2591636 - RNA, 19 nt, Artificial Sequence
  Description of Artificial Sequence: Synthetic oligonucleotide
uuauccauucauguuucuc

SEQ ID NO: 2591637 - RNA, 19 nt, Artificial Sequence
  Description of Artificial Sequence: Synthetic oligonucleotide
ugucccaacuucaggcaga

SEQ ID NO: 2591638 - RNA, 19 nt, Artificial Sequence
  Description of Artificial Sequence: Synthetic oligonucleotide
uccaucaguauugcuagaa

SEQ ID NO: 2591639 - RNA, 19 nt, Artificial Sequence
  Description of Artificial Sequence: Synthetic oligonucleotide
uucaggcagacuacaguaa

SEQ ID NO: 2591640 - RNA, 19 nt, Artificial Sequence
  Description of Artificial Sequence: Synthetic oligonucleotide
caguuaccucuccagacag

SEQ ID NO: 2591641 - RNA, 19 nt, Artificial Sequence
  Description of Artificial Sequence: Synthetic oligonucleotide
auugcugauucccacuguu

SEQ ID NO: 2591642 - RNA, 19 nt, Artificial Sequence
  Description of Artificial Sequence: Synthetic oligonucleotide
cugugguuauccauucaug

SEQ ID NO: 2591643 - RNA, 19 nt, Artificial Sequence
  Description of Artificial Sequence: Synthetic oligonucleotide
uuccaauaccauucucugu

SEQ ID NO: 2591644 - RNA, 19 nt, Artificial Sequence
  Description of Artificial Sequence: Synthetic oligonucleotide
aacuucaggcagacuacag

SEQ ID NO: 2591645 - RNA, 19 nt, Artificial Sequence
  Description of Artificial Sequence: Synthetic oligonucleotide
cugaaggaucacucagugc

SEQ ID NO: 2591646 - RNA, 19 nt, Artificial Sequence
  Description of Artificial Sequence: Synthetic oligonucleotide
uccagacagaggagaguag

SEQ ID NO: 2591647 - RNA, 19 nt, Artificial Sequence
  Description of Artificial Sequence: Synthetic oligonucleotide
aguaaacaacaucucccaa

SEQ ID NO: 2591648 - RNA, 19 nt, Artificial Sequence
  Description of Artificial Sequence: Synthetic oligonucleotide
aggcagacuacaguaaaca

SEQ ID NO: 2591649 - RNA, 19 nt, Artificial Sequence
  Description of Artificial Sequence: Synthetic oligonucleotide
gauuucacauauuucucau

SEQ ID NO: 2591650 - RNA, 19 nt, Artificial Sequence
  Description of Artificial Sequence: Synthetic oligonucleotide
auaccauucucugugguua

SEQ ID NO: 2591651 - RNA, 19 nt, Artificial Sequence
  Description of Artificial Sequence: Synthetic oligonucleotide
aucaguauugcuagaaguu

SEQ ID NO: 2591652 - RNA, 19 nt, Artificial Sequence
  Description of Artificial Sequence: Synthetic oligonucleotide
aucucccaaagcuuccugu

SEQ ID NO: 2591653 - RNA, 19 nt, Artificial Sequence
  Description of Artificial Sequence: Synthetic oligonucleotide
cucgcagcgacaugaucag

SEQ ID NO: 2591654 - RNA, 19 nt, Artificial Sequence
  Description of Artificial Sequence: Synthetic oligonucleotide
guuucuuuccaucaguauu

SEQ ID NO: 2591655 - RNA, 19 nt, Artificial Sequence
  Description of Artificial Sequence: Synthetic oligonucleotide
caggccacggcccacgcgc

SEQ ID NO: 2591656 - RNA, 19 nt, Artificial Sequence
  Description of Artificial Sequence: Synthetic oligonucleotide
cugcaagugcuucauugac

SEQ ID NO: 2591657 - RNA, 19 nt, Artificial Sequence
  Description of Artificial Sequence: Synthetic oligonucleotide
cuccgcuaacuuaagcaug

SEQ ID NO: 2591658 - RNA, 19 nt, Artificial Sequence
  Description of Artificial Sequence: Synthetic oligonucleotide
guauuuaucuguacccauc

SEQ ID NO: 2591659 - RNA, 19 nt, Artificial Sequence
  Description of Artificial Sequence: Synthetic oligonucleotide
uccauucauguuucucugu

SEQ ID NO: 2591660 - RNA, 19 nt, Artificial Sequence
  Description of Artificial Sequence: Synthetic oligonucleotide
ucauccagcucugaaggau

SEQ ID NO: 2591661 - RNA, 19 nt, Artificial Sequence
  Description of Artificial Sequence: Synthetic oligonucleotide
ugcucacuccucaauggau

SEQ ID NO: 2591662 - RNA, 19 nt, Artificial Sequence
  Description of Artificial Sequence: Synthetic oligonucleotide
cucauuaauucauccagcu

SEQ ID NO: 2591663 - RNA, 19 nt, Artificial Sequence
  Description of Artificial Sequence: Synthetic oligonucleotide
uguugagaguaguuucuuu

SEQ ID NO: 2591664 - RNA, 19 nt, Artificial Sequence
  Description of Artificial Sequence: Synthetic oligonucleotide
uguugacgagcccuggguu

SEQ ID NO: 2591665 - RNA, 19 nt, Artificial Sequence
  Description of Artificial Sequence: Synthetic oligonucleotide
uucauccagcucugaagga

SEQ ID NO: 2591666 - RNA, 19 nt, Artificial Sequence
  Description of Artificial Sequence: Synthetic oligonucleotide
uaucuguacccaucaggaa

SEQ ID NO: 2591667 - RNA, 19 nt, Artificial Sequence
  Description of Artificial Sequence: Synthetic oligonucleotide
caucaguauugcuagaagu

SEQ ID NO: 2591668 - RNA, 19 nt, Artificial Sequence
  Description of Artificial Sequence: Synthetic oligonucleotide
ugacuucaguuaccucucc

SEQ ID NO: 2591669 - RNA, 19 nt, Artificial Sequence
  Description of Artificial Sequence: Synthetic oligonucleotide
uucauguuucucugugaau

SEQ ID NO: 2591670 - RNA, 19 nt, Artificial Sequence
  Description of Artificial Sequence: Synthetic oligonucleotide
gaucagccaaccaucuuca

SEQ ID NO: 2591671 - RNA, 19 nt, Artificial Sequence
  Description of Artificial Sequence: Synthetic oligonucleotide
caggcagacuacaguaaac

SEQ ID NO: 2591672 - RNA, 19 nt, Artificial Sequence
  Description of Artificial Sequence: Synthetic oligonucleotide
cuggacagccgauccagug

SEQ ID NO: 2591673 - RNA, 19 nt, Artificial Sequence
  Description of Artificial Sequence: Synthetic oligonucleotide
cauccagcucugaaggauc

SEQ ID NO: 2591674 - RNA, 19 nt, Artificial Sequence
  Description of Artificial Sequence: Synthetic oligonucleotide
gugcaaaauugcugauucc

SEQ ID NO: 2591675 - RNA, 19 nt, Artificial Sequence
  Description of Artificial Sequence: Synthetic oligonucleotide
augcucacuccucaaugga

SEQ ID NO: 2591676 - RNA, 19 nt, Artificial Sequence
  Description of Artificial Sequence: Synthetic oligonucleotide
auuuacgcaccgacuggac

SEQ ID NO: 2591677 - RNA, 19 nt, Artificial Sequence
  Description of Artificial Sequence: Synthetic oligonucleotide
gcagacuacaguaaacaac

SEQ ID NO: 2591678 - RNA, 19 nt, Artificial Sequence
  Description of Artificial Sequence: Synthetic oligonucleotide
cuucaguuaccucuccaga

SEQ ID NO: 2591679 - RNA, 19 nt, Artificial Sequence
  Description of Artificial Sequence: Synthetic oligonucleotide
gacuucaguuaccucucca

SEQ ID NO: 2591680 - RNA, 19 nt, Artificial Sequence
  Description of Artificial Sequence: Synthetic oligonucleotide
agccaaccaucuucauaac

SEQ ID NO: 2591681 - RNA, 19 nt, Artificial Sequence
  Description of Artificial Sequence: Synthetic oligonucleotide
uaacuuaagcaugcuggau

SEQ ID NO: 2591682 - RNA, 19 nt, Artificial Sequence
  Description of Artificial Sequence: Synthetic oligonucleotide
uuaauucauccagcucuga

SEQ ID NO: 2591683 - RNA, 19 nt, Artificial Sequence
  Description of Artificial Sequence: Synthetic oligonucleotide
cuuccaguuuuauuuggaa

SEQ ID NO: 2591684 - RNA, 19 nt, Artificial Sequence
  Description of Artificial Sequence: Synthetic oligonucleotide
cauucauguuucucuguga

SEQ ID NO: 2591685 - RNA, 19 nt, Artificial Sequence
  Description of Artificial Sequence: Synthetic oligonucleotide
aucuucuauucuccgcuaa

SEQ ID NO: 2591686 - RNA, 19 nt, Artificial Sequence
  Description of Artificial Sequence: Synthetic oligonucleotide
aagcaugcuggaucagguu

SEQ ID NO: 2591687 - RNA, 19 nt, Artificial Sequence
  Description of Artificial Sequence: Synthetic oligonucleotide
aggaucacucagugccauc

SEQ ID NO: 2591688 - RNA, 19 nt, Artificial Sequence
  Description of Artificial Sequence: Synthetic oligonucleotide
uguacccaucaggaaguug

SEQ ID NO: 2591689 - RNA, 19 nt, Artificial Sequence
  Description of Artificial Sequence: Synthetic oligonucleotide
ucaauggauuucacauauu

SEQ ID NO: 2591690 - RNA, 19 nt, Artificial Sequence
  Description of Artificial Sequence: Synthetic oligonucleotide
gcuggaucagguuccuucc

SEQ ID NO: 2591691 - RNA, 19 nt, Artificial Sequence
  Description of Artificial Sequence: Synthetic oligonucleotide
aucagguuccuuccaguuu

SEQ ID NO: 2591692 - RNA, 19 nt, Artificial Sequence
  Description of Artificial Sequence: Synthetic oligonucleotide
acaacaucucccaaagcuu

SEQ ID NO: 2591693 - RNA, 19 nt, Artificial Sequence
  Description of Artificial Sequence: Synthetic oligonucleotide
cuucauaacaggauuuguu

SEQ ID NO: 2591694 - RNA, 19 nt, Artificial Sequence
  Description of Artificial Sequence: Synthetic oligonucleotide
agacugcaggccacggccc

SEQ ID NO: 2591695 - RNA, 19 nt, Artificial Sequence
  Description of Artificial Sequence: Synthetic oligonucleotide
gauccagugcucagcgcgc

SEQ ID NO: 2591696 - RNA, 19 nt, Artificial Sequence
  Description of Artificial Sequence: Synthetic oligonucleotide
agccuucacacucuccaaa

SEQ ID NO: 2591697 - RNA, 19 nt, Artificial Sequence
  Description of Artificial Sequence: Synthetic oligonucleotide
gccuucacacucuccaaag

SEQ ID NO: 2591698 - RNA, 19 nt, Artificial Sequence
  Description of Artificial Sequence: Synthetic oligonucleotide
cgauccagugcucagcgcg

SEQ ID NO: 2591699 - RNA, 19 nt, Artificial Sequence
  Description of Artificial Sequence: Synthetic oligonucleotide
cacauauuucucauaugcu

SEQ ID NO: 2591700 - RNA, 19 nt, Artificial Sequence
  Description of Artificial Sequence: Synthetic oligonucleotide
gccgauccagugcucagcg

SEQ ID NO: 2591701 - RNA, 19 nt, Artificial Sequence
  Description of Artificial Sequence: Synthetic oligonucleotide
cacggcggugcgcagacug

SEQ ID NO: 2591702 - RNA, 19 nt, Artificial Sequence
  Description of Artificial Sequence: Synthetic oligonucleotide
ccaauaccauucucugugg

SEQ ID NO: 2591703 - RNA, 19 nt, Artificial Sequence
  Description of Artificial Sequence: Synthetic oligonucleotide
ucuccagacagaggagagu

SEQ ID NO: 2591704 - RNA, 19 nt, Artificial Sequence
  Description of Artificial Sequence: Synthetic oligonucleotide
ugcgcagacugcaggccac

SEQ ID NO: 2591705 - RNA, 19 nt, Artificial Sequence
  Description of Artificial Sequence: Synthetic oligonucleotide
cauucucugugguuaucca

SEQ ID NO: 2591706 - RNA, 19 nt, Artificial Sequence
  Description of Artificial Sequence: Synthetic oligonucleotide
gagaguaguuucuuuccau

SEQ ID NO: 2591707 - RNA, 19 nt, Artificial Sequence
  Description of Artificial Sequence: Synthetic oligonucleotide
agugcucagcgcgcggacg

SEQ ID NO: 2591708 - RNA, 19 nt, Artificial Sequence
  Description of Artificial Sequence: Synthetic oligonucleotide
accgacuggacagccgauc

SEQ ID NO: 2591709 - RNA, 19 nt, Artificial Sequence
  Description of Artificial Sequence: Synthetic oligonucleotide
cauugacuucaguuaccuc

SEQ ID NO: 2591710 - RNA, 19 nt, Artificial Sequence
  Description of Artificial Sequence: Synthetic oligonucleotide
uuccaucaguauugcuaga

SEQ ID NO: 2591711 - RNA, 19 nt, Artificial Sequence
  Description of Artificial Sequence: Synthetic oligonucleotide
aguauugcuagaaguuauu

SEQ ID NO: 2591712 - RNA, 19 nt, Artificial Sequence
  Description of Artificial Sequence: Synthetic oligonucleotide
ccaacuucaggcagacuac

SEQ ID NO: 2591713 - RNA, 19 nt, Artificial Sequence
  Description of Artificial Sequence: Synthetic oligonucleotide
ccaucaguauugcuagaag

SEQ ID NO: 2591714 - RNA, 19 nt, Artificial Sequence
  Description of Artificial Sequence: Synthetic oligonucleotide
gcuagaaguuauuucagau

SEQ ID NO: 2591715 - RNA, 19 nt, Artificial Sequence
  Description of Artificial Sequence: Synthetic oligonucleotide
gaucuucuauucuccgcua

SEQ ID NO: 2591716 - RNA, 19 nt, Artificial Sequence
  Description of Artificial Sequence: Synthetic oligonucleotide
agaguagagcucacuggca

SEQ ID NO: 2591717 - RNA, 19 nt, Artificial Sequence
  Description of Artificial Sequence: Synthetic oligonucleotide
gcacccagggccccggugg

SEQ ID NO: 2591718 - RNA, 19 nt, Artificial Sequence
  Description of Artificial Sequence: Synthetic oligonucleotide
cuuaagcaugcuggaucag

SEQ ID NO: 2591719 - RNA, 19 nt, Artificial Sequence
  Description of Artificial Sequence: Synthetic oligonucleotide
acagccgauccagugcuca

SEQ ID NO: 2591720 - RNA, 19 nt, Artificial Sequence
  Description of Artificial Sequence: Synthetic oligonucleotide
cucagcgcgcggacggcgg

SEQ ID NO: 2591721 - RNA, 19 nt, Artificial Sequence
  Description of Artificial Sequence: Synthetic oligonucleotide
caggaggccacggcggugc

SEQ ID NO: 2591722 - RNA, 19 nt, Artificial Sequence
  Description of Artificial Sequence: Synthetic oligonucleotide
cgcagcgacaugaucagag

SEQ ID NO: 2591723 - RNA, 19 nt, Artificial Sequence
  Description of Artificial Sequence: Synthetic oligonucleotide
gcuccuagccacucgcagc

SEQ ID NO: 2591724 - RNA, 19 nt, Artificial Sequence
  Description of Artificial Sequence: Synthetic oligonucleotide
uagcacuguugagaguagu

SEQ ID NO: 2591725 - RNA, 19 nt, Artificial Sequence
  Description of Artificial Sequence: Synthetic oligonucleotide
accauucucugugguuauc

SEQ ID NO: 2591726 - RNA, 19 nt, Artificial Sequence
  Description of Artificial Sequence: Synthetic oligonucleotide
agaggagaguagagcucac

SEQ ID NO: 2591727 - RNA, 19 nt, Artificial Sequence
  Description of Artificial Sequence: Synthetic oligonucleotide
cuguuccaauaccauucuc

SEQ ID NO: 2591728 - RNA, 19 nt, Artificial Sequence
  Description of Artificial Sequence: Synthetic oligonucleotide
gcaaaauugcugauuccca

SEQ ID NO: 2591729 - RNA, 19 nt, Artificial Sequence
  Description of Artificial Sequence: Synthetic oligonucleotide
ccaugcucacuccucaaug

SEQ ID NO: 2591730 - RNA, 19 nt, Artificial Sequence
  Description of Artificial Sequence: Synthetic oligonucleotide
uacgcaccgacuggacagc

SEQ ID NO: 2591731 - RNA, 19 nt, Artificial Sequence
  Description of Artificial Sequence: Synthetic oligonucleotide
gaucagguuccuuccaguu

SEQ ID NO: 2591732 - RNA, 19 nt, Artificial Sequence
  Description of Artificial Sequence: Synthetic oligonucleotide
caguauugcuagaaguuau

SEQ ID NO: 2591733 - RNA, 19 nt, Artificial Sequence
  Description of Artificial Sequence: Synthetic oligonucleotide
cuccagacagaggagagua

SEQ ID NO: 2591734 - RNA, 19 nt, Artificial Sequence
  Description of Artificial Sequence: Synthetic oligonucleotide
gaggccacggcggugcgca

SEQ ID NO: 2591735 - RNA, 19 nt, Artificial Sequence
  Description of Artificial Sequence: Synthetic oligonucleotide
acgcaccgacuggacagcc

SEQ ID NO: 2591736 - RNA, 19 nt, Artificial Sequence
  Description of Artificial Sequence: Synthetic oligonucleotide
ggcagacuacaguaaacaa

SEQ ID NO: 2591737 - RNA, 19 nt, Artificial Sequence
  Description of Artificial Sequence: Synthetic oligonucleotide
caucuugaucagccaacca

SEQ ID NO: 2591738 - RNA, 19 nt, Artificial Sequence
  Description of Artificial Sequence: Synthetic oligonucleotide
ucacuccucaauggauuuc

SEQ ID NO: 2591739 - RNA, 19 nt, Artificial Sequence
  Description of Artificial Sequence: Synthetic oligonucleotide
gugccaugcucacuccuca

SEQ ID NO: 2591740 - RNA, 19 nt, Artificial Sequence
  Description of Artificial Sequence: Synthetic oligonucleotide
ucagcgcgcggacggcggc

SEQ ID NO: 2591741 - RNA, 19 nt, Artificial Sequence
  Description of Artificial Sequence: Synthetic oligonucleotide
agcacuguugagaguaguu

SEQ ID NO: 2591742 - RNA, 19 nt, Artificial Sequence
  Description of Artificial Sequence: Synthetic oligonucleotide
uugacgagcccuggguuuu

SEQ ID NO: 2591743 - RNA, 19 nt, Artificial Sequence
  Description of Artificial Sequence: Synthetic oligonucleotide
uagccacucgcagcgacau

SEQ ID NO: 2591744 - RNA, 19 nt, Artificial Sequence
  Description of Artificial Sequence: Synthetic oligonucleotide
ggauuuguugacgagcccu

SEQ ID NO: 2591745 - RNA, 19 nt, Artificial Sequence
  Description of Artificial Sequence: Synthetic oligonucleotide
acggcccacgcgcuccuag

SEQ ID NO: 2591746 - RNA, 19 nt, Artificial Sequence
  Description of Artificial Sequence: Synthetic oligonucleotide
gugaauuuacgcaccgacu

SEQ ID NO: 2591747 - RNA, 19 nt, Artificial Sequence
  Description of Artificial Sequence: Synthetic oligonucleotide
cucugaaggaucacucagu

SEQ ID NO: 2591748 - RNA, 19 nt, Artificial Sequence
  Description of Artificial Sequence: Synthetic oligonucleotide
ccaucuugaucagccaacc

SEQ ID NO: 2591749 - RNA, 19 nt, Artificial Sequence
  Description of Artificial Sequence: Synthetic oligonucleotide
cuagccacucgcagcgaca

SEQ ID NO: 2591750 - RNA, 19 nt, Artificial Sequence
  Description of Artificial Sequence: Synthetic oligonucleotide
gccaaccaucuucauaaca

SEQ ID NO: 2591751 - RNA, 19 nt, Artificial Sequence
  Description of Artificial Sequence: Synthetic oligonucleotide
ccgacuggacagccgaucc

SEQ ID NO: 2591752 - RNA, 19 nt, Artificial Sequence
  Description of Artificial Sequence: Synthetic oligonucleotide
ugccaugcucacuccucaa

SEQ ID NO: 2591753 - RNA, 19 nt, Artificial Sequence
  Description of Artificial Sequence: Synthetic oligonucleotide
gugguuauccauucauguu

SEQ ID NO: 2591754 - RNA, 19 nt, Artificial Sequence
  Description of Artificial Sequence: Synthetic oligonucleotide
acugcaggccacggcccac

SEQ ID NO: 2591755 - RNA, 19 nt, Artificial Sequence
  Description of Artificial Sequence: Synthetic oligonucleotide
cagccgauccagugcucag

SEQ ID NO: 2591756 - RNA, 19 nt, Artificial Sequence
  Description of Artificial Sequence: Synthetic oligonucleotide
acgcgcuccuagccacucg

SEQ ID NO: 2591757 - RNA, 19 nt, Artificial Sequence
  Description of Artificial Sequence: Synthetic oligonucleotide
agaaguuauuucagaucuu

SEQ ID NO: 2591758 - RNA, 19 nt, Artificial Sequence
  Description of Artificial Sequence: Synthetic oligonucleotide
gugcgcagacugcaggcca

SEQ ID NO: 2591759 - RNA, 19 nt, Artificial Sequence
  Description of Artificial Sequence: Synthetic oligonucleotide
acucuccaaagcaccaaau

SEQ ID NO: 2591760 - RNA, 19 nt, Artificial Sequence
  Description of Artificial Sequence: Synthetic oligonucleotide
caacuucaggcagacuaca

SEQ ID NO: 2591761 - RNA, 19 nt, Artificial Sequence
  Description of Artificial Sequence: Synthetic oligonucleotide
acgagcccuggguuuucug

SEQ ID NO: 2591762 - RNA, 19 nt, Artificial Sequence
  Description of Artificial Sequence: Synthetic oligonucleotide
guauugcuagaaguuauuu

SEQ ID NO: 2591763 - RNA, 19 nt, Artificial Sequence
  Description of Artificial Sequence: Synthetic oligonucleotide
gccacucgcagcgacauga

SEQ ID NO: 2591764 - RNA, 19 nt, Artificial Sequence
  Description of Artificial Sequence: Synthetic oligonucleotide
gcggugcgcagacugcagg

SEQ ID NO: 2591765 - RNA, 19 nt, Artificial Sequence
  Description of Artificial Sequence: Synthetic oligonucleotide
aucagccaaccaucuucau

SEQ ID NO: 2591766 - RNA, 19 nt, Artificial Sequence
  Description of Artificial Sequence: Synthetic oligonucleotide
gccaucuugaucagccaac

SEQ ID NO: 2591767 - RNA, 19 nt, Artificial Sequence
  Description of Artificial Sequence: Synthetic oligonucleotide
aguuaccucuccagacaga

SEQ ID NO: 2591768 - RNA, 19 nt, Artificial Sequence
  Description of Artificial Sequence: Synthetic oligonucleotide
uccagcucugaaggaucac

SEQ ID NO: 2591769 - RNA, 19 nt, Artificial Sequence
  Description of Artificial Sequence: Synthetic oligonucleotide
gcaccgacuggacagccga

SEQ ID NO: 2591770 - RNA, 19 nt, Artificial Sequence
  Description of Artificial Sequence: Synthetic oligonucleotide
guuauccauucauguuucu

SEQ ID NO: 2591771 - RNA, 19 nt, Artificial Sequence
  Description of Artificial Sequence: Synthetic oligonucleotide
cacucgcagcgacaugauc

SEQ ID NO: 2591772 - RNA, 19 nt, Artificial Sequence
  Description of Artificial Sequence: Synthetic oligonucleotide
cuggaucagguuccuucca

SEQ ID NO: 2591773 - RNA, 19 nt, Artificial Sequence
  Description of Artificial Sequence: Synthetic oligonucleotide
cucugugguuauccauuca

SEQ ID NO: 2591774 - RNA, 19 nt, Artificial Sequence
  Description of Artificial Sequence: Synthetic oligonucleotide
cauguuucucugugaauuu

SEQ ID NO: 2591775 - RNA, 19 nt, Artificial Sequence
  Description of Artificial Sequence: Synthetic oligonucleotide
agacuacaguaaacaacau

SEQ ID NO: 2591776 - RNA, 19 nt, Artificial Sequence
  Description of Artificial Sequence: Synthetic oligonucleotide
guugacgagcccuggguuu

SEQ ID NO: 2591777 - RNA, 19 nt, Artificial Sequence
  Description of Artificial Sequence: Synthetic oligonucleotide
gugccaucuugaucagcca

SEQ ID NO: 2591778 - RNA, 19 nt, Artificial Sequence
  Description of Artificial Sequence: Synthetic oligonucleotide
caauaccauucucuguggu

SEQ ID NO: 2591779 - RNA, 19 nt, Artificial Sequence
  Description of Artificial Sequence: Synthetic oligonucleotide
ccaaagcaccaaauucauc

SEQ ID NO: 2591780 - RNA, 19 nt, Artificial Sequence
  Description of Artificial Sequence: Synthetic oligonucleotide
ccuuccaguuuuauuugga

SEQ ID NO: 2591781 - RNA, 19 nt, Artificial Sequence
  Description of Artificial Sequence: Synthetic oligonucleotide
cucuccaaagcaccaaauu

SEQ ID NO: 2591782 - RNA, 19 nt, Artificial Sequence
  Description of Artificial Sequence: Synthetic oligonucleotide
ggaucacucagugccaucu

SEQ ID NO: 2591783 - RNA, 19 nt, Artificial Sequence
  Description of Artificial Sequence: Synthetic oligonucleotide
ggugcgcagacugcaggcc

SEQ ID NO: 2591784 - RNA, 19 nt, Artificial Sequence
  Description of Artificial Sequence: Synthetic oligonucleotide
ggccccggugggcaggagg

SEQ ID NO: 2591785 - RNA, 19 nt, Artificial Sequence
  Description of Artificial Sequence: Synthetic oligonucleotide
cagugcucagcgcgcggac

SEQ ID NO: 2591786 - RNA, 19 nt, Artificial Sequence
  Description of Artificial Sequence: Synthetic oligonucleotide
ucggcacccagggccccgg

SEQ ID NO: 2591787 - RNA, 19 nt, Artificial Sequence
  Description of Artificial Sequence: Synthetic oligonucleotide
ggacagccgauccagugcu

SEQ ID NO: 2591788 - RNA, 19 nt, Artificial Sequence
  Description of Artificial Sequence: Synthetic oligonucleotide
cugugaauuuacgcaccga

SEQ ID NO: 2591789 - RNA, 19 nt, Artificial Sequence
  Description of Artificial Sequence: Synthetic oligonucleotide
cagugccaucuugaucagc

SEQ ID NO: 2591790 - RNA, 19 nt, Artificial Sequence
  Description of Artificial Sequence: Synthetic oligonucleotide
cgcuaacuuaagcaugcug

SEQ ID NO: 2591791 - RNA, 19 nt, Artificial Sequence
  Description of Artificial Sequence: Synthetic oligonucleotide
ccuggguuuucugcaagug

SEQ ID NO: 2591792 - RNA, 19 nt, Artificial Sequence
  Description of Artificial Sequence: Synthetic oligonucleotide
ccuagccacucgcagcgac

SEQ ID NO: 2591793 - RNA, 19 nt, Artificial Sequence
  Description of Artificial Sequence: Synthetic oligonucleotide
gaggagaguagagcucacu

SEQ ID NO: 2591794 - RNA, 19 nt, Artificial Sequence
  Description of Artificial Sequence: Synthetic oligonucleotide
acuggacagccgauccagu

SEQ ID NO: 2591795 - RNA, 19 nt, Artificial Sequence
  Description of Artificial Sequence: Synthetic oligonucleotide
ggcccacgcgcuccuagcc

SEQ ID NO: 2591796 - RNA, 19 nt, Artificial Sequence
  Description of Artificial Sequence: Synthetic oligonucleotide
ucgcagcgacaugaucaga

SEQ ID NO: 2591797 - RNA, 19 nt, Artificial Sequence
  Description of Artificial Sequence: Synthetic oligonucleotide
ggaucagguuccuuccagu

SEQ ID NO: 2591798 - RNA, 19 nt, Artificial Sequence
  Description of Artificial Sequence: Synthetic oligonucleotide
agcgcgcggacggcggcgg

SEQ ID NO: 2591799 - RNA, 19 nt, Artificial Sequence
  Description of Artificial Sequence: Synthetic oligonucleotide
cucacuccucaauggauuu

SEQ ID NO: 2591800 - RNA, 19 nt, Artificial Sequence
  Description of Artificial Sequence: Synthetic oligonucleotide
gaucacucagugccaucuu

SEQ ID NO: 2591801 - RNA, 19 nt, Artificial Sequence
  Description of Artificial Sequence: Synthetic oligonucleotide
cccacgcgcuccuagccac

SEQ ID NO: 2591802 - RNA, 19 nt, Artificial Sequence
  Description of Artificial Sequence: Synthetic oligonucleotide
uccuagccacucgcagcga

SEQ ID NO: 2591803 - RNA, 19 nt, Artificial Sequence
  Description of Artificial Sequence: Synthetic oligonucleotide
cacucagugccaucuugau

SEQ ID NO: 2591804 - RNA, 19 nt, Artificial Sequence
  Description of Artificial Sequence: Synthetic oligonucleotide
ugacgagcccuggguuuuc

SEQ ID NO: 2591805 - RNA, 19 nt, Artificial Sequence
  Description of Artificial Sequence: Synthetic oligonucleotide
ggcggcggcgcucggcacc

SEQ ID NO: 2591806 - RNA, 19 nt, Artificial Sequence
  Description of Artificial Sequence: Synthetic oligonucleotide
gacagccgauccagugcuc

SEQ ID NO: 2591807 - RNA, 19 nt, Artificial Sequence
  Description of Artificial Sequence: Synthetic oligonucleotide
ggggugccaugcucacucc

SEQ ID NO: 2591808 - RNA, 19 nt, Artificial Sequence
  Description of Artificial Sequence: Synthetic oligonucleotide
gcucagcgcgcggacggcg

SEQ ID NO: 2591809 - RNA, 19 nt, Artificial Sequence
  Description of Artificial Sequence: Synthetic oligonucleotide
gccacggcggugcgcagac

SEQ ID NO: 2591810 - RNA, 19 nt, Artificial Sequence
  Description of Artificial Sequence: Synthetic oligonucleotide
cgcgcuccuagccacucgc

SEQ ID NO: 2591811 - RNA, 19 nt, Artificial Sequence
  Description of Artificial Sequence: Synthetic oligonucleotide
ucccaacuucaggcagacu

SEQ ID NO: 2591812 - RNA, 19 nt, Artificial Sequence
  Description of Artificial Sequence: Synthetic oligonucleotide
cacgcgcuccuagccacuc

SEQ ID NO: 2591813 - RNA, 19 nt, Artificial Sequence
  Description of Artificial Sequence: Synthetic oligonucleotide
ccucuccagacagaggaga

SEQ ID NO: 2591814 - RNA, 19 nt, Artificial Sequence
  Description of Artificial Sequence: Synthetic oligonucleotide
cgcuccuagccacucgcag

SEQ ID NO: 2591815 - RNA, 19 nt, Artificial Sequence
  Description of Artificial Sequence: Synthetic oligonucleotide
cugugcaaaauugcugauu

SEQ ID NO: 2591816 - RNA, 19 nt, Artificial Sequence
  Description of Artificial Sequence: Synthetic oligonucleotide
ggcacccagggccccggug

SEQ ID NO: 2591817 - RNA, 19 nt, Artificial Sequence
  Description of Artificial Sequence: Synthetic oligonucleotide
ccgauccagugcucagcgc

SEQ ID NO: 2591818 - RNA, 19 nt, Artificial Sequence
  Description of Artificial Sequence: Synthetic oligonucleotide
ggcggugcgcagacugcag

SEQ ID NO: 2591819 - RNA, 19 nt, Artificial Sequence
  Description of Artificial Sequence: Synthetic oligonucleotide
ggcggcgcucggcacccag

SEQ ID NO: 2591820 - RNA, 19 nt, Artificial Sequence
  Description of Artificial Sequence: Synthetic oligonucleotide
cgcaccgacuggacagccg

SEQ ID NO: 2591821 - RNA, 19 nt, Artificial Sequence
  Description of Artificial Sequence: Synthetic oligonucleotide
gcgcagacugcaggccacg

SEQ ID NO: 2591822 - RNA, 19 nt, Artificial Sequence
  Description of Artificial Sequence: Synthetic oligonucleotide
gcacuguugagaguaguuu

SEQ ID NO: 2591823 - RNA, 19 nt, Artificial Sequence
  Description of Artificial Sequence: Synthetic oligonucleotide
ggcgcucggcacccagggc

SEQ ID NO: 2591824 - RNA, 19 nt, Artificial Sequence
  Description of Artificial Sequence: Synthetic oligonucleotide
cuguugagaguaguuucuu

SEQ ID NO: 2591825 - RNA, 19 nt, Artificial Sequence
  Description of Artificial Sequence: Synthetic oligonucleotide
caucaggaaguugggguuu

SEQ ID NO: 2591826 - RNA, 19 nt, Artificial Sequence
  Description of Artificial Sequence: Synthetic oligonucleotide
cggcgcucggcacccaggg

SEQ ID NO: 2591827 - RNA, 19 nt, Artificial Sequence
  Description of Artificial Sequence: Synthetic oligonucleotide
gcccacgcgcuccuagcca

SEQ ID NO: 2591828 - RNA, 19 nt, Artificial Sequence
  Description of Artificial Sequence: Synthetic oligonucleotide
caugcuggaucagguuccu

SEQ ID NO: 2591829 - RNA, 19 nt, Artificial Sequence
  Description of Artificial Sequence: Synthetic oligonucleotide
cgcucggcacccagggccc

SEQ ID NO: 2591830 - RNA, 19 nt, Artificial Sequence
  Description of Artificial Sequence: Synthetic oligonucleotide
gcucacuccucaauggauu

SEQ ID NO: 2591831 - RNA, 19 nt, Artificial Sequence
  Description of Artificial Sequence: Synthetic oligonucleotide
gacgagcccuggguuuucu

SEQ ID NO: 2591832 - RNA, 19 nt, Artificial Sequence
  Description of Artificial Sequence: Synthetic oligonucleotide
ccggugggcaggaggccac

SEQ ID NO: 2591833 - RNA, 19 nt, Artificial Sequence
  Description of Artificial Sequence: Synthetic oligonucleotide
gccaugcucacuccucaau

SEQ ID NO: 2591834 - RNA, 19 nt, Artificial Sequence
  Description of Artificial Sequence: Synthetic oligonucleotide
agggccccggugggcagga

SEQ ID NO: 2591835 - RNA, 19 nt, Artificial Sequence
  Description of Artificial Sequence: Synthetic oligonucleotide
gcggcgcucggcacccagg

SEQ ID NO: 2591836 - RNA, 19 nt, Artificial Sequence
  Description of Artificial Sequence: Synthetic oligonucleotide
ccacuguuccaauaccauu

SEQ ID NO: 2591837 - RNA, 19 nt, Artificial Sequence
  Description of Artificial Sequence: Synthetic oligonucleotide
gcaggaggccacggcggug

SEQ ID NO: 2591838 - RNA, 19 nt, Artificial Sequence
  Description of Artificial Sequence: Synthetic oligonucleotide
ggcaggaggccacggcggu

SEQ ID NO: 2591839 - RNA, 19 nt, Artificial Sequence
  Description of Artificial Sequence: Synthetic oligonucleotide
cacuggcagccuucacacu

SEQ ID NO: 2591840 - RNA, 19 nt, Artificial Sequence
  Description of Artificial Sequence: Synthetic oligonucleotide
cgcagacugcaggccacgg

SEQ ID NO: 2591841 - RNA, 19 nt, Artificial Sequence
  Description of Artificial Sequence: Synthetic oligonucleotide
cggacggcggcggcgcucg

SEQ ID NO: 2591842 - RNA, 19 nt, Artificial Sequence
  Description of Artificial Sequence: Synthetic oligonucleotide
ccugugcaaaauugcugau

SEQ ID NO: 2591843 - RNA, 19 nt, Artificial Sequence
  Description of Artificial Sequence: Synthetic oligonucleotide
cggcccacgcgcuccuagc

SEQ ID NO: 2591844 - RNA, 19 nt, Artificial Sequence
  Description of Artificial Sequence: Synthetic oligonucleotide
cccuggguuuucugcaagu

SEQ ID NO: 2591845 - RNA, 19 nt, Artificial Sequence
  Description of Artificial Sequence: Synthetic oligonucleotide
caccgacuggacagccgau

SEQ ID NO: 2591846 - RNA, 19 nt, Artificial Sequence
  Description of Artificial Sequence: Synthetic oligonucleotide
cuguacccaucaggaaguu

SEQ ID NO: 2591847 - RNA, 19 nt, Artificial Sequence
  Description of Artificial Sequence: Synthetic oligonucleotide
ggacggcggcggcgcucgg

SEQ ID NO: 2591848 - RNA, 19 nt, Artificial Sequence
  Description of Artificial Sequence: Synthetic oligonucleotide
cgcgcggacggcggcggcg

SEQ ID NO: 2591849 - RNA, 19 nt, Artificial Sequence
  Description of Artificial Sequence: Synthetic oligonucleotide
cggugggcaggaggccacg

SEQ ID NO: 2591850 - RNA, 19 nt, Artificial Sequence
  Description of Artificial Sequence: Synthetic oligonucleotide
gcggacggcggcggcgcuc

SEQ ID NO: 2591851 - RNA, 19 nt, Artificial Sequence
  Description of Artificial Sequence: Synthetic oligonucleotide
gcgcgcggacggcggcggc

SEQ ID NO: 2591852 - RNA, 19 nt, Artificial Sequence
  Description of Artificial Sequence: Synthetic oligonucleotide
ccacucgcagcgacaugau

SEQ ID NO: 2591853 - RNA, 19 nt, Artificial Sequence
  Description of Artificial Sequence: Synthetic oligonucleotide
ccgcuaacuuaagcaugcu

SEQ ID NO: 2591854 - RNA, 19 nt, Artificial Sequence
  Description of Artificial Sequence: Synthetic oligonucleotide
ccacgcgcuccuagccacu

SEQ ID NO: 2591855 - RNA, 19 nt, Artificial Sequence
  Description of Artificial Sequence: Synthetic oligonucleotide
cacggcccacgcgcuccua

SEQ ID NO: 2591856 - RNA, 19 nt, Artificial Sequence
  Description of Artificial Sequence: Synthetic oligonucleotide
ccacggcccacgcgcuccu

SEQ ID NO: 2591857 - RNA, 19 nt, Artificial Sequence
  Description of Artificial Sequence: Synthetic oligonucleotide
ccacggcggugcgcagacu

SEQ ID NO: 2591858 - RNA, 19 nt, Artificial Sequence
  Description of Artificial Sequence: Synthetic oligonucleotide
cggcggcgcucggcaccca

SEQ ID NO: 2591859 - RNA, 19 nt, Artificial Sequence
  Description of Artificial Sequence: Synthetic oligonucleotide
agugcuuugccacaagucc

SEQ ID NO: 2591860 - RNA, 19 nt, Artificial Sequence
  Description of Artificial Sequence: Synthetic oligonucleotide
ugaaauuugguuccaggcc

SEQ ID NO: 2591861 - RNA, 19 nt, Artificial Sequence
  Description of Artificial Sequence: Synthetic oligonucleotide
aucuucugaaauuugguuc

SEQ ID NO: 2591862 - RNA, 19 nt, Artificial Sequence
  Description of Artificial Sequence: Synthetic oligonucleotide
aaggguuuggcacucaucu

SEQ ID NO: 2591863 - RNA, 19 nt, Artificial Sequence
  Description of Artificial Sequence: Synthetic oligonucleotide
ucuucugaaauuugguucc

SEQ ID NO: 2591864 - RNA, 19 nt, Artificial Sequence
  Description of Artificial Sequence: Synthetic oligonucleotide
aguugcuugcgccucagcc

SEQ ID NO: 2591865 - RNA, 19 nt, Artificial Sequence
  Description of Artificial Sequence: Synthetic oligonucleotide
auucugugaagccugcagc

SEQ ID NO: 2591866 - RNA, 19 nt, Artificial Sequence
  Description of Artificial Sequence: Synthetic oligonucleotide
ucugaaauuugguuccagg

SEQ ID NO: 2591867 - RNA, 19 nt, Artificial Sequence
  Description of Artificial Sequence: Synthetic oligonucleotide
uuucucuucagguacgagc

SEQ ID NO: 2591868 - RNA, 19 nt, Artificial Sequence
  Description of Artificial Sequence: Synthetic oligonucleotide
aaacacccgcuccacaugg

SEQ ID NO: 2591869 - RNA, 19 nt, Artificial Sequence
  Description of Artificial Sequence: Synthetic oligonucleotide
gaaggagacgcucaccagg

SEQ ID NO: 2591870 - RNA, 19 nt, Artificial Sequence
  Description of Artificial Sequence: Synthetic oligonucleotide
cugaaauuugguuccaggc

SEQ ID NO: 2591871 - RNA, 19 nt, Artificial Sequence
  Description of Artificial Sequence: Synthetic oligonucleotide
uauuuucucuucagguacg

SEQ ID NO: 2591872 - RNA, 19 nt, Artificial Sequence
  Description of Artificial Sequence: Synthetic oligonucleotide
uuugguuccaggccuuagg

SEQ ID NO: 2591873 - RNA, 19 nt, Artificial Sequence
  Description of Artificial Sequence: Synthetic oligonucleotide
gauucugugaagccugcag

SEQ ID NO: 2591874 - RNA, 19 nt, Artificial Sequence
  Description of Artificial Sequence: Synthetic oligonucleotide
ucugggaagggacgaaggg

SEQ ID NO: 2591875 - RNA, 19 nt, Artificial Sequence
  Description of Artificial Sequence: Synthetic oligonucleotide
ucaaaccucagauucugug

SEQ ID NO: 2591876 - RNA, 19 nt, Artificial Sequence
  Description of Artificial Sequence: Synthetic oligonucleotide
ugggaagggacgaagggcc

SEQ ID NO: 2591877 - RNA, 19 nt, Artificial Sequence
  Description of Artificial Sequence: Synthetic oligonucleotide
ucucgaaccuugaggaggg

SEQ ID NO: 2591878 - RNA, 19 nt, Artificial Sequence
  Description of Artificial Sequence: Synthetic oligonucleotide
aaaccucagauucugugaa

SEQ ID NO: 2591879 - RNA, 19 nt, Artificial Sequence
  Description of Artificial Sequence: Synthetic oligonucleotide
acagcauccaugucaagug

SEQ ID NO: 2591880 - RNA, 19 nt, Artificial Sequence
  Description of Artificial Sequence: Synthetic oligonucleotide
ucaucuucugaaauuuggu

SEQ ID NO: 2591881 - RNA, 19 nt, Artificial Sequence
  Description of Artificial Sequence: Synthetic oligonucleotide
ucagguacgagcuucgaua

SEQ ID NO: 2591882 - RNA, 19 nt, Artificial Sequence
  Description of Artificial Sequence: Synthetic oligonucleotide
uagccucucagcuagcuug

SEQ ID NO: 2591883 - RNA, 19 nt, Artificial Sequence
  Description of Artificial Sequence: Synthetic oligonucleotide
aagucuccccaguggaugg

SEQ ID NO: 2591884 - RNA, 19 nt, Artificial Sequence
  Description of Artificial Sequence: Synthetic oligonucleotide
ucugucgaugucuugcagc

SEQ ID NO: 2591885 - RNA, 19 nt, Artificial Sequence
  Description of Artificial Sequence: Synthetic oligonucleotide
ucaacugcgggacuccuga

SEQ ID NO: 2591886 - RNA, 19 nt, Artificial Sequence
  Description of Artificial Sequence: Synthetic oligonucleotide
aagugcagccgaaugcugc

SEQ ID NO: 2591887 - RNA, 19 nt, Artificial Sequence
  Description of Artificial Sequence: Synthetic oligonucleotide
agugcuuggaugcuggcca

SEQ ID NO: 2591888 - RNA, 19 nt, Artificial Sequence
  Description of Artificial Sequence: Synthetic oligonucleotide
ucuucagguacgagcuucg

SEQ ID NO: 2591889 - RNA, 19 nt, Artificial Sequence
  Description of Artificial Sequence: Synthetic oligonucleotide
uccuguaagucugggaagg

SEQ ID NO: 2591890 - RNA, 19 nt, Artificial Sequence
  Description of Artificial Sequence: Synthetic oligonucleotide
uuggaugcuggccaagucu

SEQ ID NO: 2591891 - RNA, 19 nt, Artificial Sequence
  Description of Artificial Sequence: Synthetic oligonucleotide
guugcuugcgccucagccg

SEQ ID NO: 2591892 - RNA, 19 nt, Artificial Sequence
  Description of Artificial Sequence: Synthetic oligonucleotide
uuuggcacucaucuucuga

SEQ ID NO: 2591893 - RNA, 19 nt, Artificial Sequence
  Description of Artificial Sequence: Synthetic oligonucleotide
aacaugucagccacagagg

SEQ ID NO: 2591894 - RNA, 19 nt, Artificial Sequence
  Description of Artificial Sequence: Synthetic oligonucleotide
ucgauaaugucugucgaug

SEQ ID NO: 2591895 - RNA, 19 nt, Artificial Sequence
  Description of Artificial Sequence: Synthetic oligonucleotide
aggggcucacaacugaggg

SEQ ID NO: 2591896 - RNA, 19 nt, Artificial Sequence
  Description of Artificial Sequence: Synthetic oligonucleotide
ugucaagugcagccgaaug

SEQ ID NO: 2591897 - RNA, 19 nt, Artificial Sequence
  Description of Artificial Sequence: Synthetic oligonucleotide
aacugcgggacuccugauc

SEQ ID NO: 2591898 - RNA, 19 nt, Artificial Sequence
  Description of Artificial Sequence: Synthetic oligonucleotide
gcuucgauaaugucugucg

SEQ ID NO: 2591899 - RNA, 19 nt, Artificial Sequence
  Description of Artificial Sequence: Synthetic oligonucleotide
gaaauuugguuccaggccu

SEQ ID NO: 2591900 - RNA, 19 nt, Artificial Sequence
  Description of Artificial Sequence: Synthetic oligonucleotide
uggcuagccucucagcuag

SEQ ID NO: 2591901 - RNA, 19 nt, Artificial Sequence
  Description of Artificial Sequence: Synthetic oligonucleotide
gagggcugcacucaacugc

SEQ ID NO: 2591902 - RNA, 19 nt, Artificial Sequence
  Description of Artificial Sequence: Synthetic oligonucleotide
ggugucucgaaccuugagg

SEQ ID NO: 2591903 - RNA, 19 nt, Artificial Sequence
  Description of Artificial Sequence: Synthetic oligonucleotide
guaggucugaaacacccgc

SEQ ID NO: 2591904 - RNA, 19 nt, Artificial Sequence
  Description of Artificial Sequence: Synthetic oligonucleotide
augucuugcagccacucca

SEQ ID NO: 2591905 - RNA, 19 nt, Artificial Sequence
  Description of Artificial Sequence: Synthetic oligonucleotide
gucaagugcagccgaaugc

SEQ ID NO: 2591906 - RNA, 19 nt, Artificial Sequence
  Description of Artificial Sequence: Synthetic oligonucleotide
acaacugagggcugcagga

SEQ ID NO: 2591907 - RNA, 19 nt, Artificial Sequence
  Description of Artificial Sequence: Synthetic oligonucleotide
ugcagccgaaugcugcucg

SEQ ID NO: 2591908 - RNA, 19 nt, Artificial Sequence
  Description of Artificial Sequence: Synthetic oligonucleotide
auaaugucugucgaugucu

SEQ ID NO: 2591909 - RNA, 19 nt, Artificial Sequence
  Description of Artificial Sequence: Synthetic oligonucleotide
ucagcuagcuuguccagga

SEQ ID NO: 2591910 - RNA, 19 nt, Artificial Sequence
  Description of Artificial Sequence: Synthetic oligonucleotide
ugaaacacccgcuccacau

SEQ ID NO: 2591911 - RNA, 19 nt, Artificial Sequence
  Description of Artificial Sequence: Synthetic oligonucleotide
aggucugaaacacccgcuc

SEQ ID NO: 2591912 - RNA, 19 nt, Artificial Sequence
  Description of Artificial Sequence: Synthetic oligonucleotide
ucaagugcagccgaaugcu

SEQ ID NO: 2591913 - RNA, 19 nt, Artificial Sequence
  Description of Artificial Sequence: Synthetic oligonucleotide
acugcgggacuccugaucu

SEQ ID NO: 2591914 - RNA, 19 nt, Artificial Sequence
  Description of Artificial Sequence: Synthetic oligonucleotide
uccaugucaagugcagccg

SEQ ID NO: 2591915 - RNA, 19 nt, Artificial Sequence
  Description of Artificial Sequence: Synthetic oligonucleotide
gucucgaaccuugaggagg

SEQ ID NO: 2591916 - RNA, 19 nt, Artificial Sequence
  Description of Artificial Sequence: Synthetic oligonucleotide
gugucucgaaccuugagga

SEQ ID NO: 2591917 - RNA, 19 nt, Artificial Sequence
  Description of Artificial Sequence: Synthetic oligonucleotide
acccgcuccacauggcugc

SEQ ID NO: 2591918 - RNA, 19 nt, Artificial Sequence
  Description of Artificial Sequence: Synthetic oligonucleotide
cugcucguaggucugaaac

SEQ ID NO: 2591919 - RNA, 19 nt, Artificial Sequence
  Description of Artificial Sequence: Synthetic oligonucleotide
ucaccaggauaucuggcac

SEQ ID NO: 2591920 - RNA, 19 nt, Artificial Sequence
  Description of Artificial Sequence: Synthetic oligonucleotide
acguccucaaaccucagau

SEQ ID NO: 2591921 - RNA, 19 nt, Artificial Sequence
  Description of Artificial Sequence: Synthetic oligonucleotide
gaagccugcagcugcucag

SEQ ID NO: 2591922 - RNA, 19 nt, Artificial Sequence
  Description of Artificial Sequence: Synthetic oligonucleotide
uuggcacucaucuucugaa

SEQ ID NO: 2591923 - RNA, 19 nt, Artificial Sequence
  Description of Artificial Sequence: Synthetic oligonucleotide
uccugcaccacagggaagc

SEQ ID NO: 2591924 - RNA, 19 nt, Artificial Sequence
  Description of Artificial Sequence: Synthetic oligonucleotide
aggauaucuggcacaaggg

SEQ ID NO: 2591925 - RNA, 19 nt, Artificial Sequence
  Description of Artificial Sequence: Synthetic oligonucleotide
ugcucguaggucugaaaca

SEQ ID NO: 2591926 - RNA, 19 nt, Artificial Sequence
  Description of Artificial Sequence: Synthetic oligonucleotide
gaaaggagguauuuucucu

SEQ ID NO: 2591927 - RNA, 19 nt, Artificial Sequence
  Description of Artificial Sequence: Synthetic oligonucleotide
uugccacaaguccugcugc

SEQ ID NO: 2591928 - RNA, 19 nt, Artificial Sequence
  Description of Artificial Sequence: Synthetic oligonucleotide
gaugucuugcagccacucc

SEQ ID NO: 2591929 - RNA, 19 nt, Artificial Sequence
  Description of Artificial Sequence: Synthetic oligonucleotide
cacaacugagggcugcagg

SEQ ID NO: 2591930 - RNA, 19 nt, Artificial Sequence
  Description of Artificial Sequence: Synthetic oligonucleotide
acgagcuucgauaaugucu

SEQ ID NO: 2591931 - RNA, 19 nt, Artificial Sequence
  Description of Artificial Sequence: Synthetic oligonucleotide
ucuggcacaaggguuuggc

SEQ ID NO: 2591932 - RNA, 19 nt, Artificial Sequence
  Description of Artificial Sequence: Synthetic oligonucleotide
cugugaagccugcagcugc

SEQ ID NO: 2591933 - RNA, 19 nt, Artificial Sequence
  Description of Artificial Sequence: Synthetic oligonucleotide
uucgauaaugucugucgau

SEQ ID NO: 2591934 - RNA, 19 nt, Artificial Sequence
  Description of Artificial Sequence: Synthetic oligonucleotide
guugcugagagaggagagg

SEQ ID NO: 2591935 - RNA, 19 nt, Artificial Sequence
  Description of Artificial Sequence: Synthetic oligonucleotide
ugaagccugcagcugcuca

SEQ ID NO: 2591936 - RNA, 19 nt, Artificial Sequence
  Description of Artificial Sequence: Synthetic oligonucleotide
caaaccucagauucuguga

SEQ ID NO: 2591937 - RNA, 19 nt, Artificial Sequence
  Description of Artificial Sequence: Synthetic oligonucleotide
gaaacacccgcuccacaug

SEQ ID NO: 2591938 - RNA, 19 nt, Artificial Sequence
  Description of Artificial Sequence: Synthetic oligonucleotide
agccgaaugcugcucguag

SEQ ID NO: 2591939 - RNA, 19 nt, Artificial Sequence
  Description of Artificial Sequence: Synthetic oligonucleotide
uagcuuguccaggacaaug

SEQ ID NO: 2591940 - RNA, 19 nt, Artificial Sequence
  Description of Artificial Sequence: Synthetic oligonucleotide
uaggucugaaacacccgcu

SEQ ID NO: 2591941 - RNA, 19 nt, Artificial Sequence
  Description of Artificial Sequence: Synthetic oligonucleotide
acacugugcagcauccugg

SEQ ID NO: 2591942 - RNA, 19 nt, Artificial Sequence
  Description of Artificial Sequence: Synthetic oligonucleotide
uaagucugggaagggacga

SEQ ID NO: 2591943 - RNA, 19 nt, Artificial Sequence
  Description of Artificial Sequence: Synthetic oligonucleotide
uuuucgagggcugcacuca

SEQ ID NO: 2591944 - RNA, 19 nt, Artificial Sequence
  Description of Artificial Sequence: Synthetic oligonucleotide
ugucugucgaugucuugca

SEQ ID NO: 2591945 - RNA, 19 nt, Artificial Sequence
  Description of Artificial Sequence: Synthetic oligonucleotide
gguacgagcuucgauaaug

SEQ ID NO: 2591946 - RNA, 19 nt, Artificial Sequence
  Description of Artificial Sequence: Synthetic oligonucleotide
ugucucgaaccuugaggag

SEQ ID NO: 2591947 - RNA, 19 nt, Artificial Sequence
  Description of Artificial Sequence: Synthetic oligonucleotide
cuuuucgagggcugcacuc

SEQ ID NO: 2591948 - RNA, 19 nt, Artificial Sequence
  Description of Artificial Sequence: Synthetic oligonucleotide
ucacagcugucccuuuuca

SEQ ID NO: 2591949 - RNA, 19 nt, Artificial Sequence
  Description of Artificial Sequence: Synthetic oligonucleotide
agccacuccaacaugucag

SEQ ID NO: 2591950 - RNA, 19 nt, Artificial Sequence
  Description of Artificial Sequence: Synthetic oligonucleotide
agagaggagaggagggacg

SEQ ID NO: 2591951 - RNA, 19 nt, Artificial Sequence
  Description of Artificial Sequence: Synthetic oligonucleotide
agcuucgauaaugucuguc

SEQ ID NO: 2591952 - RNA, 19 nt, Artificial Sequence
  Description of Artificial Sequence: Synthetic oligonucleotide
gaaugcugcucguaggucu

SEQ ID NO: 2591953 - RNA, 19 nt, Artificial Sequence
  Description of Artificial Sequence: Synthetic oligonucleotide
aaggagacgcucaccagga

SEQ ID NO: 2591954 - RNA, 19 nt, Artificial Sequence
  Description of Artificial Sequence: Synthetic oligonucleotide
uucagguacgagcuucgau

SEQ ID NO: 2591955 - RNA, 19 nt, Artificial Sequence
  Description of Artificial Sequence: Synthetic oligonucleotide
aaugcugcucguaggucug

SEQ ID NO: 2591956 - RNA, 19 nt, Artificial Sequence
  Description of Artificial Sequence: Synthetic oligonucleotide
uucugaaauuugguuccag

SEQ ID NO: 2591957 - RNA, 19 nt, Artificial Sequence
  Description of Artificial Sequence: Synthetic oligonucleotide
ugugaagccugcagcugcu

SEQ ID NO: 2591958 - RNA, 19 nt, Artificial Sequence
  Description of Artificial Sequence: Synthetic oligonucleotide
uugcucagucaggagaggc

SEQ ID NO: 2591959 - RNA, 19 nt, Artificial Sequence
  Description of Artificial Sequence: Synthetic oligonucleotide
aggacaaugucgccagccu

SEQ ID NO: 2591960 - RNA, 19 nt, Artificial Sequence
  Description of Artificial Sequence: Synthetic oligonucleotide
cuccuguaagucugggaag

SEQ ID NO: 2591961 - RNA, 19 nt, Artificial Sequence
  Description of Artificial Sequence: Synthetic oligonucleotide
ucucagcuagcuuguccag

SEQ ID NO: 2591962 - RNA, 19 nt, Artificial Sequence
  Description of Artificial Sequence: Synthetic oligonucleotide
uggugucucgaaccuugag

SEQ ID NO: 2591963 - RNA, 19 nt, Artificial Sequence
  Description of Artificial Sequence: Synthetic oligonucleotide
agggaagcacuuccucagg

SEQ ID NO: 2591964 - RNA, 19 nt, Artificial Sequence
  Description of Artificial Sequence: Synthetic oligonucleotide
cucuugcucagucaggaga

SEQ ID NO: 2591965 - RNA, 19 nt, Artificial Sequence
  Description of Artificial Sequence: Synthetic oligonucleotide
ugucuugcagccacuccaa

SEQ ID NO: 2591966 - RNA, 19 nt, Artificial Sequence
  Description of Artificial Sequence: Synthetic oligonucleotide
cugggaagggacgaagggc

SEQ ID NO: 2591967 - RNA, 19 nt, Artificial Sequence
  Description of Artificial Sequence: Synthetic oligonucleotide
agcugcucagccagguugc

SEQ ID NO: 2591968 - RNA, 19 nt, Artificial Sequence
  Description of Artificial Sequence: Synthetic oligonucleotide
gaagaaggagacgcucacc

SEQ ID NO: 2591969 - RNA, 19 nt, Artificial Sequence
  Description of Artificial Sequence: Synthetic oligonucleotide
agugcagccgaaugcugcu

SEQ ID NO: 2591970 - RNA, 19 nt, Artificial Sequence
  Description of Artificial Sequence: Synthetic oligonucleotide
aggguggcuagccucucag

SEQ ID NO: 2591971 - RNA, 19 nt, Artificial Sequence
  Description of Artificial Sequence: Synthetic oligonucleotide
cucaggaccucuugcucag

SEQ ID NO: 2591972 - RNA, 19 nt, Artificial Sequence
  Description of Artificial Sequence: Synthetic oligonucleotide
ugguuccaggccuuaggca

SEQ ID NO: 2591973 - RNA, 19 nt, Artificial Sequence
  Description of Artificial Sequence: Synthetic oligonucleotide
uugaggaggguggcuagcc

SEQ ID NO: 2591974 - RNA, 19 nt, Artificial Sequence
  Description of Artificial Sequence: Synthetic oligonucleotide
gguauuuucucuucaggua

SEQ ID NO: 2591975 - RNA, 19 nt, Artificial Sequence
  Description of Artificial Sequence: Synthetic oligonucleotide
agggacgaagggccggcac

SEQ ID NO: 2591976 - RNA, 19 nt, Artificial Sequence
  Description of Artificial Sequence: Synthetic oligonucleotide
caggacaaugucgccagcc

SEQ ID NO: 2591977 - RNA, 19 nt, Artificial Sequence
  Description of Artificial Sequence: Synthetic oligonucleotide
cuucgauaaugucugucga

SEQ ID NO: 2591978 - RNA, 19 nt, Artificial Sequence
  Description of Artificial Sequence: Synthetic oligonucleotide
gaggggcucacaacugagg

SEQ ID NO: 2591979 - RNA, 19 nt, Artificial Sequence
  Description of Artificial Sequence: Synthetic oligonucleotide
cagcauccaugucaagugc

SEQ ID NO: 2591980 - RNA, 19 nt, Artificial Sequence
  Description of Artificial Sequence: Synthetic oligonucleotide
ucgaaccuugaggagggug

SEQ ID NO: 2591981 - RNA, 19 nt, Artificial Sequence
  Description of Artificial Sequence: Synthetic oligonucleotide
ugcgggacuccugaucucc

SEQ ID NO: 2591982 - RNA, 19 nt, Artificial Sequence
  Description of Artificial Sequence: Synthetic oligonucleotide
caagucuccccaguggaug

SEQ ID NO: 2591983 - RNA, 19 nt, Artificial Sequence
  Description of Artificial Sequence: Synthetic oligonucleotide
gucugaaacacccgcucca

SEQ ID NO: 2591984 - RNA, 19 nt, Artificial Sequence
  Description of Artificial Sequence: Synthetic oligonucleotide
cgagcuucgauaaugucug

SEQ ID NO: 2591985 - RNA, 19 nt, Artificial Sequence
  Description of Artificial Sequence: Synthetic oligonucleotide
aacacccgcuccacauggc

SEQ ID NO: 2591986 - RNA, 19 nt, Artificial Sequence
  Description of Artificial Sequence: Synthetic oligonucleotide
cucagcuagcuuguccagg

SEQ ID NO: 2591987 - RNA, 19 nt, Artificial Sequence
  Description of Artificial Sequence: Synthetic oligonucleotide
aggccuuaggcagugcuug

SEQ ID NO: 2591988 - RNA, 19 nt, Artificial Sequence
  Description of Artificial Sequence: Synthetic oligonucleotide
gucugggaagggacgaagg

SEQ ID NO: 2591989 - RNA, 19 nt, Artificial Sequence
  Description of Artificial Sequence: Synthetic oligonucleotide
gagugcuuugccacaaguc

SEQ ID NO: 2591990 - RNA, 19 nt, Artificial Sequence
  Description of Artificial Sequence: Synthetic oligonucleotide
ugaggaggguggcuagccu

SEQ ID NO: 2591991 - RNA, 19 nt, Artificial Sequence
  Description of Artificial Sequence: Synthetic oligonucleotide
cgaaccuugaggagggugg

SEQ ID NO: 2591992 - RNA, 19 nt, Artificial Sequence
  Description of Artificial Sequence: Synthetic oligonucleotide
ugcuggccaagucucccca

SEQ ID NO: 2591993 - RNA, 19 nt, Artificial Sequence
  Description of Artificial Sequence: Synthetic oligonucleotide
ggacgagcagcccugaaga

SEQ ID NO: 2591994 - RNA, 19 nt, Artificial Sequence
  Description of Artificial Sequence: Synthetic oligonucleotide
agucugggaagggacgaag

SEQ ID NO: 2591995 - RNA, 19 nt, Artificial Sequence
  Description of Artificial Sequence: Synthetic oligonucleotide
agcauccuggcuccuccag

SEQ ID NO: 2591996 - RNA, 19 nt, Artificial Sequence
  Description of Artificial Sequence: Synthetic oligonucleotide
cacauggcugcugauggug

SEQ ID NO: 2591997 - RNA, 19 nt, Artificial Sequence
  Description of Artificial Sequence: Synthetic oligonucleotide
gaaccuugaggaggguggc

SEQ ID NO: 2591998 - RNA, 19 nt, Artificial Sequence
  Description of Artificial Sequence: Synthetic oligonucleotide
gauggaggaaaggagguau

SEQ ID NO: 2591999 - RNA, 19 nt, Artificial Sequence
  Description of Artificial Sequence: Synthetic oligonucleotide
agguugcugagagaggaga

SEQ ID NO: 2592000 - RNA, 19 nt, Artificial Sequence
  Description of Artificial Sequence: Synthetic oligonucleotide
ucagccgcuccuguaaguc

SEQ ID NO: 2592001 - RNA, 19 nt, Artificial Sequence
  Description of Artificial Sequence: Synthetic oligonucleotide
ggucugaaacacccgcucc

SEQ ID NO: 2592002 - RNA, 19 nt, Artificial Sequence
  Description of Artificial Sequence: Synthetic oligonucleotide
cacuccaacaugucagcca

SEQ ID NO: 2592003 - RNA, 19 nt, Artificial Sequence
  Description of Artificial Sequence: Synthetic oligonucleotide
uacgagcuucgauaauguc

SEQ ID NO: 2592004 - RNA, 19 nt, Artificial Sequence
  Description of Artificial Sequence: Synthetic oligonucleotide
uuucgagggcugcacucaa

SEQ ID NO: 2592005 - RNA, 19 nt, Artificial Sequence
  Description of Artificial Sequence: Synthetic oligonucleotide
cauccaugucaagugcagc

SEQ ID NO: 2592006 - RNA, 19 nt, Artificial Sequence
  Description of Artificial Sequence: Synthetic oligonucleotide
agcuuguccaggacaaugu

SEQ ID NO: 2592007 - RNA, 19 nt, Artificial Sequence
  Description of Artificial Sequence: Synthetic oligonucleotide
auuugguuccaggccuuag

SEQ ID NO: 2592008 - RNA, 19 nt, Artificial Sequence
  Description of Artificial Sequence: Synthetic oligonucleotide
uugcagccacuccaacaug

SEQ ID NO: 2592009 - RNA, 19 nt, Artificial Sequence
  Description of Artificial Sequence: Synthetic oligonucleotide
caaggguuuggcacucauc

SEQ ID NO: 2592010 - RNA, 19 nt, Artificial Sequence
  Description of Artificial Sequence: Synthetic oligonucleotide
ggcugcacucaacugcggg

SEQ ID NO: 2592011 - RNA, 19 nt, Artificial Sequence
  Description of Artificial Sequence: Synthetic oligonucleotide
cuuggaugcuggccaaguc

SEQ ID NO: 2592012 - RNA, 19 nt, Artificial Sequence
  Description of Artificial Sequence: Synthetic oligonucleotide
caagugcagccgaaugcug

SEQ ID NO: 2592013 - RNA, 19 nt, Artificial Sequence
  Description of Artificial Sequence: Synthetic oligonucleotide
ucacaacugagggcugcag

SEQ ID NO: 2592014 - RNA, 19 nt, Artificial Sequence
  Description of Artificial Sequence: Synthetic oligonucleotide
gggacgaagggccggcacg

SEQ ID NO: 2592015 - RNA, 19 nt, Artificial Sequence
  Description of Artificial Sequence: Synthetic oligonucleotide
ugagggcugcaggacagca

SEQ ID NO: 2592016 - RNA, 19 nt, Artificial Sequence
  Description of Artificial Sequence: Synthetic oligonucleotide
gggacgagcagcccugaag

SEQ ID NO: 2592017 - RNA, 19 nt, Artificial Sequence
  Description of Artificial Sequence: Synthetic oligonucleotide
caguggauggaggaaagga

SEQ ID NO: 2592018 - RNA, 19 nt, Artificial Sequence
  Description of Artificial Sequence: Synthetic oligonucleotide
gaagggacgaagggccggc

SEQ ID NO: 2592019 - RNA, 19 nt, Artificial Sequence
  Description of Artificial Sequence: Synthetic oligonucleotide
cugcacucaacugcgggac

SEQ ID NO: 2592020 - RNA, 19 nt, Artificial Sequence
  Description of Artificial Sequence: Synthetic oligonucleotide
gucugucgaugucuugcag

SEQ ID NO: 2592021 - RNA, 19 nt, Artificial Sequence
  Description of Artificial Sequence: Synthetic oligonucleotide
ucagucaggagaggcuggu

SEQ ID NO: 2592022 - RNA, 19 nt, Artificial Sequence
  Description of Artificial Sequence: Synthetic oligonucleotide
uccuuuucgagggcugcac

SEQ ID NO: 2592023 - RNA, 19 nt, Artificial Sequence
  Description of Artificial Sequence: Synthetic oligonucleotide
ugccacaaguccugcugcu

SEQ ID NO: 2592024 - RNA, 19 nt, Artificial Sequence
  Description of Artificial Sequence: Synthetic oligonucleotide
ggaagcacuuccucaggac

SEQ ID NO: 2592025 - RNA, 19 nt, Artificial Sequence
  Description of Artificial Sequence: Synthetic oligonucleotide
ugcacucaacugcgggacu

SEQ ID NO: 2592026 - RNA, 19 nt, Artificial Sequence
  Description of Artificial Sequence: Synthetic oligonucleotide
aaauuugguuccaggccuu

SEQ ID NO: 2592027 - RNA, 19 nt, Artificial Sequence
  Description of Artificial Sequence: Synthetic oligonucleotide
ggccaagucuccccagugg

SEQ ID NO: 2592028 - RNA, 19 nt, Artificial Sequence
  Description of Artificial Sequence: Synthetic oligonucleotide
ggacuccugaucuccagac

SEQ ID NO: 2592029 - RNA, 19 nt, Artificial Sequence
  Description of Artificial Sequence: Synthetic oligonucleotide
agccuccaguugcuugcgc

SEQ ID NO: 2592030 - RNA, 19 nt, Artificial Sequence
  Description of Artificial Sequence: Synthetic oligonucleotide
gacuccugaucuccagaca

SEQ ID NO: 2592031 - RNA, 19 nt, Artificial Sequence
  Description of Artificial Sequence: Synthetic oligonucleotide
cagguugcugagagaggag

SEQ ID NO: 2592032 - RNA, 19 nt, Artificial Sequence
  Description of Artificial Sequence: Synthetic oligonucleotide
agaggggcucacaacugag

SEQ ID NO: 2592033 - RNA, 19 nt, Artificial Sequence
  Description of Artificial Sequence: Synthetic oligonucleotide
uggcacucaucuucugaaa

SEQ ID NO: 2592034 - RNA, 19 nt, Artificial Sequence
  Description of Artificial Sequence: Synthetic oligonucleotide
cagugcuuggaugcuggcc

SEQ ID NO: 2592035 - RNA, 19 nt, Artificial Sequence
  Description of Artificial Sequence: Synthetic oligonucleotide
acgagcagcccugaagagu

SEQ ID NO: 2592036 - RNA, 19 nt, Artificial Sequence
  Description of Artificial Sequence: Synthetic oligonucleotide
ucgaugucuugcagccacu

SEQ ID NO: 2592037 - RNA, 19 nt, Artificial Sequence
  Description of Artificial Sequence: Synthetic oligonucleotide
aggacagcauccaugucaa

SEQ ID NO: 2592038 - RNA, 19 nt, Artificial Sequence
  Description of Artificial Sequence: Synthetic oligonucleotide
gaagagugcuuugccacaa

SEQ ID NO: 2592039 - RNA, 19 nt, Artificial Sequence
  Description of Artificial Sequence: Synthetic oligonucleotide
cuugcucagucaggagagg

SEQ ID NO: 2592040 - RNA, 19 nt, Artificial Sequence
  Description of Artificial Sequence: Synthetic oligonucleotide
gguugcugagagaggagag

SEQ ID NO: 2592041 - RNA, 19 nt, Artificial Sequence
  Description of Artificial Sequence: Synthetic oligonucleotide
cagguacgagcuucgauaa

SEQ ID NO: 2592042 - RNA, 19 nt, Artificial Sequence
  Description of Artificial Sequence: Synthetic oligonucleotide
uucgagggcugcacucaac

SEQ ID NO: 2592043 - RNA, 19 nt, Artificial Sequence
  Description of Artificial Sequence: Synthetic oligonucleotide
gccgaaugcugcucguagg

SEQ ID NO: 2592044 - RNA, 19 nt, Artificial Sequence
  Description of Artificial Sequence: Synthetic oligonucleotide
cucaacugcgggacuccug

SEQ ID NO: 2592045 - RNA, 19 nt, Artificial Sequence
  Description of Artificial Sequence: Synthetic oligonucleotide
cuugaggaggguggcuagc

SEQ ID NO: 2592046 - RNA, 19 nt, Artificial Sequence
  Description of Artificial Sequence: Synthetic oligonucleotide
aggagaggcuggucuugag

SEQ ID NO: 2592047 - RNA, 19 nt, Artificial Sequence
  Description of Artificial Sequence: Synthetic oligonucleotide
ccucagauucugugaagcc

SEQ ID NO: 2592048 - RNA, 19 nt, Artificial Sequence
  Description of Artificial Sequence: Synthetic oligonucleotide
ugucgccagccuccaguug

SEQ ID NO: 2592049 - RNA, 19 nt, Artificial Sequence
  Description of Artificial Sequence: Synthetic oligonucleotide
ccacaaguccugcugcucc

SEQ ID NO: 2592050 - RNA, 19 nt, Artificial Sequence
  Description of Artificial Sequence: Synthetic oligonucleotide
gagacgcucaccaggauau

SEQ ID NO: 2592051 - RNA, 19 nt, Artificial Sequence
  Description of Artificial Sequence: Synthetic oligonucleotide
guuuggcacucaucuucug

SEQ ID NO: 2592052 - RNA, 19 nt, Artificial Sequence
  Description of Artificial Sequence: Synthetic oligonucleotide
aauuugguuccaggccuua

SEQ ID NO: 2592053 - RNA, 19 nt, Artificial Sequence
  Description of Artificial Sequence: Synthetic oligonucleotide
ggauaucuggcacaagggu

SEQ ID NO: 2592054 - RNA, 19 nt, Artificial Sequence
  Description of Artificial Sequence: Synthetic oligonucleotide
aaccuugaggaggguggcu

SEQ ID NO: 2592055 - RNA, 19 nt, Artificial Sequence
  Description of Artificial Sequence: Synthetic oligonucleotide
guccaggacaaugucgcca

SEQ ID NO: 2592056 - RNA, 19 nt, Artificial Sequence
  Description of Artificial Sequence: Synthetic oligonucleotide
acgcucaccaggauaucug

SEQ ID NO: 2592057 - RNA, 19 nt, Artificial Sequence
  Description of Artificial Sequence: Synthetic oligonucleotide
gccggcacguccucaaacc

SEQ ID NO: 2592058 - RNA, 19 nt, Artificial Sequence
  Description of Artificial Sequence: Synthetic oligonucleotide
cacccgcuccacauggcug

SEQ ID NO: 2592059 - RNA, 19 nt, Artificial Sequence
  Description of Artificial Sequence: Synthetic oligonucleotide
caacugagggcugcaggac

SEQ ID NO: 2592060 - RNA, 19 nt, Artificial Sequence
  Description of Artificial Sequence: Synthetic oligonucleotide
cacucaacugcgggacucc

SEQ ID NO: 2592061 - RNA, 19 nt, Artificial Sequence
  Description of Artificial Sequence: Synthetic oligonucleotide
ugcuuggaugcuggccaag

SEQ ID NO: 2592062 - RNA, 19 nt, Artificial Sequence
  Description of Artificial Sequence: Synthetic oligonucleotide
ggggcucacaacugagggc

SEQ ID NO: 2592063 - RNA, 19 nt, Artificial Sequence
  Description of Artificial Sequence: Synthetic oligonucleotide
agccgcuccuguaagucug

SEQ ID NO: 2592064 - RNA, 19 nt, Artificial Sequence
  Description of Artificial Sequence: Synthetic oligonucleotide
aagucugggaagggacgaa

SEQ ID NO: 2592065 - RNA, 19 nt, Artificial Sequence
  Description of Artificial Sequence: Synthetic oligonucleotide
cucagauucugugaagccu

SEQ ID NO: 2592066 - RNA, 19 nt, Artificial Sequence
  Description of Artificial Sequence: Synthetic oligonucleotide
cuguaagucugggaaggga

SEQ ID NO: 2592067 - RNA, 19 nt, Artificial Sequence
  Description of Artificial Sequence: Synthetic oligonucleotide
gccacuccaacaugucagc

SEQ ID NO: 2592068 - RNA, 19 nt, Artificial Sequence
  Description of Artificial Sequence: Synthetic oligonucleotide
ggacaaugucgccagccuc

SEQ ID NO: 2592069 - RNA, 19 nt, Artificial Sequence
  Description of Artificial Sequence: Synthetic oligonucleotide
cuccagacacugugcagca

SEQ ID NO: 2592070 - RNA, 19 nt, Artificial Sequence
  Description of Artificial Sequence: Synthetic oligonucleotide
ggaagggacgaagggccgg

SEQ ID NO: 2592071 - RNA, 19 nt, Artificial Sequence
  Description of Artificial Sequence: Synthetic oligonucleotide
ugucgaugucuugcagcca

SEQ ID NO: 2592072 - RNA, 19 nt, Artificial Sequence
  Description of Artificial Sequence: Synthetic oligonucleotide
acaaugucgccagccucca

SEQ ID NO: 2592073 - RNA, 19 nt, Artificial Sequence
  Description of Artificial Sequence: Synthetic oligonucleotide
gccaagucuccccagugga

SEQ ID NO: 2592074 - RNA, 19 nt, Artificial Sequence
  Description of Artificial Sequence: Synthetic oligonucleotide
ccucucagcuagcuugucc

SEQ ID NO: 2592075 - RNA, 19 nt, Artificial Sequence
  Description of Artificial Sequence: Synthetic oligonucleotide
caugucaagugcagccgaa

SEQ ID NO: 2592076 - RNA, 19 nt, Artificial Sequence
  Description of Artificial Sequence: Synthetic oligonucleotide
agauucugugaagccugca

SEQ ID NO: 2592077 - RNA, 19 nt, Artificial Sequence
  Description of Artificial Sequence: Synthetic oligonucleotide
gguggcuagccucucagcu

SEQ ID NO: 2592078 - RNA, 19 nt, Artificial Sequence
  Description of Artificial Sequence: Synthetic oligonucleotide
cagaggggcucacaacuga

SEQ ID NO: 2592079 - RNA, 19 nt, Artificial Sequence
  Description of Artificial Sequence: Synthetic oligonucleotide
cuggcacaaggguuuggca

SEQ ID NO: 2592080 - RNA, 19 nt, Artificial Sequence
  Description of Artificial Sequence: Synthetic oligonucleotide
aucuggcacaaggguuugg

SEQ ID NO: 2592081 - RNA, 19 nt, Artificial Sequence
  Description of Artificial Sequence: Synthetic oligonucleotide
accuugaggaggguggcua

SEQ ID NO: 2592082 - RNA, 19 nt, Artificial Sequence
  Description of Artificial Sequence: Synthetic oligonucleotide
ccucaaaccucagauucug

SEQ ID NO: 2592083 - RNA, 19 nt, Artificial Sequence
  Description of Artificial Sequence: Synthetic oligonucleotide
gggaagcacuuccucagga

SEQ ID NO: 2592084 - RNA, 19 nt, Artificial Sequence
  Description of Artificial Sequence: Synthetic oligonucleotide
ggccuuaggcagugcuugg

SEQ ID NO: 2592085 - RNA, 19 nt, Artificial Sequence
  Description of Artificial Sequence: Synthetic oligonucleotide
gcugcacucaacugcggga

SEQ ID NO: 2592086 - RNA, 19 nt, Artificial Sequence
  Description of Artificial Sequence: Synthetic oligonucleotide
aggguuuggcacucaucuu

SEQ ID NO: 2592087 - RNA, 19 nt, Artificial Sequence
  Description of Artificial Sequence: Synthetic oligonucleotide
cguaggucugaaacacccg

SEQ ID NO: 2592088 - RNA, 19 nt, Artificial Sequence
  Description of Artificial Sequence: Synthetic oligonucleotide
cuugcgccucagccgcucc

SEQ ID NO: 2592089 - RNA, 19 nt, Artificial Sequence
  Description of Artificial Sequence: Synthetic oligonucleotide
gacgcucaccaggauaucu

SEQ ID NO: 2592090 - RNA, 19 nt, Artificial Sequence
  Description of Artificial Sequence: Synthetic oligonucleotide
augucaagugcagccgaau

SEQ ID NO: 2592091 - RNA, 19 nt, Artificial Sequence
  Description of Artificial Sequence: Synthetic oligonucleotide
gcuagcuuguccaggacaa

SEQ ID NO: 2592092 - RNA, 19 nt, Artificial Sequence
  Description of Artificial Sequence: Synthetic oligonucleotide
gucuugcagccacuccaac

SEQ ID NO: 2592093 - RNA, 19 nt, Artificial Sequence
  Description of Artificial Sequence: Synthetic oligonucleotide
cugaaacacccgcuccaca

SEQ ID NO: 2592094 - RNA, 19 nt, Artificial Sequence
  Description of Artificial Sequence: Synthetic oligonucleotide
ggagacgcucaccaggaua

SEQ ID NO: 2592095 - RNA, 19 nt, Artificial Sequence
  Description of Artificial Sequence: Synthetic oligonucleotide
guggcuagccucucagcua

SEQ ID NO: 2592096 - RNA, 19 nt, Artificial Sequence
  Description of Artificial Sequence: Synthetic oligonucleotide
cacagcugucccuuuucaa

SEQ ID NO: 2592097 - RNA, 19 nt, Artificial Sequence
  Description of Artificial Sequence: Synthetic oligonucleotide
gaggguggcuagccucuca

SEQ ID NO: 2592098 - RNA, 19 nt, Artificial Sequence
  Description of Artificial Sequence: Synthetic oligonucleotide
agguacgagcuucgauaau

SEQ ID NO: 2592099 - RNA, 19 nt, Artificial Sequence
  Description of Artificial Sequence: Synthetic oligonucleotide
agacgcucaccaggauauc

SEQ ID NO: 2592100 - RNA, 19 nt, Artificial Sequence
  Description of Artificial Sequence: Synthetic oligonucleotide
guacgagcuucgauaaugu

SEQ ID NO: 2592101 - RNA, 19 nt, Artificial Sequence
  Description of Artificial Sequence: Synthetic oligonucleotide
aagggacgaagggccggca

SEQ ID NO: 2592102 - RNA, 19 nt, Artificial Sequence
  Description of Artificial Sequence: Synthetic oligonucleotide
cagcuagcuuguccaggac

SEQ ID NO: 2592103 - RNA, 19 nt, Artificial Sequence
  Description of Artificial Sequence: Synthetic oligonucleotide
acucaacugcgggacuccu

SEQ ID NO: 2592104 - RNA, 19 nt, Artificial Sequence
  Description of Artificial Sequence: Synthetic oligonucleotide
ugcagcauccuggcuccuc

SEQ ID NO: 2592105 - RNA, 19 nt, Artificial Sequence
  Description of Artificial Sequence: Synthetic oligonucleotide
gggcucacaacugagggcu

SEQ ID NO: 2592106 - RNA, 19 nt, Artificial Sequence
  Description of Artificial Sequence: Synthetic oligonucleotide
gugcuuugccacaaguccu

SEQ ID NO: 2592107 - RNA, 19 nt, Artificial Sequence
  Description of Artificial Sequence: Synthetic oligonucleotide
cacguccucaaaccucaga

SEQ ID NO: 2592108 - RNA, 19 nt, Artificial Sequence
  Description of Artificial Sequence: Synthetic oligonucleotide
gggaagggacgaagggccg

SEQ ID NO: 2592109 - RNA, 19 nt, Artificial Sequence
  Description of Artificial Sequence: Synthetic oligonucleotide
ccuguaagucugggaaggg

SEQ ID NO: 2592110 - RNA, 19 nt, Artificial Sequence
  Description of Artificial Sequence: Synthetic oligonucleotide
caguugcuugcgccucagc

SEQ ID NO: 2592111 - RNA, 19 nt, Artificial Sequence
  Description of Artificial Sequence: Synthetic oligonucleotide
cagccuccaguugcuugcg

SEQ ID NO: 2592112 - RNA, 19 nt, Artificial Sequence
  Description of Artificial Sequence: Synthetic oligonucleotide
agggccggcacguccucaa

SEQ ID NO: 2592113 - RNA, 19 nt, Artificial Sequence
  Description of Artificial Sequence: Synthetic oligonucleotide
cuccaguugcuugcgccuc

SEQ ID NO: 2592114 - RNA, 19 nt, Artificial Sequence
  Description of Artificial Sequence: Synthetic oligonucleotide
gggacuccugaucuccaga

SEQ ID NO: 2592115 - RNA, 19 nt, Artificial Sequence
  Description of Artificial Sequence: Synthetic oligonucleotide
agccucucagcuagcuugu

SEQ ID NO: 2592116 - RNA, 19 nt, Artificial Sequence
  Description of Artificial Sequence: Synthetic oligonucleotide
ggcacucaucuucugaaau

SEQ ID NO: 2592117 - RNA, 19 nt, Artificial Sequence
  Description of Artificial Sequence: Synthetic oligonucleotide
ugcugcucguaggucugaa

SEQ ID NO: 2592118 - RNA, 19 nt, Artificial Sequence
  Description of Artificial Sequence: Synthetic oligonucleotide
auggaggaaaggagguauu

SEQ ID NO: 2592119 - RNA, 19 nt, Artificial Sequence
  Description of Artificial Sequence: Synthetic oligonucleotide
cugagggcugcaggacagc

SEQ ID NO: 2592120 - RNA, 19 nt, Artificial Sequence
  Description of Artificial Sequence: Synthetic oligonucleotide
aggagacgcucaccaggau

SEQ ID NO: 2592121 - RNA, 19 nt, Artificial Sequence
  Description of Artificial Sequence: Synthetic oligonucleotide
ccaguggauggaggaaagg

SEQ ID NO: 2592122 - RNA, 19 nt, Artificial Sequence
  Description of Artificial Sequence: Synthetic oligonucleotide
gcucacaacugagggcugc

SEQ ID NO: 2592123 - RNA, 19 nt, Artificial Sequence
  Description of Artificial Sequence: Synthetic oligonucleotide
gcucaccaggauaucuggc

SEQ ID NO: 2592124 - RNA, 19 nt, Artificial Sequence
  Description of Artificial Sequence: Synthetic oligonucleotide
cucacaacugagggcugca

SEQ ID NO: 2592125 - RNA, 19 nt, Artificial Sequence
  Description of Artificial Sequence: Synthetic oligonucleotide
cugcucagccagguugcug

SEQ ID NO: 2592126 - RNA, 19 nt, Artificial Sequence
  Description of Artificial Sequence: Synthetic oligonucleotide
ggguggcuagccucucagc

SEQ ID NO: 2592127 - RNA, 19 nt, Artificial Sequence
  Description of Artificial Sequence: Synthetic oligonucleotide
auggugucucgaaccuuga

SEQ ID NO: 2592128 - RNA, 19 nt, Artificial Sequence
  Description of Artificial Sequence: Synthetic oligonucleotide
gcuggccaagucuccccag

SEQ ID NO: 2592129 - RNA, 19 nt, Artificial Sequence
  Description of Artificial Sequence: Synthetic oligonucleotide
cucaaaccucagauucugu

SEQ ID NO: 2592130 - RNA, 19 nt, Artificial Sequence
  Description of Artificial Sequence: Synthetic oligonucleotide
ugcuugcgccucagccgcu

SEQ ID NO: 2592131 - RNA, 19 nt, Artificial Sequence
  Description of Artificial Sequence: Synthetic oligonucleotide
ccucuugcucagucaggag

SEQ ID NO: 2592132 - RNA, 19 nt, Artificial Sequence
  Description of Artificial Sequence: Synthetic oligonucleotide
ucaggaccucuugcucagu

SEQ ID NO: 2592133 - RNA, 19 nt, Artificial Sequence
  Description of Artificial Sequence: Synthetic oligonucleotide
gcugcugauggugucucga

SEQ ID NO: 2592134 - RNA, 19 nt, Artificial Sequence
  Description of Artificial Sequence: Synthetic oligonucleotide
agucuccccaguggaugga

SEQ ID NO: 2592135 - RNA, 19 nt, Artificial Sequence
  Description of Artificial Sequence: Synthetic oligonucleotide
gccagguugcugagagagg

SEQ ID NO: 2592136 - RNA, 19 nt, Artificial Sequence
  Description of Artificial Sequence: Synthetic oligonucleotide
ccacuccaacaugucagcc

SEQ ID NO: 2592137 - RNA, 19 nt, Artificial Sequence
  Description of Artificial Sequence: Synthetic oligonucleotide
ggccggcacguccucaaac

SEQ ID NO: 2592138 - RNA, 19 nt, Artificial Sequence
  Description of Artificial Sequence: Synthetic oligonucleotide
gcagugcuuggaugcuggc

SEQ ID NO: 2592139 - RNA, 19 nt, Artificial Sequence
  Description of Artificial Sequence: Synthetic oligonucleotide
gugcuuggaugcuggccaa

SEQ ID NO: 2592140 - RNA, 19 nt, Artificial Sequence
  Description of Artificial Sequence: Synthetic oligonucleotide
cugcgggacuccugaucuc

SEQ ID NO: 2592141 - RNA, 19 nt, Artificial Sequence
  Description of Artificial Sequence: Synthetic oligonucleotide
gaggcuggucuugagccau

SEQ ID NO: 2592142 - RNA, 19 nt, Artificial Sequence
  Description of Artificial Sequence: Synthetic oligonucleotide
cacaaguccugcugcuccu

SEQ ID NO: 2592143 - RNA, 19 nt, Artificial Sequence
  Description of Artificial Sequence: Synthetic oligonucleotide
cuucagguacgagcuucga

SEQ ID NO: 2592144 - RNA, 19 nt, Artificial Sequence
  Description of Artificial Sequence: Synthetic oligonucleotide
ccaugucaagugcagccga

SEQ ID NO: 2592145 - RNA, 19 nt, Artificial Sequence
  Description of Artificial Sequence: Synthetic oligonucleotide
agggacgagcagcccugaa

SEQ ID NO: 2592146 - RNA, 19 nt, Artificial Sequence
  Description of Artificial Sequence: Synthetic oligonucleotide
gcacucaacugcgggacuc

SEQ ID NO: 2592147 - RNA, 19 nt, Artificial Sequence
  Description of Artificial Sequence: Synthetic oligonucleotide
uccaggccuuaggcagugc

SEQ ID NO: 2592148 - RNA, 19 nt, Artificial Sequence
  Description of Artificial Sequence: Synthetic oligonucleotide
ccucagccgcuccuguaag

SEQ ID NO: 2592149 - RNA, 19 nt, Artificial Sequence
  Description of Artificial Sequence: Synthetic oligonucleotide
gagcuucgauaaugucugu

SEQ ID NO: 2592150 - RNA, 19 nt, Artificial Sequence
  Description of Artificial Sequence: Synthetic oligonucleotide
gacgaagggccggcacguc

SEQ ID NO: 2592151 - RNA, 19 nt, Artificial Sequence
  Description of Artificial Sequence: Synthetic oligonucleotide
augcugcucguaggucuga

SEQ ID NO: 2592152 - RNA, 19 nt, Artificial Sequence
  Description of Artificial Sequence: Synthetic oligonucleotide
ggauggaggaaaggaggua

SEQ ID NO: 2592153 - RNA, 19 nt, Artificial Sequence
  Description of Artificial Sequence: Synthetic oligonucleotide
gagggacgagcagcccuga

SEQ ID NO: 2592154 - RNA, 19 nt, Artificial Sequence
  Description of Artificial Sequence: Synthetic oligonucleotide
gccgcuccuguaagucugg

SEQ ID NO: 2592155 - RNA, 19 nt, Artificial Sequence
  Description of Artificial Sequence: Synthetic oligonucleotide
guuccaggccuuaggcagu

SEQ ID NO: 2592156 - RNA, 19 nt, Artificial Sequence
  Description of Artificial Sequence: Synthetic oligonucleotide
gugcagccgaaugcugcuc

SEQ ID NO: 2592157 - RNA, 19 nt, Artificial Sequence
  Description of Artificial Sequence: Synthetic oligonucleotide
gcugcucguaggucugaaa

SEQ ID NO: 2592158 - RNA, 19 nt, Artificial Sequence
  Description of Artificial Sequence: Synthetic oligonucleotide
cagccgcuccuguaagucu

SEQ ID NO: 2592159 - RNA, 19 nt, Artificial Sequence
  Description of Artificial Sequence: Synthetic oligonucleotide
cgauaaugucugucgaugu

SEQ ID NO: 2592160 - RNA, 19 nt, Artificial Sequence
  Description of Artificial Sequence: Synthetic oligonucleotide
ccaggacaaugucgccagc

SEQ ID NO: 2592161 - RNA, 19 nt, Artificial Sequence
  Description of Artificial Sequence: Synthetic oligonucleotide
gccuuaggcagugcuugga

SEQ ID NO: 2592162 - RNA, 19 nt, Artificial Sequence
  Description of Artificial Sequence: Synthetic oligonucleotide
gccacaaguccugcugcuc

SEQ ID NO: 2592163 - RNA, 19 nt, Artificial Sequence
  Description of Artificial Sequence: Synthetic oligonucleotide
cuagccucucagcuagcuu

SEQ ID NO: 2592164 - RNA, 19 nt, Artificial Sequence
  Description of Artificial Sequence: Synthetic oligonucleotide
ccaguugcuugcgccucag

SEQ ID NO: 2592165 - RNA, 19 nt, Artificial Sequence
  Description of Artificial Sequence: Synthetic oligonucleotide
caggccuuaggcagugcuu

SEQ ID NO: 2592166 - RNA, 19 nt, Artificial Sequence
  Description of Artificial Sequence: Synthetic oligonucleotide
cgggacuccugaucuccag

SEQ ID NO: 2592167 - RNA, 19 nt, Artificial Sequence
  Description of Artificial Sequence: Synthetic oligonucleotide
gagggcugcaggacagcau

SEQ ID NO: 2592168 - RNA, 19 nt, Artificial Sequence
  Description of Artificial Sequence: Synthetic oligonucleotide
ggcucacaacugagggcug

SEQ ID NO: 2592169 - RNA, 19 nt, Artificial Sequence
  Description of Artificial Sequence: Synthetic oligonucleotide
gcuuggaugcuggccaagu

SEQ ID NO: 2592170 - RNA, 19 nt, Artificial Sequence
  Description of Artificial Sequence: Synthetic oligonucleotide
cgaaugcugcucguagguc

SEQ ID NO: 2592171 - RNA, 19 nt, Artificial Sequence
  Description of Artificial Sequence: Synthetic oligonucleotide
ggacgaagggccggcacgu

SEQ ID NO: 2592172 - RNA, 19 nt, Artificial Sequence
  Description of Artificial Sequence: Synthetic oligonucleotide
cagcccugaagagugcuuu

SEQ ID NO: 2592173 - RNA, 19 nt, Artificial Sequence
  Description of Artificial Sequence: Synthetic oligonucleotide
ccaggccuuaggcagugcu

SEQ ID NO: 2592174 - RNA, 19 nt, Artificial Sequence
  Description of Artificial Sequence: Synthetic oligonucleotide
cagccgaaugcugcucgua

SEQ ID NO: 2592175 - RNA, 19 nt, Artificial Sequence
  Description of Artificial Sequence: Synthetic oligonucleotide
ccgcuccuguaagucuggg

SEQ ID NO: 2592176 - RNA, 19 nt, Artificial Sequence
  Description of Artificial Sequence: Synthetic oligonucleotide
ccuuuucgagggcugcacu

SEQ ID NO: 2592177 - RNA, 19 nt, Artificial Sequence
  Description of Artificial Sequence: Synthetic oligonucleotide
gcugucccuuuucaacuuu

SEQ ID NO: 2592178 - RNA, 19 nt, Artificial Sequence
  Description of Artificial Sequence: Synthetic oligonucleotide
cuagcuuguccaggacaau

SEQ ID NO: 2592179 - RNA, 19 nt, Artificial Sequence
  Description of Artificial Sequence: Synthetic oligonucleotide
gcuugcgccucagccgcuc

SEQ ID NO: 2592180 - RNA, 19 nt, Artificial Sequence
  Description of Artificial Sequence: Synthetic oligonucleotide
ggcuagccucucagcuagc

SEQ ID NO: 2592181 - RNA, 19 nt, Artificial Sequence
  Description of Artificial Sequence: Synthetic oligonucleotide
gcagccgaaugcugcucgu

SEQ ID NO: 2592182 - RNA, 19 nt, Artificial Sequence
  Description of Artificial Sequence: Synthetic oligonucleotide
cgcuccuguaagucuggga

SEQ ID NO: 2592183 - RNA, 19 nt, Artificial Sequence
  Description of Artificial Sequence: Synthetic oligonucleotide
caacugcgggacuccugau

SEQ ID NO: 2592184 - RNA, 19 nt, Artificial Sequence
  Description of Artificial Sequence: Synthetic oligonucleotide
ccaagucuccccaguggau

SEQ ID NO: 2592185 - RNA, 19 nt, Artificial Sequence
  Description of Artificial Sequence: Synthetic oligonucleotide
gcgggacuccugaucucca

SEQ ID NO: 2592186 - RNA, 19 nt, Artificial Sequence
  Description of Artificial Sequence: Synthetic oligonucleotide
ccggcacguccucaaaccu

SEQ ID NO: 2592187 - RNA, 19 nt, Artificial Sequence
  Description of Artificial Sequence: Synthetic oligonucleotide
gggccggcacguccucaaa

SEQ ID NO: 2592188 - RNA, 19 nt, Artificial Sequence
  Description of Artificial Sequence: Synthetic oligonucleotide
cucgaaccuugaggagggu

SEQ ID NO: 2592189 - RNA, 19 nt, Artificial Sequence
  Description of Artificial Sequence: Synthetic oligonucleotide
cguccucaaaccucagauu

SEQ ID NO: 2592190 - RNA, 19 nt, Artificial Sequence
  Description of Artificial Sequence: Synthetic oligonucleotide
gcuggucuugagccaucuu

SEQ ID NO: 2592191 - RNA, 19 nt, Artificial Sequence
  Description of Artificial Sequence: Synthetic oligonucleotide
ccgcuccacauggcugcug

SEQ ID NO: 2592192 - RNA, 19 nt, Artificial Sequence
  Description of Artificial Sequence: Synthetic oligonucleotide
gcgccucagccgcuccugu

SEQ ID NO: 2592193 - RNA, 19 nt, Artificial Sequence
  Description of Artificial Sequence: Synthetic oligonucleotide
gugcagcauccuggcuccu

SEQ ID NO: 2592194 - RNA, 19 nt, Artificial Sequence
  Description of Artificial Sequence: Synthetic oligonucleotide
cccgcuccacauggcugcu

SEQ ID NO: 2592195 - RNA, 19 nt, Artificial Sequence
  Description of Artificial Sequence: Synthetic oligonucleotide
uuuucagacacauagauac

SEQ ID NO: 2592196 - RNA, 19 nt, Artificial Sequence
  Description of Artificial Sequence: Synthetic oligonucleotide
gaaauuucggauuucaacc

SEQ ID NO: 2592197 - RNA, 19 nt, Artificial Sequence
  Description of Artificial Sequence: Synthetic oligonucleotide
aauaacaacguugaugggg

SEQ ID NO: 2592198 - RNA, 19 nt, Artificial Sequence
  Description of Artificial Sequence: Synthetic oligonucleotide
ugaaacaaguucaauauca

SEQ ID NO: 2592199 - RNA, 19 nt, Artificial Sequence
  Description of Artificial Sequence: Synthetic oligonucleotide
agaaauuucggauuucaac

SEQ ID NO: 2592200 - RNA, 19 nt, Artificial Sequence
  Description of Artificial Sequence: Synthetic oligonucleotide
auuaauucauccuuuuggg

SEQ ID NO: 2592201 - RNA, 19 nt, Artificial Sequence
  Description of Artificial Sequence: Synthetic oligonucleotide
aaugucgacggucugauug

SEQ ID NO: 2592202 - RNA, 19 nt, Artificial Sequence
  Description of Artificial Sequence: Synthetic oligonucleotide
ucggauuucaaccaaagac

SEQ ID NO: 2592203 - RNA, 19 nt, Artificial Sequence
  Description of Artificial Sequence: Synthetic oligonucleotide
uuuauugucccaaaagaca

SEQ ID NO: 2592204 - RNA, 19 nt, Artificial Sequence
  Description of Artificial Sequence: Synthetic oligonucleotide
ucauucucgcaguagaugg

SEQ ID NO: 2592205 - RNA, 19 nt, Artificial Sequence
  Description of Artificial Sequence: Synthetic oligonucleotide
uuaacuuaggucuuacuca

SEQ ID NO: 2592206 - RNA, 19 nt, Artificial Sequence
  Description of Artificial Sequence: Synthetic oligonucleotide
ugugauugaagucccuucg

SEQ ID NO: 2592207 - RNA, 19 nt, Artificial Sequence
  Description of Artificial Sequence: Synthetic oligonucleotide
uucacaaugacugugcgcc

SEQ ID NO: 2592208 - RNA, 19 nt, Artificial Sequence
  Description of Artificial Sequence: Synthetic oligonucleotide
acagaccucaucuuguagc

SEQ ID NO: 2592209 - RNA, 19 nt, Artificial Sequence
  Description of Artificial Sequence: Synthetic oligonucleotide
uuauugucccaaaagacac

SEQ ID NO: 2592210 - RNA, 19 nt, Artificial Sequence
  Description of Artificial Sequence: Synthetic oligonucleotide
aaucguacuuaauucagga

SEQ ID NO: 2592211 - RNA, 19 nt, Artificial Sequence
  Description of Artificial Sequence: Synthetic oligonucleotide
gauggggcaagagagaacg

SEQ ID NO: 2592212 - RNA, 19 nt, Artificial Sequence
  Description of Artificial Sequence: Synthetic oligonucleotide
uaauucaggaucuuguuuc

SEQ ID NO: 2592213 - RNA, 19 nt, Artificial Sequence
  Description of Artificial Sequence: Synthetic oligonucleotide
uuucacccaagaaauuucg

SEQ ID NO: 2592214 - RNA, 19 nt, Artificial Sequence
  Description of Artificial Sequence: Synthetic oligonucleotide
aaauuucggauuucaacca

SEQ ID NO: 2592215 - RNA, 19 nt, Artificial Sequence
  Description of Artificial Sequence: Synthetic oligonucleotide
ucguacuuaauucaggauc

SEQ ID NO: 2592216 - RNA, 19 nt, Artificial Sequence
  Description of Artificial Sequence: Synthetic oligonucleotide
cuuuauugucccaaaagac

SEQ ID NO: 2592217 - RNA, 19 nt, Artificial Sequence
  Description of Artificial Sequence: Synthetic oligonucleotide
uuaggucuuacucaucagc

SEQ ID NO: 2592218 - RNA, 19 nt, Artificial Sequence
  Description of Artificial Sequence: Synthetic oligonucleotide
uucaaggauuaauucaucc

SEQ ID NO: 2592219 - RNA, 19 nt, Artificial Sequence
  Description of Artificial Sequence: Synthetic oligonucleotide
auuugaaacaaguucaaua

SEQ ID NO: 2592220 - RNA, 19 nt, Artificial Sequence
  Description of Artificial Sequence: Synthetic oligonucleotide
uccugaauaacaacguuga

SEQ ID NO: 2592221 - RNA, 19 nt, Artificial Sequence
  Description of Artificial Sequence: Synthetic oligonucleotide
aggaucuuguuucuggaac

SEQ ID NO: 2592222 - RNA, 19 nt, Artificial Sequence
  Description of Artificial Sequence: Synthetic oligonucleotide
agugugacucccuugauca

SEQ ID NO: 2592223 - RNA, 19 nt, Artificial Sequence
  Description of Artificial Sequence: Synthetic oligonucleotide
auacaagucuuuauugucc

SEQ ID NO: 2592224 - RNA, 19 nt, Artificial Sequence
  Description of Artificial Sequence: Synthetic oligonucleotide
guuaacuuaggucuuacuc

SEQ ID NO: 2592225 - RNA, 19 nt, Artificial Sequence
  Description of Artificial Sequence: Synthetic oligonucleotide
uaggucuuacucaucagcc

SEQ ID NO: 2592226 - RNA, 19 nt, Artificial Sequence
  Description of Artificial Sequence: Synthetic oligonucleotide
aguagauggggcaagagag

SEQ ID NO: 2592227 - RNA, 19 nt, Artificial Sequence
  Description of Artificial Sequence: Synthetic oligonucleotide
ucuagggcccuucacaaug

SEQ ID NO: 2592228 - RNA, 19 nt, Artificial Sequence
  Description of Artificial Sequence: Synthetic oligonucleotide
uaucauuuccuucaaggau

SEQ ID NO: 2592229 - RNA, 19 nt, Artificial Sequence
  Description of Artificial Sequence: Synthetic oligonucleotide
ucuacauugaugugauuga

SEQ ID NO: 2592230 - RNA, 19 nt, Artificial Sequence
  Description of Artificial Sequence: Synthetic oligonucleotide
ugauugcugagaauggucu

SEQ ID NO: 2592231 - RNA, 19 nt, Artificial Sequence
  Description of Artificial Sequence: Synthetic oligonucleotide
agagagaacguccuucguc

SEQ ID NO: 2592232 - RNA, 19 nt, Artificial Sequence
  Description of Artificial Sequence: Synthetic oligonucleotide
gauugaagucccuucggag

SEQ ID NO: 2592233 - RNA, 19 nt, Artificial Sequence
  Description of Artificial Sequence: Synthetic oligonucleotide
ucaaggauuaauucauccu

SEQ ID NO: 2592234 - RNA, 19 nt, Artificial Sequence
  Description of Artificial Sequence: Synthetic oligonucleotide
agugagcauacacagaccu

SEQ ID NO: 2592235 - RNA, 19 nt, Artificial Sequence
  Description of Artificial Sequence: Synthetic oligonucleotide
caaaucguacuuaauucag

SEQ ID NO: 2592236 - RNA, 19 nt, Artificial Sequence
  Description of Artificial Sequence: Synthetic oligonucleotide
uuucggauuucaaccaaag

SEQ ID NO: 2592237 - RNA, 19 nt, Artificial Sequence
  Description of Artificial Sequence: Synthetic oligonucleotide
aaccaaagacccguucucc

SEQ ID NO: 2592238 - RNA, 19 nt, Artificial Sequence
  Description of Artificial Sequence: Synthetic oligonucleotide
aaaucguacuuaauucagg

SEQ ID NO: 2592239 - RNA, 19 nt, Artificial Sequence
  Description of Artificial Sequence: Synthetic oligonucleotide
acuuaggucuuacucauca

SEQ ID NO: 2592240 - RNA, 19 nt, Artificial Sequence
  Description of Artificial Sequence: Synthetic oligonucleotide
cauuugucuacccggagcc

SEQ ID NO: 2592241 - RNA, 19 nt, Artificial Sequence
  Description of Artificial Sequence: Synthetic oligonucleotide
accuguucucauccgaacc

SEQ ID NO: 2592242 - RNA, 19 nt, Artificial Sequence
  Description of Artificial Sequence: Synthetic oligonucleotide
aacuguuguggcuugcuga

SEQ ID NO: 2592243 - RNA, 19 nt, Artificial Sequence
  Description of Artificial Sequence: Synthetic oligonucleotide
ugagcauacacagaccuca

SEQ ID NO: 2592244 - RNA, 19 nt, Artificial Sequence
  Description of Artificial Sequence: Synthetic oligonucleotide
uacaagucuuuauuguccc

SEQ ID NO: 2592245 - RNA, 19 nt, Artificial Sequence
  Description of Artificial Sequence: Synthetic oligonucleotide
guagcggaaacccagugug

SEQ ID NO: 2592246 - RNA, 19 nt, Artificial Sequence
  Description of Artificial Sequence: Synthetic oligonucleotide
ucacccaagaaauuucgga

SEQ ID NO: 2592247 - RNA, 19 nt, Artificial Sequence
  Description of Artificial Sequence: Synthetic oligonucleotide
uuuucacccaagaaauuuc

SEQ ID NO: 2592248 - RNA, 19 nt, Artificial Sequence
  Description of Artificial Sequence: Synthetic oligonucleotide
aauucaggaucuuguuucu

SEQ ID NO: 2592249 - RNA, 19 nt, Artificial Sequence
  Description of Artificial Sequence: Synthetic oligonucleotide
ucuguuaccccaccauuug

SEQ ID NO: 2592250 - RNA, 19 nt, Artificial Sequence
  Description of Artificial Sequence: Synthetic oligonucleotide
uuaauucaggaucuuguuu

SEQ ID NO: 2592251 - RNA, 19 nt, Artificial Sequence
  Description of Artificial Sequence: Synthetic oligonucleotide
auuucaaccaaagacccgu

SEQ ID NO: 2592252 - RNA, 19 nt, Artificial Sequence
  Description of Artificial Sequence: Synthetic oligonucleotide
ucuuguuucuggaacuggu

SEQ ID NO: 2592253 - RNA, 19 nt, Artificial Sequence
  Description of Artificial Sequence: Synthetic oligonucleotide
ugauugaagucccuucgga

SEQ ID NO: 2592254 - RNA, 19 nt, Artificial Sequence
  Description of Artificial Sequence: Synthetic oligonucleotide
uucacccaagaaauuucgg

SEQ ID NO: 2592255 - RNA, 19 nt, Artificial Sequence
  Description of Artificial Sequence: Synthetic oligonucleotide
caugacugcagaugguccg

SEQ ID NO: 2592256 - RNA, 19 nt, Artificial Sequence
  Description of Artificial Sequence: Synthetic oligonucleotide
uucucauccgaacccugcg

SEQ ID NO: 2592257 - RNA, 19 nt, Artificial Sequence
  Description of Artificial Sequence: Synthetic oligonucleotide
augugauugaagucccuuc

SEQ ID NO: 2592258 - RNA, 19 nt, Artificial Sequence
  Description of Artificial Sequence: Synthetic oligonucleotide
augucgacggucugauugc

SEQ ID NO: 2592259 - RNA, 19 nt, Artificial Sequence
  Description of Artificial Sequence: Synthetic oligonucleotide
uucugaacaugacugcaga

SEQ ID NO: 2592260 - RNA, 19 nt, Artificial Sequence
  Description of Artificial Sequence: Synthetic oligonucleotide
agaauggucuucauucucg

SEQ ID NO: 2592261 - RNA, 19 nt, Artificial Sequence
  Description of Artificial Sequence: Synthetic oligonucleotide
aacaagcaacaccuguucu

SEQ ID NO: 2592262 - RNA, 19 nt, Artificial Sequence
  Description of Artificial Sequence: Synthetic oligonucleotide
ugugcgccccuucagagug

SEQ ID NO: 2592263 - RNA, 19 nt, Artificial Sequence
  Description of Artificial Sequence: Synthetic oligonucleotide
gagagaacguccuucguca

SEQ ID NO: 2592264 - RNA, 19 nt, Artificial Sequence
  Description of Artificial Sequence: Synthetic oligonucleotide
auacacagaccucaucuug

SEQ ID NO: 2592265 - RNA, 19 nt, Artificial Sequence
  Description of Artificial Sequence: Synthetic oligonucleotide
caucuuguagcggaaaccc

SEQ ID NO: 2592266 - RNA, 19 nt, Artificial Sequence
  Description of Artificial Sequence: Synthetic oligonucleotide
aguucaauaucauuuccuu

SEQ ID NO: 2592267 - RNA, 19 nt, Artificial Sequence
  Description of Artificial Sequence: Synthetic oligonucleotide
ggaggauuccucuagggcc

SEQ ID NO: 2592268 - RNA, 19 nt, Artificial Sequence
  Description of Artificial Sequence: Synthetic oligonucleotide
uugaaacaaguucaauauc

SEQ ID NO: 2592269 - RNA, 19 nt, Artificial Sequence
  Description of Artificial Sequence: Synthetic oligonucleotide
uucccgaggagacucagcu

SEQ ID NO: 2592270 - RNA, 19 nt, Artificial Sequence
  Description of Artificial Sequence: Synthetic oligonucleotide
uaacuuaggucuuacucau

SEQ ID NO: 2592271 - RNA, 19 nt, Artificial Sequence
  Description of Artificial Sequence: Synthetic oligonucleotide
ucucauccgaacccugcgg

SEQ ID NO: 2592272 - RNA, 19 nt, Artificial Sequence
  Description of Artificial Sequence: Synthetic oligonucleotide
cuggaacugguuaacuuag

SEQ ID NO: 2592273 - RNA, 19 nt, Artificial Sequence
  Description of Artificial Sequence: Synthetic oligonucleotide
uguuguggcuugcugaauc

SEQ ID NO: 2592274 - RNA, 19 nt, Artificial Sequence
  Description of Artificial Sequence: Synthetic oligonucleotide
cacuguucccuuuucagac

SEQ ID NO: 2592275 - RNA, 19 nt, Artificial Sequence
  Description of Artificial Sequence: Synthetic oligonucleotide
uuucagacacauagauacc

SEQ ID NO: 2592276 - RNA, 19 nt, Artificial Sequence
  Description of Artificial Sequence: Synthetic oligonucleotide
cagaccucaucuuguagcg

SEQ ID NO: 2592277 - RNA, 19 nt, Artificial Sequence
  Description of Artificial Sequence: Synthetic oligonucleotide
uacacagaccucaucuugu

SEQ ID NO: 2592278 - RNA, 19 nt, Artificial Sequence
  Description of Artificial Sequence: Synthetic oligonucleotide
cuugaucauguucugaaca

SEQ ID NO: 2592279 - RNA, 19 nt, Artificial Sequence
  Description of Artificial Sequence: Synthetic oligonucleotide
uucaauauacaagucuuua

SEQ ID NO: 2592280 - RNA, 19 nt, Artificial Sequence
  Description of Artificial Sequence: Synthetic oligonucleotide
aacaccuguucucauccga

SEQ ID NO: 2592281 - RNA, 19 nt, Artificial Sequence
  Description of Artificial Sequence: Synthetic oligonucleotide
uccucuagggcccuucaca

SEQ ID NO: 2592282 - RNA, 19 nt, Artificial Sequence
  Description of Artificial Sequence: Synthetic oligonucleotide
acuuaauucaggaucuugu

SEQ ID NO: 2592283 - RNA, 19 nt, Artificial Sequence
  Description of Artificial Sequence: Synthetic oligonucleotide
aacuuccugauaucuuugu

SEQ ID NO: 2592284 - RNA, 19 nt, Artificial Sequence
  Description of Artificial Sequence: Synthetic oligonucleotide
uguagcggaaacccagugu

SEQ ID NO: 2592285 - RNA, 19 nt, Artificial Sequence
  Description of Artificial Sequence: Synthetic oligonucleotide
aagacaccccaaaucguac

SEQ ID NO: 2592286 - RNA, 19 nt, Artificial Sequence
  Description of Artificial Sequence: Synthetic oligonucleotide
ggcuugcugaaucagagcc

SEQ ID NO: 2592287 - RNA, 19 nt, Artificial Sequence
  Description of Artificial Sequence: Synthetic oligonucleotide
gaucauguucugaacauga

SEQ ID NO: 2592288 - RNA, 19 nt, Artificial Sequence
  Description of Artificial Sequence: Synthetic oligonucleotide
gaauaacaacguugauggg

SEQ ID NO: 2592289 - RNA, 19 nt, Artificial Sequence
  Description of Artificial Sequence: Synthetic oligonucleotide
uucggaggauuccucuagg

SEQ ID NO: 2592290 - RNA, 19 nt, Artificial Sequence
  Description of Artificial Sequence: Synthetic oligonucleotide
ucaucuuguagcggaaacc

SEQ ID NO: 2592291 - RNA, 19 nt, Artificial Sequence
  Description of Artificial Sequence: Synthetic oligonucleotide
uucggauuucaaccaaaga

SEQ ID NO: 2592292 - RNA, 19 nt, Artificial Sequence
  Description of Artificial Sequence: Synthetic oligonucleotide
uuccugauaucuuuguuuu

SEQ ID NO: 2592293 - RNA, 19 nt, Artificial Sequence
  Description of Artificial Sequence: Synthetic oligonucleotide
gaauggucuucauucucgc

SEQ ID NO: 2592294 - RNA, 19 nt, Artificial Sequence
  Description of Artificial Sequence: Synthetic oligonucleotide
gauuucaaccaaagacccg

SEQ ID NO: 2592295 - RNA, 19 nt, Artificial Sequence
  Description of Artificial Sequence: Synthetic oligonucleotide
auaacaacguugaugggga

SEQ ID NO: 2592296 - RNA, 19 nt, Artificial Sequence
  Description of Artificial Sequence: Synthetic oligonucleotide
ugagaauggucuucauucu

SEQ ID NO: 2592297 - RNA, 19 nt, Artificial Sequence
  Description of Artificial Sequence: Synthetic oligonucleotide
uguuaccccaccauuuguc

SEQ ID NO: 2592298 - RNA, 19 nt, Artificial Sequence
  Description of Artificial Sequence: Synthetic oligonucleotide
ucgacggucugauugcuga

SEQ ID NO: 2592299 - RNA, 19 nt, Artificial Sequence
  Description of Artificial Sequence: Synthetic oligonucleotide
ucggaggauuccucuaggg

SEQ ID NO: 2592300 - RNA, 19 nt, Artificial Sequence
  Description of Artificial Sequence: Synthetic oligonucleotide
aauuugaaacaaguucaau

SEQ ID NO: 2592301 - RNA, 19 nt, Artificial Sequence
  Description of Artificial Sequence: Synthetic oligonucleotide
uucauucucgcaguagaug

SEQ ID NO: 2592302 - RNA, 19 nt, Artificial Sequence
  Description of Artificial Sequence: Synthetic oligonucleotide
uacuuaauucaggaucuug

SEQ ID NO: 2592303 - RNA, 19 nt, Artificial Sequence
  Description of Artificial Sequence: Synthetic oligonucleotide
ggucugauugcugagaaug

SEQ ID NO: 2592304 - RNA, 19 nt, Artificial Sequence
  Description of Artificial Sequence: Synthetic oligonucleotide
acucccuugaucauguucu

SEQ ID NO: 2592305 - RNA, 19 nt, Artificial Sequence
  Description of Artificial Sequence: Synthetic oligonucleotide
auucucgcaguagaugggg

SEQ ID NO: 2592306 - RNA, 19 nt, Artificial Sequence
  Description of Artificial Sequence: Synthetic oligonucleotide
cauugaugugauugaaguc

SEQ ID NO: 2592307 - RNA, 19 nt, Artificial Sequence
  Description of Artificial Sequence: Synthetic oligonucleotide
aaaagacaccccaaaucgu

SEQ ID NO: 2592308 - RNA, 19 nt, Artificial Sequence
  Description of Artificial Sequence: Synthetic oligonucleotide
aaagacaccccaaaucgua

SEQ ID NO: 2592309 - RNA, 19 nt, Artificial Sequence
  Description of Artificial Sequence: Synthetic oligonucleotide
agcggaaacccagugugac

SEQ ID NO: 2592310 - RNA, 19 nt, Artificial Sequence
  Description of Artificial Sequence: Synthetic oligonucleotide
cugauugcugagaaugguc

SEQ ID NO: 2592311 - RNA, 19 nt, Artificial Sequence
  Description of Artificial Sequence: Synthetic oligonucleotide
acaacguugauggggaagu

SEQ ID NO: 2592312 - RNA, 19 nt, Artificial Sequence
  Description of Artificial Sequence: Synthetic oligonucleotide
ggauuucaaccaaagaccc

SEQ ID NO: 2592313 - RNA, 19 nt, Artificial Sequence
  Description of Artificial Sequence: Synthetic oligonucleotide
ugugacucccuugaucaug

SEQ ID NO: 2592314 - RNA, 19 nt, Artificial Sequence
  Description of Artificial Sequence: Synthetic oligonucleotide
acacauagauaccauccaa

SEQ ID NO: 2592315 - RNA, 19 nt, Artificial Sequence
  Description of Artificial Sequence: Synthetic oligonucleotide
uuugggcuugagaaacaga

SEQ ID NO: 2592316 - RNA, 19 nt, Artificial Sequence
  Description of Artificial Sequence: Synthetic oligonucleotide
uuguagcggaaacccagug

SEQ ID NO: 2592317 - RNA, 19 nt, Artificial Sequence
  Description of Artificial Sequence: Synthetic oligonucleotide
acugugcgccccuucagag

SEQ ID NO: 2592318 - RNA, 19 nt, Artificial Sequence
  Description of Artificial Sequence: Synthetic oligonucleotide
ucugauugcugagaauggu

SEQ ID NO: 2592319 - RNA, 19 nt, Artificial Sequence
  Description of Artificial Sequence: Synthetic oligonucleotide
agcauacacagaccucauc

SEQ ID NO: 2592320 - RNA, 19 nt, Artificial Sequence
  Description of Artificial Sequence: Synthetic oligonucleotide
ucucgcaguagauggggca

SEQ ID NO: 2592321 - RNA, 19 nt, Artificial Sequence
  Description of Artificial Sequence: Synthetic oligonucleotide
cuuaggucuuacucaucag

SEQ ID NO: 2592322 - RNA, 19 nt, Artificial Sequence
  Description of Artificial Sequence: Synthetic oligonucleotide
gaggauuccucuagggccc

SEQ ID NO: 2592323 - RNA, 19 nt, Artificial Sequence
  Description of Artificial Sequence: Synthetic oligonucleotide
cuucggaggauuccucuag

SEQ ID NO: 2592324 - RNA, 19 nt, Artificial Sequence
  Description of Artificial Sequence: Synthetic oligonucleotide
uaccccaccauuugucuac

SEQ ID NO: 2592325 - RNA, 19 nt, Artificial Sequence
  Description of Artificial Sequence: Synthetic oligonucleotide
ugcugaaucagagccgcug

SEQ ID NO: 2592326 - RNA, 19 nt, Artificial Sequence
  Description of Artificial Sequence: Synthetic oligonucleotide
ggucuuacucaucagccug

SEQ ID NO: 2592327 - RNA, 19 nt, Artificial Sequence
  Description of Artificial Sequence: Synthetic oligonucleotide
aagagagaacguccuucgu

SEQ ID NO: 2592328 - RNA, 19 nt, Artificial Sequence
  Description of Artificial Sequence: Synthetic oligonucleotide
acguugauggggaagugag

SEQ ID NO: 2592329 - RNA, 19 nt, Artificial Sequence
  Description of Artificial Sequence: Synthetic oligonucleotide
uucaaccaaagacccguuc

SEQ ID NO: 2592330 - RNA, 19 nt, Artificial Sequence
  Description of Artificial Sequence: Synthetic oligonucleotide
ugggcuugagaaacagaac

SEQ ID NO: 2592331 - RNA, 19 nt, Artificial Sequence
  Description of Artificial Sequence: Synthetic oligonucleotide
guggcuugcugaaucagag

SEQ ID NO: 2592332 - RNA, 19 nt, Artificial Sequence
  Description of Artificial Sequence: Synthetic oligonucleotide
ggauuaauucauccuuuug

SEQ ID NO: 2592333 - RNA, 19 nt, Artificial Sequence
  Description of Artificial Sequence: Synthetic oligonucleotide
uagauggggcaagagagaa

SEQ ID NO: 2592334 - RNA, 19 nt, Artificial Sequence
  Description of Artificial Sequence: Synthetic oligonucleotide
gucugauugcugagaaugg

SEQ ID NO: 2592335 - RNA, 19 nt, Artificial Sequence
  Description of Artificial Sequence: Synthetic oligonucleotide
cuucaaggauuaauucauc

SEQ ID NO: 2592336 - RNA, 19 nt, Artificial Sequence
  Description of Artificial Sequence: Synthetic oligonucleotide
cccaaaucguacuuaauuc

SEQ ID NO: 2592337 - RNA, 19 nt, Artificial Sequence
  Description of Artificial Sequence: Synthetic oligonucleotide
agucccuucggaggauucc

SEQ ID NO: 2592338 - RNA, 19 nt, Artificial Sequence
  Description of Artificial Sequence: Synthetic oligonucleotide
gacucccuugaucauguuc

SEQ ID NO: 2592339 - RNA, 19 nt, Artificial Sequence
  Description of Artificial Sequence: Synthetic oligonucleotide
accaaagacccguucuccu

SEQ ID NO: 2592340 - RNA, 19 nt, Artificial Sequence
  Description of Artificial Sequence: Synthetic oligonucleotide
uucucgcaguagauggggc

SEQ ID NO: 2592341 - RNA, 19 nt, Artificial Sequence
  Description of Artificial Sequence: Synthetic oligonucleotide
aggucuuacucaucagccu

SEQ ID NO: 2592342 - RNA, 19 nt, Artificial Sequence
  Description of Artificial Sequence: Synthetic oligonucleotide
cacauagauaccauccaaa

SEQ ID NO: 2592343 - RNA, 19 nt, Artificial Sequence
  Description of Artificial Sequence: Synthetic oligonucleotide
uuuaacuguuguggcuugc

SEQ ID NO: 2592344 - RNA, 19 nt, Artificial Sequence
  Description of Artificial Sequence: Synthetic oligonucleotide
aucguacuuaauucaggau

SEQ ID NO: 2592345 - RNA, 19 nt, Artificial Sequence
  Description of Artificial Sequence: Synthetic oligonucleotide
uggaaugucgacggucuga

SEQ ID NO: 2592346 - RNA, 19 nt, Artificial Sequence
  Description of Artificial Sequence: Synthetic oligonucleotide
agccgcugaauuugaaaca

SEQ ID NO: 2592347 - RNA, 19 nt, Artificial Sequence
  Description of Artificial Sequence: Synthetic oligonucleotide
accauuugucuacccggag

SEQ ID NO: 2592348 - RNA, 19 nt, Artificial Sequence
  Description of Artificial Sequence: Synthetic oligonucleotide
ucagagccgcugaauuuga

SEQ ID NO: 2592349 - RNA, 19 nt, Artificial Sequence
  Description of Artificial Sequence: Synthetic oligonucleotide
uuugucuacccggagccuc

SEQ ID NO: 2592350 - RNA, 19 nt, Artificial Sequence
  Description of Artificial Sequence: Synthetic oligonucleotide
ccaccauuugucuacccgg

SEQ ID NO: 2592351 - RNA, 19 nt, Artificial Sequence
  Description of Artificial Sequence: Synthetic oligonucleotide
agagccgcugaauuugaaa

SEQ ID NO: 2592352 - RNA, 19 nt, Artificial Sequence
  Description of Artificial Sequence: Synthetic oligonucleotide
agacccguucuccugaaua

SEQ ID NO: 2592353 - RNA, 19 nt, Artificial Sequence
  Description of Artificial Sequence: Synthetic oligonucleotide
ugauggggaagugagcaua

SEQ ID NO: 2592354 - RNA, 19 nt, Artificial Sequence
  Description of Artificial Sequence: Synthetic oligonucleotide
aacuuaggucuuacucauc

SEQ ID NO: 2592355 - RNA, 19 nt, Artificial Sequence
  Description of Artificial Sequence: Synthetic oligonucleotide
uugcugagaauggucuuca

SEQ ID NO: 2592356 - RNA, 19 nt, Artificial Sequence
  Description of Artificial Sequence: Synthetic oligonucleotide
augacugcagaugguccgg

SEQ ID NO: 2592357 - RNA, 19 nt, Artificial Sequence
  Description of Artificial Sequence: Synthetic oligonucleotide
uggcuugcugaaucagagc

SEQ ID NO: 2592358 - RNA, 19 nt, Artificial Sequence
  Description of Artificial Sequence: Synthetic oligonucleotide
ugaugugauugaagucccu

SEQ ID NO: 2592359 - RNA, 19 nt, Artificial Sequence
  Description of Artificial Sequence: Synthetic oligonucleotide
uugucuacccggagccucu

SEQ ID NO: 2592360 - RNA, 19 nt, Artificial Sequence
  Description of Artificial Sequence: Synthetic oligonucleotide
agaacaagcaacaccuguu

SEQ ID NO: 2592361 - RNA, 19 nt, Artificial Sequence
  Description of Artificial Sequence: Synthetic oligonucleotide
cuuuucagacacauagaua

SEQ ID NO: 2592362 - RNA, 19 nt, Artificial Sequence
  Description of Artificial Sequence: Synthetic oligonucleotide
acaagucuuuauuguccca

SEQ ID NO: 2592363 - RNA, 19 nt, Artificial Sequence
  Description of Artificial Sequence: Synthetic oligonucleotide
ucacaaugacugugcgccc

SEQ ID NO: 2592364 - RNA, 19 nt, Artificial Sequence
  Description of Artificial Sequence: Synthetic oligonucleotide
auccgaacccugcggaugu

SEQ ID NO: 2592365 - RNA, 19 nt, Artificial Sequence
  Description of Artificial Sequence: Synthetic oligonucleotide
caguagauggggcaagaga

SEQ ID NO: 2592366 - RNA, 19 nt, Artificial Sequence
  Description of Artificial Sequence: Synthetic oligonucleotide
aaagacccguucuccugaa

SEQ ID NO: 2592367 - RNA, 19 nt, Artificial Sequence
  Description of Artificial Sequence: Synthetic oligonucleotide
ccaaaucguacuuaauuca

SEQ ID NO: 2592368 - RNA, 19 nt, Artificial Sequence
  Description of Artificial Sequence: Synthetic oligonucleotide
cacagaccucaucuuguag

SEQ ID NO: 2592369 - RNA, 19 nt, Artificial Sequence
  Description of Artificial Sequence: Synthetic oligonucleotide
caacaccuguucucauccg

SEQ ID NO: 2592370 - RNA, 19 nt, Artificial Sequence
  Description of Artificial Sequence: Synthetic oligonucleotide
gacccguucuccugaauaa

SEQ ID NO: 2592371 - RNA, 19 nt, Artificial Sequence
  Description of Artificial Sequence: Synthetic oligonucleotide
aagucccuucggaggauuc

SEQ ID NO: 2592372 - RNA, 19 nt, Artificial Sequence
  Description of Artificial Sequence: Synthetic oligonucleotide
uuucuggaaugucgacggu

SEQ ID NO: 2592373 - RNA, 19 nt, Artificial Sequence
  Description of Artificial Sequence: Synthetic oligonucleotide
ugguuaacuuaggucuuac

SEQ ID NO: 2592374 - RNA, 19 nt, Artificial Sequence
  Description of Artificial Sequence: Synthetic oligonucleotide
aacccagugugacucccuu

SEQ ID NO: 2592375 - RNA, 19 nt, Artificial Sequence
  Description of Artificial Sequence: Synthetic oligonucleotide
ccauuugucuacccggagc

SEQ ID NO: 2592376 - RNA, 19 nt, Artificial Sequence
  Description of Artificial Sequence: Synthetic oligonucleotide
acaaugacugugcgccccu

SEQ ID NO: 2592377 - RNA, 19 nt, Artificial Sequence
  Description of Artificial Sequence: Synthetic oligonucleotide
gaugguccggacaguggcc

SEQ ID NO: 2592378 - RNA, 19 nt, Artificial Sequence
  Description of Artificial Sequence: Synthetic oligonucleotide
gucuuacucaucagccugc

SEQ ID NO: 2592379 - RNA, 19 nt, Artificial Sequence
  Description of Artificial Sequence: Synthetic oligonucleotide
gccaguucuuuucuguuac

SEQ ID NO: 2592380 - RNA, 19 nt, Artificial Sequence
  Description of Artificial Sequence: Synthetic oligonucleotide
ucuuacucaucagccugcu

SEQ ID NO: 2592381 - RNA, 19 nt, Artificial Sequence
  Description of Artificial Sequence: Synthetic oligonucleotide
ccuuuugggcuugagaaac

SEQ ID NO: 2592382 - RNA, 19 nt, Artificial Sequence
  Description of Artificial Sequence: Synthetic oligonucleotide
caaagacccguucuccuga

SEQ ID NO: 2592383 - RNA, 19 nt, Artificial Sequence
  Description of Artificial Sequence: Synthetic oligonucleotide
gagaacguccuucgucauc

SEQ ID NO: 2592384 - RNA, 19 nt, Artificial Sequence
  Description of Artificial Sequence: Synthetic oligonucleotide
agauggggcaagagagaac

SEQ ID NO: 2592385 - RNA, 19 nt, Artificial Sequence
  Description of Artificial Sequence: Synthetic oligonucleotide
gacugugcgccccuucaga

SEQ ID NO: 2592386 - RNA, 19 nt, Artificial Sequence
  Description of Artificial Sequence: Synthetic oligonucleotide
uuucaaccaaagacccguu

SEQ ID NO: 2592387 - RNA, 19 nt, Artificial Sequence
  Description of Artificial Sequence: Synthetic oligonucleotide
aacccugcggauguauuuu

SEQ ID NO: 2592388 - RNA, 19 nt, Artificial Sequence
  Description of Artificial Sequence: Synthetic oligonucleotide
gaaacaaguucaauaucau

SEQ ID NO: 2592389 - RNA, 19 nt, Artificial Sequence
  Description of Artificial Sequence: Synthetic oligonucleotide
agcucuacauugaugugau

SEQ ID NO: 2592390 - RNA, 19 nt, Artificial Sequence
  Description of Artificial Sequence: Synthetic oligonucleotide
caccuguucucauccgaac

SEQ ID NO: 2592391 - RNA, 19 nt, Artificial Sequence
  Description of Artificial Sequence: Synthetic oligonucleotide
gaggagacucagcucuaca

SEQ ID NO: 2592392 - RNA, 19 nt, Artificial Sequence
  Description of Artificial Sequence: Synthetic oligonucleotide
agaccucaucuuguagcgg

SEQ ID NO: 2592393 - RNA, 19 nt, Artificial Sequence
  Description of Artificial Sequence: Synthetic oligonucleotide
cagcucuacauugauguga

SEQ ID NO: 2592394 - RNA, 19 nt, Artificial Sequence
  Description of Artificial Sequence: Synthetic oligonucleotide
auuccucuagggcccuuca

SEQ ID NO: 2592395 - RNA, 19 nt, Artificial Sequence
  Description of Artificial Sequence: Synthetic oligonucleotide
cuucccgaggagacucagc

SEQ ID NO: 2592396 - RNA, 19 nt, Artificial Sequence
  Description of Artificial Sequence: Synthetic oligonucleotide
uacccggagccucuucuuc

SEQ ID NO: 2592397 - RNA, 19 nt, Artificial Sequence
  Description of Artificial Sequence: Synthetic oligonucleotide
cccaccauuugucuacccg

SEQ ID NO: 2592398 - RNA, 19 nt, Artificial Sequence
  Description of Artificial Sequence: Synthetic oligonucleotide
aagcaacaccuguucucau

SEQ ID NO: 2592399 - RNA, 19 nt, Artificial Sequence
  Description of Artificial Sequence: Synthetic oligonucleotide
cucauccgaacccugcgga

SEQ ID NO: 2592400 - RNA, 19 nt, Artificial Sequence
  Description of Artificial Sequence: Synthetic oligonucleotide
auuucggauuucaaccaaa

SEQ ID NO: 2592401 - RNA, 19 nt, Artificial Sequence
  Description of Artificial Sequence: Synthetic oligonucleotide
cccuucacaaugacugugc

SEQ ID NO: 2592402 - RNA, 19 nt, Artificial Sequence
  Description of Artificial Sequence: Synthetic oligonucleotide
ucauccgaacccugcggau

SEQ ID NO: 2592403 - RNA, 19 nt, Artificial Sequence
  Description of Artificial Sequence: Synthetic oligonucleotide
cuuuugggcuugagaaaca

SEQ ID NO: 2592404 - RNA, 19 nt, Artificial Sequence
  Description of Artificial Sequence: Synthetic oligonucleotide
cauccgaacccugcggaug

SEQ ID NO: 2592405 - RNA, 19 nt, Artificial Sequence
  Description of Artificial Sequence: Synthetic oligonucleotide
gcuugcugaaucagagccg

SEQ ID NO: 2592406 - RNA, 19 nt, Artificial Sequence
  Description of Artificial Sequence: Synthetic oligonucleotide
acacagaccucaucuugua

SEQ ID NO: 2592407 - RNA, 19 nt, Artificial Sequence
  Description of Artificial Sequence: Synthetic oligonucleotide
ugcugcacuguucccuuuu

SEQ ID NO: 2592408 - RNA, 19 nt, Artificial Sequence
  Description of Artificial Sequence: Synthetic oligonucleotide
acucagcucuacauugaug

SEQ ID NO: 2592409 - RNA, 19 nt, Artificial Sequence
  Description of Artificial Sequence: Synthetic oligonucleotide
caccauuugucuacccgga

SEQ ID NO: 2592410 - RNA, 19 nt, Artificial Sequence
  Description of Artificial Sequence: Synthetic oligonucleotide
cagaacaagcaacaccugu

SEQ ID NO: 2592411 - RNA, 19 nt, Artificial Sequence
  Description of Artificial Sequence: Synthetic oligonucleotide
accccaccauuugucuacc

SEQ ID NO: 2592412 - RNA, 19 nt, Artificial Sequence
  Description of Artificial Sequence: Synthetic oligonucleotide
guagauggggcaagagaga

SEQ ID NO: 2592413 - RNA, 19 nt, Artificial Sequence
  Description of Artificial Sequence: Synthetic oligonucleotide
cacccaagaaauuucggau

SEQ ID NO: 2592414 - RNA, 19 nt, Artificial Sequence
  Description of Artificial Sequence: Synthetic oligonucleotide
ggggaagugagcauacaca

SEQ ID NO: 2592415 - RNA, 19 nt, Artificial Sequence
  Description of Artificial Sequence: Synthetic oligonucleotide
agagaacguccuucgucau

SEQ ID NO: 2592416 - RNA, 19 nt, Artificial Sequence
  Description of Artificial Sequence: Synthetic oligonucleotide
uaacaacguugauggggaa

SEQ ID NO: 2592417 - RNA, 19 nt, Artificial Sequence
  Description of Artificial Sequence: Synthetic oligonucleotide
aagacccguucuccugaau

SEQ ID NO: 2592418 - RNA, 19 nt, Artificial Sequence
  Description of Artificial Sequence: Synthetic oligonucleotide
augguccggacaguggcca

SEQ ID NO: 2592419 - RNA, 19 nt, Artificial Sequence
  Description of Artificial Sequence: Synthetic oligonucleotide
cuagggcccuucacaauga

SEQ ID NO: 2592420 - RNA, 19 nt, Artificial Sequence
  Description of Artificial Sequence: Synthetic oligonucleotide
ggaucuuguuucuggaacu

SEQ ID NO: 2592421 - RNA, 19 nt, Artificial Sequence
  Description of Artificial Sequence: Synthetic oligonucleotide
auucauccuuuugggcuug

SEQ ID NO: 2592422 - RNA, 19 nt, Artificial Sequence
  Description of Artificial Sequence: Synthetic oligonucleotide
ccaaagacccguucuccug

SEQ ID NO: 2592423 - RNA, 19 nt, Artificial Sequence
  Description of Artificial Sequence: Synthetic oligonucleotide
auuugucuacccggagccu

SEQ ID NO: 2592424 - RNA, 19 nt, Artificial Sequence
  Description of Artificial Sequence: Synthetic oligonucleotide
caccccaaaucguacuuaa

SEQ ID NO: 2592425 - RNA, 19 nt, Artificial Sequence
  Description of Artificial Sequence: Synthetic oligonucleotide
ggaaacccagugugacucc

SEQ ID NO: 2592426 - RNA, 19 nt, Artificial Sequence
  Description of Artificial Sequence: Synthetic oligonucleotide
uugcugaaucagagccgcu

SEQ ID NO: 2592427 - RNA, 19 nt, Artificial Sequence
  Description of Artificial Sequence: Synthetic oligonucleotide
ugguccggacaguggccag

SEQ ID NO: 2592428 - RNA, 19 nt, Artificial Sequence
  Description of Artificial Sequence: Synthetic oligonucleotide
ugacugcagaugguccgga

SEQ ID NO: 2592429 - RNA, 19 nt, Artificial Sequence
  Description of Artificial Sequence: Synthetic oligonucleotide
acugguuaacuuaggucuu

SEQ ID NO: 2592430 - RNA, 19 nt, Artificial Sequence
  Description of Artificial Sequence: Synthetic oligonucleotide
caggaucuuguuucuggaa

SEQ ID NO: 2592431 - RNA, 19 nt, Artificial Sequence
  Description of Artificial Sequence: Synthetic oligonucleotide
ucccgaggagacucagcuc

SEQ ID NO: 2592432 - RNA, 19 nt, Artificial Sequence
  Description of Artificial Sequence: Synthetic oligonucleotide
acaccuguucucauccgaa

SEQ ID NO: 2592433 - RNA, 19 nt, Artificial Sequence
  Description of Artificial Sequence: Synthetic oligonucleotide
gacucagcucuacauugau

SEQ ID NO: 2592434 - RNA, 19 nt, Artificial Sequence
  Description of Artificial Sequence: Synthetic oligonucleotide
gugagcauacacagaccuc

SEQ ID NO: 2592435 - RNA, 19 nt, Artificial Sequence
  Description of Artificial Sequence: Synthetic oligonucleotide
gaacccugcggauguauuu

SEQ ID NO: 2592436 - RNA, 19 nt, Artificial Sequence
  Description of Artificial Sequence: Synthetic oligonucleotide
cguacuuaauucaggaucu

SEQ ID NO: 2592437 - RNA, 19 nt, Artificial Sequence
  Description of Artificial Sequence: Synthetic oligonucleotide
ggcuugagaaacagaacaa

SEQ ID NO: 2592438 - RNA, 19 nt, Artificial Sequence
  Description of Artificial Sequence: Synthetic oligonucleotide
cggaggauuccucuagggc

SEQ ID NO: 2592439 - RNA, 19 nt, Artificial Sequence
  Description of Artificial Sequence: Synthetic oligonucleotide
cugaaucagagccgcugaa

SEQ ID NO: 2592440 - RNA, 19 nt, Artificial Sequence
  Description of Artificial Sequence: Synthetic oligonucleotide
cugcacuguucccuuuuca

SEQ ID NO: 2592441 - RNA, 19 nt, Artificial Sequence
  Description of Artificial Sequence: Synthetic oligonucleotide
ccuuuucagacacauagau

SEQ ID NO: 2592442 - RNA, 19 nt, Artificial Sequence
  Description of Artificial Sequence: Synthetic oligonucleotide
cuuguuucuggaacugguu

SEQ ID NO: 2592443 - RNA, 19 nt, Artificial Sequence
  Description of Artificial Sequence: Synthetic oligonucleotide
caacguugauggggaagug

SEQ ID NO: 2592444 - RNA, 19 nt, Artificial Sequence
  Description of Artificial Sequence: Synthetic oligonucleotide
ugaagucccuucggaggau

SEQ ID NO: 2592445 - RNA, 19 nt, Artificial Sequence
  Description of Artificial Sequence: Synthetic oligonucleotide
agggcccuucacaaugacu

SEQ ID NO: 2592446 - RNA, 19 nt, Artificial Sequence
  Description of Artificial Sequence: Synthetic oligonucleotide
gugacucccuugaucaugu

SEQ ID NO: 2592447 - RNA, 19 nt, Artificial Sequence
  Description of Artificial Sequence: Synthetic oligonucleotide
cucgcaguagauggggcaa

SEQ ID NO: 2592448 - RNA, 19 nt, Artificial Sequence
  Description of Artificial Sequence: Synthetic oligonucleotide
acaccccaaaucguacuua

SEQ ID NO: 2592449 - RNA, 19 nt, Artificial Sequence
  Description of Artificial Sequence: Synthetic oligonucleotide
gccgcugaauuugaaacaa

SEQ ID NO: 2592450 - RNA, 19 nt, Artificial Sequence
  Description of Artificial Sequence: Synthetic oligonucleotide
gaacaugacugcagauggu

SEQ ID NO: 2592451 - RNA, 19 nt, Artificial Sequence
  Description of Artificial Sequence: Synthetic oligonucleotide
uucauccuuuugggcuuga

SEQ ID NO: 2592452 - RNA, 19 nt, Artificial Sequence
  Description of Artificial Sequence: Synthetic oligonucleotide
cccguucuccugaauaaca

SEQ ID NO: 2592453 - RNA, 19 nt, Artificial Sequence
  Description of Artificial Sequence: Synthetic oligonucleotide
gcccuucacaaugacugug

SEQ ID NO: 2592454 - RNA, 19 nt, Artificial Sequence
  Description of Artificial Sequence: Synthetic oligonucleotide
gguuaacuuaggucuuacu

SEQ ID NO: 2592455 - RNA, 19 nt, Artificial Sequence
  Description of Artificial Sequence: Synthetic oligonucleotide
cggaaacccagugugacuc

SEQ ID NO: 2592456 - RNA, 19 nt, Artificial Sequence
  Description of Artificial Sequence: Synthetic oligonucleotide
uccggacaguggccaguuc

SEQ ID NO: 2592457 - RNA, 19 nt, Artificial Sequence
  Description of Artificial Sequence: Synthetic oligonucleotide
ggagacucagcucuacauu

SEQ ID NO: 2592458 - RNA, 19 nt, Artificial Sequence
  Description of Artificial Sequence: Synthetic oligonucleotide
ugcgccccuucagagugau

SEQ ID NO: 2592459 - RNA, 19 nt, Artificial Sequence
  Description of Artificial Sequence: Synthetic oligonucleotide
gcugaauuugaaacaaguu

SEQ ID NO: 2592460 - RNA, 19 nt, Artificial Sequence
  Description of Artificial Sequence: Synthetic oligonucleotide
cccuuuucagacacauaga

SEQ ID NO: 2592461 - RNA, 19 nt, Artificial Sequence
  Description of Artificial Sequence: Synthetic oligonucleotide
cuguuaccccaccauuugu

SEQ ID NO: 2592462 - RNA, 19 nt, Artificial Sequence
  Description of Artificial Sequence: Synthetic oligonucleotide
cugguuaacuuaggucuua

SEQ ID NO: 2592463 - RNA, 19 nt, Artificial Sequence
  Description of Artificial Sequence: Synthetic oligonucleotide
ccguucuccugaauaacaa

SEQ ID NO: 2592464 - RNA, 19 nt, Artificial Sequence
  Description of Artificial Sequence: Synthetic oligonucleotide
accucaucuuguagcggaa

SEQ ID NO: 2592465 - RNA, 19 nt, Artificial Sequence
  Description of Artificial Sequence: Synthetic oligonucleotide
cuguucucauccgaacccu

SEQ ID NO: 2592466 - RNA, 19 nt, Artificial Sequence
  Description of Artificial Sequence: Synthetic oligonucleotide
accccaaaucguacuuaau

SEQ ID NO: 2592467 - RNA, 19 nt, Artificial Sequence
  Description of Artificial Sequence: Synthetic oligonucleotide
ggaaugucgacggucugau

SEQ ID NO: 2592468 - RNA, 19 nt, Artificial Sequence
  Description of Artificial Sequence: Synthetic oligonucleotide
ugacucccuugaucauguu

SEQ ID NO: 2592469 - RNA, 19 nt, Artificial Sequence
  Description of Artificial Sequence: Synthetic oligonucleotide
gucccuucggaggauuccu

SEQ ID NO: 2592470 - RNA, 19 nt, Artificial Sequence
  Description of Artificial Sequence: Synthetic oligonucleotide
ccccaaaucguacuuaauu

SEQ ID NO: 2592471 - RNA, 19 nt, Artificial Sequence
  Description of Artificial Sequence: Synthetic oligonucleotide
cagagccgcugaauuugaa

SEQ ID NO: 2592472 - RNA, 19 nt, Artificial Sequence
  Description of Artificial Sequence: Synthetic oligonucleotide
gaagucccuucggaggauu

SEQ ID NO: 2592473 - RNA, 19 nt, Artificial Sequence
  Description of Artificial Sequence: Synthetic oligonucleotide
cugugcgccccuucagagu

SEQ ID NO: 2592474 - RNA, 19 nt, Artificial Sequence
  Description of Artificial Sequence: Synthetic oligonucleotide
gaaugucgacggucugauu

SEQ ID NO: 2592475 - RNA, 19 nt, Artificial Sequence
  Description of Artificial Sequence: Synthetic oligonucleotide
gccccuucagagugauguc

SEQ ID NO: 2592476 - RNA, 19 nt, Artificial Sequence
  Description of Artificial Sequence: Synthetic oligonucleotide
cgacggucugauugcugag

SEQ ID NO: 2592477 - RNA, 19 nt, Artificial Sequence
  Description of Artificial Sequence: Synthetic oligonucleotide
cauuuccuucaaggauuaa

SEQ ID NO: 2592478 - RNA, 19 nt, Artificial Sequence
  Description of Artificial Sequence: Synthetic oligonucleotide
gggcaagagagaacguccu

SEQ ID NO: 2592479 - RNA, 19 nt, Artificial Sequence
  Description of Artificial Sequence: Synthetic oligonucleotide
guacuuaauucaggaucuu

SEQ ID NO: 2592480 - RNA, 19 nt, Artificial Sequence
  Description of Artificial Sequence: Synthetic oligonucleotide
cucuagggcccuucacaau

SEQ ID NO: 2592481 - RNA, 19 nt, Artificial Sequence
  Description of Artificial Sequence: Synthetic oligonucleotide
ccccaccauuugucuaccc

SEQ ID NO: 2592482 - RNA, 19 nt, Artificial Sequence
  Description of Artificial Sequence: Synthetic oligonucleotide
gugugacucccuugaucau

SEQ ID NO: 2592483 - RNA, 19 nt, Artificial Sequence
  Description of Artificial Sequence: Synthetic oligonucleotide
cccaaaagacaccccaaau

SEQ ID NO: 2592484 - RNA, 19 nt, Artificial Sequence
  Description of Artificial Sequence: Synthetic oligonucleotide
uccgaacccugcggaugua

SEQ ID NO: 2592485 - RNA, 19 nt, Artificial Sequence
  Description of Artificial Sequence: Synthetic oligonucleotide
gcggaaacccagugugacu

SEQ ID NO: 2592486 - RNA, 19 nt, Artificial Sequence
  Description of Artificial Sequence: Synthetic oligonucleotide
ccuucggaggauuccucua

SEQ ID NO: 2592487 - RNA, 19 nt, Artificial Sequence
  Description of Artificial Sequence: Synthetic oligonucleotide
ggcccuucacaaugacugu

SEQ ID NO: 2592488 - RNA, 19 nt, Artificial Sequence
  Description of Artificial Sequence: Synthetic oligonucleotide
cuacccggagccucuucuu

SEQ ID NO: 2592489 - RNA, 19 nt, Artificial Sequence
  Description of Artificial Sequence: Synthetic oligonucleotide
cgccccuucagagugaugu

SEQ ID NO: 2592490 - RNA, 19 nt, Artificial Sequence
  Description of Artificial Sequence: Synthetic oligonucleotide
cgaggagacucagcucuac

SEQ ID NO: 2592491 - RNA, 19 nt, Artificial Sequence
  Description of Artificial Sequence: Synthetic oligonucleotide
ccugaauaacaacguugau

SEQ ID NO: 2592492 - RNA, 19 nt, Artificial Sequence
  Description of Artificial Sequence: Synthetic oligonucleotide
ccucaucuuguagcggaaa

SEQ ID NO: 2592493 - RNA, 19 nt, Artificial Sequence
  Description of Artificial Sequence: Synthetic oligonucleotide
gugcgccccuucagaguga

SEQ ID NO: 2592494 - RNA, 19 nt, Artificial Sequence
  Description of Artificial Sequence: Synthetic oligonucleotide
guccggacaguggccaguu

SEQ ID NO: 2592495 - RNA, 19 nt, Artificial Sequence
  Description of Artificial Sequence: Synthetic oligonucleotide
cuguuguggcuugcugaau

SEQ ID NO: 2592496 - RNA, 19 nt, Artificial Sequence
  Description of Artificial Sequence: Synthetic oligonucleotide
cgcaguagauggggcaaga

SEQ ID NO: 2592497 - RNA, 19 nt, Artificial Sequence
  Description of Artificial Sequence: Synthetic oligonucleotide
ccgaggagacucagcucua

SEQ ID NO: 2592498 - RNA, 19 nt, Artificial Sequence
  Description of Artificial Sequence: Synthetic oligonucleotide
cugcugcacuguucccuuu

SEQ ID NO: 2592499 - RNA, 19 nt, Artificial Sequence
  Description of Artificial Sequence: Synthetic oligonucleotide
caaugacugugcgccccuu

SEQ ID NO: 2592500 - RNA, 19 nt, Artificial Sequence
  Description of Artificial Sequence: Synthetic oligonucleotide
gcucuacauugaugugauu

SEQ ID NO: 2592501 - RNA, 19 nt, Artificial Sequence
  Description of Artificial Sequence: Synthetic oligonucleotide
cgaacccugcggauguauu

SEQ ID NO: 2592502 - RNA, 19 nt, Artificial Sequence
  Description of Artificial Sequence: Synthetic oligonucleotide
gcgccccuucagagugaug

SEQ ID NO: 2592503 - RNA, 19 nt, Artificial Sequence
  Description of Artificial Sequence: Synthetic oligonucleotide
ccgaacccugcggauguau

SEQ ID NO: 2592504 - RNA, 19 nt, Artificial Sequence
  Description of Artificial Sequence: Synthetic oligonucleotide
ucauacauuaagaugaagc

SEQ ID NO: 2592505 - RNA, 19 nt, Artificial Sequence
  Description of Artificial Sequence: Synthetic oligonucleotide
uaaguuuuaaucugagucg

SEQ ID NO: 2592506 - RNA, 19 nt, Artificial Sequence
  Description of Artificial Sequence: Synthetic oligonucleotide
auagucgaaguucugaucg

SEQ ID NO: 2592507 - RNA, 19 nt, Artificial Sequence
  Description of Artificial Sequence: Synthetic oligonucleotide
auuaauguuguccuuggcg

SEQ ID NO: 2592508 - RNA, 19 nt, Artificial Sequence
  Description of Artificial Sequence: Synthetic oligonucleotide
uacauuaagaugaagccca

SEQ ID NO: 2592509 - RNA, 19 nt, Artificial Sequence
  Description of Artificial Sequence: Synthetic oligonucleotide
aaugaucaggaucuugaac

SEQ ID NO: 2592510 - RNA, 19 nt, Artificial Sequence
  Description of Artificial Sequence: Synthetic oligonucleotide
cauacauuaagaugaagcc

SEQ ID NO: 2592511 - RNA, 19 nt, Artificial Sequence
  Description of Artificial Sequence: Synthetic oligonucleotide
guaaguuuuaaucugaguc

SEQ ID NO: 2592512 - RNA, 19 nt, Artificial Sequence
  Description of Artificial Sequence: Synthetic oligonucleotide
uugucauugcgguagaugg

SEQ ID NO: 2592513 - RNA, 19 nt, Artificial Sequence
  Description of Artificial Sequence: Synthetic oligonucleotide
uuaauguuguccuuggcgc

SEQ ID NO: 2592514 - RNA, 19 nt, Artificial Sequence
  Description of Artificial Sequence: Synthetic oligonucleotide
ucacguuugacacucauga

SEQ ID NO: 2592515 - RNA, 19 nt, Artificial Sequence
  Description of Artificial Sequence: Synthetic oligonucleotide
cagaucugcaguuugaucc

SEQ ID NO: 2592516 - RNA, 19 nt, Artificial Sequence
  Description of Artificial Sequence: Synthetic oligonucleotide
augaucaggaucuugaaca

SEQ ID NO: 2592517 - RNA, 19 nt, Artificial Sequence
  Description of Artificial Sequence: Synthetic oligonucleotide
aacagguuuggggauaucc

SEQ ID NO: 2592518 - RNA, 19 nt, Artificial Sequence
  Description of Artificial Sequence: Synthetic oligonucleotide
uaagaugaagcccauggca

SEQ ID NO: 2592519 - RNA, 19 nt, Artificial Sequence
  Description of Artificial Sequence: Synthetic oligonucleotide
acguuugacacucaugacg

SEQ ID NO: 2592520 - RNA, 19 nt, Artificial Sequence
  Description of Artificial Sequence: Synthetic oligonucleotide
auacauuaagaugaagccc

SEQ ID NO: 2592521 - RNA, 19 nt, Artificial Sequence
  Description of Artificial Sequence: Synthetic oligonucleotide
uucccaaugaucaggaucu

SEQ ID NO: 2592522 - RNA, 19 nt, Artificial Sequence
  Description of Artificial Sequence: Synthetic oligonucleotide
acuccuucugcccauagcg

SEQ ID NO: 2592523 - RNA, 19 nt, Artificial Sequence
  Description of Artificial Sequence: Synthetic oligonucleotide
uccugcacagcguugaagg

SEQ ID NO: 2592524 - RNA, 19 nt, Artificial Sequence
  Description of Artificial Sequence: Synthetic oligonucleotide
uuuuaaucugagucgacca

SEQ ID NO: 2592525 - RNA, 19 nt, Artificial Sequence
  Description of Artificial Sequence: Synthetic oligonucleotide
uuuaaucugagucgaccag

SEQ ID NO: 2592526 - RNA, 19 nt, Artificial Sequence
  Description of Artificial Sequence: Synthetic oligonucleotide
uaauaggcgguggugaugg

SEQ ID NO: 2592527 - RNA, 19 nt, Artificial Sequence
  Description of Artificial Sequence: Synthetic oligonucleotide
acagaucacauccaccagg

SEQ ID NO: 2592528 - RNA, 19 nt, Artificial Sequence
  Description of Artificial Sequence: Synthetic oligonucleotide
uagcggaagaggaaggagg

SEQ ID NO: 2592529 - RNA, 19 nt, Artificial Sequence
  Description of Artificial Sequence: Synthetic oligonucleotide
acgucaaacagguuugggg

SEQ ID NO: 2592530 - RNA, 19 nt, Artificial Sequence
  Description of Artificial Sequence: Synthetic oligonucleotide
uuuggggauaucccagugg

SEQ ID NO: 2592531 - RNA, 19 nt, Artificial Sequence
  Description of Artificial Sequence: Synthetic oligonucleotide
aaucugagucgaccagucc

SEQ ID NO: 2592532 - RNA, 19 nt, Artificial Sequence
  Description of Artificial Sequence: Synthetic oligonucleotide
uuggggauaucccaguggc

SEQ ID NO: 2592533 - RNA, 19 nt, Artificial Sequence
  Description of Artificial Sequence: Synthetic oligonucleotide
acauuaauguuguccuugg

SEQ ID NO: 2592534 - RNA, 19 nt, Artificial Sequence
  Description of Artificial Sequence: Synthetic oligonucleotide
cauagcgcgaaucuguggc

SEQ ID NO: 2592535 - RNA, 19 nt, Artificial Sequence
  Description of Artificial Sequence: Synthetic oligonucleotide
ucgaaguucugaucggagg

SEQ ID NO: 2592536 - RNA, 19 nt, Artificial Sequence
  Description of Artificial Sequence: Synthetic oligonucleotide
ggaucuugaacauauaguc

SEQ ID NO: 2592537 - RNA, 19 nt, Artificial Sequence
  Description of Artificial Sequence: Synthetic oligonucleotide
aacauauagucgaaguucu

SEQ ID NO: 2592538 - RNA, 19 nt, Artificial Sequence
  Description of Artificial Sequence: Synthetic oligonucleotide
aaggagguuuugcccacgc

SEQ ID NO: 2592539 - RNA, 19 nt, Artificial Sequence
  Description of Artificial Sequence: Synthetic oligonucleotide
cugcuugacauuaauguug

SEQ ID NO: 2592540 - RNA, 19 nt, Artificial Sequence
  Description of Artificial Sequence: Synthetic oligonucleotide
acgaguaaguuuuaaucug

SEQ ID NO: 2592541 - RNA, 19 nt, Artificial Sequence
  Description of Artificial Sequence: Synthetic oligonucleotide
cagguggucagcaagcugc

SEQ ID NO: 2592542 - RNA, 19 nt, Artificial Sequence
  Description of Artificial Sequence: Synthetic oligonucleotide
ugucccacgaguaaguuuu

SEQ ID NO: 2592543 - RNA, 19 nt, Artificial Sequence
  Description of Artificial Sequence: Synthetic oligonucleotide
aaguuuuaaucugagucga

SEQ ID NO: 2592544 - RNA, 19 nt, Artificial Sequence
  Description of Artificial Sequence: Synthetic oligonucleotide
ugaacauauagucgaaguu

SEQ ID NO: 2592545 - RNA, 19 nt, Artificial Sequence
  Description of Artificial Sequence: Synthetic oligonucleotide
uccuucugcccauagcgcg

SEQ ID NO: 2592546 - RNA, 19 nt, Artificial Sequence
  Description of Artificial Sequence: Synthetic oligonucleotide
uauccagcgacuccgacau

SEQ ID NO: 2592547 - RNA, 19 nt, Artificial Sequence
  Description of Artificial Sequence: Synthetic oligonucleotide
gacauuaauguuguccuug

SEQ ID NO: 2592548 - RNA, 19 nt, Artificial Sequence
  Description of Artificial Sequence: Synthetic oligonucleotide
aguuugauccucuugucau

SEQ ID NO: 2592549 - RNA, 19 nt, Artificial Sequence
  Description of Artificial Sequence: Synthetic oligonucleotide
acacucaugacgucaaaca

SEQ ID NO: 2592550 - RNA, 19 nt, Artificial Sequence
  Description of Artificial Sequence: Synthetic oligonucleotide
uuugacacucaugacguca

SEQ ID NO: 2592551 - RNA, 19 nt, Artificial Sequence
  Description of Artificial Sequence: Synthetic oligonucleotide
ugcgguagcgcucuugccc

SEQ ID NO: 2592552 - RNA, 19 nt, Artificial Sequence
  Description of Artificial Sequence: Synthetic oligonucleotide
ugcuugacauuaauguugu

SEQ ID NO: 2592553 - RNA, 19 nt, Artificial Sequence
  Description of Artificial Sequence: Synthetic oligonucleotide
aaccgugcugacgaaggcc

SEQ ID NO: 2592554 - RNA, 19 nt, Artificial Sequence
  Description of Artificial Sequence: Synthetic oligonucleotide
agcguugaaggacuccucg

SEQ ID NO: 2592555 - RNA, 19 nt, Artificial Sequence
  Description of Artificial Sequence: Synthetic oligonucleotide
gagucaucagcauagcgga

SEQ ID NO: 2592556 - RNA, 19 nt, Artificial Sequence
  Description of Artificial Sequence: Synthetic oligonucleotide
aucagcauagcggaagagg

SEQ ID NO: 2592557 - RNA, 19 nt, Artificial Sequence
  Description of Artificial Sequence: Synthetic oligonucleotide
guuuuaaucugagucgacc

SEQ ID NO: 2592558 - RNA, 19 nt, Artificial Sequence
  Description of Artificial Sequence: Synthetic oligonucleotide
aucugagucgaccaguccu

SEQ ID NO: 2592559 - RNA, 19 nt, Artificial Sequence
  Description of Artificial Sequence: Synthetic oligonucleotide
gaggaaggagguuuugccc

SEQ ID NO: 2592560 - RNA, 19 nt, Artificial Sequence
  Description of Artificial Sequence: Synthetic oligonucleotide
uaggcgguggugauggugc

SEQ ID NO: 2592561 - RNA, 19 nt, Artificial Sequence
  Description of Artificial Sequence: Synthetic oligonucleotide
cuugaagucuaugccaacc

SEQ ID NO: 2592562 - RNA, 19 nt, Artificial Sequence
  Description of Artificial Sequence: Synthetic oligonucleotide
aguaaguuuuaaucugagu

SEQ ID NO: 2592563 - RNA, 19 nt, Artificial Sequence
  Description of Artificial Sequence: Synthetic oligonucleotide
auauagucgaaguucugau

SEQ ID NO: 2592564 - RNA, 19 nt, Artificial Sequence
  Description of Artificial Sequence: Synthetic oligonucleotide
ucugagucgaccaguccug

SEQ ID NO: 2592565 - RNA, 19 nt, Artificial Sequence
  Description of Artificial Sequence: Synthetic oligonucleotide
acucaugacgucaaacagg

SEQ ID NO: 2592566 - RNA, 19 nt, Artificial Sequence
  Description of Artificial Sequence: Synthetic oligonucleotide
uuugauccucuugucauug

SEQ ID NO: 2592567 - RNA, 19 nt, Artificial Sequence
  Description of Artificial Sequence: Synthetic oligonucleotide
ugcacagcguugaaggacu

SEQ ID NO: 2592568 - RNA, 19 nt, Artificial Sequence
  Description of Artificial Sequence: Synthetic oligonucleotide
acgaaggccggugugaagg

SEQ ID NO: 2592569 - RNA, 19 nt, Artificial Sequence
  Description of Artificial Sequence: Synthetic oligonucleotide
gaaucuguggcugacgcca

SEQ ID NO: 2592570 - RNA, 19 nt, Artificial Sequence
  Description of Artificial Sequence: Synthetic oligonucleotide
ugggcauugucccacgagu

SEQ ID NO: 2592571 - RNA, 19 nt, Artificial Sequence
  Description of Artificial Sequence: Synthetic oligonucleotide
aucggaggacuccuucugc

SEQ ID NO: 2592572 - RNA, 19 nt, Artificial Sequence
  Description of Artificial Sequence: Synthetic oligonucleotide
cacucaugacgucaaacag

SEQ ID NO: 2592573 - RNA, 19 nt, Artificial Sequence
  Description of Artificial Sequence: Synthetic oligonucleotide
ugaaggagucaucagcaua

SEQ ID NO: 2592574 - RNA, 19 nt, Artificial Sequence
  Description of Artificial Sequence: Synthetic oligonucleotide
gauccucuugucauugcgg

SEQ ID NO: 2592575 - RNA, 19 nt, Artificial Sequence
  Description of Artificial Sequence: Synthetic oligonucleotide
gaccuugaagucuaugcca

SEQ ID NO: 2592576 - RNA, 19 nt, Artificial Sequence
  Description of Artificial Sequence: Synthetic oligonucleotide
ucuaugccaaccgugcuga

SEQ ID NO: 2592577 - RNA, 19 nt, Artificial Sequence
  Description of Artificial Sequence: Synthetic oligonucleotide
gacuccgacaucuucucac

SEQ ID NO: 2592578 - RNA, 19 nt, Artificial Sequence
  Description of Artificial Sequence: Synthetic oligonucleotide
ugcuuggcgccugugaccg

SEQ ID NO: 2592579 - RNA, 19 nt, Artificial Sequence
  Description of Artificial Sequence: Synthetic oligonucleotide
uuaaucugagucgaccagu

SEQ ID NO: 2592580 - RNA, 19 nt, Artificial Sequence
  Description of Artificial Sequence: Synthetic oligonucleotide
agcgguauccagcgacucc

SEQ ID NO: 2592581 - RNA, 19 nt, Artificial Sequence
  Description of Artificial Sequence: Synthetic oligonucleotide
uaaucugagucgaccaguc

SEQ ID NO: 2592582 - RNA, 19 nt, Artificial Sequence
  Description of Artificial Sequence: Synthetic oligonucleotide
augccaaccgugcugacga

SEQ ID NO: 2592583 - RNA, 19 nt, Artificial Sequence
  Description of Artificial Sequence: Synthetic oligonucleotide
uauagucgaaguucugauc

SEQ ID NO: 2592584 - RNA, 19 nt, Artificial Sequence
  Description of Artificial Sequence: Synthetic oligonucleotide
aaaggucugcuugacauua

SEQ ID NO: 2592585 - RNA, 19 nt, Artificial Sequence
  Description of Artificial Sequence: Synthetic oligonucleotide
uaugccaaccgugcugacg

SEQ ID NO: 2592586 - RNA, 19 nt, Artificial Sequence
  Description of Artificial Sequence: Synthetic oligonucleotide
gaguaaguuuuaaucugag

SEQ ID NO: 2592587 - RNA, 19 nt, Artificial Sequence
  Description of Artificial Sequence: Synthetic oligonucleotide
aauguuguccuuggcgcug

SEQ ID NO: 2592588 - RNA, 19 nt, Artificial Sequence
  Description of Artificial Sequence: Synthetic oligonucleotide
uagucgaaguucugaucgg

SEQ ID NO: 2592589 - RNA, 19 nt, Artificial Sequence
  Description of Artificial Sequence: Synthetic oligonucleotide
gaucacauccaccaggcgu

SEQ ID NO: 2592590 - RNA, 19 nt, Artificial Sequence
  Description of Artificial Sequence: Synthetic oligonucleotide
uuggucggugagcuguggg

SEQ ID NO: 2592591 - RNA, 19 nt, Artificial Sequence
  Description of Artificial Sequence: Synthetic oligonucleotide
ucuugaacauauagucgaa

SEQ ID NO: 2592592 - RNA, 19 nt, Artificial Sequence
  Description of Artificial Sequence: Synthetic oligonucleotide
cuugaacauauagucgaag

SEQ ID NO: 2592593 - RNA, 19 nt, Artificial Sequence
  Description of Artificial Sequence: Synthetic oligonucleotide
ucaaaccccagguggucag

SEQ ID NO: 2592594 - RNA, 19 nt, Artificial Sequence
  Description of Artificial Sequence: Synthetic oligonucleotide
cugcuguucccaaugauca

SEQ ID NO: 2592595 - RNA, 19 nt, Artificial Sequence
  Description of Artificial Sequence: Synthetic oligonucleotide
uaauguuguccuuggcgcu

SEQ ID NO: 2592596 - RNA, 19 nt, Artificial Sequence
  Description of Artificial Sequence: Synthetic oligonucleotide
gagguuuugcccacgcugc

SEQ ID NO: 2592597 - RNA, 19 nt, Artificial Sequence
  Description of Artificial Sequence: Synthetic oligonucleotide
cacaauccuggugaggagg

SEQ ID NO: 2592598 - RNA, 19 nt, Artificial Sequence
  Description of Artificial Sequence: Synthetic oligonucleotide
aucaggaucuugaacauau

SEQ ID NO: 2592599 - RNA, 19 nt, Artificial Sequence
  Description of Artificial Sequence: Synthetic oligonucleotide
gaucggaggacuccuucug

SEQ ID NO: 2592600 - RNA, 19 nt, Artificial Sequence
  Description of Artificial Sequence: Synthetic oligonucleotide
ggagguuuugcccacgcug

SEQ ID NO: 2592601 - RNA, 19 nt, Artificial Sequence
  Description of Artificial Sequence: Synthetic oligonucleotide
uugacacucaugacgucaa

SEQ ID NO: 2592602 - RNA, 19 nt, Artificial Sequence
  Description of Artificial Sequence: Synthetic oligonucleotide
auccucuugucauugcggu

SEQ ID NO: 2592603 - RNA, 19 nt, Artificial Sequence
  Description of Artificial Sequence: Synthetic oligonucleotide
agaucugcaguuugauccu

SEQ ID NO: 2592604 - RNA, 19 nt, Artificial Sequence
  Description of Artificial Sequence: Synthetic oligonucleotide
uccgacaucuucucacaga

SEQ ID NO: 2592605 - RNA, 19 nt, Artificial Sequence
  Description of Artificial Sequence: Synthetic oligonucleotide
uugcccacgcugcuguucc

SEQ ID NO: 2592606 - RNA, 19 nt, Artificial Sequence
  Description of Artificial Sequence: Synthetic oligonucleotide
ugucauugcgguagauggu

SEQ ID NO: 2592607 - RNA, 19 nt, Artificial Sequence
  Description of Artificial Sequence: Synthetic oligonucleotide
gagucgaccaguccugcac

SEQ ID NO: 2592608 - RNA, 19 nt, Artificial Sequence
  Description of Artificial Sequence: Synthetic oligonucleotide
ugaucaggaucuugaacau

SEQ ID NO: 2592609 - RNA, 19 nt, Artificial Sequence
  Description of Artificial Sequence: Synthetic oligonucleotide
ugaagcccauggcaccccg

SEQ ID NO: 2592610 - RNA, 19 nt, Artificial Sequence
  Description of Artificial Sequence: Synthetic oligonucleotide
uccagcgacuccgacaucu

SEQ ID NO: 2592611 - RNA, 19 nt, Artificial Sequence
  Description of Artificial Sequence: Synthetic oligonucleotide
cauauagucgaaguucuga

SEQ ID NO: 2592612 - RNA, 19 nt, Artificial Sequence
  Description of Artificial Sequence: Synthetic oligonucleotide
ucgcucguccuccauguca

SEQ ID NO: 2592613 - RNA, 19 nt, Artificial Sequence
  Description of Artificial Sequence: Synthetic oligonucleotide
cuugucauugcgguagaug

SEQ ID NO: 2592614 - RNA, 19 nt, Artificial Sequence
  Description of Artificial Sequence: Synthetic oligonucleotide
ugaucggaggacuccuucu

SEQ ID NO: 2592615 - RNA, 19 nt, Artificial Sequence
  Description of Artificial Sequence: Synthetic oligonucleotide
aaguucugaucggaggacu

SEQ ID NO: 2592616 - RNA, 19 nt, Artificial Sequence
  Description of Artificial Sequence: Synthetic oligonucleotide
gucuaugccaaccgugcug

SEQ ID NO: 2592617 - RNA, 19 nt, Artificial Sequence
  Description of Artificial Sequence: Synthetic oligonucleotide
agggucagcgguauccagc

SEQ ID NO: 2592618 - RNA, 19 nt, Artificial Sequence
  Description of Artificial Sequence: Synthetic oligonucleotide
cauuaauguuguccuuggc

SEQ ID NO: 2592619 - RNA, 19 nt, Artificial Sequence
  Description of Artificial Sequence: Synthetic oligonucleotide
auagcggaagaggaaggag

SEQ ID NO: 2592620 - RNA, 19 nt, Artificial Sequence
  Description of Artificial Sequence: Synthetic oligonucleotide
cucagcaggcacaauccug

SEQ ID NO: 2592621 - RNA, 19 nt, Artificial Sequence
  Description of Artificial Sequence: Synthetic oligonucleotide
uggucggugagcugugggc

SEQ ID NO: 2592622 - RNA, 19 nt, Artificial Sequence
  Description of Artificial Sequence: Synthetic oligonucleotide
uccucguuggugaugucau

SEQ ID NO: 2592623 - RNA, 19 nt, Artificial Sequence
  Description of Artificial Sequence: Synthetic oligonucleotide
gucagcgguauccagcgac

SEQ ID NO: 2592624 - RNA, 19 nt, Artificial Sequence
  Description of Artificial Sequence: Synthetic oligonucleotide
cacgaguaaguuuuaaucu

SEQ ID NO: 2592625 - RNA, 19 nt, Artificial Sequence
  Description of Artificial Sequence: Synthetic oligonucleotide
uccgacgacaccacucgcu

SEQ ID NO: 2592626 - RNA, 19 nt, Artificial Sequence
  Description of Artificial Sequence: Synthetic oligonucleotide
gacgucaaacagguuuggg

SEQ ID NO: 2592627 - RNA, 19 nt, Artificial Sequence
  Description of Artificial Sequence: Synthetic oligonucleotide
aguuuuaaucugagucgac

SEQ ID NO: 2592628 - RNA, 19 nt, Artificial Sequence
  Description of Artificial Sequence: Synthetic oligonucleotide
ccacgaguaaguuuuaauc

SEQ ID NO: 2592629 - RNA, 19 nt, Artificial Sequence
  Description of Artificial Sequence: Synthetic oligonucleotide
cucaugacgucaaacaggu

SEQ ID NO: 2592630 - RNA, 19 nt, Artificial Sequence
  Description of Artificial Sequence: Synthetic oligonucleotide
accgugcugacgaaggccg

SEQ ID NO: 2592631 - RNA, 19 nt, Artificial Sequence
  Description of Artificial Sequence: Synthetic oligonucleotide
gagcugugggcccugcuug

SEQ ID NO: 2592632 - RNA, 19 nt, Artificial Sequence
  Description of Artificial Sequence: Synthetic oligonucleotide
caagcugccggccacgcuc

SEQ ID NO: 2592633 - RNA, 19 nt, Artificial Sequence
  Description of Artificial Sequence: Synthetic oligonucleotide
aagcccauggcaccccggu

SEQ ID NO: 2592634 - RNA, 19 nt, Artificial Sequence
  Description of Artificial Sequence: Synthetic oligonucleotide
guagaugguuuugaccuug

SEQ ID NO: 2592635 - RNA, 19 nt, Artificial Sequence
  Description of Artificial Sequence: Synthetic oligonucleotide
ugcuguucccaaugaucag

SEQ ID NO: 2592636 - RNA, 19 nt, Artificial Sequence
  Description of Artificial Sequence: Synthetic oligonucleotide
ucagcgguauccagcgacu

SEQ ID NO: 2592637 - RNA, 19 nt, Artificial Sequence
  Description of Artificial Sequence: Synthetic oligonucleotide
agaucacauccaccaggcg

SEQ ID NO: 2592638 - RNA, 19 nt, Artificial Sequence
  Description of Artificial Sequence: Synthetic oligonucleotide
gcaggcacaauccugguga

SEQ ID NO: 2592639 - RNA, 19 nt, Artificial Sequence
  Description of Artificial Sequence: Synthetic oligonucleotide
acagcguugaaggacuccu

SEQ ID NO: 2592640 - RNA, 19 nt, Artificial Sequence
  Description of Artificial Sequence: Synthetic oligonucleotide
ugacgucaaacagguuugg

SEQ ID NO: 2592641 - RNA, 19 nt, Artificial Sequence
  Description of Artificial Sequence: Synthetic oligonucleotide
ugcgguagaugguuuugac

SEQ ID NO: 2592642 - RNA, 19 nt, Artificial Sequence
  Description of Artificial Sequence: Synthetic oligonucleotide
gaaguucugaucggaggac

SEQ ID NO: 2592643 - RNA, 19 nt, Artificial Sequence
  Description of Artificial Sequence: Synthetic oligonucleotide
ugugggcccugcuuggcgc

SEQ ID NO: 2592644 - RNA, 19 nt, Artificial Sequence
  Description of Artificial Sequence: Synthetic oligonucleotide
guuuggggauaucccagug

SEQ ID NO: 2592645 - RNA, 19 nt, Artificial Sequence
  Description of Artificial Sequence: Synthetic oligonucleotide
gggucagcgguauccagcg

SEQ ID NO: 2592646 - RNA, 19 nt, Artificial Sequence
  Description of Artificial Sequence: Synthetic oligonucleotide
guauccagcgacuccgaca

SEQ ID NO: 2592647 - RNA, 19 nt, Artificial Sequence
  Description of Artificial Sequence: Synthetic oligonucleotide
aguucugaucggaggacuc

SEQ ID NO: 2592648 - RNA, 19 nt, Artificial Sequence
  Description of Artificial Sequence: Synthetic oligonucleotide
gacuccuucugcccauagc

SEQ ID NO: 2592649 - RNA, 19 nt, Artificial Sequence
  Description of Artificial Sequence: Synthetic oligonucleotide
acucgcucguccuccaugu

SEQ ID NO: 2592650 - RNA, 19 nt, Artificial Sequence
  Description of Artificial Sequence: Synthetic oligonucleotide
uugauccucuugucauugc

SEQ ID NO: 2592651 - RNA, 19 nt, Artificial Sequence
  Description of Artificial Sequence: Synthetic oligonucleotide
gcuguucccaaugaucagg

SEQ ID NO: 2592652 - RNA, 19 nt, Artificial Sequence
  Description of Artificial Sequence: Synthetic oligonucleotide
uguuggucggugagcugug

SEQ ID NO: 2592653 - RNA, 19 nt, Artificial Sequence
  Description of Artificial Sequence: Synthetic oligonucleotide
ugaccgcagggucagcggu

SEQ ID NO: 2592654 - RNA, 19 nt, Artificial Sequence
  Description of Artificial Sequence: Synthetic oligonucleotide
auugcgguagaugguuuug

SEQ ID NO: 2592655 - RNA, 19 nt, Artificial Sequence
  Description of Artificial Sequence: Synthetic oligonucleotide
agucuaugccaaccgugcu

SEQ ID NO: 2592656 - RNA, 19 nt, Artificial Sequence
  Description of Artificial Sequence: Synthetic oligonucleotide
ccaaugaucaggaucuuga

SEQ ID NO: 2592657 - RNA, 19 nt, Artificial Sequence
  Description of Artificial Sequence: Synthetic oligonucleotide
gcguucaaaggucugcuug

SEQ ID NO: 2592658 - RNA, 19 nt, Artificial Sequence
  Description of Artificial Sequence: Synthetic oligonucleotide
agucgaccaguccugcaca

SEQ ID NO: 2592659 - RNA, 19 nt, Artificial Sequence
  Description of Artificial Sequence: Synthetic oligonucleotide
cacgcugcuguucccaaug

SEQ ID NO: 2592660 - RNA, 19 nt, Artificial Sequence
  Description of Artificial Sequence: Synthetic oligonucleotide
gucauacauuaagaugaag

SEQ ID NO: 2592661 - RNA, 19 nt, Artificial Sequence
  Description of Artificial Sequence: Synthetic oligonucleotide
gcuccgacgacaccacucg

SEQ ID NO: 2592662 - RNA, 19 nt, Artificial Sequence
  Description of Artificial Sequence: Synthetic oligonucleotide
auagcgcgaaucuguggcu

SEQ ID NO: 2592663 - RNA, 19 nt, Artificial Sequence
  Description of Artificial Sequence: Synthetic oligonucleotide
ccaaccgugcugacgaagg

SEQ ID NO: 2592664 - RNA, 19 nt, Artificial Sequence
  Description of Artificial Sequence: Synthetic oligonucleotide
agcaggcacaauccuggug

SEQ ID NO: 2592665 - RNA, 19 nt, Artificial Sequence
  Description of Artificial Sequence: Synthetic oligonucleotide
uucugaucggaggacuccu

SEQ ID NO: 2592666 - RNA, 19 nt, Artificial Sequence
  Description of Artificial Sequence: Synthetic oligonucleotide
acucaaaccccaggugguc

SEQ ID NO: 2592667 - RNA, 19 nt, Artificial Sequence
  Description of Artificial Sequence: Synthetic oligonucleotide
ucaaacagguuuggggaua

SEQ ID NO: 2592668 - RNA, 19 nt, Artificial Sequence
  Description of Artificial Sequence: Synthetic oligonucleotide
agguuuggggauaucccag

SEQ ID NO: 2592669 - RNA, 19 nt, Artificial Sequence
  Description of Artificial Sequence: Synthetic oligonucleotide
cacguuugacacucaugac

SEQ ID NO: 2592670 - RNA, 19 nt, Artificial Sequence
  Description of Artificial Sequence: Synthetic oligonucleotide
gucgaaguucugaucggag

SEQ ID NO: 2592671 - RNA, 19 nt, Artificial Sequence
  Description of Artificial Sequence: Synthetic oligonucleotide
gaagaggaaggagguuuug

SEQ ID NO: 2592672 - RNA, 19 nt, Artificial Sequence
  Description of Artificial Sequence: Synthetic oligonucleotide
aaaccccagguggucagca

SEQ ID NO: 2592673 - RNA, 19 nt, Artificial Sequence
  Description of Artificial Sequence: Synthetic oligonucleotide
caucuucucacagaucaca

SEQ ID NO: 2592674 - RNA, 19 nt, Artificial Sequence
  Description of Artificial Sequence: Synthetic oligonucleotide
ggaggugccuguuggucgg

SEQ ID NO: 2592675 - RNA, 19 nt, Artificial Sequence
  Description of Artificial Sequence: Synthetic oligonucleotide
ugacauuaauguuguccuu

SEQ ID NO: 2592676 - RNA, 19 nt, Artificial Sequence
  Description of Artificial Sequence: Synthetic oligonucleotide
ggugcgguagcgcucuugc

SEQ ID NO: 2592677 - RNA, 19 nt, Artificial Sequence
  Description of Artificial Sequence: Synthetic oligonucleotide
aaggccggugugaaggagu

SEQ ID NO: 2592678 - RNA, 19 nt, Artificial Sequence
  Description of Artificial Sequence: Synthetic oligonucleotide
cuguucccaaugaucagga

SEQ ID NO: 2592679 - RNA, 19 nt, Artificial Sequence
  Description of Artificial Sequence: Synthetic oligonucleotide
gaaggagguuuugcccacg

SEQ ID NO: 2592680 - RNA, 19 nt, Artificial Sequence
  Description of Artificial Sequence: Synthetic oligonucleotide
gugaccgcagggucagcgg

SEQ ID NO: 2592681 - RNA, 19 nt, Artificial Sequence
  Description of Artificial Sequence: Synthetic oligonucleotide
guucugaucggaggacucc

SEQ ID NO: 2592682 - RNA, 19 nt, Artificial Sequence
  Description of Artificial Sequence: Synthetic oligonucleotide
cugcuuggcgccugugacc

SEQ ID NO: 2592683 - RNA, 19 nt, Artificial Sequence
  Description of Artificial Sequence: Synthetic oligonucleotide
cugggcauugucccacgag

SEQ ID NO: 2592684 - RNA, 19 nt, Artificial Sequence
  Description of Artificial Sequence: Synthetic oligonucleotide
cugcacagcguugaaggac

SEQ ID NO: 2592685 - RNA, 19 nt, Artificial Sequence
  Description of Artificial Sequence: Synthetic oligonucleotide
ggcacaauccuggugagga

SEQ ID NO: 2592686 - RNA, 19 nt, Artificial Sequence
  Description of Artificial Sequence: Synthetic oligonucleotide
gcgaaucuguggcugacgc

SEQ ID NO: 2592687 - RNA, 19 nt, Artificial Sequence
  Description of Artificial Sequence: Synthetic oligonucleotide
ugagucgaccaguccugca

SEQ ID NO: 2592688 - RNA, 19 nt, Artificial Sequence
  Description of Artificial Sequence: Synthetic oligonucleotide
uugcgguagaugguuuuga

SEQ ID NO: 2592689 - RNA, 19 nt, Artificial Sequence
  Description of Artificial Sequence: Synthetic oligonucleotide
auaggcgguggugauggug

SEQ ID NO: 2592690 - RNA, 19 nt, Artificial Sequence
  Description of Artificial Sequence: Synthetic oligonucleotide
agucgaaguucugaucgga

SEQ ID NO: 2592691 - RNA, 19 nt, Artificial Sequence
  Description of Artificial Sequence: Synthetic oligonucleotide
caggcguucaaaggucugc

SEQ ID NO: 2592692 - RNA, 19 nt, Artificial Sequence
  Description of Artificial Sequence: Synthetic oligonucleotide
uggggauaucccaguggcu

SEQ ID NO: 2592693 - RNA, 19 nt, Artificial Sequence
  Description of Artificial Sequence: Synthetic oligonucleotide
gugccuguuggucggugag

SEQ ID NO: 2592694 - RNA, 19 nt, Artificial Sequence
  Description of Artificial Sequence: Synthetic oligonucleotide
guuuugaccuugaagucua

SEQ ID NO: 2592695 - RNA, 19 nt, Artificial Sequence
  Description of Artificial Sequence: Synthetic oligonucleotide
cauuaagaugaagcccaug

SEQ ID NO: 2592696 - RNA, 19 nt, Artificial Sequence
  Description of Artificial Sequence: Synthetic oligonucleotide
gucacguuugacacucaug

SEQ ID NO: 2592697 - RNA, 19 nt, Artificial Sequence
  Description of Artificial Sequence: Synthetic oligonucleotide
cugaucggaggacuccuuc

SEQ ID NO: 2592698 - RNA, 19 nt, Artificial Sequence
  Description of Artificial Sequence: Synthetic oligonucleotide
gacgaaggccggugugaag

SEQ ID NO: 2592699 - RNA, 19 nt, Artificial Sequence
  Description of Artificial Sequence: Synthetic oligonucleotide
gcgguagaugguuuugacc

SEQ ID NO: 2592700 - RNA, 19 nt, Artificial Sequence
  Description of Artificial Sequence: Synthetic oligonucleotide
uugucccacgaguaaguuu

SEQ ID NO: 2592701 - RNA, 19 nt, Artificial Sequence
  Description of Artificial Sequence: Synthetic oligonucleotide
aaacagguuuggggauauc

SEQ ID NO: 2592702 - RNA, 19 nt, Artificial Sequence
  Description of Artificial Sequence: Synthetic oligonucleotide
gcgguauccagcgacuccg

SEQ ID NO: 2592703 - RNA, 19 nt, Artificial Sequence
  Description of Artificial Sequence: Synthetic oligonucleotide
ucauugcgguagaugguuu

SEQ ID NO: 2592704 - RNA, 19 nt, Artificial Sequence
  Description of Artificial Sequence: Synthetic oligonucleotide
ugcugacgaaggccggugu

SEQ ID NO: 2592705 - RNA, 19 nt, Artificial Sequence
  Description of Artificial Sequence: Synthetic oligonucleotide
acaauccuggugaggaggu

SEQ ID NO: 2592706 - RNA, 19 nt, Artificial Sequence
  Description of Artificial Sequence: Synthetic oligonucleotide
caaccgugcugacgaaggc

SEQ ID NO: 2592707 - RNA, 19 nt, Artificial Sequence
  Description of Artificial Sequence: Synthetic oligonucleotide
accuugaagucuaugccaa

SEQ ID NO: 2592708 - RNA, 19 nt, Artificial Sequence
  Description of Artificial Sequence: Synthetic oligonucleotide
gucgaccaguccugcacag

SEQ ID NO: 2592709 - RNA, 19 nt, Artificial Sequence
  Description of Artificial Sequence: Synthetic oligonucleotide
caccaggcguucaaagguc

SEQ ID NO: 2592710 - RNA, 19 nt, Artificial Sequence
  Description of Artificial Sequence: Synthetic oligonucleotide
uagcgcgaaucuguggcug

SEQ ID NO: 2592711 - RNA, 19 nt, Artificial Sequence
  Description of Artificial Sequence: Synthetic oligonucleotide
auguuguccuuggcgcugg

SEQ ID NO: 2592712 - RNA, 19 nt, Artificial Sequence
  Description of Artificial Sequence: Synthetic oligonucleotide
cuccgacaucuucucacag

SEQ ID NO: 2592713 - RNA, 19 nt, Artificial Sequence
  Description of Artificial Sequence: Synthetic oligonucleotide
caaugaucaggaucuugaa

SEQ ID NO: 2592714 - RNA, 19 nt, Artificial Sequence
  Description of Artificial Sequence: Synthetic oligonucleotide
aucuguggcugacgccauc

SEQ ID NO: 2592715 - RNA, 19 nt, Artificial Sequence
  Description of Artificial Sequence: Synthetic oligonucleotide
accaguccugcacagcguu

SEQ ID NO: 2592716 - RNA, 19 nt, Artificial Sequence
  Description of Artificial Sequence: Synthetic oligonucleotide
aauaggcgguggugauggu

SEQ ID NO: 2592717 - RNA, 19 nt, Artificial Sequence
  Description of Artificial Sequence: Synthetic oligonucleotide
gcauugucccacgaguaag

SEQ ID NO: 2592718 - RNA, 19 nt, Artificial Sequence
  Description of Artificial Sequence: Synthetic oligonucleotide
gacgacaccacucgcucgu

SEQ ID NO: 2592719 - RNA, 19 nt, Artificial Sequence
  Description of Artificial Sequence: Synthetic oligonucleotide
cugugggcccugcuuggcg

SEQ ID NO: 2592720 - RNA, 19 nt, Artificial Sequence
  Description of Artificial Sequence: Synthetic oligonucleotide
acauauagucgaaguucug

SEQ ID NO: 2592721 - RNA, 19 nt, Artificial Sequence
  Description of Artificial Sequence: Synthetic oligonucleotide
ugcccauagcgcgaaucug

SEQ ID NO: 2592722 - RNA, 19 nt, Artificial Sequence
  Description of Artificial Sequence: Synthetic oligonucleotide
ggggauaucccaguggcuc

SEQ ID NO: 2592723 - RNA, 19 nt, Artificial Sequence
  Description of Artificial Sequence: Synthetic oligonucleotide
ugacacucaugacgucaaa

SEQ ID NO: 2592724 - RNA, 19 nt, Artificial Sequence
  Description of Artificial Sequence: Synthetic oligonucleotide
uuuugaccuugaagucuau

SEQ ID NO: 2592725 - RNA, 19 nt, Artificial Sequence
  Description of Artificial Sequence: Synthetic oligonucleotide
ggcucagcaggcacaaucc

SEQ ID NO: 2592726 - RNA, 19 nt, Artificial Sequence
  Description of Artificial Sequence: Synthetic oligonucleotide
ggucugcuugacauuaaug

SEQ ID NO: 2592727 - RNA, 19 nt, Artificial Sequence
  Description of Artificial Sequence: Synthetic oligonucleotide
aggagguuuugcccacgcu

SEQ ID NO: 2592728 - RNA, 19 nt, Artificial Sequence
  Description of Artificial Sequence: Synthetic oligonucleotide
ucugaucggaggacuccuu

SEQ ID NO: 2592729 - RNA, 19 nt, Artificial Sequence
  Description of Artificial Sequence: Synthetic oligonucleotide
accugggcauugucccacg

SEQ ID NO: 2592730 - RNA, 19 nt, Artificial Sequence
  Description of Artificial Sequence: Synthetic oligonucleotide
agcgcgaaucuguggcuga

SEQ ID NO: 2592731 - RNA, 19 nt, Artificial Sequence
  Description of Artificial Sequence: Synthetic oligonucleotide
uguucccaaugaucaggau

SEQ ID NO: 2592732 - RNA, 19 nt, Artificial Sequence
  Description of Artificial Sequence: Synthetic oligonucleotide
uuugcccacgcugcuguuc

SEQ ID NO: 2592733 - RNA, 19 nt, Artificial Sequence
  Description of Artificial Sequence: Synthetic oligonucleotide
cgucaaacagguuugggga

SEQ ID NO: 2592734 - RNA, 19 nt, Artificial Sequence
  Description of Artificial Sequence: Synthetic oligonucleotide
cauagcggaagaggaagga

SEQ ID NO: 2592735 - RNA, 19 nt, Artificial Sequence
  Description of Artificial Sequence: Synthetic oligonucleotide
ugacgaaggccggugugaa

SEQ ID NO: 2592736 - RNA, 19 nt, Artificial Sequence
  Description of Artificial Sequence: Synthetic oligonucleotide
gaagcccauggcaccccgg

SEQ ID NO: 2592737 - RNA, 19 nt, Artificial Sequence
  Description of Artificial Sequence: Synthetic oligonucleotide
cacucgcucguccuccaug

SEQ ID NO: 2592738 - RNA, 19 nt, Artificial Sequence
  Description of Artificial Sequence: Synthetic oligonucleotide
gacaccacucgcucguccu

SEQ ID NO: 2592739 - RNA, 19 nt, Artificial Sequence
  Description of Artificial Sequence: Synthetic oligonucleotide
ugccuguuggucggugagc

SEQ ID NO: 2592740 - RNA, 19 nt, Artificial Sequence
  Description of Artificial Sequence: Synthetic oligonucleotide
gcugcuguucccaaugauc

SEQ ID NO: 2592741 - RNA, 19 nt, Artificial Sequence
  Description of Artificial Sequence: Synthetic oligonucleotide
cacagcguugaaggacucc

SEQ ID NO: 2592742 - RNA, 19 nt, Artificial Sequence
  Description of Artificial Sequence: Synthetic oligonucleotide
gucagcaagcugccggcca

SEQ ID NO: 2592743 - RNA, 19 nt, Artificial Sequence
  Description of Artificial Sequence: Synthetic oligonucleotide
aggccggugugaaggaguc

SEQ ID NO: 2592744 - RNA, 19 nt, Artificial Sequence
  Description of Artificial Sequence: Synthetic oligonucleotide
aaccccagguggucagcaa

SEQ ID NO: 2592745 - RNA, 19 nt, Artificial Sequence
  Description of Artificial Sequence: Synthetic oligonucleotide
aggcacaauccuggugagg

SEQ ID NO: 2592746 - RNA, 19 nt, Artificial Sequence
  Description of Artificial Sequence: Synthetic oligonucleotide
guuugacacucaugacguc

SEQ ID NO: 2592747 - RNA, 19 nt, Artificial Sequence
  Description of Artificial Sequence: Synthetic oligonucleotide
ucgaccaguccugcacagc

SEQ ID NO: 2592748 - RNA, 19 nt, Artificial Sequence
  Description of Artificial Sequence: Synthetic oligonucleotide
gcaccccgguaauaggcgg

SEQ ID NO: 2592749 - RNA, 19 nt, Artificial Sequence
  Description of Artificial Sequence: Synthetic oligonucleotide
cugagucgaccaguccugc

SEQ ID NO: 2592750 - RNA, 19 nt, Artificial Sequence
  Description of Artificial Sequence: Synthetic oligonucleotide
guuggucggugagcugugg

SEQ ID NO: 2592751 - RNA, 19 nt, Artificial Sequence
  Description of Artificial Sequence: Synthetic oligonucleotide
uggcgccugugaccgcagg

SEQ ID NO: 2592752 - RNA, 19 nt, Artificial Sequence
  Description of Artificial Sequence: Synthetic oligonucleotide
ggaaggagguuuugcccac

SEQ ID NO: 2592753 - RNA, 19 nt, Artificial Sequence
  Description of Artificial Sequence: Synthetic oligonucleotide
gauggugcgguagcgcucu

SEQ ID NO: 2592754 - RNA, 19 nt, Artificial Sequence
  Description of Artificial Sequence: Synthetic oligonucleotide
gguuuugaccuugaagucu

SEQ ID NO: 2592755 - RNA, 19 nt, Artificial Sequence
  Description of Artificial Sequence: Synthetic oligonucleotide
cauugucccacgaguaagu

SEQ ID NO: 2592756 - RNA, 19 nt, Artificial Sequence
  Description of Artificial Sequence: Synthetic oligonucleotide
ggcgccugugaccgcaggg

SEQ ID NO: 2592757 - RNA, 19 nt, Artificial Sequence
  Description of Artificial Sequence: Synthetic oligonucleotide
cacgcuccgacgacaccac

SEQ ID NO: 2592758 - RNA, 19 nt, Artificial Sequence
  Description of Artificial Sequence: Synthetic oligonucleotide
uuggcgccugugaccgcag

SEQ ID NO: 2592759 - RNA, 19 nt, Artificial Sequence
  Description of Artificial Sequence: Synthetic oligonucleotide
caccacucgcucguccucc

SEQ ID NO: 2592760 - RNA, 19 nt, Artificial Sequence
  Description of Artificial Sequence: Synthetic oligonucleotide
ggaggacuccuucugccca

SEQ ID NO: 2592761 - RNA, 19 nt, Artificial Sequence
  Description of Artificial Sequence: Synthetic oligonucleotide
ccauagcgcgaaucugugg

SEQ ID NO: 2592762 - RNA, 19 nt, Artificial Sequence
  Description of Artificial Sequence: Synthetic oligonucleotide
cuccucguuggugauguca

SEQ ID NO: 2592763 - RNA, 19 nt, Artificial Sequence
  Description of Artificial Sequence: Synthetic oligonucleotide
auugucccacgaguaaguu

SEQ ID NO: 2592764 - RNA, 19 nt, Artificial Sequence
  Description of Artificial Sequence: Synthetic oligonucleotide
cugccggccacgcuccgac

SEQ ID NO: 2592765 - RNA, 19 nt, Artificial Sequence
  Description of Artificial Sequence: Synthetic oligonucleotide
accaggcguucaaaggucu

SEQ ID NO: 2592766 - RNA, 19 nt, Artificial Sequence
  Description of Artificial Sequence: Synthetic oligonucleotide
ucccacgaguaaguuuuaa

SEQ ID NO: 2592767 - RNA, 19 nt, Artificial Sequence
  Description of Artificial Sequence: Synthetic oligonucleotide
gaucaggaucuugaacaua

SEQ ID NO: 2592768 - RNA, 19 nt, Artificial Sequence
  Description of Artificial Sequence: Synthetic oligonucleotide
cgaguaaguuuuaaucuga

SEQ ID NO: 2592769 - RNA, 19 nt, Artificial Sequence
  Description of Artificial Sequence: Synthetic oligonucleotide
gucaaacagguuuggggau

SEQ ID NO: 2592770 - RNA, 19 nt, Artificial Sequence
  Description of Artificial Sequence: Synthetic oligonucleotide
cugacgaaggccgguguga

SEQ ID NO: 2592771 - RNA, 19 nt, Artificial Sequence
  Description of Artificial Sequence: Synthetic oligonucleotide
aaucuguggcugacgccau

SEQ ID NO: 2592772 - RNA, 19 nt, Artificial Sequence
  Description of Artificial Sequence: Synthetic oligonucleotide
cagcguugaaggacuccuc

SEQ ID NO: 2592773 - RNA, 19 nt, Artificial Sequence
  Description of Artificial Sequence: Synthetic oligonucleotide
acauuaagaugaagcccau

SEQ ID NO: 2592774 - RNA, 19 nt, Artificial Sequence
  Description of Artificial Sequence: Synthetic oligonucleotide
cuccgacgacaccacucgc

SEQ ID NO: 2592775 - RNA, 19 nt, Artificial Sequence
  Description of Artificial Sequence: Synthetic oligonucleotide
ccagaucugcaguuugauc

SEQ ID NO: 2592776 - RNA, 19 nt, Artificial Sequence
  Description of Artificial Sequence: Synthetic oligonucleotide
caccugggcauugucccac

SEQ ID NO: 2592777 - RNA, 19 nt, Artificial Sequence
  Description of Artificial Sequence: Synthetic oligonucleotide
aaggucugcuugacauuaa

SEQ ID NO: 2592778 - RNA, 19 nt, Artificial Sequence
  Description of Artificial Sequence: Synthetic oligonucleotide
ggcauugucccacgaguaa

SEQ ID NO: 2592779 - RNA, 19 nt, Artificial Sequence
  Description of Artificial Sequence: Synthetic oligonucleotide
caaaccccagguggucagc

SEQ ID NO: 2592780 - RNA, 19 nt, Artificial Sequence
  Description of Artificial Sequence: Synthetic oligonucleotide
cagcauagcggaagaggaa

SEQ ID NO: 2592781 - RNA, 19 nt, Artificial Sequence
  Description of Artificial Sequence: Synthetic oligonucleotide
gguauccagcgacuccgac

SEQ ID NO: 2592782 - RNA, 19 nt, Artificial Sequence
  Description of Artificial Sequence: Synthetic oligonucleotide
ucaugacgucaaacagguu

SEQ ID NO: 2592783 - RNA, 19 nt, Artificial Sequence
  Description of Artificial Sequence: Synthetic oligonucleotide
gugcgguagcgcucuugcc

SEQ ID NO: 2592784 - RNA, 19 nt, Artificial Sequence
  Description of Artificial Sequence: Synthetic oligonucleotide
cuguuggucggugagcugu

SEQ ID NO: 2592785 - RNA, 19 nt, Artificial Sequence
  Description of Artificial Sequence: Synthetic oligonucleotide
uggugcgguagcgcucuug

SEQ ID NO: 2592786 - RNA, 19 nt, Artificial Sequence
  Description of Artificial Sequence: Synthetic oligonucleotide
caguccugcacagcguuga

SEQ ID NO: 2592787 - RNA, 19 nt, Artificial Sequence
  Description of Artificial Sequence: Synthetic oligonucleotide
cccauagcgcgaaucugug

SEQ ID NO: 2592788 - RNA, 19 nt, Artificial Sequence
  Description of Artificial Sequence: Synthetic oligonucleotide
gguuuugcccacgcugcug

SEQ ID NO: 2592789 - RNA, 19 nt, Artificial Sequence
  Description of Artificial Sequence: Synthetic oligonucleotide
caguggcucagcaggcaca

SEQ ID NO: 2592790 - RNA, 19 nt, Artificial Sequence
  Description of Artificial Sequence: Synthetic oligonucleotide
accccgguaauaggcggug

SEQ ID NO: 2592791 - RNA, 19 nt, Artificial Sequence
  Description of Artificial Sequence: Synthetic oligonucleotide
gugcugacgaaggccggug

SEQ ID NO: 2592792 - RNA, 19 nt, Artificial Sequence
  Description of Artificial Sequence: Synthetic oligonucleotide
cuuggcgccugugaccgca

SEQ ID NO: 2592793 - RNA, 19 nt, Artificial Sequence
  Description of Artificial Sequence: Synthetic oligonucleotide
cuaugccaaccgugcugac

SEQ ID NO: 2592794 - RNA, 19 nt, Artificial Sequence
  Description of Artificial Sequence: Synthetic oligonucleotide
ugccggccacgcuccgacg

SEQ ID NO: 2592795 - RNA, 19 nt, Artificial Sequence
  Description of Artificial Sequence: Synthetic oligonucleotide
aguccugcacagcguugaa

SEQ ID NO: 2592796 - RNA, 19 nt, Artificial Sequence
  Description of Artificial Sequence: Synthetic oligonucleotide
gucauugcgguagaugguu

SEQ ID NO: 2592797 - RNA, 19 nt, Artificial Sequence
  Description of Artificial Sequence: Synthetic oligonucleotide
gugggcccugcuuggcgcc

SEQ ID NO: 2592798 - RNA, 19 nt, Artificial Sequence
  Description of Artificial Sequence: Synthetic oligonucleotide
guuugauccucuugucauu

SEQ ID NO: 2592799 - RNA, 19 nt, Artificial Sequence
  Description of Artificial Sequence: Synthetic oligonucleotide
cguuugacacucaugacgu

SEQ ID NO: 2592800 - RNA, 19 nt, Artificial Sequence
  Description of Artificial Sequence: Synthetic oligonucleotide
caauccuggugaggaggug

SEQ ID NO: 2592801 - RNA, 19 nt, Artificial Sequence
  Description of Artificial Sequence: Synthetic oligonucleotide
cguucaaaggucugcuuga

SEQ ID NO: 2592802 - RNA, 19 nt, Artificial Sequence
  Description of Artificial Sequence: Synthetic oligonucleotide
acgacaccacucgcucguc

SEQ ID NO: 2592803 - RNA, 19 nt, Artificial Sequence
  Description of Artificial Sequence: Synthetic oligonucleotide
uuuugcccacgcugcuguu

SEQ ID NO: 2592804 - RNA, 19 nt, Artificial Sequence
  Description of Artificial Sequence: Synthetic oligonucleotide
gguggucagcaagcugccg

SEQ ID NO: 2592805 - RNA, 19 nt, Artificial Sequence
  Description of Artificial Sequence: Synthetic oligonucleotide
ccugugaccgcagggucag

SEQ ID NO: 2592806 - RNA, 19 nt, Artificial Sequence
  Description of Artificial Sequence: Synthetic oligonucleotide
ggugccuguuggucgguga

SEQ ID NO: 2592807 - RNA, 19 nt, Artificial Sequence
  Description of Artificial Sequence: Synthetic oligonucleotide
gguuuggggauaucccagu

SEQ ID NO: 2592808 - RNA, 19 nt, Artificial Sequence
  Description of Artificial Sequence: Synthetic oligonucleotide
gccaaccgugcugacgaag

SEQ ID NO: 2592809 - RNA, 19 nt, Artificial Sequence
  Description of Artificial Sequence: Synthetic oligonucleotide
accgcagggucagcgguau

SEQ ID NO: 2592810 - RNA, 19 nt, Artificial Sequence
  Description of Artificial Sequence: Synthetic oligonucleotide
agcugccggccacgcuccg

SEQ ID NO: 2592811 - RNA, 19 nt, Artificial Sequence
  Description of Artificial Sequence: Synthetic oligonucleotide
ugccaaccgugcugacgaa

SEQ ID NO: 2592812 - RNA, 19 nt, Artificial Sequence
  Description of Artificial Sequence: Synthetic oligonucleotide
cagcgguauccagcgacuc

SEQ ID NO: 2592813 - RNA, 19 nt, Artificial Sequence
  Description of Artificial Sequence: Synthetic oligonucleotide
ccagguggucagcaagcug

SEQ ID NO: 2592814 - RNA, 19 nt, Artificial Sequence
  Description of Artificial Sequence: Synthetic oligonucleotide
cauugcgguagaugguuuu

SEQ ID NO: 2592815 - RNA, 19 nt, Artificial Sequence
  Description of Artificial Sequence: Synthetic oligonucleotide
caaaggucugcuugacauu

SEQ ID NO: 2592816 - RNA, 19 nt, Artificial Sequence
  Description of Artificial Sequence: Synthetic oligonucleotide
gaggacuccuucugcccau

SEQ ID NO: 2592817 - RNA, 19 nt, Artificial Sequence
  Description of Artificial Sequence: Synthetic oligonucleotide
ccaggcguucaaaggucug

SEQ ID NO: 2592818 - RNA, 19 nt, Artificial Sequence
  Description of Artificial Sequence: Synthetic oligonucleotide
acgcuccgacgacaccacu

SEQ ID NO: 2592819 - RNA, 19 nt, Artificial Sequence
  Description of Artificial Sequence: Synthetic oligonucleotide
aggugccuguuggucggug

SEQ ID NO: 2592820 - RNA, 19 nt, Artificial Sequence
  Description of Artificial Sequence: Synthetic oligonucleotide
ggcgguggugauggugcgg

SEQ ID NO: 2592821 - RNA, 19 nt, Artificial Sequence
  Description of Artificial Sequence: Synthetic oligonucleotide
cucgcucguccuccauguc

SEQ ID NO: 2592822 - RNA, 19 nt, Artificial Sequence
  Description of Artificial Sequence: Synthetic oligonucleotide
uccccaccagcagcaccug

SEQ ID NO: 2592823 - RNA, 19 nt, Artificial Sequence
  Description of Artificial Sequence: Synthetic oligonucleotide
cgacgacaccacucgcucg

SEQ ID NO: 2592824 - RNA, 19 nt, Artificial Sequence
  Description of Artificial Sequence: Synthetic oligonucleotide
ccaccaggcguucaaaggu

SEQ ID NO: 2592825 - RNA, 19 nt, Artificial Sequence
  Description of Artificial Sequence: Synthetic oligonucleotide
ccuucugcccauagcgcga

SEQ ID NO: 2592826 - RNA, 19 nt, Artificial Sequence
  Description of Artificial Sequence: Synthetic oligonucleotide
ccaguccugcacagcguug

SEQ ID NO: 2592827 - RNA, 19 nt, Artificial Sequence
  Description of Artificial Sequence: Synthetic oligonucleotide
ccgacaucuucucacagau

SEQ ID NO: 2592828 - RNA, 19 nt, Artificial Sequence
  Description of Artificial Sequence: Synthetic oligonucleotide
cuucugcccauagcgcgaa

SEQ ID NO: 2592829 - RNA, 19 nt, Artificial Sequence
  Description of Artificial Sequence: Synthetic oligonucleotide
ccacgcuccgacgacacca

SEQ ID NO: 2592830 - RNA, 19 nt, Artificial Sequence
  Description of Artificial Sequence: Synthetic oligonucleotide
ggucacguuugacacucau

SEQ ID NO: 2592831 - RNA, 19 nt, Artificial Sequence
  Description of Artificial Sequence: Synthetic oligonucleotide
ggacuccucguuggugaug

SEQ ID NO: 2592832 - RNA, 19 nt, Artificial Sequence
  Description of Artificial Sequence: Synthetic oligonucleotide
ccgugcugacgaaggccgg

SEQ ID NO: 2592833 - RNA, 19 nt, Artificial Sequence
  Description of Artificial Sequence: Synthetic oligonucleotide
gguagaugguuuugaccuu

SEQ ID NO: 2592834 - RNA, 19 nt, Artificial Sequence
  Description of Artificial Sequence: Synthetic oligonucleotide
cgcuccgacgacaccacuc

SEQ ID NO: 2592835 - RNA, 19 nt, Artificial Sequence
  Description of Artificial Sequence: Synthetic oligonucleotide
ccuguuggucggugagcug

SEQ ID NO: 2592836 - RNA, 19 nt, Artificial Sequence
  Description of Artificial Sequence: Synthetic oligonucleotide
gaccaguccugcacagcgu

SEQ ID NO: 2592837 - RNA, 19 nt, Artificial Sequence
  Description of Artificial Sequence: Synthetic oligonucleotide
gcccauagcgcgaaucugu

SEQ ID NO: 2592838 - RNA, 19 nt, Artificial Sequence
  Description of Artificial Sequence: Synthetic oligonucleotide
gccggccacgcuccgacga

SEQ ID NO: 2592839 - RNA, 19 nt, Artificial Sequence
  Description of Artificial Sequence: Synthetic oligonucleotide
gcguugaaggacuccucgu

SEQ ID NO: 2592840 - RNA, 19 nt, Artificial Sequence
  Description of Artificial Sequence: Synthetic oligonucleotide
gggcauugucccacgagua

SEQ ID NO: 2592841 - RNA, 19 nt, Artificial Sequence
  Description of Artificial Sequence: Synthetic oligonucleotide
gaccgcagggucagcggua

SEQ ID NO: 2592842 - RNA, 19 nt, Artificial Sequence
  Description of Artificial Sequence: Synthetic oligonucleotide
gccugugaccgcaggguca

SEQ ID NO: 2592843 - RNA, 19 nt, Artificial Sequence
  Description of Artificial Sequence: Synthetic oligonucleotide
caccccgguaauaggcggu

SEQ ID NO: 2592844 - RNA, 19 nt, Artificial Sequence
  Description of Artificial Sequence: Synthetic oligonucleotide
gcucagcaggcacaauccu

SEQ ID NO: 2592845 - RNA, 19 nt, Artificial Sequence
  Description of Artificial Sequence: Synthetic oligonucleotide
cacauccaccaggcguuca

SEQ ID NO: 2592846 - RNA, 19 nt, Artificial Sequence
  Description of Artificial Sequence: Synthetic oligonucleotide
gccggugugaaggagucau

SEQ ID NO: 2592847 - RNA, 19 nt, Artificial Sequence
  Description of Artificial Sequence: Synthetic oligonucleotide
cgacaccacucgcucgucc

SEQ ID NO: 2592848 - RNA, 19 nt, Artificial Sequence
  Description of Artificial Sequence: Synthetic oligonucleotide
gccuguuggucggugagcu

SEQ ID NO: 2592849 - RNA, 19 nt, Artificial Sequence
  Description of Artificial Sequence: Synthetic oligonucleotide
guagcgcucuugcccugcu

SEQ ID NO: 2592850 - RNA, 19 nt, Artificial Sequence
  Description of Artificial Sequence: Synthetic oligonucleotide
aggacuccuucugcccaua

SEQ ID NO: 2592851 - RNA, 19 nt, Artificial Sequence
  Description of Artificial Sequence: Synthetic oligonucleotide
cagcagcaccugggcauug

SEQ ID NO: 2592852 - RNA, 19 nt, Artificial Sequence
  Description of Artificial Sequence: Synthetic oligonucleotide
cccacgaguaaguuuuaau

SEQ ID NO: 2592853 - RNA, 19 nt, Artificial Sequence
  Description of Artificial Sequence: Synthetic oligonucleotide
cgcgaaucuguggcugacg

SEQ ID NO: 2592854 - RNA, 19 nt, Artificial Sequence
  Description of Artificial Sequence: Synthetic oligonucleotide
gccacgcuccgacgacacc

SEQ ID NO: 2592855 - RNA, 19 nt, Artificial Sequence
  Description of Artificial Sequence: Synthetic oligonucleotide
ggccacgcuccgacgacac

SEQ ID NO: 2592856 - RNA, 19 nt, Artificial Sequence
  Description of Artificial Sequence: Synthetic oligonucleotide
ccggugugaaggagucauc

SEQ ID NO: 2592857 - RNA, 19 nt, Artificial Sequence
  Description of Artificial Sequence: Synthetic oligonucleotide
ggucagcgguauccagcga

SEQ ID NO: 2592858 - RNA, 19 nt, Artificial Sequence
  Description of Artificial Sequence: Synthetic oligonucleotide
cugugaccgcagggucagc

SEQ ID NO: 2592859 - RNA, 19 nt, Artificial Sequence
  Description of Artificial Sequence: Synthetic oligonucleotide
ccccgguaauaggcggugg

SEQ ID NO: 2592860 - RNA, 19 nt, Artificial Sequence
  Description of Artificial Sequence: Synthetic oligonucleotide
gcgcgaaucuguggcugac

SEQ ID NO: 2592861 - RNA, 19 nt, Artificial Sequence
  Description of Artificial Sequence: Synthetic oligonucleotide
gcgguggugauggugcggu

SEQ ID NO: 2592862 - RNA, 19 nt, Artificial Sequence
  Description of Artificial Sequence: Synthetic oligonucleotide
ggcguucaaaggucugcuu

SEQ ID NO: 2592863 - RNA, 19 nt, Artificial Sequence
  Description of Artificial Sequence: Synthetic oligonucleotide
ccggccacgcuccgacgac

SEQ ID NO: 2592864 - RNA, 19 nt, Artificial Sequence
  Description of Artificial Sequence: Synthetic oligonucleotide
gcuuggcgccugugaccgc

SEQ ID NO: 2592865 - RNA, 19 nt, Artificial Sequence
  Description of Artificial Sequence: Synthetic oligonucleotide
cgaaggccggugugaagga

SEQ ID NO: 2592866 - RNA, 19 nt, Artificial Sequence
  Description of Artificial Sequence: Synthetic oligonucleotide
gucccacgaguaaguuuua

SEQ ID NO: 2592867 - RNA, 19 nt, Artificial Sequence
  Description of Artificial Sequence: Synthetic oligonucleotide
auggugcgguagcgcucuu

SEQ ID NO: 2592868 - RNA, 19 nt, Artificial Sequence
  Description of Artificial Sequence: Synthetic oligonucleotide
gcacagcguugaaggacuc

SEQ ID NO: 2592869 - RNA, 19 nt, Artificial Sequence
  Description of Artificial Sequence: Synthetic oligonucleotide
cccgguaauaggcgguggu

SEQ ID NO: 2592870 - RNA, 19 nt, Artificial Sequence
  Description of Artificial Sequence: Synthetic oligonucleotide
ccugggcauugucccacga

SEQ ID NO: 2592871 - RNA, 19 nt, Artificial Sequence
  Description of Artificial Sequence: Synthetic oligonucleotide
gcgccugugaccgcagggu

SEQ ID NO: 2592872 - RNA, 19 nt, Artificial Sequence
  Description of Artificial Sequence: Synthetic oligonucleotide
cguugaaggacuccucguu

SEQ ID NO: 2592873 - RNA, 19 nt, Artificial Sequence
  Description of Artificial Sequence: Synthetic oligonucleotide
ccucguuggugaugucaua

SEQ ID NO: 2592874 - RNA, 19 nt, Artificial Sequence
  Description of Artificial Sequence: Synthetic oligonucleotide
ggccggugugaaggaguca

SEQ ID NO: 2592875 - RNA, 19 nt, Artificial Sequence
  Description of Artificial Sequence: Synthetic oligonucleotide
cgacuccgacaucuucuca

SEQ ID NO: 2592876 - RNA, 19 nt, Artificial Sequence
  Description of Artificial Sequence: Synthetic oligonucleotide
gggucacguuugacacuca

SEQ ID NO: 2592877 - RNA, 19 nt, Artificial Sequence
  Description of Artificial Sequence: Synthetic oligonucleotide
gcugccggccacgcuccga

SEQ ID NO: 2592878 - RNA, 19 nt, Artificial Sequence
  Description of Artificial Sequence: Synthetic oligonucleotide
ccagcgacuccgacaucuu

SEQ ID NO: 2592879 - RNA, 19 nt, Artificial Sequence
  Description of Artificial Sequence: Synthetic oligonucleotide
cgugcugacgaaggccggu

SEQ ID NO: 2592880 - RNA, 19 nt, Artificial Sequence
  Description of Artificial Sequence: Synthetic oligonucleotide
ccacgcugcuguucccaau

SEQ ID NO: 2592881 - RNA, 19 nt, Artificial Sequence
  Description of Artificial Sequence: Synthetic oligonucleotide
ccagcagcaccugggcauu

SEQ ID NO: 2592882 - RNA, 19 nt, Artificial Sequence
  Description of Artificial Sequence: Synthetic oligonucleotide
cggccacgcuccgacgaca

SEQ ID NO: 2592883 - RNA, 19 nt, Artificial Sequence
  Description of Artificial Sequence: Synthetic oligonucleotide
ccacucgcucguccuccau

SEQ ID NO: 2592884 - RNA, 19 nt, Artificial Sequence
  Description of Artificial Sequence: Synthetic oligonucleotide
aaaauaauagaacaaaacc

SEQ ID NO: 2592885 - RNA, 19 nt, Artificial Sequence
  Description of Artificial Sequence: Synthetic oligonucleotide
aaaauuaauauauauauau

SEQ ID NO: 2592886 - RNA, 19 nt, Artificial Sequence
  Description of Artificial Sequence: Synthetic oligonucleotide
aauaauuuaaacucuauga

SEQ ID NO: 2592887 - RNA, 19 nt, Artificial Sequence
  Description of Artificial Sequence: Synthetic oligonucleotide
aggaaaauaauuuaaacuc

SEQ ID NO: 2592888 - RNA, 19 nt, Artificial Sequence
  Description of Artificial Sequence: Synthetic oligonucleotide
aauauauauauauauauau

SEQ ID NO: 2592889 - RNA, 19 nt, Artificial Sequence
  Description of Artificial Sequence: Synthetic oligonucleotide
aauguacaugauuaggucc

SEQ ID NO: 2592890 - RNA, 19 nt, Artificial Sequence
  Description of Artificial Sequence: Synthetic oligonucleotide
uauauauauauauauauga

SEQ ID NO: 2592891 - RNA, 19 nt, Artificial Sequence
  Description of Artificial Sequence: Synthetic oligonucleotide
aauuaauauauauauauau

SEQ ID NO: 2592892 - RNA, 19 nt, Artificial Sequence
  Description of Artificial Sequence: Synthetic oligonucleotide
aacucuaugaaagugcucc

SEQ ID NO: 2592893 - RNA, 19 nt, Artificial Sequence
  Description of Artificial Sequence: Synthetic oligonucleotide
uuuacaauugucaauguac

SEQ ID NO: 2592894 - RNA, 19 nt, Artificial Sequence
  Description of Artificial Sequence: Synthetic oligonucleotide
uauauauauauauauauau

SEQ ID NO: 2592895 - RNA, 19 nt, Artificial Sequence
  Description of Artificial Sequence: Synthetic oligonucleotide
uuaauauauauauauauau

SEQ ID NO: 2592896 - RNA, 19 nt, Artificial Sequence
  Description of Artificial Sequence: Synthetic oligonucleotide
cuuaacuguacaaacaggg

SEQ ID NO: 2592897 - RNA, 19 nt, Artificial Sequence
  Description of Artificial Sequence: Synthetic oligonucleotide
acauuaaagaaagagaggg

SEQ ID NO: 2592898 - RNA, 19 nt, Artificial Sequence
  Description of Artificial Sequence: Synthetic oligonucleotide
aaauaauagaacaaaacca

SEQ ID NO: 2592899 - RNA, 19 nt, Artificial Sequence
  Description of Artificial Sequence: Synthetic oligonucleotide
uauauauauauauaugagu

SEQ ID NO: 2592900 - RNA, 19 nt, Artificial Sequence
  Description of Artificial Sequence: Synthetic oligonucleotide
auauauauaugagugcucc

SEQ ID NO: 2592901 - RNA, 19 nt, Artificial Sequence
  Description of Artificial Sequence: Synthetic oligonucleotide
aaugauuugaaugaucuga

SEQ ID NO: 2592902 - RNA, 19 nt, Artificial Sequence
  Description of Artificial Sequence: Synthetic oligonucleotide
uggaauaucaaccucaaau

SEQ ID NO: 2592903 - RNA, 19 nt, Artificial Sequence
  Description of Artificial Sequence: Synthetic oligonucleotide
uaauuuacaauugucaaug

SEQ ID NO: 2592904 - RNA, 19 nt, Artificial Sequence
  Description of Artificial Sequence: Synthetic oligonucleotide
auauauauauauaugagug

SEQ ID NO: 2592905 - RNA, 19 nt, Artificial Sequence
  Description of Artificial Sequence: Synthetic oligonucleotide
aacaaaucaacauggaaaa

SEQ ID NO: 2592906 - RNA, 19 nt, Artificial Sequence
  Description of Artificial Sequence: Synthetic oligonucleotide
aaaaugauuugaaugaucu

SEQ ID NO: 2592907 - RNA, 19 nt, Artificial Sequence
  Description of Artificial Sequence: Synthetic oligonucleotide
uuaaagaaagagagggagg

SEQ ID NO: 2592908 - RNA, 19 nt, Artificial Sequence
  Description of Artificial Sequence: Synthetic oligonucleotide
aauaauagaacaaaaccaa

SEQ ID NO: 2592909 - RNA, 19 nt, Artificial Sequence
  Description of Artificial Sequence: Synthetic oligonucleotide
uauauauauauaugagugc

SEQ ID NO: 2592910 - RNA, 19 nt, Artificial Sequence
  Description of Artificial Sequence: Synthetic oligonucleotide
auuaaagaaagagagggag

SEQ ID NO: 2592911 - RNA, 19 nt, Artificial Sequence
  Description of Artificial Sequence: Synthetic oligonucleotide
ucuaugaaagugcuccugg

SEQ ID NO: 2592912 - RNA, 19 nt, Artificial Sequence
  Description of Artificial Sequence: Synthetic oligonucleotide
aucagauggaauaucaacc

SEQ ID NO: 2592913 - RNA, 19 nt, Artificial Sequence
  Description of Artificial Sequence: Synthetic oligonucleotide
ucaauguacaugauuaggu

SEQ ID NO: 2592914 - RNA, 19 nt, Artificial Sequence
  Description of Artificial Sequence: Synthetic oligonucleotide
aauuauuaauuuacaauug

SEQ ID NO: 2592915 - RNA, 19 nt, Artificial Sequence
  Description of Artificial Sequence: Synthetic oligonucleotide
aaagaucguauaaacaguc

SEQ ID NO: 2592916 - RNA, 19 nt, Artificial Sequence
  Description of Artificial Sequence: Synthetic oligonucleotide
aaauggaacaaaucaacau

SEQ ID NO: 2592917 - RNA, 19 nt, Artificial Sequence
  Description of Artificial Sequence: Synthetic oligonucleotide
auccaaauggaacaaauca

SEQ ID NO: 2592918 - RNA, 19 nt, Artificial Sequence
  Description of Artificial Sequence: Synthetic oligonucleotide
uauauaugagugcucccgg

SEQ ID NO: 2592919 - RNA, 19 nt, Artificial Sequence
  Description of Artificial Sequence: Synthetic oligonucleotide
uaauauauauauauauaua

SEQ ID NO: 2592920 - RNA, 19 nt, Artificial Sequence
  Description of Artificial Sequence: Synthetic oligonucleotide
ugaaugaucugaagauucg

SEQ ID NO: 2592921 - RNA, 19 nt, Artificial Sequence
  Description of Artificial Sequence: Synthetic oligonucleotide
uuacaauugucaauguaca

SEQ ID NO: 2592922 - RNA, 19 nt, Artificial Sequence
  Description of Artificial Sequence: Synthetic oligonucleotide
ucuuaacuguacaaacagg

SEQ ID NO: 2592923 - RNA, 19 nt, Artificial Sequence
  Description of Artificial Sequence: Synthetic oligonucleotide
auuugaaugaucugaagau

SEQ ID NO: 2592924 - RNA, 19 nt, Artificial Sequence
  Description of Artificial Sequence: Synthetic oligonucleotide
ugaucugaagauucgagga

SEQ ID NO: 2592925 - RNA, 19 nt, Artificial Sequence
  Description of Artificial Sequence: Synthetic oligonucleotide
auauauauauaugagugcu

SEQ ID NO: 2592926 - RNA, 19 nt, Artificial Sequence
  Description of Artificial Sequence: Synthetic oligonucleotide
ugugcuucagcccuguccc

SEQ ID NO: 2592927 - RNA, 19 nt, Artificial Sequence
  Description of Artificial Sequence: Synthetic oligonucleotide
auauauauauauauaugag

SEQ ID NO: 2592928 - RNA, 19 nt, Artificial Sequence
  Description of Artificial Sequence: Synthetic oligonucleotide
auauauaugagugcucccg

SEQ ID NO: 2592929 - RNA, 19 nt, Artificial Sequence
  Description of Artificial Sequence: Synthetic oligonucleotide
uugaaugaucugaagauuc

SEQ ID NO: 2592930 - RNA, 19 nt, Artificial Sequence
  Description of Artificial Sequence: Synthetic oligonucleotide
uauaugagugcucccgggg

SEQ ID NO: 2592931 - RNA, 19 nt, Artificial Sequence
  Description of Artificial Sequence: Synthetic oligonucleotide
aacaggguuucucaaagga

SEQ ID NO: 2592932 - RNA, 19 nt, Artificial Sequence
  Description of Artificial Sequence: Synthetic oligonucleotide
uaaacucuaugaaagugcu

SEQ ID NO: 2592933 - RNA, 19 nt, Artificial Sequence
  Description of Artificial Sequence: Synthetic oligonucleotide
ugaagauucgaggagacac

SEQ ID NO: 2592934 - RNA, 19 nt, Artificial Sequence
  Description of Artificial Sequence: Synthetic oligonucleotide
acuugaaaagaaaagagga

SEQ ID NO: 2592935 - RNA, 19 nt, Artificial Sequence
  Description of Artificial Sequence: Synthetic oligonucleotide
gucuuaacuguacaaacag

SEQ ID NO: 2592936 - RNA, 19 nt, Artificial Sequence
  Description of Artificial Sequence: Synthetic oligonucleotide
uauaaacagucuuaacugu

SEQ ID NO: 2592937 - RNA, 19 nt, Artificial Sequence
  Description of Artificial Sequence: Synthetic oligonucleotide
ucagauggaauaucaaccu

SEQ ID NO: 2592938 - RNA, 19 nt, Artificial Sequence
  Description of Artificial Sequence: Synthetic oligonucleotide
auggaacaaaucaacaugg

SEQ ID NO: 2592939 - RNA, 19 nt, Artificial Sequence
  Description of Artificial Sequence: Synthetic oligonucleotide
auguacaugauuagguccc

SEQ ID NO: 2592940 - RNA, 19 nt, Artificial Sequence
  Description of Artificial Sequence: Synthetic oligonucleotide
auauauauauauauauaug

SEQ ID NO: 2592941 - RNA, 19 nt, Artificial Sequence
  Description of Artificial Sequence: Synthetic oligonucleotide
aaugaucugaagauucgag

SEQ ID NO: 2592942 - RNA, 19 nt, Artificial Sequence
  Description of Artificial Sequence: Synthetic oligonucleotide
uccaaauggaacaaaucaa

SEQ ID NO: 2592943 - RNA, 19 nt, Artificial Sequence
  Description of Artificial Sequence: Synthetic oligonucleotide
ugauuagguccccaaaaug

SEQ ID NO: 2592944 - RNA, 19 nt, Artificial Sequence
  Description of Artificial Sequence: Synthetic oligonucleotide
cacauuaaagaaagagagg

SEQ ID NO: 2592945 - RNA, 19 nt, Artificial Sequence
  Description of Artificial Sequence: Synthetic oligonucleotide
aauccaaauggaacaaauc

SEQ ID NO: 2592946 - RNA, 19 nt, Artificial Sequence
  Description of Artificial Sequence: Synthetic oligonucleotide
ucgaggagacacauuaaag

SEQ ID NO: 2592947 - RNA, 19 nt, Artificial Sequence
  Description of Artificial Sequence: Synthetic oligonucleotide
aauaucaaccucaaauuaa

SEQ ID NO: 2592948 - RNA, 19 nt, Artificial Sequence
  Description of Artificial Sequence: Synthetic oligonucleotide
aaggcugugcuucagcccu

SEQ ID NO: 2592949 - RNA, 19 nt, Artificial Sequence
  Description of Artificial Sequence: Synthetic oligonucleotide
caauugucaauguacauga

SEQ ID NO: 2592950 - RNA, 19 nt, Artificial Sequence
  Description of Artificial Sequence: Synthetic oligonucleotide
acaauugucaauguacaug

SEQ ID NO: 2592951 - RNA, 19 nt, Artificial Sequence
  Description of Artificial Sequence: Synthetic oligonucleotide
uuaacuguacaaacagggu

SEQ ID NO: 2592952 - RNA, 19 nt, Artificial Sequence
  Description of Artificial Sequence: Synthetic oligonucleotide
caucagauggaauaucaac

SEQ ID NO: 2592953 - RNA, 19 nt, Artificial Sequence
  Description of Artificial Sequence: Synthetic oligonucleotide
aagaaaagaggaccaggca

SEQ ID NO: 2592954 - RNA, 19 nt, Artificial Sequence
  Description of Artificial Sequence: Synthetic oligonucleotide
gauuagguccccaaaauga

SEQ ID NO: 2592955 - RNA, 19 nt, Artificial Sequence
  Description of Artificial Sequence: Synthetic oligonucleotide
aaaagaucguauaaacagu

SEQ ID NO: 2592956 - RNA, 19 nt, Artificial Sequence
  Description of Artificial Sequence: Synthetic oligonucleotide
aauuuacaauugucaaugu

SEQ ID NO: 2592957 - RNA, 19 nt, Artificial Sequence
  Description of Artificial Sequence: Synthetic oligonucleotide
auuuaaacucuaugaaagu

SEQ ID NO: 2592958 - RNA, 19 nt, Artificial Sequence
  Description of Artificial Sequence: Synthetic oligonucleotide
gaucugaagauucgaggag

SEQ ID NO: 2592959 - RNA, 19 nt, Artificial Sequence
  Description of Artificial Sequence: Synthetic oligonucleotide
agacaauaaagaaugauaa

SEQ ID NO: 2592960 - RNA, 19 nt, Artificial Sequence
  Description of Artificial Sequence: Synthetic oligonucleotide
aaauuaauauauauauaua

SEQ ID NO: 2592961 - RNA, 19 nt, Artificial Sequence
  Description of Artificial Sequence: Synthetic oligonucleotide
aaacagucuuaacuguaca

SEQ ID NO: 2592962 - RNA, 19 nt, Artificial Sequence
  Description of Artificial Sequence: Synthetic oligonucleotide
auauaugagugcucccggg

SEQ ID NO: 2592963 - RNA, 19 nt, Artificial Sequence
  Description of Artificial Sequence: Synthetic oligonucleotide
uauauauaugagugcuccc

SEQ ID NO: 2592964 - RNA, 19 nt, Artificial Sequence
  Description of Artificial Sequence: Synthetic oligonucleotide
ugauuugaaugaucugaag

SEQ ID NO: 2592965 - RNA, 19 nt, Artificial Sequence
  Description of Artificial Sequence: Synthetic oligonucleotide
auuaauauauauauauaua

SEQ ID NO: 2592966 - RNA, 19 nt, Artificial Sequence
  Description of Artificial Sequence: Synthetic oligonucleotide
ggagacacauuaaagaaag

SEQ ID NO: 2592967 - RNA, 19 nt, Artificial Sequence
  Description of Artificial Sequence: Synthetic oligonucleotide
aauggccuaguugugcuag

SEQ ID NO: 2592968 - RNA, 19 nt, Artificial Sequence
  Description of Artificial Sequence: Synthetic oligonucleotide
aucaaccucaaauuaaaua

SEQ ID NO: 2592969 - RNA, 19 nt, Artificial Sequence
  Description of Artificial Sequence: Synthetic oligonucleotide
gaggagacacauuaaagaa

SEQ ID NO: 2592970 - RNA, 19 nt, Artificial Sequence
  Description of Artificial Sequence: Synthetic oligonucleotide
cagugaacgugucuggugg

SEQ ID NO: 2592971 - RNA, 19 nt, Artificial Sequence
  Description of Artificial Sequence: Synthetic oligonucleotide
aaauccaaauggaacaaau

SEQ ID NO: 2592972 - RNA, 19 nt, Artificial Sequence
  Description of Artificial Sequence: Synthetic oligonucleotide
uucgaggagacacauuaaa

SEQ ID NO: 2592973 - RNA, 19 nt, Artificial Sequence
  Description of Artificial Sequence: Synthetic oligonucleotide
gaauaucaaccucaaauua

SEQ ID NO: 2592974 - RNA, 19 nt, Artificial Sequence
  Description of Artificial Sequence: Synthetic oligonucleotide
guuccugucuauucugggg

SEQ ID NO: 2592975 - RNA, 19 nt, Artificial Sequence
  Description of Artificial Sequence: Synthetic oligonucleotide
cagucuuaacuguacaaac

SEQ ID NO: 2592976 - RNA, 19 nt, Artificial Sequence
  Description of Artificial Sequence: Synthetic oligonucleotide
caauguacaugauuagguc

SEQ ID NO: 2592977 - RNA, 19 nt, Artificial Sequence
  Description of Artificial Sequence: Synthetic oligonucleotide
uaugagugcucccggggag

SEQ ID NO: 2592978 - RNA, 19 nt, Artificial Sequence
  Description of Artificial Sequence: Synthetic oligonucleotide
uucucaaaggagugggucu

SEQ ID NO: 2592979 - RNA, 19 nt, Artificial Sequence
  Description of Artificial Sequence: Synthetic oligonucleotide
uguacaaacaggguuucuc

SEQ ID NO: 2592980 - RNA, 19 nt, Artificial Sequence
  Description of Artificial Sequence: Synthetic oligonucleotide
caggaaaauaauuuaaacu

SEQ ID NO: 2592981 - RNA, 19 nt, Artificial Sequence
  Description of Artificial Sequence: Synthetic oligonucleotide
agaucguauaaacagucuu

SEQ ID NO: 2592982 - RNA, 19 nt, Artificial Sequence
  Description of Artificial Sequence: Synthetic oligonucleotide
agugaacgugucugguggc

SEQ ID NO: 2592983 - RNA, 19 nt, Artificial Sequence
  Description of Artificial Sequence: Synthetic oligonucleotide
uggagugggaggcaauggc

SEQ ID NO: 2592984 - RNA, 19 nt, Artificial Sequence
  Description of Artificial Sequence: Synthetic oligonucleotide
uagguccccaaaaugauuu

SEQ ID NO: 2592985 - RNA, 19 nt, Artificial Sequence
  Description of Artificial Sequence: Synthetic oligonucleotide
caaauggaacaaaucaaca

SEQ ID NO: 2592986 - RNA, 19 nt, Artificial Sequence
  Description of Artificial Sequence: Synthetic oligonucleotide
auauauauauauauauaua

SEQ ID NO: 2592987 - RNA, 19 nt, Artificial Sequence
  Description of Artificial Sequence: Synthetic oligonucleotide
augaaagugcuccugguuu

SEQ ID NO: 2592988 - RNA, 19 nt, Artificial Sequence
  Description of Artificial Sequence: Synthetic oligonucleotide
uggaguguggccagggaga

SEQ ID NO: 2592989 - RNA, 19 nt, Artificial Sequence
  Description of Artificial Sequence: Synthetic oligonucleotide
agcacagugaacgugucug

SEQ ID NO: 2592990 - RNA, 19 nt, Artificial Sequence
  Description of Artificial Sequence: Synthetic oligonucleotide
uggaacaaaucaacaugga

SEQ ID NO: 2592991 - RNA, 19 nt, Artificial Sequence
  Description of Artificial Sequence: Synthetic oligonucleotide
aacuguacaaacaggguuu

SEQ ID NO: 2592992 - RNA, 19 nt, Artificial Sequence
  Description of Artificial Sequence: Synthetic oligonucleotide
gaucaguagcugaaggcag

SEQ ID NO: 2592993 - RNA, 19 nt, Artificial Sequence
  Description of Artificial Sequence: Synthetic oligonucleotide
ccaaauggaacaaaucaac

SEQ ID NO: 2592994 - RNA, 19 nt, Artificial Sequence
  Description of Artificial Sequence: Synthetic oligonucleotide
uaugaaagugcuccugguu

SEQ ID NO: 2592995 - RNA, 19 nt, Artificial Sequence
  Description of Artificial Sequence: Synthetic oligonucleotide
gugauguccaugcugucug

SEQ ID NO: 2592996 - RNA, 19 nt, Artificial Sequence
  Description of Artificial Sequence: Synthetic oligonucleotide
augauuagguccccaaaau

SEQ ID NO: 2592997 - RNA, 19 nt, Artificial Sequence
  Description of Artificial Sequence: Synthetic oligonucleotide
uugugcuaggggaggagcc

SEQ ID NO: 2592998 - RNA, 19 nt, Artificial Sequence
  Description of Artificial Sequence: Synthetic oligonucleotide
gaugcuagggguuccuguc

SEQ ID NO: 2592999 - RNA, 19 nt, Artificial Sequence
  Description of Artificial Sequence: Synthetic oligonucleotide
uccugguuucuguauggag

SEQ ID NO: 2593000 - RNA, 19 nt, Artificial Sequence
  Description of Artificial Sequence: Synthetic oligonucleotide
ugaaagugcuccugguuuc

SEQ ID NO: 2593001 - RNA, 19 nt, Artificial Sequence
  Description of Artificial Sequence: Synthetic oligonucleotide
guacaaacaggguuucuca

SEQ ID NO: 2593002 - RNA, 19 nt, Artificial Sequence
  Description of Artificial Sequence: Synthetic oligonucleotide
uuugaaugaucugaagauu

SEQ ID NO: 2593003 - RNA, 19 nt, Artificial Sequence
  Description of Artificial Sequence: Synthetic oligonucleotide
cugugcuucagcccugucc

SEQ ID NO: 2593004 - RNA, 19 nt, Artificial Sequence
  Description of Artificial Sequence: Synthetic oligonucleotide
cauuaaagaaagagaggga

SEQ ID NO: 2593005 - RNA, 19 nt, Artificial Sequence
  Description of Artificial Sequence: Synthetic oligonucleotide
gcuggagaggagcugauag

SEQ ID NO: 2593006 - RNA, 19 nt, Artificial Sequence
  Description of Artificial Sequence: Synthetic oligonucleotide
uacaauugucaauguacau

SEQ ID NO: 2593007 - RNA, 19 nt, Artificial Sequence
  Description of Artificial Sequence: Synthetic oligonucleotide
acagugaacgugucuggug

SEQ ID NO: 2593008 - RNA, 19 nt, Artificial Sequence
  Description of Artificial Sequence: Synthetic oligonucleotide
auaugagugcucccgggga

SEQ ID NO: 2593009 - RNA, 19 nt, Artificial Sequence
  Description of Artificial Sequence: Synthetic oligonucleotide
uaucaaccucaaauuaaau

SEQ ID NO: 2593010 - RNA, 19 nt, Artificial Sequence
  Description of Artificial Sequence: Synthetic oligonucleotide
auaucaaccucaaauuaaa

SEQ ID NO: 2593011 - RNA, 19 nt, Artificial Sequence
  Description of Artificial Sequence: Synthetic oligonucleotide
ucuccagccaucagaugga

SEQ ID NO: 2593012 - RNA, 19 nt, Artificial Sequence
  Description of Artificial Sequence: Synthetic oligonucleotide
uggagaggagcugauagaa

SEQ ID NO: 2593013 - RNA, 19 nt, Artificial Sequence
  Description of Artificial Sequence: Synthetic oligonucleotide
aagaucguauaaacagucu

SEQ ID NO: 2593014 - RNA, 19 nt, Artificial Sequence
  Description of Artificial Sequence: Synthetic oligonucleotide
acaaacaggguuucucaaa

SEQ ID NO: 2593015 - RNA, 19 nt, Artificial Sequence
  Description of Artificial Sequence: Synthetic oligonucleotide
aaacucuaugaaagugcuc

SEQ ID NO: 2593016 - RNA, 19 nt, Artificial Sequence
  Description of Artificial Sequence: Synthetic oligonucleotide
agucuuaacuguacaaaca

SEQ ID NO: 2593017 - RNA, 19 nt, Artificial Sequence
  Description of Artificial Sequence: Synthetic oligonucleotide
aagauucgaggagacacau

SEQ ID NO: 2593018 - RNA, 19 nt, Artificial Sequence
  Description of Artificial Sequence: Synthetic oligonucleotide
ccccaaaaugauuugaaug

SEQ ID NO: 2593019 - RNA, 19 nt, Artificial Sequence
  Description of Artificial Sequence: Synthetic oligonucleotide
aagugcuccugguuucugu

SEQ ID NO: 2593020 - RNA, 19 nt, Artificial Sequence
  Description of Artificial Sequence: Synthetic oligonucleotide
cuaggggaggagcccaugg

SEQ ID NO: 2593021 - RNA, 19 nt, Artificial Sequence
  Description of Artificial Sequence: Synthetic oligonucleotide
cuaguugugcuaggggagg

SEQ ID NO: 2593022 - RNA, 19 nt, Artificial Sequence
  Description of Artificial Sequence: Synthetic oligonucleotide
ucaguagcugaaggcagag

SEQ ID NO: 2593023 - RNA, 19 nt, Artificial Sequence
  Description of Artificial Sequence: Synthetic oligonucleotide
acuguacaaacaggguuuc

SEQ ID NO: 2593024 - RNA, 19 nt, Artificial Sequence
  Description of Artificial Sequence: Synthetic oligonucleotide
acagucuuaacuguacaaa

SEQ ID NO: 2593025 - RNA, 19 nt, Artificial Sequence
  Description of Artificial Sequence: Synthetic oligonucleotide
ucguauaaacagucuuaac

SEQ ID NO: 2593026 - RNA, 19 nt, Artificial Sequence
  Description of Artificial Sequence: Synthetic oligonucleotide
aucguauaaacagucuuaa

SEQ ID NO: 2593027 - RNA, 19 nt, Artificial Sequence
  Description of Artificial Sequence: Synthetic oligonucleotide
ugauguccaugcugucugg

SEQ ID NO: 2593028 - RNA, 19 nt, Artificial Sequence
  Description of Artificial Sequence: Synthetic oligonucleotide
cuggaguguggccagggag

SEQ ID NO: 2593029 - RNA, 19 nt, Artificial Sequence
  Description of Artificial Sequence: Synthetic oligonucleotide
caugauuagguccccaaaa

SEQ ID NO: 2593030 - RNA, 19 nt, Artificial Sequence
  Description of Artificial Sequence: Synthetic oligonucleotide
aucugaagauucgaggaga

SEQ ID NO: 2593031 - RNA, 19 nt, Artificial Sequence
  Description of Artificial Sequence: Synthetic oligonucleotide
guagcugaaggcagagggg

SEQ ID NO: 2593032 - RNA, 19 nt, Artificial Sequence
  Description of Artificial Sequence: Synthetic oligonucleotide
gaucguauaaacagucuua

SEQ ID NO: 2593033 - RNA, 19 nt, Artificial Sequence
  Description of Artificial Sequence: Synthetic oligonucleotide
gaaugaucugaagauucga

SEQ ID NO: 2593034 - RNA, 19 nt, Artificial Sequence
  Description of Artificial Sequence: Synthetic oligonucleotide
uuagguccccaaaaugauu

SEQ ID NO: 2593035 - RNA, 19 nt, Artificial Sequence
  Description of Artificial Sequence: Synthetic oligonucleotide
ccugcugcuaucuccagcc

SEQ ID NO: 2593036 - RNA, 19 nt, Artificial Sequence
  Description of Artificial Sequence: Synthetic oligonucleotide
ucuggagugggaggcaaug

SEQ ID NO: 2593037 - RNA, 19 nt, Artificial Sequence
  Description of Artificial Sequence: Synthetic oligonucleotide
agggguuccugucuauucu

SEQ ID NO: 2593038 - RNA, 19 nt, Artificial Sequence
  Description of Artificial Sequence: Synthetic oligonucleotide
ugcuucagcccuguccccg

SEQ ID NO: 2593039 - RNA, 19 nt, Artificial Sequence
  Description of Artificial Sequence: Synthetic oligonucleotide
cuugcugccucuggagugg

SEQ ID NO: 2593040 - RNA, 19 nt, Artificial Sequence
  Description of Artificial Sequence: Synthetic oligonucleotide
uccuugcugccucuggagu

SEQ ID NO: 2593041 - RNA, 19 nt, Artificial Sequence
  Description of Artificial Sequence: Synthetic oligonucleotide
acaugauuagguccccaaa

SEQ ID NO: 2593042 - RNA, 19 nt, Artificial Sequence
  Description of Artificial Sequence: Synthetic oligonucleotide
gugucugguggccucuggg

SEQ ID NO: 2593043 - RNA, 19 nt, Artificial Sequence
  Description of Artificial Sequence: Synthetic oligonucleotide
uguacaugauuaggucccc

SEQ ID NO: 2593044 - RNA, 19 nt, Artificial Sequence
  Description of Artificial Sequence: Synthetic oligonucleotide
gaagauucgaggagacaca

SEQ ID NO: 2593045 - RNA, 19 nt, Artificial Sequence
  Description of Artificial Sequence: Synthetic oligonucleotide
augauuugaaugaucugaa

SEQ ID NO: 2593046 - RNA, 19 nt, Artificial Sequence
  Description of Artificial Sequence: Synthetic oligonucleotide
ugugcuaggggaggagccc

SEQ ID NO: 2593047 - RNA, 19 nt, Artificial Sequence
  Description of Artificial Sequence: Synthetic oligonucleotide
augagugcucccggggagc

SEQ ID NO: 2593048 - RNA, 19 nt, Artificial Sequence
  Description of Artificial Sequence: Synthetic oligonucleotide
uggccuaguugugcuaggg

SEQ ID NO: 2593049 - RNA, 19 nt, Artificial Sequence
  Description of Artificial Sequence: Synthetic oligonucleotide
auaaacagucuuaacugua

SEQ ID NO: 2593050 - RNA, 19 nt, Artificial Sequence
  Description of Artificial Sequence: Synthetic oligonucleotide
cagauggaauaucaaccuc

SEQ ID NO: 2593051 - RNA, 19 nt, Artificial Sequence
  Description of Artificial Sequence: Synthetic oligonucleotide
gguuccugucuauucuggg

SEQ ID NO: 2593052 - RNA, 19 nt, Artificial Sequence
  Description of Artificial Sequence: Synthetic oligonucleotide
gauggaauaucaaccucaa

SEQ ID NO: 2593053 - RNA, 19 nt, Artificial Sequence
  Description of Artificial Sequence: Synthetic oligonucleotide
auuagguccccaaaaugau

SEQ ID NO: 2593054 - RNA, 19 nt, Artificial Sequence
  Description of Artificial Sequence: Synthetic oligonucleotide
ggaggcaauggccuaguug

SEQ ID NO: 2593055 - RNA, 19 nt, Artificial Sequence
  Description of Artificial Sequence: Synthetic oligonucleotide
ugcugcuaucuccagccau

SEQ ID NO: 2593056 - RNA, 19 nt, Artificial Sequence
  Description of Artificial Sequence: Synthetic oligonucleotide
caggugaaggcugugcuuc

SEQ ID NO: 2593057 - RNA, 19 nt, Artificial Sequence
  Description of Artificial Sequence: Synthetic oligonucleotide
guugugcuaggggaggagc

SEQ ID NO: 2593058 - RNA, 19 nt, Artificial Sequence
  Description of Artificial Sequence: Synthetic oligonucleotide
ggaauaucaaccucaaauu

SEQ ID NO: 2593059 - RNA, 19 nt, Artificial Sequence
  Description of Artificial Sequence: Synthetic oligonucleotide
cucuaugaaagugcuccug

SEQ ID NO: 2593060 - RNA, 19 nt, Artificial Sequence
  Description of Artificial Sequence: Synthetic oligonucleotide
aggagacacauuaaagaaa

SEQ ID NO: 2593061 - RNA, 19 nt, Artificial Sequence
  Description of Artificial Sequence: Synthetic oligonucleotide
ggaucaguagcugaaggca

SEQ ID NO: 2593062 - RNA, 19 nt, Artificial Sequence
  Description of Artificial Sequence: Synthetic oligonucleotide
ugccucuggagugggaggc

SEQ ID NO: 2593063 - RNA, 19 nt, Artificial Sequence
  Description of Artificial Sequence: Synthetic oligonucleotide
ccuaguugugcuaggggag

SEQ ID NO: 2593064 - RNA, 19 nt, Artificial Sequence
  Description of Artificial Sequence: Synthetic oligonucleotide
agcccuguccccggguucc

SEQ ID NO: 2593065 - RNA, 19 nt, Artificial Sequence
  Description of Artificial Sequence: Synthetic oligonucleotide
aaagugcuccugguuucug

SEQ ID NO: 2593066 - RNA, 19 nt, Artificial Sequence
  Description of Artificial Sequence: Synthetic oligonucleotide
auggccuaguugugcuagg

SEQ ID NO: 2593067 - RNA, 19 nt, Artificial Sequence
  Description of Artificial Sequence: Synthetic oligonucleotide
agccaucagauggaauauc

SEQ ID NO: 2593068 - RNA, 19 nt, Artificial Sequence
  Description of Artificial Sequence: Synthetic oligonucleotide
cguauaaacagucuuaacu

SEQ ID NO: 2593069 - RNA, 19 nt, Artificial Sequence
  Description of Artificial Sequence: Synthetic oligonucleotide
uggcuggccggaucaguag

SEQ ID NO: 2593070 - RNA, 19 nt, Artificial Sequence
  Description of Artificial Sequence: Synthetic oligonucleotide
ugaacgugucugguggccu

SEQ ID NO: 2593071 - RNA, 19 nt, Artificial Sequence
  Description of Artificial Sequence: Synthetic oligonucleotide
uaucuccagccaucagaug

SEQ ID NO: 2593072 - RNA, 19 nt, Artificial Sequence
  Description of Artificial Sequence: Synthetic oligonucleotide
ccggggagcacagugaacg

SEQ ID NO: 2593073 - RNA, 19 nt, Artificial Sequence
  Description of Artificial Sequence: Synthetic oligonucleotide
cuggagugggaggcaaugg

SEQ ID NO: 2593074 - RNA, 19 nt, Artificial Sequence
  Description of Artificial Sequence: Synthetic oligonucleotide
gcugucuggagccagcgca

SEQ ID NO: 2593075 - RNA, 19 nt, Artificial Sequence
  Description of Artificial Sequence: Synthetic oligonucleotide
ugcuagggguuccugucua

SEQ ID NO: 2593076 - RNA, 19 nt, Artificial Sequence
  Description of Artificial Sequence: Synthetic oligonucleotide
agguccccaaaaugauuug

SEQ ID NO: 2593077 - RNA, 19 nt, Artificial Sequence
  Description of Artificial Sequence: Synthetic oligonucleotide
gccuaguugugcuagggga

SEQ ID NO: 2593078 - RNA, 19 nt, Artificial Sequence
  Description of Artificial Sequence: Synthetic oligonucleotide
uggccggaucaguagcuga

SEQ ID NO: 2593079 - RNA, 19 nt, Artificial Sequence
  Description of Artificial Sequence: Synthetic oligonucleotide
aauugucaauguacaugau

SEQ ID NO: 2593080 - RNA, 19 nt, Artificial Sequence
  Description of Artificial Sequence: Synthetic oligonucleotide
aguugugcuaggggaggag

SEQ ID NO: 2593081 - RNA, 19 nt, Artificial Sequence
  Description of Artificial Sequence: Synthetic oligonucleotide
guuccuugcugccucugga

SEQ ID NO: 2593082 - RNA, 19 nt, Artificial Sequence
  Description of Artificial Sequence: Synthetic oligonucleotide
cugucuggagccagcgcac

SEQ ID NO: 2593083 - RNA, 19 nt, Artificial Sequence
  Description of Artificial Sequence: Synthetic oligonucleotide
cuaucuccagccaucagau

SEQ ID NO: 2593084 - RNA, 19 nt, Artificial Sequence
  Description of Artificial Sequence: Synthetic oligonucleotide
ggccuaguugugcuagggg

SEQ ID NO: 2593085 - RNA, 19 nt, Artificial Sequence
  Description of Artificial Sequence: Synthetic oligonucleotide
cucaaaggagugggucugg

SEQ ID NO: 2593086 - RNA, 19 nt, Artificial Sequence
  Description of Artificial Sequence: Synthetic oligonucleotide
gaacgugucugguggccuc

SEQ ID NO: 2593087 - RNA, 19 nt, Artificial Sequence
  Description of Artificial Sequence: Synthetic oligonucleotide
aggggccuguggcugcugg

SEQ ID NO: 2593088 - RNA, 19 nt, Artificial Sequence
  Description of Artificial Sequence: Synthetic oligonucleotide
gcacagugaacgugucugg

SEQ ID NO: 2593089 - RNA, 19 nt, Artificial Sequence
  Description of Artificial Sequence: Synthetic oligonucleotide
auggaauaucaaccucaaa

SEQ ID NO: 2593090 - RNA, 19 nt, Artificial Sequence
  Description of Artificial Sequence: Synthetic oligonucleotide
aucaguagcugaaggcaga

SEQ ID NO: 2593091 - RNA, 19 nt, Artificial Sequence
  Description of Artificial Sequence: Synthetic oligonucleotide
ggagugggaggcaauggcc

SEQ ID NO: 2593092 - RNA, 19 nt, Artificial Sequence
  Description of Artificial Sequence: Synthetic oligonucleotide
gugaacgugucugguggcc

SEQ ID NO: 2593093 - RNA, 19 nt, Artificial Sequence
  Description of Artificial Sequence: Synthetic oligonucleotide
ggguuucucaaaggagugg

SEQ ID NO: 2593094 - RNA, 19 nt, Artificial Sequence
  Description of Artificial Sequence: Synthetic oligonucleotide
uaguugugcuaggggagga

SEQ ID NO: 2593095 - RNA, 19 nt, Artificial Sequence
  Description of Artificial Sequence: Synthetic oligonucleotide
aacgugucugguggccucu

SEQ ID NO: 2593096 - RNA, 19 nt, Artificial Sequence
  Description of Artificial Sequence: Synthetic oligonucleotide
agugcucccggggagcaca

SEQ ID NO: 2593097 - RNA, 19 nt, Artificial Sequence
  Description of Artificial Sequence: Synthetic oligonucleotide
gggagacuugaaaagaaaa

SEQ ID NO: 2593098 - RNA, 19 nt, Artificial Sequence
  Description of Artificial Sequence: Synthetic oligonucleotide
ccggaucaguagcugaagg

SEQ ID NO: 2593099 - RNA, 19 nt, Artificial Sequence
  Description of Artificial Sequence: Synthetic oligonucleotide
gagacacauuaaagaaaga

SEQ ID NO: 2593100 - RNA, 19 nt, Artificial Sequence
  Description of Artificial Sequence: Synthetic oligonucleotide
cggaucaguagcugaaggc

SEQ ID NO: 2593101 - RNA, 19 nt, Artificial Sequence
  Description of Artificial Sequence: Synthetic oligonucleotide
accucaaauuaaauacuuu

SEQ ID NO: 2593102 - RNA, 19 nt, Artificial Sequence
  Description of Artificial Sequence: Synthetic oligonucleotide
gggguuccugucuauucug

SEQ ID NO: 2593103 - RNA, 19 nt, Artificial Sequence
  Description of Artificial Sequence: Synthetic oligonucleotide
gccaucagauggaauauca

SEQ ID NO: 2593104 - RNA, 19 nt, Artificial Sequence
  Description of Artificial Sequence: Synthetic oligonucleotide
caguagcugaaggcagagg

SEQ ID NO: 2593105 - RNA, 19 nt, Artificial Sequence
  Description of Artificial Sequence: Synthetic oligonucleotide
agugggaggcaauggccua

SEQ ID NO: 2593106 - RNA, 19 nt, Artificial Sequence
  Description of Artificial Sequence: Synthetic oligonucleotide
cuaugaaagugcuccuggu

SEQ ID NO: 2593107 - RNA, 19 nt, Artificial Sequence
  Description of Artificial Sequence: Synthetic oligonucleotide
ggguuccugucuauucugg

SEQ ID NO: 2593108 - RNA, 19 nt, Artificial Sequence
  Description of Artificial Sequence: Synthetic oligonucleotide
gccuguggcugcuggagag

SEQ ID NO: 2593109 - RNA, 19 nt, Artificial Sequence
  Description of Artificial Sequence: Synthetic oligonucleotide
gugggaggcaauggccuag

SEQ ID NO: 2593110 - RNA, 19 nt, Artificial Sequence
  Description of Artificial Sequence: Synthetic oligonucleotide
ccucaaauuaaauacuuuu

SEQ ID NO: 2593111 - RNA, 19 nt, Artificial Sequence
  Description of Artificial Sequence: Synthetic oligonucleotide
gaaggcagaggggccugug

SEQ ID NO: 2593112 - RNA, 19 nt, Artificial Sequence
  Description of Artificial Sequence: Synthetic oligonucleotide
gagugggaggcaauggccu

SEQ ID NO: 2593113 - RNA, 19 nt, Artificial Sequence
  Description of Artificial Sequence: Synthetic oligonucleotide
ggcuggccggaucaguagc

SEQ ID NO: 2593114 - RNA, 19 nt, Artificial Sequence
  Description of Artificial Sequence: Synthetic oligonucleotide
gucuggaugcuagggguuc

SEQ ID NO: 2593115 - RNA, 19 nt, Artificial Sequence
  Description of Artificial Sequence: Synthetic oligonucleotide
auucgaggagacacauuaa

SEQ ID NO: 2593116 - RNA, 19 nt, Artificial Sequence
  Description of Artificial Sequence: Synthetic oligonucleotide
gaggaccaggcaggugaag

SEQ ID NO: 2593117 - RNA, 19 nt, Artificial Sequence
  Description of Artificial Sequence: Synthetic oligonucleotide
ugcuaggggaggagcccau

SEQ ID NO: 2593118 - RNA, 19 nt, Artificial Sequence
  Description of Artificial Sequence: Synthetic oligonucleotide
gaggagcccauggcuggcc

SEQ ID NO: 2593119 - RNA, 19 nt, Artificial Sequence
  Description of Artificial Sequence: Synthetic oligonucleotide
ggggcggagggugaugucc

SEQ ID NO: 2593120 - RNA, 19 nt, Artificial Sequence
  Description of Artificial Sequence: Synthetic oligonucleotide
gaaagugcuccugguuucu

SEQ ID NO: 2593121 - RNA, 19 nt, Artificial Sequence
  Description of Artificial Sequence: Synthetic oligonucleotide
ugggaggcaauggccuagu

SEQ ID NO: 2593122 - RNA, 19 nt, Artificial Sequence
  Description of Artificial Sequence: Synthetic oligonucleotide
guacaugauuaggucccca

SEQ ID NO: 2593123 - RNA, 19 nt, Artificial Sequence
  Description of Artificial Sequence: Synthetic oligonucleotide
cugaagauucgaggagaca

SEQ ID NO: 2593124 - RNA, 19 nt, Artificial Sequence
  Description of Artificial Sequence: Synthetic oligonucleotide
ggagcccauggcuggccgg

SEQ ID NO: 2593125 - RNA, 19 nt, Artificial Sequence
  Description of Artificial Sequence: Synthetic oligonucleotide
gguccccaaaaugauuuga

SEQ ID NO: 2593126 - RNA, 19 nt, Artificial Sequence
  Description of Artificial Sequence: Synthetic oligonucleotide
gcugcuaucuccagccauc

SEQ ID NO: 2593127 - RNA, 19 nt, Artificial Sequence
  Description of Artificial Sequence: Synthetic oligonucleotide
gccccaggaaaauaauuua

SEQ ID NO: 2593128 - RNA, 19 nt, Artificial Sequence
  Description of Artificial Sequence: Synthetic oligonucleotide
ggugaaggcugugcuucag

SEQ ID NO: 2593129 - RNA, 19 nt, Artificial Sequence
  Description of Artificial Sequence: Synthetic oligonucleotide
cuggccggaucaguagcug

SEQ ID NO: 2593130 - RNA, 19 nt, Artificial Sequence
  Description of Artificial Sequence: Synthetic oligonucleotide
cucccggggagcacaguga

SEQ ID NO: 2593131 - RNA, 19 nt, Artificial Sequence
  Description of Artificial Sequence: Synthetic oligonucleotide
auggcuggccggaucagua

SEQ ID NO: 2593132 - RNA, 19 nt, Artificial Sequence
  Description of Artificial Sequence: Synthetic oligonucleotide
gagcccauggcuggccgga

SEQ ID NO: 2593133 - RNA, 19 nt, Artificial Sequence
  Description of Artificial Sequence: Synthetic oligonucleotide
cugcuaucuccagccauca

SEQ ID NO: 2593134 - RNA, 19 nt, Artificial Sequence
  Description of Artificial Sequence: Synthetic oligonucleotide
ggcuggaguguggccaggg

SEQ ID NO: 2593135 - RNA, 19 nt, Artificial Sequence
  Description of Artificial Sequence: Synthetic oligonucleotide
ggugauguccaugcugucu

SEQ ID NO: 2593136 - RNA, 19 nt, Artificial Sequence
  Description of Artificial Sequence: Synthetic oligonucleotide
guuucucaaaggagugggu

SEQ ID NO: 2593137 - RNA, 19 nt, Artificial Sequence
  Description of Artificial Sequence: Synthetic oligonucleotide
ggaugcuagggguuccugu

SEQ ID NO: 2593138 - RNA, 19 nt, Artificial Sequence
  Description of Artificial Sequence: Synthetic oligonucleotide
gugcuaggggaggagccca

SEQ ID NO: 2593139 - RNA, 19 nt, Artificial Sequence
  Description of Artificial Sequence: Synthetic oligonucleotide
ccaucagauggaauaucaa

SEQ ID NO: 2593140 - RNA, 19 nt, Artificial Sequence
  Description of Artificial Sequence: Synthetic oligonucleotide
gggagcacagugaacgugu

SEQ ID NO: 2593141 - RNA, 19 nt, Artificial Sequence
  Description of Artificial Sequence: Synthetic oligonucleotide
agauucgaggagacacauu

SEQ ID NO: 2593142 - RNA, 19 nt, Artificial Sequence
  Description of Artificial Sequence: Synthetic oligonucleotide
cuccugguuucuguaugga

SEQ ID NO: 2593143 - RNA, 19 nt, Artificial Sequence
  Description of Artificial Sequence: Synthetic oligonucleotide
agaggaccaggcaggugaa

SEQ ID NO: 2593144 - RNA, 19 nt, Artificial Sequence
  Description of Artificial Sequence: Synthetic oligonucleotide
gccggaucaguagcugaag

SEQ ID NO: 2593145 - RNA, 19 nt, Artificial Sequence
  Description of Artificial Sequence: Synthetic oligonucleotide
caaaggagugggucuggau

SEQ ID NO: 2593146 - RNA, 19 nt, Artificial Sequence
  Description of Artificial Sequence: Synthetic oligonucleotide
ggccccaggaaaauaauuu

SEQ ID NO: 2593147 - RNA, 19 nt, Artificial Sequence
  Description of Artificial Sequence: Synthetic oligonucleotide
cagcccuguccccggguuc

SEQ ID NO: 2593148 - RNA, 19 nt, Artificial Sequence
  Description of Artificial Sequence: Synthetic oligonucleotide
cacagugaacgugucuggu

SEQ ID NO: 2593149 - RNA, 19 nt, Artificial Sequence
  Description of Artificial Sequence: Synthetic oligonucleotide
cugcugcuaucuccagcca

SEQ ID NO: 2593150 - RNA, 19 nt, Artificial Sequence
  Description of Artificial Sequence: Synthetic oligonucleotide
gcuggaguguggccaggga

SEQ ID NO: 2593151 - RNA, 19 nt, Artificial Sequence
  Description of Artificial Sequence: Synthetic oligonucleotide
acgugucugguggccucug

SEQ ID NO: 2593152 - RNA, 19 nt, Artificial Sequence
  Description of Artificial Sequence: Synthetic oligonucleotide
ccggguuccuugcugccuc

SEQ ID NO: 2593153 - RNA, 19 nt, Artificial Sequence
  Description of Artificial Sequence: Synthetic oligonucleotide
guggccagggagacuugaa

SEQ ID NO: 2593154 - RNA, 19 nt, Artificial Sequence
  Description of Artificial Sequence: Synthetic oligonucleotide
gagugcucccggggagcac

SEQ ID NO: 2593155 - RNA, 19 nt, Artificial Sequence
  Description of Artificial Sequence: Synthetic oligonucleotide
gugcucccggggagcacag

SEQ ID NO: 2593156 - RNA, 19 nt, Artificial Sequence
  Description of Artificial Sequence: Synthetic oligonucleotide
ggccggaucaguagcugaa

SEQ ID NO: 2593157 - RNA, 19 nt, Artificial Sequence
  Description of Artificial Sequence: Synthetic oligonucleotide
gcuaggggaggagcccaug

SEQ ID NO: 2593158 - RNA, 19 nt, Artificial Sequence
  Description of Artificial Sequence: Synthetic oligonucleotide
gcggagggugauguccaug

SEQ ID NO: 2593159 - RNA, 19 nt, Artificial Sequence
  Description of Artificial Sequence: Synthetic oligonucleotide
cgugucugguggccucugg

SEQ ID NO: 2593160 - RNA, 19 nt, Artificial Sequence
  Description of Artificial Sequence: Synthetic oligonucleotide
cuguacaaacaggguuucu

SEQ ID NO: 2593161 - RNA, 19 nt, Artificial Sequence
  Description of Artificial Sequence: Synthetic oligonucleotide
guguggccagggagacuug

SEQ ID NO: 2593162 - RNA, 19 nt, Artificial Sequence
  Description of Artificial Sequence: Synthetic oligonucleotide
ggagggugauguccaugcu

SEQ ID NO: 2593163 - RNA, 19 nt, Artificial Sequence
  Description of Artificial Sequence: Synthetic oligonucleotide
cauggcuggccggaucagu

SEQ ID NO: 2593164 - RNA, 19 nt, Artificial Sequence
  Description of Artificial Sequence: Synthetic oligonucleotide
cuagggguuccugucuauu

SEQ ID NO: 2593165 - RNA, 19 nt, Artificial Sequence
  Description of Artificial Sequence: Synthetic oligonucleotide
cccggggagcacagugaac

SEQ ID NO: 2593166 - RNA, 19 nt, Artificial Sequence
  Description of Artificial Sequence: Synthetic oligonucleotide
cucuggagugggaggcaau

SEQ ID NO: 2593167 - RNA, 19 nt, Artificial Sequence
  Description of Artificial Sequence: Synthetic oligonucleotide
gcccauggcuggccggauc

SEQ ID NO: 2593168 - RNA, 19 nt, Artificial Sequence
  Description of Artificial Sequence: Synthetic oligonucleotide
gcugugcuucagcccuguc

SEQ ID NO: 2593169 - RNA, 19 nt, Artificial Sequence
  Description of Artificial Sequence: Synthetic oligonucleotide
gcuggccggaucaguagcu

SEQ ID NO: 2593170 - RNA, 19 nt, Artificial Sequence
  Description of Artificial Sequence: Synthetic oligonucleotide
ggucuggaugcuagggguu

SEQ ID NO: 2593171 - RNA, 19 nt, Artificial Sequence
  Description of Artificial Sequence: Synthetic oligonucleotide
gccucuggagugggaggca

SEQ ID NO: 2593172 - RNA, 19 nt, Artificial Sequence
  Description of Artificial Sequence: Synthetic oligonucleotide
gggccccaggaaaauaauu

SEQ ID NO: 2593173 - RNA, 19 nt, Artificial Sequence
  Description of Artificial Sequence: Synthetic oligonucleotide
ccucuggagugggaggcaa

SEQ ID NO: 2593174 - RNA, 19 nt, Artificial Sequence
  Description of Artificial Sequence: Synthetic oligonucleotide
gggaggcaauggccuaguu

SEQ ID NO: 2593175 - RNA, 19 nt, Artificial Sequence
  Description of Artificial Sequence: Synthetic oligonucleotide
cggggagcacagugaacgu

SEQ ID NO: 2593176 - RNA, 19 nt, Artificial Sequence
  Description of Artificial Sequence: Synthetic oligonucleotide
cccggguuccuugcugccu

SEQ ID NO: 2593177 - RNA, 19 nt, Artificial Sequence
  Description of Artificial Sequence: Synthetic oligonucleotide
gcccuguccccggguuccu

SEQ ID NO: 2593178 - RNA, 19 nt, Artificial Sequence
  Description of Artificial Sequence: Synthetic oligonucleotide
cccuguccccggguuccuu

SEQ ID NO: 2593179 - RNA, 19 nt, Artificial Sequence
  Description of Artificial Sequence: Synthetic oligonucleotide
aauuucgugacccaagugc

SEQ ID NO: 2593180 - RNA, 19 nt, Artificial Sequence
  Description of Artificial Sequence: Synthetic oligonucleotide
uuuaaaaccccuuugaagc

SEQ ID NO: 2593181 - RNA, 19 nt, Artificial Sequence
  Description of Artificial Sequence: Synthetic oligonucleotide
agaaugguuagccagaagc

SEQ ID NO: 2593182 - RNA, 19 nt, Artificial Sequence
  Description of Artificial Sequence: Synthetic oligonucleotide
ugagauucaauuaugauac

SEQ ID NO: 2593183 - RNA, 19 nt, Artificial Sequence
  Description of Artificial Sequence: Synthetic oligonucleotide
aagguuagcacauuuagag

SEQ ID NO: 2593184 - RNA, 19 nt, Artificial Sequence
  Description of Artificial Sequence: Synthetic oligonucleotide
uuaugauacaauaucauca

SEQ ID NO: 2593185 - RNA, 19 nt, Artificial Sequence
  Description of Artificial Sequence: Synthetic oligonucleotide
uuuaaugugcugaauuucg

SEQ ID NO: 2593186 - RNA, 19 nt, Artificial Sequence
  Description of Artificial Sequence: Synthetic oligonucleotide
aauaauuuuaaugugcuga

SEQ ID NO: 2593187 - RNA, 19 nt, Artificial Sequence
  Description of Artificial Sequence: Synthetic oligonucleotide
agguguauggccuaaaugg

SEQ ID NO: 2593188 - RNA, 19 nt, Artificial Sequence
  Description of Artificial Sequence: Synthetic oligonucleotide
uauaaauuggaucuauccc

SEQ ID NO: 2593189 - RNA, 19 nt, Artificial Sequence
  Description of Artificial Sequence: Synthetic oligonucleotide
aaacuuucaaguaaaacuc

SEQ ID NO: 2593190 - RNA, 19 nt, Artificial Sequence
  Description of Artificial Sequence: Synthetic oligonucleotide
acauacaucaguuaagaag

SEQ ID NO: 2593191 - RNA, 19 nt, Artificial Sequence
  Description of Artificial Sequence: Synthetic oligonucleotide
ucaauuaugauacaauauc

SEQ ID NO: 2593192 - RNA, 19 nt, Artificial Sequence
  Description of Artificial Sequence: Synthetic oligonucleotide
ugaugaaaggcauuuaucc

SEQ ID NO: 2593193 - RNA, 19 nt, Artificial Sequence
  Description of Artificial Sequence: Synthetic oligonucleotide
aaugguaccuccaucaugg

SEQ ID NO: 2593194 - RNA, 19 nt, Artificial Sequence
  Description of Artificial Sequence: Synthetic oligonucleotide
aagaacauagucuguauug

SEQ ID NO: 2593195 - RNA, 19 nt, Artificial Sequence
  Description of Artificial Sequence: Synthetic oligonucleotide
auuaugauacaauaucauc

SEQ ID NO: 2593196 - RNA, 19 nt, Artificial Sequence
  Description of Artificial Sequence: Synthetic oligonucleotide
gaugcaacgagauuuaaac

SEQ ID NO: 2593197 - RNA, 19 nt, Artificial Sequence
  Description of Artificial Sequence: Synthetic oligonucleotide
gaugaugcuaucuucauac

SEQ ID NO: 2593198 - RNA, 19 nt, Artificial Sequence
  Description of Artificial Sequence: Synthetic oligonucleotide
aaguauuaugaaaauauuc

SEQ ID NO: 2593199 - RNA, 19 nt, Artificial Sequence
  Description of Artificial Sequence: Synthetic oligonucleotide
uaaacaugaaacuuucaag

SEQ ID NO: 2593200 - RNA, 19 nt, Artificial Sequence
  Description of Artificial Sequence: Synthetic oligonucleotide
uugcaauuuaugaugaaag

SEQ ID NO: 2593201 - RNA, 19 nt, Artificial Sequence
  Description of Artificial Sequence: Synthetic oligonucleotide
auuuaaacauuccucuucg

SEQ ID NO: 2593202 - RNA, 19 nt, Artificial Sequence
  Description of Artificial Sequence: Synthetic oligonucleotide
ugugauacaccucagagau

SEQ ID NO: 2593203 - RNA, 19 nt, Artificial Sequence
  Description of Artificial Sequence: Synthetic oligonucleotide
acaauaucaucaucuauac

SEQ ID NO: 2593204 - RNA, 19 nt, Artificial Sequence
  Description of Artificial Sequence: Synthetic oligonucleotide
auaaauuggaucuaucccu

SEQ ID NO: 2593205 - RNA, 19 nt, Artificial Sequence
  Description of Artificial Sequence: Synthetic oligonucleotide
uuauuuaaaaccccuuuga

SEQ ID NO: 2593206 - RNA, 19 nt, Artificial Sequence
  Description of Artificial Sequence: Synthetic oligonucleotide
uguauugacauacaucagu

SEQ ID NO: 2593207 - RNA, 19 nt, Artificial Sequence
  Description of Artificial Sequence: Synthetic oligonucleotide
gaugaaaggcauuuauccg

SEQ ID NO: 2593208 - RNA, 19 nt, Artificial Sequence
  Description of Artificial Sequence: Synthetic oligonucleotide
caugguuuaguuuauaauc

SEQ ID NO: 2593209 - RNA, 19 nt, Artificial Sequence
  Description of Artificial Sequence: Synthetic oligonucleotide
uacaauaucaucaucuaua

SEQ ID NO: 2593210 - RNA, 19 nt, Artificial Sequence
  Description of Artificial Sequence: Synthetic oligonucleotide
uuaagaagaaugguuagcc

SEQ ID NO: 2593211 - RNA, 19 nt, Artificial Sequence
  Description of Artificial Sequence: Synthetic oligonucleotide
ugcaauuuaugaugaaagg

SEQ ID NO: 2593212 - RNA, 19 nt, Artificial Sequence
  Description of Artificial Sequence: Synthetic oligonucleotide
cauacaucaguuaagaaga

SEQ ID NO: 2593213 - RNA, 19 nt, Artificial Sequence
  Description of Artificial Sequence: Synthetic oligonucleotide
ucagauuugugauagggcu

SEQ ID NO: 2593214 - RNA, 19 nt, Artificial Sequence
  Description of Artificial Sequence: Synthetic oligonucleotide
aguauuaugaaaauauucu

SEQ ID NO: 2593215 - RNA, 19 nt, Artificial Sequence
  Description of Artificial Sequence: Synthetic oligonucleotide
auagucuguauugacauac

SEQ ID NO: 2593216 - RNA, 19 nt, Artificial Sequence
  Description of Artificial Sequence: Synthetic oligonucleotide
uuuagagacauuuccagaa

SEQ ID NO: 2593217 - RNA, 19 nt, Artificial Sequence
  Description of Artificial Sequence: Synthetic oligonucleotide
aaacucagauuugugauag

SEQ ID NO: 2593218 - RNA, 19 nt, Artificial Sequence
  Description of Artificial Sequence: Synthetic oligonucleotide
ucuggacugaugaauuugg

SEQ ID NO: 2593219 - RNA, 19 nt, Artificial Sequence
  Description of Artificial Sequence: Synthetic oligonucleotide
ugcccaaguauuuauuugg

SEQ ID NO: 2593220 - RNA, 19 nt, Artificial Sequence
  Description of Artificial Sequence: Synthetic oligonucleotide
gauagggcuuuauaaauug

SEQ ID NO: 2593221 - RNA, 19 nt, Artificial Sequence
  Description of Artificial Sequence: Synthetic oligonucleotide
aauaagaggccugaaauaa

SEQ ID NO: 2593222 - RNA, 19 nt, Artificial Sequence
  Description of Artificial Sequence: Synthetic oligonucleotide
uaaauaaaccaguuguuaa

SEQ ID NO: 2593223 - RNA, 19 nt, Artificial Sequence
  Description of Artificial Sequence: Synthetic oligonucleotide
guauuaugaaaauauucug

SEQ ID NO: 2593224 - RNA, 19 nt, Artificial Sequence
  Description of Artificial Sequence: Synthetic oligonucleotide
ccaguuguuaauaagaggc

SEQ ID NO: 2593225 - RNA, 19 nt, Artificial Sequence
  Description of Artificial Sequence: Synthetic oligonucleotide
aucaucuauacauauaaau

SEQ ID NO: 2593226 - RNA, 19 nt, Artificial Sequence
  Description of Artificial Sequence: Synthetic oligonucleotide
auugacauacaucaguuaa

SEQ ID NO: 2593227 - RNA, 19 nt, Artificial Sequence
  Description of Artificial Sequence: Synthetic oligonucleotide
caauuuaugaugaaaggca

SEQ ID NO: 2593228 - RNA, 19 nt, Artificial Sequence
  Description of Artificial Sequence: Synthetic oligonucleotide
uaaaccaguuguuaauaag

SEQ ID NO: 2593229 - RNA, 19 nt, Artificial Sequence
  Description of Artificial Sequence: Synthetic oligonucleotide
ugcaacgagauuuaaacau

SEQ ID NO: 2593230 - RNA, 19 nt, Artificial Sequence
  Description of Artificial Sequence: Synthetic oligonucleotide
uucauacugagguguaugg

SEQ ID NO: 2593231 - RNA, 19 nt, Artificial Sequence
  Description of Artificial Sequence: Synthetic oligonucleotide
cauuuagagacauuuccag

SEQ ID NO: 2593232 - RNA, 19 nt, Artificial Sequence
  Description of Artificial Sequence: Synthetic oligonucleotide
uggauaaauaaaccaguug

SEQ ID NO: 2593233 - RNA, 19 nt, Artificial Sequence
  Description of Artificial Sequence: Synthetic oligonucleotide
uucaauuaugauacaauau

SEQ ID NO: 2593234 - RNA, 19 nt, Artificial Sequence
  Description of Artificial Sequence: Synthetic oligonucleotide
cuacuugcaauuuaugaug

SEQ ID NO: 2593235 - RNA, 19 nt, Artificial Sequence
  Description of Artificial Sequence: Synthetic oligonucleotide
aaugagauucaauuaugau

SEQ ID NO: 2593236 - RNA, 19 nt, Artificial Sequence
  Description of Artificial Sequence: Synthetic oligonucleotide
uaugaugaaaggcauuuau

SEQ ID NO: 2593237 - RNA, 19 nt, Artificial Sequence
  Description of Artificial Sequence: Synthetic oligonucleotide
uuuaccaauuuaaucucca

SEQ ID NO: 2593238 - RNA, 19 nt, Artificial Sequence
  Description of Artificial Sequence: Synthetic oligonucleotide
ucagagaucaauugugacu

SEQ ID NO: 2593239 - RNA, 19 nt, Artificial Sequence
  Description of Artificial Sequence: Synthetic oligonucleotide
uugacauacaucaguuaag

SEQ ID NO: 2593240 - RNA, 19 nt, Artificial Sequence
  Description of Artificial Sequence: Synthetic oligonucleotide
augagauucaauuaugaua

SEQ ID NO: 2593241 - RNA, 19 nt, Artificial Sequence
  Description of Artificial Sequence: Synthetic oligonucleotide
uaucccuuuaccaauuuaa

SEQ ID NO: 2593242 - RNA, 19 nt, Artificial Sequence
  Description of Artificial Sequence: Synthetic oligonucleotide
uguauggccuaaaugguac

SEQ ID NO: 2593243 - RNA, 19 nt, Artificial Sequence
  Description of Artificial Sequence: Synthetic oligonucleotide
uucugaacuggccaguuca

SEQ ID NO: 2593244 - RNA, 19 nt, Artificial Sequence
  Description of Artificial Sequence: Synthetic oligonucleotide
ucaagaugcaacgagauuu

SEQ ID NO: 2593245 - RNA, 19 nt, Artificial Sequence
  Description of Artificial Sequence: Synthetic oligonucleotide
aaaccaguuguuaauaaga

SEQ ID NO: 2593246 - RNA, 19 nt, Artificial Sequence
  Description of Artificial Sequence: Synthetic oligonucleotide
ugugauagggcuuuauaaa

SEQ ID NO: 2593247 - RNA, 19 nt, Artificial Sequence
  Description of Artificial Sequence: Synthetic oligonucleotide
aaaggcauuuauccguucu

SEQ ID NO: 2593248 - RNA, 19 nt, Artificial Sequence
  Description of Artificial Sequence: Synthetic oligonucleotide
acaucaguuaagaagaaug

SEQ ID NO: 2593249 - RNA, 19 nt, Artificial Sequence
  Description of Artificial Sequence: Synthetic oligonucleotide
ucaguuguguuacagucgu

SEQ ID NO: 2593250 - RNA, 19 nt, Artificial Sequence
  Description of Artificial Sequence: Synthetic oligonucleotide
uuauuuucaucuuggcuga

SEQ ID NO: 2593251 - RNA, 19 nt, Artificial Sequence
  Description of Artificial Sequence: Synthetic oligonucleotide
ugcuacuugcaauuuauga

SEQ ID NO: 2593252 - RNA, 19 nt, Artificial Sequence
  Description of Artificial Sequence: Synthetic oligonucleotide
aaugguuagccagaagcag

SEQ ID NO: 2593253 - RNA, 19 nt, Artificial Sequence
  Description of Artificial Sequence: Synthetic oligonucleotide
ugaugcuaucuucauacug

SEQ ID NO: 2593254 - RNA, 19 nt, Artificial Sequence
  Description of Artificial Sequence: Synthetic oligonucleotide
aaaugguaccuccaucaug

SEQ ID NO: 2593255 - RNA, 19 nt, Artificial Sequence
  Description of Artificial Sequence: Synthetic oligonucleotide
aacgagauuuaaacauucc

SEQ ID NO: 2593256 - RNA, 19 nt, Artificial Sequence
  Description of Artificial Sequence: Synthetic oligonucleotide
uggaguggauaaauaaacc

SEQ ID NO: 2593257 - RNA, 19 nt, Artificial Sequence
  Description of Artificial Sequence: Synthetic oligonucleotide
auucaauuaugauacaaua

SEQ ID NO: 2593258 - RNA, 19 nt, Artificial Sequence
  Description of Artificial Sequence: Synthetic oligonucleotide
guaaaacucagauuuguga

SEQ ID NO: 2593259 - RNA, 19 nt, Artificial Sequence
  Description of Artificial Sequence: Synthetic oligonucleotide
auuuggaguggauaaauaa

SEQ ID NO: 2593260 - RNA, 19 nt, Artificial Sequence
  Description of Artificial Sequence: Synthetic oligonucleotide
cuaaaugguaccuccauca

SEQ ID NO: 2593261 - RNA, 19 nt, Artificial Sequence
  Description of Artificial Sequence: Synthetic oligonucleotide
caauuaugauacaauauca

SEQ ID NO: 2593262 - RNA, 19 nt, Artificial Sequence
  Description of Artificial Sequence: Synthetic oligonucleotide
uugugauagggcuuuauaa

SEQ ID NO: 2593263 - RNA, 19 nt, Artificial Sequence
  Description of Artificial Sequence: Synthetic oligonucleotide
aacaugaaacuuucaagua

SEQ ID NO: 2593264 - RNA, 19 nt, Artificial Sequence
  Description of Artificial Sequence: Synthetic oligonucleotide
aaaugagauucaauuauga

SEQ ID NO: 2593265 - RNA, 19 nt, Artificial Sequence
  Description of Artificial Sequence: Synthetic oligonucleotide
uaagaggccugaaauaaaa

SEQ ID NO: 2593266 - RNA, 19 nt, Artificial Sequence
  Description of Artificial Sequence: Synthetic oligonucleotide
uuuaugaugaaaggcauuu

SEQ ID NO: 2593267 - RNA, 19 nt, Artificial Sequence
  Description of Artificial Sequence: Synthetic oligonucleotide
aucaauugugacuucauua

SEQ ID NO: 2593268 - RNA, 19 nt, Artificial Sequence
  Description of Artificial Sequence: Synthetic oligonucleotide
aaguaaaacucagauuugu

SEQ ID NO: 2593269 - RNA, 19 nt, Artificial Sequence
  Description of Artificial Sequence: Synthetic oligonucleotide
agucguaggggccuauuac

SEQ ID NO: 2593270 - RNA, 19 nt, Artificial Sequence
  Description of Artificial Sequence: Synthetic oligonucleotide
gguuagcacauuuagagac

SEQ ID NO: 2593271 - RNA, 19 nt, Artificial Sequence
  Description of Artificial Sequence: Synthetic oligonucleotide
ugaauuucgugacccaagu

SEQ ID NO: 2593272 - RNA, 19 nt, Artificial Sequence
  Description of Artificial Sequence: Synthetic oligonucleotide
gagauuuaaacauuccucu

SEQ ID NO: 2593273 - RNA, 19 nt, Artificial Sequence
  Description of Artificial Sequence: Synthetic oligonucleotide
uacuugcaauuuaugauga

SEQ ID NO: 2593274 - RNA, 19 nt, Artificial Sequence
  Description of Artificial Sequence: Synthetic oligonucleotide
aaagaacauagucuguauu

SEQ ID NO: 2593275 - RNA, 19 nt, Artificial Sequence
  Description of Artificial Sequence: Synthetic oligonucleotide
acgagauuuaaacauuccu

SEQ ID NO: 2593276 - RNA, 19 nt, Artificial Sequence
  Description of Artificial Sequence: Synthetic oligonucleotide
augugcugaauuucgugac

SEQ ID NO: 2593277 - RNA, 19 nt, Artificial Sequence
  Description of Artificial Sequence: Synthetic oligonucleotide
uaaugugcugaauuucgug

SEQ ID NO: 2593278 - RNA, 19 nt, Artificial Sequence
  Description of Artificial Sequence: Synthetic oligonucleotide
aaacauuccucuucgcaaa

SEQ ID NO: 2593279 - RNA, 19 nt, Artificial Sequence
  Description of Artificial Sequence: Synthetic oligonucleotide
ugacauacaucaguuaaga

SEQ ID NO: 2593280 - RNA, 19 nt, Artificial Sequence
  Description of Artificial Sequence: Synthetic oligonucleotide
cuccaaauaauuuuaaugu

SEQ ID NO: 2593281 - RNA, 19 nt, Artificial Sequence
  Description of Artificial Sequence: Synthetic oligonucleotide
uucgcaaacagagugcaug

SEQ ID NO: 2593282 - RNA, 19 nt, Artificial Sequence
  Description of Artificial Sequence: Synthetic oligonucleotide
ucgcaaacagagugcaugg

SEQ ID NO: 2593283 - RNA, 19 nt, Artificial Sequence
  Description of Artificial Sequence: Synthetic oligonucleotide
gaugcuaucuucauacuga

SEQ ID NO: 2593284 - RNA, 19 nt, Artificial Sequence
  Description of Artificial Sequence: Synthetic oligonucleotide
ugaaacuuucaaguaaaac

SEQ ID NO: 2593285 - RNA, 19 nt, Artificial Sequence
  Description of Artificial Sequence: Synthetic oligonucleotide
uggaucuaucccuuuacca

SEQ ID NO: 2593286 - RNA, 19 nt, Artificial Sequence
  Description of Artificial Sequence: Synthetic oligonucleotide
auuuagagacauuuccaga

SEQ ID NO: 2593287 - RNA, 19 nt, Artificial Sequence
  Description of Artificial Sequence: Synthetic oligonucleotide
uaccaauuuaaucuccaaa

SEQ ID NO: 2593288 - RNA, 19 nt, Artificial Sequence
  Description of Artificial Sequence: Synthetic oligonucleotide
acagaggaugcucuuaacu

SEQ ID NO: 2593289 - RNA, 19 nt, Artificial Sequence
  Description of Artificial Sequence: Synthetic oligonucleotide
uaagaagaaugguuagcca

SEQ ID NO: 2593290 - RNA, 19 nt, Artificial Sequence
  Description of Artificial Sequence: Synthetic oligonucleotide
uaucuucauacugaggugu

SEQ ID NO: 2593291 - RNA, 19 nt, Artificial Sequence
  Description of Artificial Sequence: Synthetic oligonucleotide
ugguuuaguuuauaaucug

SEQ ID NO: 2593292 - RNA, 19 nt, Artificial Sequence
  Description of Artificial Sequence: Synthetic oligonucleotide
caauuuaaucuccaaauaa

SEQ ID NO: 2593293 - RNA, 19 nt, Artificial Sequence
  Description of Artificial Sequence: Synthetic oligonucleotide
uuaaaaccccuuugaagcu

SEQ ID NO: 2593294 - RNA, 19 nt, Artificial Sequence
  Description of Artificial Sequence: Synthetic oligonucleotide
ugacccaagugcuacuugc

SEQ ID NO: 2593295 - RNA, 19 nt, Artificial Sequence
  Description of Artificial Sequence: Synthetic oligonucleotide
uaauaagaggccugaaaua

SEQ ID NO: 2593296 - RNA, 19 nt, Artificial Sequence
  Description of Artificial Sequence: Synthetic oligonucleotide
uuaaugugcugaauuucgu

SEQ ID NO: 2593297 - RNA, 19 nt, Artificial Sequence
  Description of Artificial Sequence: Synthetic oligonucleotide
cauuuauccguucuuucug

SEQ ID NO: 2593298 - RNA, 19 nt, Artificial Sequence
  Description of Artificial Sequence: Synthetic oligonucleotide
acacaaugaaguauuauga

SEQ ID NO: 2593299 - RNA, 19 nt, Artificial Sequence
  Description of Artificial Sequence: Synthetic oligonucleotide
uuggaucuaucccuuuacc

SEQ ID NO: 2593300 - RNA, 19 nt, Artificial Sequence
  Description of Artificial Sequence: Synthetic oligonucleotide
auggagucaguuguguuac

SEQ ID NO: 2593301 - RNA, 19 nt, Artificial Sequence
  Description of Artificial Sequence: Synthetic oligonucleotide
uuugugauagggcuuuaua

SEQ ID NO: 2593302 - RNA, 19 nt, Artificial Sequence
  Description of Artificial Sequence: Synthetic oligonucleotide
aauuggaucuaucccuuua

SEQ ID NO: 2593303 - RNA, 19 nt, Artificial Sequence
  Description of Artificial Sequence: Synthetic oligonucleotide
guuguguuacagucguagg

SEQ ID NO: 2593304 - RNA, 19 nt, Artificial Sequence
  Description of Artificial Sequence: Synthetic oligonucleotide
gagugcaugguuuaguuua

SEQ ID NO: 2593305 - RNA, 19 nt, Artificial Sequence
  Description of Artificial Sequence: Synthetic oligonucleotide
ugugcugaauuucgugacc

SEQ ID NO: 2593306 - RNA, 19 nt, Artificial Sequence
  Description of Artificial Sequence: Synthetic oligonucleotide
caguuguuaauaagaggcc

SEQ ID NO: 2593307 - RNA, 19 nt, Artificial Sequence
  Description of Artificial Sequence: Synthetic oligonucleotide
uguuacagucguaggggcc

SEQ ID NO: 2593308 - RNA, 19 nt, Artificial Sequence
  Description of Artificial Sequence: Synthetic oligonucleotide
guuaagaagaaugguuagc

SEQ ID NO: 2593309 - RNA, 19 nt, Artificial Sequence
  Description of Artificial Sequence: Synthetic oligonucleotide
gcaauuuaugaugaaaggc

SEQ ID NO: 2593310 - RNA, 19 nt, Artificial Sequence
  Description of Artificial Sequence: Synthetic oligonucleotide
gagguguauggccuaaaug

SEQ ID NO: 2593311 - RNA, 19 nt, Artificial Sequence
  Description of Artificial Sequence: Synthetic oligonucleotide
cagguuuauuuaaaacccc

SEQ ID NO: 2593312 - RNA, 19 nt, Artificial Sequence
  Description of Artificial Sequence: Synthetic oligonucleotide
uaacagaggaugcucuuaa

SEQ ID NO: 2593313 - RNA, 19 nt, Artificial Sequence
  Description of Artificial Sequence: Synthetic oligonucleotide
aguuguuaauaagaggccu

SEQ ID NO: 2593314 - RNA, 19 nt, Artificial Sequence
  Description of Artificial Sequence: Synthetic oligonucleotide
ugugcagguuuauuuaaaa

SEQ ID NO: 2593315 - RNA, 19 nt, Artificial Sequence
  Description of Artificial Sequence: Synthetic oligonucleotide
gguuuaguuuauaaucugg

SEQ ID NO: 2593316 - RNA, 19 nt, Artificial Sequence
  Description of Artificial Sequence: Synthetic oligonucleotide
auuuauccguucuuucuga

SEQ ID NO: 2593317 - RNA, 19 nt, Artificial Sequence
  Description of Artificial Sequence: Synthetic oligonucleotide
aguggauaaauaaaccagu

SEQ ID NO: 2593318 - RNA, 19 nt, Artificial Sequence
  Description of Artificial Sequence: Synthetic oligonucleotide
cugaauuucgugacccaag

SEQ ID NO: 2593319 - RNA, 19 nt, Artificial Sequence
  Description of Artificial Sequence: Synthetic oligonucleotide
ucuuaacugcccaaguauu

SEQ ID NO: 2593320 - RNA, 19 nt, Artificial Sequence
  Description of Artificial Sequence: Synthetic oligonucleotide
agcacauuuagagacauuu

SEQ ID NO: 2593321 - RNA, 19 nt, Artificial Sequence
  Description of Artificial Sequence: Synthetic oligonucleotide
guuaauaagaggccugaaa

SEQ ID NO: 2593322 - RNA, 19 nt, Artificial Sequence
  Description of Artificial Sequence: Synthetic oligonucleotide
caguucaagaugcaacgag

SEQ ID NO: 2593323 - RNA, 19 nt, Artificial Sequence
  Description of Artificial Sequence: Synthetic oligonucleotide
ugcaugguuuaguuuauaa

SEQ ID NO: 2593324 - RNA, 19 nt, Artificial Sequence
  Description of Artificial Sequence: Synthetic oligonucleotide
gcugugauacaccucagag

SEQ ID NO: 2593325 - RNA, 19 nt, Artificial Sequence
  Description of Artificial Sequence: Synthetic oligonucleotide
aagaaugguuagccagaag

SEQ ID NO: 2593326 - RNA, 19 nt, Artificial Sequence
  Description of Artificial Sequence: Synthetic oligonucleotide
gcaagguuagcacauuuag

SEQ ID NO: 2593327 - RNA, 19 nt, Artificial Sequence
  Description of Artificial Sequence: Synthetic oligonucleotide
ugcuaucuucauacugagg

SEQ ID NO: 2593328 - RNA, 19 nt, Artificial Sequence
  Description of Artificial Sequence: Synthetic oligonucleotide
uucauuaacagaggaugcu

SEQ ID NO: 2593329 - RNA, 19 nt, Artificial Sequence
  Description of Artificial Sequence: Synthetic oligonucleotide
ucccuuuaccaauuuaauc

SEQ ID NO: 2593330 - RNA, 19 nt, Artificial Sequence
  Description of Artificial Sequence: Synthetic oligonucleotide
ugauagggcuuuauaaauu

SEQ ID NO: 2593331 - RNA, 19 nt, Artificial Sequence
  Description of Artificial Sequence: Synthetic oligonucleotide
auaaaccaguuguuaauaa

SEQ ID NO: 2593332 - RNA, 19 nt, Artificial Sequence
  Description of Artificial Sequence: Synthetic oligonucleotide
caacgagauuuaaacauuc

SEQ ID NO: 2593333 - RNA, 19 nt, Artificial Sequence
  Description of Artificial Sequence: Synthetic oligonucleotide
aacucagauuugugauagg

SEQ ID NO: 2593334 - RNA, 19 nt, Artificial Sequence
  Description of Artificial Sequence: Synthetic oligonucleotide
uggccuaaaugguaccucc

SEQ ID NO: 2593335 - RNA, 19 nt, Artificial Sequence
  Description of Artificial Sequence: Synthetic oligonucleotide
uggacugaugaauuugguc

SEQ ID NO: 2593336 - RNA, 19 nt, Artificial Sequence
  Description of Artificial Sequence: Synthetic oligonucleotide
acuuucaaguaaaacucag

SEQ ID NO: 2593337 - RNA, 19 nt, Artificial Sequence
  Description of Artificial Sequence: Synthetic oligonucleotide
acaccucagagaucaauug

SEQ ID NO: 2593338 - RNA, 19 nt, Artificial Sequence
  Description of Artificial Sequence: Synthetic oligonucleotide
agagacauuuccagaacuc

SEQ ID NO: 2593339 - RNA, 19 nt, Artificial Sequence
  Description of Artificial Sequence: Synthetic oligonucleotide
auacaauaucaucaucuau

SEQ ID NO: 2593340 - RNA, 19 nt, Artificial Sequence
  Description of Artificial Sequence: Synthetic oligonucleotide
gccaguucaagaugcaacg

SEQ ID NO: 2593341 - RNA, 19 nt, Artificial Sequence
  Description of Artificial Sequence: Synthetic oligonucleotide
augcuaucuucauacugag

SEQ ID NO: 2593342 - RNA, 19 nt, Artificial Sequence
  Description of Artificial Sequence: Synthetic oligonucleotide
uauuuggaguggauaaaua

SEQ ID NO: 2593343 - RNA, 19 nt, Artificial Sequence
  Description of Artificial Sequence: Synthetic oligonucleotide
uuguuaauaagaggccuga

SEQ ID NO: 2593344 - RNA, 19 nt, Artificial Sequence
  Description of Artificial Sequence: Synthetic oligonucleotide
aauaaacaugaaacuuuca

SEQ ID NO: 2593345 - RNA, 19 nt, Artificial Sequence
  Description of Artificial Sequence: Synthetic oligonucleotide
ucuucgcaaacagagugca

SEQ ID NO: 2593346 - RNA, 19 nt, Artificial Sequence
  Description of Artificial Sequence: Synthetic oligonucleotide
uacaccucagagaucaauu

SEQ ID NO: 2593347 - RNA, 19 nt, Artificial Sequence
  Description of Artificial Sequence: Synthetic oligonucleotide
ucauuaacagaggaugcuc

SEQ ID NO: 2593348 - RNA, 19 nt, Artificial Sequence
  Description of Artificial Sequence: Synthetic oligonucleotide
cuaucuucauacugaggug

SEQ ID NO: 2593349 - RNA, 19 nt, Artificial Sequence
  Description of Artificial Sequence: Synthetic oligonucleotide
guuguuaauaagaggccug

SEQ ID NO: 2593350 - RNA, 19 nt, Artificial Sequence
  Description of Artificial Sequence: Synthetic oligonucleotide
auuuaaucuccaaauaauu

SEQ ID NO: 2593351 - RNA, 19 nt, Artificial Sequence
  Description of Artificial Sequence: Synthetic oligonucleotide
gaauuucgugacccaagug

SEQ ID NO: 2593352 - RNA, 19 nt, Artificial Sequence
  Description of Artificial Sequence: Synthetic oligonucleotide
aaacagagugcaugguuua

SEQ ID NO: 2593353 - RNA, 19 nt, Artificial Sequence
  Description of Artificial Sequence: Synthetic oligonucleotide
cucagagaucaauugugac

SEQ ID NO: 2593354 - RNA, 19 nt, Artificial Sequence
  Description of Artificial Sequence: Synthetic oligonucleotide
cucuucgcaaacagagugc

SEQ ID NO: 2593355 - RNA, 19 nt, Artificial Sequence
  Description of Artificial Sequence: Synthetic oligonucleotide
acauuuagagacauuucca

SEQ ID NO: 2593356 - RNA, 19 nt, Artificial Sequence
  Description of Artificial Sequence: Synthetic oligonucleotide
agaacuacagaagccaaaa

SEQ ID NO: 2593357 - RNA, 19 nt, Artificial Sequence
  Description of Artificial Sequence: Synthetic oligonucleotide
agauucaauuaugauacaa

SEQ ID NO: 2593358 - RNA, 19 nt, Artificial Sequence
  Description of Artificial Sequence: Synthetic oligonucleotide
gaaugguuagccagaagca

SEQ ID NO: 2593359 - RNA, 19 nt, Artificial Sequence
  Description of Artificial Sequence: Synthetic oligonucleotide
ugaaaggcauuuauccguu

SEQ ID NO: 2593360 - RNA, 19 nt, Artificial Sequence
  Description of Artificial Sequence: Synthetic oligonucleotide
caguuaagaagaaugguua

SEQ ID NO: 2593361 - RNA, 19 nt, Artificial Sequence
  Description of Artificial Sequence: Synthetic oligonucleotide
ucguaggggccuauuacac

SEQ ID NO: 2593362 - RNA, 19 nt, Artificial Sequence
  Description of Artificial Sequence: Synthetic oligonucleotide
gucaguuguguuacagucg

SEQ ID NO: 2593363 - RNA, 19 nt, Artificial Sequence
  Description of Artificial Sequence: Synthetic oligonucleotide
uaaaugguaccuccaucau

SEQ ID NO: 2593364 - RNA, 19 nt, Artificial Sequence
  Description of Artificial Sequence: Synthetic oligonucleotide
aacagagugcaugguuuag

SEQ ID NO: 2593365 - RNA, 19 nt, Artificial Sequence
  Description of Artificial Sequence: Synthetic oligonucleotide
augcaacgagauuuaaaca

SEQ ID NO: 2593366 - RNA, 19 nt, Artificial Sequence
  Description of Artificial Sequence: Synthetic oligonucleotide
ucauacugagguguauggc

SEQ ID NO: 2593367 - RNA, 19 nt, Artificial Sequence
  Description of Artificial Sequence: Synthetic oligonucleotide
caauugugacuucauuaac

SEQ ID NO: 2593368 - RNA, 19 nt, Artificial Sequence
  Description of Artificial Sequence: Synthetic oligonucleotide
uuaccaauuuaaucuccaa

SEQ ID NO: 2593369 - RNA, 19 nt, Artificial Sequence
  Description of Artificial Sequence: Synthetic oligonucleotide
ggacugaugaauuuggucu

SEQ ID NO: 2593370 - RNA, 19 nt, Artificial Sequence
  Description of Artificial Sequence: Synthetic oligonucleotide
aaggcauuuauccguucuu

SEQ ID NO: 2593371 - RNA, 19 nt, Artificial Sequence
  Description of Artificial Sequence: Synthetic oligonucleotide
agguuagcacauuuagaga

SEQ ID NO: 2593372 - RNA, 19 nt, Artificial Sequence
  Description of Artificial Sequence: Synthetic oligonucleotide
uauugacauacaucaguua

SEQ ID NO: 2593373 - RNA, 19 nt, Artificial Sequence
  Description of Artificial Sequence: Synthetic oligonucleotide
aguucaagaugcaacgaga

SEQ ID NO: 2593374 - RNA, 19 nt, Artificial Sequence
  Description of Artificial Sequence: Synthetic oligonucleotide
agucuguauugacauacau

SEQ ID NO: 2593375 - RNA, 19 nt, Artificial Sequence
  Description of Artificial Sequence: Synthetic oligonucleotide
cagaagcagaacuacagaa

SEQ ID NO: 2593376 - RNA, 19 nt, Artificial Sequence
  Description of Artificial Sequence: Synthetic oligonucleotide
augaaaauauucugcucuu

SEQ ID NO: 2593377 - RNA, 19 nt, Artificial Sequence
  Description of Artificial Sequence: Synthetic oligonucleotide
gugcagguuuauuuaaaac

SEQ ID NO: 2593378 - RNA, 19 nt, Artificial Sequence
  Description of Artificial Sequence: Synthetic oligonucleotide
ugaugaugcuaucuucaua

SEQ ID NO: 2593379 - RNA, 19 nt, Artificial Sequence
  Description of Artificial Sequence: Synthetic oligonucleotide
cuucauacugagguguaug

SEQ ID NO: 2593380 - RNA, 19 nt, Artificial Sequence
  Description of Artificial Sequence: Synthetic oligonucleotide
ugggugugcagguuuauuu

SEQ ID NO: 2593381 - RNA, 19 nt, Artificial Sequence
  Description of Artificial Sequence: Synthetic oligonucleotide
uuagcacauuuagagacau

SEQ ID NO: 2593382 - RNA, 19 nt, Artificial Sequence
  Description of Artificial Sequence: Synthetic oligonucleotide
guuagccagaagcagaacu

SEQ ID NO: 2593383 - RNA, 19 nt, Artificial Sequence
  Description of Artificial Sequence: Synthetic oligonucleotide
cuguauugacauacaucag

SEQ ID NO: 2593384 - RNA, 19 nt, Artificial Sequence
  Description of Artificial Sequence: Synthetic oligonucleotide
auuucgugacccaagugcu

SEQ ID NO: 2593385 - RNA, 19 nt, Artificial Sequence
  Description of Artificial Sequence: Synthetic oligonucleotide
ugcucuuaacugcccaagu

SEQ ID NO: 2593386 - RNA, 19 nt, Artificial Sequence
  Description of Artificial Sequence: Synthetic oligonucleotide
agguuuauuuaaaaccccu

SEQ ID NO: 2593387 - RNA, 19 nt, Artificial Sequence
  Description of Artificial Sequence: Synthetic oligonucleotide
acugcccaaguauuuauuu

SEQ ID NO: 2593388 - RNA, 19 nt, Artificial Sequence
  Description of Artificial Sequence: Synthetic oligonucleotide
ugagguguauggccuaaau

SEQ ID NO: 2593389 - RNA, 19 nt, Artificial Sequence
  Description of Artificial Sequence: Synthetic oligonucleotide
uuaacugcccaaguauuua

SEQ ID NO: 2593390 - RNA, 19 nt, Artificial Sequence
  Description of Artificial Sequence: Synthetic oligonucleotide
accccuuugaagcugugau

SEQ ID NO: 2593391 - RNA, 19 nt, Artificial Sequence
  Description of Artificial Sequence: Synthetic oligonucleotide
uucaagaugcaacgagauu

SEQ ID NO: 2593392 - RNA, 19 nt, Artificial Sequence
  Description of Artificial Sequence: Synthetic oligonucleotide
uauggccuaaaugguaccu

SEQ ID NO: 2593393 - RNA, 19 nt, Artificial Sequence
  Description of Artificial Sequence: Synthetic oligonucleotide
guguuacagucguaggggc

SEQ ID NO: 2593394 - RNA, 19 nt, Artificial Sequence
  Description of Artificial Sequence: Synthetic oligonucleotide
uuuauccguucuuucugaa

SEQ ID NO: 2593395 - RNA, 19 nt, Artificial Sequence
  Description of Artificial Sequence: Synthetic oligonucleotide
auuaacagaggaugcucuu

SEQ ID NO: 2593396 - RNA, 19 nt, Artificial Sequence
  Description of Artificial Sequence: Synthetic oligonucleotide
uucgugacccaagugcuac

SEQ ID NO: 2593397 - RNA, 19 nt, Artificial Sequence
  Description of Artificial Sequence: Synthetic oligonucleotide
gagaucaauugugacuuca

SEQ ID NO: 2593398 - RNA, 19 nt, Artificial Sequence
  Description of Artificial Sequence: Synthetic oligonucleotide
ugaugaauuuggucuuuau

SEQ ID NO: 2593399 - RNA, 19 nt, Artificial Sequence
  Description of Artificial Sequence: Synthetic oligonucleotide
aaaaccccuuugaagcugu

SEQ ID NO: 2593400 - RNA, 19 nt, Artificial Sequence
  Description of Artificial Sequence: Synthetic oligonucleotide
uaacugcccaaguauuuau

SEQ ID NO: 2593401 - RNA, 19 nt, Artificial Sequence
  Description of Artificial Sequence: Synthetic oligonucleotide
agugcuacuugcaauuuau

SEQ ID NO: 2593402 - RNA, 19 nt, Artificial Sequence
  Description of Artificial Sequence: Synthetic oligonucleotide
aaauuggaucuaucccuuu

SEQ ID NO: 2593403 - RNA, 19 nt, Artificial Sequence
  Description of Artificial Sequence: Synthetic oligonucleotide
ggaucuaucccuuuaccaa

SEQ ID NO: 2593404 - RNA, 19 nt, Artificial Sequence
  Description of Artificial Sequence: Synthetic oligonucleotide
caagguuagcacauuuaga

SEQ ID NO: 2593405 - RNA, 19 nt, Artificial Sequence
  Description of Artificial Sequence: Synthetic oligonucleotide
cuugcaauuuaugaugaaa

SEQ ID NO: 2593406 - RNA, 19 nt, Artificial Sequence
  Description of Artificial Sequence: Synthetic oligonucleotide
aggggccuauuacacaaug

SEQ ID NO: 2593407 - RNA, 19 nt, Artificial Sequence
  Description of Artificial Sequence: Synthetic oligonucleotide
gaugaauuuggucuuuauu

SEQ ID NO: 2593408 - RNA, 19 nt, Artificial Sequence
  Description of Artificial Sequence: Synthetic oligonucleotide
gucuguauugacauacauc

SEQ ID NO: 2593409 - RNA, 19 nt, Artificial Sequence
  Description of Artificial Sequence: Synthetic oligonucleotide
cugugauacaccucagaga

SEQ ID NO: 2593410 - RNA, 19 nt, Artificial Sequence
  Description of Artificial Sequence: Synthetic oligonucleotide
ucugaacuggccaguucaa

SEQ ID NO: 2593411 - RNA, 19 nt, Artificial Sequence
  Description of Artificial Sequence: Synthetic oligonucleotide
uuaacagaggaugcucuua

SEQ ID NO: 2593412 - RNA, 19 nt, Artificial Sequence
  Description of Artificial Sequence: Synthetic oligonucleotide
aacucuggacugaugaauu

SEQ ID NO: 2593413 - RNA, 19 nt, Artificial Sequence
  Description of Artificial Sequence: Synthetic oligonucleotide
gugcugaauuucgugaccc

SEQ ID NO: 2593414 - RNA, 19 nt, Artificial Sequence
  Description of Artificial Sequence: Synthetic oligonucleotide
gucguaggggccuauuaca

SEQ ID NO: 2593415 - RNA, 19 nt, Artificial Sequence
  Description of Artificial Sequence: Synthetic oligonucleotide
auggccuaaaugguaccuc

SEQ ID NO: 2593416 - RNA, 19 nt, Artificial Sequence
  Description of Artificial Sequence: Synthetic oligonucleotide
guauggccuaaaugguacc

SEQ ID NO: 2593417 - RNA, 19 nt, Artificial Sequence
  Description of Artificial Sequence: Synthetic oligonucleotide
agauuugugauagggcuuu

SEQ ID NO: 2593418 - RNA, 19 nt, Artificial Sequence
  Description of Artificial Sequence: Synthetic oligonucleotide
cucuggacugaugaauuug

SEQ ID NO: 2593419 - RNA, 19 nt, Artificial Sequence
  Description of Artificial Sequence: Synthetic oligonucleotide
gaugcucuuaacugcccaa

SEQ ID NO: 2593420 - RNA, 19 nt, Artificial Sequence
  Description of Artificial Sequence: Synthetic oligonucleotide
ccucuucgcaaacagagug

SEQ ID NO: 2593421 - RNA, 19 nt, Artificial Sequence
  Description of Artificial Sequence: Synthetic oligonucleotide
agcugugauacaccucaga

SEQ ID NO: 2593422 - RNA, 19 nt, Artificial Sequence
  Description of Artificial Sequence: Synthetic oligonucleotide
gaucuaucccuuuaccaau

SEQ ID NO: 2593423 - RNA, 19 nt, Artificial Sequence
  Description of Artificial Sequence: Synthetic oligonucleotide
augaugcuaucuucauacu

SEQ ID NO: 2593424 - RNA, 19 nt, Artificial Sequence
  Description of Artificial Sequence: Synthetic oligonucleotide
ugcugaauuucgugaccca

SEQ ID NO: 2593425 - RNA, 19 nt, Artificial Sequence
  Description of Artificial Sequence: Synthetic oligonucleotide
ucuugggugugcagguuua

SEQ ID NO: 2593426 - RNA, 19 nt, Artificial Sequence
  Description of Artificial Sequence: Synthetic oligonucleotide
uguuaauaagaggccugaa

SEQ ID NO: 2593427 - RNA, 19 nt, Artificial Sequence
  Description of Artificial Sequence: Synthetic oligonucleotide
augcucuuaacugcccaag

SEQ ID NO: 2593428 - RNA, 19 nt, Artificial Sequence
  Description of Artificial Sequence: Synthetic oligonucleotide
auaucaucaucuauacaua

SEQ ID NO: 2593429 - RNA, 19 nt, Artificial Sequence
  Description of Artificial Sequence: Synthetic oligonucleotide
gugauagggcuuuauaaau

SEQ ID NO: 2593430 - RNA, 19 nt, Artificial Sequence
  Description of Artificial Sequence: Synthetic oligonucleotide
aucauggagucaguugugu

SEQ ID NO: 2593431 - RNA, 19 nt, Artificial Sequence
  Description of Artificial Sequence: Synthetic oligonucleotide
gccuauuacacaaugaagu

SEQ ID NO: 2593432 - RNA, 19 nt, Artificial Sequence
  Description of Artificial Sequence: Synthetic oligonucleotide
cauuaacagaggaugcucu

SEQ ID NO: 2593433 - RNA, 19 nt, Artificial Sequence
  Description of Artificial Sequence: Synthetic oligonucleotide
ggccuauuacacaaugaag

SEQ ID NO: 2593434 - RNA, 19 nt, Artificial Sequence
  Description of Artificial Sequence: Synthetic oligonucleotide
uuucaucuuggcugaugau

SEQ ID NO: 2593435 - RNA, 19 nt, Artificial Sequence
  Description of Artificial Sequence: Synthetic oligonucleotide
gagauucaauuaugauaca

SEQ ID NO: 2593436 - RNA, 19 nt, Artificial Sequence
  Description of Artificial Sequence: Synthetic oligonucleotide
ggagucaguuguguuacag

SEQ ID NO: 2593437 - RNA, 19 nt, Artificial Sequence
  Description of Artificial Sequence: Synthetic oligonucleotide
acagagugcaugguuuagu

SEQ ID NO: 2593438 - RNA, 19 nt, Artificial Sequence
  Description of Artificial Sequence: Synthetic oligonucleotide
gaagaaugguuagccagaa

SEQ ID NO: 2593439 - RNA, 19 nt, Artificial Sequence
  Description of Artificial Sequence: Synthetic oligonucleotide
gaaaggcauuuauccguuc

SEQ ID NO: 2593440 - RNA, 19 nt, Artificial Sequence
  Description of Artificial Sequence: Synthetic oligonucleotide
agagugcaugguuuaguuu

SEQ ID NO: 2593441 - RNA, 19 nt, Artificial Sequence
  Description of Artificial Sequence: Synthetic oligonucleotide
gaaguauuaugaaaauauu

SEQ ID NO: 2593442 - RNA, 19 nt, Artificial Sequence
  Description of Artificial Sequence: Synthetic oligonucleotide
uuucgugacccaagugcua

SEQ ID NO: 2593443 - RNA, 19 nt, Artificial Sequence
  Description of Artificial Sequence: Synthetic oligonucleotide
guaccuccaucauggaguc

SEQ ID NO: 2593444 - RNA, 19 nt, Artificial Sequence
  Description of Artificial Sequence: Synthetic oligonucleotide
gggccuauuacacaaugaa

SEQ ID NO: 2593445 - RNA, 19 nt, Artificial Sequence
  Description of Artificial Sequence: Synthetic oligonucleotide
gagacauuuccagaacucu

SEQ ID NO: 2593446 - RNA, 19 nt, Artificial Sequence
  Description of Artificial Sequence: Synthetic oligonucleotide
aaccccuuugaagcuguga

SEQ ID NO: 2593447 - RNA, 19 nt, Artificial Sequence
  Description of Artificial Sequence: Synthetic oligonucleotide
acuugcaauuuaugaugaa

SEQ ID NO: 2593448 - RNA, 19 nt, Artificial Sequence
  Description of Artificial Sequence: Synthetic oligonucleotide
gcuacuugcaauuuaugau

SEQ ID NO: 2593449 - RNA, 19 nt, Artificial Sequence
  Description of Artificial Sequence: Synthetic oligonucleotide
cccaaguauuuauuuggag

SEQ ID NO: 2593450 - RNA, 19 nt, Artificial Sequence
  Description of Artificial Sequence: Synthetic oligonucleotide
aagaugcaacgagauuuaa

SEQ ID NO: 2593451 - RNA, 19 nt, Artificial Sequence
  Description of Artificial Sequence: Synthetic oligonucleotide
ccaaguauuuauuuggagu

SEQ ID NO: 2593452 - RNA, 19 nt, Artificial Sequence
  Description of Artificial Sequence: Synthetic oligonucleotide
gguaccuccaucauggagu

SEQ ID NO: 2593453 - RNA, 19 nt, Artificial Sequence
  Description of Artificial Sequence: Synthetic oligonucleotide
ucuucauacugagguguau

SEQ ID NO: 2593454 - RNA, 19 nt, Artificial Sequence
  Description of Artificial Sequence: Synthetic oligonucleotide
agaugcaacgagauuuaaa

SEQ ID NO: 2593455 - RNA, 19 nt, Artificial Sequence
  Description of Artificial Sequence: Synthetic oligonucleotide
cugaacuggccaguucaag

SEQ ID NO: 2593456 - RNA, 19 nt, Artificial Sequence
  Description of Artificial Sequence: Synthetic oligonucleotide
cucuuaacugcccaaguau

SEQ ID NO: 2593457 - RNA, 19 nt, Artificial Sequence
  Description of Artificial Sequence: Synthetic oligonucleotide
ggcauuuauccguucuuuc

SEQ ID NO: 2593458 - RNA, 19 nt, Artificial Sequence
  Description of Artificial Sequence: Synthetic oligonucleotide
acccaagugcuacuugcaa

SEQ ID NO: 2593459 - RNA, 19 nt, Artificial Sequence
  Description of Artificial Sequence: Synthetic oligonucleotide
gagucaguuguguuacagu

SEQ ID NO: 2593460 - RNA, 19 nt, Artificial Sequence
  Description of Artificial Sequence: Synthetic oligonucleotide
acucuggacugaugaauuu

SEQ ID NO: 2593461 - RNA, 19 nt, Artificial Sequence
  Description of Artificial Sequence: Synthetic oligonucleotide
auaagaggccugaaauaaa

SEQ ID NO: 2593462 - RNA, 19 nt, Artificial Sequence
  Description of Artificial Sequence: Synthetic oligonucleotide
gugacccaagugcuacuug

SEQ ID NO: 2593463 - RNA, 19 nt, Artificial Sequence
  Description of Artificial Sequence: Synthetic oligonucleotide
aucaucaucuauacauaua

SEQ ID NO: 2593464 - RNA, 19 nt, Artificial Sequence
  Description of Artificial Sequence: Synthetic oligonucleotide
agaucaauugugacuucau

SEQ ID NO: 2593465 - RNA, 19 nt, Artificial Sequence
  Description of Artificial Sequence: Synthetic oligonucleotide
guauugacauacaucaguu

SEQ ID NO: 2593466 - RNA, 19 nt, Artificial Sequence
  Description of Artificial Sequence: Synthetic oligonucleotide
auuugugauagggcuuuau

SEQ ID NO: 2593467 - RNA, 19 nt, Artificial Sequence
  Description of Artificial Sequence: Synthetic oligonucleotide
gaacucuggacugaugaau

SEQ ID NO: 2593468 - RNA, 19 nt, Artificial Sequence
  Description of Artificial Sequence: Synthetic oligonucleotide
cagaacuacagaagccaaa

SEQ ID NO: 2593469 - RNA, 19 nt, Artificial Sequence
  Description of Artificial Sequence: Synthetic oligonucleotide
uccagaacucuggacugau

SEQ ID NO: 2593470 - RNA, 19 nt, Artificial Sequence
  Description of Artificial Sequence: Synthetic oligonucleotide
aacugcccaaguauuuauu

SEQ ID NO: 2593471 - RNA, 19 nt, Artificial Sequence
  Description of Artificial Sequence: Synthetic oligonucleotide
cuauuacacaaugaaguau

SEQ ID NO: 2593472 - RNA, 19 nt, Artificial Sequence
  Description of Artificial Sequence: Synthetic oligonucleotide
ccuaaaugguaccuccauc

SEQ ID NO: 2593473 - RNA, 19 nt, Artificial Sequence
  Description of Artificial Sequence: Synthetic oligonucleotide
ggugugcagguuuauuuaa

SEQ ID NO: 2593474 - RNA, 19 nt, Artificial Sequence
  Description of Artificial Sequence: Synthetic oligonucleotide
guuacagucguaggggccu

SEQ ID NO: 2593475 - RNA, 19 nt, Artificial Sequence
  Description of Artificial Sequence: Synthetic oligonucleotide
ggccaguucaagaugcaac

SEQ ID NO: 2593476 - RNA, 19 nt, Artificial Sequence
  Description of Artificial Sequence: Synthetic oligonucleotide
gcauuuauccguucuuucu

SEQ ID NO: 2593477 - RNA, 19 nt, Artificial Sequence
  Description of Artificial Sequence: Synthetic oligonucleotide
ccuauuacacaaugaagua

SEQ ID NO: 2593478 - RNA, 19 nt, Artificial Sequence
  Description of Artificial Sequence: Synthetic oligonucleotide
cuuggcugaugaugcuauc

SEQ ID NO: 2593479 - RNA, 19 nt, Artificial Sequence
  Description of Artificial Sequence: Synthetic oligonucleotide
agcaagguuagcacauuua

SEQ ID NO: 2593480 - RNA, 19 nt, Artificial Sequence
  Description of Artificial Sequence: Synthetic oligonucleotide
uggagucaguuguguuaca

SEQ ID NO: 2593481 - RNA, 19 nt, Artificial Sequence
  Description of Artificial Sequence: Synthetic oligonucleotide
gacccaagugcuacuugca

SEQ ID NO: 2593482 - RNA, 19 nt, Artificial Sequence
  Description of Artificial Sequence: Synthetic oligonucleotide
guucaagaugcaacgagau

SEQ ID NO: 2593483 - RNA, 19 nt, Artificial Sequence
  Description of Artificial Sequence: Synthetic oligonucleotide
ucgugacccaagugcuacu

SEQ ID NO: 2593484 - RNA, 19 nt, Artificial Sequence
  Description of Artificial Sequence: Synthetic oligonucleotide
auacaucaguuaagaagaa

SEQ ID NO: 2593485 - RNA, 19 nt, Artificial Sequence
  Description of Artificial Sequence: Synthetic oligonucleotide
agugcaugguuuaguuuau

SEQ ID NO: 2593486 - RNA, 19 nt, Artificial Sequence
  Description of Artificial Sequence: Synthetic oligonucleotide
uaggggccuauuacacaau

SEQ ID NO: 2593487 - RNA, 19 nt, Artificial Sequence
  Description of Artificial Sequence: Synthetic oligonucleotide
cuaucccuuuaccaauuua

SEQ ID NO: 2593488 - RNA, 19 nt, Artificial Sequence
  Description of Artificial Sequence: Synthetic oligonucleotide
guguauggccuaaauggua

SEQ ID NO: 2593489 - RNA, 19 nt, Artificial Sequence
  Description of Artificial Sequence: Synthetic oligonucleotide
augguaccuccaucaugga

SEQ ID NO: 2593490 - RNA, 19 nt, Artificial Sequence
  Description of Artificial Sequence: Synthetic oligonucleotide
guggauaaauaaaccaguu

SEQ ID NO: 2593491 - RNA, 19 nt, Artificial Sequence
  Description of Artificial Sequence: Synthetic oligonucleotide
caccucagagaucaauugu

SEQ ID NO: 2593492 - RNA, 19 nt, Artificial Sequence
  Description of Artificial Sequence: Synthetic oligonucleotide
aucuaucccuuuaccaauu

SEQ ID NO: 2593493 - RNA, 19 nt, Artificial Sequence
  Description of Artificial Sequence: Synthetic oligonucleotide
uauuuucaucuuggcugau

SEQ ID NO: 2593494 - RNA, 19 nt, Artificial Sequence
  Description of Artificial Sequence: Synthetic oligonucleotide
gcaugguuuaguuuauaau

SEQ ID NO: 2593495 - RNA, 19 nt, Artificial Sequence
  Description of Artificial Sequence: Synthetic oligonucleotide
acugagguguauggccuaa

SEQ ID NO: 2593496 - RNA, 19 nt, Artificial Sequence
  Description of Artificial Sequence: Synthetic oligonucleotide
gcucuuaacugcccaagua

SEQ ID NO: 2593497 - RNA, 19 nt, Artificial Sequence
  Description of Artificial Sequence: Synthetic oligonucleotide
uugggugugcagguuuauu

SEQ ID NO: 2593498 - RNA, 19 nt, Artificial Sequence
  Description of Artificial Sequence: Synthetic oligonucleotide
ccagaagcagaacuacaga

SEQ ID NO: 2593499 - RNA, 19 nt, Artificial Sequence
  Description of Artificial Sequence: Synthetic oligonucleotide
cagagugcaugguuuaguu

SEQ ID NO: 2593500 - RNA, 19 nt, Artificial Sequence
  Description of Artificial Sequence: Synthetic oligonucleotide
gguguauggccuaaauggu

SEQ ID NO: 2593501 - RNA, 19 nt, Artificial Sequence
  Description of Artificial Sequence: Synthetic oligonucleotide
cagauuugugauagggcuu

SEQ ID NO: 2593502 - RNA, 19 nt, Artificial Sequence
  Description of Artificial Sequence: Synthetic oligonucleotide
uuacagucguaggggccua

SEQ ID NO: 2593503 - RNA, 19 nt, Artificial Sequence
  Description of Artificial Sequence: Synthetic oligonucleotide
cagucguaggggccuauua

SEQ ID NO: 2593504 - RNA, 19 nt, Artificial Sequence
  Description of Artificial Sequence: Synthetic oligonucleotide
gcccaaguauuuauuugga

SEQ ID NO: 2593505 - RNA, 19 nt, Artificial Sequence
  Description of Artificial Sequence: Synthetic oligonucleotide
ggggccuauuacacaauga

SEQ ID NO: 2593506 - RNA, 19 nt, Artificial Sequence
  Description of Artificial Sequence: Synthetic oligonucleotide
gguuuauuuaaaaccccuu

SEQ ID NO: 2593507 - RNA, 19 nt, Artificial Sequence
  Description of Artificial Sequence: Synthetic oligonucleotide
ccagaacucuggacugaug

SEQ ID NO: 2593508 - RNA, 19 nt, Artificial Sequence
  Description of Artificial Sequence: Synthetic oligonucleotide
gauacaccucagagaucaa

SEQ ID NO: 2593509 - RNA, 19 nt, Artificial Sequence
  Description of Artificial Sequence: Synthetic oligonucleotide
ccaagugcuacuugcaauu

SEQ ID NO: 2593510 - RNA, 19 nt, Artificial Sequence
  Description of Artificial Sequence: Synthetic oligonucleotide
uacagucguaggggccuau

SEQ ID NO: 2593511 - RNA, 19 nt, Artificial Sequence
  Description of Artificial Sequence: Synthetic oligonucleotide
uaccuccaucauggaguca

SEQ ID NO: 2593512 - RNA, 19 nt, Artificial Sequence
  Description of Artificial Sequence: Synthetic oligonucleotide
acagucguaggggccuauu

SEQ ID NO: 2593513 - RNA, 19 nt, Artificial Sequence
  Description of Artificial Sequence: Synthetic oligonucleotide
ggccuaaaugguaccucca

SEQ ID NO: 2593514 - RNA, 19 nt, Artificial Sequence
  Description of Artificial Sequence: Synthetic oligonucleotide
gccuaaaugguaccuccau

SEQ ID NO: 2593515 - RNA, 19 nt, Artificial Sequence
  Description of Artificial Sequence: Synthetic oligonucleotide
gcaacgagauuuaaacauu

SEQ ID NO: 2593516 - RNA, 19 nt, Artificial Sequence
  Description of Artificial Sequence: Synthetic oligonucleotide
ccaguucaagaugcaacga

SEQ ID NO: 2593517 - RNA, 19 nt, Artificial Sequence
  Description of Artificial Sequence: Synthetic oligonucleotide
cuucgcaaacagagugcau

SEQ ID NO: 2593518 - RNA, 19 nt, Artificial Sequence
  Description of Artificial Sequence: Synthetic oligonucleotide
cguaggggccuauuacaca

SEQ ID NO: 2593519 - RNA, 19 nt, Artificial Sequence
  Description of Artificial Sequence: Synthetic oligonucleotide
cugagguguauggccuaaa

SEQ ID NO: 2593520 - RNA, 19 nt, Artificial Sequence
  Description of Artificial Sequence: Synthetic oligonucleotide
cccaagugcuacuugcaau

SEQ ID NO: 2593521 - RNA, 19 nt, Artificial Sequence
  Description of Artificial Sequence: Synthetic oligonucleotide
caagugcuacuugcaauuu

SEQ ID NO: 2593522 - RNA, 19 nt, Artificial Sequence
  Description of Artificial Sequence: Synthetic oligonucleotide
cuccaucauggagucaguu

SEQ ID NO: 2593523 - RNA, 19 nt, Artificial Sequence
  Description of Artificial Sequence: Synthetic oligonucleotide
cuugggugugcagguuuau

SEQ ID NO: 2593524 - RNA, 19 nt, Artificial Sequence
  Description of Artificial Sequence: Synthetic oligonucleotide
cgcaaacagagugcauggu

SEQ ID NO: 2593525 - RNA, 19 nt, Artificial Sequence
  Description of Artificial Sequence: Synthetic oligonucleotide
cgugacccaagugcuacuu

SEQ ID NO: 2593526 - RNA, 19 nt, Artificial Sequence
  Description of Artificial Sequence: Synthetic oligonucleotide
aagaauuuucuucaaaugg

SEQ ID NO: 2593527 - RNA, 19 nt, Artificial Sequence
  Description of Artificial Sequence: Synthetic oligonucleotide
aaugcugcuagcucccucc

SEQ ID NO: 2593528 - RNA, 19 nt, Artificial Sequence
  Description of Artificial Sequence: Synthetic oligonucleotide
uggaaaugccaauugaagg

SEQ ID NO: 2593529 - RNA, 19 nt, Artificial Sequence
  Description of Artificial Sequence: Synthetic oligonucleotide
ucugcauagggccugaagc

SEQ ID NO: 2593530 - RNA, 19 nt, Artificial Sequence
  Description of Artificial Sequence: Synthetic oligonucleotide
gagaagguagcuuugcuag

SEQ ID NO: 2593531 - RNA, 19 nt, Artificial Sequence
  Description of Artificial Sequence: Synthetic oligonucleotide
cagaggacgaaucaaaugc

SEQ ID NO: 2593532 - RNA, 19 nt, Artificial Sequence
  Description of Artificial Sequence: Synthetic oligonucleotide
gaaucaaaugcugagagac

SEQ ID NO: 2593533 - RNA, 19 nt, Artificial Sequence
  Description of Artificial Sequence: Synthetic oligonucleotide
ucuucaaucgacuucggcu

SEQ ID NO: 2593534 - RNA, 19 nt, Artificial Sequence
  Description of Artificial Sequence: Synthetic oligonucleotide
  modified_base (16)..(16): a, c, u, g, unknown or other
guuaucaguuccucgnggg

SEQ ID NO: 2593535 - RNA, 19 nt, Artificial Sequence
  Description of Artificial Sequence: Synthetic oligonucleotide
ucugagucuccccagagcc

SEQ ID NO: 2593536 - RNA, 19 nt, Artificial Sequence
  Description of Artificial Sequence: Synthetic oligonucleotide
uuuggugacugcuacauac

SEQ ID NO: 2593537 - RNA, 19 nt, Artificial Sequence
  Description of Artificial Sequence: Synthetic oligonucleotide
ggaaaugccaauugaaggg

SEQ ID NO: 2593538 - RNA, 19 nt, Artificial Sequence
  Description of Artificial Sequence: Synthetic oligonucleotide
aauuucuguaccauaaacu

SEQ ID NO: 2593539 - RNA, 19 nt, Artificial Sequence
  Description of Artificial Sequence: Synthetic oligonucleotide
uuugcuaggaugagcagca

SEQ ID NO: 2593540 - RNA, 19 nt, Artificial Sequence
  Description of Artificial Sequence: Synthetic oligonucleotide
uguaccauaaacuguucca

SEQ ID NO: 2593541 - RNA, 19 nt, Artificial Sequence
  Description of Artificial Sequence: Synthetic oligonucleotide
acgaaucaaaugcugagag

SEQ ID NO: 2593542 - RNA, 19 nt, Artificial Sequence
  Description of Artificial Sequence: Synthetic oligonucleotide
auaaacuguuccaagaaag

SEQ ID NO: 2593543 - RNA, 19 nt, Artificial Sequence
  Description of Artificial Sequence: Synthetic oligonucleotide
gaugcuucuguccugcuug

SEQ ID NO: 2593544 - RNA, 19 nt, Artificial Sequence
  Description of Artificial Sequence: Synthetic oligonucleotide
gaguagaagagacuggcug

SEQ ID NO: 2593545 - RNA, 19 nt, Artificial Sequence
  Description of Artificial Sequence: Synthetic oligonucleotide
ucgacuucggcucagcaca

SEQ ID NO: 2593546 - RNA, 19 nt, Artificial Sequence
  Description of Artificial Sequence: Synthetic oligonucleotide
gacugcuacauacagacuc

SEQ ID NO: 2593547 - RNA, 19 nt, Artificial Sequence
  Description of Artificial Sequence: Synthetic oligonucleotide
uaaacuguuccaagaaaga

SEQ ID NO: 2593548 - RNA, 19 nt, Artificial Sequence
  Description of Artificial Sequence: Synthetic oligonucleotide
ucauccgaagcaaugcugc

SEQ ID NO: 2593549 - RNA, 19 nt, Artificial Sequence
  Description of Artificial Sequence: Synthetic oligonucleotide
gacauggucaguuaacuga

SEQ ID NO: 2593550 - RNA, 19 nt, Artificial Sequence
  Description of Artificial Sequence: Synthetic oligonucleotide
aaucaaaugcugagagacc

SEQ ID NO: 2593551 - RNA, 19 nt, Artificial Sequence
  Description of Artificial Sequence: Synthetic oligonucleotide
gaaaugccaauugaagggg

SEQ ID NO: 2593552 - RNA, 19 nt, Artificial Sequence
  Description of Artificial Sequence: Synthetic oligonucleotide
uccgaagcaaugcugcuag

SEQ ID NO: 2593553 - RNA, 19 nt, Artificial Sequence
  Description of Artificial Sequence: Synthetic oligonucleotide
uacauacagacucugcaga

SEQ ID NO: 2593554 - RNA, 19 nt, Artificial Sequence
  Description of Artificial Sequence: Synthetic oligonucleotide
ugaagaacuagccggagua

SEQ ID NO: 2593555 - RNA, 19 nt, Artificial Sequence
  Description of Artificial Sequence: Synthetic oligonucleotide
ucaguuaacugaagagucc

SEQ ID NO: 2593556 - RNA, 19 nt, Artificial Sequence
  Description of Artificial Sequence: Synthetic oligonucleotide
  modified_base (15)..(15): a, c, u, g, unknown or other
uuaucaguuccucgngggg

SEQ ID NO: 2593557 - RNA, 19 nt, Artificial Sequence
  Description of Artificial Sequence: Synthetic oligonucleotide
uggucaguuaacugaagag

SEQ ID NO: 2593558 - RNA, 19 nt, Artificial Sequence
  Description of Artificial Sequence: Synthetic oligonucleotide
uggucuuccaucaccaaca

SEQ ID NO: 2593559 - RNA, 19 nt, Artificial Sequence
  Description of Artificial Sequence: Synthetic oligonucleotide
acuucggcucagcacagcc

SEQ ID NO: 2593560 - RNA, 19 nt, Artificial Sequence
  Description of Artificial Sequence: Synthetic oligonucleotide
cugucuucaaucgacuucg

SEQ ID NO: 2593561 - RNA, 19 nt, Artificial Sequence
  Description of Artificial Sequence: Synthetic oligonucleotide
auggucuuccaucaccaac

SEQ ID NO: 2593562 - RNA, 19 nt, Artificial Sequence
  Description of Artificial Sequence: Synthetic oligonucleotide
uaacugaagaguccucuug

SEQ ID NO: 2593563 - RNA, 19 nt, Artificial Sequence
  Description of Artificial Sequence: Synthetic oligonucleotide
caaauggucuuccaucacc

SEQ ID NO: 2593564 - RNA, 19 nt, Artificial Sequence
  Description of Artificial Sequence: Synthetic oligonucleotide
caauuucuguaccauaaac

SEQ ID NO: 2593565 - RNA, 19 nt, Artificial Sequence
  Description of Artificial Sequence: Synthetic oligonucleotide
uccccagagccuuugaugc

SEQ ID NO: 2593566 - RNA, 19 nt, Artificial Sequence
  Description of Artificial Sequence: Synthetic oligonucleotide
aacuagccggaguacagug

SEQ ID NO: 2593567 - RNA, 19 nt, Artificial Sequence
  Description of Artificial Sequence: Synthetic oligonucleotide
cuacauacagacucugcag

SEQ ID NO: 2593568 - RNA, 19 nt, Artificial Sequence
  Description of Artificial Sequence: Synthetic oligonucleotide
ucucgaucacaggagaagg

SEQ ID NO: 2593569 - RNA, 19 nt, Artificial Sequence
  Description of Artificial Sequence: Synthetic oligonucleotide
ucagaggacgaaucaaaug

SEQ ID NO: 2593570 - RNA, 19 nt, Artificial Sequence
  Description of Artificial Sequence: Synthetic oligonucleotide
agaccagugaagaacuagc

SEQ ID NO: 2593571 - RNA, 19 nt, Artificial Sequence
  Description of Artificial Sequence: Synthetic oligonucleotide
ucuucaaauggcucugucu

SEQ ID NO: 2593572 - RNA, 19 nt, Artificial Sequence
  Description of Artificial Sequence: Synthetic oligonucleotide
aguagaagagacuggcugu

SEQ ID NO: 2593573 - RNA, 19 nt, Artificial Sequence
  Description of Artificial Sequence: Synthetic oligonucleotide
cuucaaucgacuucggcuc

SEQ ID NO: 2593574 - RNA, 19 nt, Artificial Sequence
  Description of Artificial Sequence: Synthetic oligonucleotide
ccagugaagaacuagccgg

SEQ ID NO: 2593575 - RNA, 19 nt, Artificial Sequence
  Description of Artificial Sequence: Synthetic oligonucleotide
ugaugucugagucucccca

SEQ ID NO: 2593576 - RNA, 19 nt, Artificial Sequence
  Description of Artificial Sequence: Synthetic oligonucleotide
uucggcucagcacagcccc

SEQ ID NO: 2593577 - RNA, 19 nt, Artificial Sequence
  Description of Artificial Sequence: Synthetic oligonucleotide
accauaaacuguuccaaga

SEQ ID NO: 2593578 - RNA, 19 nt, Artificial Sequence
  Description of Artificial Sequence: Synthetic oligonucleotide
uucauccgaagcaaugcug

SEQ ID NO: 2593579 - RNA, 19 nt, Artificial Sequence
  Description of Artificial Sequence: Synthetic oligonucleotide
aucgacuucggcucagcac

SEQ ID NO: 2593580 - RNA, 19 nt, Artificial Sequence
  Description of Artificial Sequence: Synthetic oligonucleotide
ucugucuucaaucgacuuc

SEQ ID NO: 2593581 - RNA, 19 nt, Artificial Sequence
  Description of Artificial Sequence: Synthetic oligonucleotide
uguucugcucccuucucag

SEQ ID NO: 2593582 - RNA, 19 nt, Artificial Sequence
  Description of Artificial Sequence: Synthetic oligonucleotide
gauauugggaagcuguucu

SEQ ID NO: 2593583 - RNA, 19 nt, Artificial Sequence
  Description of Artificial Sequence: Synthetic oligonucleotide
cacccgaagaaccagugcc

SEQ ID NO: 2593584 - RNA, 19 nt, Artificial Sequence
  Description of Artificial Sequence: Synthetic oligonucleotide
ucaccaacagugcaugccu

SEQ ID NO: 2593585 - RNA, 19 nt, Artificial Sequence
  Description of Artificial Sequence: Synthetic oligonucleotide
agagacuggcuguucuggc

SEQ ID NO: 2593586 - RNA, 19 nt, Artificial Sequence
  Description of Artificial Sequence: Synthetic oligonucleotide
aaacuguuccaagaaagaa

SEQ ID NO: 2593587 - RNA, 19 nt, Artificial Sequence
  Description of Artificial Sequence: Synthetic oligonucleotide
uggugacugcuacauacag

SEQ ID NO: 2593588 - RNA, 19 nt, Artificial Sequence
  Description of Artificial Sequence: Synthetic oligonucleotide
caaugccaggcucacaccg

SEQ ID NO: 2593589 - RNA, 19 nt, Artificial Sequence
  Description of Artificial Sequence: Synthetic oligonucleotide
aucaaaugcugagagacca

SEQ ID NO: 2593590 - RNA, 19 nt, Artificial Sequence
  Description of Artificial Sequence: Synthetic oligonucleotide
  modified_base (14)..(14): a, c, u, g, unknown or other
uaucaguuccucgngggga

SEQ ID NO: 2593591 - RNA, 19 nt, Artificial Sequence
  Description of Artificial Sequence: Synthetic oligonucleotide
acaguggaaaugccaauug

SEQ ID NO: 2593592 - RNA, 19 nt, Artificial Sequence
  Description of Artificial Sequence: Synthetic oligonucleotide
aagaaagaauuuucuucaa

SEQ ID NO: 2593593 - RNA, 19 nt, Artificial Sequence
  Description of Artificial Sequence: Synthetic oligonucleotide
  modified_base (18)..(18): a, c, u, g, unknown or other
ugguuaucaguuccucgng

SEQ ID NO: 2593594 - RNA, 19 nt, Artificial Sequence
  Description of Artificial Sequence: Synthetic oligonucleotide
uccagaugauauugggaag

SEQ ID NO: 2593595 - RNA, 19 nt, Artificial Sequence
  Description of Artificial Sequence: Synthetic oligonucleotide
ugcugagagaccagugaag

SEQ ID NO: 2593596 - RNA, 19 nt, Artificial Sequence
  Description of Artificial Sequence: Synthetic oligonucleotide
ugcagauucauggcaaaug

SEQ ID NO: 2593597 - RNA, 19 nt, Artificial Sequence
  Description of Artificial Sequence: Synthetic oligonucleotide
uccuuuccagaugauauug

SEQ ID NO: 2593598 - RNA, 19 nt, Artificial Sequence
  Description of Artificial Sequence: Synthetic oligonucleotide
ucaaaugcugagagaccag

SEQ ID NO: 2593599 - RNA, 19 nt, Artificial Sequence
  Description of Artificial Sequence: Synthetic oligonucleotide
gaugauauugggaagcugu

SEQ ID NO: 2593600 - RNA, 19 nt, Artificial Sequence
  Description of Artificial Sequence: Synthetic oligonucleotide
aacuguuccaagaaagaau

SEQ ID NO: 2593601 - RNA, 19 nt, Artificial Sequence
  Description of Artificial Sequence: Synthetic oligonucleotide
auggucaguuaacugaaga

SEQ ID NO: 2593602 - RNA, 19 nt, Artificial Sequence
  Description of Artificial Sequence: Synthetic oligonucleotide
augaugucugagucucccc

SEQ ID NO: 2593603 - RNA, 19 nt, Artificial Sequence
  Description of Artificial Sequence: Synthetic oligonucleotide
uccuucauccgaagcaaug

SEQ ID NO: 2593604 - RNA, 19 nt, Artificial Sequence
  Description of Artificial Sequence: Synthetic oligonucleotide
uucucgaucacaggagaag

SEQ ID NO: 2593605 - RNA, 19 nt, Artificial Sequence
  Description of Artificial Sequence: Synthetic oligonucleotide
ucccaugacacugcaaugc

SEQ ID NO: 2593606 - RNA, 19 nt, Artificial Sequence
  Description of Artificial Sequence: Synthetic oligonucleotide
aaugccaauugaaggggag

SEQ ID NO: 2593607 - RNA, 19 nt, Artificial Sequence
  Description of Artificial Sequence: Synthetic oligonucleotide
cucagugguggagacaugg

SEQ ID NO: 2593608 - RNA, 19 nt, Artificial Sequence
  Description of Artificial Sequence: Synthetic oligonucleotide
ucugcucccuucucagugg

SEQ ID NO: 2593609 - RNA, 19 nt, Artificial Sequence
  Description of Artificial Sequence: Synthetic oligonucleotide
agaagguagcuuugcuagg

SEQ ID NO: 2593610 - RNA, 19 nt, Artificial Sequence
  Description of Artificial Sequence: Synthetic oligonucleotide
uauugggaagcuguucugc

SEQ ID NO: 2593611 - RNA, 19 nt, Artificial Sequence
  Description of Artificial Sequence: Synthetic oligonucleotide
gaugucugagucuccccag

SEQ ID NO: 2593612 - RNA, 19 nt, Artificial Sequence
  Description of Artificial Sequence: Synthetic oligonucleotide
uguucuggcugguuaucag

SEQ ID NO: 2593613 - RNA, 19 nt, Artificial Sequence
  Description of Artificial Sequence: Synthetic oligonucleotide
ugcaugaugucugagucuc

SEQ ID NO: 2593614 - RNA, 19 nt, Artificial Sequence
  Description of Artificial Sequence: Synthetic oligonucleotide
cuguaccauaaacuguucc

SEQ ID NO: 2593615 - RNA, 19 nt, Artificial Sequence
  Description of Artificial Sequence: Synthetic oligonucleotide
gaaccagugccucugcuuc

SEQ ID NO: 2593616 - RNA, 19 nt, Artificial Sequence
  Description of Artificial Sequence: Synthetic oligonucleotide
ugccaauugaaggggagcc

SEQ ID NO: 2593617 - RNA, 19 nt, Artificial Sequence
  Description of Artificial Sequence: Synthetic oligonucleotide
aagaacuagccggaguaca

SEQ ID NO: 2593618 - RNA, 19 nt, Artificial Sequence
  Description of Artificial Sequence: Synthetic oligonucleotide
ucuagguccuucauccgaa

SEQ ID NO: 2593619 - RNA, 19 nt, Artificial Sequence
  Description of Artificial Sequence: Synthetic oligonucleotide
ugcuacauacagacucugc

SEQ ID NO: 2593620 - RNA, 19 nt, Artificial Sequence
  Description of Artificial Sequence: Synthetic oligonucleotide
gucaguuaacugaagaguc

SEQ ID NO: 2593621 - RNA, 19 nt, Artificial Sequence
  Description of Artificial Sequence: Synthetic oligonucleotide
ugucugagucuccccagag

SEQ ID NO: 2593622 - RNA, 19 nt, Artificial Sequence
  Description of Artificial Sequence: Synthetic oligonucleotide
uucucagugguggagacau

SEQ ID NO: 2593623 - RNA, 19 nt, Artificial Sequence
  Description of Artificial Sequence: Synthetic oligonucleotide
  modified_base (19)..(19): a, c, u, g, unknown or other
cugguuaucaguuccucgn

SEQ ID NO: 2593624 - RNA, 19 nt, Artificial Sequence
  Description of Artificial Sequence: Synthetic oligonucleotide
uguuuggugacugcuacau

SEQ ID NO: 2593625 - RNA, 19 nt, Artificial Sequence
  Description of Artificial Sequence: Synthetic oligonucleotide
cugaggucucugcauaggg

SEQ ID NO: 2593626 - RNA, 19 nt, Artificial Sequence
  Description of Artificial Sequence: Synthetic oligonucleotide
uucuguccugcuuggaucu

SEQ ID NO: 2593627 - RNA, 19 nt, Artificial Sequence
  Description of Artificial Sequence: Synthetic oligonucleotide
cuuccaucaccaacagugc

SEQ ID NO: 2593628 - RNA, 19 nt, Artificial Sequence
  Description of Artificial Sequence: Synthetic oligonucleotide
augccaauugaaggggagc

SEQ ID NO: 2593629 - RNA, 19 nt, Artificial Sequence
  Description of Artificial Sequence: Synthetic oligonucleotide
ugacacugcaaugccaggc

SEQ ID NO: 2593630 - RNA, 19 nt, Artificial Sequence
  Description of Artificial Sequence: Synthetic oligonucleotide
gaucacaggagaagguagc

SEQ ID NO: 2593631 - RNA, 19 nt, Artificial Sequence
  Description of Artificial Sequence: Synthetic oligonucleotide
guagcccuggaucucuagg

SEQ ID NO: 2593632 - RNA, 19 nt, Artificial Sequence
  Description of Artificial Sequence: Synthetic oligonucleotide
uuggugacugcuacauaca

SEQ ID NO: 2593633 - RNA, 19 nt, Artificial Sequence
  Description of Artificial Sequence: Synthetic oligonucleotide
aaucgacuucggcucagca

SEQ ID NO: 2593634 - RNA, 19 nt, Artificial Sequence
  Description of Artificial Sequence: Synthetic oligonucleotide
caugaugucugagucuccc

SEQ ID NO: 2593635 - RNA, 19 nt, Artificial Sequence
  Description of Artificial Sequence: Synthetic oligonucleotide
auauugggaagcuguucug

SEQ ID NO: 2593636 - RNA, 19 nt, Artificial Sequence
  Description of Artificial Sequence: Synthetic oligonucleotide
ucugagagggcuggaguag

SEQ ID NO: 2593637 - RNA, 19 nt, Artificial Sequence
  Description of Artificial Sequence: Synthetic oligonucleotide
agcuuugcuaggaugagca

SEQ ID NO: 2593638 - RNA, 19 nt, Artificial Sequence
  Description of Artificial Sequence: Synthetic oligonucleotide
ggacgaaucaaaugcugag

SEQ ID NO: 2593639 - RNA, 19 nt, Artificial Sequence
  Description of Artificial Sequence: Synthetic oligonucleotide
aaggggagcccagacagcu

SEQ ID NO: 2593640 - RNA, 19 nt, Artificial Sequence
  Description of Artificial Sequence: Synthetic oligonucleotide
  modified_base (17)..(17): a, c, u, g, unknown or other
gguuaucaguuccucgngg

SEQ ID NO: 2593641 - RNA, 19 nt, Artificial Sequence
  Description of Artificial Sequence: Synthetic oligonucleotide
uuggccuuugccagcugag

SEQ ID NO: 2593642 - RNA, 19 nt, Artificial Sequence
  Description of Artificial Sequence: Synthetic oligonucleotide
ucucuagguccuucauccg

SEQ ID NO: 2593643 - RNA, 19 nt, Artificial Sequence
  Description of Artificial Sequence: Synthetic oligonucleotide
cuucuguccugcuuggauc

SEQ ID NO: 2593644 - RNA, 19 nt, Artificial Sequence
  Description of Artificial Sequence: Synthetic oligonucleotide
auguucaggcucugagagg

SEQ ID NO: 2593645 - RNA, 19 nt, Artificial Sequence
  Description of Artificial Sequence: Synthetic oligonucleotide
agcaaugcugcuagcuccc

SEQ ID NO: 2593646 - RNA, 19 nt, Artificial Sequence
  Description of Artificial Sequence: Synthetic oligonucleotide
gaccagugaagaacuagcc

SEQ ID NO: 2593647 - RNA, 19 nt, Artificial Sequence
  Description of Artificial Sequence: Synthetic oligonucleotide
gaucucuagguccuucauc

SEQ ID NO: 2593648 - RNA, 19 nt, Artificial Sequence
  Description of Artificial Sequence: Synthetic oligonucleotide
uccugguagcccuggaucu

SEQ ID NO: 2593649 - RNA, 19 nt, Artificial Sequence
  Description of Artificial Sequence: Synthetic oligonucleotide
uucaaucgacuucggcuca

SEQ ID NO: 2593650 - RNA, 19 nt, Artificial Sequence
  Description of Artificial Sequence: Synthetic oligonucleotide
gcuggaguagaagagacug

SEQ ID NO: 2593651 - RNA, 19 nt, Artificial Sequence
  Description of Artificial Sequence: Synthetic oligonucleotide
ugccucugcuucucgauca

SEQ ID NO: 2593652 - RNA, 19 nt, Artificial Sequence
  Description of Artificial Sequence: Synthetic oligonucleotide
  modified_base (8)..(8): a, c, u, g, unknown or other
uuccucgnggggaagugcu

SEQ ID NO: 2593653 - RNA, 19 nt, Artificial Sequence
  Description of Artificial Sequence: Synthetic oligonucleotide
aagaaccagugccucugcu

SEQ ID NO: 2593654 - RNA, 19 nt, Artificial Sequence
  Description of Artificial Sequence: Synthetic oligonucleotide
aaauggcucugucuucaau

SEQ ID NO: 2593655 - RNA, 19 nt, Artificial Sequence
  Description of Artificial Sequence: Synthetic oligonucleotide
gaggacgaaucaaaugcug

SEQ ID NO: 2593656 - RNA, 19 nt, Artificial Sequence
  Description of Artificial Sequence: Synthetic oligonucleotide
aguggaaaugccaauugaa

SEQ ID NO: 2593657 - RNA, 19 nt, Artificial Sequence
  Description of Artificial Sequence: Synthetic oligonucleotide
acauacagacucugcagau

SEQ ID NO: 2593658 - RNA, 19 nt, Artificial Sequence
  Description of Artificial Sequence: Synthetic oligonucleotide
uagcccuggaucucuaggu

SEQ ID NO: 2593659 - RNA, 19 nt, Artificial Sequence
  Description of Artificial Sequence: Synthetic oligonucleotide
agccccacucuccugguag

SEQ ID NO: 2593660 - RNA, 19 nt, Artificial Sequence
  Description of Artificial Sequence: Synthetic oligonucleotide
uggaucucuagguccuuca

SEQ ID NO: 2593661 - RNA, 19 nt, Artificial Sequence
  Description of Artificial Sequence: Synthetic oligonucleotide
ucugcuguuuggugacugc

SEQ ID NO: 2593662 - RNA, 19 nt, Artificial Sequence
  Description of Artificial Sequence: Synthetic oligonucleotide
ugggcucauguucaggcuc

SEQ ID NO: 2593663 - RNA, 19 nt, Artificial Sequence
  Description of Artificial Sequence: Synthetic oligonucleotide
ugucuucaaucgacuucgg

SEQ ID NO: 2593664 - RNA, 19 nt, Artificial Sequence
  Description of Artificial Sequence: Synthetic oligonucleotide
acacugcaaugccaggcuc

SEQ ID NO: 2593665 - RNA, 19 nt, Artificial Sequence
  Description of Artificial Sequence: Synthetic oligonucleotide
gcuacauacagacucugca

SEQ ID NO: 2593666 - RNA, 19 nt, Artificial Sequence
  Description of Artificial Sequence: Synthetic oligonucleotide
uucuggcugguuaucaguu

SEQ ID NO: 2593667 - RNA, 19 nt, Artificial Sequence
  Description of Artificial Sequence: Synthetic oligonucleotide
gaagguagcuuugcuagga

SEQ ID NO: 2593668 - RNA, 19 nt, Artificial Sequence
  Description of Artificial Sequence: Synthetic oligonucleotide
agcccuggaucucuagguc

SEQ ID NO: 2593669 - RNA, 19 nt, Artificial Sequence
  Description of Artificial Sequence: Synthetic oligonucleotide
agaacuagccggaguacag

SEQ ID NO: 2593670 - RNA, 19 nt, Artificial Sequence
  Description of Artificial Sequence: Synthetic oligonucleotide
ucacaccgaucagaggacg

SEQ ID NO: 2593671 - RNA, 19 nt, Artificial Sequence
  Description of Artificial Sequence: Synthetic oligonucleotide
acugcaaugccaggcucac

SEQ ID NO: 2593672 - RNA, 19 nt, Artificial Sequence
  Description of Artificial Sequence: Synthetic oligonucleotide
ugcuagcucccucccauga

SEQ ID NO: 2593673 - RNA, 19 nt, Artificial Sequence
  Description of Artificial Sequence: Synthetic oligonucleotide
aaaugccaauugaagggga

SEQ ID NO: 2593674 - RNA, 19 nt, Artificial Sequence
  Description of Artificial Sequence: Synthetic oligonucleotide
aauugaaggggagcccaga

SEQ ID NO: 2593675 - RNA, 19 nt, Artificial Sequence
  Description of Artificial Sequence: Synthetic oligonucleotide
ugcuuggaucugcuguuug

SEQ ID NO: 2593676 - RNA, 19 nt, Artificial Sequence
  Description of Artificial Sequence: Synthetic oligonucleotide
augcugagagaccagugaa

SEQ ID NO: 2593677 - RNA, 19 nt, Artificial Sequence
  Description of Artificial Sequence: Synthetic oligonucleotide
uccggcaauuucuguacca

SEQ ID NO: 2593678 - RNA, 19 nt, Artificial Sequence
  Description of Artificial Sequence: Synthetic oligonucleotide
uguucugacgugccagcuc

SEQ ID NO: 2593679 - RNA, 19 nt, Artificial Sequence
  Description of Artificial Sequence: Synthetic oligonucleotide
cauaaacuguuccaagaaa

SEQ ID NO: 2593680 - RNA, 19 nt, Artificial Sequence
  Description of Artificial Sequence: Synthetic oligonucleotide
ugauauugggaagcuguuc

SEQ ID NO: 2593681 - RNA, 19 nt, Artificial Sequence
  Description of Artificial Sequence: Synthetic oligonucleotide
gacgaaucaaaugcugaga

SEQ ID NO: 2593682 - RNA, 19 nt, Artificial Sequence
  Description of Artificial Sequence: Synthetic oligonucleotide
aauggucuuccaucaccaa

SEQ ID NO: 2593683 - RNA, 19 nt, Artificial Sequence
  Description of Artificial Sequence: Synthetic oligonucleotide
gaucagaggacgaaucaaa

SEQ ID NO: 2593684 - RNA, 19 nt, Artificial Sequence
  Description of Artificial Sequence: Synthetic oligonucleotide
aagguagcuuugcuaggau

SEQ ID NO: 2593685 - RNA, 19 nt, Artificial Sequence
  Description of Artificial Sequence: Synthetic oligonucleotide
gcugguuaucaguuccucg

SEQ ID NO: 2593686 - RNA, 19 nt, Artificial Sequence
  Description of Artificial Sequence: Synthetic oligonucleotide
ugacgugccagcuccuuuc

SEQ ID NO: 2593687 - RNA, 19 nt, Artificial Sequence
  Description of Artificial Sequence: Synthetic oligonucleotide
gacuggcuguucuggcugg

SEQ ID NO: 2593688 - RNA, 19 nt, Artificial Sequence
  Description of Artificial Sequence: Synthetic oligonucleotide
  modified_base (2)..(2): a, c, u, g, unknown or other
gnggggaagugcugcauga

SEQ ID NO: 2593689 - RNA, 19 nt, Artificial Sequence
  Description of Artificial Sequence: Synthetic oligonucleotide
ucagugguggagacauggu

SEQ ID NO: 2593690 - RNA, 19 nt, Artificial Sequence
  Description of Artificial Sequence: Synthetic oligonucleotide
ucuguaccauaaacuguuc

SEQ ID NO: 2593691 - RNA, 19 nt, Artificial Sequence
  Description of Artificial Sequence: Synthetic oligonucleotide
gaguacaguggaaaugcca

SEQ ID NO: 2593692 - RNA, 19 nt, Artificial Sequence
  Description of Artificial Sequence: Synthetic oligonucleotide
uacagacucugcagauuca

SEQ ID NO: 2593693 - RNA, 19 nt, Artificial Sequence
  Description of Artificial Sequence: Synthetic oligonucleotide
accgaucagaggacgaauc

SEQ ID NO: 2593694 - RNA, 19 nt, Artificial Sequence
  Description of Artificial Sequence: Synthetic oligonucleotide
aggagaagguagcuuugcu

SEQ ID NO: 2593695 - RNA, 19 nt, Artificial Sequence
  Description of Artificial Sequence: Synthetic oligonucleotide
gucuucaaucgacuucggc

SEQ ID NO: 2593696 - RNA, 19 nt, Artificial Sequence
  Description of Artificial Sequence: Synthetic oligonucleotide
augcuucuguccugcuugg

SEQ ID NO: 2593697 - RNA, 19 nt, Artificial Sequence
  Description of Artificial Sequence: Synthetic oligonucleotide
gguagcuuugcuaggauga

SEQ ID NO: 2593698 - RNA, 19 nt, Artificial Sequence
  Description of Artificial Sequence: Synthetic oligonucleotide
ucgaucacaggagaaggua

SEQ ID NO: 2593699 - RNA, 19 nt, Artificial Sequence
  Description of Artificial Sequence: Synthetic oligonucleotide
caauugaaggggagcccag

SEQ ID NO: 2593700 - RNA, 19 nt, Artificial Sequence
  Description of Artificial Sequence: Synthetic oligonucleotide
ggcaaauggucuuccauca

SEQ ID NO: 2593701 - RNA, 19 nt, Artificial Sequence
  Description of Artificial Sequence: Synthetic oligonucleotide
cuuugaugcuucuguccug

SEQ ID NO: 2593702 - RNA, 19 nt, Artificial Sequence
  Description of Artificial Sequence: Synthetic oligonucleotide
ucauggcaaauggucuucc

SEQ ID NO: 2593703 - RNA, 19 nt, Artificial Sequence
  Description of Artificial Sequence: Synthetic oligonucleotide
cauggucaguuaacugaag

SEQ ID NO: 2593704 - RNA, 19 nt, Artificial Sequence
  Description of Artificial Sequence: Synthetic oligonucleotide
gaagaacuagccggaguac

SEQ ID NO: 2593705 - RNA, 19 nt, Artificial Sequence
  Description of Artificial Sequence: Synthetic oligonucleotide
cucacaccgaucagaggac

SEQ ID NO: 2593706 - RNA, 19 nt, Artificial Sequence
  Description of Artificial Sequence: Synthetic oligonucleotide
cacccaugggcucauguuc

SEQ ID NO: 2593707 - RNA, 19 nt, Artificial Sequence
  Description of Artificial Sequence: Synthetic oligonucleotide
  modified_base (7)..(7): a, c, u, g, unknown or other
uccucgnggggaagugcug

SEQ ID NO: 2593708 - RNA, 19 nt, Artificial Sequence
  Description of Artificial Sequence: Synthetic oligonucleotide
ccagaugauauugggaagc

SEQ ID NO: 2593709 - RNA, 19 nt, Artificial Sequence
  Description of Artificial Sequence: Synthetic oligonucleotide
  modified_base (10)..(10): a, c, u, g, unknown or other
aguuccucgnggggaagug

SEQ ID NO: 2593710 - RNA, 19 nt, Artificial Sequence
  Description of Artificial Sequence: Synthetic oligonucleotide
cuccugguagcccuggauc

SEQ ID NO: 2593711 - RNA, 19 nt, Artificial Sequence
  Description of Artificial Sequence: Synthetic oligonucleotide
agaaccagugccucugcuu

SEQ ID NO: 2593712 - RNA, 19 nt, Artificial Sequence
  Description of Artificial Sequence: Synthetic oligonucleotide
aggacgaaucaaaugcuga

SEQ ID NO: 2593713 - RNA, 19 nt, Artificial Sequence
  Description of Artificial Sequence: Synthetic oligonucleotide
acuagccggaguacagugg

SEQ ID NO: 2593714 - RNA, 19 nt, Artificial Sequence
  Description of Artificial Sequence: Synthetic oligonucleotide
caacagugcaugccuccgg

SEQ ID NO: 2593715 - RNA, 19 nt, Artificial Sequence
  Description of Artificial Sequence: Synthetic oligonucleotide
agaggacgaaucaaaugcu

SEQ ID NO: 2593716 - RNA, 19 nt, Artificial Sequence
  Description of Artificial Sequence: Synthetic oligonucleotide
cuagccggaguacagugga

SEQ ID NO: 2593717 - RNA, 19 nt, Artificial Sequence
  Description of Artificial Sequence: Synthetic oligonucleotide
uucauggcaaauggucuuc

SEQ ID NO: 2593718 - RNA, 19 nt, Artificial Sequence
  Description of Artificial Sequence: Synthetic oligonucleotide
ugcuguuuggugacugcua

SEQ ID NO: 2593719 - RNA, 19 nt, Artificial Sequence
  Description of Artificial Sequence: Synthetic oligonucleotide
cucugcauagggccugaag

SEQ ID NO: 2593720 - RNA, 19 nt, Artificial Sequence
  Description of Artificial Sequence: Synthetic oligonucleotide
uagcuuugcuaggaugagc

SEQ ID NO: 2593721 - RNA, 19 nt, Artificial Sequence
  Description of Artificial Sequence: Synthetic oligonucleotide
acugcuacauacagacucu

SEQ ID NO: 2593722 - RNA, 19 nt, Artificial Sequence
  Description of Artificial Sequence: Synthetic oligonucleotide
guagcuuugcuaggaugag

SEQ ID NO: 2593723 - RNA, 19 nt, Artificial Sequence
  Description of Artificial Sequence: Synthetic oligonucleotide
gggccugaagcacccaugg

SEQ ID NO: 2593724 - RNA, 19 nt, Artificial Sequence
  Description of Artificial Sequence: Synthetic oligonucleotide
agaugauauugggaagcug

SEQ ID NO: 2593725 - RNA, 19 nt, Artificial Sequence
  Description of Artificial Sequence: Synthetic oligonucleotide
ucuggcugguuaucaguuc

SEQ ID NO: 2593726 - RNA, 19 nt, Artificial Sequence
  Description of Artificial Sequence: Synthetic oligonucleotide
uggccuuugccagcugagg

SEQ ID NO: 2593727 - RNA, 19 nt, Artificial Sequence
  Description of Artificial Sequence: Synthetic oligonucleotide
guaccauaaacuguuccaa

SEQ ID NO: 2593728 - RNA, 19 nt, Artificial Sequence
  Description of Artificial Sequence: Synthetic oligonucleotide
guuaacugaagaguccucu

SEQ ID NO: 2593729 - RNA, 19 nt, Artificial Sequence
  Description of Artificial Sequence: Synthetic oligonucleotide
ucaaucgacuucggcucag

SEQ ID NO: 2593730 - RNA, 19 nt, Artificial Sequence
  Description of Artificial Sequence: Synthetic oligonucleotide
aaugccaggcucacaccga

SEQ ID NO: 2593731 - RNA, 19 nt, Artificial Sequence
  Description of Artificial Sequence: Synthetic oligonucleotide
aucacaggagaagguagcu

SEQ ID NO: 2593732 - RNA, 19 nt, Artificial Sequence
  Description of Artificial Sequence: Synthetic oligonucleotide
ugacugcuacauacagacu

SEQ ID NO: 2593733 - RNA, 19 nt, Artificial Sequence
  Description of Artificial Sequence: Synthetic oligonucleotide
caucaccaacagugcaugc

SEQ ID NO: 2593734 - RNA, 19 nt, Artificial Sequence
  Description of Artificial Sequence: Synthetic oligonucleotide
gcuguuuggugacugcuac

SEQ ID NO: 2593735 - RNA, 19 nt, Artificial Sequence
  Description of Artificial Sequence: Synthetic oligonucleotide
acauggucaguuaacugaa

SEQ ID NO: 2593736 - RNA, 19 nt, Artificial Sequence
  Description of Artificial Sequence: Synthetic oligonucleotide
uggcugguuaucaguuccu

SEQ ID NO: 2593737 - RNA, 19 nt, Artificial Sequence
  Description of Artificial Sequence: Synthetic oligonucleotide
gcucccuucucaguggugg

SEQ ID NO: 2593738 - RNA, 19 nt, Artificial Sequence
  Description of Artificial Sequence: Synthetic oligonucleotide
cuagcucccucccaugaca

SEQ ID NO: 2593739 - RNA, 19 nt, Artificial Sequence
  Description of Artificial Sequence: Synthetic oligonucleotide
gacgugccagcuccuuucc

SEQ ID NO: 2593740 - RNA, 19 nt, Artificial Sequence
  Description of Artificial Sequence: Synthetic oligonucleotide
cucccaugacacugcaaug

SEQ ID NO: 2593741 - RNA, 19 nt, Artificial Sequence
  Description of Artificial Sequence: Synthetic oligonucleotide
ugagagggcuggaguagaa

SEQ ID NO: 2593742 - RNA, 19 nt, Artificial Sequence
  Description of Artificial Sequence: Synthetic oligonucleotide
uggcucugucuucaaucga

SEQ ID NO: 2593743 - RNA, 19 nt, Artificial Sequence
  Description of Artificial Sequence: Synthetic oligonucleotide
gagagaccagugaagaacu

SEQ ID NO: 2593744 - RNA, 19 nt, Artificial Sequence
  Description of Artificial Sequence: Synthetic oligonucleotide
agcacccaugggcucaugu

SEQ ID NO: 2593745 - RNA, 19 nt, Artificial Sequence
  Description of Artificial Sequence: Synthetic oligonucleotide
caggagaagguagcuuugc

SEQ ID NO: 2593746 - RNA, 19 nt, Artificial Sequence
  Description of Artificial Sequence: Synthetic oligonucleotide
cagugaagaacuagccgga

SEQ ID NO: 2593747 - RNA, 19 nt, Artificial Sequence
  Description of Artificial Sequence: Synthetic oligonucleotide
gacacugcaaugccaggcu

SEQ ID NO: 2593748 - RNA, 19 nt, Artificial Sequence
  Description of Artificial Sequence: Synthetic oligonucleotide
caugccuccggcaauuucu

SEQ ID NO: 2593749 - RNA, 19 nt, Artificial Sequence
  Description of Artificial Sequence: Synthetic oligonucleotide
aggcucacaccgaucagag

SEQ ID NO: 2593750 - RNA, 19 nt, Artificial Sequence
  Description of Artificial Sequence: Synthetic oligonucleotide
cucuagguccuucauccga

SEQ ID NO: 2593751 - RNA, 19 nt, Artificial Sequence
  Description of Artificial Sequence: Synthetic oligonucleotide
caguggaaaugccaauuga

SEQ ID NO: 2593752 - RNA, 19 nt, Artificial Sequence
  Description of Artificial Sequence: Synthetic oligonucleotide
augggcucauguucaggcu

SEQ ID NO: 2593753 - RNA, 19 nt, Artificial Sequence
  Description of Artificial Sequence: Synthetic oligonucleotide
ggcaauuucuguaccauaa

SEQ ID NO: 2593754 - RNA, 19 nt, Artificial Sequence
  Description of Artificial Sequence: Synthetic oligonucleotide
gguguucugacgugccagc

SEQ ID NO: 2593755 - RNA, 19 nt, Artificial Sequence
  Description of Artificial Sequence: Synthetic oligonucleotide
aucagaggacgaaucaaau

SEQ ID NO: 2593756 - RNA, 19 nt, Artificial Sequence
  Description of Artificial Sequence: Synthetic oligonucleotide
uccgcacccgaagaaccag

SEQ ID NO: 2593757 - RNA, 19 nt, Artificial Sequence
  Description of Artificial Sequence: Synthetic oligonucleotide
gaggguguucugacgugcc

SEQ ID NO: 2593758 - RNA, 19 nt, Artificial Sequence
  Description of Artificial Sequence: Synthetic oligonucleotide
cggaguacaguggaaaugc

SEQ ID NO: 2593759 - RNA, 19 nt, Artificial Sequence
  Description of Artificial Sequence: Synthetic oligonucleotide
ugccagcugaggucucugc

SEQ ID NO: 2593760 - RNA, 19 nt, Artificial Sequence
  Description of Artificial Sequence: Synthetic oligonucleotide
cacugcaaugccaggcuca

SEQ ID NO: 2593761 - RNA, 19 nt, Artificial Sequence
  Description of Artificial Sequence: Synthetic oligonucleotide
cucccucccaugacacugc

SEQ ID NO: 2593762 - RNA, 19 nt, Artificial Sequence
  Description of Artificial Sequence: Synthetic oligonucleotide
ugcugcuagcucccuccca

SEQ ID NO: 2593763 - RNA, 19 nt, Artificial Sequence
  Description of Artificial Sequence: Synthetic oligonucleotide
  modified_base (12)..(12): a, c, u, g, unknown or other
ucaguuccucgnggggaag

SEQ ID NO: 2593764 - RNA, 19 nt, Artificial Sequence
  Description of Artificial Sequence: Synthetic oligonucleotide
ggagaagguagcuuugcua

SEQ ID NO: 2593765 - RNA, 19 nt, Artificial Sequence
  Description of Artificial Sequence: Synthetic oligonucleotide
cuccggcaauuucuguacc

SEQ ID NO: 2593766 - RNA, 19 nt, Artificial Sequence
  Description of Artificial Sequence: Synthetic oligonucleotide
ggagacauggucaguuaac

SEQ ID NO: 2593767 - RNA, 19 nt, Artificial Sequence
  Description of Artificial Sequence: Synthetic oligonucleotide
ucucagugguggagacaug

SEQ ID NO: 2593768 - RNA, 19 nt, Artificial Sequence
  Description of Artificial Sequence: Synthetic oligonucleotide
  modified_base (9)..(9): a, c, u, g, unknown or other
guuccucgnggggaagugc

SEQ ID NO: 2593769 - RNA, 19 nt, Artificial Sequence
  Description of Artificial Sequence: Synthetic oligonucleotide
cgaucacaggagaagguag

SEQ ID NO: 2593770 - RNA, 19 nt, Artificial Sequence
  Description of Artificial Sequence: Synthetic oligonucleotide
ggucaguuaacugaagagu

SEQ ID NO: 2593771 - RNA, 19 nt, Artificial Sequence
  Description of Artificial Sequence: Synthetic oligonucleotide
ggcucugucuucaaucgac

SEQ ID NO: 2593772 - RNA, 19 nt, Artificial Sequence
  Description of Artificial Sequence: Synthetic oligonucleotide
cuucucgaucacaggagaa

SEQ ID NO: 2593773 - RNA, 19 nt, Artificial Sequence
  Description of Artificial Sequence: Synthetic oligonucleotide
cucugagagggcuggagua

SEQ ID NO: 2593774 - RNA, 19 nt, Artificial Sequence
  Description of Artificial Sequence: Synthetic oligonucleotide
gagacuggcuguucuggcu

SEQ ID NO: 2593775 - RNA, 19 nt, Artificial Sequence
  Description of Artificial Sequence: Synthetic oligonucleotide
uagaagagacuggcuguuc

SEQ ID NO: 2593776 - RNA, 19 nt, Artificial Sequence
  Description of Artificial Sequence: Synthetic oligonucleotide
gcccuggaucucuaggucc

SEQ ID NO: 2593777 - RNA, 19 nt, Artificial Sequence
  Description of Artificial Sequence: Synthetic oligonucleotide
cuguccugcuuggaucugc

SEQ ID NO: 2593778 - RNA, 19 nt, Artificial Sequence
  Description of Artificial Sequence: Synthetic oligonucleotide
cccaugacacugcaaugcc

SEQ ID NO: 2593779 - RNA, 19 nt, Artificial Sequence
  Description of Artificial Sequence: Synthetic oligonucleotide
cauggcaaauggucuucca

SEQ ID NO: 2593780 - RNA, 19 nt, Artificial Sequence
  Description of Artificial Sequence: Synthetic oligonucleotide
cugaagcacccaugggcuc

SEQ ID NO: 2593781 - RNA, 19 nt, Artificial Sequence
  Description of Artificial Sequence: Synthetic oligonucleotide
cugcuacauacagacucug

SEQ ID NO: 2593782 - RNA, 19 nt, Artificial Sequence
  Description of Artificial Sequence: Synthetic oligonucleotide
gcuucucgaucacaggaga

SEQ ID NO: 2593783 - RNA, 19 nt, Artificial Sequence
  Description of Artificial Sequence: Synthetic oligonucleotide
ccuccggcaauuucuguac

SEQ ID NO: 2593784 - RNA, 19 nt, Artificial Sequence
  Description of Artificial Sequence: Synthetic oligonucleotide
augauauugggaagcuguu

SEQ ID NO: 2593785 - RNA, 19 nt, Artificial Sequence
  Description of Artificial Sequence: Synthetic oligonucleotide
  modified_base (13)..(13): a, c, u, g, unknown or other
aucaguuccucgnggggaa

SEQ ID NO: 2593786 - RNA, 19 nt, Artificial Sequence
  Description of Artificial Sequence: Synthetic oligonucleotide
ccauaaacuguuccaagaa

SEQ ID NO: 2593787 - RNA, 19 nt, Artificial Sequence
  Description of Artificial Sequence: Synthetic oligonucleotide
gugaagaacuagccggagu

SEQ ID NO: 2593788 - RNA, 19 nt, Artificial Sequence
  Description of Artificial Sequence: Synthetic oligonucleotide
caguuaacugaagaguccu

SEQ ID NO: 2593789 - RNA, 19 nt, Artificial Sequence
  Description of Artificial Sequence: Synthetic oligonucleotide
cugagagaccagugaagaa

SEQ ID NO: 2593790 - RNA, 19 nt, Artificial Sequence
  Description of Artificial Sequence: Synthetic oligonucleotide
gcuuugcuaggaugagcag

SEQ ID NO: 2593791 - RNA, 19 nt, Artificial Sequence
  Description of Artificial Sequence: Synthetic oligonucleotide
cugaagaguccucuuggcu

SEQ ID NO: 2593792 - RNA, 19 nt, Artificial Sequence
  Description of Artificial Sequence: Synthetic oligonucleotide
ucgcuccgcacccgaagaa

SEQ ID NO: 2593793 - RNA, 19 nt, Artificial Sequence
  Description of Artificial Sequence: Synthetic oligonucleotide
caaucgacuucggcucagc

SEQ ID NO: 2593794 - RNA, 19 nt, Artificial Sequence
  Description of Artificial Sequence: Synthetic oligonucleotide
uucugacgugccagcuccu

SEQ ID NO: 2593795 - RNA, 19 nt, Artificial Sequence
  Description of Artificial Sequence: Synthetic oligonucleotide
acccgaagaaccagugccu

SEQ ID NO: 2593796 - RNA, 19 nt, Artificial Sequence
  Description of Artificial Sequence: Synthetic oligonucleotide
cuguuuggugacugcuaca

SEQ ID NO: 2593797 - RNA, 19 nt, Artificial Sequence
  Description of Artificial Sequence: Synthetic oligonucleotide
gguagcccuggaucucuag

SEQ ID NO: 2593798 - RNA, 19 nt, Artificial Sequence
  Description of Artificial Sequence: Synthetic oligonucleotide
cacaccgaucagaggacga

SEQ ID NO: 2593799 - RNA, 19 nt, Artificial Sequence
  Description of Artificial Sequence: Synthetic oligonucleotide
acaccgaucagaggacgaa

SEQ ID NO: 2593800 - RNA, 19 nt, Artificial Sequence
  Description of Artificial Sequence: Synthetic oligonucleotide
gcaauuucuguaccauaaa

SEQ ID NO: 2593801 - RNA, 19 nt, Artificial Sequence
  Description of Artificial Sequence: Synthetic oligonucleotide
gcucccucccaugacacug

SEQ ID NO: 2593802 - RNA, 19 nt, Artificial Sequence
  Description of Artificial Sequence: Synthetic oligonucleotide
gcaaauggucuuccaucac

SEQ ID NO: 2593803 - RNA, 19 nt, Artificial Sequence
  Description of Artificial Sequence: Synthetic oligonucleotide
uagccggaguacaguggaa

SEQ ID NO: 2593804 - RNA, 19 nt, Artificial Sequence
  Description of Artificial Sequence: Synthetic oligonucleotide
ucuguccugcuuggaucug

SEQ ID NO: 2593805 - RNA, 19 nt, Artificial Sequence
  Description of Artificial Sequence: Synthetic oligonucleotide
ggaguacaguggaaaugcc

SEQ ID NO: 2593806 - RNA, 19 nt, Artificial Sequence
  Description of Artificial Sequence: Synthetic oligonucleotide
  modified_base (4)..(4): a, c, u, g, unknown or other
ucgnggggaagugcugcau

SEQ ID NO: 2593807 - RNA, 19 nt, Artificial Sequence
  Description of Artificial Sequence: Synthetic oligonucleotide
cgugccagcuccuuuccag

SEQ ID NO: 2593808 - RNA, 19 nt, Artificial Sequence
  Description of Artificial Sequence: Synthetic oligonucleotide
cuguucuggcugguuauca

SEQ ID NO: 2593809 - RNA, 19 nt, Artificial Sequence
  Description of Artificial Sequence: Synthetic oligonucleotide
ucggcucagcacagcccca

SEQ ID NO: 2593810 - RNA, 19 nt, Artificial Sequence
  Description of Artificial Sequence: Synthetic oligonucleotide
ccaacagugcaugccuccg

SEQ ID NO: 2593811 - RNA, 19 nt, Artificial Sequence
  Description of Artificial Sequence: Synthetic oligonucleotide
cagugcaugccuccggcaa

SEQ ID NO: 2593812 - RNA, 19 nt, Artificial Sequence
  Description of Artificial Sequence: Synthetic oligonucleotide
auccgaagcaaugcugcua

SEQ ID NO: 2593813 - RNA, 19 nt, Artificial Sequence
  Description of Artificial Sequence: Synthetic oligonucleotide
caaaugcugagagaccagu

SEQ ID NO: 2593814 - RNA, 19 nt, Artificial Sequence
  Description of Artificial Sequence: Synthetic oligonucleotide
ggugacugcuacauacaga

SEQ ID NO: 2593815 - RNA, 19 nt, Artificial Sequence
  Description of Artificial Sequence: Synthetic oligonucleotide
  modified_base (5)..(5): a, c, u, g, unknown or other
cucgnggggaagugcugca

SEQ ID NO: 2593816 - RNA, 19 nt, Artificial Sequence
  Description of Artificial Sequence: Synthetic oligonucleotide
augccuccggcaauuucug

SEQ ID NO: 2593817 - RNA, 19 nt, Artificial Sequence
  Description of Artificial Sequence: Synthetic oligonucleotide
cucgcuccgcacccgaaga

SEQ ID NO: 2593818 - RNA, 19 nt, Artificial Sequence
  Description of Artificial Sequence: Synthetic oligonucleotide
ugccuccggcaauuucugu

SEQ ID NO: 2593819 - RNA, 19 nt, Artificial Sequence
  Description of Artificial Sequence: Synthetic oligonucleotide
agggccugaagcacccaug

SEQ ID NO: 2593820 - RNA, 19 nt, Artificial Sequence
  Description of Artificial Sequence: Synthetic oligonucleotide
gacuucggcucagcacagc

SEQ ID NO: 2593821 - RNA, 19 nt, Artificial Sequence
  Description of Artificial Sequence: Synthetic oligonucleotide
gcacccgaagaaccagugc

SEQ ID NO: 2593822 - RNA, 19 nt, Artificial Sequence
  Description of Artificial Sequence: Synthetic oligonucleotide
gaacuagccggaguacagu

SEQ ID NO: 2593823 - RNA, 19 nt, Artificial Sequence
  Description of Artificial Sequence: Synthetic oligonucleotide
cucgaucacaggagaaggu

SEQ ID NO: 2593824 - RNA, 19 nt, Artificial Sequence
  Description of Artificial Sequence: Synthetic oligonucleotide
ccuucucagugguggagac

SEQ ID NO: 2593825 - RNA, 19 nt, Artificial Sequence
  Description of Artificial Sequence: Synthetic oligonucleotide
agcucccucccaugacacu

SEQ ID NO: 2593826 - RNA, 19 nt, Artificial Sequence
  Description of Artificial Sequence: Synthetic oligonucleotide
cuccgcacccgaagaacca

SEQ ID NO: 2593827 - RNA, 19 nt, Artificial Sequence
  Description of Artificial Sequence: Synthetic oligonucleotide
agucuccccagagccuuug

SEQ ID NO: 2593828 - RNA, 19 nt, Artificial Sequence
  Description of Artificial Sequence: Synthetic oligonucleotide
ugccaggcucacaccgauc

SEQ ID NO: 2593829 - RNA, 19 nt, Artificial Sequence
  Description of Artificial Sequence: Synthetic oligonucleotide
cucagcacagccccacucu

SEQ ID NO: 2593830 - RNA, 19 nt, Artificial Sequence
  Description of Artificial Sequence: Synthetic oligonucleotide
gccaauugaaggggagccc

SEQ ID NO: 2593831 - RNA, 19 nt, Artificial Sequence
  Description of Artificial Sequence: Synthetic oligonucleotide
cacucuccugguagcccug

SEQ ID NO: 2593832 - RNA, 19 nt, Artificial Sequence
  Description of Artificial Sequence: Synthetic oligonucleotide
gcuagcucccucccaugac

SEQ ID NO: 2593833 - RNA, 19 nt, Artificial Sequence
  Description of Artificial Sequence: Synthetic oligonucleotide
guacaguggaaaugccaau

SEQ ID NO: 2593834 - RNA, 19 nt, Artificial Sequence
  Description of Artificial Sequence: Synthetic oligonucleotide
gcucgcuccgcacccgaag

SEQ ID NO: 2593835 - RNA, 19 nt, Artificial Sequence
  Description of Artificial Sequence: Synthetic oligonucleotide
  modified_base (6)..(6): a, c, u, g, unknown or other
ccucgnggggaagugcugc

SEQ ID NO: 2593836 - RNA, 19 nt, Artificial Sequence
  Description of Artificial Sequence: Synthetic oligonucleotide
cugcaugaugucugagucu

SEQ ID NO: 2593837 - RNA, 19 nt, Artificial Sequence
  Description of Artificial Sequence: Synthetic oligonucleotide
cugagagggcuggaguaga

SEQ ID NO: 2593838 - RNA, 19 nt, Artificial Sequence
  Description of Artificial Sequence: Synthetic oligonucleotide
ugguagcccuggaucucua

SEQ ID NO: 2593839 - RNA, 19 nt, Artificial Sequence
  Description of Artificial Sequence: Synthetic oligonucleotide
ccugaagcacccaugggcu

SEQ ID NO: 2593840 - RNA, 19 nt, Artificial Sequence
  Description of Artificial Sequence: Synthetic oligonucleotide
ccggaguacaguggaaaug

SEQ ID NO: 2593841 - RNA, 19 nt, Artificial Sequence
  Description of Artificial Sequence: Synthetic oligonucleotide
cagcugaggucucugcaua

SEQ ID NO: 2593842 - RNA, 19 nt, Artificial Sequence
  Description of Artificial Sequence: Synthetic oligonucleotide
cagaugauauugggaagcu

SEQ ID NO: 2593843 - RNA, 19 nt, Artificial Sequence
  Description of Artificial Sequence: Synthetic oligonucleotide
cuucucagugguggagaca

SEQ ID NO: 2593844 - RNA, 19 nt, Artificial Sequence
  Description of Artificial Sequence: Synthetic oligonucleotide
ccgaucagaggacgaauca

SEQ ID NO: 2593845 - RNA, 19 nt, Artificial Sequence
  Description of Artificial Sequence: Synthetic oligonucleotide
cucccuucucaguggugga

SEQ ID NO: 2593846 - RNA, 19 nt, Artificial Sequence
  Description of Artificial Sequence: Synthetic oligonucleotide
ccucuuggccuuugccagc

SEQ ID NO: 2593847 - RNA, 19 nt, Artificial Sequence
  Description of Artificial Sequence: Synthetic oligonucleotide
guagaagagacuggcuguu

SEQ ID NO: 2593848 - RNA, 19 nt, Artificial Sequence
  Description of Artificial Sequence: Synthetic oligonucleotide
cauccgaagcaaugcugcu

SEQ ID NO: 2593849 - RNA, 19 nt, Artificial Sequence
  Description of Artificial Sequence: Synthetic oligonucleotide
cgaaucaaaugcugagaga

SEQ ID NO: 2593850 - RNA, 19 nt, Artificial Sequence
  Description of Artificial Sequence: Synthetic oligonucleotide
ggccuuugccagcugaggu

SEQ ID NO: 2593851 - RNA, 19 nt, Artificial Sequence
  Description of Artificial Sequence: Synthetic oligonucleotide
gccuccggcaauuucugua

SEQ ID NO: 2593852 - RNA, 19 nt, Artificial Sequence
  Description of Artificial Sequence: Synthetic oligonucleotide
agagaccagugaagaacua

SEQ ID NO: 2593853 - RNA, 19 nt, Artificial Sequence
  Description of Artificial Sequence: Synthetic oligonucleotide
gguggagacauggucaguu

SEQ ID NO: 2593854 - RNA, 19 nt, Artificial Sequence
  Description of Artificial Sequence: Synthetic oligonucleotide
acuggcuguucuggcuggu

SEQ ID NO: 2593855 - RNA, 19 nt, Artificial Sequence
  Description of Artificial Sequence: Synthetic oligonucleotide
cucugucuucaaucgacuu

SEQ ID NO: 2593856 - RNA, 19 nt, Artificial Sequence
  Description of Artificial Sequence: Synthetic oligonucleotide
ggcugguuaucaguuccuc

SEQ ID NO: 2593857 - RNA, 19 nt, Artificial Sequence
  Description of Artificial Sequence: Synthetic oligonucleotide
ccaugggcucauguucagg

SEQ ID NO: 2593858 - RNA, 19 nt, Artificial Sequence
  Description of Artificial Sequence: Synthetic oligonucleotide
  modified_base (3)..(3): a, c, u, g, unknown or other
cgnggggaagugcugcaug

SEQ ID NO: 2593859 - RNA, 19 nt, Artificial Sequence
  Description of Artificial Sequence: Synthetic oligonucleotide
ccagagccuuugaugcuuc

SEQ ID NO: 2593860 - RNA, 19 nt, Artificial Sequence
  Description of Artificial Sequence: Synthetic oligonucleotide
gcugcuagcucccucccau

SEQ ID NO: 2593861 - RNA, 19 nt, Artificial Sequence
  Description of Artificial Sequence: Synthetic oligonucleotide
cugagucuccccagagccu

SEQ ID NO: 2593862 - RNA, 19 nt, Artificial Sequence
  Description of Artificial Sequence: Synthetic oligonucleotide
auagggccugaagcaccca

SEQ ID NO: 2593863 - RNA, 19 nt, Artificial Sequence
  Description of Artificial Sequence: Synthetic oligonucleotide
gcaugccuccggcaauuuc

SEQ ID NO: 2593864 - RNA, 19 nt, Artificial Sequence
  Description of Artificial Sequence: Synthetic oligonucleotide
gccccacucuccugguagc

SEQ ID NO: 2593865 - RNA, 19 nt, Artificial Sequence
  Description of Artificial Sequence: Synthetic oligonucleotide
cuguuccaagaaagaauuu

SEQ ID NO: 2593866 - RNA, 19 nt, Artificial Sequence
  Description of Artificial Sequence: Synthetic oligonucleotide
ugcaugccuccggcaauuu

SEQ ID NO: 2593867 - RNA, 19 nt, Artificial Sequence
  Description of Artificial Sequence: Synthetic oligonucleotide
gcaugaugucugagucucc

SEQ ID NO: 2593868 - RNA, 19 nt, Artificial Sequence
  Description of Artificial Sequence: Synthetic oligonucleotide
ggaguagaagagacuggcu

SEQ ID NO: 2593869 - RNA, 19 nt, Artificial Sequence
  Description of Artificial Sequence: Synthetic oligonucleotide
cccacucuccugguagccc

SEQ ID NO: 2593870 - RNA, 19 nt, Artificial Sequence
  Description of Artificial Sequence: Synthetic oligonucleotide
cccgaagaaccagugccuc

SEQ ID NO: 2593871 - RNA, 19 nt, Artificial Sequence
  Description of Artificial Sequence: Synthetic oligonucleotide
gucucugcauagggccuga

SEQ ID NO: 2593872 - RNA, 19 nt, Artificial Sequence
  Description of Artificial Sequence: Synthetic oligonucleotide
ccgaagcaaugcugcuagc

SEQ ID NO: 2593873 - RNA, 19 nt, Artificial Sequence
  Description of Artificial Sequence: Synthetic oligonucleotide
guguucugacgugccagcu

SEQ ID NO: 2593874 - RNA, 19 nt, Artificial Sequence
  Description of Artificial Sequence: Synthetic oligonucleotide
ggcuguucuggcugguuau

SEQ ID NO: 2593875 - RNA, 19 nt, Artificial Sequence
  Description of Artificial Sequence: Synthetic oligonucleotide
cugguagcccuggaucucu

SEQ ID NO: 2593876 - RNA, 19 nt, Artificial Sequence
  Description of Artificial Sequence: Synthetic oligonucleotide
cgacuucggcucagcacag

SEQ ID NO: 2593877 - RNA, 19 nt, Artificial Sequence
  Description of Artificial Sequence: Synthetic oligonucleotide
cugcucccuucucaguggu

SEQ ID NO: 2593878 - RNA, 19 nt, Artificial Sequence
  Description of Artificial Sequence: Synthetic oligonucleotide
cugcagauucauggcaaau

SEQ ID NO: 2593879 - RNA, 19 nt, Artificial Sequence
  Description of Artificial Sequence: Synthetic oligonucleotide
gccggaguacaguggaaau

SEQ ID NO: 2593880 - RNA, 19 nt, Artificial Sequence
  Description of Artificial Sequence: Synthetic oligonucleotide
  modified_base (11)..(11): a, c, u, g, unknown or other
caguuccucgnggggaagu

SEQ ID NO: 2593881 - RNA, 19 nt, Artificial Sequence
  Description of Artificial Sequence: Synthetic oligonucleotide
cgaucagaggacgaaucaa

SEQ ID NO: 2593882 - RNA, 19 nt, Artificial Sequence
  Description of Artificial Sequence: Synthetic oligonucleotide
cugacgugccagcuccuuu

SEQ ID NO: 2593883 - RNA, 19 nt, Artificial Sequence
  Description of Artificial Sequence: Synthetic oligonucleotide
cugcaaugccaggcucaca

SEQ ID NO: 2593884 - RNA, 19 nt, Artificial Sequence
  Description of Artificial Sequence: Synthetic oligonucleotide
caccgaucagaggacgaau

SEQ ID NO: 2593885 - RNA, 19 nt, Artificial Sequence
  Description of Artificial Sequence: Synthetic oligonucleotide
gcacccaugggcucauguu

SEQ ID NO: 2593886 - RNA, 19 nt, Artificial Sequence
  Description of Artificial Sequence: Synthetic oligonucleotide
guccuucauccgaagcaau

SEQ ID NO: 2593887 - RNA, 19 nt, Artificial Sequence
  Description of Artificial Sequence: Synthetic oligonucleotide
ccugcuuggaucugcuguu

SEQ ID NO: 2593888 - RNA, 19 nt, Artificial Sequence
  Description of Artificial Sequence: Synthetic oligonucleotide
cgaagcaaugcugcuagcu

SEQ ID NO: 2593889 - RNA, 19 nt, Artificial Sequence
  Description of Artificial Sequence: Synthetic oligonucleotide
cgcuccgcacccgaagaac

SEQ ID NO: 2593890 - RNA, 19 nt, Artificial Sequence
  Description of Artificial Sequence: Synthetic oligonucleotide
gugcaugccuccggcaauu

SEQ ID NO: 2593891 - RNA, 19 nt, Artificial Sequence
  Description of Artificial Sequence: Synthetic oligonucleotide
ccgaagaaccagugccucu

SEQ ID NO: 2593892 - RNA, 19 nt, Artificial Sequence
  Description of Artificial Sequence: Synthetic oligonucleotide
cggcaauuucuguaccaua

SEQ ID NO: 2593893 - RNA, 19 nt, Artificial Sequence
  Description of Artificial Sequence: Synthetic oligonucleotide
ggcucagcacagccccacu

SEQ ID NO: 2593894 - RNA, 19 nt, Artificial Sequence
  Description of Artificial Sequence: Synthetic oligonucleotide
ccggcaauuucuguaccau

SEQ ID NO: 2593895 - RNA, 19 nt, Artificial Sequence
  Description of Artificial Sequence: Synthetic oligonucleotide
gcaaugcugcuagcucccu

SEQ ID NO: 2593896 - RNA, 19 nt, Artificial Sequence
  Description of Artificial Sequence: Synthetic oligonucleotide
cagcuccuuuccagaugau

SEQ ID NO: 2593897 - RNA, 19 nt, Artificial Sequence
  Description of Artificial Sequence: Synthetic oligonucleotide
ccgcacccgaagaaccagu

SEQ ID NO: 2593898 - RNA, 19 nt, Artificial Sequence
  Description of Artificial Sequence: Synthetic oligonucleotide
aauagcauucuacaauugc

SEQ ID NO: 2593899 - RNA, 19 nt, Artificial Sequence
  Description of Artificial Sequence: Synthetic oligonucleotide
aacauuuacccucugggcc

SEQ ID NO: 2593900 - RNA, 19 nt, Artificial Sequence
  Description of Artificial Sequence: Synthetic oligonucleotide
agaacaaagucaaagagcc

SEQ ID NO: 2593901 - RNA, 19 nt, Artificial Sequence
  Description of Artificial Sequence: Synthetic oligonucleotide
aaauaaauagcauucuaca

SEQ ID NO: 2593902 - RNA, 19 nt, Artificial Sequence
  Description of Artificial Sequence: Synthetic oligonucleotide
aucccuacagcacagaugc

SEQ ID NO: 2593903 - RNA, 19 nt, Artificial Sequence
  Description of Artificial Sequence: Synthetic oligonucleotide
cuuaccaccacaaagguag

SEQ ID NO: 2593904 - RNA, 19 nt, Artificial Sequence
  Description of Artificial Sequence: Synthetic oligonucleotide
uguacaaacuuacagacac

SEQ ID NO: 2593905 - RNA, 19 nt, Artificial Sequence
  Description of Artificial Sequence: Synthetic oligonucleotide
auaagguuaaaaucuuucc

SEQ ID NO: 2593906 - RNA, 19 nt, Artificial Sequence
  Description of Artificial Sequence: Synthetic oligonucleotide
uuuacuguggcccaauucc

SEQ ID NO: 2593907 - RNA, 19 nt, Artificial Sequence
  Description of Artificial Sequence: Synthetic oligonucleotide
ggaaauaaaacucaaacug

SEQ ID NO: 2593908 - RNA, 19 nt, Artificial Sequence
  Description of Artificial Sequence: Synthetic oligonucleotide
auugguauuuuacuguggc

SEQ ID NO: 2593909 - RNA, 19 nt, Artificial Sequence
  Description of Artificial Sequence: Synthetic oligonucleotide
uuaagcacuagacauuagg

SEQ ID NO: 2593910 - RNA, 19 nt, Artificial Sequence
  Description of Artificial Sequence: Synthetic oligonucleotide
uuucccaucuuuaacacag

SEQ ID NO: 2593911 - RNA, 19 nt, Artificial Sequence
  Description of Artificial Sequence: Synthetic oligonucleotide
auaaaacucaaacugaggu

SEQ ID NO: 2593912 - RNA, 19 nt, Artificial Sequence
  Description of Artificial Sequence: Synthetic oligonucleotide
uagacauuaggucugagga

SEQ ID NO: 2593913 - RNA, 19 nt, Artificial Sequence
  Description of Artificial Sequence: Synthetic oligonucleotide
uuucaguaauaucugaaag

SEQ ID NO: 2593914 - RNA, 19 nt, Artificial Sequence
  Description of Artificial Sequence: Synthetic oligonucleotide
aaagagccagucuucagac

SEQ ID NO: 2593915 - RNA, 19 nt, Artificial Sequence
  Description of Artificial Sequence: Synthetic oligonucleotide
aagguuaaaaucuuuccca

SEQ ID NO: 2593916 - RNA, 19 nt, Artificial Sequence
  Description of Artificial Sequence: Synthetic oligonucleotide
agugacaacauggaaaccc

SEQ ID NO: 2593917 - RNA, 19 nt, Artificial Sequence
  Description of Artificial Sequence: Synthetic oligonucleotide
aacgaguggaaacuggcac

SEQ ID NO: 2593918 - RNA, 19 nt, Artificial Sequence
  Description of Artificial Sequence: Synthetic oligonucleotide
uaagguuaaaaucuuuccc

SEQ ID NO: 2593919 - RNA, 19 nt, Artificial Sequence
  Description of Artificial Sequence: Synthetic oligonucleotide
uauguacaaacuuacagac

SEQ ID NO: 2593920 - RNA, 19 nt, Artificial Sequence
  Description of Artificial Sequence: Synthetic oligonucleotide
ucaaaggaaauaaaacuca

SEQ ID NO: 2593921 - RNA, 19 nt, Artificial Sequence
  Description of Artificial Sequence: Synthetic oligonucleotide
uuaacacagaacaaaguca

SEQ ID NO: 2593922 - RNA, 19 nt, Artificial Sequence
  Description of Artificial Sequence: Synthetic oligonucleotide
aaagcucaugugaagagcc

SEQ ID NO: 2593923 - RNA, 19 nt, Artificial Sequence
  Description of Artificial Sequence: Synthetic oligonucleotide
aaucuuucccaucuuuaac

SEQ ID NO: 2593924 - RNA, 19 nt, Artificial Sequence
  Description of Artificial Sequence: Synthetic oligonucleotide
aagauauguacaaacuuac

SEQ ID NO: 2593925 - RNA, 19 nt, Artificial Sequence
  Description of Artificial Sequence: Synthetic oligonucleotide
aaauaaaacucaaacugag

SEQ ID NO: 2593926 - RNA, 19 nt, Artificial Sequence
  Description of Artificial Sequence: Synthetic oligonucleotide
aauaaauagcauucuacaa

SEQ ID NO: 2593927 - RNA, 19 nt, Artificial Sequence
  Description of Artificial Sequence: Synthetic oligonucleotide
aaaagaggcggggugaagc

SEQ ID NO: 2593928 - RNA, 19 nt, Artificial Sequence
  Description of Artificial Sequence: Synthetic oligonucleotide
uucaguaauaucugaaagc

SEQ ID NO: 2593929 - RNA, 19 nt, Artificial Sequence
  Description of Artificial Sequence: Synthetic oligonucleotide
aaaacgaguggaaacuggc

SEQ ID NO: 2593930 - RNA, 19 nt, Artificial Sequence
  Description of Artificial Sequence: Synthetic oligonucleotide
acagaacaaagucaaagag

SEQ ID NO: 2593931 - RNA, 19 nt, Artificial Sequence
  Description of Artificial Sequence: Synthetic oligonucleotide
cuuaauuccugcuucuccg

SEQ ID NO: 2593932 - RNA, 19 nt, Artificial Sequence
  Description of Artificial Sequence: Synthetic oligonucleotide
uaagauauguacaaacuua

SEQ ID NO: 2593933 - RNA, 19 nt, Artificial Sequence
  Description of Artificial Sequence: Synthetic oligonucleotide
auauguacaaacuuacaga

SEQ ID NO: 2593934 - RNA, 19 nt, Artificial Sequence
  Description of Artificial Sequence: Synthetic oligonucleotide
ucugaggaaucccugaacc

SEQ ID NO: 2593935 - RNA, 19 nt, Artificial Sequence
  Description of Artificial Sequence: Synthetic oligonucleotide
uaucugaaagcucauguga

SEQ ID NO: 2593936 - RNA, 19 nt, Artificial Sequence
  Description of Artificial Sequence: Synthetic oligonucleotide
auaaauagcauucuacaau

SEQ ID NO: 2593937 - RNA, 19 nt, Artificial Sequence
  Description of Artificial Sequence: Synthetic oligonucleotide
ugagguuaagauauguaca

SEQ ID NO: 2593938 - RNA, 19 nt, Artificial Sequence
  Description of Artificial Sequence: Synthetic oligonucleotide
aaagaggcggggugaagcc

SEQ ID NO: 2593939 - RNA, 19 nt, Artificial Sequence
  Description of Artificial Sequence: Synthetic oligonucleotide
aacccuuaccaccacaaag

SEQ ID NO: 2593940 - RNA, 19 nt, Artificial Sequence
  Description of Artificial Sequence: Synthetic oligonucleotide
ucaguaauaucugaaagcu

SEQ ID NO: 2593941 - RNA, 19 nt, Artificial Sequence
  Description of Artificial Sequence: Synthetic oligonucleotide
ucuccgauuaaacuggucu

SEQ ID NO: 2593942 - RNA, 19 nt, Artificial Sequence
  Description of Artificial Sequence: Synthetic oligonucleotide
aacuuacagacacaaauaa

SEQ ID NO: 2593943 - RNA, 19 nt, Artificial Sequence
  Description of Artificial Sequence: Synthetic oligonucleotide
aauaaaacucaaacugagg

SEQ ID NO: 2593944 - RNA, 19 nt, Artificial Sequence
  Description of Artificial Sequence: Synthetic oligonucleotide
agguagaaauuccucaugg

SEQ ID NO: 2593945 - RNA, 19 nt, Artificial Sequence
  Description of Artificial Sequence: Synthetic oligonucleotide
aguaauaucugaaagcuca

SEQ ID NO: 2593946 - RNA, 19 nt, Artificial Sequence
  Description of Artificial Sequence: Synthetic oligonucleotide
ucugacaucuggaagccag

SEQ ID NO: 2593947 - RNA, 19 nt, Artificial Sequence
  Description of Artificial Sequence: Synthetic oligonucleotide
uccuuuauaagguuaaaau

SEQ ID NO: 2593948 - RNA, 19 nt, Artificial Sequence
  Description of Artificial Sequence: Synthetic oligonucleotide
aggaaauaaaacucaaacu

SEQ ID NO: 2593949 - RNA, 19 nt, Artificial Sequence
  Description of Artificial Sequence: Synthetic oligonucleotide
cuuuauaagguuaaaaucu

SEQ ID NO: 2593950 - RNA, 19 nt, Artificial Sequence
  Description of Artificial Sequence: Synthetic oligonucleotide
cuugauugguauuuuacug

SEQ ID NO: 2593951 - RNA, 19 nt, Artificial Sequence
  Description of Artificial Sequence: Synthetic oligonucleotide
ugauguuccuuuauaaggu

SEQ ID NO: 2593952 - RNA, 19 nt, Artificial Sequence
  Description of Artificial Sequence: Synthetic oligonucleotide
uuaagauauguacaaacuu

SEQ ID NO: 2593953 - RNA, 19 nt, Artificial Sequence
  Description of Artificial Sequence: Synthetic oligonucleotide
agcacuagacauuaggucu

SEQ ID NO: 2593954 - RNA, 19 nt, Artificial Sequence
  Description of Artificial Sequence: Synthetic oligonucleotide
cagaacaaagucaaagagc

SEQ ID NO: 2593955 - RNA, 19 nt, Artificial Sequence
  Description of Artificial Sequence: Synthetic oligonucleotide
aguguuccagucugcaucc

SEQ ID NO: 2593956 - RNA, 19 nt, Artificial Sequence
  Description of Artificial Sequence: Synthetic oligonucleotide
ucccuuagaacccuuacca

SEQ ID NO: 2593957 - RNA, 19 nt, Artificial Sequence
  Description of Artificial Sequence: Synthetic oligonucleotide
accacaaagguagaaauuc

SEQ ID NO: 2593958 - RNA, 19 nt, Artificial Sequence
  Description of Artificial Sequence: Synthetic oligonucleotide
aagucaaagagccagucuu

SEQ ID NO: 2593959 - RNA, 19 nt, Artificial Sequence
  Description of Artificial Sequence: Synthetic oligonucleotide
uuucuaguaaguuuacuaa

SEQ ID NO: 2593960 - RNA, 19 nt, Artificial Sequence
  Description of Artificial Sequence: Synthetic oligonucleotide
ugguauuuuacuguggccc

SEQ ID NO: 2593961 - RNA, 19 nt, Artificial Sequence
  Description of Artificial Sequence: Synthetic oligonucleotide
aacauggaaacccaagcau

SEQ ID NO: 2593962 - RNA, 19 nt, Artificial Sequence
  Description of Artificial Sequence: Synthetic oligonucleotide
cugagguuaagauauguac

SEQ ID NO: 2593963 - RNA, 19 nt, Artificial Sequence
  Description of Artificial Sequence: Synthetic oligonucleotide
uaagcacuagacauuaggu

SEQ ID NO: 2593964 - RNA, 19 nt, Artificial Sequence
  Description of Artificial Sequence: Synthetic oligonucleotide
ugcuucuccgauuaaacug

SEQ ID NO: 2593965 - RNA, 19 nt, Artificial Sequence
  Description of Artificial Sequence: Synthetic oligonucleotide
uaaauagcauucuacaauu

SEQ ID NO: 2593966 - RNA, 19 nt, Artificial Sequence
  Description of Artificial Sequence: Synthetic oligonucleotide
caccaaagaaaucagcugc

SEQ ID NO: 2593967 - RNA, 19 nt, Artificial Sequence
  Description of Artificial Sequence: Synthetic oligonucleotide
acaauugcuggcuuaagca

SEQ ID NO: 2593968 - RNA, 19 nt, Artificial Sequence
  Description of Artificial Sequence: Synthetic oligonucleotide
ugcagugacaacauggaaa

SEQ ID NO: 2593969 - RNA, 19 nt, Artificial Sequence
  Description of Artificial Sequence: Synthetic oligonucleotide
uacaauugcuggcuuaagc

SEQ ID NO: 2593970 - RNA, 19 nt, Artificial Sequence
  Description of Artificial Sequence: Synthetic oligonucleotide
agcauucuacaauugcugg

SEQ ID NO: 2593971 - RNA, 19 nt, Artificial Sequence
  Description of Artificial Sequence: Synthetic oligonucleotide
gauuaaacuggucucccug

SEQ ID NO: 2593972 - RNA, 19 nt, Artificial Sequence
  Description of Artificial Sequence: Synthetic oligonucleotide
uagaaauuccucaugguuu

SEQ ID NO: 2593973 - RNA, 19 nt, Artificial Sequence
  Description of Artificial Sequence: Synthetic oligonucleotide
cuagacauuaggucugagg

SEQ ID NO: 2593974 - RNA, 19 nt, Artificial Sequence
  Description of Artificial Sequence: Synthetic oligonucleotide
uugauugguauuuuacugu

SEQ ID NO: 2593975 - RNA, 19 nt, Artificial Sequence
  Description of Artificial Sequence: Synthetic oligonucleotide
aaaucuuucccaucuuuaa

SEQ ID NO: 2593976 - RNA, 19 nt, Artificial Sequence
  Description of Artificial Sequence: Synthetic oligonucleotide
uguaguugaucccuacagc

SEQ ID NO: 2593977 - RNA, 19 nt, Artificial Sequence
  Description of Artificial Sequence: Synthetic oligonucleotide
gaaauaaaacucaaacuga

SEQ ID NO: 2593978 - RNA, 19 nt, Artificial Sequence
  Description of Artificial Sequence: Synthetic oligonucleotide
ugaaagcucaugugaagag

SEQ ID NO: 2593979 - RNA, 19 nt, Artificial Sequence
  Description of Artificial Sequence: Synthetic oligonucleotide
ugauugguauuuuacugug

SEQ ID NO: 2593980 - RNA, 19 nt, Artificial Sequence
  Description of Artificial Sequence: Synthetic oligonucleotide
uagcauucuacaauugcug

SEQ ID NO: 2593981 - RNA, 19 nt, Artificial Sequence
  Description of Artificial Sequence: Synthetic oligonucleotide
auggcuuaauuccugcuuc

SEQ ID NO: 2593982 - RNA, 19 nt, Artificial Sequence
  Description of Artificial Sequence: Synthetic oligonucleotide
acgaguggaaacuggcacc

SEQ ID NO: 2593983 - RNA, 19 nt, Artificial Sequence
  Description of Artificial Sequence: Synthetic oligonucleotide
aucuuucccaucuuuaaca

SEQ ID NO: 2593984 - RNA, 19 nt, Artificial Sequence
  Description of Artificial Sequence: Synthetic oligonucleotide
ggagugauggcuuaauucc

SEQ ID NO: 2593985 - RNA, 19 nt, Artificial Sequence
  Description of Artificial Sequence: Synthetic oligonucleotide
caagauuccugggagaagg

SEQ ID NO: 2593986 - RNA, 19 nt, Artificial Sequence
  Description of Artificial Sequence: Synthetic oligonucleotide
aagguagaaauuccucaug

SEQ ID NO: 2593987 - RNA, 19 nt, Artificial Sequence
  Description of Artificial Sequence: Synthetic oligonucleotide
acacagaacaaagucaaag

SEQ ID NO: 2593988 - RNA, 19 nt, Artificial Sequence
  Description of Artificial Sequence: Synthetic oligonucleotide
agagaaaggagaaaacgag

SEQ ID NO: 2593989 - RNA, 19 nt, Artificial Sequence
  Description of Artificial Sequence: Synthetic oligonucleotide
acuugauugguauuuuacu

SEQ ID NO: 2593990 - RNA, 19 nt, Artificial Sequence
  Description of Artificial Sequence: Synthetic oligonucleotide
acuggcaccaaagaaauca

SEQ ID NO: 2593991 - RNA, 19 nt, Artificial Sequence
  Description of Artificial Sequence: Synthetic oligonucleotide
gaacauuuacccucugggc

SEQ ID NO: 2593992 - RNA, 19 nt, Artificial Sequence
  Description of Artificial Sequence: Synthetic oligonucleotide
aagagccagaaguuucuag

SEQ ID NO: 2593993 - RNA, 19 nt, Artificial Sequence
  Description of Artificial Sequence: Synthetic oligonucleotide
gagaaaauggcaagauucc

SEQ ID NO: 2593994 - RNA, 19 nt, Artificial Sequence
  Description of Artificial Sequence: Synthetic oligonucleotide
agaaaggagaaaacgagug

SEQ ID NO: 2593995 - RNA, 19 nt, Artificial Sequence
  Description of Artificial Sequence: Synthetic oligonucleotide
ucugaaagcucaugugaag

SEQ ID NO: 2593996 - RNA, 19 nt, Artificial Sequence
  Description of Artificial Sequence: Synthetic oligonucleotide
uggcuuaagcacuagacau

SEQ ID NO: 2593997 - RNA, 19 nt, Artificial Sequence
  Description of Artificial Sequence: Synthetic oligonucleotide
gguuaagauauguacaaac

SEQ ID NO: 2593998 - RNA, 19 nt, Artificial Sequence
  Description of Artificial Sequence: Synthetic oligonucleotide
uuacagacacaaauaaaua

SEQ ID NO: 2593999 - RNA, 19 nt, Artificial Sequence
  Description of Artificial Sequence: Synthetic oligonucleotide
gaagccaggagaaaauggc

SEQ ID NO: 2594000 - RNA, 19 nt, Artificial Sequence
  Description of Artificial Sequence: Synthetic oligonucleotide
gaaaacgaguggaaacugg

SEQ ID NO: 2594001 - RNA, 19 nt, Artificial Sequence
  Description of Artificial Sequence: Synthetic oligonucleotide
caauuccugacccugcagg

SEQ ID NO: 2594002 - RNA, 19 nt, Artificial Sequence
  Description of Artificial Sequence: Synthetic oligonucleotide
auggcaagauuccugggag

SEQ ID NO: 2594003 - RNA, 19 nt, Artificial Sequence
  Description of Artificial Sequence: Synthetic oligonucleotide
cuguaguugaucccuacag

SEQ ID NO: 2594004 - RNA, 19 nt, Artificial Sequence
  Description of Artificial Sequence: Synthetic oligonucleotide
guaguugaucccuacagca

SEQ ID NO: 2594005 - RNA, 19 nt, Artificial Sequence
  Description of Artificial Sequence: Synthetic oligonucleotide
aauuccugacccugcagga

SEQ ID NO: 2594006 - RNA, 19 nt, Artificial Sequence
  Description of Artificial Sequence: Synthetic oligonucleotide
cuuacagacacaaauaaau

SEQ ID NO: 2594007 - RNA, 19 nt, Artificial Sequence
  Description of Artificial Sequence: Synthetic oligonucleotide
uuccucaugguuuucagua

SEQ ID NO: 2594008 - RNA, 19 nt, Artificial Sequence
  Description of Artificial Sequence: Synthetic oligonucleotide
agagccagaaguuucuagu

SEQ ID NO: 2594009 - RNA, 19 nt, Artificial Sequence
  Description of Artificial Sequence: Synthetic oligonucleotide
gagguuaagauauguacaa

SEQ ID NO: 2594010 - RNA, 19 nt, Artificial Sequence
  Description of Artificial Sequence: Synthetic oligonucleotide
uuaggucugaggaaucccu

SEQ ID NO: 2594011 - RNA, 19 nt, Artificial Sequence
  Description of Artificial Sequence: Synthetic oligonucleotide
caaacugagguuaagauau

SEQ ID NO: 2594012 - RNA, 19 nt, Artificial Sequence
  Description of Artificial Sequence: Synthetic oligonucleotide
auuaggucugaggaauccc

SEQ ID NO: 2594013 - RNA, 19 nt, Artificial Sequence
  Description of Artificial Sequence: Synthetic oligonucleotide
ccaucuuuaacacagaaca

SEQ ID NO: 2594014 - RNA, 19 nt, Artificial Sequence
  Description of Artificial Sequence: Synthetic oligonucleotide
gaaaucagcugccauggga

SEQ ID NO: 2594015 - RNA, 19 nt, Artificial Sequence
  Description of Artificial Sequence: Synthetic oligonucleotide
uccacucugagcuccagca

SEQ ID NO: 2594016 - RNA, 19 nt, Artificial Sequence
  Description of Artificial Sequence: Synthetic oligonucleotide
gauuccugggagaagggag

SEQ ID NO: 2594017 - RNA, 19 nt, Artificial Sequence
  Description of Artificial Sequence: Synthetic oligonucleotide
guuucuaguaaguuuacua

SEQ ID NO: 2594018 - RNA, 19 nt, Artificial Sequence
  Description of Artificial Sequence: Synthetic oligonucleotide
uaaaacucaaacugagguu

SEQ ID NO: 2594019 - RNA, 19 nt, Artificial Sequence
  Description of Artificial Sequence: Synthetic oligonucleotide
aguugaucccuacagcaca

SEQ ID NO: 2594020 - RNA, 19 nt, Artificial Sequence
  Description of Artificial Sequence: Synthetic oligonucleotide
ugggccagcaaaagaggcg

SEQ ID NO: 2594021 - RNA, 19 nt, Artificial Sequence
  Description of Artificial Sequence: Synthetic oligonucleotide
ggagaaaauggcaagauuc

SEQ ID NO: 2594022 - RNA, 19 nt, Artificial Sequence
  Description of Artificial Sequence: Synthetic oligonucleotide
uuuuacuguggcccaauuc

SEQ ID NO: 2594023 - RNA, 19 nt, Artificial Sequence
  Description of Artificial Sequence: Synthetic oligonucleotide
uucccuuagaacccuuacc

SEQ ID NO: 2594024 - RNA, 19 nt, Artificial Sequence
  Description of Artificial Sequence: Synthetic oligonucleotide
acaaauaaauagcauucua

SEQ ID NO: 2594025 - RNA, 19 nt, Artificial Sequence
  Description of Artificial Sequence: Synthetic oligonucleotide
cagacacaaauaaauagca

SEQ ID NO: 2594026 - RNA, 19 nt, Artificial Sequence
  Description of Artificial Sequence: Synthetic oligonucleotide
acagaugcacgugcaaacc

SEQ ID NO: 2594027 - RNA, 19 nt, Artificial Sequence
  Description of Artificial Sequence: Synthetic oligonucleotide
aaacuggucucccugugau

SEQ ID NO: 2594028 - RNA, 19 nt, Artificial Sequence
  Description of Artificial Sequence: Synthetic oligonucleotide
acaaagguagaaauuccuc

SEQ ID NO: 2594029 - RNA, 19 nt, Artificial Sequence
  Description of Artificial Sequence: Synthetic oligonucleotide
uuaaacuggucucccugug

SEQ ID NO: 2594030 - RNA, 19 nt, Artificial Sequence
  Description of Artificial Sequence: Synthetic oligonucleotide
acugcaaugcagugacaac

SEQ ID NO: 2594031 - RNA, 19 nt, Artificial Sequence
  Description of Artificial Sequence: Synthetic oligonucleotide
auuaaacuggucucccugu

SEQ ID NO: 2594032 - RNA, 19 nt, Artificial Sequence
  Description of Artificial Sequence: Synthetic oligonucleotide
acccuuaccaccacaaagg

SEQ ID NO: 2594033 - RNA, 19 nt, Artificial Sequence
  Description of Artificial Sequence: Synthetic oligonucleotide
cuuccuucccuuagaaccc

SEQ ID NO: 2594034 - RNA, 19 nt, Artificial Sequence
  Description of Artificial Sequence: Synthetic oligonucleotide
ucuguaguugaucccuaca

SEQ ID NO: 2594035 - RNA, 19 nt, Artificial Sequence
  Description of Artificial Sequence: Synthetic oligonucleotide
cuuagaacccuuaccacca

SEQ ID NO: 2594036 - RNA, 19 nt, Artificial Sequence
  Description of Artificial Sequence: Synthetic oligonucleotide
aaucagcugccaugggaag

SEQ ID NO: 2594037 - RNA, 19 nt, Artificial Sequence
  Description of Artificial Sequence: Synthetic oligonucleotide
uggaaacuggcaccaaaga

SEQ ID NO: 2594038 - RNA, 19 nt, Artificial Sequence
  Description of Artificial Sequence: Synthetic oligonucleotide
acauuuacccucugggcca

SEQ ID NO: 2594039 - RNA, 19 nt, Artificial Sequence
  Description of Artificial Sequence: Synthetic oligonucleotide
caauugcuggcuuaagcac

SEQ ID NO: 2594040 - RNA, 19 nt, Artificial Sequence
  Description of Artificial Sequence: Synthetic oligonucleotide
gacaacauggaaacccaag

SEQ ID NO: 2594041 - RNA, 19 nt, Artificial Sequence
  Description of Artificial Sequence: Synthetic oligonucleotide
ccuuuauaagguuaaaauc

SEQ ID NO: 2594042 - RNA, 19 nt, Artificial Sequence
  Description of Artificial Sequence: Synthetic oligonucleotide
aauugcuggcuuaagcacu

SEQ ID NO: 2594043 - RNA, 19 nt, Artificial Sequence
  Description of Artificial Sequence: Synthetic oligonucleotide
aaaucagcugccaugggaa

SEQ ID NO: 2594044 - RNA, 19 nt, Artificial Sequence
  Description of Artificial Sequence: Synthetic oligonucleotide
uuauaagguuaaaaucuuu

SEQ ID NO: 2594045 - RNA, 19 nt, Artificial Sequence
  Description of Artificial Sequence: Synthetic oligonucleotide
gauugguauuuuacugugg

SEQ ID NO: 2594046 - RNA, 19 nt, Artificial Sequence
  Description of Artificial Sequence: Synthetic oligonucleotide
aaacuuacagacacaaaua

SEQ ID NO: 2594047 - RNA, 19 nt, Artificial Sequence
  Description of Artificial Sequence: Synthetic oligonucleotide
auagcauucuacaauugcu

SEQ ID NO: 2594048 - RNA, 19 nt, Artificial Sequence
  Description of Artificial Sequence: Synthetic oligonucleotide
uggaaacccaagcaucugu

SEQ ID NO: 2594049 - RNA, 19 nt, Artificial Sequence
  Description of Artificial Sequence: Synthetic oligonucleotide
uugguauuuuacuguggcc

SEQ ID NO: 2594050 - RNA, 19 nt, Artificial Sequence
  Description of Artificial Sequence: Synthetic oligonucleotide
aaacuggcaccaaagaaau

SEQ ID NO: 2594051 - RNA, 19 nt, Artificial Sequence
  Description of Artificial Sequence: Synthetic oligonucleotide
cacgugcaaaccuugcugc

SEQ ID NO: 2594052 - RNA, 19 nt, Artificial Sequence
  Description of Artificial Sequence: Synthetic oligonucleotide
ugaggaaucccugaacccu

SEQ ID NO: 2594053 - RNA, 19 nt, Artificial Sequence
  Description of Artificial Sequence: Synthetic oligonucleotide
aaguuucuaguaaguuuac

SEQ ID NO: 2594054 - RNA, 19 nt, Artificial Sequence
  Description of Artificial Sequence: Synthetic oligonucleotide
agaaauuccucaugguuuu

SEQ ID NO: 2594055 - RNA, 19 nt, Artificial Sequence
  Description of Artificial Sequence: Synthetic oligonucleotide
ugccaugggaagaacauuu

SEQ ID NO: 2594056 - RNA, 19 nt, Artificial Sequence
  Description of Artificial Sequence: Synthetic oligonucleotide
gacuugauugguauuuuac

SEQ ID NO: 2594057 - RNA, 19 nt, Artificial Sequence
  Description of Artificial Sequence: Synthetic oligonucleotide
uccgauuaaacuggucucc

SEQ ID NO: 2594058 - RNA, 19 nt, Artificial Sequence
  Description of Artificial Sequence: Synthetic oligonucleotide
aaucccugaacccuuccuu

SEQ ID NO: 2594059 - RNA, 19 nt, Artificial Sequence
  Description of Artificial Sequence: Synthetic oligonucleotide
uaaacuggucucccuguga

SEQ ID NO: 2594060 - RNA, 19 nt, Artificial Sequence
  Description of Artificial Sequence: Synthetic oligonucleotide
ggagaaaacgaguggaaac

SEQ ID NO: 2594061 - RNA, 19 nt, Artificial Sequence
  Description of Artificial Sequence: Synthetic oligonucleotide
uuaauuccugcuucuccga

SEQ ID NO: 2594062 - RNA, 19 nt, Artificial Sequence
  Description of Artificial Sequence: Synthetic oligonucleotide
aacugagguuaagauaugu

SEQ ID NO: 2594063 - RNA, 19 nt, Artificial Sequence
  Description of Artificial Sequence: Synthetic oligonucleotide
aaauagcauucuacaauug

SEQ ID NO: 2594064 - RNA, 19 nt, Artificial Sequence
  Description of Artificial Sequence: Synthetic oligonucleotide
uaauaucugaaagcucaug

SEQ ID NO: 2594065 - RNA, 19 nt, Artificial Sequence
  Description of Artificial Sequence: Synthetic oligonucleotide
gggaagaacauuuacccuc

SEQ ID NO: 2594066 - RNA, 19 nt, Artificial Sequence
  Description of Artificial Sequence: Synthetic oligonucleotide
gcagugacaacauggaaac

SEQ ID NO: 2594067 - RNA, 19 nt, Artificial Sequence
  Description of Artificial Sequence: Synthetic oligonucleotide
ucuacaauugcuggcuuaa

SEQ ID NO: 2594068 - RNA, 19 nt, Artificial Sequence
  Description of Artificial Sequence: Synthetic oligonucleotide
aagaggcggggugaagccc

SEQ ID NO: 2594069 - RNA, 19 nt, Artificial Sequence
  Description of Artificial Sequence: Synthetic oligonucleotide
uuacuguggcccaauuccu

SEQ ID NO: 2594070 - RNA, 19 nt, Artificial Sequence
  Description of Artificial Sequence: Synthetic oligonucleotide
ugcaaaccuugcugcaagg

SEQ ID NO: 2594071 - RNA, 19 nt, Artificial Sequence
  Description of Artificial Sequence: Synthetic oligonucleotide
cacagaugcacgugcaaac

SEQ ID NO: 2594072 - RNA, 19 nt, Artificial Sequence
  Description of Artificial Sequence: Synthetic oligonucleotide
caguguuccagucugcauc

SEQ ID NO: 2594073 - RNA, 19 nt, Artificial Sequence
  Description of Artificial Sequence: Synthetic oligonucleotide
ugggaagaacauuuacccu

SEQ ID NO: 2594074 - RNA, 19 nt, Artificial Sequence
  Description of Artificial Sequence: Synthetic oligonucleotide
ccuuagaacccuuaccacc

SEQ ID NO: 2594075 - RNA, 19 nt, Artificial Sequence
  Description of Artificial Sequence: Synthetic oligonucleotide
uguggcccaauuccugacc

SEQ ID NO: 2594076 - RNA, 19 nt, Artificial Sequence
  Description of Artificial Sequence: Synthetic oligonucleotide
agaaaacgaguggaaacug

SEQ ID NO: 2594077 - RNA, 19 nt, Artificial Sequence
  Description of Artificial Sequence: Synthetic oligonucleotide
acuggucucccugugaugu

SEQ ID NO: 2594078 - RNA, 19 nt, Artificial Sequence
  Description of Artificial Sequence: Synthetic oligonucleotide
ucccaucuuuaacacagaa

SEQ ID NO: 2594079 - RNA, 19 nt, Artificial Sequence
  Description of Artificial Sequence: Synthetic oligonucleotide
agaaaauggcaagauuccu

SEQ ID NO: 2594080 - RNA, 19 nt, Artificial Sequence
  Description of Artificial Sequence: Synthetic oligonucleotide
cauuaggucugaggaaucc

SEQ ID NO: 2594081 - RNA, 19 nt, Artificial Sequence
  Description of Artificial Sequence: Synthetic oligonucleotide
ugcacgugcaaaccuugcu

SEQ ID NO: 2594082 - RNA, 19 nt, Artificial Sequence
  Description of Artificial Sequence: Synthetic oligonucleotide
gcuucuccgauuaaacugg

SEQ ID NO: 2594083 - RNA, 19 nt, Artificial Sequence
  Description of Artificial Sequence: Synthetic oligonucleotide
guggaaacuggcaccaaag

SEQ ID NO: 2594084 - RNA, 19 nt, Artificial Sequence
  Description of Artificial Sequence: Synthetic oligonucleotide
gaagcccagucucuccucc

SEQ ID NO: 2594085 - RNA, 19 nt, Artificial Sequence
  Description of Artificial Sequence: Synthetic oligonucleotide
ugaucccuacagcacagau

SEQ ID NO: 2594086 - RNA, 19 nt, Artificial Sequence
  Description of Artificial Sequence: Synthetic oligonucleotide
cuccgauuaaacuggucuc

SEQ ID NO: 2594087 - RNA, 19 nt, Artificial Sequence
  Description of Artificial Sequence: Synthetic oligonucleotide
gugcaaaccuugcugcaag

SEQ ID NO: 2594088 - RNA, 19 nt, Artificial Sequence
  Description of Artificial Sequence: Synthetic oligonucleotide
gaucccuacagcacagaug

SEQ ID NO: 2594089 - RNA, 19 nt, Artificial Sequence
  Description of Artificial Sequence: Synthetic oligonucleotide
aaacgaguggaaacuggca

SEQ ID NO: 2594090 - RNA, 19 nt, Artificial Sequence
  Description of Artificial Sequence: Synthetic oligonucleotide
caacauggaaacccaagca

SEQ ID NO: 2594091 - RNA, 19 nt, Artificial Sequence
  Description of Artificial Sequence: Synthetic oligonucleotide
aaccuugcugcaaggccac

SEQ ID NO: 2594092 - RNA, 19 nt, Artificial Sequence
  Description of Artificial Sequence: Synthetic oligonucleotide
gugauggcuuaauuccugc

SEQ ID NO: 2594093 - RNA, 19 nt, Artificial Sequence
  Description of Artificial Sequence: Synthetic oligonucleotide
gcuuaauuccugcuucucc

SEQ ID NO: 2594094 - RNA, 19 nt, Artificial Sequence
  Description of Artificial Sequence: Synthetic oligonucleotide
aguggaaacuggcaccaaa

SEQ ID NO: 2594095 - RNA, 19 nt, Artificial Sequence
  Description of Artificial Sequence: Synthetic oligonucleotide
agacauuaggucugaggaa

SEQ ID NO: 2594096 - RNA, 19 nt, Artificial Sequence
  Description of Artificial Sequence: Synthetic oligonucleotide
gagaaaacgaguggaaacu

SEQ ID NO: 2594097 - RNA, 19 nt, Artificial Sequence
  Description of Artificial Sequence: Synthetic oligonucleotide
aacuggucucccugugaug

SEQ ID NO: 2594098 - RNA, 19 nt, Artificial Sequence
  Description of Artificial Sequence: Synthetic oligonucleotide
aagccaggagaaaauggca

SEQ ID NO: 2594099 - RNA, 19 nt, Artificial Sequence
  Description of Artificial Sequence: Synthetic oligonucleotide
gaugcacgugcaaaccuug

SEQ ID NO: 2594100 - RNA, 19 nt, Artificial Sequence
  Description of Artificial Sequence: Synthetic oligonucleotide
cccucugacaucuggaagc

SEQ ID NO: 2594101 - RNA, 19 nt, Artificial Sequence
  Description of Artificial Sequence: Synthetic oligonucleotide
uagaacccuuaccaccaca

SEQ ID NO: 2594102 - RNA, 19 nt, Artificial Sequence
  Description of Artificial Sequence: Synthetic oligonucleotide
cuuaagcacuagacauuag

SEQ ID NO: 2594103 - RNA, 19 nt, Artificial Sequence
  Description of Artificial Sequence: Synthetic oligonucleotide
uuccugacccugcaggaau

SEQ ID NO: 2594104 - RNA, 19 nt, Artificial Sequence
  Description of Artificial Sequence: Synthetic oligonucleotide
cuucccuuagaacccuuac

SEQ ID NO: 2594105 - RNA, 19 nt, Artificial Sequence
  Description of Artificial Sequence: Synthetic oligonucleotide
agcucaugugaagagccag

SEQ ID NO: 2594106 - RNA, 19 nt, Artificial Sequence
  Description of Artificial Sequence: Synthetic oligonucleotide
cuggcuuaagcacuagaca

SEQ ID NO: 2594107 - RNA, 19 nt, Artificial Sequence
  Description of Artificial Sequence: Synthetic oligonucleotide
guagaaauuccucaugguu

SEQ ID NO: 2594108 - RNA, 19 nt, Artificial Sequence
  Description of Artificial Sequence: Synthetic oligonucleotide
aaggagaaaacgaguggaa

SEQ ID NO: 2594109 - RNA, 19 nt, Artificial Sequence
  Description of Artificial Sequence: Synthetic oligonucleotide
ccuacagcacagaugcacg

SEQ ID NO: 2594110 - RNA, 19 nt, Artificial Sequence
  Description of Artificial Sequence: Synthetic oligonucleotide
aggagaaaauggcaagauu

SEQ ID NO: 2594111 - RNA, 19 nt, Artificial Sequence
  Description of Artificial Sequence: Synthetic oligonucleotide
agccagaaguuucuaguaa

SEQ ID NO: 2594112 - RNA, 19 nt, Artificial Sequence
  Description of Artificial Sequence: Synthetic oligonucleotide
guggcccaauuccugaccc

SEQ ID NO: 2594113 - RNA, 19 nt, Artificial Sequence
  Description of Artificial Sequence: Synthetic oligonucleotide
uucuacaauugcuggcuua

SEQ ID NO: 2594114 - RNA, 19 nt, Artificial Sequence
  Description of Artificial Sequence: Synthetic oligonucleotide
ugacaacauggaaacccaa

SEQ ID NO: 2594115 - RNA, 19 nt, Artificial Sequence
  Description of Artificial Sequence: Synthetic oligonucleotide
gcauucuacaauugcuggc

SEQ ID NO: 2594116 - RNA, 19 nt, Artificial Sequence
  Description of Artificial Sequence: Synthetic oligonucleotide
ugcuggcuuaagcacuaga

SEQ ID NO: 2594117 - RNA, 19 nt, Artificial Sequence
  Description of Artificial Sequence: Synthetic oligonucleotide
uacagcacagaugcacgug

SEQ ID NO: 2594118 - RNA, 19 nt, Artificial Sequence
  Description of Artificial Sequence: Synthetic oligonucleotide
agauauguacaaacuuaca

SEQ ID NO: 2594119 - RNA, 19 nt, Artificial Sequence
  Description of Artificial Sequence: Synthetic oligonucleotide
caaagucaaagagccaguc

SEQ ID NO: 2594120 - RNA, 19 nt, Artificial Sequence
  Description of Artificial Sequence: Synthetic oligonucleotide
cugaaagcucaugugaaga

SEQ ID NO: 2594121 - RNA, 19 nt, Artificial Sequence
  Description of Artificial Sequence: Synthetic oligonucleotide
guugaucccuacagcacag

SEQ ID NO: 2594122 - RNA, 19 nt, Artificial Sequence
  Description of Artificial Sequence: Synthetic oligonucleotide
uuagaacccuuaccaccac

SEQ ID NO: 2594123 - RNA, 19 nt, Artificial Sequence
  Description of Artificial Sequence: Synthetic oligonucleotide
agcccagucucuccuccac

SEQ ID NO: 2594124 - RNA, 19 nt, Artificial Sequence
  Description of Artificial Sequence: Synthetic oligonucleotide
gacauuaggucugaggaau

SEQ ID NO: 2594125 - RNA, 19 nt, Artificial Sequence
  Description of Artificial Sequence: Synthetic oligonucleotide
aguuucuaguaaguuuacu

SEQ ID NO: 2594126 - RNA, 19 nt, Artificial Sequence
  Description of Artificial Sequence: Synthetic oligonucleotide
ggaaacuggcaccaaagaa

SEQ ID NO: 2594127 - RNA, 19 nt, Artificial Sequence
  Description of Artificial Sequence: Synthetic oligonucleotide
uccucaugguuuucaguaa

SEQ ID NO: 2594128 - RNA, 19 nt, Artificial Sequence
  Description of Artificial Sequence: Synthetic oligonucleotide
ucagcugccaugggaagaa

SEQ ID NO: 2594129 - RNA, 19 nt, Artificial Sequence
  Description of Artificial Sequence: Synthetic oligonucleotide
cuuuaacacagaacaaagu

SEQ ID NO: 2594130 - RNA, 19 nt, Artificial Sequence
  Description of Artificial Sequence: Synthetic oligonucleotide
cugugauguuccuuuauaa

SEQ ID NO: 2594131 - RNA, 19 nt, Artificial Sequence
  Description of Artificial Sequence: Synthetic oligonucleotide
ucuucccagucuguaguug

SEQ ID NO: 2594132 - RNA, 19 nt, Artificial Sequence
  Description of Artificial Sequence: Synthetic oligonucleotide
gguauuuuacuguggccca

SEQ ID NO: 2594133 - RNA, 19 nt, Artificial Sequence
  Description of Artificial Sequence: Synthetic oligonucleotide
cagcaaaagaggcggggug

SEQ ID NO: 2594134 - RNA, 19 nt, Artificial Sequence
  Description of Artificial Sequence: Synthetic oligonucleotide
gaagaacauuuacccucug

SEQ ID NO: 2594135 - RNA, 19 nt, Artificial Sequence
  Description of Artificial Sequence: Synthetic oligonucleotide
uccagucugcauccaggac

SEQ ID NO: 2594136 - RNA, 19 nt, Artificial Sequence
  Description of Artificial Sequence: Synthetic oligonucleotide
gagaaaggagaaaacgagu

SEQ ID NO: 2594137 - RNA, 19 nt, Artificial Sequence
  Description of Artificial Sequence: Synthetic oligonucleotide
aucugaaagcucaugugaa

SEQ ID NO: 2594138 - RNA, 19 nt, Artificial Sequence
  Description of Artificial Sequence: Synthetic oligonucleotide
gguuuucaguaauaucuga

SEQ ID NO: 2594139 - RNA, 19 nt, Artificial Sequence
  Description of Artificial Sequence: Synthetic oligonucleotide
aggagaaaacgaguggaaa

SEQ ID NO: 2594140 - RNA, 19 nt, Artificial Sequence
  Description of Artificial Sequence: Synthetic oligonucleotide
cuucccagucuguaguuga

SEQ ID NO: 2594141 - RNA, 19 nt, Artificial Sequence
  Description of Artificial Sequence: Synthetic oligonucleotide
caucuuuaacacagaacaa

SEQ ID NO: 2594142 - RNA, 19 nt, Artificial Sequence
  Description of Artificial Sequence: Synthetic oligonucleotide
acauuaggucugaggaauc

SEQ ID NO: 2594143 - RNA, 19 nt, Artificial Sequence
  Description of Artificial Sequence: Synthetic oligonucleotide
uuaccaccacaaagguaga

SEQ ID NO: 2594144 - RNA, 19 nt, Artificial Sequence
  Description of Artificial Sequence: Synthetic oligonucleotide
agacuugauugguauuuua

SEQ ID NO: 2594145 - RNA, 19 nt, Artificial Sequence
  Description of Artificial Sequence: Synthetic oligonucleotide
gggccagcaaaagaggcgg

SEQ ID NO: 2594146 - RNA, 19 nt, Artificial Sequence
  Description of Artificial Sequence: Synthetic oligonucleotide
uggcaagauuccugggaga

SEQ ID NO: 2594147 - RNA, 19 nt, Artificial Sequence
  Description of Artificial Sequence: Synthetic oligonucleotide
gucugaggaaucccugaac

SEQ ID NO: 2594148 - RNA, 19 nt, Artificial Sequence
  Description of Artificial Sequence: Synthetic oligonucleotide
uucccaucuuuaacacaga

SEQ ID NO: 2594149 - RNA, 19 nt, Artificial Sequence
  Description of Artificial Sequence: Synthetic oligonucleotide
uauuuuacuguggcccaau

SEQ ID NO: 2594150 - RNA, 19 nt, Artificial Sequence
  Description of Artificial Sequence: Synthetic oligonucleotide
aacuggcaccaaagaaauc

SEQ ID NO: 2594151 - RNA, 19 nt, Artificial Sequence
  Description of Artificial Sequence: Synthetic oligonucleotide
gagccagaaguuucuagua

SEQ ID NO: 2594152 - RNA, 19 nt, Artificial Sequence
  Description of Artificial Sequence: Synthetic oligonucleotide
cacaaagguagaaauuccu

SEQ ID NO: 2594153 - RNA, 19 nt, Artificial Sequence
  Description of Artificial Sequence: Synthetic oligonucleotide
gauggcuuaauuccugcuu

SEQ ID NO: 2594154 - RNA, 19 nt, Artificial Sequence
  Description of Artificial Sequence: Synthetic oligonucleotide
uuuacccucugggccagca

SEQ ID NO: 2594155 - RNA, 19 nt, Artificial Sequence
  Description of Artificial Sequence: Synthetic oligonucleotide
gcacgugcaaaccuugcug

SEQ ID NO: 2594156 - RNA, 19 nt, Artificial Sequence
  Description of Artificial Sequence: Synthetic oligonucleotide
auguacaaacuuacagaca

SEQ ID NO: 2594157 - RNA, 19 nt, Artificial Sequence
  Description of Artificial Sequence: Synthetic oligonucleotide
cugcaggaaucuucuuccc

SEQ ID NO: 2594158 - RNA, 19 nt, Artificial Sequence
  Description of Artificial Sequence: Synthetic oligonucleotide
augcacgugcaaaccuugc

SEQ ID NO: 2594159 - RNA, 19 nt, Artificial Sequence
  Description of Artificial Sequence: Synthetic oligonucleotide
ccugcuucuccgauuaaac

SEQ ID NO: 2594160 - RNA, 19 nt, Artificial Sequence
  Description of Artificial Sequence: Synthetic oligonucleotide
agaacccuuaccaccacaa

SEQ ID NO: 2594161 - RNA, 19 nt, Artificial Sequence
  Description of Artificial Sequence: Synthetic oligonucleotide
auuccugggagaagggagu

SEQ ID NO: 2594162 - RNA, 19 nt, Artificial Sequence
  Description of Artificial Sequence: Synthetic oligonucleotide
uucuccgauuaaacugguc

SEQ ID NO: 2594163 - RNA, 19 nt, Artificial Sequence
  Description of Artificial Sequence: Synthetic oligonucleotide
auuuuacuguggcccaauu

SEQ ID NO: 2594164 - RNA, 19 nt, Artificial Sequence
  Description of Artificial Sequence: Synthetic oligonucleotide
cauucuacaauugcuggcu

SEQ ID NO: 2594165 - RNA, 19 nt, Artificial Sequence
  Description of Artificial Sequence: Synthetic oligonucleotide
augcagugacaacauggaa

SEQ ID NO: 2594166 - RNA, 19 nt, Artificial Sequence
  Description of Artificial Sequence: Synthetic oligonucleotide
gucuguaguugaucccuac

SEQ ID NO: 2594167 - RNA, 19 nt, Artificial Sequence
  Description of Artificial Sequence: Synthetic oligonucleotide
aagcccagucucuccucca

SEQ ID NO: 2594168 - RNA, 19 nt, Artificial Sequence
  Description of Artificial Sequence: Synthetic oligonucleotide
aagggagugauggcuuaau

SEQ ID NO: 2594169 - RNA, 19 nt, Artificial Sequence
  Description of Artificial Sequence: Synthetic oligonucleotide
aacacagaacaaagucaaa

SEQ ID NO: 2594170 - RNA, 19 nt, Artificial Sequence
  Description of Artificial Sequence: Synthetic oligonucleotide
aagcucaugugaagagcca

SEQ ID NO: 2594171 - RNA, 19 nt, Artificial Sequence
  Description of Artificial Sequence: Synthetic oligonucleotide
auucuacaauugcuggcuu

SEQ ID NO: 2594172 - RNA, 19 nt, Artificial Sequence
  Description of Artificial Sequence: Synthetic oligonucleotide
acugagguuaagauaugua

SEQ ID NO: 2594173 - RNA, 19 nt, Artificial Sequence
  Description of Artificial Sequence: Synthetic oligonucleotide
acgugcaaaccuugcugca

SEQ ID NO: 2594174 - RNA, 19 nt, Artificial Sequence
  Description of Artificial Sequence: Synthetic oligonucleotide
agaagggagugauggcuua

SEQ ID NO: 2594175 - RNA, 19 nt, Artificial Sequence
  Description of Artificial Sequence: Synthetic oligonucleotide
agcaguguuccagucugca

SEQ ID NO: 2594176 - RNA, 19 nt, Artificial Sequence
  Description of Artificial Sequence: Synthetic oligonucleotide
uccugacccugcaggaauc

SEQ ID NO: 2594177 - RNA, 19 nt, Artificial Sequence
  Description of Artificial Sequence: Synthetic oligonucleotide
auggaaacccaagcaucug

SEQ ID NO: 2594178 - RNA, 19 nt, Artificial Sequence
  Description of Artificial Sequence: Synthetic oligonucleotide
agccaggagaaaauggcaa

SEQ ID NO: 2594179 - RNA, 19 nt, Artificial Sequence
  Description of Artificial Sequence: Synthetic oligonucleotide
ggugaagcccagucucucc

SEQ ID NO: 2594180 - RNA, 19 nt, Artificial Sequence
  Description of Artificial Sequence: Synthetic oligonucleotide
cuacaauugcuggcuuaag

SEQ ID NO: 2594181 - RNA, 19 nt, Artificial Sequence
  Description of Artificial Sequence: Synthetic oligonucleotide
uucccagucuguaguugau

SEQ ID NO: 2594182 - RNA, 19 nt, Artificial Sequence
  Description of Artificial Sequence: Synthetic oligonucleotide
gauguuccuuuauaagguu

SEQ ID NO: 2594183 - RNA, 19 nt, Artificial Sequence
  Description of Artificial Sequence: Synthetic oligonucleotide
aucagcugccaugggaaga

SEQ ID NO: 2594184 - RNA, 19 nt, Artificial Sequence
  Description of Artificial Sequence: Synthetic oligonucleotide
ccagucugcauccaggaca

SEQ ID NO: 2594185 - RNA, 19 nt, Artificial Sequence
  Description of Artificial Sequence: Synthetic oligonucleotide
agguuaagauauguacaaa

SEQ ID NO: 2594186 - RNA, 19 nt, Artificial Sequence
  Description of Artificial Sequence: Synthetic oligonucleotide
aggccacagagaaaggaga

SEQ ID NO: 2594187 - RNA, 19 nt, Artificial Sequence
  Description of Artificial Sequence: Synthetic oligonucleotide
acuagacauuaggucugag

SEQ ID NO: 2594188 - RNA, 19 nt, Artificial Sequence
  Description of Artificial Sequence: Synthetic oligonucleotide
agggagugauggcuuaauu

SEQ ID NO: 2594189 - RNA, 19 nt, Artificial Sequence
  Description of Artificial Sequence: Synthetic oligonucleotide
gaaucccugaacccuuccu

SEQ ID NO: 2594190 - RNA, 19 nt, Artificial Sequence
  Description of Artificial Sequence: Synthetic oligonucleotide
gcaucuguuucaaaggaaa

SEQ ID NO: 2594191 - RNA, 19 nt, Artificial Sequence
  Description of Artificial Sequence: Synthetic oligonucleotide
augugaagagccagaaguu

SEQ ID NO: 2594192 - RNA, 19 nt, Artificial Sequence
  Description of Artificial Sequence: Synthetic oligonucleotide
uuacccucugggccagcaa

SEQ ID NO: 2594193 - RNA, 19 nt, Artificial Sequence
  Description of Artificial Sequence: Synthetic oligonucleotide
cucaugguuuucaguaaua

SEQ ID NO: 2594194 - RNA, 19 nt, Artificial Sequence
  Description of Artificial Sequence: Synthetic oligonucleotide
aggaaucccugaacccuuc

SEQ ID NO: 2594195 - RNA, 19 nt, Artificial Sequence
  Description of Artificial Sequence: Synthetic oligonucleotide
caaaagaggcggggugaag

SEQ ID NO: 2594196 - RNA, 19 nt, Artificial Sequence
  Description of Artificial Sequence: Synthetic oligonucleotide
uugaucccuacagcacaga

SEQ ID NO: 2594197 - RNA, 19 nt, Artificial Sequence
  Description of Artificial Sequence: Synthetic oligonucleotide
cauuuacccucugggccag

SEQ ID NO: 2594198 - RNA, 19 nt, Artificial Sequence
  Description of Artificial Sequence: Synthetic oligonucleotide
acaaacuuacagacacaaa

SEQ ID NO: 2594199 - RNA, 19 nt, Artificial Sequence
  Description of Artificial Sequence: Synthetic oligonucleotide
gcacuagacauuaggucug

SEQ ID NO: 2594200 - RNA, 19 nt, Artificial Sequence
  Description of Artificial Sequence: Synthetic oligonucleotide
agaugcacgugcaaaccuu

SEQ ID NO: 2594201 - RNA, 19 nt, Artificial Sequence
  Description of Artificial Sequence: Synthetic oligonucleotide
ccagucuguaguugauccc

SEQ ID NO: 2594202 - RNA, 19 nt, Artificial Sequence
  Description of Artificial Sequence: Synthetic oligonucleotide
cucaugugaagagccagaa

SEQ ID NO: 2594203 - RNA, 19 nt, Artificial Sequence
  Description of Artificial Sequence: Synthetic oligonucleotide
gcaaaccuugcugcaaggc

SEQ ID NO: 2594204 - RNA, 19 nt, Artificial Sequence
  Description of Artificial Sequence: Synthetic oligonucleotide
agaggcggggugaagccca

SEQ ID NO: 2594205 - RNA, 19 nt, Artificial Sequence
  Description of Artificial Sequence: Synthetic oligonucleotide
uaccaccacaaagguagaa

SEQ ID NO: 2594206 - RNA, 19 nt, Artificial Sequence
  Description of Artificial Sequence: Synthetic oligonucleotide
gguagaaauuccucauggu

SEQ ID NO: 2594207 - RNA, 19 nt, Artificial Sequence
  Description of Artificial Sequence: Synthetic oligonucleotide
gggagaagggagugauggc

SEQ ID NO: 2594208 - RNA, 19 nt, Artificial Sequence
  Description of Artificial Sequence: Synthetic oligonucleotide
cccuacagcacagaugcac

SEQ ID NO: 2594209 - RNA, 19 nt, Artificial Sequence
  Description of Artificial Sequence: Synthetic oligonucleotide
ucccagucuguaguugauc

SEQ ID NO: 2594210 - RNA, 19 nt, Artificial Sequence
  Description of Artificial Sequence: Synthetic oligonucleotide
gagugauggcuuaauuccu

SEQ ID NO: 2594211 - RNA, 19 nt, Artificial Sequence
  Description of Artificial Sequence: Synthetic oligonucleotide
gcuuaagcacuagacauua

SEQ ID NO: 2594212 - RNA, 19 nt, Artificial Sequence
  Description of Artificial Sequence: Synthetic oligonucleotide
cagugacaacauggaaacc

SEQ ID NO: 2594213 - RNA, 19 nt, Artificial Sequence
  Description of Artificial Sequence: Synthetic oligonucleotide
ggaaucccugaacccuucc

SEQ ID NO: 2594214 - RNA, 19 nt, Artificial Sequence
  Description of Artificial Sequence: Synthetic oligonucleotide
auuccugacccugcaggaa

SEQ ID NO: 2594215 - RNA, 19 nt, Artificial Sequence
  Description of Artificial Sequence: Synthetic oligonucleotide
agucucuccuccacucuga

SEQ ID NO: 2594216 - RNA, 19 nt, Artificial Sequence
  Description of Artificial Sequence: Synthetic oligonucleotide
cccuuagaacccuuaccac

SEQ ID NO: 2594217 - RNA, 19 nt, Artificial Sequence
  Description of Artificial Sequence: Synthetic oligonucleotide
cugcuucuccgauuaaacu

SEQ ID NO: 2594218 - RNA, 19 nt, Artificial Sequence
  Description of Artificial Sequence: Synthetic oligonucleotide
cuccagcaguguuccaguc

SEQ ID NO: 2594219 - RNA, 19 nt, Artificial Sequence
  Description of Artificial Sequence: Synthetic oligonucleotide
gugaagcccagucucuccu

SEQ ID NO: 2594220 - RNA, 19 nt, Artificial Sequence
  Description of Artificial Sequence: Synthetic oligonucleotide
ucccuacagcacagaugca

SEQ ID NO: 2594221 - RNA, 19 nt, Artificial Sequence
  Description of Artificial Sequence: Synthetic oligonucleotide
ggcaagauuccugggagaa

SEQ ID NO: 2594222 - RNA, 19 nt, Artificial Sequence
  Description of Artificial Sequence: Synthetic oligonucleotide
cacucugagcuccagcagu

SEQ ID NO: 2594223 - RNA, 19 nt, Artificial Sequence
  Description of Artificial Sequence: Synthetic oligonucleotide
ccgauuaaacuggucuccc

SEQ ID NO: 2594224 - RNA, 19 nt, Artificial Sequence
  Description of Artificial Sequence: Synthetic oligonucleotide
gaagggagugauggcuuaa

SEQ ID NO: 2594225 - RNA, 19 nt, Artificial Sequence
  Description of Artificial Sequence: Synthetic oligonucleotide
gacccugcaggaaucuucu

SEQ ID NO: 2594226 - RNA, 19 nt, Artificial Sequence
  Description of Artificial Sequence: Synthetic oligonucleotide
cagucuguaguugaucccu

SEQ ID NO: 2594227 - RNA, 19 nt, Artificial Sequence
  Description of Artificial Sequence: Synthetic oligonucleotide
cagcacagaugcacgugca

SEQ ID NO: 2594228 - RNA, 19 nt, Artificial Sequence
  Description of Artificial Sequence: Synthetic oligonucleotide
guauuuuacuguggcccaa

SEQ ID NO: 2594229 - RNA, 19 nt, Artificial Sequence
  Description of Artificial Sequence: Synthetic oligonucleotide
guuccuuuauaagguuaaa

SEQ ID NO: 2594230 - RNA, 19 nt, Artificial Sequence
  Description of Artificial Sequence: Synthetic oligonucleotide
ggucugaggaaucccugaa

SEQ ID NO: 2594231 - RNA, 19 nt, Artificial Sequence
  Description of Artificial Sequence: Synthetic oligonucleotide
ucccugugauguuccuuua

SEQ ID NO: 2594232 - RNA, 19 nt, Artificial Sequence
  Description of Artificial Sequence: Synthetic oligonucleotide
ucucccugugauguuccuu

SEQ ID NO: 2594233 - RNA, 19 nt, Artificial Sequence
  Description of Artificial Sequence: Synthetic oligonucleotide
gaagagccagaaguuucua

SEQ ID NO: 2594234 - RNA, 19 nt, Artificial Sequence
  Description of Artificial Sequence: Synthetic oligonucleotide
ccaauuccugacccugcag

SEQ ID NO: 2594235 - RNA, 19 nt, Artificial Sequence
  Description of Artificial Sequence: Synthetic oligonucleotide
gcaagauuccugggagaag

SEQ ID NO: 2594236 - RNA, 19 nt, Artificial Sequence
  Description of Artificial Sequence: Synthetic oligonucleotide
cagaugcacgugcaaaccu

SEQ ID NO: 2594237 - RNA, 19 nt, Artificial Sequence
  Description of Artificial Sequence: Synthetic oligonucleotide
cuacagcacagaugcacgu

SEQ ID NO: 2594238 - RNA, 19 nt, Artificial Sequence
  Description of Artificial Sequence: Synthetic oligonucleotide
ggaagaacauuuacccucu

SEQ ID NO: 2594239 - RNA, 19 nt, Artificial Sequence
  Description of Artificial Sequence: Synthetic oligonucleotide
cuggaagccaggagaaaau

SEQ ID NO: 2594240 - RNA, 19 nt, Artificial Sequence
  Description of Artificial Sequence: Synthetic oligonucleotide
ggcggggugaagcccaguc

SEQ ID NO: 2594241 - RNA, 19 nt, Artificial Sequence
  Description of Artificial Sequence: Synthetic oligonucleotide
uuccugcuucuccgauuaa

SEQ ID NO: 2594242 - RNA, 19 nt, Artificial Sequence
  Description of Artificial Sequence: Synthetic oligonucleotide
gagaagggagugauggcuu

SEQ ID NO: 2594243 - RNA, 19 nt, Artificial Sequence
  Description of Artificial Sequence: Synthetic oligonucleotide
ggucucccugugauguucc

SEQ ID NO: 2594244 - RNA, 19 nt, Artificial Sequence
  Description of Artificial Sequence: Synthetic oligonucleotide
ccccucugacaucuggaag

SEQ ID NO: 2594245 - RNA, 19 nt, Artificial Sequence
  Description of Artificial Sequence: Synthetic oligonucleotide
ccuugcugcaaggccacag

SEQ ID NO: 2594246 - RNA, 19 nt, Artificial Sequence
  Description of Artificial Sequence: Synthetic oligonucleotide
cacuagacauuaggucuga

SEQ ID NO: 2594247 - RNA, 19 nt, Artificial Sequence
  Description of Artificial Sequence: Synthetic oligonucleotide
ggcuuaauuccugcuucuc

SEQ ID NO: 2594248 - RNA, 19 nt, Artificial Sequence
  Description of Artificial Sequence: Synthetic oligonucleotide
ccaggagaaaauggcaaga

SEQ ID NO: 2594249 - RNA, 19 nt, Artificial Sequence
  Description of Artificial Sequence: Synthetic oligonucleotide
agucuguaguugaucccua

SEQ ID NO: 2594250 - RNA, 19 nt, Artificial Sequence
  Description of Artificial Sequence: Synthetic oligonucleotide
caggagaaaauggcaagau

SEQ ID NO: 2594251 - RNA, 19 nt, Artificial Sequence
  Description of Artificial Sequence: Synthetic oligonucleotide
cggggugaagcccagucuc

SEQ ID NO: 2594252 - RNA, 19 nt, Artificial Sequence
  Description of Artificial Sequence: Synthetic oligonucleotide
cuucuccgauuaaacuggu

SEQ ID NO: 2594253 - RNA, 19 nt, Artificial Sequence
  Description of Artificial Sequence: Synthetic oligonucleotide
gaggcggggugaagcccag

SEQ ID NO: 2594254 - RNA, 19 nt, Artificial Sequence
  Description of Artificial Sequence: Synthetic oligonucleotide
gaggaaucccugaacccuu

SEQ ID NO: 2594255 - RNA, 19 nt, Artificial Sequence
  Description of Artificial Sequence: Synthetic oligonucleotide
ggccagcaaaagaggcggg

SEQ ID NO: 2594256 - RNA, 19 nt, Artificial Sequence
  Description of Artificial Sequence: Synthetic oligonucleotide
acccucugggccagcaaaa

SEQ ID NO: 2594257 - RNA, 19 nt, Artificial Sequence
  Description of Artificial Sequence: Synthetic oligonucleotide
gcaaaagaggcggggugaa

SEQ ID NO: 2594258 - RNA, 19 nt, Artificial Sequence
  Description of Artificial Sequence: Synthetic oligonucleotide
gcccaauuccugacccugc

SEQ ID NO: 2594259 - RNA, 19 nt, Artificial Sequence
  Description of Artificial Sequence: Synthetic oligonucleotide
gaguggaaacuggcaccaa

SEQ ID NO: 2594260 - RNA, 19 nt, Artificial Sequence
  Description of Artificial Sequence: Synthetic oligonucleotide
ccuuaccaccacaaaggua

SEQ ID NO: 2594261 - RNA, 19 nt, Artificial Sequence
  Description of Artificial Sequence: Synthetic oligonucleotide
gcugccaugggaagaacau

SEQ ID NO: 2594262 - RNA, 19 nt, Artificial Sequence
  Description of Artificial Sequence: Synthetic oligonucleotide
gcuccagcaguguuccagu

SEQ ID NO: 2594263 - RNA, 19 nt, Artificial Sequence
  Description of Artificial Sequence: Synthetic oligonucleotide
ggaaacccaagcaucuguu

SEQ ID NO: 2594264 - RNA, 19 nt, Artificial Sequence
  Description of Artificial Sequence: Synthetic oligonucleotide
cagcugccaugggaagaac

SEQ ID NO: 2594265 - RNA, 19 nt, Artificial Sequence
  Description of Artificial Sequence: Synthetic oligonucleotide
cgaguggaaacuggcacca

SEQ ID NO: 2594266 - RNA, 19 nt, Artificial Sequence
  Description of Artificial Sequence: Synthetic oligonucleotide
cagacuugauugguauuuu

SEQ ID NO: 2594267 - RNA, 19 nt, Artificial Sequence
  Description of Artificial Sequence: Synthetic oligonucleotide
gccaugggaagaacauuua

SEQ ID NO: 2594268 - RNA, 19 nt, Artificial Sequence
  Description of Artificial Sequence: Synthetic oligonucleotide
ccucaugguuuucaguaau

SEQ ID NO: 2594269 - RNA, 19 nt, Artificial Sequence
  Description of Artificial Sequence: Synthetic oligonucleotide
gcaguguuccagucugcau

SEQ ID NO: 2594270 - RNA, 19 nt, Artificial Sequence
  Description of Artificial Sequence: Synthetic oligonucleotide
cccuuaccaccacaaaggu

SEQ ID NO: 2594271 - RNA, 19 nt, Artificial Sequence
  Description of Artificial Sequence: Synthetic oligonucleotide
ccuucccuuagaacccuua

SEQ ID NO: 2594272 - RNA, 19 nt, Artificial Sequence
  Description of Artificial Sequence: Synthetic oligonucleotide
gcggggugaagcccagucu

SEQ ID NO: 2594273 - RNA, 19 nt, Artificial Sequence
  Description of Artificial Sequence: Synthetic oligonucleotide
cugccaugggaagaacauu

SEQ ID NO: 2594274 - RNA, 19 nt, Artificial Sequence
  Description of Artificial Sequence: Synthetic oligonucleotide
ccagcaaaagaggcggggu

SEQ ID NO: 2594275 - RNA, 19 nt, Artificial Sequence
  Description of Artificial Sequence: Synthetic oligonucleotide
cucugagcuccagcagugu

SEQ ID NO: 2594276 - RNA, 19 nt, Artificial Sequence
  Description of Artificial Sequence: Synthetic oligonucleotide
ggggugaagcccagucucu

SEQ ID NO: 2594277 - RNA, 19 nt, Artificial Sequence
  Description of Artificial Sequence: Synthetic oligonucleotide
cgauuaaacuggucucccu

SEQ ID NO: 2594278 - RNA, 19 nt, Artificial Sequence
  Description of Artificial Sequence: Synthetic oligonucleotide
ccugaacccuuccuucccu

SEQ ID NO: 2594279 - RNA, 19 nt, Artificial Sequence
  Description of Artificial Sequence: Synthetic oligonucleotide
ccuccacucugagcuccag

SEQ ID NO: 2594280 - RNA, 19 nt, Artificial Sequence
  Description of Artificial Sequence: Synthetic oligonucleotide
aggcggggugaagcccagu

SEQ ID NO: 2594281 - RNA, 19 nt, Artificial Sequence
  Description of Artificial Sequence: Synthetic oligonucleotide
cccaagcaucuguuucaaa

SEQ ID NO: 2594282 - RNA, 19 nt, Artificial Sequence
  Description of Artificial Sequence: Synthetic oligonucleotide
ccagucucuccuccacucu

SEQ ID NO: 2594283 - RNA, 19 nt, Artificial Sequence
  Description of Artificial Sequence: Synthetic oligonucleotide
cugacccugcaggaaucuu

SEQ ID NO: 2594284 - RNA, 19 nt, Artificial Sequence
  Description of Artificial Sequence: Synthetic oligonucleotide
cccugugauguuccuuuau

SEQ ID NO: 2594285 - RNA, 19 nt, Artificial Sequence
  Description of Artificial Sequence: Synthetic oligonucleotide
ccugacccugcaggaaucu

SEQ ID NO: 2594286 - RNA, 19 nt, Artificial Sequence
  Description of Artificial Sequence: Synthetic oligonucleotide
aaauuuuaugucuuuaaac

SEQ ID NO: 2594287 - RNA, 19 nt, Artificial Sequence
  Description of Artificial Sequence: Synthetic oligonucleotide
uuuaaagugagugagauga

SEQ ID NO: 2594288 - RNA, 19 nt, Artificial Sequence
  Description of Artificial Sequence: Synthetic oligonucleotide
aaaagauuuacaaaagaac

SEQ ID NO: 2594289 - RNA, 19 nt, Artificial Sequence
  Description of Artificial Sequence: Synthetic oligonucleotide
agugucagaaaccaaauac

SEQ ID NO: 2594290 - RNA, 19 nt, Artificial Sequence
  Description of Artificial Sequence: Synthetic oligonucleotide
aacgaaaagauuuacaaaa

SEQ ID NO: 2594291 - RNA, 19 nt, Artificial Sequence
  Description of Artificial Sequence: Synthetic oligonucleotide
ugucuuuaaaccaggaugg

SEQ ID NO: 2594292 - RNA, 19 nt, Artificial Sequence
  Description of Artificial Sequence: Synthetic oligonucleotide
aauaaggauucuuugauga

SEQ ID NO: 2594293 - RNA, 19 nt, Artificial Sequence
  Description of Artificial Sequence: Synthetic oligonucleotide
aaaacgaaaagauuuacaa

SEQ ID NO: 2594294 - RNA, 19 nt, Artificial Sequence
  Description of Artificial Sequence: Synthetic oligonucleotide
uuuguuaaaacgaaaagau

SEQ ID NO: 2594295 - RNA, 19 nt, Artificial Sequence
  Description of Artificial Sequence: Synthetic oligonucleotide
uguuaaaacgaaaagauuu

SEQ ID NO: 2594296 - RNA, 19 nt, Artificial Sequence
  Description of Artificial Sequence: Synthetic oligonucleotide
aaaagaacuauaugcugac

SEQ ID NO: 2594297 - RNA, 19 nt, Artificial Sequence
  Description of Artificial Sequence: Synthetic oligonucleotide
aaagauuuacaaaagaacu

SEQ ID NO: 2594298 - RNA, 19 nt, Artificial Sequence
  Description of Artificial Sequence: Synthetic oligonucleotide
cuauaugcugacuugaagg

SEQ ID NO: 2594299 - RNA, 19 nt, Artificial Sequence
  Description of Artificial Sequence: Synthetic oligonucleotide
uuuuaugucuuuaaaccag

SEQ ID NO: 2594300 - RNA, 19 nt, Artificial Sequence
  Description of Artificial Sequence: Synthetic oligonucleotide
aacucuuaucaucuguggc

SEQ ID NO: 2594301 - RNA, 19 nt, Artificial Sequence
  Description of Artificial Sequence: Synthetic oligonucleotide
uaugaugccagcccaaagg

SEQ ID NO: 2594302 - RNA, 19 nt, Artificial Sequence
  Description of Artificial Sequence: Synthetic oligonucleotide
aaaccaaauacuuagccaa

SEQ ID NO: 2594303 - RNA, 19 nt, Artificial Sequence
  Description of Artificial Sequence: Synthetic oligonucleotide
acuaucaucaaauuuuaug

SEQ ID NO: 2594304 - RNA, 19 nt, Artificial Sequence
  Description of Artificial Sequence: Synthetic oligonucleotide
accaacuugcaccugaagc

SEQ ID NO: 2594305 - RNA, 19 nt, Artificial Sequence
  Description of Artificial Sequence: Synthetic oligonucleotide
gagucaaagguuuaaagug

SEQ ID NO: 2594306 - RNA, 19 nt, Artificial Sequence
  Description of Artificial Sequence: Synthetic oligonucleotide
augucuuuaaaccaggaug

SEQ ID NO: 2594307 - RNA, 19 nt, Artificial Sequence
  Description of Artificial Sequence: Synthetic oligonucleotide
gaugagaaggacucggugg

SEQ ID NO: 2594308 - RNA, 19 nt, Artificial Sequence
  Description of Artificial Sequence: Synthetic oligonucleotide
uacaaaagaacuauaugcu

SEQ ID NO: 2594309 - RNA, 19 nt, Artificial Sequence
  Description of Artificial Sequence: Synthetic oligonucleotide
auuaaauaaggauucuuug

SEQ ID NO: 2594310 - RNA, 19 nt, Artificial Sequence
  Description of Artificial Sequence: Synthetic oligonucleotide
  modified_base (16)..(16): a, c, u, g, unknown or other
gaaaacaaaacaaaanaaa

SEQ ID NO: 2594311 - RNA, 19 nt, Artificial Sequence
  Description of Artificial Sequence: Synthetic oligonucleotide
gaaggcaucgcuuauugag

SEQ ID NO: 2594312 - RNA, 19 nt, Artificial Sequence
  Description of Artificial Sequence: Synthetic oligonucleotide
uuuaugucuuuaaaccagg

SEQ ID NO: 2594313 - RNA, 19 nt, Artificial Sequence
  Description of Artificial Sequence: Synthetic oligonucleotide
aauacuuagccaaauuauc

SEQ ID NO: 2594314 - RNA, 19 nt, Artificial Sequence
  Description of Artificial Sequence: Synthetic oligonucleotide
auuaucgucaccuucuuca

SEQ ID NO: 2594315 - RNA, 19 nt, Artificial Sequence
  Description of Artificial Sequence: Synthetic oligonucleotide
uuagcaggguccaaugucg

SEQ ID NO: 2594316 - RNA, 19 nt, Artificial Sequence
  Description of Artificial Sequence: Synthetic oligonucleotide
caaaucauuagcagggucc

SEQ ID NO: 2594317 - RNA, 19 nt, Artificial Sequence
  Description of Artificial Sequence: Synthetic oligonucleotide
aaagguuuaaagugaguga

SEQ ID NO: 2594318 - RNA, 19 nt, Artificial Sequence
  Description of Artificial Sequence: Synthetic oligonucleotide
aaauaaggauucuuugaug

SEQ ID NO: 2594319 - RNA, 19 nt, Artificial Sequence
  Description of Artificial Sequence: Synthetic oligonucleotide
accaggaugguucagagug

SEQ ID NO: 2594320 - RNA, 19 nt, Artificial Sequence
  Description of Artificial Sequence: Synthetic oligonucleotide
uuuuguaagguaccgguga

SEQ ID NO: 2594321 - RNA, 19 nt, Artificial Sequence
  Description of Artificial Sequence: Synthetic oligonucleotide
uaaaacgaaaagauuuaca

SEQ ID NO: 2594322 - RNA, 19 nt, Artificial Sequence
  Description of Artificial Sequence: Synthetic oligonucleotide
cauuucaugagucuucgcc

SEQ ID NO: 2594323 - RNA, 19 nt, Artificial Sequence
  Description of Artificial Sequence: Synthetic oligonucleotide
ucucucuuuguuaaaacga

SEQ ID NO: 2594324 - RNA, 19 nt, Artificial Sequence
  Description of Artificial Sequence: Synthetic oligonucleotide
aagagcagucuuuccaugg

SEQ ID NO: 2594325 - RNA, 19 nt, Artificial Sequence
  Description of Artificial Sequence: Synthetic oligonucleotide
uacucgucgauuaaauaag

SEQ ID NO: 2594326 - RNA, 19 nt, Artificial Sequence
  Description of Artificial Sequence: Synthetic oligonucleotide
ugugucacuaucaucaaau

SEQ ID NO: 2594327 - RNA, 19 nt, Artificial Sequence
  Description of Artificial Sequence: Synthetic oligonucleotide
agcgaggcaaaucauuagc

SEQ ID NO: 2594328 - RNA, 19 nt, Artificial Sequence
  Description of Artificial Sequence: Synthetic oligonucleotide
auuagcaggguccaauguc

SEQ ID NO: 2594329 - RNA, 19 nt, Artificial Sequence
  Description of Artificial Sequence: Synthetic oligonucleotide
aaggauucuuugaugaagg

SEQ ID NO: 2594330 - RNA, 19 nt, Artificial Sequence
  Description of Artificial Sequence: Synthetic oligonucleotide
aagaacuauaugcugacuu

SEQ ID NO: 2594331 - RNA, 19 nt, Artificial Sequence
  Description of Artificial Sequence: Synthetic oligonucleotide
cuaacacugaggaacgccg

SEQ ID NO: 2594332 - RNA, 19 nt, Artificial Sequence
  Description of Artificial Sequence: Synthetic oligonucleotide
uguccuucuaacacugagg

SEQ ID NO: 2594333 - RNA, 19 nt, Artificial Sequence
  Description of Artificial Sequence: Synthetic oligonucleotide
aaacgaaaagauuuacaaa

SEQ ID NO: 2594334 - RNA, 19 nt, Artificial Sequence
  Description of Artificial Sequence: Synthetic oligonucleotide
acaaaagaacuauaugcug

SEQ ID NO: 2594335 - RNA, 19 nt, Artificial Sequence
  Description of Artificial Sequence: Synthetic oligonucleotide
auacuuagccaaauuaucg

SEQ ID NO: 2594336 - RNA, 19 nt, Artificial Sequence
  Description of Artificial Sequence: Synthetic oligonucleotide
uagauaggcucccauguag

SEQ ID NO: 2594337 - RNA, 19 nt, Artificial Sequence
  Description of Artificial Sequence: Synthetic oligonucleotide
acuuagccaaauuaucguc

SEQ ID NO: 2594338 - RNA, 19 nt, Artificial Sequence
  Description of Artificial Sequence: Synthetic oligonucleotide
gaaaagauuuacaaaagaa

SEQ ID NO: 2594339 - RNA, 19 nt, Artificial Sequence
  Description of Artificial Sequence: Synthetic oligonucleotide
aaauacuuagccaaauuau

SEQ ID NO: 2594340 - RNA, 19 nt, Artificial Sequence
  Description of Artificial Sequence: Synthetic oligonucleotide
aaaagagcagucuuuccau

SEQ ID NO: 2594341 - RNA, 19 nt, Artificial Sequence
  Description of Artificial Sequence: Synthetic oligonucleotide
caaagguuuaaagugagug

SEQ ID NO: 2594342 - RNA, 19 nt, Artificial Sequence
  Description of Artificial Sequence: Synthetic oligonucleotide
aagugagugagaugagaag

SEQ ID NO: 2594343 - RNA, 19 nt, Artificial Sequence
  Description of Artificial Sequence: Synthetic oligonucleotide
aauuaucgucaccuucuuc

SEQ ID NO: 2594344 - RNA, 19 nt, Artificial Sequence
  Description of Artificial Sequence: Synthetic oligonucleotide
aaaccaggaugguucagag

SEQ ID NO: 2594345 - RNA, 19 nt, Artificial Sequence
  Description of Artificial Sequence: Synthetic oligonucleotide
guuguuaugaugccagccc

SEQ ID NO: 2594346 - RNA, 19 nt, Artificial Sequence
  Description of Artificial Sequence: Synthetic oligonucleotide
ugucggggaacucuuauca

SEQ ID NO: 2594347 - RNA, 19 nt, Artificial Sequence
  Description of Artificial Sequence: Synthetic oligonucleotide
cucucucuuuguuaaaacg

SEQ ID NO: 2594348 - RNA, 19 nt, Artificial Sequence
  Description of Artificial Sequence: Synthetic oligonucleotide
uuauugagagcuguugucc

SEQ ID NO: 2594349 - RNA, 19 nt, Artificial Sequence
  Description of Artificial Sequence: Synthetic oligonucleotide
gaacucuuaucaucugugg

SEQ ID NO: 2594350 - RNA, 19 nt, Artificial Sequence
  Description of Artificial Sequence: Synthetic oligonucleotide
agaacuauaugcugacuug

SEQ ID NO: 2594351 - RNA, 19 nt, Artificial Sequence
  Description of Artificial Sequence: Synthetic oligonucleotide
ugcaccugaagccugcugc

SEQ ID NO: 2594352 - RNA, 19 nt, Artificial Sequence
  Description of Artificial Sequence: Synthetic oligonucleotide
ugaaaggcagcucuuugga

SEQ ID NO: 2594353 - RNA, 19 nt, Artificial Sequence
  Description of Artificial Sequence: Synthetic oligonucleotide
cuucuaacacugaggaacg

SEQ ID NO: 2594354 - RNA, 19 nt, Artificial Sequence
  Description of Artificial Sequence: Synthetic oligonucleotide
cagacugaguccucgaagg

SEQ ID NO: 2594355 - RNA, 19 nt, Artificial Sequence
  Description of Artificial Sequence: Synthetic oligonucleotide
uucuccucccgcaagagcu

SEQ ID NO: 2594356 - RNA, 19 nt, Artificial Sequence
  Description of Artificial Sequence: Synthetic oligonucleotide
caaaagaacuauaugcuga

SEQ ID NO: 2594357 - RNA, 19 nt, Artificial Sequence
  Description of Artificial Sequence: Synthetic oligonucleotide
cuaucaucaaauuuuaugu

SEQ ID NO: 2594358 - RNA, 19 nt, Artificial Sequence
  Description of Artificial Sequence: Synthetic oligonucleotide
auuucaugagucuucgccu

SEQ ID NO: 2594359 - RNA, 19 nt, Artificial Sequence
  Description of Artificial Sequence: Synthetic oligonucleotide
acuauaugcugacuugaag

SEQ ID NO: 2594360 - RNA, 19 nt, Artificial Sequence
  Description of Artificial Sequence: Synthetic oligonucleotide
cauguaggaaaacaaaaca

SEQ ID NO: 2594361 - RNA, 19 nt, Artificial Sequence
  Description of Artificial Sequence: Synthetic oligonucleotide
agagcagucuuuccauggc

SEQ ID NO: 2594362 - RNA, 19 nt, Artificial Sequence
  Description of Artificial Sequence: Synthetic oligonucleotide
uuaaaacgaaaagauuuac

SEQ ID NO: 2594363 - RNA, 19 nt, Artificial Sequence
  Description of Artificial Sequence: Synthetic oligonucleotide
ucgucgauuaaauaaggau

SEQ ID NO: 2594364 - RNA, 19 nt, Artificial Sequence
  Description of Artificial Sequence: Synthetic oligonucleotide
aggcaaaucauuagcaggg

SEQ ID NO: 2594365 - RNA, 19 nt, Artificial Sequence
  Description of Artificial Sequence: Synthetic oligonucleotide
ucagcaaucuguucugugu

SEQ ID NO: 2594366 - RNA, 19 nt, Artificial Sequence
  Description of Artificial Sequence: Synthetic oligonucleotide
uacuuagccaaauuaucgu

SEQ ID NO: 2594367 - RNA, 19 nt, Artificial Sequence
  Description of Artificial Sequence: Synthetic oligonucleotide
uuuaaaccaggaugguuca

SEQ ID NO: 2594368 - RNA, 19 nt, Artificial Sequence
  Description of Artificial Sequence: Synthetic oligonucleotide
uaagguaccggugaccuca

SEQ ID NO: 2594369 - RNA, 19 nt, Artificial Sequence
  Description of Artificial Sequence: Synthetic oligonucleotide
ucuguggccauuucaugag

SEQ ID NO: 2594370 - RNA, 19 nt, Artificial Sequence
  Description of Artificial Sequence: Synthetic oligonucleotide
ugaccucacagacugaguc

SEQ ID NO: 2594371 - RNA, 19 nt, Artificial Sequence
  Description of Artificial Sequence: Synthetic oligonucleotide
uuugaugaaggcaucgcuu

SEQ ID NO: 2594372 - RNA, 19 nt, Artificial Sequence
  Description of Artificial Sequence: Synthetic oligonucleotide
aaagagcagucuuuccaug

SEQ ID NO: 2594373 - RNA, 19 nt, Artificial Sequence
  Description of Artificial Sequence: Synthetic oligonucleotide
aucgucaccuucuucagca

SEQ ID NO: 2594374 - RNA, 19 nt, Artificial Sequence
  Description of Artificial Sequence: Synthetic oligonucleotide
uuguuaugaugccagccca

SEQ ID NO: 2594375 - RNA, 19 nt, Artificial Sequence
  Description of Artificial Sequence: Synthetic oligonucleotide
uuaaagugagugagaugag

SEQ ID NO: 2594376 - RNA, 19 nt, Artificial Sequence
  Description of Artificial Sequence: Synthetic oligonucleotide
aaaucauuagcagggucca

SEQ ID NO: 2594377 - RNA, 19 nt, Artificial Sequence
  Description of Artificial Sequence: Synthetic oligonucleotide
cuuauugagagcuguuguc

SEQ ID NO: 2594378 - RNA, 19 nt, Artificial Sequence
  Description of Artificial Sequence: Synthetic oligonucleotide
uuuguaagguaccggugac

SEQ ID NO: 2594379 - RNA, 19 nt, Artificial Sequence
  Description of Artificial Sequence: Synthetic oligonucleotide
ucuaacacugaggaacgcc

SEQ ID NO: 2594380 - RNA, 19 nt, Artificial Sequence
  Description of Artificial Sequence: Synthetic oligonucleotide
uucagaguguccuucuaac

SEQ ID NO: 2594381 - RNA, 19 nt, Artificial Sequence
  Description of Artificial Sequence: Synthetic oligonucleotide
ugucacuaucaucaaauuu

SEQ ID NO: 2594382 - RNA, 19 nt, Artificial Sequence
  Description of Artificial Sequence: Synthetic oligonucleotide
augaaggcaucgcuuauug

SEQ ID NO: 2594383 - RNA, 19 nt, Artificial Sequence
  Description of Artificial Sequence: Synthetic oligonucleotide
uuguuaaaacgaaaagauu

SEQ ID NO: 2594384 - RNA, 19 nt, Artificial Sequence
  Description of Artificial Sequence: Synthetic oligonucleotide
gucgauuaaauaaggauuc

SEQ ID NO: 2594385 - RNA, 19 nt, Artificial Sequence
  Description of Artificial Sequence: Synthetic oligonucleotide
uuaugucuuuaaaccagga

SEQ ID NO: 2594386 - RNA, 19 nt, Artificial Sequence
  Description of Artificial Sequence: Synthetic oligonucleotide
acagacugaguccucgaag

SEQ ID NO: 2594387 - RNA, 19 nt, Artificial Sequence
  Description of Artificial Sequence: Synthetic oligonucleotide
cuacucgucgauuaaauaa

SEQ ID NO: 2594388 - RNA, 19 nt, Artificial Sequence
  Description of Artificial Sequence: Synthetic oligonucleotide
ugaugccagcccaaagggg

SEQ ID NO: 2594389 - RNA, 19 nt, Artificial Sequence
  Description of Artificial Sequence: Synthetic oligonucleotide
cagaguguccuucuaacac

SEQ ID NO: 2594390 - RNA, 19 nt, Artificial Sequence
  Description of Artificial Sequence: Synthetic oligonucleotide
ucauuagcaggguccaaug

SEQ ID NO: 2594391 - RNA, 19 nt, Artificial Sequence
  Description of Artificial Sequence: Synthetic oligonucleotide
uuaucgucaccuucuucag

SEQ ID NO: 2594392 - RNA, 19 nt, Artificial Sequence
  Description of Artificial Sequence: Synthetic oligonucleotide
ugaggaacgccgcuggaac

SEQ ID NO: 2594393 - RNA, 19 nt, Artificial Sequence
  Description of Artificial Sequence: Synthetic oligonucleotide
ugagucuucgccucccgcc

SEQ ID NO: 2594394 - RNA, 19 nt, Artificial Sequence
  Description of Artificial Sequence: Synthetic oligonucleotide
aaugucggggaacucuuau

SEQ ID NO: 2594395 - RNA, 19 nt, Artificial Sequence
  Description of Artificial Sequence: Synthetic oligonucleotide
uguucugugucacuaucau

SEQ ID NO: 2594396 - RNA, 19 nt, Artificial Sequence
  Description of Artificial Sequence: Synthetic oligonucleotide
uaaagugagugagaugaga

SEQ ID NO: 2594397 - RNA, 19 nt, Artificial Sequence
  Description of Artificial Sequence: Synthetic oligonucleotide
agccaaauuaucgucaccu

SEQ ID NO: 2594398 - RNA, 19 nt, Artificial Sequence
  Description of Artificial Sequence: Synthetic oligonucleotide
aaaggggugaaaggcagcu

SEQ ID NO: 2594399 - RNA, 19 nt, Artificial Sequence
  Description of Artificial Sequence: Synthetic oligonucleotide
ucacuaucaucaaauuuua

SEQ ID NO: 2594400 - RNA, 19 nt, Artificial Sequence
  Description of Artificial Sequence: Synthetic oligonucleotide
gauucuuugaugaaggcau

SEQ ID NO: 2594401 - RNA, 19 nt, Artificial Sequence
  Description of Artificial Sequence: Synthetic oligonucleotide
caaauacuuagccaaauua

SEQ ID NO: 2594402 - RNA, 19 nt, Artificial Sequence
  Description of Artificial Sequence: Synthetic oligonucleotide
cuuagccaaauuaucguca

SEQ ID NO: 2594403 - RNA, 19 nt, Artificial Sequence
  Description of Artificial Sequence: Synthetic oligonucleotide
cucuuuguuaaaacgaaaa

SEQ ID NO: 2594404 - RNA, 19 nt, Artificial Sequence
  Description of Artificial Sequence: Synthetic oligonucleotide
auugagagcuguuguccuc

SEQ ID NO: 2594405 - RNA, 19 nt, Artificial Sequence
  Description of Artificial Sequence: Synthetic oligonucleotide
ucucuuuguuaaaacgaaa

SEQ ID NO: 2594406 - RNA, 19 nt, Artificial Sequence
  Description of Artificial Sequence: Synthetic oligonucleotide
uaaaccaggaugguucaga

SEQ ID NO: 2594407 - RNA, 19 nt, Artificial Sequence
  Description of Artificial Sequence: Synthetic oligonucleotide
guccuucuaacacugagga

SEQ ID NO: 2594408 - RNA, 19 nt, Artificial Sequence
  Description of Artificial Sequence: Synthetic oligonucleotide
uggaccaacuugcaccuga

SEQ ID NO: 2594409 - RNA, 19 nt, Artificial Sequence
  Description of Artificial Sequence: Synthetic oligonucleotide
ucuccucucucuuuguuaa

SEQ ID NO: 2594410 - RNA, 19 nt, Artificial Sequence
  Description of Artificial Sequence: Synthetic oligonucleotide
ccuucuaacacugaggaac

SEQ ID NO: 2594411 - RNA, 19 nt, Artificial Sequence
  Description of Artificial Sequence: Synthetic oligonucleotide
acgaaaagauuuacaaaag

SEQ ID NO: 2594412 - RNA, 19 nt, Artificial Sequence
  Description of Artificial Sequence: Synthetic oligonucleotide
aggggugaaaggcagcucu

SEQ ID NO: 2594413 - RNA, 19 nt, Artificial Sequence
  Description of Artificial Sequence: Synthetic oligonucleotide
ucccauguaggaaaacaaa

SEQ ID NO: 2594414 - RNA, 19 nt, Artificial Sequence
  Description of Artificial Sequence: Synthetic oligonucleotide
ugagggcuggaccaacuug

SEQ ID NO: 2594415 - RNA, 19 nt, Artificial Sequence
  Description of Artificial Sequence: Synthetic oligonucleotide
cagaaaccaaauacuuagc

SEQ ID NO: 2594416 - RNA, 19 nt, Artificial Sequence
  Description of Artificial Sequence: Synthetic oligonucleotide
auguaggaaaacaaaacaa

SEQ ID NO: 2594417 - RNA, 19 nt, Artificial Sequence
  Description of Artificial Sequence: Synthetic oligonucleotide
auaugcugacuugaagggg

SEQ ID NO: 2594418 - RNA, 19 nt, Artificial Sequence
  Description of Artificial Sequence: Synthetic oligonucleotide
agguuguuaugaugccagc

SEQ ID NO: 2594419 - RNA, 19 nt, Artificial Sequence
  Description of Artificial Sequence: Synthetic oligonucleotide
ucaaagguuuaaagugagu

SEQ ID NO: 2594420 - RNA, 19 nt, Artificial Sequence
  Description of Artificial Sequence: Synthetic oligonucleotide
uuucaugagucuucgccuc

SEQ ID NO: 2594421 - RNA, 19 nt, Artificial Sequence
  Description of Artificial Sequence: Synthetic oligonucleotide
uaggcucccauguaggaaa

SEQ ID NO: 2594422 - RNA, 19 nt, Artificial Sequence
  Description of Artificial Sequence: Synthetic oligonucleotide
aggcaucgcuuauugagag

SEQ ID NO: 2594423 - RNA, 19 nt, Artificial Sequence
  Description of Artificial Sequence: Synthetic oligonucleotide
guuuaaagugagugagaug

SEQ ID NO: 2594424 - RNA, 19 nt, Artificial Sequence
  Description of Artificial Sequence: Synthetic oligonucleotide
agucaaagguuuaaaguga

SEQ ID NO: 2594425 - RNA, 19 nt, Artificial Sequence
  Description of Artificial Sequence: Synthetic oligonucleotide
augagucuucgccucccgc

SEQ ID NO: 2594426 - RNA, 19 nt, Artificial Sequence
  Description of Artificial Sequence: Synthetic oligonucleotide
gucaaagguuuaaagugag

SEQ ID NO: 2594427 - RNA, 19 nt, Artificial Sequence
  Description of Artificial Sequence: Synthetic oligonucleotide
uaacacugaggaacgccgc

SEQ ID NO: 2594428 - RNA, 19 nt, Artificial Sequence
  Description of Artificial Sequence: Synthetic oligonucleotide
guguccuucuaacacugag

SEQ ID NO: 2594429 - RNA, 19 nt, Artificial Sequence
  Description of Artificial Sequence: Synthetic oligonucleotide
aaauuaucgucaccuucuu

SEQ ID NO: 2594430 - RNA, 19 nt, Artificial Sequence
  Description of Artificial Sequence: Synthetic oligonucleotide
agacugaguccucgaaggg

SEQ ID NO: 2594431 - RNA, 19 nt, Artificial Sequence
  Description of Artificial Sequence: Synthetic oligonucleotide
uuuuccucuacucgucgau

SEQ ID NO: 2594432 - RNA, 19 nt, Artificial Sequence
  Description of Artificial Sequence: Synthetic oligonucleotide
gaccucacagacugagucc

SEQ ID NO: 2594433 - RNA, 19 nt, Artificial Sequence
  Description of Artificial Sequence: Synthetic oligonucleotide
ggcuggaccaacuugcacc

SEQ ID NO: 2594434 - RNA, 19 nt, Artificial Sequence
  Description of Artificial Sequence: Synthetic oligonucleotide
uccaaugucggggaacucu

SEQ ID NO: 2594435 - RNA, 19 nt, Artificial Sequence
  Description of Artificial Sequence: Synthetic oligonucleotide
uguggccauuucaugaguc

SEQ ID NO: 2594436 - RNA, 19 nt, Artificial Sequence
  Description of Artificial Sequence: Synthetic oligonucleotide
gagggcuggaccaacuugc

SEQ ID NO: 2594437 - RNA, 19 nt, Artificial Sequence
  Description of Artificial Sequence: Synthetic oligonucleotide
gauuaaauaaggauucuuu

SEQ ID NO: 2594438 - RNA, 19 nt, Artificial Sequence
  Description of Artificial Sequence: Synthetic oligonucleotide
cucgaagggaucugagggc

SEQ ID NO: 2594439 - RNA, 19 nt, Artificial Sequence
  Description of Artificial Sequence: Synthetic oligonucleotide
agguagauaggcucccaug

SEQ ID NO: 2594440 - RNA, 19 nt, Artificial Sequence
  Description of Artificial Sequence: Synthetic oligonucleotide
gaacuauaugcugacuuga

SEQ ID NO: 2594441 - RNA, 19 nt, Artificial Sequence
  Description of Artificial Sequence: Synthetic oligonucleotide
uaucgucaccuucuucagc

SEQ ID NO: 2594442 - RNA, 19 nt, Artificial Sequence
  Description of Artificial Sequence: Synthetic oligonucleotide
gggagucaaagguuuaaag

SEQ ID NO: 2594443 - RNA, 19 nt, Artificial Sequence
  Description of Artificial Sequence: Synthetic oligonucleotide
aaagaacuauaugcugacu

SEQ ID NO: 2594444 - RNA, 19 nt, Artificial Sequence
  Description of Artificial Sequence: Synthetic oligonucleotide
uaccggugaccucacagac

SEQ ID NO: 2594445 - RNA, 19 nt, Artificial Sequence
  Description of Artificial Sequence: Synthetic oligonucleotide
agauaggcucccauguagg

SEQ ID NO: 2594446 - RNA, 19 nt, Artificial Sequence
  Description of Artificial Sequence: Synthetic oligonucleotide
guuaaaacgaaaagauuua

SEQ ID NO: 2594447 - RNA, 19 nt, Artificial Sequence
  Description of Artificial Sequence: Synthetic oligonucleotide
ccauguaggaaaacaaaac

SEQ ID NO: 2594448 - RNA, 19 nt, Artificial Sequence
  Description of Artificial Sequence: Synthetic oligonucleotide
augucggggaacucuuauc

SEQ ID NO: 2594449 - RNA, 19 nt, Artificial Sequence
  Description of Artificial Sequence: Synthetic oligonucleotide
gagcgaggcaaaucauuag

SEQ ID NO: 2594450 - RNA, 19 nt, Artificial Sequence
  Description of Artificial Sequence: Synthetic oligonucleotide
cucuucauucuccucccgc

SEQ ID NO: 2594451 - RNA, 19 nt, Artificial Sequence
  Description of Artificial Sequence: Synthetic oligonucleotide
aaggcaucgcuuauugaga

SEQ ID NO: 2594452 - RNA, 19 nt, Artificial Sequence
  Description of Artificial Sequence: Synthetic oligonucleotide
ucggggaacucuuaucauc

SEQ ID NO: 2594453 - RNA, 19 nt, Artificial Sequence
  Description of Artificial Sequence: Synthetic oligonucleotide
ucuacucgucgauuaaaua

SEQ ID NO: 2594454 - RNA, 19 nt, Artificial Sequence
  Description of Artificial Sequence: Synthetic oligonucleotide
ucccgcaagagcuccaggu

SEQ ID NO: 2594455 - RNA, 19 nt, Artificial Sequence
  Description of Artificial Sequence: Synthetic oligonucleotide
uccagguuguuaugaugcc

SEQ ID NO: 2594456 - RNA, 19 nt, Artificial Sequence
  Description of Artificial Sequence: Synthetic oligonucleotide
ugagugagaugagaaggac

SEQ ID NO: 2594457 - RNA, 19 nt, Artificial Sequence
  Description of Artificial Sequence: Synthetic oligonucleotide
gguaccggugaccucacag

SEQ ID NO: 2594458 - RNA, 19 nt, Artificial Sequence
  Description of Artificial Sequence: Synthetic oligonucleotide
acucgucgauuaaauaagg

SEQ ID NO: 2594459 - RNA, 19 nt, Artificial Sequence
  Description of Artificial Sequence: Synthetic oligonucleotide
gauaggcucccauguagga

SEQ ID NO: 2594460 - RNA, 19 nt, Artificial Sequence
  Description of Artificial Sequence: Synthetic oligonucleotide
agcaaucuguucuguguca

SEQ ID NO: 2594461 - RNA, 19 nt, Artificial Sequence
  Description of Artificial Sequence: Synthetic oligonucleotide
ucuuuaaaccaggaugguu

SEQ ID NO: 2594462 - RNA, 19 nt, Artificial Sequence
  Description of Artificial Sequence: Synthetic oligonucleotide
cucacagacugaguccucg

SEQ ID NO: 2594463 - RNA, 19 nt, Artificial Sequence
  Description of Artificial Sequence: Synthetic oligonucleotide
uccuggucgggagucaaag

SEQ ID NO: 2594464 - RNA, 19 nt, Artificial Sequence
  Description of Artificial Sequence: Synthetic oligonucleotide
ucgaagggaucugagggcu

SEQ ID NO: 2594465 - RNA, 19 nt, Artificial Sequence
  Description of Artificial Sequence: Synthetic oligonucleotide
uagccaaauuaucgucacc

SEQ ID NO: 2594466 - RNA, 19 nt, Artificial Sequence
  Description of Artificial Sequence: Synthetic oligonucleotide
ucgauuaaauaaggauucu

SEQ ID NO: 2594467 - RNA, 19 nt, Artificial Sequence
  Description of Artificial Sequence: Synthetic oligonucleotide
gaguguccuucuaacacug

SEQ ID NO: 2594468 - RNA, 19 nt, Artificial Sequence
  Description of Artificial Sequence: Synthetic oligonucleotide
cucucuuuguuaaaacgaa

SEQ ID NO: 2594469 - RNA, 19 nt, Artificial Sequence
  Description of Artificial Sequence: Synthetic oligonucleotide
gagucuucgccucccgccc

SEQ ID NO: 2594470 - RNA, 19 nt, Artificial Sequence
  Description of Artificial Sequence: Synthetic oligonucleotide
cacugaggaacgccgcugg

SEQ ID NO: 2594471 - RNA, 19 nt, Artificial Sequence
  Description of Artificial Sequence: Synthetic oligonucleotide
ugaguccucgaagggaucu

SEQ ID NO: 2594472 - RNA, 19 nt, Artificial Sequence
  Description of Artificial Sequence: Synthetic oligonucleotide
aacuauaugcugacuugaa

SEQ ID NO: 2594473 - RNA, 19 nt, Artificial Sequence
  Description of Artificial Sequence: Synthetic oligonucleotide
ggaacucuuaucaucugug

SEQ ID NO: 2594474 - RNA, 19 nt, Artificial Sequence
  Description of Artificial Sequence: Synthetic oligonucleotide
ugaaggcaucgcuuauuga

SEQ ID NO: 2594475 - RNA, 19 nt, Artificial Sequence
  Description of Artificial Sequence: Synthetic oligonucleotide
aucgcuuauugagagcugu

SEQ ID NO: 2594476 - RNA, 19 nt, Artificial Sequence
  Description of Artificial Sequence: Synthetic oligonucleotide
uuaaaccaggaugguucag

SEQ ID NO: 2594477 - RNA, 19 nt, Artificial Sequence
  Description of Artificial Sequence: Synthetic oligonucleotide
ggaacuccucauuaagcug

SEQ ID NO: 2594478 - RNA, 19 nt, Artificial Sequence
  Description of Artificial Sequence: Synthetic oligonucleotide
ugaugaaggcaucgcuuau

SEQ ID NO: 2594479 - RNA, 19 nt, Artificial Sequence
  Description of Artificial Sequence: Synthetic oligonucleotide
uuccucuacucgucgauua

SEQ ID NO: 2594480 - RNA, 19 nt, Artificial Sequence
  Description of Artificial Sequence: Synthetic oligonucleotide
aucauuagcaggguccaau

SEQ ID NO: 2594481 - RNA, 19 nt, Artificial Sequence
  Description of Artificial Sequence: Synthetic oligonucleotide
cagcaaucuguucuguguc

SEQ ID NO: 2594482 - RNA, 19 nt, Artificial Sequence
  Description of Artificial Sequence: Synthetic oligonucleotide
auucuuugaugaaggcauc

SEQ ID NO: 2594483 - RNA, 19 nt, Artificial Sequence
  Description of Artificial Sequence: Synthetic oligonucleotide
uguuguccuccagugucag

SEQ ID NO: 2594484 - RNA, 19 nt, Artificial Sequence
  Description of Artificial Sequence: Synthetic oligonucleotide
gguuguuaugaugccagcc

SEQ ID NO: 2594485 - RNA, 19 nt, Artificial Sequence
  Description of Artificial Sequence: Synthetic oligonucleotide
uccucucucuuuguuaaaa

SEQ ID NO: 2594486 - RNA, 19 nt, Artificial Sequence
  Description of Artificial Sequence: Synthetic oligonucleotide
aggaacgccgcuggaacuc

SEQ ID NO: 2594487 - RNA, 19 nt, Artificial Sequence
  Description of Artificial Sequence: Synthetic oligonucleotide
ggcuuguuucucuucauuc

SEQ ID NO: 2594488 - RNA, 19 nt, Artificial Sequence
  Description of Artificial Sequence: Synthetic oligonucleotide
aaggggugaaaggcagcuc

SEQ ID NO: 2594489 - RNA, 19 nt, Artificial Sequence
  Description of Artificial Sequence: Synthetic oligonucleotide
ggaucugagggcuggacca

SEQ ID NO: 2594490 - RNA, 19 nt, Artificial Sequence
  Description of Artificial Sequence: Synthetic oligonucleotide
ggugaaaggcagcucuuug

SEQ ID NO: 2594491 - RNA, 19 nt, Artificial Sequence
  Description of Artificial Sequence: Synthetic oligonucleotide
cucgucgauuaaauaagga

SEQ ID NO: 2594492 - RNA, 19 nt, Artificial Sequence
  Description of Artificial Sequence: Synthetic oligonucleotide
uucgccucccgcccggccc

SEQ ID NO: 2594493 - RNA, 19 nt, Artificial Sequence
  Description of Artificial Sequence: Synthetic oligonucleotide
accucacagacugaguccu

SEQ ID NO: 2594494 - RNA, 19 nt, Artificial Sequence
  Description of Artificial Sequence: Synthetic oligonucleotide
gaugccagcccaaaggggu

SEQ ID NO: 2594495 - RNA, 19 nt, Artificial Sequence
  Description of Artificial Sequence: Synthetic oligonucleotide
cagcccaaaggggugaaag

SEQ ID NO: 2594496 - RNA, 19 nt, Artificial Sequence
  Description of Artificial Sequence: Synthetic oligonucleotide
ucaugagucuucgccuccc

SEQ ID NO: 2594497 - RNA, 19 nt, Artificial Sequence
  Description of Artificial Sequence: Synthetic oligonucleotide
uuaucaucuguggccauuu

SEQ ID NO: 2594498 - RNA, 19 nt, Artificial Sequence
  Description of Artificial Sequence: Synthetic oligonucleotide
accacccgggucucucgcc

SEQ ID NO: 2594499 - RNA, 19 nt, Artificial Sequence
  Description of Artificial Sequence: Synthetic oligonucleotide
uccucuacucgucgauuaa

SEQ ID NO: 2594500 - RNA, 19 nt, Artificial Sequence
  Description of Artificial Sequence: Synthetic oligonucleotide
ccaaauuaucgucaccuuc

SEQ ID NO: 2594501 - RNA, 19 nt, Artificial Sequence
  Description of Artificial Sequence: Synthetic oligonucleotide
aaccaaauacuuagccaaa

SEQ ID NO: 2594502 - RNA, 19 nt, Artificial Sequence
  Description of Artificial Sequence: Synthetic oligonucleotide
uggucgggagucaaagguu

SEQ ID NO: 2594503 - RNA, 19 nt, Artificial Sequence
  Description of Artificial Sequence: Synthetic oligonucleotide
caugagucuucgccucccg

SEQ ID NO: 2594504 - RNA, 19 nt, Artificial Sequence
  Description of Artificial Sequence: Synthetic oligonucleotide
acugaguccucgaagggau

SEQ ID NO: 2594505 - RNA, 19 nt, Artificial Sequence
  Description of Artificial Sequence: Synthetic oligonucleotide
guaccggugaccucacaga

SEQ ID NO: 2594506 - RNA, 19 nt, Artificial Sequence
  Description of Artificial Sequence: Synthetic oligonucleotide
cucuuaucaucuguggcca

SEQ ID NO: 2594507 - RNA, 19 nt, Artificial Sequence
  Description of Artificial Sequence: Synthetic oligonucleotide
gacugaguccucgaaggga

SEQ ID NO: 2594508 - RNA, 19 nt, Artificial Sequence
  Description of Artificial Sequence: Synthetic oligonucleotide
cucccauguaggaaaacaa

SEQ ID NO: 2594509 - RNA, 19 nt, Artificial Sequence
  Description of Artificial Sequence: Synthetic oligonucleotide
gguagauaggcucccaugu

SEQ ID NO: 2594510 - RNA, 19 nt, Artificial Sequence
  Description of Artificial Sequence: Synthetic oligonucleotide
agucuucgccucccgcccg

SEQ ID NO: 2594511 - RNA, 19 nt, Artificial Sequence
  Description of Artificial Sequence: Synthetic oligonucleotide
gccauuucaugagucuucg

SEQ ID NO: 2594512 - RNA, 19 nt, Artificial Sequence
  Description of Artificial Sequence: Synthetic oligonucleotide
accaaauacuuagccaaau

SEQ ID NO: 2594513 - RNA, 19 nt, Artificial Sequence
  Description of Artificial Sequence: Synthetic oligonucleotide
uggcuuguuucucuucauu

SEQ ID NO: 2594514 - RNA, 19 nt, Artificial Sequence
  Description of Artificial Sequence: Synthetic oligonucleotide
uugcaccugaagccugcug

SEQ ID NO: 2594515 - RNA, 19 nt, Artificial Sequence
  Description of Artificial Sequence: Synthetic oligonucleotide
gugucagaaaccaaauacu

SEQ ID NO: 2594516 - RNA, 19 nt, Artificial Sequence
  Description of Artificial Sequence: Synthetic oligonucleotide
uucuaacacugaggaacgc

SEQ ID NO: 2594517 - RNA, 19 nt, Artificial Sequence
  Description of Artificial Sequence: Synthetic oligonucleotide
uccuucuaacacugaggaa

SEQ ID NO: 2594518 - RNA, 19 nt, Artificial Sequence
  Description of Artificial Sequence: Synthetic oligonucleotide
ccggugaccucacagacug

SEQ ID NO: 2594519 - RNA, 19 nt, Artificial Sequence
  Description of Artificial Sequence: Synthetic oligonucleotide
aucuguucugugucacuau

SEQ ID NO: 2594520 - RNA, 19 nt, Artificial Sequence
  Description of Artificial Sequence: Synthetic oligonucleotide
agcuguuguccuccagugu

SEQ ID NO: 2594521 - RNA, 19 nt, Artificial Sequence
  Description of Artificial Sequence: Synthetic oligonucleotide
aagguaccggugaccucac

SEQ ID NO: 2594522 - RNA, 19 nt, Artificial Sequence
  Description of Artificial Sequence: Synthetic oligonucleotide
gucagaaaccaaauacuua

SEQ ID NO: 2594523 - RNA, 19 nt, Artificial Sequence
  Description of Artificial Sequence: Synthetic oligonucleotide
ugagagcuguuguccucca

SEQ ID NO: 2594524 - RNA, 19 nt, Artificial Sequence
  Description of Artificial Sequence: Synthetic oligonucleotide
agguuuaaagugagugaga

SEQ ID NO: 2594525 - RNA, 19 nt, Artificial Sequence
  Description of Artificial Sequence: Synthetic oligonucleotide
ucgggagucaaagguuuaa

SEQ ID NO: 2594526 - RNA, 19 nt, Artificial Sequence
  Description of Artificial Sequence: Synthetic oligonucleotide
gcaaaucauuagcaggguc

SEQ ID NO: 2594527 - RNA, 19 nt, Artificial Sequence
  Description of Artificial Sequence: Synthetic oligonucleotide
aacuccucauuaagcugcu

SEQ ID NO: 2594528 - RNA, 19 nt, Artificial Sequence
  Description of Artificial Sequence: Synthetic oligonucleotide
caucgcuuauugagagcug

SEQ ID NO: 2594529 - RNA, 19 nt, Artificial Sequence
  Description of Artificial Sequence: Synthetic oligonucleotide
agcuccagguuguuaugau

SEQ ID NO: 2594530 - RNA, 19 nt, Artificial Sequence
  Description of Artificial Sequence: Synthetic oligonucleotide
aacgccgcuggaacuccuc

SEQ ID NO: 2594531 - RNA, 19 nt, Artificial Sequence
  Description of Artificial Sequence: Synthetic oligonucleotide
cauucuccucccgcaagag

SEQ ID NO: 2594532 - RNA, 19 nt, Artificial Sequence
  Description of Artificial Sequence: Synthetic oligonucleotide
acacugaggaacgccgcug

SEQ ID NO: 2594533 - RNA, 19 nt, Artificial Sequence
  Description of Artificial Sequence: Synthetic oligonucleotide
auaggcucccauguaggaa

SEQ ID NO: 2594534 - RNA, 19 nt, Artificial Sequence
  Description of Artificial Sequence: Synthetic oligonucleotide
gcagucuuuccauggcuug

SEQ ID NO: 2594535 - RNA, 19 nt, Artificial Sequence
  Description of Artificial Sequence: Synthetic oligonucleotide
cuggucgggagucaaaggu

SEQ ID NO: 2594536 - RNA, 19 nt, Artificial Sequence
  Description of Artificial Sequence: Synthetic oligonucleotide
guagauaggcucccaugua

SEQ ID NO: 2594537 - RNA, 19 nt, Artificial Sequence
  Description of Artificial Sequence: Synthetic oligonucleotide
ucgcuuauugagagcuguu

SEQ ID NO: 2594538 - RNA, 19 nt, Artificial Sequence
  Description of Artificial Sequence: Synthetic oligonucleotide
uggccauuucaugagucuu

SEQ ID NO: 2594539 - RNA, 19 nt, Artificial Sequence
  Description of Artificial Sequence: Synthetic oligonucleotide
gguuuaaagugagugagau

SEQ ID NO: 2594540 - RNA, 19 nt, Artificial Sequence
  Description of Artificial Sequence: Synthetic oligonucleotide
guuaugaugccagcccaaa

SEQ ID NO: 2594541 - RNA, 19 nt, Artificial Sequence
  Description of Artificial Sequence: Synthetic oligonucleotide
uuuccucuacucgucgauu

SEQ ID NO: 2594542 - RNA, 19 nt, Artificial Sequence
  Description of Artificial Sequence: Synthetic oligonucleotide
gcuuauugagagcuguugu

SEQ ID NO: 2594543 - RNA, 19 nt, Artificial Sequence
  Description of Artificial Sequence: Synthetic oligonucleotide
acugaggaacgccgcugga

SEQ ID NO: 2594544 - RNA, 19 nt, Artificial Sequence
  Description of Artificial Sequence: Synthetic oligonucleotide
aguccucgaagggaucuga

SEQ ID NO: 2594545 - RNA, 19 nt, Artificial Sequence
  Description of Artificial Sequence: Synthetic oligonucleotide
cuguuguccuccaguguca

SEQ ID NO: 2594546 - RNA, 19 nt, Artificial Sequence
  Description of Artificial Sequence: Synthetic oligonucleotide
gaaaggcagcucuuuggau

SEQ ID NO: 2594547 - RNA, 19 nt, Artificial Sequence
  Description of Artificial Sequence: Synthetic oligonucleotide
gagcagucuuuccauggcu

SEQ ID NO: 2594548 - RNA, 19 nt, Artificial Sequence
  Description of Artificial Sequence: Synthetic oligonucleotide
gaguccucgaagggaucug

SEQ ID NO: 2594549 - RNA, 19 nt, Artificial Sequence
  Description of Artificial Sequence: Synthetic oligonucleotide
ggcaucgcuuauugagagc

SEQ ID NO: 2594550 - RNA, 19 nt, Artificial Sequence
  Description of Artificial Sequence: Synthetic oligonucleotide
guaagguaccggugaccuc

SEQ ID NO: 2594551 - RNA, 19 nt, Artificial Sequence
  Description of Artificial Sequence: Synthetic oligonucleotide
gcucccauguaggaaaaca

SEQ ID NO: 2594552 - RNA, 19 nt, Artificial Sequence
  Description of Artificial Sequence: Synthetic oligonucleotide
agcagucuuuccauggcuu

SEQ ID NO: 2594553 - RNA, 19 nt, Artificial Sequence
  Description of Artificial Sequence: Synthetic oligonucleotide
cucuacucgucgauuaaau

SEQ ID NO: 2594554 - RNA, 19 nt, Artificial Sequence
  Description of Artificial Sequence: Synthetic oligonucleotide
agucuuuccauggcuuguu

SEQ ID NO: 2594555 - RNA, 19 nt, Artificial Sequence
  Description of Artificial Sequence: Synthetic oligonucleotide
ccuggucgggagucaaagg

SEQ ID NO: 2594556 - RNA, 19 nt, Artificial Sequence
  Description of Artificial Sequence: Synthetic oligonucleotide
guccucgaagggaucugag

SEQ ID NO: 2594557 - RNA, 19 nt, Artificial Sequence
  Description of Artificial Sequence: Synthetic oligonucleotide
cugaagccugcugcucucc

SEQ ID NO: 2594558 - RNA, 19 nt, Artificial Sequence
  Description of Artificial Sequence: Synthetic oligonucleotide
guggccauuucaugagucu

SEQ ID NO: 2594559 - RNA, 19 nt, Artificial Sequence
  Description of Artificial Sequence: Synthetic oligonucleotide
caggguccaaugucgggga

SEQ ID NO: 2594560 - RNA, 19 nt, Artificial Sequence
  Description of Artificial Sequence: Synthetic oligonucleotide
gcaucgcuuauugagagcu

SEQ ID NO: 2594561 - RNA, 19 nt, Artificial Sequence
  Description of Artificial Sequence: Synthetic oligonucleotide
ucgucaccuucuucagcaa

SEQ ID NO: 2594562 - RNA, 19 nt, Artificial Sequence
  Description of Artificial Sequence: Synthetic oligonucleotide
cucccgcaagagcuccagg

SEQ ID NO: 2594563 - RNA, 19 nt, Artificial Sequence
  Description of Artificial Sequence: Synthetic oligonucleotide
cauuagcaggguccaaugu

SEQ ID NO: 2594564 - RNA, 19 nt, Artificial Sequence
  Description of Artificial Sequence: Synthetic oligonucleotide
cugaguccucgaagggauc

SEQ ID NO: 2594565 - RNA, 19 nt, Artificial Sequence
  Description of Artificial Sequence: Synthetic oligonucleotide
gcgaggcaaaucauuagca

SEQ ID NO: 2594566 - RNA, 19 nt, Artificial Sequence
  Description of Artificial Sequence: Synthetic oligonucleotide
ccgcaagagcuccagguug

SEQ ID NO: 2594567 - RNA, 19 nt, Artificial Sequence
  Description of Artificial Sequence: Synthetic oligonucleotide
gagaugagaaggacucggu

SEQ ID NO: 2594568 - RNA, 19 nt, Artificial Sequence
  Description of Artificial Sequence: Synthetic oligonucleotide
cugugucacuaucaucaaa

SEQ ID NO: 2594569 - RNA, 19 nt, Artificial Sequence
  Description of Artificial Sequence: Synthetic oligonucleotide
ggagcgaggcaaaucauua

SEQ ID NO: 2594570 - RNA, 19 nt, Artificial Sequence
  Description of Artificial Sequence: Synthetic oligonucleotide
uccucccgcaagagcucca

SEQ ID NO: 2594571 - RNA, 19 nt, Artificial Sequence
  Description of Artificial Sequence: Synthetic oligonucleotide
cacagacugaguccucgaa

SEQ ID NO: 2594572 - RNA, 19 nt, Artificial Sequence
  Description of Artificial Sequence: Synthetic oligonucleotide
caccacccgggucucucgc

SEQ ID NO: 2594573 - RNA, 19 nt, Artificial Sequence
  Description of Artificial Sequence: Synthetic oligonucleotide
ggggaacucuuaucaucug

SEQ ID NO: 2594574 - RNA, 19 nt, Artificial Sequence
  Description of Artificial Sequence: Synthetic oligonucleotide
gaugaaggcaucgcuuauu

SEQ ID NO: 2594575 - RNA, 19 nt, Artificial Sequence
  Description of Artificial Sequence: Synthetic oligonucleotide
cccaaaggggugaaaggca

SEQ ID NO: 2594576 - RNA, 19 nt, Artificial Sequence
  Description of Artificial Sequence: Synthetic oligonucleotide
ggccauuucaugagucuuc

SEQ ID NO: 2594577 - RNA, 19 nt, Artificial Sequence
  Description of Artificial Sequence: Synthetic oligonucleotide
gaucugagggcuggaccaa

SEQ ID NO: 2594578 - RNA, 19 nt, Artificial Sequence
  Description of Artificial Sequence: Synthetic oligonucleotide
augccagcccaaaggggug

SEQ ID NO: 2594579 - RNA, 19 nt, Artificial Sequence
  Description of Artificial Sequence: Synthetic oligonucleotide
ccauuucaugagucuucgc

SEQ ID NO: 2594580 - RNA, 19 nt, Artificial Sequence
  Description of Artificial Sequence: Synthetic oligonucleotide
accggugaccucacagacu

SEQ ID NO: 2594581 - RNA, 19 nt, Artificial Sequence
  Description of Artificial Sequence: Synthetic oligonucleotide
caacuugcaccugaagccu

SEQ ID NO: 2594582 - RNA, 19 nt, Artificial Sequence
  Description of Artificial Sequence: Synthetic oligonucleotide
gcuggaccaacuugcaccu

SEQ ID NO: 2594583 - RNA, 19 nt, Artificial Sequence
  Description of Artificial Sequence: Synthetic oligonucleotide
cugaggaacgccgcuggaa

SEQ ID NO: 2594584 - RNA, 19 nt, Artificial Sequence
  Description of Artificial Sequence: Synthetic oligonucleotide
cuucgccucccgcccggcc

SEQ ID NO: 2594585 - RNA, 19 nt, Artificial Sequence
  Description of Artificial Sequence: Synthetic oligonucleotide
gugucacuaucaucaaauu

SEQ ID NO: 2594586 - RNA, 19 nt, Artificial Sequence
  Description of Artificial Sequence: Synthetic oligonucleotide
caaucuguucugugucacu

SEQ ID NO: 2594587 - RNA, 19 nt, Artificial Sequence
  Description of Artificial Sequence: Synthetic oligonucleotide
aggguccaaugucggggaa

SEQ ID NO: 2594588 - RNA, 19 nt, Artificial Sequence
  Description of Artificial Sequence: Synthetic oligonucleotide
agggcuggaccaacuugca

SEQ ID NO: 2594589 - RNA, 19 nt, Artificial Sequence
  Description of Artificial Sequence: Synthetic oligonucleotide
cgcuuauugagagcuguug

SEQ ID NO: 2594590 - RNA, 19 nt, Artificial Sequence
  Description of Artificial Sequence: Synthetic oligonucleotide
ggaacgccgcuggaacucc

SEQ ID NO: 2594591 - RNA, 19 nt, Artificial Sequence
  Description of Artificial Sequence: Synthetic oligonucleotide
gucuuuaaaccaggauggu

SEQ ID NO: 2594592 - RNA, 19 nt, Artificial Sequence
  Description of Artificial Sequence: Synthetic oligonucleotide
caaugucggggaacucuua

SEQ ID NO: 2594593 - RNA, 19 nt, Artificial Sequence
  Description of Artificial Sequence: Synthetic oligonucleotide
gggcuggaccaacuugcac

SEQ ID NO: 2594594 - RNA, 19 nt, Artificial Sequence
  Description of Artificial Sequence: Synthetic oligonucleotide
gguccaaugucggggaacu

SEQ ID NO: 2594595 - RNA, 19 nt, Artificial Sequence
  Description of Artificial Sequence: Synthetic oligonucleotide
ggguccaaugucggggaac

SEQ ID NO: 2594596 - RNA, 19 nt, Artificial Sequence
  Description of Artificial Sequence: Synthetic oligonucleotide
ucuucgccucccgcccggc

SEQ ID NO: 2594597 - RNA, 19 nt, Artificial Sequence
  Description of Artificial Sequence: Synthetic oligonucleotide
ggcccucccaccacccggg

SEQ ID NO: 2594598 - RNA, 19 nt, Artificial Sequence
  Description of Artificial Sequence: Synthetic oligonucleotide
agguaccggugaccucaca

SEQ ID NO: 2594599 - RNA, 19 nt, Artificial Sequence
  Description of Artificial Sequence: Synthetic oligonucleotide
gucggggaacucuuaucau

SEQ ID NO: 2594600 - RNA, 19 nt, Artificial Sequence
  Description of Artificial Sequence: Synthetic oligonucleotide
cuuaucaucuguggccauu

SEQ ID NO: 2594601 - RNA, 19 nt, Artificial Sequence
  Description of Artificial Sequence: Synthetic oligonucleotide
ccagguuguuaugaugcca

SEQ ID NO: 2594602 - RNA, 19 nt, Artificial Sequence
  Description of Artificial Sequence: Synthetic oligonucleotide
ccaccacccgggucucucg

SEQ ID NO: 2594603 - RNA, 19 nt, Artificial Sequence
  Description of Artificial Sequence: Synthetic oligonucleotide
cuguggccauuucaugagu

SEQ ID NO: 2594604 - RNA, 19 nt, Artificial Sequence
  Description of Artificial Sequence: Synthetic oligonucleotide
cuggaccaacuugcaccug

SEQ ID NO: 2594605 - RNA, 19 nt, Artificial Sequence
  Description of Artificial Sequence: Synthetic oligonucleotide
cauccuggucgggagucaa

SEQ ID NO: 2594606 - RNA, 19 nt, Artificial Sequence
  Description of Artificial Sequence: Synthetic oligonucleotide
ggcaaaucauuagcagggu

SEQ ID NO: 2594607 - RNA, 19 nt, Artificial Sequence
  Description of Artificial Sequence: Synthetic oligonucleotide
aggcucccauguaggaaaa

SEQ ID NO: 2594608 - RNA, 19 nt, Artificial Sequence
  Description of Artificial Sequence: Synthetic oligonucleotide
cggggaacucuuaucaucu

SEQ ID NO: 2594609 - RNA, 19 nt, Artificial Sequence
  Description of Artificial Sequence: Synthetic oligonucleotide
gucgggagucaaagguuua

SEQ ID NO: 2594610 - RNA, 19 nt, Artificial Sequence
  Description of Artificial Sequence: Synthetic oligonucleotide
ccucccaccacccgggucu

SEQ ID NO: 2594611 - RNA, 19 nt, Artificial Sequence
  Description of Artificial Sequence: Synthetic oligonucleotide
gcaccugaagccugcugcu

SEQ ID NO: 2594612 - RNA, 19 nt, Artificial Sequence
  Description of Artificial Sequence: Synthetic oligonucleotide
guccaaugucggggaacuc

SEQ ID NO: 2594613 - RNA, 19 nt, Artificial Sequence
  Description of Artificial Sequence: Synthetic oligonucleotide
gugaccucacagacugagu

SEQ ID NO: 2594614 - RNA, 19 nt, Artificial Sequence
  Description of Artificial Sequence: Synthetic oligonucleotide
ggucgggagucaaagguuu

SEQ ID NO: 2594615 - RNA, 19 nt, Artificial Sequence
  Description of Artificial Sequence: Synthetic oligonucleotide
ggaccaacuugcaccugaa

SEQ ID NO: 2594616 - RNA, 19 nt, Artificial Sequence
  Description of Artificial Sequence: Synthetic oligonucleotide
gccaaauuaucgucaccuu

SEQ ID NO: 2594617 - RNA, 19 nt, Artificial Sequence
  Description of Artificial Sequence: Synthetic oligonucleotide
acuccucauuaagcugcuu

SEQ ID NO: 2594618 - RNA, 19 nt, Artificial Sequence
  Description of Artificial Sequence: Synthetic oligonucleotide
gggcucauccuggucggga

SEQ ID NO: 2594619 - RNA, 19 nt, Artificial Sequence
  Description of Artificial Sequence: Synthetic oligonucleotide
ccucccgcaagagcuccag

SEQ ID NO: 2594620 - RNA, 19 nt, Artificial Sequence
  Description of Artificial Sequence: Synthetic oligonucleotide
ccucacagacugaguccuc

SEQ ID NO: 2594621 - RNA, 19 nt, Artificial Sequence
  Description of Artificial Sequence: Synthetic oligonucleotide
ggcucccauguaggaaaac

SEQ ID NO: 2594622 - RNA, 19 nt, Artificial Sequence
  Description of Artificial Sequence: Synthetic oligonucleotide
cugagggcuggaccaacuu

SEQ ID NO: 2594623 - RNA, 19 nt, Artificial Sequence
  Description of Artificial Sequence: Synthetic oligonucleotide
cggcccucccaccacccgg

SEQ ID NO: 2594624 - RNA, 19 nt, Artificial Sequence
  Description of Artificial Sequence: Synthetic oligonucleotide
ccucuacucgucgauuaaa

SEQ ID NO: 2594625 - RNA, 19 nt, Artificial Sequence
  Description of Artificial Sequence: Synthetic oligonucleotide
ccaaugucggggaacucuu

SEQ ID NO: 2594626 - RNA, 19 nt, Artificial Sequence
  Description of Artificial Sequence: Synthetic oligonucleotide
cuugcaccugaagccugcu

SEQ ID NO: 2594627 - RNA, 19 nt, Artificial Sequence
  Description of Artificial Sequence: Synthetic oligonucleotide
gggagcgaggcaaaucauu

SEQ ID NO: 2594628 - RNA, 19 nt, Artificial Sequence
  Description of Artificial Sequence: Synthetic oligonucleotide
gaacgccgcuggaacuccu

SEQ ID NO: 2594629 - RNA, 19 nt, Artificial Sequence
  Description of Artificial Sequence: Synthetic oligonucleotide
cucccaccacccgggucuc

SEQ ID NO: 2594630 - RNA, 19 nt, Artificial Sequence
  Description of Artificial Sequence: Synthetic oligonucleotide
ccgcuggaacuccucauua

SEQ ID NO: 2594631 - RNA, 19 nt, Artificial Sequence
  Description of Artificial Sequence: Synthetic oligonucleotide
ccaggaugguucagagugu

SEQ ID NO: 2594632 - RNA, 19 nt, Artificial Sequence
  Description of Artificial Sequence: Synthetic oligonucleotide
cgcuggaacuccucauuaa

SEQ ID NO: 2594633 - RNA, 19 nt, Artificial Sequence
  Description of Artificial Sequence: Synthetic oligonucleotide
cgauuaaauaaggauucuu

SEQ ID NO: 2594634 - RNA, 19 nt, Artificial Sequence
  Description of Artificial Sequence: Synthetic oligonucleotide
gccgcuggaacuccucauu

SEQ ID NO: 2594635 - RNA, 19 nt, Artificial Sequence
  Description of Artificial Sequence: Synthetic oligonucleotide
cccaccacccgggucucuc

SEQ ID NO: 2594636 - RNA, 19 nt, Artificial Sequence
  Description of Artificial Sequence: Synthetic oligonucleotide
cgcaagagcuccagguugu

SEQ ID NO: 2594637 - RNA, 19 nt, Artificial Sequence
  Description of Artificial Sequence: Synthetic oligonucleotide
gggugaaaggcagcucuuu

SEQ ID NO: 2594638 - RNA, 19 nt, Artificial Sequence
  Description of Artificial Sequence: Synthetic oligonucleotide
gccggcccucccaccaccc

SEQ ID NO: 2594639 - RNA, 19 nt, Artificial Sequence
  Description of Artificial Sequence: Synthetic oligonucleotide
cccucccaccacccggguc

SEQ ID NO: 2594640 - RNA, 19 nt, Artificial Sequence
  Description of Artificial Sequence: Synthetic oligonucleotide
cgggagucaaagguuuaaa

SEQ ID NO: 2594641 - RNA, 19 nt, Artificial Sequence
  Description of Artificial Sequence: Synthetic oligonucleotide
cgccggcccucccaccacc

SEQ ID NO: 2594642 - RNA, 19 nt, Artificial Sequence
  Description of Artificial Sequence: Synthetic oligonucleotide
cccgcaagagcuccagguu

SEQ ID NO: 2594643 - RNA, 19 nt, Artificial Sequence
  Description of Artificial Sequence: Synthetic oligonucleotide
ggggagcgaggcaaaucau

SEQ ID NO: 2594644 - RNA, 19 nt, Artificial Sequence
  Description of Artificial Sequence: Synthetic oligonucleotide
ccacccgggucucucgccu

SEQ ID NO: 2594645 - RNA, 19 nt, Artificial Sequence
  Description of Artificial Sequence: Synthetic oligonucleotide
cgucaccuucuucagcaau

SEQ ID NO: 2594646 - RNA, 19 nt, Artificial Sequence
  Description of Artificial Sequence: Synthetic oligonucleotide
ccgccggcccucccaccac

SEQ ID NO: 2594647 - RNA, 19 nt, Artificial Sequence
  Description of Artificial Sequence: Synthetic oligonucleotide
gcaagagcuccagguuguu

SEQ ID NO: 2594648 - RNA, 19 nt, Artificial Sequence
  Description of Artificial Sequence: Synthetic oligonucleotide
ccccuucuccucucucuuu

SEQ ID NO: 2594649 - RNA, 19 nt, Artificial Sequence
  Description of Artificial Sequence: Synthetic oligonucleotide
cgccucccgcccggcccgc

SEQ ID NO: 2594650 - RNA, 19 nt, Artificial Sequence
  Description of Artificial Sequence: Synthetic oligonucleotide
aacaaguucacacaagugc

SEQ ID NO: 2594651 - RNA, 19 nt, Artificial Sequence
  Description of Artificial Sequence: Synthetic oligonucleotide
aaaacgaacaaguucacac

SEQ ID NO: 2594652 - RNA, 19 nt, Artificial Sequence
  Description of Artificial Sequence: Synthetic oligonucleotide
uuuguaauaauucuguccc

SEQ ID NO: 2594653 - RNA, 19 nt, Artificial Sequence
  Description of Artificial Sequence: Synthetic oligonucleotide
uugcaauuaaaccaaaagg

SEQ ID NO: 2594654 - RNA, 19 nt, Artificial Sequence
  Description of Artificial Sequence: Synthetic oligonucleotide
ugcaauuaaaccaaaaggu

SEQ ID NO: 2594655 - RNA, 19 nt, Artificial Sequence
  Description of Artificial Sequence: Synthetic oligonucleotide
uaauaaacuuauuugagug

SEQ ID NO: 2594656 - RNA, 19 nt, Artificial Sequence
  Description of Artificial Sequence: Synthetic oligonucleotide
aaucacaagagaaaugugg

SEQ ID NO: 2594657 - RNA, 19 nt, Artificial Sequence
  Description of Artificial Sequence: Synthetic oligonucleotide
aacaaaauggguauguguc

SEQ ID NO: 2594658 - RNA, 19 nt, Artificial Sequence
  Description of Artificial Sequence: Synthetic oligonucleotide
aaacuuauuugaguguggc

SEQ ID NO: 2594659 - RNA, 19 nt, Artificial Sequence
  Description of Artificial Sequence: Synthetic oligonucleotide
cauaauaaacuuauuugag

SEQ ID NO: 2594660 - RNA, 19 nt, Artificial Sequence
  Description of Artificial Sequence: Synthetic oligonucleotide
aagagaaauguggaaaacg

SEQ ID NO: 2594661 - RNA, 19 nt, Artificial Sequence
  Description of Artificial Sequence: Synthetic oligonucleotide
aauaaacuuauuugagugu

SEQ ID NO: 2594662 - RNA, 19 nt, Artificial Sequence
  Description of Artificial Sequence: Synthetic oligonucleotide
aaaauuucugcuucuccug

SEQ ID NO: 2594663 - RNA, 19 nt, Artificial Sequence
  Description of Artificial Sequence: Synthetic oligonucleotide
cuugcaauuaaaccaaaag

SEQ ID NO: 2594664 - RNA, 19 nt, Artificial Sequence
  Description of Artificial Sequence: Synthetic oligonucleotide
uucacaggcauaauaaacu

SEQ ID NO: 2594665 - RNA, 19 nt, Artificial Sequence
  Description of Artificial Sequence: Synthetic oligonucleotide
ucagcuuccacacuugggc

SEQ ID NO: 2594666 - RNA, 19 nt, Artificial Sequence
  Description of Artificial Sequence: Synthetic oligonucleotide
uucuuuguaauaauucugu

SEQ ID NO: 2594667 - RNA, 19 nt, Artificial Sequence
  Description of Artificial Sequence: Synthetic oligonucleotide
cauggcaucagacaggaag

SEQ ID NO: 2594668 - RNA, 19 nt, Artificial Sequence
  Description of Artificial Sequence: Synthetic oligonucleotide
acuuauuugaguguggcag

SEQ ID NO: 2594669 - RNA, 19 nt, Artificial Sequence
  Description of Artificial Sequence: Synthetic oligonucleotide
gaaacccuaacaaaauggg

SEQ ID NO: 2594670 - RNA, 19 nt, Artificial Sequence
  Description of Artificial Sequence: Synthetic oligonucleotide
uguggcagauaccacacag

SEQ ID NO: 2594671 - RNA, 19 nt, Artificial Sequence
  Description of Artificial Sequence: Synthetic oligonucleotide
uaaacuuauuugagugugg

SEQ ID NO: 2594672 - RNA, 19 nt, Artificial Sequence
  Description of Artificial Sequence: Synthetic oligonucleotide
agaaacccuaacaaaaugg

SEQ ID NO: 2594673 - RNA, 19 nt, Artificial Sequence
  Description of Artificial Sequence: Synthetic oligonucleotide
ggcauaauaaacuuauuug

SEQ ID NO: 2594674 - RNA, 19 nt, Artificial Sequence
  Description of Artificial Sequence: Synthetic oligonucleotide
aaacgaacaaguucacaca

SEQ ID NO: 2594675 - RNA, 19 nt, Artificial Sequence
  Description of Artificial Sequence: Synthetic oligonucleotide
uaauaauucugucccaaaa

SEQ ID NO: 2594676 - RNA, 19 nt, Artificial Sequence
  Description of Artificial Sequence: Synthetic oligonucleotide
auaaacuuauuugagugug

SEQ ID NO: 2594677 - RNA, 19 nt, Artificial Sequence
  Description of Artificial Sequence: Synthetic oligonucleotide
ucacacaagugccagcucc

SEQ ID NO: 2594678 - RNA, 19 nt, Artificial Sequence
  Description of Artificial Sequence: Synthetic oligonucleotide
uguaguggaacugcagugg

SEQ ID NO: 2594679 - RNA, 19 nt, Artificial Sequence
  Description of Artificial Sequence: Synthetic oligonucleotide
uggcagauaccacacaggc

SEQ ID NO: 2594680 - RNA, 19 nt, Artificial Sequence
  Description of Artificial Sequence: Synthetic oligonucleotide
guuugagauuucuucagag

SEQ ID NO: 2594681 - RNA, 19 nt, Artificial Sequence
  Description of Artificial Sequence: Synthetic oligonucleotide
cuucuuuguaauaauucug

SEQ ID NO: 2594682 - RNA, 19 nt, Artificial Sequence
  Description of Artificial Sequence: Synthetic oligonucleotide
aaauguggaaaacgaacaa

SEQ ID NO: 2594683 - RNA, 19 nt, Artificial Sequence
  Description of Artificial Sequence: Synthetic oligonucleotide
gaacgcugggccuauuucg

SEQ ID NO: 2594684 - RNA, 19 nt, Artificial Sequence
  Description of Artificial Sequence: Synthetic oligonucleotide
auggguaugugucuguaag

SEQ ID NO: 2594685 - RNA, 19 nt, Artificial Sequence
  Description of Artificial Sequence: Synthetic oligonucleotide
aaagguggaagugugugug

SEQ ID NO: 2594686 - RNA, 19 nt, Artificial Sequence
  Description of Artificial Sequence: Synthetic oligonucleotide
gucaucaguagagagagag

SEQ ID NO: 2594687 - RNA, 19 nt, Artificial Sequence
  Description of Artificial Sequence: Synthetic oligonucleotide
gagauuucuucagaggcgg

SEQ ID NO: 2594688 - RNA, 19 nt, Artificial Sequence
  Description of Artificial Sequence: Synthetic oligonucleotide
ugcgauggcauauuccucc

SEQ ID NO: 2594689 - RNA, 19 nt, Artificial Sequence
  Description of Artificial Sequence: Synthetic oligonucleotide
ucaucacagacgaaagccc

SEQ ID NO: 2594690 - RNA, 19 nt, Artificial Sequence
  Description of Artificial Sequence: Synthetic oligonucleotide
aacgaacaaguucacacaa

SEQ ID NO: 2594691 - RNA, 19 nt, Artificial Sequence
  Description of Artificial Sequence: Synthetic oligonucleotide
uaucauugcccuccggucc

SEQ ID NO: 2594692 - RNA, 19 nt, Artificial Sequence
  Description of Artificial Sequence: Synthetic oligonucleotide
uucagaggcggccucauca

SEQ ID NO: 2594693 - RNA, 19 nt, Artificial Sequence
  Description of Artificial Sequence: Synthetic oligonucleotide
cugaguucauugcacaggg

SEQ ID NO: 2594694 - RNA, 19 nt, Artificial Sequence
  Description of Artificial Sequence: Synthetic oligonucleotide
guaugugucuguaaggugc

SEQ ID NO: 2594695 - RNA, 19 nt, Artificial Sequence
  Description of Artificial Sequence: Synthetic oligonucleotide
aggaagcugaguucauugc

SEQ ID NO: 2594696 - RNA, 19 nt, Artificial Sequence
  Description of Artificial Sequence: Synthetic oligonucleotide
gaguuugagauuucuucag

SEQ ID NO: 2594697 - RNA, 19 nt, Artificial Sequence
  Description of Artificial Sequence: Synthetic oligonucleotide
uuucggauaucauugcccu

SEQ ID NO: 2594698 - RNA, 19 nt, Artificial Sequence
  Description of Artificial Sequence: Synthetic oligonucleotide
uuaaaccaaaagguggaag

SEQ ID NO: 2594699 - RNA, 19 nt, Artificial Sequence
  Description of Artificial Sequence: Synthetic oligonucleotide
aaaagguggaagugugugu

SEQ ID NO: 2594700 - RNA, 19 nt, Artificial Sequence
  Description of Artificial Sequence: Synthetic oligonucleotide
uggguuugagaucuuggcc

SEQ ID NO: 2594701 - RNA, 19 nt, Artificial Sequence
  Description of Artificial Sequence: Synthetic oligonucleotide
uaagcacuggcaaucacaa

SEQ ID NO: 2594702 - RNA, 19 nt, Artificial Sequence
  Description of Artificial Sequence: Synthetic oligonucleotide
gaguucauugcacaggguc

SEQ ID NO: 2594703 - RNA, 19 nt, Artificial Sequence
  Description of Artificial Sequence: Synthetic oligonucleotide
ucuuucggauaucauugcc

SEQ ID NO: 2594704 - RNA, 19 nt, Artificial Sequence
  Description of Artificial Sequence: Synthetic oligonucleotide
caucaguagagagagagac

SEQ ID NO: 2594705 - RNA, 19 nt, Artificial Sequence
  Description of Artificial Sequence: Synthetic oligonucleotide
caggcuugcaauuaaacca

SEQ ID NO: 2594706 - RNA, 19 nt, Artificial Sequence
  Description of Artificial Sequence: Synthetic oligonucleotide
aaaccaaaagguggaagug

SEQ ID NO: 2594707 - RNA, 19 nt, Artificial Sequence
  Description of Artificial Sequence: Synthetic oligonucleotide
caccauuagcccaagcagg

SEQ ID NO: 2594708 - RNA, 19 nt, Artificial Sequence
  Description of Artificial Sequence: Synthetic oligonucleotide
aggcauaauaaacuuauuu

SEQ ID NO: 2594709 - RNA, 19 nt, Artificial Sequence
  Description of Artificial Sequence: Synthetic oligonucleotide
ucagaaacccuaacaaaau

SEQ ID NO: 2594710 - RNA, 19 nt, Artificial Sequence
  Description of Artificial Sequence: Synthetic oligonucleotide
agucuuucggauaucauug

SEQ ID NO: 2594711 - RNA, 19 nt, Artificial Sequence
  Description of Artificial Sequence: Synthetic oligonucleotide
uucagccuugcaaaguccc

SEQ ID NO: 2594712 - RNA, 19 nt, Artificial Sequence
  Description of Artificial Sequence: Synthetic oligonucleotide
ucggauaucauugcccucc

SEQ ID NO: 2594713 - RNA, 19 nt, Artificial Sequence
  Description of Artificial Sequence: Synthetic oligonucleotide
uccaugagugcuuccuugg

SEQ ID NO: 2594714 - RNA, 19 nt, Artificial Sequence
  Description of Artificial Sequence: Synthetic oligonucleotide
acaagagaaauguggaaaa

SEQ ID NO: 2594715 - RNA, 19 nt, Artificial Sequence
  Description of Artificial Sequence: Synthetic oligonucleotide
uucgucagggcugugaucu

SEQ ID NO: 2594716 - RNA, 19 nt, Artificial Sequence
  Description of Artificial Sequence: Synthetic oligonucleotide
cuugcaaagucccagccuc

SEQ ID NO: 2594717 - RNA, 19 nt, Artificial Sequence
  Description of Artificial Sequence: Synthetic oligonucleotide
uggguaugugucuguaagg

SEQ ID NO: 2594718 - RNA, 19 nt, Artificial Sequence
  Description of Artificial Sequence: Synthetic oligonucleotide
guggaaaacgaacaaguuc

SEQ ID NO: 2594719 - RNA, 19 nt, Artificial Sequence
  Description of Artificial Sequence: Synthetic oligonucleotide
ucaaccauguaagcacugg

SEQ ID NO: 2594720 - RNA, 19 nt, Artificial Sequence
  Description of Artificial Sequence: Synthetic oligonucleotide
aacuuauuugaguguggca

SEQ ID NO: 2594721 - RNA, 19 nt, Artificial Sequence
  Description of Artificial Sequence: Synthetic oligonucleotide
aaucaggaguuugagauuu

SEQ ID NO: 2594722 - RNA, 19 nt, Artificial Sequence
  Description of Artificial Sequence: Synthetic oligonucleotide
aacccuaacaaaaugggua

SEQ ID NO: 2594723 - RNA, 19 nt, Artificial Sequence
  Description of Artificial Sequence: Synthetic oligonucleotide
ucuguaaggugcaaccaaa

SEQ ID NO: 2594724 - RNA, 19 nt, Artificial Sequence
  Description of Artificial Sequence: Synthetic oligonucleotide
aaaauggguaugugucugu

SEQ ID NO: 2594725 - RNA, 19 nt, Artificial Sequence
  Description of Artificial Sequence: Synthetic oligonucleotide
auugcacagggucucguag

SEQ ID NO: 2594726 - RNA, 19 nt, Artificial Sequence
  Description of Artificial Sequence: Synthetic oligonucleotide
acaaaauggguaugugucu

SEQ ID NO: 2594727 - RNA, 19 nt, Artificial Sequence
  Description of Artificial Sequence: Synthetic oligonucleotide
ugugucacuuggcauucag

SEQ ID NO: 2594728 - RNA, 19 nt, Artificial Sequence
  Description of Artificial Sequence: Synthetic oligonucleotide
uguaauaauucugucccaa

SEQ ID NO: 2594729 - RNA, 19 nt, Artificial Sequence
  Description of Artificial Sequence: Synthetic oligonucleotide
cucagaaacccuaacaaaa

SEQ ID NO: 2594730 - RNA, 19 nt, Artificial Sequence
  Description of Artificial Sequence: Synthetic oligonucleotide
augagugcuuccuuggugu

SEQ ID NO: 2594731 - RNA, 19 nt, Artificial Sequence
  Description of Artificial Sequence: Synthetic oligonucleotide
cacacuugggcugcgaugg

SEQ ID NO: 2594732 - RNA, 19 nt, Artificial Sequence
  Description of Artificial Sequence: Synthetic oligonucleotide
aguucacacaagugccagc

SEQ ID NO: 2594733 - RNA, 19 nt, Artificial Sequence
  Description of Artificial Sequence: Synthetic oligonucleotide
ugggagguggucagcaucc

SEQ ID NO: 2594734 - RNA, 19 nt, Artificial Sequence
  Description of Artificial Sequence: Synthetic oligonucleotide
ucacuuggcauucagccuu

SEQ ID NO: 2594735 - RNA, 19 nt, Artificial Sequence
  Description of Artificial Sequence: Synthetic oligonucleotide
accauuagcccaagcaggc

SEQ ID NO: 2594736 - RNA, 19 nt, Artificial Sequence
  Description of Artificial Sequence: Synthetic oligonucleotide
guaguggaacugcaguggg

SEQ ID NO: 2594737 - RNA, 19 nt, Artificial Sequence
  Description of Artificial Sequence: Synthetic oligonucleotide
aaccaaaaucaggaguuug

SEQ ID NO: 2594738 - RNA, 19 nt, Artificial Sequence
  Description of Artificial Sequence: Synthetic oligonucleotide
ucuuuguaauaauucuguc

SEQ ID NO: 2594739 - RNA, 19 nt, Artificial Sequence
  Description of Artificial Sequence: Synthetic oligonucleotide
ugcagcacgcuguuccugg

SEQ ID NO: 2594740 - RNA, 19 nt, Artificial Sequence
  Description of Artificial Sequence: Synthetic oligonucleotide
uagucuuucggauaucauu

SEQ ID NO: 2594741 - RNA, 19 nt, Artificial Sequence
  Description of Artificial Sequence: Synthetic oligonucleotide
ugacuucauggcaucagac

SEQ ID NO: 2594742 - RNA, 19 nt, Artificial Sequence
  Description of Artificial Sequence: Synthetic oligonucleotide
gauaucauugcccuccggu

SEQ ID NO: 2594743 - RNA, 19 nt, Artificial Sequence
  Description of Artificial Sequence: Synthetic oligonucleotide
aguuugagauuucuucaga

SEQ ID NO: 2594744 - RNA, 19 nt, Artificial Sequence
  Description of Artificial Sequence: Synthetic oligonucleotide
guggucagcauccagcuca

SEQ ID NO: 2594745 - RNA, 19 nt, Artificial Sequence
  Description of Artificial Sequence: Synthetic oligonucleotide
ucacagacgaaagcccugg

SEQ ID NO: 2594746 - RNA, 19 nt, Artificial Sequence
  Description of Artificial Sequence: Synthetic oligonucleotide
acaggcauaauaaacuuau

SEQ ID NO: 2594747 - RNA, 19 nt, Artificial Sequence
  Description of Artificial Sequence: Synthetic oligonucleotide
ucacaugugcucagcuucc

SEQ ID NO: 2594748 - RNA, 19 nt, Artificial Sequence
  Description of Artificial Sequence: Synthetic oligonucleotide
ugcaguggggucaucagua

SEQ ID NO: 2594749 - RNA, 19 nt, Artificial Sequence
  Description of Artificial Sequence: Synthetic oligonucleotide
gaggccacucugcagcacg

SEQ ID NO: 2594750 - RNA, 19 nt, Artificial Sequence
  Description of Artificial Sequence: Synthetic oligonucleotide
caaaagguggaagugugug

SEQ ID NO: 2594751 - RNA, 19 nt, Artificial Sequence
  Description of Artificial Sequence: Synthetic oligonucleotide
gucacaugugcucagcuuc

SEQ ID NO: 2594752 - RNA, 19 nt, Artificial Sequence
  Description of Artificial Sequence: Synthetic oligonucleotide
aucacaagagaaaugugga

SEQ ID NO: 2594753 - RNA, 19 nt, Artificial Sequence
  Description of Artificial Sequence: Synthetic oligonucleotide
ucaucaguagagagagaga

SEQ ID NO: 2594754 - RNA, 19 nt, Artificial Sequence
  Description of Artificial Sequence: Synthetic oligonucleotide
augccauccggaucugcgc

SEQ ID NO: 2594755 - RNA, 19 nt, Artificial Sequence
  Description of Artificial Sequence: Synthetic oligonucleotide
ggugcaaccaaaaucagga

SEQ ID NO: 2594756 - RNA, 19 nt, Artificial Sequence
  Description of Artificial Sequence: Synthetic oligonucleotide
caggaagcugaguucauug

SEQ ID NO: 2594757 - RNA, 19 nt, Artificial Sequence
  Description of Artificial Sequence: Synthetic oligonucleotide
ucucguagcggaaugccau

SEQ ID NO: 2594758 - RNA, 19 nt, Artificial Sequence
  Description of Artificial Sequence: Synthetic oligonucleotide
uaguggaacugcagugggg

SEQ ID NO: 2594759 - RNA, 19 nt, Artificial Sequence
  Description of Artificial Sequence: Synthetic oligonucleotide
aguguggcagauaccacac

SEQ ID NO: 2594760 - RNA, 19 nt, Artificial Sequence
  Description of Artificial Sequence: Synthetic oligonucleotide
cauucagccuugcaaaguc

SEQ ID NO: 2594761 - RNA, 19 nt, Artificial Sequence
  Description of Artificial Sequence: Synthetic oligonucleotide
guuccuggcgaucucacac

SEQ ID NO: 2594762 - RNA, 19 nt, Artificial Sequence
  Description of Artificial Sequence: Synthetic oligonucleotide
aaccauguaagcacuggca

SEQ ID NO: 2594763 - RNA, 19 nt, Artificial Sequence
  Description of Artificial Sequence: Synthetic oligonucleotide
gaguguggcagauaccaca

SEQ ID NO: 2594764 - RNA, 19 nt, Artificial Sequence
  Description of Artificial Sequence: Synthetic oligonucleotide
cagaaacccuaacaaaaug

SEQ ID NO: 2594765 - RNA, 19 nt, Artificial Sequence
  Description of Artificial Sequence: Synthetic oligonucleotide
aaacccuaacaaaaugggu

SEQ ID NO: 2594766 - RNA, 19 nt, Artificial Sequence
  Description of Artificial Sequence: Synthetic oligonucleotide
guagcggaaugccauccgg

SEQ ID NO: 2594767 - RNA, 19 nt, Artificial Sequence
  Description of Artificial Sequence: Synthetic oligonucleotide
guguguggaacgcugggcc

SEQ ID NO: 2594768 - RNA, 19 nt, Artificial Sequence
  Description of Artificial Sequence: Synthetic oligonucleotide
acaagugccagcucccaga

SEQ ID NO: 2594769 - RNA, 19 nt, Artificial Sequence
  Description of Artificial Sequence: Synthetic oligonucleotide
accauguaagcacuggcaa

SEQ ID NO: 2594770 - RNA, 19 nt, Artificial Sequence
  Description of Artificial Sequence: Synthetic oligonucleotide
ucacaagagaaauguggaa

SEQ ID NO: 2594771 - RNA, 19 nt, Artificial Sequence
  Description of Artificial Sequence: Synthetic oligonucleotide
uuguaauaauucuguccca

SEQ ID NO: 2594772 - RNA, 19 nt, Artificial Sequence
  Description of Artificial Sequence: Synthetic oligonucleotide
acccuaacaaaauggguau

SEQ ID NO: 2594773 - RNA, 19 nt, Artificial Sequence
  Description of Artificial Sequence: Synthetic oligonucleotide
ggagaggccacucugcagc

SEQ ID NO: 2594774 - RNA, 19 nt, Artificial Sequence
  Description of Artificial Sequence: Synthetic oligonucleotide
ucacaggcauaauaaacuu

SEQ ID NO: 2594775 - RNA, 19 nt, Artificial Sequence
  Description of Artificial Sequence: Synthetic oligonucleotide
ugggccuauuucgucaggg

SEQ ID NO: 2594776 - RNA, 19 nt, Artificial Sequence
  Description of Artificial Sequence: Synthetic oligonucleotide
aguggaacugcaguggggu

SEQ ID NO: 2594777 - RNA, 19 nt, Artificial Sequence
  Description of Artificial Sequence: Synthetic oligonucleotide
gagguggucagcauccagc

SEQ ID NO: 2594778 - RNA, 19 nt, Artificial Sequence
  Description of Artificial Sequence: Synthetic oligonucleotide
uucuccugaugggagaggc

SEQ ID NO: 2594779 - RNA, 19 nt, Artificial Sequence
  Description of Artificial Sequence: Synthetic oligonucleotide
caaucacaagagaaaugug

SEQ ID NO: 2594780 - RNA, 19 nt, Artificial Sequence
  Description of Artificial Sequence: Synthetic oligonucleotide
acguuagucuuucggauau

SEQ ID NO: 2594781 - RNA, 19 nt, Artificial Sequence
  Description of Artificial Sequence: Synthetic oligonucleotide
gcaggcuugcaauuaaacc

SEQ ID NO: 2594782 - RNA, 19 nt, Artificial Sequence
  Description of Artificial Sequence: Synthetic oligonucleotide
uugcacagggucucguagc

SEQ ID NO: 2594783 - RNA, 19 nt, Artificial Sequence
  Description of Artificial Sequence: Synthetic oligonucleotide
cuaacaaaauggguaugug

SEQ ID NO: 2594784 - RNA, 19 nt, Artificial Sequence
  Description of Artificial Sequence: Synthetic oligonucleotide
uauuucgucagggcuguga

SEQ ID NO: 2594785 - RNA, 19 nt, Artificial Sequence
  Description of Artificial Sequence: Synthetic oligonucleotide
ggaguuugagauuucuuca

SEQ ID NO: 2594786 - RNA, 19 nt, Artificial Sequence
  Description of Artificial Sequence: Synthetic oligonucleotide
auucagccuugcaaagucc

SEQ ID NO: 2594787 - RNA, 19 nt, Artificial Sequence
  Description of Artificial Sequence: Synthetic oligonucleotide
uccuggcgaucucacacag

SEQ ID NO: 2594788 - RNA, 19 nt, Artificial Sequence
  Description of Artificial Sequence: Synthetic oligonucleotide
agacaggaagcugaguuca

SEQ ID NO: 2594789 - RNA, 19 nt, Artificial Sequence
  Description of Artificial Sequence: Synthetic oligonucleotide
cuuauuugaguguggcaga

SEQ ID NO: 2594790 - RNA, 19 nt, Artificial Sequence
  Description of Artificial Sequence: Synthetic oligonucleotide
ccagccucaaccauguaag

SEQ ID NO: 2594791 - RNA, 19 nt, Artificial Sequence
  Description of Artificial Sequence: Synthetic oligonucleotide
acagacgaaagcccugggu

SEQ ID NO: 2594792 - RNA, 19 nt, Artificial Sequence
  Description of Artificial Sequence: Synthetic oligonucleotide
uuagucuuucggauaucau

SEQ ID NO: 2594793 - RNA, 19 nt, Artificial Sequence
  Description of Artificial Sequence: Synthetic oligonucleotide
cacacaagugccagcuccc

SEQ ID NO: 2594794 - RNA, 19 nt, Artificial Sequence
  Description of Artificial Sequence: Synthetic oligonucleotide
aguucauugcacagggucu

SEQ ID NO: 2594795 - RNA, 19 nt, Artificial Sequence
  Description of Artificial Sequence: Synthetic oligonucleotide
uggcaaucacaagagaaau

SEQ ID NO: 2594796 - RNA, 19 nt, Artificial Sequence
  Description of Artificial Sequence: Synthetic oligonucleotide
uguguguggaacgcugggc

SEQ ID NO: 2594797 - RNA, 19 nt, Artificial Sequence
  Description of Artificial Sequence: Synthetic oligonucleotide
ugugucuguaaggugcaac

SEQ ID NO: 2594798 - RNA, 19 nt, Artificial Sequence
  Description of Artificial Sequence: Synthetic oligonucleotide
uacguuagucuuucggaua

SEQ ID NO: 2594799 - RNA, 19 nt, Artificial Sequence
  Description of Artificial Sequence: Synthetic oligonucleotide
guuagucuuucggauauca

SEQ ID NO: 2594800 - RNA, 19 nt, Artificial Sequence
  Description of Artificial Sequence: Synthetic oligonucleotide
accaaaagguggaagugug

SEQ ID NO: 2594801 - RNA, 19 nt, Artificial Sequence
  Description of Artificial Sequence: Synthetic oligonucleotide
aggugcaaccaaaaucagg

SEQ ID NO: 2594802 - RNA, 19 nt, Artificial Sequence
  Description of Artificial Sequence: Synthetic oligonucleotide
uagcggaaugccauccgga

SEQ ID NO: 2594803 - RNA, 19 nt, Artificial Sequence
  Description of Artificial Sequence: Synthetic oligonucleotide
ucagccuugcaaaguccca

SEQ ID NO: 2594804 - RNA, 19 nt, Artificial Sequence
  Description of Artificial Sequence: Synthetic oligonucleotide
gaaaacgaacaaguucaca

SEQ ID NO: 2594805 - RNA, 19 nt, Artificial Sequence
  Description of Artificial Sequence: Synthetic oligonucleotide
caagagaaauguggaaaac

SEQ ID NO: 2594806 - RNA, 19 nt, Artificial Sequence
  Description of Artificial Sequence: Synthetic oligonucleotide
guaagcacuggcaaucaca

SEQ ID NO: 2594807 - RNA, 19 nt, Artificial Sequence
  Description of Artificial Sequence: Synthetic oligonucleotide
uauuccuccaugagugcuu

SEQ ID NO: 2594808 - RNA, 19 nt, Artificial Sequence
  Description of Artificial Sequence: Synthetic oligonucleotide
agguggucagcauccagcu

SEQ ID NO: 2594809 - RNA, 19 nt, Artificial Sequence
  Description of Artificial Sequence: Synthetic oligonucleotide
gucuuucggauaucauugc

SEQ ID NO: 2594810 - RNA, 19 nt, Artificial Sequence
  Description of Artificial Sequence: Synthetic oligonucleotide
uucauugcacagggucucg

SEQ ID NO: 2594811 - RNA, 19 nt, Artificial Sequence
  Description of Artificial Sequence: Synthetic oligonucleotide
agcuuccacacuugggcug

SEQ ID NO: 2594812 - RNA, 19 nt, Artificial Sequence
  Description of Artificial Sequence: Synthetic oligonucleotide
cacaagagaaauguggaaa

SEQ ID NO: 2594813 - RNA, 19 nt, Artificial Sequence
  Description of Artificial Sequence: Synthetic oligonucleotide
cuggcaaucacaagagaaa

SEQ ID NO: 2594814 - RNA, 19 nt, Artificial Sequence
  Description of Artificial Sequence: Synthetic oligonucleotide
gccucaaccauguaagcac

SEQ ID NO: 2594815 - RNA, 19 nt, Artificial Sequence
  Description of Artificial Sequence: Synthetic oligonucleotide
uuauuugaguguggcagau

SEQ ID NO: 2594816 - RNA, 19 nt, Artificial Sequence
  Description of Artificial Sequence: Synthetic oligonucleotide
cagacaggaagcugaguuc

SEQ ID NO: 2594817 - RNA, 19 nt, Artificial Sequence
  Description of Artificial Sequence: Synthetic oligonucleotide
ugccauccggaucugcgcu

SEQ ID NO: 2594818 - RNA, 19 nt, Artificial Sequence
  Description of Artificial Sequence: Synthetic oligonucleotide
ugaugggagaggccacucu

SEQ ID NO: 2594819 - RNA, 19 nt, Artificial Sequence
  Description of Artificial Sequence: Synthetic oligonucleotide
uguguggaacgcugggccu

SEQ ID NO: 2594820 - RNA, 19 nt, Artificial Sequence
  Description of Artificial Sequence: Synthetic oligonucleotide
gcuacguuagucuuucgga

SEQ ID NO: 2594821 - RNA, 19 nt, Artificial Sequence
  Description of Artificial Sequence: Synthetic oligonucleotide
gagaucuuggccaccauua

SEQ ID NO: 2594822 - RNA, 19 nt, Artificial Sequence
  Description of Artificial Sequence: Synthetic oligonucleotide
ucagaggcggccucaucac

SEQ ID NO: 2594823 - RNA, 19 nt, Artificial Sequence
  Description of Artificial Sequence: Synthetic oligonucleotide
aguguguguggaacgcugg

SEQ ID NO: 2594824 - RNA, 19 nt, Artificial Sequence
  Description of Artificial Sequence: Synthetic oligonucleotide
ugaguguggcagauaccac

SEQ ID NO: 2594825 - RNA, 19 nt, Artificial Sequence
  Description of Artificial Sequence: Synthetic oligonucleotide
guaauaauucugucccaaa

SEQ ID NO: 2594826 - RNA, 19 nt, Artificial Sequence
  Description of Artificial Sequence: Synthetic oligonucleotide
aaggugcaaccaaaaucag

SEQ ID NO: 2594827 - RNA, 19 nt, Artificial Sequence
  Description of Artificial Sequence: Synthetic oligonucleotide
agcccuggguuugagaucu

SEQ ID NO: 2594828 - RNA, 19 nt, Artificial Sequence
  Description of Artificial Sequence: Synthetic oligonucleotide
ucugcgcuacguuagucuu

SEQ ID NO: 2594829 - RNA, 19 nt, Artificial Sequence
  Description of Artificial Sequence: Synthetic oligonucleotide
gugcaaccaaaaucaggag

SEQ ID NO: 2594830 - RNA, 19 nt, Artificial Sequence
  Description of Artificial Sequence: Synthetic oligonucleotide
ugcucagcuuccacacuug

SEQ ID NO: 2594831 - RNA, 19 nt, Artificial Sequence
  Description of Artificial Sequence: Synthetic oligonucleotide
gacgaaagcccuggguuug

SEQ ID NO: 2594832 - RNA, 19 nt, Artificial Sequence
  Description of Artificial Sequence: Synthetic oligonucleotide
gagaaauguggaaaacgaa

SEQ ID NO: 2594833 - RNA, 19 nt, Artificial Sequence
  Description of Artificial Sequence: Synthetic oligonucleotide
uuccuggcgaucucacaca

SEQ ID NO: 2594834 - RNA, 19 nt, Artificial Sequence
  Description of Artificial Sequence: Synthetic oligonucleotide
guggcagauaccacacagg

SEQ ID NO: 2594835 - RNA, 19 nt, Artificial Sequence
  Description of Artificial Sequence: Synthetic oligonucleotide
auuccuccaugagugcuuc

SEQ ID NO: 2594836 - RNA, 19 nt, Artificial Sequence
  Description of Artificial Sequence: Synthetic oligonucleotide
aggccugugucacuuggca

SEQ ID NO: 2594837 - RNA, 19 nt, Artificial Sequence
  Description of Artificial Sequence: Synthetic oligonucleotide
uugcaaagucccagccuca

SEQ ID NO: 2594838 - RNA, 19 nt, Artificial Sequence
  Description of Artificial Sequence: Synthetic oligonucleotide
gcugaguucauugcacagg

SEQ ID NO: 2594839 - RNA, 19 nt, Artificial Sequence
  Description of Artificial Sequence: Synthetic oligonucleotide
ccaccauuagcccaagcag

SEQ ID NO: 2594840 - RNA, 19 nt, Artificial Sequence
  Description of Artificial Sequence: Synthetic oligonucleotide
agugcuuccuugguguagu

SEQ ID NO: 2594841 - RNA, 19 nt, Artificial Sequence
  Description of Artificial Sequence: Synthetic oligonucleotide
aaauggguaugugucugua

SEQ ID NO: 2594842 - RNA, 19 nt, Artificial Sequence
  Description of Artificial Sequence: Synthetic oligonucleotide
gcaaucacaagagaaaugu

SEQ ID NO: 2594843 - RNA, 19 nt, Artificial Sequence
  Description of Artificial Sequence: Synthetic oligonucleotide
aacgcugggccuauuucgu

SEQ ID NO: 2594844 - RNA, 19 nt, Artificial Sequence
  Description of Artificial Sequence: Synthetic oligonucleotide
agacgaaagcccuggguuu

SEQ ID NO: 2594845 - RNA, 19 nt, Artificial Sequence
  Description of Artificial Sequence: Synthetic oligonucleotide
ggaagcugaguucauugca

SEQ ID NO: 2594846 - RNA, 19 nt, Artificial Sequence
  Description of Artificial Sequence: Synthetic oligonucleotide
caaguucacacaagugcca

SEQ ID NO: 2594847 - RNA, 19 nt, Artificial Sequence
  Description of Artificial Sequence: Synthetic oligonucleotide
auuaaaccaaaagguggaa

SEQ ID NO: 2594848 - RNA, 19 nt, Artificial Sequence
  Description of Artificial Sequence: Synthetic oligonucleotide
ucguagcggaaugccaucc

SEQ ID NO: 2594849 - RNA, 19 nt, Artificial Sequence
  Description of Artificial Sequence: Synthetic oligonucleotide
agccucaaccauguaagca

SEQ ID NO: 2594850 - RNA, 19 nt, Artificial Sequence
  Description of Artificial Sequence: Synthetic oligonucleotide
cucaaccauguaagcacug

SEQ ID NO: 2594851 - RNA, 19 nt, Artificial Sequence
  Description of Artificial Sequence: Synthetic oligonucleotide
agcacgcuguuccuggcga

SEQ ID NO: 2594852 - RNA, 19 nt, Artificial Sequence
  Description of Artificial Sequence: Synthetic oligonucleotide
ugcgcuacguuagucuuuc

SEQ ID NO: 2594853 - RNA, 19 nt, Artificial Sequence
  Description of Artificial Sequence: Synthetic oligonucleotide
uguuccuggcgaucucaca

SEQ ID NO: 2594854 - RNA, 19 nt, Artificial Sequence
  Description of Artificial Sequence: Synthetic oligonucleotide
ugugcucagcuuccacacu

SEQ ID NO: 2594855 - RNA, 19 nt, Artificial Sequence
  Description of Artificial Sequence: Synthetic oligonucleotide
auuagcccaagcaggcuug

SEQ ID NO: 2594856 - RNA, 19 nt, Artificial Sequence
  Description of Artificial Sequence: Synthetic oligonucleotide
agcggaaugccauccggau

SEQ ID NO: 2594857 - RNA, 19 nt, Artificial Sequence
  Description of Artificial Sequence: Synthetic oligonucleotide
gucuguaaggugcaaccaa

SEQ ID NO: 2594858 - RNA, 19 nt, Artificial Sequence
  Description of Artificial Sequence: Synthetic oligonucleotide
aggcggccucaucacagac

SEQ ID NO: 2594859 - RNA, 19 nt, Artificial Sequence
  Description of Artificial Sequence: Synthetic oligonucleotide
aggucacaugugcucagcu

SEQ ID NO: 2594860 - RNA, 19 nt, Artificial Sequence
  Description of Artificial Sequence: Synthetic oligonucleotide
agaggcggccucaucacag

SEQ ID NO: 2594861 - RNA, 19 nt, Artificial Sequence
  Description of Artificial Sequence: Synthetic oligonucleotide
acacuugggcugcgauggc

SEQ ID NO: 2594862 - RNA, 19 nt, Artificial Sequence
  Description of Artificial Sequence: Synthetic oligonucleotide
agggucucguagcggaaug

SEQ ID NO: 2594863 - RNA, 19 nt, Artificial Sequence
  Description of Artificial Sequence: Synthetic oligonucleotide
uccacacuugggcugcgau

SEQ ID NO: 2594864 - RNA, 19 nt, Artificial Sequence
  Description of Artificial Sequence: Synthetic oligonucleotide
ggcauucagccuugcaaag

SEQ ID NO: 2594865 - RNA, 19 nt, Artificial Sequence
  Description of Artificial Sequence: Synthetic oligonucleotide
gccaccauuagcccaagca

SEQ ID NO: 2594866 - RNA, 19 nt, Artificial Sequence
  Description of Artificial Sequence: Synthetic oligonucleotide
gagugcuuccuugguguag

SEQ ID NO: 2594867 - RNA, 19 nt, Artificial Sequence
  Description of Artificial Sequence: Synthetic oligonucleotide
gguuugagaucuuggccac

SEQ ID NO: 2594868 - RNA, 19 nt, Artificial Sequence
  Description of Artificial Sequence: Synthetic oligonucleotide
cuggcgaucucacacaggu

SEQ ID NO: 2594869 - RNA, 19 nt, Artificial Sequence
  Description of Artificial Sequence: Synthetic oligonucleotide
agcccaagcaggcuugcaa

SEQ ID NO: 2594870 - RNA, 19 nt, Artificial Sequence
  Description of Artificial Sequence: Synthetic oligonucleotide
guucauugcacagggucuc

SEQ ID NO: 2594871 - RNA, 19 nt, Artificial Sequence
  Description of Artificial Sequence: Synthetic oligonucleotide
aggcuugcaauuaaaccaa

SEQ ID NO: 2594872 - RNA, 19 nt, Artificial Sequence
  Description of Artificial Sequence: Synthetic oligonucleotide
ccaaaaucaggaguuugag

SEQ ID NO: 2594873 - RNA, 19 nt, Artificial Sequence
  Description of Artificial Sequence: Synthetic oligonucleotide
uucacacaagugccagcuc

SEQ ID NO: 2594874 - RNA, 19 nt, Artificial Sequence
  Description of Artificial Sequence: Synthetic oligonucleotide
ggaaguguguguggaacgc

SEQ ID NO: 2594875 - RNA, 19 nt, Artificial Sequence
  Description of Artificial Sequence: Synthetic oligonucleotide
aucaguagagagagagaca

SEQ ID NO: 2594876 - RNA, 19 nt, Artificial Sequence
  Description of Artificial Sequence: Synthetic oligonucleotide
uccgguccuucuuuguaau

SEQ ID NO: 2594877 - RNA, 19 nt, Artificial Sequence
  Description of Artificial Sequence: Synthetic oligonucleotide
uggaacgcugggccuauuu

SEQ ID NO: 2594878 - RNA, 19 nt, Artificial Sequence
  Description of Artificial Sequence: Synthetic oligonucleotide
gcaucagacaggaagcuga

SEQ ID NO: 2594879 - RNA, 19 nt, Artificial Sequence
  Description of Artificial Sequence: Synthetic oligonucleotide
cagccucaaccauguaagc

SEQ ID NO: 2594880 - RNA, 19 nt, Artificial Sequence
  Description of Artificial Sequence: Synthetic oligonucleotide
uccugaugggagaggccac

SEQ ID NO: 2594881 - RNA, 19 nt, Artificial Sequence
  Description of Artificial Sequence: Synthetic oligonucleotide
guucacacaagugccagcu

SEQ ID NO: 2594882 - RNA, 19 nt, Artificial Sequence
  Description of Artificial Sequence: Synthetic oligonucleotide
uuucgucagggcugugauc

SEQ ID NO: 2594883 - RNA, 19 nt, Artificial Sequence
  Description of Artificial Sequence: Synthetic oligonucleotide
cuccugaugggagaggcca

SEQ ID NO: 2594884 - RNA, 19 nt, Artificial Sequence
  Description of Artificial Sequence: Synthetic oligonucleotide
uucggauaucauugcccuc

SEQ ID NO: 2594885 - RNA, 19 nt, Artificial Sequence
  Description of Artificial Sequence: Synthetic oligonucleotide
cacagacgaaagcccuggg

SEQ ID NO: 2594886 - RNA, 19 nt, Artificial Sequence
  Description of Artificial Sequence: Synthetic oligonucleotide
acgcugggccuauuucguc

SEQ ID NO: 2594887 - RNA, 19 nt, Artificial Sequence
  Description of Artificial Sequence: Synthetic oligonucleotide
gcugcgauggcauauuccu

SEQ ID NO: 2594888 - RNA, 19 nt, Artificial Sequence
  Description of Artificial Sequence: Synthetic oligonucleotide
ggcaaucacaagagaaaug

SEQ ID NO: 2594889 - RNA, 19 nt, Artificial Sequence
  Description of Artificial Sequence: Synthetic oligonucleotide
cuguuccuggcgaucucac

SEQ ID NO: 2594890 - RNA, 19 nt, Artificial Sequence
  Description of Artificial Sequence: Synthetic oligonucleotide
aucacagacgaaagcccug

SEQ ID NO: 2594891 - RNA, 19 nt, Artificial Sequence
  Description of Artificial Sequence: Synthetic oligonucleotide
agguggaagugugugugga

SEQ ID NO: 2594892 - RNA, 19 nt, Artificial Sequence
  Description of Artificial Sequence: Synthetic oligonucleotide
gcacuggcaaucacaagag

SEQ ID NO: 2594893 - RNA, 19 nt, Artificial Sequence
  Description of Artificial Sequence: Synthetic oligonucleotide
ggcauauuccuccaugagu

SEQ ID NO: 2594894 - RNA, 19 nt, Artificial Sequence
  Description of Artificial Sequence: Synthetic oligonucleotide
caucacagacgaaagcccu

SEQ ID NO: 2594895 - RNA, 19 nt, Artificial Sequence
  Description of Artificial Sequence: Synthetic oligonucleotide
uuagcccaagcaggcuugc

SEQ ID NO: 2594896 - RNA, 19 nt, Artificial Sequence
  Description of Artificial Sequence: Synthetic oligonucleotide
cacaggcauaauaaacuua

SEQ ID NO: 2594897 - RNA, 19 nt, Artificial Sequence
  Description of Artificial Sequence: Synthetic oligonucleotide
ugcaaagucccagccucaa

SEQ ID NO: 2594898 - RNA, 19 nt, Artificial Sequence
  Description of Artificial Sequence: Synthetic oligonucleotide
cagcacgcuguuccuggcg

SEQ ID NO: 2594899 - RNA, 19 nt, Artificial Sequence
  Description of Artificial Sequence: Synthetic oligonucleotide
cucguagcggaaugccauc

SEQ ID NO: 2594900 - RNA, 19 nt, Artificial Sequence
  Description of Artificial Sequence: Synthetic oligonucleotide
caggccugugucacuuggc

SEQ ID NO: 2594901 - RNA, 19 nt, Artificial Sequence
  Description of Artificial Sequence: Synthetic oligonucleotide
gccuauuucgucagggcug

SEQ ID NO: 2594902 - RNA, 19 nt, Artificial Sequence
  Description of Artificial Sequence: Synthetic oligonucleotide
gcucagcuuccacacuugg

SEQ ID NO: 2594903 - RNA, 19 nt, Artificial Sequence
  Description of Artificial Sequence: Synthetic oligonucleotide
gugucacuuggcauucagc

SEQ ID NO: 2594904 - RNA, 19 nt, Artificial Sequence
  Description of Artificial Sequence: Synthetic oligonucleotide
ucauugcacagggucucgu

SEQ ID NO: 2594905 - RNA, 19 nt, Artificial Sequence
  Description of Artificial Sequence: Synthetic oligonucleotide
ccuucuuuguaauaauucu

SEQ ID NO: 2594906 - RNA, 19 nt, Artificial Sequence
  Description of Artificial Sequence: Synthetic oligonucleotide
cagauaccacacaggccug

SEQ ID NO: 2594907 - RNA, 19 nt, Artificial Sequence
  Description of Artificial Sequence: Synthetic oligonucleotide
acuuggcauucagccuugc

SEQ ID NO: 2594908 - RNA, 19 nt, Artificial Sequence
  Description of Artificial Sequence: Synthetic oligonucleotide
ugagugcuuccuuggugua

SEQ ID NO: 2594909 - RNA, 19 nt, Artificial Sequence
  Description of Artificial Sequence: Synthetic oligonucleotide
uccggaucugcgcuacguu

SEQ ID NO: 2594910 - RNA, 19 nt, Artificial Sequence
  Description of Artificial Sequence: Synthetic oligonucleotide
gaaugccauccggaucugc

SEQ ID NO: 2594911 - RNA, 19 nt, Artificial Sequence
  Description of Artificial Sequence: Synthetic oligonucleotide
cugcgauggcauauuccuc

SEQ ID NO: 2594912 - RNA, 19 nt, Artificial Sequence
  Description of Artificial Sequence: Synthetic oligonucleotide
cuacguuagucuuucggau

SEQ ID NO: 2594913 - RNA, 19 nt, Artificial Sequence
  Description of Artificial Sequence: Synthetic oligonucleotide
uauuugaguguggcagaua

SEQ ID NO: 2594914 - RNA, 19 nt, Artificial Sequence
  Description of Artificial Sequence: Synthetic oligonucleotide
gcggccucaucacagacga

SEQ ID NO: 2594915 - RNA, 19 nt, Artificial Sequence
  Description of Artificial Sequence: Synthetic oligonucleotide
ggauaucauugcccuccgg

SEQ ID NO: 2594916 - RNA, 19 nt, Artificial Sequence
  Description of Artificial Sequence: Synthetic oligonucleotide
aggccacucugcagcacgc

SEQ ID NO: 2594917 - RNA, 19 nt, Artificial Sequence
  Description of Artificial Sequence: Synthetic oligonucleotide
cgcuacguuagucuuucgg

SEQ ID NO: 2594918 - RNA, 19 nt, Artificial Sequence
  Description of Artificial Sequence: Synthetic oligonucleotide
aagcaggcuugcaauuaaa

SEQ ID NO: 2594919 - RNA, 19 nt, Artificial Sequence
  Description of Artificial Sequence: Synthetic oligonucleotide
caagcaggcuugcaauuaa

SEQ ID NO: 2594920 - RNA, 19 nt, Artificial Sequence
  Description of Artificial Sequence: Synthetic oligonucleotide
agauaccacacaggccugu

SEQ ID NO: 2594921 - RNA, 19 nt, Artificial Sequence
  Description of Artificial Sequence: Synthetic oligonucleotide
ggucucguagcggaaugcc

SEQ ID NO: 2594922 - RNA, 19 nt, Artificial Sequence
  Description of Artificial Sequence: Synthetic oligonucleotide
guuugagaucuuggccacc

SEQ ID NO: 2594923 - RNA, 19 nt, Artificial Sequence
  Description of Artificial Sequence: Synthetic oligonucleotide
gucacuuggcauucagccu

SEQ ID NO: 2594924 - RNA, 19 nt, Artificial Sequence
  Description of Artificial Sequence: Synthetic oligonucleotide
gccuugcaaagucccagcc

SEQ ID NO: 2594925 - RNA, 19 nt, Artificial Sequence
  Description of Artificial Sequence: Synthetic oligonucleotide
gcugggccuauuucgucag

SEQ ID NO: 2594926 - RNA, 19 nt, Artificial Sequence
  Description of Artificial Sequence: Synthetic oligonucleotide
gggccuauuucgucagggc

SEQ ID NO: 2594927 - RNA, 19 nt, Artificial Sequence
  Description of Artificial Sequence: Synthetic oligonucleotide
cuuggcauucagccuugca

SEQ ID NO: 2594928 - RNA, 19 nt, Artificial Sequence
  Description of Artificial Sequence: Synthetic oligonucleotide
agaggccacucugcagcac

SEQ ID NO: 2594929 - RNA, 19 nt, Artificial Sequence
  Description of Artificial Sequence: Synthetic oligonucleotide
ggaaaacgaacaaguucac

SEQ ID NO: 2594930 - RNA, 19 nt, Artificial Sequence
  Description of Artificial Sequence: Synthetic oligonucleotide
cagacgaaagcccuggguu

SEQ ID NO: 2594931 - RNA, 19 nt, Artificial Sequence
  Description of Artificial Sequence: Synthetic oligonucleotide
ggcagauaccacacaggcc

SEQ ID NO: 2594932 - RNA, 19 nt, Artificial Sequence
  Description of Artificial Sequence: Synthetic oligonucleotide
gccucaucacagacgaaag

SEQ ID NO: 2594933 - RNA, 19 nt, Artificial Sequence
  Description of Artificial Sequence: Synthetic oligonucleotide
uggcgaucucacacagguc

SEQ ID NO: 2594934 - RNA, 19 nt, Artificial Sequence
  Description of Artificial Sequence: Synthetic oligonucleotide
ugcccuccgguccuucuuu

SEQ ID NO: 2594935 - RNA, 19 nt, Artificial Sequence
  Description of Artificial Sequence: Synthetic oligonucleotide
gaggcggccucaucacaga

SEQ ID NO: 2594936 - RNA, 19 nt, Artificial Sequence
  Description of Artificial Sequence: Synthetic oligonucleotide
cugggccuauuucgucagg

SEQ ID NO: 2594937 - RNA, 19 nt, Artificial Sequence
  Description of Artificial Sequence: Synthetic oligonucleotide
acgcuguuccuggcgaucu

SEQ ID NO: 2594938 - RNA, 19 nt, Artificial Sequence
  Description of Artificial Sequence: Synthetic oligonucleotide
cuccgguccuucuuuguaa

SEQ ID NO: 2594939 - RNA, 19 nt, Artificial Sequence
  Description of Artificial Sequence: Synthetic oligonucleotide
ucuucagaggcggccucau

SEQ ID NO: 2594940 - RNA, 19 nt, Artificial Sequence
  Description of Artificial Sequence: Synthetic oligonucleotide
gcaaccaaaaucaggaguu

SEQ ID NO: 2594941 - RNA, 19 nt, Artificial Sequence
  Description of Artificial Sequence: Synthetic oligonucleotide
acaggaagcugaguucauu

SEQ ID NO: 2594942 - RNA, 19 nt, Artificial Sequence
  Description of Artificial Sequence: Synthetic oligonucleotide
acacaagugccagcuccca

SEQ ID NO: 2594943 - RNA, 19 nt, Artificial Sequence
  Description of Artificial Sequence: Synthetic oligonucleotide
aucagacaggaagcugagu

SEQ ID NO: 2594944 - RNA, 19 nt, Artificial Sequence
  Description of Artificial Sequence: Synthetic oligonucleotide
ggcaucagacaggaagcug

SEQ ID NO: 2594945 - RNA, 19 nt, Artificial Sequence
  Description of Artificial Sequence: Synthetic oligonucleotide
gucucguagcggaaugcca

SEQ ID NO: 2594946 - RNA, 19 nt, Artificial Sequence
  Description of Artificial Sequence: Synthetic oligonucleotide
gaaguguguguggaacgcu

SEQ ID NO: 2594947 - RNA, 19 nt, Artificial Sequence
  Description of Artificial Sequence: Synthetic oligonucleotide
ggguaugugucuguaaggu

SEQ ID NO: 2594948 - RNA, 19 nt, Artificial Sequence
  Description of Artificial Sequence: Synthetic oligonucleotide
uguggaacgcugggccuau

SEQ ID NO: 2594949 - RNA, 19 nt, Artificial Sequence
  Description of Artificial Sequence: Synthetic oligonucleotide
cauccggaucugcgcuacg

SEQ ID NO: 2594950 - RNA, 19 nt, Artificial Sequence
  Description of Artificial Sequence: Synthetic oligonucleotide
cugugaucuccucugacuu

SEQ ID NO: 2594951 - RNA, 19 nt, Artificial Sequence
  Description of Artificial Sequence: Synthetic oligonucleotide
cauugcacagggucucgua

SEQ ID NO: 2594952 - RNA, 19 nt, Artificial Sequence
  Description of Artificial Sequence: Synthetic oligonucleotide
ucauggcaucagacaggaa

SEQ ID NO: 2594953 - RNA, 19 nt, Artificial Sequence
  Description of Artificial Sequence: Synthetic oligonucleotide
ggcugcgauggcauauucc

SEQ ID NO: 2594954 - RNA, 19 nt, Artificial Sequence
  Description of Artificial Sequence: Synthetic oligonucleotide
ggccuauuucgucagggcu

SEQ ID NO: 2594955 - RNA, 19 nt, Artificial Sequence
  Description of Artificial Sequence: Synthetic oligonucleotide
cacuggcaaucacaagaga

SEQ ID NO: 2594956 - RNA, 19 nt, Artificial Sequence
  Description of Artificial Sequence: Synthetic oligonucleotide
cauuagcccaagcaggcuu

SEQ ID NO: 2594957 - RNA, 19 nt, Artificial Sequence
  Description of Artificial Sequence: Synthetic oligonucleotide
cugaugggagaggccacuc

SEQ ID NO: 2594958 - RNA, 19 nt, Artificial Sequence
  Description of Artificial Sequence: Synthetic oligonucleotide
auccagcucagaaacccua

SEQ ID NO: 2594959 - RNA, 19 nt, Artificial Sequence
  Description of Artificial Sequence: Synthetic oligonucleotide
cuucagaggcggccucauc

SEQ ID NO: 2594960 - RNA, 19 nt, Artificial Sequence
  Description of Artificial Sequence: Synthetic oligonucleotide
ccacacuugggcugcgaug

SEQ ID NO: 2594961 - RNA, 19 nt, Artificial Sequence
  Description of Artificial Sequence: Synthetic oligonucleotide
guguggcagauaccacaca

SEQ ID NO: 2594962 - RNA, 19 nt, Artificial Sequence
  Description of Artificial Sequence: Synthetic oligonucleotide
ccagcucagaaacccuaac

SEQ ID NO: 2594963 - RNA, 19 nt, Artificial Sequence
  Description of Artificial Sequence: Synthetic oligonucleotide
gugcucagcuuccacacuu

SEQ ID NO: 2594964 - RNA, 19 nt, Artificial Sequence
  Description of Artificial Sequence: Synthetic oligonucleotide
gcaaagucccagccucaac

SEQ ID NO: 2594965 - RNA, 19 nt, Artificial Sequence
  Description of Artificial Sequence: Synthetic oligonucleotide
uuccacacuugggcugcga

SEQ ID NO: 2594966 - RNA, 19 nt, Artificial Sequence
  Description of Artificial Sequence: Synthetic oligonucleotide
cguagcggaaugccauccg

SEQ ID NO: 2594967 - RNA, 19 nt, Artificial Sequence
  Description of Artificial Sequence: Synthetic oligonucleotide
ccuaacaaaauggguaugu

SEQ ID NO: 2594968 - RNA, 19 nt, Artificial Sequence
  Description of Artificial Sequence: Synthetic oligonucleotide
acgaaagcccuggguuuga

SEQ ID NO: 2594969 - RNA, 19 nt, Artificial Sequence
  Description of Artificial Sequence: Synthetic oligonucleotide
ccuggcgaucucacacagg

SEQ ID NO: 2594970 - RNA, 19 nt, Artificial Sequence
  Description of Artificial Sequence: Synthetic oligonucleotide
cacgcuguuccuggcgauc

SEQ ID NO: 2594971 - RNA, 19 nt, Artificial Sequence
  Description of Artificial Sequence: Synthetic oligonucleotide
ucgucagggcugugaucuc

SEQ ID NO: 2594972 - RNA, 19 nt, Artificial Sequence
  Description of Artificial Sequence: Synthetic oligonucleotide
gcggaaugccauccggauc

SEQ ID NO: 2594973 - RNA, 19 nt, Artificial Sequence
  Description of Artificial Sequence: Synthetic oligonucleotide
cugcagcacgcuguuccug

SEQ ID NO: 2594974 - RNA, 19 nt, Artificial Sequence
  Description of Artificial Sequence: Synthetic oligonucleotide
cccagccucaaccauguaa

SEQ ID NO: 2594975 - RNA, 19 nt, Artificial Sequence
  Description of Artificial Sequence: Synthetic oligonucleotide
cagaggcggccucaucaca

SEQ ID NO: 2594976 - RNA, 19 nt, Artificial Sequence
  Description of Artificial Sequence: Synthetic oligonucleotide
ccacacaggccugugucac

SEQ ID NO: 2594977 - RNA, 19 nt, Artificial Sequence
  Description of Artificial Sequence: Synthetic oligonucleotide
gguccuucuuuguaauaau

SEQ ID NO: 2594978 - RNA, 19 nt, Artificial Sequence
  Description of Artificial Sequence: Synthetic oligonucleotide
gguggucagcauccagcuc

SEQ ID NO: 2594979 - RNA, 19 nt, Artificial Sequence
  Description of Artificial Sequence: Synthetic oligonucleotide
gcuguuccuggcgaucuca

SEQ ID NO: 2594980 - RNA, 19 nt, Artificial Sequence
  Description of Artificial Sequence: Synthetic oligonucleotide
ccccaugggagguggucag

SEQ ID NO: 2594981 - RNA, 19 nt, Artificial Sequence
  Description of Artificial Sequence: Synthetic oligonucleotide
cggauaucauugcccuccg

SEQ ID NO: 2594982 - RNA, 19 nt, Artificial Sequence
  Description of Artificial Sequence: Synthetic oligonucleotide
cccuaacaaaauggguaug

SEQ ID NO: 2594983 - RNA, 19 nt, Artificial Sequence
  Description of Artificial Sequence: Synthetic oligonucleotide
cacaugugcucagcuucca

SEQ ID NO: 2594984 - RNA, 19 nt, Artificial Sequence
  Description of Artificial Sequence: Synthetic oligonucleotide
caagugccagcucccagau

SEQ ID NO: 2594985 - RNA, 19 nt, Artificial Sequence
  Description of Artificial Sequence: Synthetic oligonucleotide
guguggaacgcugggccua

SEQ ID NO: 2594986 - RNA, 19 nt, Artificial Sequence
  Description of Artificial Sequence: Synthetic oligonucleotide
cuugggcugcgauggcaua

SEQ ID NO: 2594987 - RNA, 19 nt, Artificial Sequence
  Description of Artificial Sequence: Synthetic oligonucleotide
gcgaucucacacaggucac

SEQ ID NO: 2594988 - RNA, 19 nt, Artificial Sequence
  Description of Artificial Sequence: Synthetic oligonucleotide
acagggucucguagcggaa

SEQ ID NO: 2594989 - RNA, 19 nt, Artificial Sequence
  Description of Artificial Sequence: Synthetic oligonucleotide
cuauuucgucagggcugug

SEQ ID NO: 2594990 - RNA, 19 nt, Artificial Sequence
  Description of Artificial Sequence: Synthetic oligonucleotide
ggucacaugugcucagcuu

SEQ ID NO: 2594991 - RNA, 19 nt, Artificial Sequence
  Description of Artificial Sequence: Synthetic oligonucleotide
caggcauaauaaacuuauu

SEQ ID NO: 2594992 - RNA, 19 nt, Artificial Sequence
  Description of Artificial Sequence: Synthetic oligonucleotide
cauugcccuccgguccuuc

SEQ ID NO: 2594993 - RNA, 19 nt, Artificial Sequence
  Description of Artificial Sequence: Synthetic oligonucleotide
cgucagggcugugaucucc

SEQ ID NO: 2594994 - RNA, 19 nt, Artificial Sequence
  Description of Artificial Sequence: Synthetic oligonucleotide
gggcugcgauggcauauuc

SEQ ID NO: 2594995 - RNA, 19 nt, Artificial Sequence
  Description of Artificial Sequence: Synthetic oligonucleotide
gcauucagccuugcaaagu

SEQ ID NO: 2594996 - RNA, 19 nt, Artificial Sequence
  Description of Artificial Sequence: Synthetic oligonucleotide
ccucaaccauguaagcacu

SEQ ID NO: 2594997 - RNA, 19 nt, Artificial Sequence
  Description of Artificial Sequence: Synthetic oligonucleotide
ccauccggaucugcgcuac

SEQ ID NO: 2594998 - RNA, 19 nt, Artificial Sequence
  Description of Artificial Sequence: Synthetic oligonucleotide
ccaugggagguggucagca

SEQ ID NO: 2594999 - RNA, 19 nt, Artificial Sequence
  Description of Artificial Sequence: Synthetic oligonucleotide
gacaggaagcugaguucau

SEQ ID NO: 2595000 - RNA, 19 nt, Artificial Sequence
  Description of Artificial Sequence: Synthetic oligonucleotide
ggccaccauuagcccaagc

SEQ ID NO: 2595001 - RNA, 19 nt, Artificial Sequence
  Description of Artificial Sequence: Synthetic oligonucleotide
ucccagccucaaccaugua

SEQ ID NO: 2595002 - RNA, 19 nt, Artificial Sequence
  Description of Artificial Sequence: Synthetic oligonucleotide
gcccaagcaggcuugcaau

SEQ ID NO: 2595003 - RNA, 19 nt, Artificial Sequence
  Description of Artificial Sequence: Synthetic oligonucleotide
gcgcuacguuagucuuucg

SEQ ID NO: 2595004 - RNA, 19 nt, Artificial Sequence
  Description of Artificial Sequence: Synthetic oligonucleotide
ccggaucugcgcuacguua

SEQ ID NO: 2595005 - RNA, 19 nt, Artificial Sequence
  Description of Artificial Sequence: Synthetic oligonucleotide
cccuggguuugagaucuug

SEQ ID NO: 2595006 - RNA, 19 nt, Artificial Sequence
  Description of Artificial Sequence: Synthetic oligonucleotide
gcccuccgguccuucuuug

SEQ ID NO: 2595007 - RNA, 19 nt, Artificial Sequence
  Description of Artificial Sequence: Synthetic oligonucleotide
ucauugcccuccgguccuu

SEQ ID NO: 2595008 - RNA, 19 nt, Artificial Sequence
  Description of Artificial Sequence: Synthetic oligonucleotide
caugggagguggucagcau

SEQ ID NO: 2595009 - RNA, 19 nt, Artificial Sequence
  Description of Artificial Sequence: Synthetic oligonucleotide
caaccaaaaucaggaguuu

SEQ ID NO: 2595010 - RNA, 19 nt, Artificial Sequence
  Description of Artificial Sequence: Synthetic oligonucleotide
ccauguaagcacuggcaau

SEQ ID NO: 2595011 - RNA, 19 nt, Artificial Sequence
  Description of Artificial Sequence: Synthetic oligonucleotide
ccuugcaaagucccagccu

SEQ ID NO: 2595012 - RNA, 19 nt, Artificial Sequence
  Description of Artificial Sequence: Synthetic oligonucleotide
ggcuugcaauuaaaccaaa

SEQ ID NO: 2595013 - RNA, 19 nt, Artificial Sequence
  Description of Artificial Sequence: Synthetic oligonucleotide
cacacaggccugugucacu

SEQ ID NO: 2595014 - RNA, 19 nt, Artificial Sequence
  Description of Artificial Sequence: Synthetic oligonucleotide
ccaagcaggcuugcaauua

SEQ ID NO: 2595015 - RNA, 19 nt, Artificial Sequence
  Description of Artificial Sequence: Synthetic oligonucleotide
ccuauuucgucagggcugu

SEQ ID NO: 2595016 - RNA, 19 nt, Artificial Sequence
  Description of Artificial Sequence: Synthetic oligonucleotide
ggccugugucacuuggcau

SEQ ID NO: 2595017 - RNA, 19 nt, Artificial Sequence
  Description of Artificial Sequence: Synthetic oligonucleotide
ggaacugcaguggggucau

SEQ ID NO: 2595018 - RNA, 19 nt, Artificial Sequence
  Description of Artificial Sequence: Synthetic oligonucleotide
cugcgcuacguuagucuuu

SEQ ID NO: 2595019 - RNA, 19 nt, Artificial Sequence
  Description of Artificial Sequence: Synthetic oligonucleotide
gccauccggaucugcgcua

SEQ ID NO: 2595020 - RNA, 19 nt, Artificial Sequence
  Description of Artificial Sequence: Synthetic oligonucleotide
ccaugagugcuuccuuggu

SEQ ID NO: 2595021 - RNA, 19 nt, Artificial Sequence
  Description of Artificial Sequence: Synthetic oligonucleotide
cagggucucguagcggaau

SEQ ID NO: 2595022 - RNA, 19 nt, Artificial Sequence
  Description of Artificial Sequence: Synthetic oligonucleotide
cguuagucuuucggauauc

SEQ ID NO: 2595023 - RNA, 19 nt, Artificial Sequence
  Description of Artificial Sequence: Synthetic oligonucleotide
cgaucucacacaggucaca

SEQ ID NO: 2595024 - RNA, 19 nt, Artificial Sequence
  Description of Artificial Sequence: Synthetic oligonucleotide
cccaagcaggcuugcaauu

SEQ ID NO: 2595025 - RNA, 19 nt, Artificial Sequence
  Description of Artificial Sequence: Synthetic oligonucleotide
ccugaugggagaggccacu

SEQ ID NO: 2595026 - RNA, 19 nt, Artificial Sequence
  Description of Artificial Sequence: Synthetic oligonucleotide
ccauuagcccaagcaggcu

SEQ ID NO: 2595027 - RNA, 19 nt, Artificial Sequence
  Description of Artificial Sequence: Synthetic oligonucleotide
gcacgcuguuccuggcgau

SEQ ID NO: 2595028 - RNA, 19 nt, Artificial Sequence
  Description of Artificial Sequence: Synthetic oligonucleotide
cgcuguuccuggcgaucuc

SEQ ID NO: 2595029 - RNA, 19 nt, Artificial Sequence
  Description of Artificial Sequence: Synthetic oligonucleotide
cccuccgguccuucuuugu

SEQ ID NO: 2595030 - RNA, 19 nt, Artificial Sequence
  Description of Artificial Sequence: Synthetic oligonucleotide
cgauggcauauuccuccau

SEQ ID NO: 2595031 - RNA, 19 nt, Artificial Sequence
  Description of Artificial Sequence: Synthetic oligonucleotide
guggaacgcugggccuauu

SEQ ID NO: 2595032 - RNA, 19 nt, Artificial Sequence
  Description of Artificial Sequence: Synthetic oligonucleotide
cggccucaucacagacgaa

SEQ ID NO: 2595033 - RNA, 19 nt, Artificial Sequence
  Description of Artificial Sequence: Synthetic oligonucleotide
ugaaugagggcuaaggugg

SEQ ID NO: 2595034 - RNA, 19 nt, Artificial Sequence
  Description of Artificial Sequence: Synthetic oligonucleotide
aaucgguugccauugaggg

SEQ ID NO: 2595035 - RNA, 19 nt, Artificial Sequence
  Description of Artificial Sequence: Synthetic oligonucleotide
gauguaacgugccagacug

SEQ ID NO: 2595036 - RNA, 19 nt, Artificial Sequence
  Description of Artificial Sequence: Synthetic oligonucleotide
uaacgugccagacugauga

SEQ ID NO: 2595037 - RNA, 19 nt, Artificial Sequence
  Description of Artificial Sequence: Synthetic oligonucleotide
acauugggaaacuugcugg

SEQ ID NO: 2595038 - RNA, 19 nt, Artificial Sequence
  Description of Artificial Sequence: Synthetic oligonucleotide
ugggaugccugacagaucc

SEQ ID NO: 2595039 - RNA, 19 nt, Artificial Sequence
  Description of Artificial Sequence: Synthetic oligonucleotide
cuuaagacaggccuguggc

SEQ ID NO: 2595040 - RNA, 19 nt, Artificial Sequence
  Description of Artificial Sequence: Synthetic oligonucleotide
aagauagcuggucacccuc

SEQ ID NO: 2595041 - RNA, 19 nt, Artificial Sequence
  Description of Artificial Sequence: Synthetic oligonucleotide
uuuuggagagcgcuuacgc

SEQ ID NO: 2595042 - RNA, 19 nt, Artificial Sequence
  Description of Artificial Sequence: Synthetic oligonucleotide
ugugacauugggaaacuug

SEQ ID NO: 2595043 - RNA, 19 nt, Artificial Sequence
  Description of Artificial Sequence: Synthetic oligonucleotide
ugacagauccaccauguug

SEQ ID NO: 2595044 - RNA, 19 nt, Artificial Sequence
  Description of Artificial Sequence: Synthetic oligonucleotide
ucgguugccauugagggcg

SEQ ID NO: 2595045 - RNA, 19 nt, Artificial Sequence
  Description of Artificial Sequence: Synthetic oligonucleotide
gguaaaagagaagauaucc

SEQ ID NO: 2595046 - RNA, 19 nt, Artificial Sequence
  Description of Artificial Sequence: Synthetic oligonucleotide
uaggagggccuuaagacag

SEQ ID NO: 2595047 - RNA, 19 nt, Artificial Sequence
  Description of Artificial Sequence: Synthetic oligonucleotide
gaugaugaggucaugugug

SEQ ID NO: 2595048 - RNA, 19 nt, Artificial Sequence
  Description of Artificial Sequence: Synthetic oligonucleotide
gacauugggaaacuugcug

SEQ ID NO: 2595049 - RNA, 19 nt, Artificial Sequence
  Description of Artificial Sequence: Synthetic oligonucleotide
ugugaaugagggcuaaggu

SEQ ID NO: 2595050 - RNA, 19 nt, Artificial Sequence
  Description of Artificial Sequence: Synthetic oligonucleotide
caauccaugugacauuggg

SEQ ID NO: 2595051 - RNA, 19 nt, Artificial Sequence
  Description of Artificial Sequence: Synthetic oligonucleotide
ucaccuuccggcuuggggc

SEQ ID NO: 2595052 - RNA, 19 nt, Artificial Sequence
  Description of Artificial Sequence: Synthetic oligonucleotide
caaucgguugccauugagg

SEQ ID NO: 2595053 - RNA, 19 nt, Artificial Sequence
  Description of Artificial Sequence: Synthetic oligonucleotide
augaggucaugugugaugg

SEQ ID NO: 2595054 - RNA, 19 nt, Artificial Sequence
  Description of Artificial Sequence: Synthetic oligonucleotide
gucacgugaggucaguggg

SEQ ID NO: 2595055 - RNA, 19 nt, Artificial Sequence
  Description of Artificial Sequence: Synthetic oligonucleotide
agggccuuaagacaggccu

SEQ ID NO: 2595056 - RNA, 19 nt, Artificial Sequence
  Description of Artificial Sequence: Synthetic oligonucleotide
cagggugucagugaggucc

SEQ ID NO: 2595057 - RNA, 19 nt, Artificial Sequence
  Description of Artificial Sequence: Synthetic oligonucleotide
cuugaggauucccagcuag

SEQ ID NO: 2595058 - RNA, 19 nt, Artificial Sequence
  Description of Artificial Sequence: Synthetic oligonucleotide
gauauccacauuguugccc

SEQ ID NO: 2595059 - RNA, 19 nt, Artificial Sequence
  Description of Artificial Sequence: Synthetic oligonucleotide
agugaggucccucagcaga

SEQ ID NO: 2595060 - RNA, 19 nt, Artificial Sequence
  Description of Artificial Sequence: Synthetic oligonucleotide
gaggucaugugugaugggg

SEQ ID NO: 2595061 - RNA, 19 nt, Artificial Sequence
  Description of Artificial Sequence: Synthetic oligonucleotide
ucaaucgguugccauugag

SEQ ID NO: 2595062 - RNA, 19 nt, Artificial Sequence
  Description of Artificial Sequence: Synthetic oligonucleotide
cacauuguugcccagguca

SEQ ID NO: 2595063 - RNA, 19 nt, Artificial Sequence
  Description of Artificial Sequence: Synthetic oligonucleotide
cauguugucuugaggauuc

SEQ ID NO: 2595064 - RNA, 19 nt, Artificial Sequence
  Description of Artificial Sequence: Synthetic oligonucleotide
auauccacauuguugccca

SEQ ID NO: 2595065 - RNA, 19 nt, Artificial Sequence
  Description of Artificial Sequence: Synthetic oligonucleotide
uugaggauucccagcuagg

SEQ ID NO: 2595066 - RNA, 19 nt, Artificial Sequence
  Description of Artificial Sequence: Synthetic oligonucleotide
uguggugaggcgaggcagg

SEQ ID NO: 2595067 - RNA, 19 nt, Artificial Sequence
  Description of Artificial Sequence: Synthetic oligonucleotide
uuggagagcgcuuacgcaa

SEQ ID NO: 2595068 - RNA, 19 nt, Artificial Sequence
  Description of Artificial Sequence: Synthetic oligonucleotide
ugaagauagcuggucaccc

SEQ ID NO: 2595069 - RNA, 19 nt, Artificial Sequence
  Description of Artificial Sequence: Synthetic oligonucleotide
gugacauugggaaacuugc

SEQ ID NO: 2595070 - RNA, 19 nt, Artificial Sequence
  Description of Artificial Sequence: Synthetic oligonucleotide
auucccagcuaggagggcc

SEQ ID NO: 2595071 - RNA, 19 nt, Artificial Sequence
  Description of Artificial Sequence: Synthetic oligonucleotide
cuuacgcaagcugaguagg

SEQ ID NO: 2595072 - RNA, 19 nt, Artificial Sequence
  Description of Artificial Sequence: Synthetic oligonucleotide
uugggaaacuugcuggggu

SEQ ID NO: 2595073 - RNA, 19 nt, Artificial Sequence
  Description of Artificial Sequence: Synthetic oligonucleotide
aucaccuuccggcuugggg

SEQ ID NO: 2595074 - RNA, 19 nt, Artificial Sequence
  Description of Artificial Sequence: Synthetic oligonucleotide
aucgguugccauugagggc

SEQ ID NO: 2595075 - RNA, 19 nt, Artificial Sequence
  Description of Artificial Sequence: Synthetic oligonucleotide
uuuggagagcgcuuacgca

SEQ ID NO: 2595076 - RNA, 19 nt, Artificial Sequence
  Description of Artificial Sequence: Synthetic oligonucleotide
caggaugguugguaggugg

SEQ ID NO: 2595077 - RNA, 19 nt, Artificial Sequence
  Description of Artificial Sequence: Synthetic oligonucleotide
agauccaccauguugucuu

SEQ ID NO: 2595078 - RNA, 19 nt, Artificial Sequence
  Description of Artificial Sequence: Synthetic oligonucleotide
cagcgcaucaccuuccggc

SEQ ID NO: 2595079 - RNA, 19 nt, Artificial Sequence
  Description of Artificial Sequence: Synthetic oligonucleotide
ugucuugaggauucccagc

SEQ ID NO: 2595080 - RNA, 19 nt, Artificial Sequence
  Description of Artificial Sequence: Synthetic oligonucleotide
ugccagacugaugaugagg

SEQ ID NO: 2595081 - RNA, 19 nt, Artificial Sequence
  Description of Artificial Sequence: Synthetic oligonucleotide
aguggauguaacgugccag

SEQ ID NO: 2595082 - RNA, 19 nt, Artificial Sequence
  Description of Artificial Sequence: Synthetic oligonucleotide
guaaaagagaagauaucca

SEQ ID NO: 2595083 - RNA, 19 nt, Artificial Sequence
  Description of Artificial Sequence: Synthetic oligonucleotide
ucuuccccaguacuuggcc

SEQ ID NO: 2595084 - RNA, 19 nt, Artificial Sequence
  Description of Artificial Sequence: Synthetic oligonucleotide
uacuuggccccucacccag

SEQ ID NO: 2595085 - RNA, 19 nt, Artificial Sequence
  Description of Artificial Sequence: Synthetic oligonucleotide
uggggcaguggauguaacg

SEQ ID NO: 2595086 - RNA, 19 nt, Artificial Sequence
  Description of Artificial Sequence: Synthetic oligonucleotide
uccaccauguugucuugag

SEQ ID NO: 2595087 - RNA, 19 nt, Artificial Sequence
  Description of Artificial Sequence: Synthetic oligonucleotide
aggaccaugucaucuguga

SEQ ID NO: 2595088 - RNA, 19 nt, Artificial Sequence
  Description of Artificial Sequence: Synthetic oligonucleotide
augccugacagauccacca

SEQ ID NO: 2595089 - RNA, 19 nt, Artificial Sequence
  Description of Artificial Sequence: Synthetic oligonucleotide
acgcaagcugaguaggaag

SEQ ID NO: 2595090 - RNA, 19 nt, Artificial Sequence
  Description of Artificial Sequence: Synthetic oligonucleotide
ugagggcuaaggugguagg

SEQ ID NO: 2595091 - RNA, 19 nt, Artificial Sequence
  Description of Artificial Sequence: Synthetic oligonucleotide
ugacauugggaaacuugcu

SEQ ID NO: 2595092 - RNA, 19 nt, Artificial Sequence
  Description of Artificial Sequence: Synthetic oligonucleotide
uuguugcccaggucaaucc

SEQ ID NO: 2595093 - RNA, 19 nt, Artificial Sequence
  Description of Artificial Sequence: Synthetic oligonucleotide
gcuaggagggccuuaagac

SEQ ID NO: 2595094 - RNA, 19 nt, Artificial Sequence
  Description of Artificial Sequence: Synthetic oligonucleotide
uggagagcgcuuacgcaag

SEQ ID NO: 2595095 - RNA, 19 nt, Artificial Sequence
  Description of Artificial Sequence: Synthetic oligonucleotide
cuccacacuguccacuugc

SEQ ID NO: 2595096 - RNA, 19 nt, Artificial Sequence
  Description of Artificial Sequence: Synthetic oligonucleotide
uuaagacaggccuguggcu

SEQ ID NO: 2595097 - RNA, 19 nt, Artificial Sequence
  Description of Artificial Sequence: Synthetic oligonucleotide
gucaauccaugugacauug

SEQ ID NO: 2595098 - RNA, 19 nt, Artificial Sequence
  Description of Artificial Sequence: Synthetic oligonucleotide
uuccccaguacuuggcccc

SEQ ID NO: 2595099 - RNA, 19 nt, Artificial Sequence
  Description of Artificial Sequence: Synthetic oligonucleotide
agugggaugccugacagau

SEQ ID NO: 2595100 - RNA, 19 nt, Artificial Sequence
  Description of Artificial Sequence: Synthetic oligonucleotide
agaagauauccacauuguu

SEQ ID NO: 2595101 - RNA, 19 nt, Artificial Sequence
  Description of Artificial Sequence: Synthetic oligonucleotide
ugaggauucccagcuagga

SEQ ID NO: 2595102 - RNA, 19 nt, Artificial Sequence
  Description of Artificial Sequence: Synthetic oligonucleotide
ugguagguggcccuguuuu

SEQ ID NO: 2595103 - RNA, 19 nt, Artificial Sequence
  Description of Artificial Sequence: Synthetic oligonucleotide
uaaggugguaggucagcug

SEQ ID NO: 2595104 - RNA, 19 nt, Artificial Sequence
  Description of Artificial Sequence: Synthetic oligonucleotide
gaugguugguagguggccc

SEQ ID NO: 2595105 - RNA, 19 nt, Artificial Sequence
  Description of Artificial Sequence: Synthetic oligonucleotide
uguccacuugcucuccaca

SEQ ID NO: 2595106 - RNA, 19 nt, Artificial Sequence
  Description of Artificial Sequence: Synthetic oligonucleotide
agagcgcuuacgcaagcug

SEQ ID NO: 2595107 - RNA, 19 nt, Artificial Sequence
  Description of Artificial Sequence: Synthetic oligonucleotide
uguugcccaggucaaucca

SEQ ID NO: 2595108 - RNA, 19 nt, Artificial Sequence
  Description of Artificial Sequence: Synthetic oligonucleotide
cucgaugccuccuccacug

SEQ ID NO: 2595109 - RNA, 19 nt, Artificial Sequence
  Description of Artificial Sequence: Synthetic oligonucleotide
uuacgcaagcugaguagga

SEQ ID NO: 2595110 - RNA, 19 nt, Artificial Sequence
  Description of Artificial Sequence: Synthetic oligonucleotide
uccggcuuggggcagugga

SEQ ID NO: 2595111 - RNA, 19 nt, Artificial Sequence
  Description of Artificial Sequence: Synthetic oligonucleotide
cugaagauagcuggucacc

SEQ ID NO: 2595112 - RNA, 19 nt, Artificial Sequence
  Description of Artificial Sequence: Synthetic oligonucleotide
ugaguaggaagggcugggg

SEQ ID NO: 2595113 - RNA, 19 nt, Artificial Sequence
  Description of Artificial Sequence: Synthetic oligonucleotide
guuuuggagagcgcuuacg

SEQ ID NO: 2595114 - RNA, 19 nt, Artificial Sequence
  Description of Artificial Sequence: Synthetic oligonucleotide
ugucagugaggucccucag

SEQ ID NO: 2595115 - RNA, 19 nt, Artificial Sequence
  Description of Artificial Sequence: Synthetic oligonucleotide
uguaacgugccagacugau

SEQ ID NO: 2595116 - RNA, 19 nt, Artificial Sequence
  Description of Artificial Sequence: Synthetic oligonucleotide
augagggcuaaggugguag

SEQ ID NO: 2595117 - RNA, 19 nt, Artificial Sequence
  Description of Artificial Sequence: Synthetic oligonucleotide
cauugagggcguagugugg

SEQ ID NO: 2595118 - RNA, 19 nt, Artificial Sequence
  Description of Artificial Sequence: Synthetic oligonucleotide
cuuccccaguacuuggccc

SEQ ID NO: 2595119 - RNA, 19 nt, Artificial Sequence
  Description of Artificial Sequence: Synthetic oligonucleotide
aggaugguugguagguggc

SEQ ID NO: 2595120 - RNA, 19 nt, Artificial Sequence
  Description of Artificial Sequence: Synthetic oligonucleotide
guagguggcccuguuuugg

SEQ ID NO: 2595121 - RNA, 19 nt, Artificial Sequence
  Description of Artificial Sequence: Synthetic oligonucleotide
agggcuaaggugguagguc

SEQ ID NO: 2595122 - RNA, 19 nt, Artificial Sequence
  Description of Artificial Sequence: Synthetic oligonucleotide
ucaugugugauggggucca

SEQ ID NO: 2595123 - RNA, 19 nt, Artificial Sequence
  Description of Artificial Sequence: Synthetic oligonucleotide
ggucacgugaggucagugg

SEQ ID NO: 2595124 - RNA, 19 nt, Artificial Sequence
  Description of Artificial Sequence: Synthetic oligonucleotide
cuaggagggccuuaagaca

SEQ ID NO: 2595125 - RNA, 19 nt, Artificial Sequence
  Description of Artificial Sequence: Synthetic oligonucleotide
cagacugaugaugagguca

SEQ ID NO: 2595126 - RNA, 19 nt, Artificial Sequence
  Description of Artificial Sequence: Synthetic oligonucleotide
uugcccaggucaauccaug

SEQ ID NO: 2595127 - RNA, 19 nt, Artificial Sequence
  Description of Artificial Sequence: Synthetic oligonucleotide
ucacgugaggucaguggga

SEQ ID NO: 2595128 - RNA, 19 nt, Artificial Sequence
  Description of Artificial Sequence: Synthetic oligonucleotide
ugccauugagggcguagug

SEQ ID NO: 2595129 - RNA, 19 nt, Artificial Sequence
  Description of Artificial Sequence: Synthetic oligonucleotide
gguccuuguaccuucccug

SEQ ID NO: 2595130 - RNA, 19 nt, Artificial Sequence
  Description of Artificial Sequence: Synthetic oligonucleotide
caguacuuggccccucacc

SEQ ID NO: 2595131 - RNA, 19 nt, Artificial Sequence
  Description of Artificial Sequence: Synthetic oligonucleotide
ugaggucaugugugauggg

SEQ ID NO: 2595132 - RNA, 19 nt, Artificial Sequence
  Description of Artificial Sequence: Synthetic oligonucleotide
gcuuacgcaagcugaguag

SEQ ID NO: 2595133 - RNA, 19 nt, Artificial Sequence
  Description of Artificial Sequence: Synthetic oligonucleotide
aguguggugaggcgaggca

SEQ ID NO: 2595134 - RNA, 19 nt, Artificial Sequence
  Description of Artificial Sequence: Synthetic oligonucleotide
gagggcguaguguggugag

SEQ ID NO: 2595135 - RNA, 19 nt, Artificial Sequence
  Description of Artificial Sequence: Synthetic oligonucleotide
ugggaaacuugcugggguc

SEQ ID NO: 2595136 - RNA, 19 nt, Artificial Sequence
  Description of Artificial Sequence: Synthetic oligonucleotide
uccaugugacauugggaaa

SEQ ID NO: 2595137 - RNA, 19 nt, Artificial Sequence
  Description of Artificial Sequence: Synthetic oligonucleotide
auugagggcguaguguggu

SEQ ID NO: 2595138 - RNA, 19 nt, Artificial Sequence
  Description of Artificial Sequence: Synthetic oligonucleotide
uguaccuucccuggccucu

SEQ ID NO: 2595139 - RNA, 19 nt, Artificial Sequence
  Description of Artificial Sequence: Synthetic oligonucleotide
ucuccaggucacgugaggu

SEQ ID NO: 2595140 - RNA, 19 nt, Artificial Sequence
  Description of Artificial Sequence: Synthetic oligonucleotide
gucagugaggucccucagc

SEQ ID NO: 2595141 - RNA, 19 nt, Artificial Sequence
  Description of Artificial Sequence: Synthetic oligonucleotide
gaugccugacagauccacc

SEQ ID NO: 2595142 - RNA, 19 nt, Artificial Sequence
  Description of Artificial Sequence: Synthetic oligonucleotide
cacacuguccacuugcucu

SEQ ID NO: 2595143 - RNA, 19 nt, Artificial Sequence
  Description of Artificial Sequence: Synthetic oligonucleotide
uccacacuguccacuugcu

SEQ ID NO: 2595144 - RNA, 19 nt, Artificial Sequence
  Description of Artificial Sequence: Synthetic oligonucleotide
agcccucgaugccuccucc

SEQ ID NO: 2595145 - RNA, 19 nt, Artificial Sequence
  Description of Artificial Sequence: Synthetic oligonucleotide
uggucaaucgguugccauu

SEQ ID NO: 2595146 - RNA, 19 nt, Artificial Sequence
  Description of Artificial Sequence: Synthetic oligonucleotide
ccuuaagacaggccugugg

SEQ ID NO: 2595147 - RNA, 19 nt, Artificial Sequence
  Description of Artificial Sequence: Synthetic oligonucleotide
agcgcaucaccuuccggcu

SEQ ID NO: 2595148 - RNA, 19 nt, Artificial Sequence
  Description of Artificial Sequence: Synthetic oligonucleotide
guggauguaacgugccaga

SEQ ID NO: 2595149 - RNA, 19 nt, Artificial Sequence
  Description of Artificial Sequence: Synthetic oligonucleotide
ccacuugcucuccacagcg

SEQ ID NO: 2595150 - RNA, 19 nt, Artificial Sequence
  Description of Artificial Sequence: Synthetic oligonucleotide
uggauguaacgugccagac

SEQ ID NO: 2595151 - RNA, 19 nt, Artificial Sequence
  Description of Artificial Sequence: Synthetic oligonucleotide
ggguacugagugcaggcag

SEQ ID NO: 2595152 - RNA, 19 nt, Artificial Sequence
  Description of Artificial Sequence: Synthetic oligonucleotide
uugcucuccacagcgcuga

SEQ ID NO: 2595153 - RNA, 19 nt, Artificial Sequence
  Description of Artificial Sequence: Synthetic oligonucleotide
ugagggcguagugugguga

SEQ ID NO: 2595154 - RNA, 19 nt, Artificial Sequence
  Description of Artificial Sequence: Synthetic oligonucleotide
ccauugagggcguagugug

SEQ ID NO: 2595155 - RNA, 19 nt, Artificial Sequence
  Description of Artificial Sequence: Synthetic oligonucleotide
aagacaggccuguggcuuu

SEQ ID NO: 2595156 - RNA, 19 nt, Artificial Sequence
  Description of Artificial Sequence: Synthetic oligonucleotide
ggcccuguuuuggagagcg

SEQ ID NO: 2595157 - RNA, 19 nt, Artificial Sequence
  Description of Artificial Sequence: Synthetic oligonucleotide
uucccagcuaggagggccu

SEQ ID NO: 2595158 - RNA, 19 nt, Artificial Sequence
  Description of Artificial Sequence: Synthetic oligonucleotide
ggaccaugucaucugugag

SEQ ID NO: 2595159 - RNA, 19 nt, Artificial Sequence
  Description of Artificial Sequence: Synthetic oligonucleotide
ggauucccagcuaggaggg

SEQ ID NO: 2595160 - RNA, 19 nt, Artificial Sequence
  Description of Artificial Sequence: Synthetic oligonucleotide
gauccaccauguugucuug

SEQ ID NO: 2595161 - RNA, 19 nt, Artificial Sequence
  Description of Artificial Sequence: Synthetic oligonucleotide
gaugccuccuccacuguga

SEQ ID NO: 2595162 - RNA, 19 nt, Artificial Sequence
  Description of Artificial Sequence: Synthetic oligonucleotide
augguugguagguggcccu

SEQ ID NO: 2595163 - RNA, 19 nt, Artificial Sequence
  Description of Artificial Sequence: Synthetic oligonucleotide
gcugaagauagcuggucac

SEQ ID NO: 2595164 - RNA, 19 nt, Artificial Sequence
  Description of Artificial Sequence: Synthetic oligonucleotide
uacgcaagcugaguaggaa

SEQ ID NO: 2595165 - RNA, 19 nt, Artificial Sequence
  Description of Artificial Sequence: Synthetic oligonucleotide
uagguggcccuguuuugga

SEQ ID NO: 2595166 - RNA, 19 nt, Artificial Sequence
  Description of Artificial Sequence: Synthetic oligonucleotide
guguggugaggcgaggcag

SEQ ID NO: 2595167 - RNA, 19 nt, Artificial Sequence
  Description of Artificial Sequence: Synthetic oligonucleotide
ggucaaucgguugccauug

SEQ ID NO: 2595168 - RNA, 19 nt, Artificial Sequence
  Description of Artificial Sequence: Synthetic oligonucleotide
gagaagauauccacauugu

SEQ ID NO: 2595169 - RNA, 19 nt, Artificial Sequence
  Description of Artificial Sequence: Synthetic oligonucleotide
cagagcccuggucaaucgg

SEQ ID NO: 2595170 - RNA, 19 nt, Artificial Sequence
  Description of Artificial Sequence: Synthetic oligonucleotide
agcugcaggaccaugucau

SEQ ID NO: 2595171 - RNA, 19 nt, Artificial Sequence
  Description of Artificial Sequence: Synthetic oligonucleotide
uacugagugcaggcaguag

SEQ ID NO: 2595172 - RNA, 19 nt, Artificial Sequence
  Description of Artificial Sequence: Synthetic oligonucleotide
aggugguaggucagcugcc

SEQ ID NO: 2595173 - RNA, 19 nt, Artificial Sequence
  Description of Artificial Sequence: Synthetic oligonucleotide
uugccauugagggcguagu

SEQ ID NO: 2595174 - RNA, 19 nt, Artificial Sequence
  Description of Artificial Sequence: Synthetic oligonucleotide
gagcgcuuacgcaagcuga

SEQ ID NO: 2595175 - RNA, 19 nt, Artificial Sequence
  Description of Artificial Sequence: Synthetic oligonucleotide
cgcaagcugaguaggaagg

SEQ ID NO: 2595176 - RNA, 19 nt, Artificial Sequence
  Description of Artificial Sequence: Synthetic oligonucleotide
agguggcccuguuuuggag

SEQ ID NO: 2595177 - RNA, 19 nt, Artificial Sequence
  Description of Artificial Sequence: Synthetic oligonucleotide
gaagauagcuggucacccu

SEQ ID NO: 2595178 - RNA, 19 nt, Artificial Sequence
  Description of Artificial Sequence: Synthetic oligonucleotide
ccaugugacauugggaaac

SEQ ID NO: 2595179 - RNA, 19 nt, Artificial Sequence
  Description of Artificial Sequence: Synthetic oligonucleotide
ugaugaggucaugugugau

SEQ ID NO: 2595180 - RNA, 19 nt, Artificial Sequence
  Description of Artificial Sequence: Synthetic oligonucleotide
agcgcuuacgcaagcugag

SEQ ID NO: 2595181 - RNA, 19 nt, Artificial Sequence
  Description of Artificial Sequence: Synthetic oligonucleotide
gugaggucccucagcagag

SEQ ID NO: 2595182 - RNA, 19 nt, Artificial Sequence
  Description of Artificial Sequence: Synthetic oligonucleotide
ugcccaggucaauccaugu

SEQ ID NO: 2595183 - RNA, 19 nt, Artificial Sequence
  Description of Artificial Sequence: Synthetic oligonucleotide
uugagggcguaguguggug

SEQ ID NO: 2595184 - RNA, 19 nt, Artificial Sequence
  Description of Artificial Sequence: Synthetic oligonucleotide
cccagcuccaggaugguug

SEQ ID NO: 2595185 - RNA, 19 nt, Artificial Sequence
  Description of Artificial Sequence: Synthetic oligonucleotide
acaggccuguggcuuucuc

SEQ ID NO: 2595186 - RNA, 19 nt, Artificial Sequence
  Description of Artificial Sequence: Synthetic oligonucleotide
aggcaggguacugagugca

SEQ ID NO: 2595187 - RNA, 19 nt, Artificial Sequence
  Description of Artificial Sequence: Synthetic oligonucleotide
gucagugggaugccugaca

SEQ ID NO: 2595188 - RNA, 19 nt, Artificial Sequence
  Description of Artificial Sequence: Synthetic oligonucleotide
ccuuguaccuucccuggcc

SEQ ID NO: 2595189 - RNA, 19 nt, Artificial Sequence
  Description of Artificial Sequence: Synthetic oligonucleotide
ugccugacagauccaccau

SEQ ID NO: 2595190 - RNA, 19 nt, Artificial Sequence
  Description of Artificial Sequence: Synthetic oligonucleotide
acgugccagacugaugaug

SEQ ID NO: 2595191 - RNA, 19 nt, Artificial Sequence
  Description of Artificial Sequence: Synthetic oligonucleotide
agugcaggcaguagcugca

SEQ ID NO: 2595192 - RNA, 19 nt, Artificial Sequence
  Description of Artificial Sequence: Synthetic oligonucleotide
ugaggccugugaagcccag

SEQ ID NO: 2595193 - RNA, 19 nt, Artificial Sequence
  Description of Artificial Sequence: Synthetic oligonucleotide
agacugaugaugaggucau

SEQ ID NO: 2595194 - RNA, 19 nt, Artificial Sequence
  Description of Artificial Sequence: Synthetic oligonucleotide
agcugaguaggaagggcug

SEQ ID NO: 2595195 - RNA, 19 nt, Artificial Sequence
  Description of Artificial Sequence: Synthetic oligonucleotide
ugccggcacagcuucucca

SEQ ID NO: 2595196 - RNA, 19 nt, Artificial Sequence
  Description of Artificial Sequence: Synthetic oligonucleotide
agagcccuggucaaucggu

SEQ ID NO: 2595197 - RNA, 19 nt, Artificial Sequence
  Description of Artificial Sequence: Synthetic oligonucleotide
ggugguaggucagcugccg

SEQ ID NO: 2595198 - RNA, 19 nt, Artificial Sequence
  Description of Artificial Sequence: Synthetic oligonucleotide
gggguaaaagagaagauau

SEQ ID NO: 2595199 - RNA, 19 nt, Artificial Sequence
  Description of Artificial Sequence: Synthetic oligonucleotide
acugugaaugagggcuaag

SEQ ID NO: 2595200 - RNA, 19 nt, Artificial Sequence
  Description of Artificial Sequence: Synthetic oligonucleotide
gcaagcugaguaggaaggg

SEQ ID NO: 2595201 - RNA, 19 nt, Artificial Sequence
  Description of Artificial Sequence: Synthetic oligonucleotide
ggucaugugugaugggguc

SEQ ID NO: 2595202 - RNA, 19 nt, Artificial Sequence
  Description of Artificial Sequence: Synthetic oligonucleotide
aggucaugugugauggggu

SEQ ID NO: 2595203 - RNA, 19 nt, Artificial Sequence
  Description of Artificial Sequence: Synthetic oligonucleotide
uugguagguggcccuguuu

SEQ ID NO: 2595204 - RNA, 19 nt, Artificial Sequence
  Description of Artificial Sequence: Synthetic oligonucleotide
ggcgaggcaggguacugag

SEQ ID NO: 2595205 - RNA, 19 nt, Artificial Sequence
  Description of Artificial Sequence: Synthetic oligonucleotide
accagcccucgaugccucc

SEQ ID NO: 2595206 - RNA, 19 nt, Artificial Sequence
  Description of Artificial Sequence: Synthetic oligonucleotide
gggcaguggauguaacgug

SEQ ID NO: 2595207 - RNA, 19 nt, Artificial Sequence
  Description of Artificial Sequence: Synthetic oligonucleotide
cuuucucuucaccagcccu

SEQ ID NO: 2595208 - RNA, 19 nt, Artificial Sequence
  Description of Artificial Sequence: Synthetic oligonucleotide
acccucuccaggucacgug

SEQ ID NO: 2595209 - RNA, 19 nt, Artificial Sequence
  Description of Artificial Sequence: Synthetic oligonucleotide
gggcuaaggugguagguca

SEQ ID NO: 2595210 - RNA, 19 nt, Artificial Sequence
  Description of Artificial Sequence: Synthetic oligonucleotide
agcuccacacuguccacuu

SEQ ID NO: 2595211 - RNA, 19 nt, Artificial Sequence
  Description of Artificial Sequence: Synthetic oligonucleotide
cgaggcaggguacugagug

SEQ ID NO: 2595212 - RNA, 19 nt, Artificial Sequence
  Description of Artificial Sequence: Synthetic oligonucleotide
gguagguggcccuguuuug

SEQ ID NO: 2595213 - RNA, 19 nt, Artificial Sequence
  Description of Artificial Sequence: Synthetic oligonucleotide
ggcguaguguggugaggcg

SEQ ID NO: 2595214 - RNA, 19 nt, Artificial Sequence
  Description of Artificial Sequence: Synthetic oligonucleotide
uccauggcacccagcgcau

SEQ ID NO: 2595215 - RNA, 19 nt, Artificial Sequence
  Description of Artificial Sequence: Synthetic oligonucleotide
ugaggcgaggcaggguacu

SEQ ID NO: 2595216 - RNA, 19 nt, Artificial Sequence
  Description of Artificial Sequence: Synthetic oligonucleotide
ggugaggcgaggcagggua

SEQ ID NO: 2595217 - RNA, 19 nt, Artificial Sequence
  Description of Artificial Sequence: Synthetic oligonucleotide
acccagcgcaucaccuucc

SEQ ID NO: 2595218 - RNA, 19 nt, Artificial Sequence
  Description of Artificial Sequence: Synthetic oligonucleotide
gugccagacugaugaugag

SEQ ID NO: 2595219 - RNA, 19 nt, Artificial Sequence
  Description of Artificial Sequence: Synthetic oligonucleotide
ugaggucccucagcagagc

SEQ ID NO: 2595220 - RNA, 19 nt, Artificial Sequence
  Description of Artificial Sequence: Synthetic oligonucleotide
guggugaggcgaggcaggg

SEQ ID NO: 2595221 - RNA, 19 nt, Artificial Sequence
  Description of Artificial Sequence: Synthetic oligonucleotide
aaugagggcuaagguggua

SEQ ID NO: 2595222 - RNA, 19 nt, Artificial Sequence
  Description of Artificial Sequence: Synthetic oligonucleotide
aagcccagcuccacacugu

SEQ ID NO: 2595223 - RNA, 19 nt, Artificial Sequence
  Description of Artificial Sequence: Synthetic oligonucleotide
uuguaccuucccuggccuc

SEQ ID NO: 2595224 - RNA, 19 nt, Artificial Sequence
  Description of Artificial Sequence: Synthetic oligonucleotide
gcccuggucaaucgguugc

SEQ ID NO: 2595225 - RNA, 19 nt, Artificial Sequence
  Description of Artificial Sequence: Synthetic oligonucleotide
gagggccuuaagacaggcc

SEQ ID NO: 2595226 - RNA, 19 nt, Artificial Sequence
  Description of Artificial Sequence: Synthetic oligonucleotide
guacuuggccccucaccca

SEQ ID NO: 2595227 - RNA, 19 nt, Artificial Sequence
  Description of Artificial Sequence: Synthetic oligonucleotide
aggguacugagugcaggca

SEQ ID NO: 2595228 - RNA, 19 nt, Artificial Sequence
  Description of Artificial Sequence: Synthetic oligonucleotide
ccucuuccccaguacuugg

SEQ ID NO: 2595229 - RNA, 19 nt, Artificial Sequence
  Description of Artificial Sequence: Synthetic oligonucleotide
gccugacagauccaccaug

SEQ ID NO: 2595230 - RNA, 19 nt, Artificial Sequence
  Description of Artificial Sequence: Synthetic oligonucleotide
gggaaacuugcuggggucc

SEQ ID NO: 2595231 - RNA, 19 nt, Artificial Sequence
  Description of Artificial Sequence: Synthetic oligonucleotide
uggucacccucuccagguc

SEQ ID NO: 2595232 - RNA, 19 nt, Artificial Sequence
  Description of Artificial Sequence: Synthetic oligonucleotide
gguggcccuguuuuggaga

SEQ ID NO: 2595233 - RNA, 19 nt, Artificial Sequence
  Description of Artificial Sequence: Synthetic oligonucleotide
cguaguguggugaggcgag

SEQ ID NO: 2595234 - RNA, 19 nt, Artificial Sequence
  Description of Artificial Sequence: Synthetic oligonucleotide
ucgaugccuccuccacugu

SEQ ID NO: 2595235 - RNA, 19 nt, Artificial Sequence
  Description of Artificial Sequence: Synthetic oligonucleotide
gggcguaguguggugaggc

SEQ ID NO: 2595236 - RNA, 19 nt, Artificial Sequence
  Description of Artificial Sequence: Synthetic oligonucleotide
agggcguaguguggugagg

SEQ ID NO: 2595237 - RNA, 19 nt, Artificial Sequence
  Description of Artificial Sequence: Synthetic oligonucleotide
ggaugccugacagauccac

SEQ ID NO: 2595238 - RNA, 19 nt, Artificial Sequence
  Description of Artificial Sequence: Synthetic oligonucleotide
agacaggccuguggcuuuc

SEQ ID NO: 2595239 - RNA, 19 nt, Artificial Sequence
  Description of Artificial Sequence: Synthetic oligonucleotide
guaggucagcugccggcac

SEQ ID NO: 2595240 - RNA, 19 nt, Artificial Sequence
  Description of Artificial Sequence: Synthetic oligonucleotide
acgugaggucagugggaug

SEQ ID NO: 2595241 - RNA, 19 nt, Artificial Sequence
  Description of Artificial Sequence: Synthetic oligonucleotide
ggaugguugguagguggcc

SEQ ID NO: 2595242 - RNA, 19 nt, Artificial Sequence
  Description of Artificial Sequence: Synthetic oligonucleotide
aggagggccuuaagacagg

SEQ ID NO: 2595243 - RNA, 19 nt, Artificial Sequence
  Description of Artificial Sequence: Synthetic oligonucleotide
gacugaugaugaggucaug

SEQ ID NO: 2595244 - RNA, 19 nt, Artificial Sequence
  Description of Artificial Sequence: Synthetic oligonucleotide
cuuguaccuucccuggccu

SEQ ID NO: 2595245 - RNA, 19 nt, Artificial Sequence
  Description of Artificial Sequence: Synthetic oligonucleotide
ugucaucugugaggccugu

SEQ ID NO: 2595246 - RNA, 19 nt, Artificial Sequence
  Description of Artificial Sequence: Synthetic oligonucleotide
caguggauguaacgugcca

SEQ ID NO: 2595247 - RNA, 19 nt, Artificial Sequence
  Description of Artificial Sequence: Synthetic oligonucleotide
gcccaggucaauccaugug

SEQ ID NO: 2595248 - RNA, 19 nt, Artificial Sequence
  Description of Artificial Sequence: Synthetic oligonucleotide
cuuggggcaguggauguaa

SEQ ID NO: 2595249 - RNA, 19 nt, Artificial Sequence
  Description of Artificial Sequence: Synthetic oligonucleotide
gcuaaggugguaggucagc

SEQ ID NO: 2595250 - RNA, 19 nt, Artificial Sequence
  Description of Artificial Sequence: Synthetic oligonucleotide
cuggucacccucuccaggu

SEQ ID NO: 2595251 - RNA, 19 nt, Artificial Sequence
  Description of Artificial Sequence: Synthetic oligonucleotide
gaggcgaggcaggguacug

SEQ ID NO: 2595252 - RNA, 19 nt, Artificial Sequence
  Description of Artificial Sequence: Synthetic oligonucleotide
gcaguggauguaacgugcc

SEQ ID NO: 2595253 - RNA, 19 nt, Artificial Sequence
  Description of Artificial Sequence: Synthetic oligonucleotide
ggauguaacgugccagacu

SEQ ID NO: 2595254 - RNA, 19 nt, Artificial Sequence
  Description of Artificial Sequence: Synthetic oligonucleotide
ggagagcgcuuacgcaagc

SEQ ID NO: 2595255 - RNA, 19 nt, Artificial Sequence
  Description of Artificial Sequence: Synthetic oligonucleotide
ggagggccuuaagacaggc

SEQ ID NO: 2595256 - RNA, 19 nt, Artificial Sequence
  Description of Artificial Sequence: Synthetic oligonucleotide
ggcuaaggugguaggucag

SEQ ID NO: 2595257 - RNA, 19 nt, Artificial Sequence
  Description of Artificial Sequence: Synthetic oligonucleotide
gucaaucgguugccauuga

SEQ ID NO: 2595258 - RNA, 19 nt, Artificial Sequence
  Description of Artificial Sequence: Synthetic oligonucleotide
cacagcgcugaagauagcu

SEQ ID NO: 2595259 - RNA, 19 nt, Artificial Sequence
  Description of Artificial Sequence: Synthetic oligonucleotide
cuaaggugguaggucagcu

SEQ ID NO: 2595260 - RNA, 19 nt, Artificial Sequence
  Description of Artificial Sequence: Synthetic oligonucleotide
gguaggucagcugccggca

SEQ ID NO: 2595261 - RNA, 19 nt, Artificial Sequence
  Description of Artificial Sequence: Synthetic oligonucleotide
cagcuaggagggccuuaag

SEQ ID NO: 2595262 - RNA, 19 nt, Artificial Sequence
  Description of Artificial Sequence: Synthetic oligonucleotide
gccagacugaugaugaggu

SEQ ID NO: 2595263 - RNA, 19 nt, Artificial Sequence
  Description of Artificial Sequence: Synthetic oligonucleotide
uuccggcuuggggcagugg

SEQ ID NO: 2595264 - RNA, 19 nt, Artificial Sequence
  Description of Artificial Sequence: Synthetic oligonucleotide
gggccuuaagacaggccug

SEQ ID NO: 2595265 - RNA, 19 nt, Artificial Sequence
  Description of Artificial Sequence: Synthetic oligonucleotide
aggcgaggcaggguacuga

SEQ ID NO: 2595266 - RNA, 19 nt, Artificial Sequence
  Description of Artificial Sequence: Synthetic oligonucleotide
uaccuucccuggccucuuc

SEQ ID NO: 2595267 - RNA, 19 nt, Artificial Sequence
  Description of Artificial Sequence: Synthetic oligonucleotide
gugaggccugugaagccca

SEQ ID NO: 2595268 - RNA, 19 nt, Artificial Sequence
  Description of Artificial Sequence: Synthetic oligonucleotide
uccccaguacuuggccccu

SEQ ID NO: 2595269 - RNA, 19 nt, Artificial Sequence
  Description of Artificial Sequence: Synthetic oligonucleotide
ggggcaguggauguaacgu

SEQ ID NO: 2595270 - RNA, 19 nt, Artificial Sequence
  Description of Artificial Sequence: Synthetic oligonucleotide
auguaacgugccagacuga

SEQ ID NO: 2595271 - RNA, 19 nt, Artificial Sequence
  Description of Artificial Sequence: Synthetic oligonucleotide
ugcucuccacagcgcugaa

SEQ ID NO: 2595272 - RNA, 19 nt, Artificial Sequence
  Description of Artificial Sequence: Synthetic oligonucleotide
augugacauugggaaacuu

SEQ ID NO: 2595273 - RNA, 19 nt, Artificial Sequence
  Description of Artificial Sequence: Synthetic oligonucleotide
ccugacagauccaccaugu

SEQ ID NO: 2595274 - RNA, 19 nt, Artificial Sequence
  Description of Artificial Sequence: Synthetic oligonucleotide
uggugaggcgaggcagggu

SEQ ID NO: 2595275 - RNA, 19 nt, Artificial Sequence
  Description of Artificial Sequence: Synthetic oligonucleotide
caugugacauugggaaacu

SEQ ID NO: 2595276 - RNA, 19 nt, Artificial Sequence
  Description of Artificial Sequence: Synthetic oligonucleotide
caucaccuuccggcuuggg

SEQ ID NO: 2595277 - RNA, 19 nt, Artificial Sequence
  Description of Artificial Sequence: Synthetic oligonucleotide
gugaggcgaggcaggguac

SEQ ID NO: 2595278 - RNA, 19 nt, Artificial Sequence
  Description of Artificial Sequence: Synthetic oligonucleotide
gagagcgcuuacgcaagcu

SEQ ID NO: 2595279 - RNA, 19 nt, Artificial Sequence
  Description of Artificial Sequence: Synthetic oligonucleotide
gcacagcuucuccauggca

SEQ ID NO: 2595280 - RNA, 19 nt, Artificial Sequence
  Description of Artificial Sequence: Synthetic oligonucleotide
ccucuccaggucacgugag

SEQ ID NO: 2595281 - RNA, 19 nt, Artificial Sequence
  Description of Artificial Sequence: Synthetic oligonucleotide
uggcccuguuuuggagagc

SEQ ID NO: 2595282 - RNA, 19 nt, Artificial Sequence
  Description of Artificial Sequence: Synthetic oligonucleotide
caugugugaugggguccac

SEQ ID NO: 2595283 - RNA, 19 nt, Artificial Sequence
  Description of Artificial Sequence: Synthetic oligonucleotide
cuggucaaucgguugccau

SEQ ID NO: 2595284 - RNA, 19 nt, Artificial Sequence
  Description of Artificial Sequence: Synthetic oligonucleotide
gugaugggguccaccaagu

SEQ ID NO: 2595285 - RNA, 19 nt, Artificial Sequence
  Description of Artificial Sequence: Synthetic oligonucleotide
gcguaguguggugaggcga

SEQ ID NO: 2595286 - RNA, 19 nt, Artificial Sequence
  Description of Artificial Sequence: Synthetic oligonucleotide
cccagcgcaucaccuuccg

SEQ ID NO: 2595287 - RNA, 19 nt, Artificial Sequence
  Description of Artificial Sequence: Synthetic oligonucleotide
guugcccaggucaauccau

SEQ ID NO: 2595288 - RNA, 19 nt, Artificial Sequence
  Description of Artificial Sequence: Synthetic oligonucleotide
cccucgaugccuccuccac

SEQ ID NO: 2595289 - RNA, 19 nt, Artificial Sequence
  Description of Artificial Sequence: Synthetic oligonucleotide
ccagcgcaucaccuuccgg

SEQ ID NO: 2595290 - RNA, 19 nt, Artificial Sequence
  Description of Artificial Sequence: Synthetic oligonucleotide
ggcaggguacugagugcag

SEQ ID NO: 2595291 - RNA, 19 nt, Artificial Sequence
  Description of Artificial Sequence: Synthetic oligonucleotide
gguacugagugcaggcagu

SEQ ID NO: 2595292 - RNA, 19 nt, Artificial Sequence
  Description of Artificial Sequence: Synthetic oligonucleotide
ggccugugaagcccagcuc

SEQ ID NO: 2595293 - RNA, 19 nt, Artificial Sequence
  Description of Artificial Sequence: Synthetic oligonucleotide
ccaugucaucugugaggcc

SEQ ID NO: 2595294 - RNA, 19 nt, Artificial Sequence
  Description of Artificial Sequence: Synthetic oligonucleotide
ggucagugggaugccugac

SEQ ID NO: 2595295 - RNA, 19 nt, Artificial Sequence
  Description of Artificial Sequence: Synthetic oligonucleotide
cccucuccaggucacguga

SEQ ID NO: 2595296 - RNA, 19 nt, Artificial Sequence
  Description of Artificial Sequence: Synthetic oligonucleotide
accuuccggcuuggggcag

SEQ ID NO: 2595297 - RNA, 19 nt, Artificial Sequence
  Description of Artificial Sequence: Synthetic oligonucleotide
cacugugaaugagggcuaa

SEQ ID NO: 2595298 - RNA, 19 nt, Artificial Sequence
  Description of Artificial Sequence: Synthetic oligonucleotide
ggucaauccaugugacauu

SEQ ID NO: 2595299 - RNA, 19 nt, Artificial Sequence
  Description of Artificial Sequence: Synthetic oligonucleotide
ccaguacuuggccccucac

SEQ ID NO: 2595300 - RNA, 19 nt, Artificial Sequence
  Description of Artificial Sequence: Synthetic oligonucleotide
gcaucaccuuccggcuugg

SEQ ID NO: 2595301 - RNA, 19 nt, Artificial Sequence
  Description of Artificial Sequence: Synthetic oligonucleotide
ggccuguggcuuucucuuc

SEQ ID NO: 2595302 - RNA, 19 nt, Artificial Sequence
  Description of Artificial Sequence: Synthetic oligonucleotide
cacgugaggucagugggau

SEQ ID NO: 2595303 - RNA, 19 nt, Artificial Sequence
  Description of Artificial Sequence: Synthetic oligonucleotide
guugguagguggcccuguu

SEQ ID NO: 2595304 - RNA, 19 nt, Artificial Sequence
  Description of Artificial Sequence: Synthetic oligonucleotide
ggccuuaagacaggccugu

SEQ ID NO: 2595305 - RNA, 19 nt, Artificial Sequence
  Description of Artificial Sequence: Synthetic oligonucleotide
gcugccggcacagcuucuc

SEQ ID NO: 2595306 - RNA, 19 nt, Artificial Sequence
  Description of Artificial Sequence: Synthetic oligonucleotide
gccuuaagacaggccugug

SEQ ID NO: 2595307 - RNA, 19 nt, Artificial Sequence
  Description of Artificial Sequence: Synthetic oligonucleotide
ccggcacagcuucuccaug

SEQ ID NO: 2595308 - RNA, 19 nt, Artificial Sequence
  Description of Artificial Sequence: Synthetic oligonucleotide
ucccagcuaggagggccuu

SEQ ID NO: 2595309 - RNA, 19 nt, Artificial Sequence
  Description of Artificial Sequence: Synthetic oligonucleotide
gagcccuggucaaucgguu

SEQ ID NO: 2595310 - RNA, 19 nt, Artificial Sequence
  Description of Artificial Sequence: Synthetic oligonucleotide
cccuguuuuggagagcgcu

SEQ ID NO: 2595311 - RNA, 19 nt, Artificial Sequence
  Description of Artificial Sequence: Synthetic oligonucleotide
cgcuuacgcaagcugagua

SEQ ID NO: 2595312 - RNA, 19 nt, Artificial Sequence
  Description of Artificial Sequence: Synthetic oligonucleotide
ccacugugaaugagggcua

SEQ ID NO: 2595313 - RNA, 19 nt, Artificial Sequence
  Description of Artificial Sequence: Synthetic oligonucleotide
cccaguacuuggccccuca

SEQ ID NO: 2595314 - RNA, 19 nt, Artificial Sequence
  Description of Artificial Sequence: Synthetic oligonucleotide
gcccucgaugccuccucca

SEQ ID NO: 2595315 - RNA, 19 nt, Artificial Sequence
  Description of Artificial Sequence: Synthetic oligonucleotide
ccagcuaggagggccuuaa

SEQ ID NO: 2595316 - RNA, 19 nt, Artificial Sequence
  Description of Artificial Sequence: Synthetic oligonucleotide
cggcuuggggcaguggaug

SEQ ID NO: 2595317 - RNA, 19 nt, Artificial Sequence
  Description of Artificial Sequence: Synthetic oligonucleotide
cagcuccacacuguccacu

SEQ ID NO: 2595318 - RNA, 19 nt, Artificial Sequence
  Description of Artificial Sequence: Synthetic oligonucleotide
ccacagcgcugaagauagc

SEQ ID NO: 2595319 - RNA, 19 nt, Artificial Sequence
  Description of Artificial Sequence: Synthetic oligonucleotide
cauuguugcccaggucaau

SEQ ID NO: 2595320 - RNA, 19 nt, Artificial Sequence
  Description of Artificial Sequence: Synthetic oligonucleotide
gccggcacagcuucuccau

SEQ ID NO: 2595321 - RNA, 19 nt, Artificial Sequence
  Description of Artificial Sequence: Synthetic oligonucleotide
gacaggccuguggcuuucu

SEQ ID NO: 2595322 - RNA, 19 nt, Artificial Sequence
  Description of Artificial Sequence: Synthetic oligonucleotide
gcccuguuuuggagagcgc

SEQ ID NO: 2595323 - RNA, 19 nt, Artificial Sequence
  Description of Artificial Sequence: Synthetic oligonucleotide
ccuggucaaucgguugcca

SEQ ID NO: 2595324 - RNA, 19 nt, Artificial Sequence
  Description of Artificial Sequence: Synthetic oligonucleotide
gggaugccugacagaucca

SEQ ID NO: 2595325 - RNA, 19 nt, Artificial Sequence
  Description of Artificial Sequence: Synthetic oligonucleotide
gguugguagguggcccugu

SEQ ID NO: 2595326 - RNA, 19 nt, Artificial Sequence
  Description of Artificial Sequence: Synthetic oligonucleotide
ccuggccucuuccccagua

SEQ ID NO: 2595327 - RNA, 19 nt, Artificial Sequence
  Description of Artificial Sequence: Synthetic oligonucleotide
caggucacgugaggucagu

SEQ ID NO: 2595328 - RNA, 19 nt, Artificial Sequence
  Description of Artificial Sequence: Synthetic oligonucleotide
ccucgaugccuccuccacu

SEQ ID NO: 2595329 - RNA, 19 nt, Artificial Sequence
  Description of Artificial Sequence: Synthetic oligonucleotide
guaccuucccuggccucuu

SEQ ID NO: 2595330 - RNA, 19 nt, Artificial Sequence
  Description of Artificial Sequence: Synthetic oligonucleotide
gcgcuuacgcaagcugagu

SEQ ID NO: 2595331 - RNA, 19 nt, Artificial Sequence
  Description of Artificial Sequence: Synthetic oligonucleotide
gcaguagcugcaggaccau

SEQ ID NO: 2595332 - RNA, 19 nt, Artificial Sequence
  Description of Artificial Sequence: Synthetic oligonucleotide
gguugccauugagggcgua

SEQ ID NO: 2595333 - RNA, 19 nt, Artificial Sequence
  Description of Artificial Sequence: Synthetic oligonucleotide
ccggcuuggggcaguggau

SEQ ID NO: 2595334 - RNA, 19 nt, Artificial Sequence
  Description of Artificial Sequence: Synthetic oligonucleotide
gcgaggcaggguacugagu

SEQ ID NO: 2595335 - RNA, 19 nt, Artificial Sequence
  Description of Artificial Sequence: Synthetic oligonucleotide
gcgcaucaccuuccggcuu

SEQ ID NO: 2595336 - RNA, 19 nt, Artificial Sequence
  Description of Artificial Sequence: Synthetic oligonucleotide
cagcuccaggaugguuggu

SEQ ID NO: 2595337 - RNA, 19 nt, Artificial Sequence
  Description of Artificial Sequence: Synthetic oligonucleotide
ccccaguacuuggccccuc

SEQ ID NO: 2595338 - RNA, 19 nt, Artificial Sequence
  Description of Artificial Sequence: Synthetic oligonucleotide
ccagcccucgaugccuccu

SEQ ID NO: 2595339 - RNA, 19 nt, Artificial Sequence
  Description of Artificial Sequence: Synthetic oligonucleotide
cccagcuaggagggccuua

SEQ ID NO: 2595340 - RNA, 19 nt, Artificial Sequence
  Description of Artificial Sequence: Synthetic oligonucleotide
ccuuccggcuuggggcagu

SEQ ID NO: 2595341 - RNA, 19 nt, Artificial Sequence
  Description of Artificial Sequence: Synthetic oligonucleotide
cgguugccauugagggcgu

SEQ ID NO: 2595342 - RNA, 19 nt, Artificial Sequence
  Description of Artificial Sequence: Synthetic oligonucleotide
aaguuugucugucaguucc

SEQ ID NO: 2595343 - RNA, 19 nt, Artificial Sequence
  Description of Artificial Sequence: Synthetic oligonucleotide
aaguagaagcugcuuaucc

SEQ ID NO: 2595344 - RNA, 19 nt, Artificial Sequence
  Description of Artificial Sequence: Synthetic oligonucleotide
aauuuugcagguaagauug

SEQ ID NO: 2595345 - RNA, 19 nt, Artificial Sequence
  Description of Artificial Sequence: Synthetic oligonucleotide
ucaauggcaauuuugcagg

SEQ ID NO: 2595346 - RNA, 19 nt, Artificial Sequence
  Description of Artificial Sequence: Synthetic oligonucleotide
aauauccuggauaagcgcc

SEQ ID NO: 2595347 - RNA, 19 nt, Artificial Sequence
  Description of Artificial Sequence: Synthetic oligonucleotide
ugugacaucauccugcuga

SEQ ID NO: 2595348 - RNA, 19 nt, Artificial Sequence
  Description of Artificial Sequence: Synthetic oligonucleotide
uucuucacaauauaaagga

SEQ ID NO: 2595349 - RNA, 19 nt, Artificial Sequence
  Description of Artificial Sequence: Synthetic oligonucleotide
aagaugagaaguuugucug

SEQ ID NO: 2595350 - RNA, 19 nt, Artificial Sequence
  Description of Artificial Sequence: Synthetic oligonucleotide
uguagcaaggaacagggcc

SEQ ID NO: 2595351 - RNA, 19 nt, Artificial Sequence
  Description of Artificial Sequence: Synthetic oligonucleotide
uuugugaugagcuuccggc

SEQ ID NO: 2595352 - RNA, 19 nt, Artificial Sequence
  Description of Artificial Sequence: Synthetic oligonucleotide
uucacaauauaaaggacug

SEQ ID NO: 2595353 - RNA, 19 nt, Artificial Sequence
  Description of Artificial Sequence: Synthetic oligonucleotide
uuguauuuugugaugagcu

SEQ ID NO: 2595354 - RNA, 19 nt, Artificial Sequence
  Description of Artificial Sequence: Synthetic oligonucleotide
ucagugagcucacuuaagg

SEQ ID NO: 2595355 - RNA, 19 nt, Artificial Sequence
  Description of Artificial Sequence: Synthetic oligonucleotide
uugucaauggcaauuuugc

SEQ ID NO: 2595356 - RNA, 19 nt, Artificial Sequence
  Description of Artificial Sequence: Synthetic oligonucleotide
aacaaucucgaauauccug

SEQ ID NO: 2595357 - RNA, 19 nt, Artificial Sequence
  Description of Artificial Sequence: Synthetic oligonucleotide
agccucuucacucugcugc

SEQ ID NO: 2595358 - RNA, 19 nt, Artificial Sequence
  Description of Artificial Sequence: Synthetic oligonucleotide
caauauaaaggacuguagc

SEQ ID NO: 2595359 - RNA, 19 nt, Artificial Sequence
  Description of Artificial Sequence: Synthetic oligonucleotide
guaagauuggcuuuccgcc

SEQ ID NO: 2595360 - RNA, 19 nt, Artificial Sequence
  Description of Artificial Sequence: Synthetic oligonucleotide
uuggcuuuccgccaugagg

SEQ ID NO: 2595361 - RNA, 19 nt, Artificial Sequence
  Description of Artificial Sequence: Synthetic oligonucleotide
aguagaagcugcuuauccg

SEQ ID NO: 2595362 - RNA, 19 nt, Artificial Sequence
  Description of Artificial Sequence: Synthetic oligonucleotide
agugcaaagggccacagcu

SEQ ID NO: 2595363 - RNA, 19 nt, Artificial Sequence
  Description of Artificial Sequence: Synthetic oligonucleotide
uauuuugugaugagcuucc

SEQ ID NO: 2595364 - RNA, 19 nt, Artificial Sequence
  Description of Artificial Sequence: Synthetic oligonucleotide
gucaauggcaauuuugcag

SEQ ID NO: 2595365 - RNA, 19 nt, Artificial Sequence
  Description of Artificial Sequence: Synthetic oligonucleotide
uuuuccagguugucaaugg

SEQ ID NO: 2595366 - RNA, 19 nt, Artificial Sequence
  Description of Artificial Sequence: Synthetic oligonucleotide
ugcaaagggccacagcugg

SEQ ID NO: 2595367 - RNA, 19 nt, Artificial Sequence
  Description of Artificial Sequence: Synthetic oligonucleotide
ugagaaguuugucugucag

SEQ ID NO: 2595368 - RNA, 19 nt, Artificial Sequence
  Description of Artificial Sequence: Synthetic oligonucleotide
uggauaagcgccuucaccu

SEQ ID NO: 2595369 - RNA, 19 nt, Artificial Sequence
  Description of Artificial Sequence: Synthetic oligonucleotide
uaacuguugaaacuuuucu

SEQ ID NO: 2595370 - RNA, 19 nt, Artificial Sequence
  Description of Artificial Sequence: Synthetic oligonucleotide
gagcaguccaguuuggcgg

SEQ ID NO: 2595371 - RNA, 19 nt, Artificial Sequence
  Description of Artificial Sequence: Synthetic oligonucleotide
ucgaauauccuggauaagc

SEQ ID NO: 2595372 - RNA, 19 nt, Artificial Sequence
  Description of Artificial Sequence: Synthetic oligonucleotide
uuccuuugccuuaagaggu

SEQ ID NO: 2595373 - RNA, 19 nt, Artificial Sequence
  Description of Artificial Sequence: Synthetic oligonucleotide
uuuugugaugagcuuccgg

SEQ ID NO: 2595374 - RNA, 19 nt, Artificial Sequence
  Description of Artificial Sequence: Synthetic oligonucleotide
uccagaacaaucucgaaua

SEQ ID NO: 2595375 - RNA, 19 nt, Artificial Sequence
  Description of Artificial Sequence: Synthetic oligonucleotide
acaaucucgaauauccugg

SEQ ID NO: 2595376 - RNA, 19 nt, Artificial Sequence
  Description of Artificial Sequence: Synthetic oligonucleotide
uggauggucccugacaugg

SEQ ID NO: 2595377 - RNA, 19 nt, Artificial Sequence
  Description of Artificial Sequence: Synthetic oligonucleotide
acuguagcaaggaacaggg

SEQ ID NO: 2595378 - RNA, 19 nt, Artificial Sequence
  Description of Artificial Sequence: Synthetic oligonucleotide
cacuuccugaaguagaagc

SEQ ID NO: 2595379 - RNA, 19 nt, Artificial Sequence
  Description of Artificial Sequence: Synthetic oligonucleotide
cugacuagagucugcauag

SEQ ID NO: 2595380 - RNA, 19 nt, Artificial Sequence
  Description of Artificial Sequence: Synthetic oligonucleotide
cuuaguguucaguucagug

SEQ ID NO: 2595381 - RNA, 19 nt, Artificial Sequence
  Description of Artificial Sequence: Synthetic oligonucleotide
ucucgaauauccuggauaa

SEQ ID NO: 2595382 - RNA, 19 nt, Artificial Sequence
  Description of Artificial Sequence: Synthetic oligonucleotide
uggcuuuccgccaugaggu

SEQ ID NO: 2595383 - RNA, 19 nt, Artificial Sequence
  Description of Artificial Sequence: Synthetic oligonucleotide
gaauauccuggauaagcgc

SEQ ID NO: 2595384 - RNA, 19 nt, Artificial Sequence
  Description of Artificial Sequence: Synthetic oligonucleotide
uuugcagguaagauuggcu

SEQ ID NO: 2595385 - RNA, 19 nt, Artificial Sequence
  Description of Artificial Sequence: Synthetic oligonucleotide
cuuuucuuucaccuuagug

SEQ ID NO: 2595386 - RNA, 19 nt, Artificial Sequence
  Description of Artificial Sequence: Synthetic oligonucleotide
aacuguugaaacuuuucuu

SEQ ID NO: 2595387 - RNA, 19 nt, Artificial Sequence
  Description of Artificial Sequence: Synthetic oligonucleotide
ugaaucgggagugcaaagg

SEQ ID NO: 2595388 - RNA, 19 nt, Artificial Sequence
  Description of Artificial Sequence: Synthetic oligonucleotide
uuucuuucaccuuaguguu

SEQ ID NO: 2595389 - RNA, 19 nt, Artificial Sequence
  Description of Artificial Sequence: Synthetic oligonucleotide
uggacuuaaacucuucauu

SEQ ID NO: 2595390 - RNA, 19 nt, Artificial Sequence
  Description of Artificial Sequence: Synthetic oligonucleotide
aaucgggagugcaaagggc

SEQ ID NO: 2595391 - RNA, 19 nt, Artificial Sequence
  Description of Artificial Sequence: Synthetic oligonucleotide
ucuucacaauauaaaggac

SEQ ID NO: 2595392 - RNA, 19 nt, Artificial Sequence
  Description of Artificial Sequence: Synthetic oligonucleotide
uugucugucaguucccggc

SEQ ID NO: 2595393 - RNA, 19 nt, Artificial Sequence
  Description of Artificial Sequence: Synthetic oligonucleotide
gacuguagcaaggaacagg

SEQ ID NO: 2595394 - RNA, 19 nt, Artificial Sequence
  Description of Artificial Sequence: Synthetic oligonucleotide
gaagaugagaaguuugucu

SEQ ID NO: 2595395 - RNA, 19 nt, Artificial Sequence
  Description of Artificial Sequence: Synthetic oligonucleotide
ugaaguagaagcugcuuau

SEQ ID NO: 2595396 - RNA, 19 nt, Artificial Sequence
  Description of Artificial Sequence: Synthetic oligonucleotide
gacuagagucugcauagcc

SEQ ID NO: 2595397 - RNA, 19 nt, Artificial Sequence
  Description of Artificial Sequence: Synthetic oligonucleotide
uccuugagagcccaguccu

SEQ ID NO: 2595398 - RNA, 19 nt, Artificial Sequence
  Description of Artificial Sequence: Synthetic oligonucleotide
aucgggagugcaaagggcc

SEQ ID NO: 2595399 - RNA, 19 nt, Artificial Sequence
  Description of Artificial Sequence: Synthetic oligonucleotide
cacuuaaggguccagaaca

SEQ ID NO: 2595400 - RNA, 19 nt, Artificial Sequence
  Description of Artificial Sequence: Synthetic oligonucleotide
gguaagauuggcuuuccgc

SEQ ID NO: 2595401 - RNA, 19 nt, Artificial Sequence
  Description of Artificial Sequence: Synthetic oligonucleotide
auauaaaggacuguagcaa

SEQ ID NO: 2595402 - RNA, 19 nt, Artificial Sequence
  Description of Artificial Sequence: Synthetic oligonucleotide
cuagagucugcauagccuc

SEQ ID NO: 2595403 - RNA, 19 nt, Artificial Sequence
  Description of Artificial Sequence: Synthetic oligonucleotide
uuccagguugucaauggca

SEQ ID NO: 2595404 - RNA, 19 nt, Artificial Sequence
  Description of Artificial Sequence: Synthetic oligonucleotide
acaauauaaaggacuguag

SEQ ID NO: 2595405 - RNA, 19 nt, Artificial Sequence
  Description of Artificial Sequence: Synthetic oligonucleotide
uugucuugcucccuugcug

SEQ ID NO: 2595406 - RNA, 19 nt, Artificial Sequence
  Description of Artificial Sequence: Synthetic oligonucleotide
gauaagcgccuucaccucc

SEQ ID NO: 2595407 - RNA, 19 nt, Artificial Sequence
  Description of Artificial Sequence: Synthetic oligonucleotide
uaagauuggcuuuccgcca

SEQ ID NO: 2595408 - RNA, 19 nt, Artificial Sequence
  Description of Artificial Sequence: Synthetic oligonucleotide
ucacuuaaggguccagaac

SEQ ID NO: 2595409 - RNA, 19 nt, Artificial Sequence
  Description of Artificial Sequence: Synthetic oligonucleotide
uccgugaagagcugacuag

SEQ ID NO: 2595410 - RNA, 19 nt, Artificial Sequence
  Description of Artificial Sequence: Synthetic oligonucleotide
agcuccuguauccugcauc

SEQ ID NO: 2595411 - RNA, 19 nt, Artificial Sequence
  Description of Artificial Sequence: Synthetic oligonucleotide
ugucuugcucccuugcuga

SEQ ID NO: 2595412 - RNA, 19 nt, Artificial Sequence
  Description of Artificial Sequence: Synthetic oligonucleotide
ugcugacuguuccagcucc

SEQ ID NO: 2595413 - RNA, 19 nt, Artificial Sequence
  Description of Artificial Sequence: Synthetic oligonucleotide
uccagguugucaauggcaa

SEQ ID NO: 2595414 - RNA, 19 nt, Artificial Sequence
  Description of Artificial Sequence: Synthetic oligonucleotide
cagugagcucacuuaaggg

SEQ ID NO: 2595415 - RNA, 19 nt, Artificial Sequence
  Description of Artificial Sequence: Synthetic oligonucleotide
uuugccuuaagaggucucc

SEQ ID NO: 2595416 - RNA, 19 nt, Artificial Sequence
  Description of Artificial Sequence: Synthetic oligonucleotide
agcgccuucaccuccaggu

SEQ ID NO: 2595417 - RNA, 19 nt, Artificial Sequence
  Description of Artificial Sequence: Synthetic oligonucleotide
agcaguccaguuuggcggc

SEQ ID NO: 2595418 - RNA, 19 nt, Artificial Sequence
  Description of Artificial Sequence: Synthetic oligonucleotide
uucagugagcucacuuaag

SEQ ID NO: 2595419 - RNA, 19 nt, Artificial Sequence
  Description of Artificial Sequence: Synthetic oligonucleotide
ugucaauggcaauuuugca

SEQ ID NO: 2595420 - RNA, 19 nt, Artificial Sequence
  Description of Artificial Sequence: Synthetic oligonucleotide
cuucacaauauaaaggacu

SEQ ID NO: 2595421 - RNA, 19 nt, Artificial Sequence
  Description of Artificial Sequence: Synthetic oligonucleotide
guauccugcaucguaacug

SEQ ID NO: 2595422 - RNA, 19 nt, Artificial Sequence
  Description of Artificial Sequence: Synthetic oligonucleotide
aucucgaauauccuggaua

SEQ ID NO: 2595423 - RNA, 19 nt, Artificial Sequence
  Description of Artificial Sequence: Synthetic oligonucleotide
uucacucugcugcaccugc

SEQ ID NO: 2595424 - RNA, 19 nt, Artificial Sequence
  Description of Artificial Sequence: Synthetic oligonucleotide
uauccugcaucguaacugu

SEQ ID NO: 2595425 - RNA, 19 nt, Artificial Sequence
  Description of Artificial Sequence: Synthetic oligonucleotide
uuaagaggucuccucccug

SEQ ID NO: 2595426 - RNA, 19 nt, Artificial Sequence
  Description of Artificial Sequence: Synthetic oligonucleotide
uuuugcagguaagauuggc

SEQ ID NO: 2595427 - RNA, 19 nt, Artificial Sequence
  Description of Artificial Sequence: Synthetic oligonucleotide
ugagcucacuuaagggucc

SEQ ID NO: 2595428 - RNA, 19 nt, Artificial Sequence
  Description of Artificial Sequence: Synthetic oligonucleotide
gaagcugcuuauccgacuc

SEQ ID NO: 2595429 - RNA, 19 nt, Artificial Sequence
  Description of Artificial Sequence: Synthetic oligonucleotide
cuggauaagcgccuucacc

SEQ ID NO: 2595430 - RNA, 19 nt, Artificial Sequence
  Description of Artificial Sequence: Synthetic oligonucleotide
guagaagcugcuuauccga

SEQ ID NO: 2595431 - RNA, 19 nt, Artificial Sequence
  Description of Artificial Sequence: Synthetic oligonucleotide
aguccuugagagcccaguc

SEQ ID NO: 2595432 - RNA, 19 nt, Artificial Sequence
  Description of Artificial Sequence: Synthetic oligonucleotide
uguauccugcaucguaacu

SEQ ID NO: 2595433 - RNA, 19 nt, Artificial Sequence
  Description of Artificial Sequence: Synthetic oligonucleotide
agaaguuugucugucaguu

SEQ ID NO: 2595434 - RNA, 19 nt, Artificial Sequence
  Description of Artificial Sequence: Synthetic oligonucleotide
aaaggacuguagcaaggaa

SEQ ID NO: 2595435 - RNA, 19 nt, Artificial Sequence
  Description of Artificial Sequence: Synthetic oligonucleotide
uguauuuugugaugagcuu

SEQ ID NO: 2595436 - RNA, 19 nt, Artificial Sequence
  Description of Artificial Sequence: Synthetic oligonucleotide
ggugcuagaugucugugcc

SEQ ID NO: 2595437 - RNA, 19 nt, Artificial Sequence
  Description of Artificial Sequence: Synthetic oligonucleotide
guauuuugugaugagcuuc

SEQ ID NO: 2595438 - RNA, 19 nt, Artificial Sequence
  Description of Artificial Sequence: Synthetic oligonucleotide
uuccggcccagcuggaugg

SEQ ID NO: 2595439 - RNA, 19 nt, Artificial Sequence
  Description of Artificial Sequence: Synthetic oligonucleotide
uccacuuccugaaguagaa

SEQ ID NO: 2595440 - RNA, 19 nt, Artificial Sequence
  Description of Artificial Sequence: Synthetic oligonucleotide
aaagggccacagcuggcag

SEQ ID NO: 2595441 - RNA, 19 nt, Artificial Sequence
  Description of Artificial Sequence: Synthetic oligonucleotide
aguucagugagcucacuua

SEQ ID NO: 2595442 - RNA, 19 nt, Artificial Sequence
  Description of Artificial Sequence: Synthetic oligonucleotide
aagauuggcuuuccgccau

SEQ ID NO: 2595443 - RNA, 19 nt, Artificial Sequence
  Description of Artificial Sequence: Synthetic oligonucleotide
auggacuuaaacucuucau

SEQ ID NO: 2595444 - RNA, 19 nt, Artificial Sequence
  Description of Artificial Sequence: Synthetic oligonucleotide
gccaaacucucuuugguag

SEQ ID NO: 2595445 - RNA, 19 nt, Artificial Sequence
  Description of Artificial Sequence: Synthetic oligonucleotide
uagaugucugugccaaacu

SEQ ID NO: 2595446 - RNA, 19 nt, Artificial Sequence
  Description of Artificial Sequence: Synthetic oligonucleotide
uuauccgacuccuugucuu

SEQ ID NO: 2595447 - RNA, 19 nt, Artificial Sequence
  Description of Artificial Sequence: Synthetic oligonucleotide
aggacuguagcaaggaaca

SEQ ID NO: 2595448 - RNA, 19 nt, Artificial Sequence
  Description of Artificial Sequence: Synthetic oligonucleotide
cagccaguccuugagagcc

SEQ ID NO: 2595449 - RNA, 19 nt, Artificial Sequence
  Description of Artificial Sequence: Synthetic oligonucleotide
ggagcaguccaguuuggcg

SEQ ID NO: 2595450 - RNA, 19 nt, Artificial Sequence
  Description of Artificial Sequence: Synthetic oligonucleotide
uccaggagaguccgugaag

SEQ ID NO: 2595451 - RNA, 19 nt, Artificial Sequence
  Description of Artificial Sequence: Synthetic oligonucleotide
cuagaugucugugccaaac

SEQ ID NO: 2595452 - RNA, 19 nt, Artificial Sequence
  Description of Artificial Sequence: Synthetic oligonucleotide
uggugcuagaugucugugc

SEQ ID NO: 2595453 - RNA, 19 nt, Artificial Sequence
  Description of Artificial Sequence: Synthetic oligonucleotide
gcuccuguauccugcaucg

SEQ ID NO: 2595454 - RNA, 19 nt, Artificial Sequence
  Description of Artificial Sequence: Synthetic oligonucleotide
ugcuuauccgacuccuugu

SEQ ID NO: 2595455 - RNA, 19 nt, Artificial Sequence
  Description of Artificial Sequence: Synthetic oligonucleotide
augucugugccaaacucuc

SEQ ID NO: 2595456 - RNA, 19 nt, Artificial Sequence
  Description of Artificial Sequence: Synthetic oligonucleotide
uugcauccaggagaguccg

SEQ ID NO: 2595457 - RNA, 19 nt, Artificial Sequence
  Description of Artificial Sequence: Synthetic oligonucleotide
gaugagaaguuugucuguc

SEQ ID NO: 2595458 - RNA, 19 nt, Artificial Sequence
  Description of Artificial Sequence: Synthetic oligonucleotide
aaucucgaauauccuggau

SEQ ID NO: 2595459 - RNA, 19 nt, Artificial Sequence
  Description of Artificial Sequence: Synthetic oligonucleotide
gauggucccugacauggac

SEQ ID NO: 2595460 - RNA, 19 nt, Artificial Sequence
  Description of Artificial Sequence: Synthetic oligonucleotide
uccuguauccugcaucgua

SEQ ID NO: 2595461 - RNA, 19 nt, Artificial Sequence
  Description of Artificial Sequence: Synthetic oligonucleotide
agguaagauuggcuuuccg

SEQ ID NO: 2595462 - RNA, 19 nt, Artificial Sequence
  Description of Artificial Sequence: Synthetic oligonucleotide
aucguaacuguugaaacuu

SEQ ID NO: 2595463 - RNA, 19 nt, Artificial Sequence
  Description of Artificial Sequence: Synthetic oligonucleotide
gagagcccaguccugaauc

SEQ ID NO: 2595464 - RNA, 19 nt, Artificial Sequence
  Description of Artificial Sequence: Synthetic oligonucleotide
ugguugcugagcaucugcu

SEQ ID NO: 2595465 - RNA, 19 nt, Artificial Sequence
  Description of Artificial Sequence: Synthetic oligonucleotide
cgaauauccuggauaagcg

SEQ ID NO: 2595466 - RNA, 19 nt, Artificial Sequence
  Description of Artificial Sequence: Synthetic oligonucleotide
ugcuagaugucugugccaa

SEQ ID NO: 2595467 - RNA, 19 nt, Artificial Sequence
  Description of Artificial Sequence: Synthetic oligonucleotide
uauccgacuccuugucuug

SEQ ID NO: 2595468 - RNA, 19 nt, Artificial Sequence
  Description of Artificial Sequence: Synthetic oligonucleotide
cugcuuauccgacuccuug

SEQ ID NO: 2595469 - RNA, 19 nt, Artificial Sequence
  Description of Artificial Sequence: Synthetic oligonucleotide
cucccuugcugacuguucc

SEQ ID NO: 2595470 - RNA, 19 nt, Artificial Sequence
  Description of Artificial Sequence: Synthetic oligonucleotide
aggguccagaacaaucucg

SEQ ID NO: 2595471 - RNA, 19 nt, Artificial Sequence
  Description of Artificial Sequence: Synthetic oligonucleotide
acuagagucugcauagccu

SEQ ID NO: 2595472 - RNA, 19 nt, Artificial Sequence
  Description of Artificial Sequence: Synthetic oligonucleotide
uuuugugguucuccacuuc

SEQ ID NO: 2595473 - RNA, 19 nt, Artificial Sequence
  Description of Artificial Sequence: Synthetic oligonucleotide
ugacuguuccagcuccugu

SEQ ID NO: 2595474 - RNA, 19 nt, Artificial Sequence
  Description of Artificial Sequence: Synthetic oligonucleotide
aaggcgcuucuucacaaua

SEQ ID NO: 2595475 - RNA, 19 nt, Artificial Sequence
  Description of Artificial Sequence: Synthetic oligonucleotide
guagcaaggaacagggcca

SEQ ID NO: 2595476 - RNA, 19 nt, Artificial Sequence
  Description of Artificial Sequence: Synthetic oligonucleotide
guuugucugucaguucccg

SEQ ID NO: 2595477 - RNA, 19 nt, Artificial Sequence
  Description of Artificial Sequence: Synthetic oligonucleotide
guccuugagagcccagucc

SEQ ID NO: 2595478 - RNA, 19 nt, Artificial Sequence
  Description of Artificial Sequence: Synthetic oligonucleotide
cacaauauaaaggacugua

SEQ ID NO: 2595479 - RNA, 19 nt, Artificial Sequence
  Description of Artificial Sequence: Synthetic oligonucleotide
cauagccucuucacucugc

SEQ ID NO: 2595480 - RNA, 19 nt, Artificial Sequence
  Description of Artificial Sequence: Synthetic oligonucleotide
gaaguuugucugucaguuc

SEQ ID NO: 2595481 - RNA, 19 nt, Artificial Sequence
  Description of Artificial Sequence: Synthetic oligonucleotide
augagaaguuugucuguca

SEQ ID NO: 2595482 - RNA, 19 nt, Artificial Sequence
  Description of Artificial Sequence: Synthetic oligonucleotide
uugugguucuccacuuccu

SEQ ID NO: 2595483 - RNA, 19 nt, Artificial Sequence
  Description of Artificial Sequence: Synthetic oligonucleotide
uccuggauaagcgccuuca

SEQ ID NO: 2595484 - RNA, 19 nt, Artificial Sequence
  Description of Artificial Sequence: Synthetic oligonucleotide
aguguucaguucagugagc

SEQ ID NO: 2595485 - RNA, 19 nt, Artificial Sequence
  Description of Artificial Sequence: Synthetic oligonucleotide
cauggacuuaaacucuuca

SEQ ID NO: 2595486 - RNA, 19 nt, Artificial Sequence
  Description of Artificial Sequence: Synthetic oligonucleotide
gcaucguaacuguugaaac

SEQ ID NO: 2595487 - RNA, 19 nt, Artificial Sequence
  Description of Artificial Sequence: Synthetic oligonucleotide
ucacaauauaaaggacugu

SEQ ID NO: 2595488 - RNA, 19 nt, Artificial Sequence
  Description of Artificial Sequence: Synthetic oligonucleotide
cugaaucgggagugcaaag

SEQ ID NO: 2595489 - RNA, 19 nt, Artificial Sequence
  Description of Artificial Sequence: Synthetic oligonucleotide
aggagcaguccaguuuggc

SEQ ID NO: 2595490 - RNA, 19 nt, Artificial Sequence
  Description of Artificial Sequence: Synthetic oligonucleotide
ucugucaguucccggcggu

SEQ ID NO: 2595491 - RNA, 19 nt, Artificial Sequence
  Description of Artificial Sequence: Synthetic oligonucleotide
uucuccacuuccugaagua

SEQ ID NO: 2595492 - RNA, 19 nt, Artificial Sequence
  Description of Artificial Sequence: Synthetic oligonucleotide
auuggcuuuccgccaugag

SEQ ID NO: 2595493 - RNA, 19 nt, Artificial Sequence
  Description of Artificial Sequence: Synthetic oligonucleotide
ugccaaacucucuuuggua

SEQ ID NO: 2595494 - RNA, 19 nt, Artificial Sequence
  Description of Artificial Sequence: Synthetic oligonucleotide
gguuguauuuugugaugag

SEQ ID NO: 2595495 - RNA, 19 nt, Artificial Sequence
  Description of Artificial Sequence: Synthetic oligonucleotide
ugcagguaagauuggcuuu

SEQ ID NO: 2595496 - RNA, 19 nt, Artificial Sequence
  Description of Artificial Sequence: Synthetic oligonucleotide
auccugcugauccccauga

SEQ ID NO: 2595497 - RNA, 19 nt, Artificial Sequence
  Description of Artificial Sequence: Synthetic oligonucleotide
uuucaccuuaguguucagu

SEQ ID NO: 2595498 - RNA, 19 nt, Artificial Sequence
  Description of Artificial Sequence: Synthetic oligonucleotide
uagagucugcauagccucu

SEQ ID NO: 2595499 - RNA, 19 nt, Artificial Sequence
  Description of Artificial Sequence: Synthetic oligonucleotide
ucgggagugcaaagggcca

SEQ ID NO: 2595500 - RNA, 19 nt, Artificial Sequence
  Description of Artificial Sequence: Synthetic oligonucleotide
auuuugugaugagcuuccg

SEQ ID NO: 2595501 - RNA, 19 nt, Artificial Sequence
  Description of Artificial Sequence: Synthetic oligonucleotide
uccugaaucgggagugcaa

SEQ ID NO: 2595502 - RNA, 19 nt, Artificial Sequence
  Description of Artificial Sequence: Synthetic oligonucleotide
cucacuuaaggguccagaa

SEQ ID NO: 2595503 - RNA, 19 nt, Artificial Sequence
  Description of Artificial Sequence: Synthetic oligonucleotide
cugugauggugcuagaugu

SEQ ID NO: 2595504 - RNA, 19 nt, Artificial Sequence
  Description of Artificial Sequence: Synthetic oligonucleotide
ugccuuaagaggucuccuc

SEQ ID NO: 2595505 - RNA, 19 nt, Artificial Sequence
  Description of Artificial Sequence: Synthetic oligonucleotide
aguccugaaucgggagugc

SEQ ID NO: 2595506 - RNA, 19 nt, Artificial Sequence
  Description of Artificial Sequence: Synthetic oligonucleotide
uucuuucaccuuaguguuc

SEQ ID NO: 2595507 - RNA, 19 nt, Artificial Sequence
  Description of Artificial Sequence: Synthetic oligonucleotide
gaaguagaagcugcuuauc

SEQ ID NO: 2595508 - RNA, 19 nt, Artificial Sequence
  Description of Artificial Sequence: Synthetic oligonucleotide
guaguuuuccuuugccuua

SEQ ID NO: 2595509 - RNA, 19 nt, Artificial Sequence
  Description of Artificial Sequence: Synthetic oligonucleotide
auuuugcagguaagauugg

SEQ ID NO: 2595510 - RNA, 19 nt, Artificial Sequence
  Description of Artificial Sequence: Synthetic oligonucleotide
augagcuuccggcccagcu

SEQ ID NO: 2595511 - RNA, 19 nt, Artificial Sequence
  Description of Artificial Sequence: Synthetic oligonucleotide
cuguauccugcaucguaac

SEQ ID NO: 2595512 - RNA, 19 nt, Artificial Sequence
  Description of Artificial Sequence: Synthetic oligonucleotide
gccuuaagaggucuccucc

SEQ ID NO: 2595513 - RNA, 19 nt, Artificial Sequence
  Description of Artificial Sequence: Synthetic oligonucleotide
ugucaguucccggcgguug

SEQ ID NO: 2595514 - RNA, 19 nt, Artificial Sequence
  Description of Artificial Sequence: Synthetic oligonucleotide
auccgacuccuugucuugc

SEQ ID NO: 2595515 - RNA, 19 nt, Artificial Sequence
  Description of Artificial Sequence: Synthetic oligonucleotide
uagcaaggaacagggccag

SEQ ID NO: 2595516 - RNA, 19 nt, Artificial Sequence
  Description of Artificial Sequence: Synthetic oligonucleotide
acuuuucuuucaccuuagu

SEQ ID NO: 2595517 - RNA, 19 nt, Artificial Sequence
  Description of Artificial Sequence: Synthetic oligonucleotide
uccuuugccuuaagagguc

SEQ ID NO: 2595518 - RNA, 19 nt, Artificial Sequence
  Description of Artificial Sequence: Synthetic oligonucleotide
uguucaguucagugagcuc

SEQ ID NO: 2595519 - RNA, 19 nt, Artificial Sequence
  Description of Artificial Sequence: Synthetic oligonucleotide
ccugcugauccccaugagg

SEQ ID NO: 2595520 - RNA, 19 nt, Artificial Sequence
  Description of Artificial Sequence: Synthetic oligonucleotide
uccugcugauccccaugag

SEQ ID NO: 2595521 - RNA, 19 nt, Artificial Sequence
  Description of Artificial Sequence: Synthetic oligonucleotide
ucguaacuguugaaacuuu

SEQ ID NO: 2595522 - RNA, 19 nt, Artificial Sequence
  Description of Artificial Sequence: Synthetic oligonucleotide
ugcugauccccaugaggcu

SEQ ID NO: 2595523 - RNA, 19 nt, Artificial Sequence
  Description of Artificial Sequence: Synthetic oligonucleotide
aauggcaauuuugcaggua

SEQ ID NO: 2595524 - RNA, 19 nt, Artificial Sequence
  Description of Artificial Sequence: Synthetic oligonucleotide
gagugcaaagggccacagc

SEQ ID NO: 2595525 - RNA, 19 nt, Artificial Sequence
  Description of Artificial Sequence: Synthetic oligonucleotide
caguccugaaucgggagug

SEQ ID NO: 2595526 - RNA, 19 nt, Artificial Sequence
  Description of Artificial Sequence: Synthetic oligonucleotide
uccgccaugaggucugguu

SEQ ID NO: 2595527 - RNA, 19 nt, Artificial Sequence
  Description of Artificial Sequence: Synthetic oligonucleotide
ugcugcaccugcugugaca

SEQ ID NO: 2595528 - RNA, 19 nt, Artificial Sequence
  Description of Artificial Sequence: Synthetic oligonucleotide
gucugucaguucccggcgg

SEQ ID NO: 2595529 - RNA, 19 nt, Artificial Sequence
  Description of Artificial Sequence: Synthetic oligonucleotide
auauccuggauaagcgccu

SEQ ID NO: 2595530 - RNA, 19 nt, Artificial Sequence
  Description of Artificial Sequence: Synthetic oligonucleotide
ugacuagagucugcauagc

SEQ ID NO: 2595531 - RNA, 19 nt, Artificial Sequence
  Description of Artificial Sequence: Synthetic oligonucleotide
auccuggauaagcgccuuc

SEQ ID NO: 2595532 - RNA, 19 nt, Artificial Sequence
  Description of Artificial Sequence: Synthetic oligonucleotide
caugaggcucucugugaug

SEQ ID NO: 2595533 - RNA, 19 nt, Artificial Sequence
  Description of Artificial Sequence: Synthetic oligonucleotide
auccaggagaguccgugaa

SEQ ID NO: 2595534 - RNA, 19 nt, Artificial Sequence
  Description of Artificial Sequence: Synthetic oligonucleotide
uugcugagcaucugcuuuu

SEQ ID NO: 2595535 - RNA, 19 nt, Artificial Sequence
  Description of Artificial Sequence: Synthetic oligonucleotide
cuuugccuuaagaggucuc

SEQ ID NO: 2595536 - RNA, 19 nt, Artificial Sequence
  Description of Artificial Sequence: Synthetic oligonucleotide
cuguagcaaggaacagggc

SEQ ID NO: 2595537 - RNA, 19 nt, Artificial Sequence
  Description of Artificial Sequence: Synthetic oligonucleotide
caaucucgaauauccugga

SEQ ID NO: 2595538 - RNA, 19 nt, Artificial Sequence
  Description of Artificial Sequence: Synthetic oligonucleotide
uugccuuaagaggucuccu

SEQ ID NO: 2595539 - RNA, 19 nt, Artificial Sequence
  Description of Artificial Sequence: Synthetic oligonucleotide
gagaaguuugucugucagu

SEQ ID NO: 2595540 - RNA, 19 nt, Artificial Sequence
  Description of Artificial Sequence: Synthetic oligonucleotide
uaagcgccuucaccuccag

SEQ ID NO: 2595541 - RNA, 19 nt, Artificial Sequence
  Description of Artificial Sequence: Synthetic oligonucleotide
agcccaguccugaaucggg

SEQ ID NO: 2595542 - RNA, 19 nt, Artificial Sequence
  Description of Artificial Sequence: Synthetic oligonucleotide
ggacuuaaacucuucauuu

SEQ ID NO: 2595543 - RNA, 19 nt, Artificial Sequence
  Description of Artificial Sequence: Synthetic oligonucleotide
agcugcuuauccgacuccu

SEQ ID NO: 2595544 - RNA, 19 nt, Artificial Sequence
  Description of Artificial Sequence: Synthetic oligonucleotide
guccagaacaaucucgaau

SEQ ID NO: 2595545 - RNA, 19 nt, Artificial Sequence
  Description of Artificial Sequence: Synthetic oligonucleotide
gcugacuagagucugcaua

SEQ ID NO: 2595546 - RNA, 19 nt, Artificial Sequence
  Description of Artificial Sequence: Synthetic oligonucleotide
cauccugcugauccccaug

SEQ ID NO: 2595547 - RNA, 19 nt, Artificial Sequence
  Description of Artificial Sequence: Synthetic oligonucleotide
gaggucuccucccugcaua

SEQ ID NO: 2595548 - RNA, 19 nt, Artificial Sequence
  Description of Artificial Sequence: Synthetic oligonucleotide
aaacucucuuugguaguuu

SEQ ID NO: 2595549 - RNA, 19 nt, Artificial Sequence
  Description of Artificial Sequence: Synthetic oligonucleotide
uccgacuccuugucuugcu

SEQ ID NO: 2595550 - RNA, 19 nt, Artificial Sequence
  Description of Artificial Sequence: Synthetic oligonucleotide
ggcaauuuugcagguaaga

SEQ ID NO: 2595551 - RNA, 19 nt, Artificial Sequence
  Description of Artificial Sequence: Synthetic oligonucleotide
guccgugaagagcugacua

SEQ ID NO: 2595552 - RNA, 19 nt, Artificial Sequence
  Description of Artificial Sequence: Synthetic oligonucleotide
gccagggcaaggaagauga

SEQ ID NO: 2595553 - RNA, 19 nt, Artificial Sequence
  Description of Artificial Sequence: Synthetic oligonucleotide
agauuggcuuuccgccaug

SEQ ID NO: 2595554 - RNA, 19 nt, Artificial Sequence
  Description of Artificial Sequence: Synthetic oligonucleotide
cuuucaccuuaguguucag

SEQ ID NO: 2595555 - RNA, 19 nt, Artificial Sequence
  Description of Artificial Sequence: Synthetic oligonucleotide
ggagaguccgugaagagcu

SEQ ID NO: 2595556 - RNA, 19 nt, Artificial Sequence
  Description of Artificial Sequence: Synthetic oligonucleotide
gaggagcaguccaguuugg

SEQ ID NO: 2595557 - RNA, 19 nt, Artificial Sequence
  Description of Artificial Sequence: Synthetic oligonucleotide
gugcaaagggccacagcug

SEQ ID NO: 2595558 - RNA, 19 nt, Artificial Sequence
  Description of Artificial Sequence: Synthetic oligonucleotide
cucgaauauccuggauaag

SEQ ID NO: 2595559 - RNA, 19 nt, Artificial Sequence
  Description of Artificial Sequence: Synthetic oligonucleotide
agaguccgugaagagcuga

SEQ ID NO: 2595560 - RNA, 19 nt, Artificial Sequence
  Description of Artificial Sequence: Synthetic oligonucleotide
gaguccgugaagagcugac

SEQ ID NO: 2595561 - RNA, 19 nt, Artificial Sequence
  Description of Artificial Sequence: Synthetic oligonucleotide
guucuccacuuccugaagu

SEQ ID NO: 2595562 - RNA, 19 nt, Artificial Sequence
  Description of Artificial Sequence: Synthetic oligonucleotide
cagguaagauuggcuuucc

SEQ ID NO: 2595563 - RNA, 19 nt, Artificial Sequence
  Description of Artificial Sequence: Synthetic oligonucleotide
gggcaaggaagaugagaag

SEQ ID NO: 2595564 - RNA, 19 nt, Artificial Sequence
  Description of Artificial Sequence: Synthetic oligonucleotide
agguugucaauggcaauuu

SEQ ID NO: 2595565 - RNA, 19 nt, Artificial Sequence
  Description of Artificial Sequence: Synthetic oligonucleotide
aguccgugaagagcugacu

SEQ ID NO: 2595566 - RNA, 19 nt, Artificial Sequence
  Description of Artificial Sequence: Synthetic oligonucleotide
aguccaguuuggcggccca

SEQ ID NO: 2595567 - RNA, 19 nt, Artificial Sequence
  Description of Artificial Sequence: Synthetic oligonucleotide
auaagcgccuucaccucca

SEQ ID NO: 2595568 - RNA, 19 nt, Artificial Sequence
  Description of Artificial Sequence: Synthetic oligonucleotide
cagggcaaggaagaugaga

SEQ ID NO: 2595569 - RNA, 19 nt, Artificial Sequence
  Description of Artificial Sequence: Synthetic oligonucleotide
gaacaaucucgaauauccu

SEQ ID NO: 2595570 - RNA, 19 nt, Artificial Sequence
  Description of Artificial Sequence: Synthetic oligonucleotide
ucucugugauggugcuaga

SEQ ID NO: 2595571 - RNA, 19 nt, Artificial Sequence
  Description of Artificial Sequence: Synthetic oligonucleotide
gucuccucccugcauaagu

SEQ ID NO: 2595572 - RNA, 19 nt, Artificial Sequence
  Description of Artificial Sequence: Synthetic oligonucleotide
gugccaaacucucuuuggu

SEQ ID NO: 2595573 - RNA, 19 nt, Artificial Sequence
  Description of Artificial Sequence: Synthetic oligonucleotide
gcuuauccgacuccuuguc

SEQ ID NO: 2595574 - RNA, 19 nt, Artificial Sequence
  Description of Artificial Sequence: Synthetic oligonucleotide
ggauaagcgccuucaccuc

SEQ ID NO: 2595575 - RNA, 19 nt, Artificial Sequence
  Description of Artificial Sequence: Synthetic oligonucleotide
auggucccugacauggacu

SEQ ID NO: 2595576 - RNA, 19 nt, Artificial Sequence
  Description of Artificial Sequence: Synthetic oligonucleotide
agccaguccuugagagccc

SEQ ID NO: 2595577 - RNA, 19 nt, Artificial Sequence
  Description of Artificial Sequence: Synthetic oligonucleotide
cugacuguuccagcuccug

SEQ ID NO: 2595578 - RNA, 19 nt, Artificial Sequence
  Description of Artificial Sequence: Synthetic oligonucleotide
gcagguaagauuggcuuuc

SEQ ID NO: 2595579 - RNA, 19 nt, Artificial Sequence
  Description of Artificial Sequence: Synthetic oligonucleotide
uuuccgccaugaggucugg

SEQ ID NO: 2595580 - RNA, 19 nt, Artificial Sequence
  Description of Artificial Sequence: Synthetic oligonucleotide
ggucugguugcugagcauc

SEQ ID NO: 2595581 - RNA, 19 nt, Artificial Sequence
  Description of Artificial Sequence: Synthetic oligonucleotide
agcugacuagagucugcau

SEQ ID NO: 2595582 - RNA, 19 nt, Artificial Sequence
  Description of Artificial Sequence: Synthetic oligonucleotide
cacagcuggcagcucucac

SEQ ID NO: 2595583 - RNA, 19 nt, Artificial Sequence
  Description of Artificial Sequence: Synthetic oligonucleotide
ucccugacauggacuuaaa

SEQ ID NO: 2595584 - RNA, 19 nt, Artificial Sequence
  Description of Artificial Sequence: Synthetic oligonucleotide
gugcuagaugucugugcca

SEQ ID NO: 2595585 - RNA, 19 nt, Artificial Sequence
  Description of Artificial Sequence: Synthetic oligonucleotide
cagcuggcagcucucacaa

SEQ ID NO: 2595586 - RNA, 19 nt, Artificial Sequence
  Description of Artificial Sequence: Synthetic oligonucleotide
ucaguucagugagcucacu

SEQ ID NO: 2595587 - RNA, 19 nt, Artificial Sequence
  Description of Artificial Sequence: Synthetic oligonucleotide
ggguccagaacaaucucga

SEQ ID NO: 2595588 - RNA, 19 nt, Artificial Sequence
  Description of Artificial Sequence: Synthetic oligonucleotide
ggcgguuguauuuugugau

SEQ ID NO: 2595589 - RNA, 19 nt, Artificial Sequence
  Description of Artificial Sequence: Synthetic oligonucleotide
agcaaggaacagggccagg

SEQ ID NO: 2595590 - RNA, 19 nt, Artificial Sequence
  Description of Artificial Sequence: Synthetic oligonucleotide
gagaguccgugaagagcug

SEQ ID NO: 2595591 - RNA, 19 nt, Artificial Sequence
  Description of Artificial Sequence: Synthetic oligonucleotide
cuuauccgacuccuugucu

SEQ ID NO: 2595592 - RNA, 19 nt, Artificial Sequence
  Description of Artificial Sequence: Synthetic oligonucleotide
ccuguauccugcaucguaa

SEQ ID NO: 2595593 - RNA, 19 nt, Artificial Sequence
  Description of Artificial Sequence: Synthetic oligonucleotide
uauccuggauaagcgccuu

SEQ ID NO: 2595594 - RNA, 19 nt, Artificial Sequence
  Description of Artificial Sequence: Synthetic oligonucleotide
cucuuugguaguuuuccuu

SEQ ID NO: 2595595 - RNA, 19 nt, Artificial Sequence
  Description of Artificial Sequence: Synthetic oligonucleotide
ucccggcgguuguauuuug

SEQ ID NO: 2595596 - RNA, 19 nt, Artificial Sequence
  Description of Artificial Sequence: Synthetic oligonucleotide
cgacuccuugucuugcucc

SEQ ID NO: 2595597 - RNA, 19 nt, Artificial Sequence
  Description of Artificial Sequence: Synthetic oligonucleotide
aggcgcuucuucacaauau

SEQ ID NO: 2595598 - RNA, 19 nt, Artificial Sequence
  Description of Artificial Sequence: Synthetic oligonucleotide
agcucacuuaaggguccag

SEQ ID NO: 2595599 - RNA, 19 nt, Artificial Sequence
  Description of Artificial Sequence: Synthetic oligonucleotide
ccgccaugaggucugguug

SEQ ID NO: 2595600 - RNA, 19 nt, Artificial Sequence
  Description of Artificial Sequence: Synthetic oligonucleotide
ggacuguagcaaggaacag

SEQ ID NO: 2595601 - RNA, 19 nt, Artificial Sequence
  Description of Artificial Sequence: Synthetic oligonucleotide
ccagccaguccuugagagc

SEQ ID NO: 2595602 - RNA, 19 nt, Artificial Sequence
  Description of Artificial Sequence: Synthetic oligonucleotide
ugacaucauccugcugauc

SEQ ID NO: 2595603 - RNA, 19 nt, Artificial Sequence
  Description of Artificial Sequence: Synthetic oligonucleotide
aguucccggcgguuguauu

SEQ ID NO: 2595604 - RNA, 19 nt, Artificial Sequence
  Description of Artificial Sequence: Synthetic oligonucleotide
gcaauuuugcagguaagau

SEQ ID NO: 2595605 - RNA, 19 nt, Artificial Sequence
  Description of Artificial Sequence: Synthetic oligonucleotide
ugcucccuugcugacuguu

SEQ ID NO: 2595606 - RNA, 19 nt, Artificial Sequence
  Description of Artificial Sequence: Synthetic oligonucleotide
cugugacaucauccugcug

SEQ ID NO: 2595607 - RNA, 19 nt, Artificial Sequence
  Description of Artificial Sequence: Synthetic oligonucleotide
caguccaguuuggcggccc

SEQ ID NO: 2595608 - RNA, 19 nt, Artificial Sequence
  Description of Artificial Sequence: Synthetic oligonucleotide
cccaguccugaaucgggag

SEQ ID NO: 2595609 - RNA, 19 nt, Artificial Sequence
  Description of Artificial Sequence: Synthetic oligonucleotide
caccugcugugacaucauc

SEQ ID NO: 2595610 - RNA, 19 nt, Artificial Sequence
  Description of Artificial Sequence: Synthetic oligonucleotide
guccugaaucgggagugca

SEQ ID NO: 2595611 - RNA, 19 nt, Artificial Sequence
  Description of Artificial Sequence: Synthetic oligonucleotide
cgccuucaccuccaggucg

SEQ ID NO: 2595612 - RNA, 19 nt, Artificial Sequence
  Description of Artificial Sequence: Synthetic oligonucleotide
gcucacuuaaggguccaga

SEQ ID NO: 2595613 - RNA, 19 nt, Artificial Sequence
  Description of Artificial Sequence: Synthetic oligonucleotide
cgccaugaggucugguugc

SEQ ID NO: 2595614 - RNA, 19 nt, Artificial Sequence
  Description of Artificial Sequence: Synthetic oligonucleotide
cccugacauggacuuaaac

SEQ ID NO: 2595615 - RNA, 19 nt, Artificial Sequence
  Description of Artificial Sequence: Synthetic oligonucleotide
caauggcaauuuugcaggu

SEQ ID NO: 2595616 - RNA, 19 nt, Artificial Sequence
  Description of Artificial Sequence: Synthetic oligonucleotide
cugcugcaccugcugugac

SEQ ID NO: 2595617 - RNA, 19 nt, Artificial Sequence
  Description of Artificial Sequence: Synthetic oligonucleotide
gagcucacuuaagggucca

SEQ ID NO: 2595618 - RNA, 19 nt, Artificial Sequence
  Description of Artificial Sequence: Synthetic oligonucleotide
ggccagggcaaggaagaug

SEQ ID NO: 2595619 - RNA, 19 nt, Artificial Sequence
  Description of Artificial Sequence: Synthetic oligonucleotide
cagguugucaauggcaauu

SEQ ID NO: 2595620 - RNA, 19 nt, Artificial Sequence
  Description of Artificial Sequence: Synthetic oligonucleotide
ucaguucccggcgguugua

SEQ ID NO: 2595621 - RNA, 19 nt, Artificial Sequence
  Description of Artificial Sequence: Synthetic oligonucleotide
gucaguucccggcgguugu

SEQ ID NO: 2595622 - RNA, 19 nt, Artificial Sequence
  Description of Artificial Sequence: Synthetic oligonucleotide
guucccggcgguuguauuu

SEQ ID NO: 2595623 - RNA, 19 nt, Artificial Sequence
  Description of Artificial Sequence: Synthetic oligonucleotide
ccuugagagcccaguccug

SEQ ID NO: 2595624 - RNA, 19 nt, Artificial Sequence
  Description of Artificial Sequence: Synthetic oligonucleotide
uugcucccuugcugacugu

SEQ ID NO: 2595625 - RNA, 19 nt, Artificial Sequence
  Description of Artificial Sequence: Synthetic oligonucleotide
ccugcauaaguucugcuuu

SEQ ID NO: 2595626 - RNA, 19 nt, Artificial Sequence
  Description of Artificial Sequence: Synthetic oligonucleotide
cugcauaaguucugcuuuu

SEQ ID NO: 2595627 - RNA, 19 nt, Artificial Sequence
  Description of Artificial Sequence: Synthetic oligonucleotide
ccugaaucgggagugcaaa

SEQ ID NO: 2595628 - RNA, 19 nt, Artificial Sequence
  Description of Artificial Sequence: Synthetic oligonucleotide
caguucagugagcucacuu

SEQ ID NO: 2595629 - RNA, 19 nt, Artificial Sequence
  Description of Artificial Sequence: Synthetic oligonucleotide
gcgcuucuucacaauauaa

SEQ ID NO: 2595630 - RNA, 19 nt, Artificial Sequence
  Description of Artificial Sequence: Synthetic oligonucleotide
agcuggcagcucucacaaa

SEQ ID NO: 2595631 - RNA, 19 nt, Artificial Sequence
  Description of Artificial Sequence: Synthetic oligonucleotide
caaacucucuuugguaguu

SEQ ID NO: 2595632 - RNA, 19 nt, Artificial Sequence
  Description of Artificial Sequence: Synthetic oligonucleotide
ccacuuccugaaguagaag

SEQ ID NO: 2595633 - RNA, 19 nt, Artificial Sequence
  Description of Artificial Sequence: Synthetic oligonucleotide
ccgugaagagcugacuaga

SEQ ID NO: 2595634 - RNA, 19 nt, Artificial Sequence
  Description of Artificial Sequence: Synthetic oligonucleotide
ggcuuuccgccaugagguc

SEQ ID NO: 2595635 - RNA, 19 nt, Artificial Sequence
  Description of Artificial Sequence: Synthetic oligonucleotide
ggucuccucccugcauaag

SEQ ID NO: 2595636 - RNA, 19 nt, Artificial Sequence
  Description of Artificial Sequence: Synthetic oligonucleotide
gggagugcaaagggccaca

SEQ ID NO: 2595637 - RNA, 19 nt, Artificial Sequence
  Description of Artificial Sequence: Synthetic oligonucleotide
ccgacuccuugucuugcuc

SEQ ID NO: 2595638 - RNA, 19 nt, Artificial Sequence
  Description of Artificial Sequence: Synthetic oligonucleotide
uccggcccagcuggauggu

SEQ ID NO: 2595639 - RNA, 19 nt, Artificial Sequence
  Description of Artificial Sequence: Synthetic oligonucleotide
gcuagaugucugugccaaa

SEQ ID NO: 2595640 - RNA, 19 nt, Artificial Sequence
  Description of Artificial Sequence: Synthetic oligonucleotide
gcugcaccugcugugacau

SEQ ID NO: 2595641 - RNA, 19 nt, Artificial Sequence
  Description of Artificial Sequence: Synthetic oligonucleotide
gguugucaauggcaauuuu

SEQ ID NO: 2595642 - RNA, 19 nt, Artificial Sequence
  Description of Artificial Sequence: Synthetic oligonucleotide
cggcgguuguauuuuguga

SEQ ID NO: 2595643 - RNA, 19 nt, Artificial Sequence
  Description of Artificial Sequence: Synthetic oligonucleotide
auccugcaucguaacuguu

SEQ ID NO: 2595644 - RNA, 19 nt, Artificial Sequence
  Description of Artificial Sequence: Synthetic oligonucleotide
gcuuuccgccaugaggucu

SEQ ID NO: 2595645 - RNA, 19 nt, Artificial Sequence
  Description of Artificial Sequence: Synthetic oligonucleotide
gcccagccaguccuugaga

SEQ ID NO: 2595646 - RNA, 19 nt, Artificial Sequence
  Description of Artificial Sequence: Synthetic oligonucleotide
ggauggucccugacaugga

SEQ ID NO: 2595647 - RNA, 19 nt, Artificial Sequence
  Description of Artificial Sequence: Synthetic oligonucleotide
gccaguccuugagagccca

SEQ ID NO: 2595648 - RNA, 19 nt, Artificial Sequence
  Description of Artificial Sequence: Synthetic oligonucleotide
ccaguccugaaucgggagu

SEQ ID NO: 2595649 - RNA, 19 nt, Artificial Sequence
  Description of Artificial Sequence: Synthetic oligonucleotide
ccaugaggcucucugugau

SEQ ID NO: 2595650 - RNA, 19 nt, Artificial Sequence
  Description of Artificial Sequence: Synthetic oligonucleotide
ccagaacaaucucgaauau

SEQ ID NO: 2595651 - RNA, 19 nt, Artificial Sequence
  Description of Artificial Sequence: Synthetic oligonucleotide
gauccccaugaggcucucu

SEQ ID NO: 2595652 - RNA, 19 nt, Artificial Sequence
  Description of Artificial Sequence: Synthetic oligonucleotide
cgggagugcaaagggccac

SEQ ID NO: 2595653 - RNA, 19 nt, Artificial Sequence
  Description of Artificial Sequence: Synthetic oligonucleotide
cauuugcauccaggagagu

SEQ ID NO: 2595654 - RNA, 19 nt, Artificial Sequence
  Description of Artificial Sequence: Synthetic oligonucleotide
ccuuaguguucaguucagu

SEQ ID NO: 2595655 - RNA, 19 nt, Artificial Sequence
  Description of Artificial Sequence: Synthetic oligonucleotide
gccaugaggucugguugcu

SEQ ID NO: 2595656 - RNA, 19 nt, Artificial Sequence
  Description of Artificial Sequence: Synthetic oligonucleotide
ccagguugucaauggcaau

SEQ ID NO: 2595657 - RNA, 19 nt, Artificial Sequence
  Description of Artificial Sequence: Synthetic oligonucleotide
cuccuguauccugcaucgu

SEQ ID NO: 2595658 - RNA, 19 nt, Artificial Sequence
  Description of Artificial Sequence: Synthetic oligonucleotide
ggucccugacauggacuua

SEQ ID NO: 2595659 - RNA, 19 nt, Artificial Sequence
  Description of Artificial Sequence: Synthetic oligonucleotide
caguucccggcgguuguau

SEQ ID NO: 2595660 - RNA, 19 nt, Artificial Sequence
  Description of Artificial Sequence: Synthetic oligonucleotide
guuuggcggcccagccagu

SEQ ID NO: 2595661 - RNA, 19 nt, Artificial Sequence
  Description of Artificial Sequence: Synthetic oligonucleotide
gcucucugugauggugcua

SEQ ID NO: 2595662 - RNA, 19 nt, Artificial Sequence
  Description of Artificial Sequence: Synthetic oligonucleotide
cugucaguucccggcgguu

SEQ ID NO: 2595663 - RNA, 19 nt, Artificial Sequence
  Description of Artificial Sequence: Synthetic oligonucleotide
cccggcgguuguauuuugu

SEQ ID NO: 2595664 - RNA, 19 nt, Artificial Sequence
  Description of Artificial Sequence: Synthetic oligonucleotide
gcugcuuauccgacuccuu

SEQ ID NO: 2595665 - RNA, 19 nt, Artificial Sequence
  Description of Artificial Sequence: Synthetic oligonucleotide
ccggcccagcuggaugguc

SEQ ID NO: 2595666 - RNA, 19 nt, Artificial Sequence
  Description of Artificial Sequence: Synthetic oligonucleotide
cggcccagccaguccuuga

SEQ ID NO: 2595667 - RNA, 19 nt, Artificial Sequence
  Description of Artificial Sequence: Synthetic oligonucleotide
aaaucagugcccuucuucc

SEQ ID NO: 2595668 - RNA, 19 nt, Artificial Sequence
  Description of Artificial Sequence: Synthetic oligonucleotide
ucaggaaagagguaguugg

SEQ ID NO: 2595669 - RNA, 19 nt, Artificial Sequence
  Description of Artificial Sequence: Synthetic oligonucleotide
ugaagugauacuuagcaga

SEQ ID NO: 2595670 - RNA, 19 nt, Artificial Sequence
  Description of Artificial Sequence: Synthetic oligonucleotide
uagaauuuucaccaggggc

SEQ ID NO: 2595671 - RNA, 19 nt, Artificial Sequence
  Description of Artificial Sequence: Synthetic oligonucleotide
gaagccaccacuuacuggc

SEQ ID NO: 2595672 - RNA, 19 nt, Artificial Sequence
  Description of Artificial Sequence: Synthetic oligonucleotide
aauucuuccggagaaacug

SEQ ID NO: 2595673 - RNA, 19 nt, Artificial Sequence
  Description of Artificial Sequence: Synthetic oligonucleotide
uguauuuaugcccacugac

SEQ ID NO: 2595674 - RNA, 19 nt, Artificial Sequence
  Description of Artificial Sequence: Synthetic oligonucleotide
uucucuaugccuaaggauc

SEQ ID NO: 2595675 - RNA, 19 nt, Artificial Sequence
  Description of Artificial Sequence: Synthetic oligonucleotide
uauuuaugcccacugacgu

SEQ ID NO: 2595676 - RNA, 19 nt, Artificial Sequence
  Description of Artificial Sequence: Synthetic oligonucleotide
uucuugauguuaauugugc

SEQ ID NO: 2595677 - RNA, 19 nt, Artificial Sequence
  Description of Artificial Sequence: Synthetic oligonucleotide
aaacacgagggcugcaaac

SEQ ID NO: 2595678 - RNA, 19 nt, Artificial Sequence
  Description of Artificial Sequence: Synthetic oligonucleotide
aaguauggaagccaccacu

SEQ ID NO: 2595679 - RNA, 19 nt, Artificial Sequence
  Description of Artificial Sequence: Synthetic oligonucleotide
guuggacugacguuggccg

SEQ ID NO: 2595680 - RNA, 19 nt, Artificial Sequence
  Description of Artificial Sequence: Synthetic oligonucleotide
uuaauugugccuagaauuu

SEQ ID NO: 2595681 - RNA, 19 nt, Artificial Sequence
  Description of Artificial Sequence: Synthetic oligonucleotide
uacuuagcagaauucuucc

SEQ ID NO: 2595682 - RNA, 19 nt, Artificial Sequence
  Description of Artificial Sequence: Synthetic oligonucleotide
uauggaagccaccacuuac

SEQ ID NO: 2595683 - RNA, 19 nt, Artificial Sequence
  Description of Artificial Sequence: Synthetic oligonucleotide
agaauucuuccggagaaac

SEQ ID NO: 2595684 - RNA, 19 nt, Artificial Sequence
  Description of Artificial Sequence: Synthetic oligonucleotide
aggacuuccacgccugccc

SEQ ID NO: 2595685 - RNA, 19 nt, Artificial Sequence
  Description of Artificial Sequence: Synthetic oligonucleotide
agugauacuuagcagaauu

SEQ ID NO: 2595686 - RNA, 19 nt, Artificial Sequence
  Description of Artificial Sequence: Synthetic oligonucleotide
aaucagugcccuucuuccg

SEQ ID NO: 2595687 - RNA, 19 nt, Artificial Sequence
  Description of Artificial Sequence: Synthetic oligonucleotide
cauagcuucggcucggacc

SEQ ID NO: 2595688 - RNA, 19 nt, Artificial Sequence
  Description of Artificial Sequence: Synthetic oligonucleotide
uuuaugcccacugacguug

SEQ ID NO: 2595689 - RNA, 19 nt, Artificial Sequence
  Description of Artificial Sequence: Synthetic oligonucleotide
agaauuuucaccaggggcu

SEQ ID NO: 2595690 - RNA, 19 nt, Artificial Sequence
  Description of Artificial Sequence: Synthetic oligonucleotide
auacuuagcagaauucuuc

SEQ ID NO: 2595691 - RNA, 19 nt, Artificial Sequence
  Description of Artificial Sequence: Synthetic oligonucleotide
ugcauacagaccuucagaa

SEQ ID NO: 2595692 - RNA, 19 nt, Artificial Sequence
  Description of Artificial Sequence: Synthetic oligonucleotide
guauuuaugcccacugacg

SEQ ID NO: 2595693 - RNA, 19 nt, Artificial Sequence
  Description of Artificial Sequence: Synthetic oligonucleotide
auagcuucggcucggaccu

SEQ ID NO: 2595694 - RNA, 19 nt, Artificial Sequence
  Description of Artificial Sequence: Synthetic oligonucleotide
uguuaauugugccuagaau

SEQ ID NO: 2595695 - RNA, 19 nt, Artificial Sequence
  Description of Artificial Sequence: Synthetic oligonucleotide
aagguguccugagaugacc

SEQ ID NO: 2595696 - RNA, 19 nt, Artificial Sequence
  Description of Artificial Sequence: Synthetic oligonucleotide
augaggcaaguauggaagc

SEQ ID NO: 2595697 - RNA, 19 nt, Artificial Sequence
  Description of Artificial Sequence: Synthetic oligonucleotide
ugguuguaggacuuccacg

SEQ ID NO: 2595698 - RNA, 19 nt, Artificial Sequence
  Description of Artificial Sequence: Synthetic oligonucleotide
ugauacuuagcagaauucu

SEQ ID NO: 2595699 - RNA, 19 nt, Artificial Sequence
  Description of Artificial Sequence: Synthetic oligonucleotide
uuccggagaaacugcaggg

SEQ ID NO: 2595700 - RNA, 19 nt, Artificial Sequence
  Description of Artificial Sequence: Synthetic oligonucleotide
ucuugcauagcuucggcuc

SEQ ID NO: 2595701 - RNA, 19 nt, Artificial Sequence
  Description of Artificial Sequence: Synthetic oligonucleotide
gguuguaggacuuccacgc

SEQ ID NO: 2595702 - RNA, 19 nt, Artificial Sequence
  Description of Artificial Sequence: Synthetic oligonucleotide
ucaggauccgugcuggucu

SEQ ID NO: 2595703 - RNA, 19 nt, Artificial Sequence
  Description of Artificial Sequence: Synthetic oligonucleotide
acauccacgugguuguagg

SEQ ID NO: 2595704 - RNA, 19 nt, Artificial Sequence
  Description of Artificial Sequence: Synthetic oligonucleotide
cuagaauuuucaccagggg

SEQ ID NO: 2595705 - RNA, 19 nt, Artificial Sequence
  Description of Artificial Sequence: Synthetic oligonucleotide
aguuggacugacguuggcc

SEQ ID NO: 2595706 - RNA, 19 nt, Artificial Sequence
  Description of Artificial Sequence: Synthetic oligonucleotide
guuaauugugccuagaauu

SEQ ID NO: 2595707 - RNA, 19 nt, Artificial Sequence
  Description of Artificial Sequence: Synthetic oligonucleotide
ucaagguguccugagauga

SEQ ID NO: 2595708 - RNA, 19 nt, Artificial Sequence
  Description of Artificial Sequence: Synthetic oligonucleotide
gaaaucagugcccuucuuc

SEQ ID NO: 2595709 - RNA, 19 nt, Artificial Sequence
  Description of Artificial Sequence: Synthetic oligonucleotide
uaugccuaaggaucugcag

SEQ ID NO: 2595710 - RNA, 19 nt, Artificial Sequence
  Description of Artificial Sequence: Synthetic oligonucleotide
acuuagcagaauucuuccg

SEQ ID NO: 2595711 - RNA, 19 nt, Artificial Sequence
  Description of Artificial Sequence: Synthetic oligonucleotide
uggggacagcuucagaugc

SEQ ID NO: 2595712 - RNA, 19 nt, Artificial Sequence
  Description of Artificial Sequence: Synthetic oligonucleotide
uccgcuuguagauggagug

SEQ ID NO: 2595713 - RNA, 19 nt, Artificial Sequence
  Description of Artificial Sequence: Synthetic oligonucleotide
cuccaugaggcaaguaugg

SEQ ID NO: 2595714 - RNA, 19 nt, Artificial Sequence
  Description of Artificial Sequence: Synthetic oligonucleotide
ccuucagaaaacuccaugg

SEQ ID NO: 2595715 - RNA, 19 nt, Artificial Sequence
  Description of Artificial Sequence: Synthetic oligonucleotide
ucucuaugccuaaggaucu

SEQ ID NO: 2595716 - RNA, 19 nt, Artificial Sequence
  Description of Artificial Sequence: Synthetic oligonucleotide
cuugcauagcuucggcucg

SEQ ID NO: 2595717 - RNA, 19 nt, Artificial Sequence
  Description of Artificial Sequence: Synthetic oligonucleotide
ugccuaaggaucugcagug

SEQ ID NO: 2595718 - RNA, 19 nt, Artificial Sequence
  Description of Artificial Sequence: Synthetic oligonucleotide
ggcuucuugauguuaauug

SEQ ID NO: 2595719 - RNA, 19 nt, Artificial Sequence
  Description of Artificial Sequence: Synthetic oligonucleotide
uguaggacuuccacgccug

SEQ ID NO: 2595720 - RNA, 19 nt, Artificial Sequence
  Description of Artificial Sequence: Synthetic oligonucleotide
aaguuggacugacguuggc

SEQ ID NO: 2595721 - RNA, 19 nt, Artificial Sequence
  Description of Artificial Sequence: Synthetic oligonucleotide
uugauguuaauugugccua

SEQ ID NO: 2595722 - RNA, 19 nt, Artificial Sequence
  Description of Artificial Sequence: Synthetic oligonucleotide
aggaaagagguaguuggac

SEQ ID NO: 2595723 - RNA, 19 nt, Artificial Sequence
  Description of Artificial Sequence: Synthetic oligonucleotide
cugaagugauacuuagcag

SEQ ID NO: 2595724 - RNA, 19 nt, Artificial Sequence
  Description of Artificial Sequence: Synthetic oligonucleotide
augccuaaggaucugcagu

SEQ ID NO: 2595725 - RNA, 19 nt, Artificial Sequence
  Description of Artificial Sequence: Synthetic oligonucleotide
ggauccauguauuuaugcc

SEQ ID NO: 2595726 - RNA, 19 nt, Artificial Sequence
  Description of Artificial Sequence: Synthetic oligonucleotide
ccuagaauuuucaccaggg

SEQ ID NO: 2595727 - RNA, 19 nt, Artificial Sequence
  Description of Artificial Sequence: Synthetic oligonucleotide
ucuuggugcgccugaagug

SEQ ID NO: 2595728 - RNA, 19 nt, Artificial Sequence
  Description of Artificial Sequence: Synthetic oligonucleotide
accuucagaaaacuccaug

SEQ ID NO: 2595729 - RNA, 19 nt, Artificial Sequence
  Description of Artificial Sequence: Synthetic oligonucleotide
ucggcucggaccuucacug

SEQ ID NO: 2595730 - RNA, 19 nt, Artificial Sequence
  Description of Artificial Sequence: Synthetic oligonucleotide
ugauguuaauugugccuag

SEQ ID NO: 2595731 - RNA, 19 nt, Artificial Sequence
  Description of Artificial Sequence: Synthetic oligonucleotide
uuguaggacuuccacgccu

SEQ ID NO: 2595732 - RNA, 19 nt, Artificial Sequence
  Description of Artificial Sequence: Synthetic oligonucleotide
auacagaccuucagaaaac

SEQ ID NO: 2595733 - RNA, 19 nt, Artificial Sequence
  Description of Artificial Sequence: Synthetic oligonucleotide
cagacagcaucccacuggg

SEQ ID NO: 2595734 - RNA, 19 nt, Artificial Sequence
  Description of Artificial Sequence: Synthetic oligonucleotide
gaaacugcagggccucaag

SEQ ID NO: 2595735 - RNA, 19 nt, Artificial Sequence
  Description of Artificial Sequence: Synthetic oligonucleotide
uaguuggacaccuggcaca

SEQ ID NO: 2595736 - RNA, 19 nt, Artificial Sequence
  Description of Artificial Sequence: Synthetic oligonucleotide
auucuuccggagaaacugc

SEQ ID NO: 2595737 - RNA, 19 nt, Artificial Sequence
  Description of Artificial Sequence: Synthetic oligonucleotide
agcagaauucuuccggaga

SEQ ID NO: 2595738 - RNA, 19 nt, Artificial Sequence
  Description of Artificial Sequence: Synthetic oligonucleotide
ccugcagucaggaaagagg

SEQ ID NO: 2595739 - RNA, 19 nt, Artificial Sequence
  Description of Artificial Sequence: Synthetic oligonucleotide
aacaucuuggugcgccuga

SEQ ID NO: 2595740 - RNA, 19 nt, Artificial Sequence
  Description of Artificial Sequence: Synthetic oligonucleotide
guuggccgaggacagacag

SEQ ID NO: 2595741 - RNA, 19 nt, Artificial Sequence
  Description of Artificial Sequence: Synthetic oligonucleotide
uccugggcuuccaugcagg

SEQ ID NO: 2595742 - RNA, 19 nt, Artificial Sequence
  Description of Artificial Sequence: Synthetic oligonucleotide
aagagguaguuggacaccu

SEQ ID NO: 2595743 - RNA, 19 nt, Artificial Sequence
  Description of Artificial Sequence: Synthetic oligonucleotide
acugacguuggccgaggac

SEQ ID NO: 2595744 - RNA, 19 nt, Artificial Sequence
  Description of Artificial Sequence: Synthetic oligonucleotide
gaaaacuccauggcuccag

SEQ ID NO: 2595745 - RNA, 19 nt, Artificial Sequence
  Description of Artificial Sequence: Synthetic oligonucleotide
auguuaauugugccuagaa

SEQ ID NO: 2595746 - RNA, 19 nt, Artificial Sequence
  Description of Artificial Sequence: Synthetic oligonucleotide
gaaguuggacugacguugg

SEQ ID NO: 2595747 - RNA, 19 nt, Artificial Sequence
  Description of Artificial Sequence: Synthetic oligonucleotide
ugacguuggccgaggacag

SEQ ID NO: 2595748 - RNA, 19 nt, Artificial Sequence
  Description of Artificial Sequence: Synthetic oligonucleotide
guaguuggacaccuggcac

SEQ ID NO: 2595749 - RNA, 19 nt, Artificial Sequence
  Description of Artificial Sequence: Synthetic oligonucleotide
uccacgugguuguaggacu

SEQ ID NO: 2595750 - RNA, 19 nt, Artificial Sequence
  Description of Artificial Sequence: Synthetic oligonucleotide
gagugcaucgucugcuccc

SEQ ID NO: 2595751 - RNA, 19 nt, Artificial Sequence
  Description of Artificial Sequence: Synthetic oligonucleotide
uggucugcaucacauccac

SEQ ID NO: 2595752 - RNA, 19 nt, Artificial Sequence
  Description of Artificial Sequence: Synthetic oligonucleotide
cuucacugcauacagaccu

SEQ ID NO: 2595753 - RNA, 19 nt, Artificial Sequence
  Description of Artificial Sequence: Synthetic oligonucleotide
uagcagaauucuuccggag

SEQ ID NO: 2595754 - RNA, 19 nt, Artificial Sequence
  Description of Artificial Sequence: Synthetic oligonucleotide
gaugcuccccaguugccgc

SEQ ID NO: 2595755 - RNA, 19 nt, Artificial Sequence
  Description of Artificial Sequence: Synthetic oligonucleotide
ugaggcaaguauggaagcc

SEQ ID NO: 2595756 - RNA, 19 nt, Artificial Sequence
  Description of Artificial Sequence: Synthetic oligonucleotide
acaccggguucucuaugcc

SEQ ID NO: 2595757 - RNA, 19 nt, Artificial Sequence
  Description of Artificial Sequence: Synthetic oligonucleotide
ucuaugccuaaggaucugc

SEQ ID NO: 2595758 - RNA, 19 nt, Artificial Sequence
  Description of Artificial Sequence: Synthetic oligonucleotide
auccgugcuggucugcauc

SEQ ID NO: 2595759 - RNA, 19 nt, Artificial Sequence
  Description of Artificial Sequence: Synthetic oligonucleotide
uuaugcccacugacguugg

SEQ ID NO: 2595760 - RNA, 19 nt, Artificial Sequence
  Description of Artificial Sequence: Synthetic oligonucleotide
uucuugcauagcuucggcu

SEQ ID NO: 2595761 - RNA, 19 nt, Artificial Sequence
  Description of Artificial Sequence: Synthetic oligonucleotide
uggucaggauccgugcugg

SEQ ID NO: 2595762 - RNA, 19 nt, Artificial Sequence
  Description of Artificial Sequence: Synthetic oligonucleotide
agguguccugagaugaccc

SEQ ID NO: 2595763 - RNA, 19 nt, Artificial Sequence
  Description of Artificial Sequence: Synthetic oligonucleotide
cuaaggaucugcagugcuc

SEQ ID NO: 2595764 - RNA, 19 nt, Artificial Sequence
  Description of Artificial Sequence: Synthetic oligonucleotide
auccacgugguuguaggac

SEQ ID NO: 2595765 - RNA, 19 nt, Artificial Sequence
  Description of Artificial Sequence: Synthetic oligonucleotide
cacaccggguucucuaugc

SEQ ID NO: 2595766 - RNA, 19 nt, Artificial Sequence
  Description of Artificial Sequence: Synthetic oligonucleotide
gcuggucugcaucacaucc

SEQ ID NO: 2595767 - RNA, 19 nt, Artificial Sequence
  Description of Artificial Sequence: Synthetic oligonucleotide
agguaguuggacaccuggc

SEQ ID NO: 2595768 - RNA, 19 nt, Artificial Sequence
  Description of Artificial Sequence: Synthetic oligonucleotide
gaagugauacuuagcagaa

SEQ ID NO: 2595769 - RNA, 19 nt, Artificial Sequence
  Description of Artificial Sequence: Synthetic oligonucleotide
ugagaugacccugcaguca

SEQ ID NO: 2595770 - RNA, 19 nt, Artificial Sequence
  Description of Artificial Sequence: Synthetic oligonucleotide
gaguggacagcaaccagug

SEQ ID NO: 2595771 - RNA, 19 nt, Artificial Sequence
  Description of Artificial Sequence: Synthetic oligonucleotide
uuccgcuuguagauggagu

SEQ ID NO: 2595772 - RNA, 19 nt, Artificial Sequence
  Description of Artificial Sequence: Synthetic oligonucleotide
uucggcucggaccuucacu

SEQ ID NO: 2595773 - RNA, 19 nt, Artificial Sequence
  Description of Artificial Sequence: Synthetic oligonucleotide
acgugguuguaggacuucc

SEQ ID NO: 2595774 - RNA, 19 nt, Artificial Sequence
  Description of Artificial Sequence: Synthetic oligonucleotide
ugcccacugacguuggagu

SEQ ID NO: 2595775 - RNA, 19 nt, Artificial Sequence
  Description of Artificial Sequence: Synthetic oligonucleotide
ucacccuggggccauucca

SEQ ID NO: 2595776 - RNA, 19 nt, Artificial Sequence
  Description of Artificial Sequence: Synthetic oligonucleotide
uccugagaugacccugcag

SEQ ID NO: 2595777 - RNA, 19 nt, Artificial Sequence
  Description of Artificial Sequence: Synthetic oligonucleotide
cuugauguuaauugugccu

SEQ ID NO: 2595778 - RNA, 19 nt, Artificial Sequence
  Description of Artificial Sequence: Synthetic oligonucleotide
guagauggagugcaucguc

SEQ ID NO: 2595779 - RNA, 19 nt, Artificial Sequence
  Description of Artificial Sequence: Synthetic oligonucleotide
gugguuguaggacuuccac

SEQ ID NO: 2595780 - RNA, 19 nt, Artificial Sequence
  Description of Artificial Sequence: Synthetic oligonucleotide
ggaaagagguaguuggaca

SEQ ID NO: 2595781 - RNA, 19 nt, Artificial Sequence
  Description of Artificial Sequence: Synthetic oligonucleotide
acguuggccgaggacagac

SEQ ID NO: 2595782 - RNA, 19 nt, Artificial Sequence
  Description of Artificial Sequence: Synthetic oligonucleotide
uugugccuagaauuuucac

SEQ ID NO: 2595783 - RNA, 19 nt, Artificial Sequence
  Description of Artificial Sequence: Synthetic oligonucleotide
ccauucaaggcccucagug

SEQ ID NO: 2595784 - RNA, 19 nt, Artificial Sequence
  Description of Artificial Sequence: Synthetic oligonucleotide
gucugcaucacauccacgu

SEQ ID NO: 2595785 - RNA, 19 nt, Artificial Sequence
  Description of Artificial Sequence: Synthetic oligonucleotide
gggauccauguauuuaugc

SEQ ID NO: 2595786 - RNA, 19 nt, Artificial Sequence
  Description of Artificial Sequence: Synthetic oligonucleotide
agggagaaguuggacugac

SEQ ID NO: 2595787 - RNA, 19 nt, Artificial Sequence
  Description of Artificial Sequence: Synthetic oligonucleotide
aggcaaguauggaagccac

SEQ ID NO: 2595788 - RNA, 19 nt, Artificial Sequence
  Description of Artificial Sequence: Synthetic oligonucleotide
ugccuagaauuuucaccag

SEQ ID NO: 2595789 - RNA, 19 nt, Artificial Sequence
  Description of Artificial Sequence: Synthetic oligonucleotide
gacagacagcaucccacug

SEQ ID NO: 2595790 - RNA, 19 nt, Artificial Sequence
  Description of Artificial Sequence: Synthetic oligonucleotide
gccuagaauuuucaccagg

SEQ ID NO: 2595791 - RNA, 19 nt, Artificial Sequence
  Description of Artificial Sequence: Synthetic oligonucleotide
cacgccugcccauugcagc

SEQ ID NO: 2595792 - RNA, 19 nt, Artificial Sequence
  Description of Artificial Sequence: Synthetic oligonucleotide
uccgugcuggucugcauca

SEQ ID NO: 2595793 - RNA, 19 nt, Artificial Sequence
  Description of Artificial Sequence: Synthetic oligonucleotide
uccggagaaacugcagggc

SEQ ID NO: 2595794 - RNA, 19 nt, Artificial Sequence
  Description of Artificial Sequence: Synthetic oligonucleotide
gacguuggaguggacagca

SEQ ID NO: 2595795 - RNA, 19 nt, Artificial Sequence
  Description of Artificial Sequence: Synthetic oligonucleotide
guuguaggacuuccacgcc

SEQ ID NO: 2595796 - RNA, 19 nt, Artificial Sequence
  Description of Artificial Sequence: Synthetic oligonucleotide
caaguauggaagccaccac

SEQ ID NO: 2595797 - RNA, 19 nt, Artificial Sequence
  Description of Artificial Sequence: Synthetic oligonucleotide
auuccauucaaggcccuca

SEQ ID NO: 2595798 - RNA, 19 nt, Artificial Sequence
  Description of Artificial Sequence: Synthetic oligonucleotide
cugacguuggccgaggaca

SEQ ID NO: 2595799 - RNA, 19 nt, Artificial Sequence
  Description of Artificial Sequence: Synthetic oligonucleotide
ugcgccugaagugauacuu

SEQ ID NO: 2595800 - RNA, 19 nt, Artificial Sequence
  Description of Artificial Sequence: Synthetic oligonucleotide
uccacgccugcccauugca

SEQ ID NO: 2595801 - RNA, 19 nt, Artificial Sequence
  Description of Artificial Sequence: Synthetic oligonucleotide
cuuccaugcaggcaaggga

SEQ ID NO: 2595802 - RNA, 19 nt, Artificial Sequence
  Description of Artificial Sequence: Synthetic oligonucleotide
gguaguuggacaccuggca

SEQ ID NO: 2595803 - RNA, 19 nt, Artificial Sequence
  Description of Artificial Sequence: Synthetic oligonucleotide
ucaaggcccucagugguca

SEQ ID NO: 2595804 - RNA, 19 nt, Artificial Sequence
  Description of Artificial Sequence: Synthetic oligonucleotide
gacagcaaccaguggcuuc

SEQ ID NO: 2595805 - RNA, 19 nt, Artificial Sequence
  Description of Artificial Sequence: Synthetic oligonucleotide
gauguuaauugugccuaga

SEQ ID NO: 2595806 - RNA, 19 nt, Artificial Sequence
  Description of Artificial Sequence: Synthetic oligonucleotide
auuuaugcccacugacguu

SEQ ID NO: 2595807 - RNA, 19 nt, Artificial Sequence
  Description of Artificial Sequence: Synthetic oligonucleotide
caguggucaggauccgugc

SEQ ID NO: 2595808 - RNA, 19 nt, Artificial Sequence
  Description of Artificial Sequence: Synthetic oligonucleotide
cugcauacagaccuucaga

SEQ ID NO: 2595809 - RNA, 19 nt, Artificial Sequence
  Description of Artificial Sequence: Synthetic oligonucleotide
cccauugcagcucuucagg

SEQ ID NO: 2595810 - RNA, 19 nt, Artificial Sequence
  Description of Artificial Sequence: Synthetic oligonucleotide
ucaaaggugcuggggaaau

SEQ ID NO: 2595811 - RNA, 19 nt, Artificial Sequence
  Description of Artificial Sequence: Synthetic oligonucleotide
uggacugacguuggccgag

SEQ ID NO: 2595812 - RNA, 19 nt, Artificial Sequence
  Description of Artificial Sequence: Synthetic oligonucleotide
uccauucaaggcccucagu

SEQ ID NO: 2595813 - RNA, 19 nt, Artificial Sequence
  Description of Artificial Sequence: Synthetic oligonucleotide
uccaugaggcaaguaugga

SEQ ID NO: 2595814 - RNA, 19 nt, Artificial Sequence
  Description of Artificial Sequence: Synthetic oligonucleotide
uuucaccaggggcuccaca

SEQ ID NO: 2595815 - RNA, 19 nt, Artificial Sequence
  Description of Artificial Sequence: Synthetic oligonucleotide
uugcauagcuucggcucgg

SEQ ID NO: 2595816 - RNA, 19 nt, Artificial Sequence
  Description of Artificial Sequence: Synthetic oligonucleotide
uaauugugccuagaauuuu

SEQ ID NO: 2595817 - RNA, 19 nt, Artificial Sequence
  Description of Artificial Sequence: Synthetic oligonucleotide
uuggacugacguuggccga

SEQ ID NO: 2595818 - RNA, 19 nt, Artificial Sequence
  Description of Artificial Sequence: Synthetic oligonucleotide
gggccauuccauucaaggc

SEQ ID NO: 2595819 - RNA, 19 nt, Artificial Sequence
  Description of Artificial Sequence: Synthetic oligonucleotide
aguauggaagccaccacuu

SEQ ID NO: 2595820 - RNA, 19 nt, Artificial Sequence
  Description of Artificial Sequence: Synthetic oligonucleotide
cuaugccuaaggaucugca

SEQ ID NO: 2595821 - RNA, 19 nt, Artificial Sequence
  Description of Artificial Sequence: Synthetic oligonucleotide
uucacugcauacagaccuu

SEQ ID NO: 2595822 - RNA, 19 nt, Artificial Sequence
  Description of Artificial Sequence: Synthetic oligonucleotide
aguggcuucuugauguuaa

SEQ ID NO: 2595823 - RNA, 19 nt, Artificial Sequence
  Description of Artificial Sequence: Synthetic oligonucleotide
ugacguuggaguggacagc

SEQ ID NO: 2595824 - RNA, 19 nt, Artificial Sequence
  Description of Artificial Sequence: Synthetic oligonucleotide
gcaaguauggaagccacca

SEQ ID NO: 2595825 - RNA, 19 nt, Artificial Sequence
  Description of Artificial Sequence: Synthetic oligonucleotide
acaccuggcacaccggguu

SEQ ID NO: 2595826 - RNA, 19 nt, Artificial Sequence
  Description of Artificial Sequence: Synthetic oligonucleotide
cuuggugcgccugaaguga

SEQ ID NO: 2595827 - RNA, 19 nt, Artificial Sequence
  Description of Artificial Sequence: Synthetic oligonucleotide
gaugugcuggggauccaug

SEQ ID NO: 2595828 - RNA, 19 nt, Artificial Sequence
  Description of Artificial Sequence: Synthetic oligonucleotide
ggcaacaucuuggugcgcc

SEQ ID NO: 2595829 - RNA, 19 nt, Artificial Sequence
  Description of Artificial Sequence: Synthetic oligonucleotide
gcuucuugcauagcuucgg

SEQ ID NO: 2595830 - RNA, 19 nt, Artificial Sequence
  Description of Artificial Sequence: Synthetic oligonucleotide
uuccacgccugcccauugc

SEQ ID NO: 2595831 - RNA, 19 nt, Artificial Sequence
  Description of Artificial Sequence: Synthetic oligonucleotide
augcccacugacguuggag

SEQ ID NO: 2595832 - RNA, 19 nt, Artificial Sequence
  Description of Artificial Sequence: Synthetic oligonucleotide
ucggaccuucacugcauac

SEQ ID NO: 2595833 - RNA, 19 nt, Artificial Sequence
  Description of Artificial Sequence: Synthetic oligonucleotide
uggggccauuccauucaag

SEQ ID NO: 2595834 - RNA, 19 nt, Artificial Sequence
  Description of Artificial Sequence: Synthetic oligonucleotide
uuccggaugugcuggggau

SEQ ID NO: 2595835 - RNA, 19 nt, Artificial Sequence
  Description of Artificial Sequence: Synthetic oligonucleotide
cuuccgcuuguagauggag

SEQ ID NO: 2595836 - RNA, 19 nt, Artificial Sequence
  Description of Artificial Sequence: Synthetic oligonucleotide
ugcuggggauccauguauu

SEQ ID NO: 2595837 - RNA, 19 nt, Artificial Sequence
  Description of Artificial Sequence: Synthetic oligonucleotide
caucuuggugcgccugaag

SEQ ID NO: 2595838 - RNA, 19 nt, Artificial Sequence
  Description of Artificial Sequence: Synthetic oligonucleotide
acgccugcccauugcagcu

SEQ ID NO: 2595839 - RNA, 19 nt, Artificial Sequence
  Description of Artificial Sequence: Synthetic oligonucleotide
caggaaagagguaguugga

SEQ ID NO: 2595840 - RNA, 19 nt, Artificial Sequence
  Description of Artificial Sequence: Synthetic oligonucleotide
ccggagaaacugcagggcc

SEQ ID NO: 2595841 - RNA, 19 nt, Artificial Sequence
  Description of Artificial Sequence: Synthetic oligonucleotide
aggaucugcagugcuccug

SEQ ID NO: 2595842 - RNA, 19 nt, Artificial Sequence
  Description of Artificial Sequence: Synthetic oligonucleotide
cuccagcaaacacgagggc

SEQ ID NO: 2595843 - RNA, 19 nt, Artificial Sequence
  Description of Artificial Sequence: Synthetic oligonucleotide
agugcaucgucugcuccca

SEQ ID NO: 2595844 - RNA, 19 nt, Artificial Sequence
  Description of Artificial Sequence: Synthetic oligonucleotide
agaaaacuccauggcucca

SEQ ID NO: 2595845 - RNA, 19 nt, Artificial Sequence
  Description of Artificial Sequence: Synthetic oligonucleotide
cuucuuccgcuuguagaug

SEQ ID NO: 2595846 - RNA, 19 nt, Artificial Sequence
  Description of Artificial Sequence: Synthetic oligonucleotide
ugcuggucugcaucacauc

SEQ ID NO: 2595847 - RNA, 19 nt, Artificial Sequence
  Description of Artificial Sequence: Synthetic oligonucleotide
uuggugcgccugaagugau

SEQ ID NO: 2595848 - RNA, 19 nt, Artificial Sequence
  Description of Artificial Sequence: Synthetic oligonucleotide
ccacuuacuggcaacaucu

SEQ ID NO: 2595849 - RNA, 19 nt, Artificial Sequence
  Description of Artificial Sequence: Synthetic oligonucleotide
cuuccggaugugcugggga

SEQ ID NO: 2595850 - RNA, 19 nt, Artificial Sequence
  Description of Artificial Sequence: Synthetic oligonucleotide
ccaguugccgcccgggacc

SEQ ID NO: 2595851 - RNA, 19 nt, Artificial Sequence
  Description of Artificial Sequence: Synthetic oligonucleotide
ccgggacccaccucaaagg

SEQ ID NO: 2595852 - RNA, 19 nt, Artificial Sequence
  Description of Artificial Sequence: Synthetic oligonucleotide
cacugcauacagaccuuca

SEQ ID NO: 2595853 - RNA, 19 nt, Artificial Sequence
  Description of Artificial Sequence: Synthetic oligonucleotide
ggugcgccugaagugauac

SEQ ID NO: 2595854 - RNA, 19 nt, Artificial Sequence
  Description of Artificial Sequence: Synthetic oligonucleotide
aggauccgugcuggucugc

SEQ ID NO: 2595855 - RNA, 19 nt, Artificial Sequence
  Description of Artificial Sequence: Synthetic oligonucleotide
guauggaagccaccacuua

SEQ ID NO: 2595856 - RNA, 19 nt, Artificial Sequence
  Description of Artificial Sequence: Synthetic oligonucleotide
agugcuccugggcuuccau

SEQ ID NO: 2595857 - RNA, 19 nt, Artificial Sequence
  Description of Artificial Sequence: Synthetic oligonucleotide
caacaucuuggugcgccug

SEQ ID NO: 2595858 - RNA, 19 nt, Artificial Sequence
  Description of Artificial Sequence: Synthetic oligonucleotide
caggauccgugcuggucug

SEQ ID NO: 2595859 - RNA, 19 nt, Artificial Sequence
  Description of Artificial Sequence: Synthetic oligonucleotide
cccgggacccaccucaaag

SEQ ID NO: 2595860 - RNA, 19 nt, Artificial Sequence
  Description of Artificial Sequence: Synthetic oligonucleotide
cuuccacgccugcccauug

SEQ ID NO: 2595861 - RNA, 19 nt, Artificial Sequence
  Description of Artificial Sequence: Synthetic oligonucleotide
caaacacgagggcugcaaa

SEQ ID NO: 2595862 - RNA, 19 nt, Artificial Sequence
  Description of Artificial Sequence: Synthetic oligonucleotide
ggcuccaugaggcaaguau

SEQ ID NO: 2595863 - RNA, 19 nt, Artificial Sequence
  Description of Artificial Sequence: Synthetic oligonucleotide
cauuccauucaaggcccuc

SEQ ID NO: 2595864 - RNA, 19 nt, Artificial Sequence
  Description of Artificial Sequence: Synthetic oligonucleotide
cucuaugccuaaggaucug

SEQ ID NO: 2595865 - RNA, 19 nt, Artificial Sequence
  Description of Artificial Sequence: Synthetic oligonucleotide
gucaggauccgugcugguc

SEQ ID NO: 2595866 - RNA, 19 nt, Artificial Sequence
  Description of Artificial Sequence: Synthetic oligonucleotide
accggguucucuaugccua

SEQ ID NO: 2595867 - RNA, 19 nt, Artificial Sequence
  Description of Artificial Sequence: Synthetic oligonucleotide
agagguaguuggacaccug

SEQ ID NO: 2595868 - RNA, 19 nt, Artificial Sequence
  Description of Artificial Sequence: Synthetic oligonucleotide
caucgucugcucccacuuc

SEQ ID NO: 2595869 - RNA, 19 nt, Artificial Sequence
  Description of Artificial Sequence: Synthetic oligonucleotide
ugcauagcuucggcucgga

SEQ ID NO: 2595870 - RNA, 19 nt, Artificial Sequence
  Description of Artificial Sequence: Synthetic oligonucleotide
gggagaaguuggacugacg

SEQ ID NO: 2595871 - RNA, 19 nt, Artificial Sequence
  Description of Artificial Sequence: Synthetic oligonucleotide
cccacugacguuggagugg

SEQ ID NO: 2595872 - RNA, 19 nt, Artificial Sequence
  Description of Artificial Sequence: Synthetic oligonucleotide
cguuggaguggacagcaac

SEQ ID NO: 2595873 - RNA, 19 nt, Artificial Sequence
  Description of Artificial Sequence: Synthetic oligonucleotide
ggcaagggagaaguuggac

SEQ ID NO: 2595874 - RNA, 19 nt, Artificial Sequence
  Description of Artificial Sequence: Synthetic oligonucleotide
gccaccacuuacuggcaac

SEQ ID NO: 2595875 - RNA, 19 nt, Artificial Sequence
  Description of Artificial Sequence: Synthetic oligonucleotide
gacugacguuggccgagga

SEQ ID NO: 2595876 - RNA, 19 nt, Artificial Sequence
  Description of Artificial Sequence: Synthetic oligonucleotide
cuucggcucggaccuucac

SEQ ID NO: 2595877 - RNA, 19 nt, Artificial Sequence
  Description of Artificial Sequence: Synthetic oligonucleotide
cgccugaagugauacuuag

SEQ ID NO: 2595878 - RNA, 19 nt, Artificial Sequence
  Description of Artificial Sequence: Synthetic oligonucleotide
cauugcagcucuucaggau

SEQ ID NO: 2595879 - RNA, 19 nt, Artificial Sequence
  Description of Artificial Sequence: Synthetic oligonucleotide
ggcaaguauggaagccacc

SEQ ID NO: 2595880 - RNA, 19 nt, Artificial Sequence
  Description of Artificial Sequence: Synthetic oligonucleotide
caaccaguggcuucuugau

SEQ ID NO: 2595881 - RNA, 19 nt, Artificial Sequence
  Description of Artificial Sequence: Synthetic oligonucleotide
cagaugcuucuugcauagc

SEQ ID NO: 2595882 - RNA, 19 nt, Artificial Sequence
  Description of Artificial Sequence: Synthetic oligonucleotide
ggaguggacagcaaccagu

SEQ ID NO: 2595883 - RNA, 19 nt, Artificial Sequence
  Description of Artificial Sequence: Synthetic oligonucleotide
uggugcgccugaagugaua

SEQ ID NO: 2595884 - RNA, 19 nt, Artificial Sequence
  Description of Artificial Sequence: Synthetic oligonucleotide
ggucugcaucacauccacg

SEQ ID NO: 2595885 - RNA, 19 nt, Artificial Sequence
  Description of Artificial Sequence: Synthetic oligonucleotide
ccggaugugcuggggaucc

SEQ ID NO: 2595886 - RNA, 19 nt, Artificial Sequence
  Description of Artificial Sequence: Synthetic oligonucleotide
caguugccgcccgggaccc

SEQ ID NO: 2595887 - RNA, 19 nt, Artificial Sequence
  Description of Artificial Sequence: Synthetic oligonucleotide
caucccacuggggacagcu

SEQ ID NO: 2595888 - RNA, 19 nt, Artificial Sequence
  Description of Artificial Sequence: Synthetic oligonucleotide
aggcaagggagaaguugga

SEQ ID NO: 2595889 - RNA, 19 nt, Artificial Sequence
  Description of Artificial Sequence: Synthetic oligonucleotide
cuccccaguugccgcccgg

SEQ ID NO: 2595890 - RNA, 19 nt, Artificial Sequence
  Description of Artificial Sequence: Synthetic oligonucleotide
guugccgcccgggacccac

SEQ ID NO: 2595891 - RNA, 19 nt, Artificial Sequence
  Description of Artificial Sequence: Synthetic oligonucleotide
cagaauucuuccggagaaa

SEQ ID NO: 2595892 - RNA, 19 nt, Artificial Sequence
  Description of Artificial Sequence: Synthetic oligonucleotide
ggacugacguuggccgagg

SEQ ID NO: 2595893 - RNA, 19 nt, Artificial Sequence
  Description of Artificial Sequence: Synthetic oligonucleotide
agcaaacacgagggcugca

SEQ ID NO: 2595894 - RNA, 19 nt, Artificial Sequence
  Description of Artificial Sequence: Synthetic oligonucleotide
cacgugguuguaggacuuc

SEQ ID NO: 2595895 - RNA, 19 nt, Artificial Sequence
  Description of Artificial Sequence: Synthetic oligonucleotide
cagcaucccacuggggaca

SEQ ID NO: 2595896 - RNA, 19 nt, Artificial Sequence
  Description of Artificial Sequence: Synthetic oligonucleotide
gccuaaggaucugcagugc

SEQ ID NO: 2595897 - RNA, 19 nt, Artificial Sequence
  Description of Artificial Sequence: Synthetic oligonucleotide
ggcuuccaugcaggcaagg

SEQ ID NO: 2595898 - RNA, 19 nt, Artificial Sequence
  Description of Artificial Sequence: Synthetic oligonucleotide
guuggacaccuggcacacc

SEQ ID NO: 2595899 - RNA, 19 nt, Artificial Sequence
  Description of Artificial Sequence: Synthetic oligonucleotide
gcacaccggguucucuaug

SEQ ID NO: 2595900 - RNA, 19 nt, Artificial Sequence
  Description of Artificial Sequence: Synthetic oligonucleotide
gcaaacacgagggcugcaa

SEQ ID NO: 2595901 - RNA, 19 nt, Artificial Sequence
  Description of Artificial Sequence: Synthetic oligonucleotide
caccaggggcuccacagcu

SEQ ID NO: 2595902 - RNA, 19 nt, Artificial Sequence
  Description of Artificial Sequence: Synthetic oligonucleotide
caccggguucucuaugccu

SEQ ID NO: 2595903 - RNA, 19 nt, Artificial Sequence
  Description of Artificial Sequence: Synthetic oligonucleotide
gccucaagguguccugaga

SEQ ID NO: 2595904 - RNA, 19 nt, Artificial Sequence
  Description of Artificial Sequence: Synthetic oligonucleotide
cccaguugccgcccgggac

SEQ ID NO: 2595905 - RNA, 19 nt, Artificial Sequence
  Description of Artificial Sequence: Synthetic oligonucleotide
gcauagcuucggcucggac

SEQ ID NO: 2595906 - RNA, 19 nt, Artificial Sequence
  Description of Artificial Sequence: Synthetic oligonucleotide
gacaccuggcacaccgggu

SEQ ID NO: 2595907 - RNA, 19 nt, Artificial Sequence
  Description of Artificial Sequence: Synthetic oligonucleotide
cugcucccacuucacugga

SEQ ID NO: 2595908 - RNA, 19 nt, Artificial Sequence
  Description of Artificial Sequence: Synthetic oligonucleotide
gacguuggccgaggacaga

SEQ ID NO: 2595909 - RNA, 19 nt, Artificial Sequence
  Description of Artificial Sequence: Synthetic oligonucleotide
gguguccugagaugacccu

SEQ ID NO: 2595910 - RNA, 19 nt, Artificial Sequence
  Description of Artificial Sequence: Synthetic oligonucleotide
ucacauccacgugguugua

SEQ ID NO: 2595911 - RNA, 19 nt, Artificial Sequence
  Description of Artificial Sequence: Synthetic oligonucleotide
gauccgugcuggucugcau

SEQ ID NO: 2595912 - RNA, 19 nt, Artificial Sequence
  Description of Artificial Sequence: Synthetic oligonucleotide
ggauccgugcuggucugca

SEQ ID NO: 2595913 - RNA, 19 nt, Artificial Sequence
  Description of Artificial Sequence: Synthetic oligonucleotide
cucggaccuucacugcaua

SEQ ID NO: 2595914 - RNA, 19 nt, Artificial Sequence
  Description of Artificial Sequence: Synthetic oligonucleotide
gugcaucgucugcucccac

SEQ ID NO: 2595915 - RNA, 19 nt, Artificial Sequence
  Description of Artificial Sequence: Synthetic oligonucleotide
gaccuucagaaaacuccau

SEQ ID NO: 2595916 - RNA, 19 nt, Artificial Sequence
  Description of Artificial Sequence: Synthetic oligonucleotide
cacugacguuggaguggac

SEQ ID NO: 2595917 - RNA, 19 nt, Artificial Sequence
  Description of Artificial Sequence: Synthetic oligonucleotide
gacuuccacgccugcccau

SEQ ID NO: 2595918 - RNA, 19 nt, Artificial Sequence
  Description of Artificial Sequence: Synthetic oligonucleotide
cacccuggggccauuccau

SEQ ID NO: 2595919 - RNA, 19 nt, Artificial Sequence
  Description of Artificial Sequence: Synthetic oligonucleotide
acccugcagucaggaaaga

SEQ ID NO: 2595920 - RNA, 19 nt, Artificial Sequence
  Description of Artificial Sequence: Synthetic oligonucleotide
cacuuacuggcaacaucuu

SEQ ID NO: 2595921 - RNA, 19 nt, Artificial Sequence
  Description of Artificial Sequence: Synthetic oligonucleotide
caguggcuucuugauguua

SEQ ID NO: 2595922 - RNA, 19 nt, Artificial Sequence
  Description of Artificial Sequence: Synthetic oligonucleotide
cgugguuguaggacuucca

SEQ ID NO: 2595923 - RNA, 19 nt, Artificial Sequence
  Description of Artificial Sequence: Synthetic oligonucleotide
cucaguggucaggauccgu

SEQ ID NO: 2595924 - RNA, 19 nt, Artificial Sequence
  Description of Artificial Sequence: Synthetic oligonucleotide
gugcgccugaagugauacu

SEQ ID NO: 2595925 - RNA, 19 nt, Artificial Sequence
  Description of Artificial Sequence: Synthetic oligonucleotide
ggaaaucagugcccuucuu

SEQ ID NO: 2595926 - RNA, 19 nt, Artificial Sequence
  Description of Artificial Sequence: Synthetic oligonucleotide
ggcacaccggguucucuau

SEQ ID NO: 2595927 - RNA, 19 nt, Artificial Sequence
  Description of Artificial Sequence: Synthetic oligonucleotide
cugcagugcuccugggcuu

SEQ ID NO: 2595928 - RNA, 19 nt, Artificial Sequence
  Description of Artificial Sequence: Synthetic oligonucleotide
gcgccugaagugauacuua

SEQ ID NO: 2595929 - RNA, 19 nt, Artificial Sequence
  Description of Artificial Sequence: Synthetic oligonucleotide
gacccaccucaaaggugcu

SEQ ID NO: 2595930 - RNA, 19 nt, Artificial Sequence
  Description of Artificial Sequence: Synthetic oligonucleotide
caccacuuacuggcaacau

SEQ ID NO: 2595931 - RNA, 19 nt, Artificial Sequence
  Description of Artificial Sequence: Synthetic oligonucleotide
cggagaaacugcagggccu

SEQ ID NO: 2595932 - RNA, 19 nt, Artificial Sequence
  Description of Artificial Sequence: Synthetic oligonucleotide
cagugcuccugggcuucca

SEQ ID NO: 2595933 - RNA, 19 nt, Artificial Sequence
  Description of Artificial Sequence: Synthetic oligonucleotide
gcuucggcucggaccuuca

SEQ ID NO: 2595934 - RNA, 19 nt, Artificial Sequence
  Description of Artificial Sequence: Synthetic oligonucleotide
cggguucucuaugccuaag

SEQ ID NO: 2595935 - RNA, 19 nt, Artificial Sequence
  Description of Artificial Sequence: Synthetic oligonucleotide
uagcuucggcucggaccuu

SEQ ID NO: 2595936 - RNA, 19 nt, Artificial Sequence
  Description of Artificial Sequence: Synthetic oligonucleotide
ggucaggauccgugcuggu

SEQ ID NO: 2595937 - RNA, 19 nt, Artificial Sequence
  Description of Artificial Sequence: Synthetic oligonucleotide
ccggguucucuaugccuaa

SEQ ID NO: 2595938 - RNA, 19 nt, Artificial Sequence
  Description of Artificial Sequence: Synthetic oligonucleotide
cguuggccgaggacagaca

SEQ ID NO: 2595939 - RNA, 19 nt, Artificial Sequence
  Description of Artificial Sequence: Synthetic oligonucleotide
ccgugcuggucugcaucac

SEQ ID NO: 2595940 - RNA, 19 nt, Artificial Sequence
  Description of Artificial Sequence: Synthetic oligonucleotide
ggacagcaaccaguggcuu

SEQ ID NO: 2595941 - RNA, 19 nt, Artificial Sequence
  Description of Artificial Sequence: Synthetic oligonucleotide
cgggacccaccucaaaggu

SEQ ID NO: 2595942 - RNA, 19 nt, Artificial Sequence
  Description of Artificial Sequence: Synthetic oligonucleotide
ccauuccauucaaggcccu

SEQ ID NO: 2595943 - RNA, 19 nt, Artificial Sequence
  Description of Artificial Sequence: Synthetic oligonucleotide
ccacgugguuguaggacuu

SEQ ID NO: 2595944 - RNA, 19 nt, Artificial Sequence
  Description of Artificial Sequence: Synthetic oligonucleotide
ccccaguugccgcccggga

SEQ ID NO: 2595945 - RNA, 19 nt, Artificial Sequence
  Description of Artificial Sequence: Synthetic oligonucleotide
cagugcccuucuuccgcuu

SEQ ID NO: 2595946 - RNA, 19 nt, Artificial Sequence
  Description of Artificial Sequence: Synthetic oligonucleotide
cgccugcccauugcagcuc

SEQ ID NO: 2595947 - RNA, 19 nt, Artificial Sequence
  Description of Artificial Sequence: Synthetic oligonucleotide
ggccgaggacagacagcau

SEQ ID NO: 2595948 - RNA, 19 nt, Artificial Sequence
  Description of Artificial Sequence: Synthetic oligonucleotide
cggaugugcuggggaucca

SEQ ID NO: 2595949 - RNA, 19 nt, Artificial Sequence
  Description of Artificial Sequence: Synthetic oligonucleotide
cgcccgggacccaccucaa

SEQ ID NO: 2595950 - RNA, 19 nt, Artificial Sequence
  Description of Artificial Sequence: Synthetic oligonucleotide
ccugcccauugcagcucuu

SEQ ID NO: 2595951 - RNA, 19 nt, Artificial Sequence
  Description of Artificial Sequence: Synthetic oligonucleotide
aaaugaaugauauuauucc

SEQ ID NO: 2595952 - RNA, 19 nt, Artificial Sequence
  Description of Artificial Sequence: Synthetic oligonucleotide
uuaacauuuaguugaaagg

SEQ ID NO: 2595953 - RNA, 19 nt, Artificial Sequence
  Description of Artificial Sequence: Synthetic oligonucleotide
aaagcagcgaaguggaugg

SEQ ID NO: 2595954 - RNA, 19 nt, Artificial Sequence
  Description of Artificial Sequence: Synthetic oligonucleotide
ucuauuauauacuugagua

SEQ ID NO: 2595955 - RNA, 19 nt, Artificial Sequence
  Description of Artificial Sequence: Synthetic oligonucleotide
uuuauuauaaaguuauauc

SEQ ID NO: 2595956 - RNA, 19 nt, Artificial Sequence
  Description of Artificial Sequence: Synthetic oligonucleotide
ugcuauagcauccugcacg

SEQ ID NO: 2595957 - RNA, 19 nt, Artificial Sequence
  Description of Artificial Sequence: Synthetic oligonucleotide
cagaguacaaugaugaugc

SEQ ID NO: 2595958 - RNA, 19 nt, Artificial Sequence
  Description of Artificial Sequence: Synthetic oligonucleotide
  modified_base (10)..(10): a, c, u, g, unknown or other
uuucuuuucngaaaugccu

SEQ ID NO: 2595959 - RNA, 19 nt, Artificial Sequence
  Description of Artificial Sequence: Synthetic oligonucleotide
uucacuuggacacugagcu

SEQ ID NO: 2595960 - RNA, 19 nt, Artificial Sequence
  Description of Artificial Sequence: Synthetic oligonucleotide
uaaaguuauauccaaucug

SEQ ID NO: 2595961 - RNA, 19 nt, Artificial Sequence
  Description of Artificial Sequence: Synthetic oligonucleotide
uguguaaucggcuuugaag

SEQ ID NO: 2595962 - RNA, 19 nt, Artificial Sequence
  Description of Artificial Sequence: Synthetic oligonucleotide
aaugaaugauauuauuccu

SEQ ID NO: 2595963 - RNA, 19 nt, Artificial Sequence
  Description of Artificial Sequence: Synthetic oligonucleotide
ucggcuuugaagcagagca

SEQ ID NO: 2595964 - RNA, 19 nt, Artificial Sequence
  Description of Artificial Sequence: Synthetic oligonucleotide
aacauuuaguugaaaggcc

SEQ ID NO: 2595965 - RNA, 19 nt, Artificial Sequence
  Description of Artificial Sequence: Synthetic oligonucleotide
uaacauuuaguugaaaggc

SEQ ID NO: 2595966 - RNA, 19 nt, Artificial Sequence
  Description of Artificial Sequence: Synthetic oligonucleotide
  modified_base (19)..(19): a, c, u, g, unknown or other
uuaguuaaguuucuuuucn

SEQ ID NO: 2595967 - RNA, 19 nt, Artificial Sequence
  Description of Artificial Sequence: Synthetic oligonucleotide
gaggacaucuauuauauac

SEQ ID NO: 2595968 - RNA, 19 nt, Artificial Sequence
  Description of Artificial Sequence: Synthetic oligonucleotide
uauaaaguuauauccaauc

SEQ ID NO: 2595969 - RNA, 19 nt, Artificial Sequence
  Description of Artificial Sequence: Synthetic oligonucleotide
aguuauauccaaucuguuc

SEQ ID NO: 2595970 - RNA, 19 nt, Artificial Sequence
  Description of Artificial Sequence: Synthetic oligonucleotide
aguacacugauuuucagcu

SEQ ID NO: 2595971 - RNA, 19 nt, Artificial Sequence
  Description of Artificial Sequence: Synthetic oligonucleotide
aaggauuccacagccaucg

SEQ ID NO: 2595972 - RNA, 19 nt, Artificial Sequence
  Description of Artificial Sequence: Synthetic oligonucleotide
agaucuuuaguuaaguuuc

SEQ ID NO: 2595973 - RNA, 19 nt, Artificial Sequence
  Description of Artificial Sequence: Synthetic oligonucleotide
acagguacugaauaguguc

SEQ ID NO: 2595974 - RNA, 19 nt, Artificial Sequence
  Description of Artificial Sequence: Synthetic oligonucleotide
ucuguaugaaaugugagca

SEQ ID NO: 2595975 - RNA, 19 nt, Artificial Sequence
  Description of Artificial Sequence: Synthetic oligonucleotide
caaaugaaugauauuauuc

SEQ ID NO: 2595976 - RNA, 19 nt, Artificial Sequence
  Description of Artificial Sequence: Synthetic oligonucleotide
uauagcauccugcacgucc

SEQ ID NO: 2595977 - RNA, 19 nt, Artificial Sequence
  Description of Artificial Sequence: Synthetic oligonucleotide
  modified_base (5)..(5): a, c, u, g, unknown or other
uuucngaaaugccuucugg

SEQ ID NO: 2595978 - RNA, 19 nt, Artificial Sequence
  Description of Artificial Sequence: Synthetic oligonucleotide
ugacaaaugaaugauauua

SEQ ID NO: 2595979 - RNA, 19 nt, Artificial Sequence
  Description of Artificial Sequence: Synthetic oligonucleotide
guguaaucggcuuugaagc

SEQ ID NO: 2595980 - RNA, 19 nt, Artificial Sequence
  Description of Artificial Sequence: Synthetic oligonucleotide
uguccaaugcuccugaagu

SEQ ID NO: 2595981 - RNA, 19 nt, Artificial Sequence
  Description of Artificial Sequence: Synthetic oligonucleotide
auaaaguuauauccaaucu

SEQ ID NO: 2595982 - RNA, 19 nt, Artificial Sequence
  Description of Artificial Sequence: Synthetic oligonucleotide
aguuuuaggagaucuuuag

SEQ ID NO: 2595983 - RNA, 19 nt, Artificial Sequence
  Description of Artificial Sequence: Synthetic oligonucleotide
aguggaugggcauccagcc

SEQ ID NO: 2595984 - RNA, 19 nt, Artificial Sequence
  Description of Artificial Sequence: Synthetic oligonucleotide
guugaaaggccuuuaguag

SEQ ID NO: 2595985 - RNA, 19 nt, Artificial Sequence
  Description of Artificial Sequence: Synthetic oligonucleotide
ugccuucuggauuaaaggg

SEQ ID NO: 2595986 - RNA, 19 nt, Artificial Sequence
  Description of Artificial Sequence: Synthetic oligonucleotide
aaaagaucuaccaggggag

SEQ ID NO: 2595987 - RNA, 19 nt, Artificial Sequence
  Description of Artificial Sequence: Synthetic oligonucleotide
auuauaaaguuauauccaa

SEQ ID NO: 2595988 - RNA, 19 nt, Artificial Sequence
  Description of Artificial Sequence: Synthetic oligonucleotide
ucggccucuagcaagcucg

SEQ ID NO: 2595989 - RNA, 19 nt, Artificial Sequence
  Description of Artificial Sequence: Synthetic oligonucleotide
ugaauaguguccaaugcuc

SEQ ID NO: 2595990 - RNA, 19 nt, Artificial Sequence
  Description of Artificial Sequence: Synthetic oligonucleotide
auauccaaucuguucugcc

SEQ ID NO: 2595991 - RNA, 19 nt, Artificial Sequence
  Description of Artificial Sequence: Synthetic oligonucleotide
guaguaguggaguacacug

SEQ ID NO: 2595992 - RNA, 19 nt, Artificial Sequence
  Description of Artificial Sequence: Synthetic oligonucleotide
cugauuuucagcuguggcc

SEQ ID NO: 2595993 - RNA, 19 nt, Artificial Sequence
  Description of Artificial Sequence: Synthetic oligonucleotide
uuaguugaaaggccuuuag

SEQ ID NO: 2595994 - RNA, 19 nt, Artificial Sequence
  Description of Artificial Sequence: Synthetic oligonucleotide
  modified_base (4)..(4): a, c, u, g, unknown or other
uucngaaaugccuucugga

SEQ ID NO: 2595995 - RNA, 19 nt, Artificial Sequence
  Description of Artificial Sequence: Synthetic oligonucleotide
auugcuauagcauccugca

SEQ ID NO: 2595996 - RNA, 19 nt, Artificial Sequence
  Description of Artificial Sequence: Synthetic oligonucleotide
aguugaaaggccuuuagua

SEQ ID NO: 2595997 - RNA, 19 nt, Artificial Sequence
  Description of Artificial Sequence: Synthetic oligonucleotide
gauguugucguagaaagca

SEQ ID NO: 2595998 - RNA, 19 nt, Artificial Sequence
  Description of Artificial Sequence: Synthetic oligonucleotide
aacuucagcgauuguagcu

SEQ ID NO: 2595999 - RNA, 19 nt, Artificial Sequence
  Description of Artificial Sequence: Synthetic oligonucleotide
  modified_base (15)..(15): a, c, u, g, unknown or other
uuaaguuucuuuucngaaa

SEQ ID NO: 2596000 - RNA, 19 nt, Artificial Sequence
  Description of Artificial Sequence: Synthetic oligonucleotide
cucuguaugaaaugugagc

SEQ ID NO: 2596001 - RNA, 19 nt, Artificial Sequence
  Description of Artificial Sequence: Synthetic oligonucleotide
aucuauuauauacuugagu

SEQ ID NO: 2596002 - RNA, 19 nt, Artificial Sequence
  Description of Artificial Sequence: Synthetic oligonucleotide
aguacaaugaugaugcaga

SEQ ID NO: 2596003 - RNA, 19 nt, Artificial Sequence
  Description of Artificial Sequence: Synthetic oligonucleotide
ugaaguggcggcaaguagu

SEQ ID NO: 2596004 - RNA, 19 nt, Artificial Sequence
  Description of Artificial Sequence: Synthetic oligonucleotide
aaguggaugggcauccagc

SEQ ID NO: 2596005 - RNA, 19 nt, Artificial Sequence
  Description of Artificial Sequence: Synthetic oligonucleotide
uggauuaaaggguuguagu

SEQ ID NO: 2596006 - RNA, 19 nt, Artificial Sequence
  Description of Artificial Sequence: Synthetic oligonucleotide
gaaaugugagcacugacaa

SEQ ID NO: 2596007 - RNA, 19 nt, Artificial Sequence
  Description of Artificial Sequence: Synthetic oligonucleotide
aauaucuguuuucuccagu

SEQ ID NO: 2596008 - RNA, 19 nt, Artificial Sequence
  Description of Artificial Sequence: Synthetic oligonucleotide
uauauacuugaguaccucu

SEQ ID NO: 2596009 - RNA, 19 nt, Artificial Sequence
  Description of Artificial Sequence: Synthetic oligonucleotide
agagcagacagacagucga

SEQ ID NO: 2596010 - RNA, 19 nt, Artificial Sequence
  Description of Artificial Sequence: Synthetic oligonucleotide
  modified_base (16)..(16): a, c, u, g, unknown or other
guuaaguuucuuuucngaa

SEQ ID NO: 2596011 - RNA, 19 nt, Artificial Sequence
  Description of Artificial Sequence: Synthetic oligonucleotide
ugucguagaaagcagcgaa

SEQ ID NO: 2596012 - RNA, 19 nt, Artificial Sequence
  Description of Artificial Sequence: Synthetic oligonucleotide
uuucacuuggacacugagc

SEQ ID NO: 2596013 - RNA, 19 nt, Artificial Sequence
  Description of Artificial Sequence: Synthetic oligonucleotide
uugaaaggccuuuaguagu

SEQ ID NO: 2596014 - RNA, 19 nt, Artificial Sequence
  Description of Artificial Sequence: Synthetic oligonucleotide
aagcucggauccuuccugc

SEQ ID NO: 2596015 - RNA, 19 nt, Artificial Sequence
  Description of Artificial Sequence: Synthetic oligonucleotide
ucggaaaguguguaaucgg

SEQ ID NO: 2596016 - RNA, 19 nt, Artificial Sequence
  Description of Artificial Sequence: Synthetic oligonucleotide
cauugcuauagcauccugc

SEQ ID NO: 2596017 - RNA, 19 nt, Artificial Sequence
  Description of Artificial Sequence: Synthetic oligonucleotide
  modified_base (6)..(6): a, c, u, g, unknown or other
uuuucngaaaugccuucug

SEQ ID NO: 2596018 - RNA, 19 nt, Artificial Sequence
  Description of Artificial Sequence: Synthetic oligonucleotide
uuaggagaucuuuaguuaa

SEQ ID NO: 2596019 - RNA, 19 nt, Artificial Sequence
  Description of Artificial Sequence: Synthetic oligonucleotide
gaguacacugauuuucagc

SEQ ID NO: 2596020 - RNA, 19 nt, Artificial Sequence
  Description of Artificial Sequence: Synthetic oligonucleotide
ugauuuucagcuguggccu

SEQ ID NO: 2596021 - RNA, 19 nt, Artificial Sequence
  Description of Artificial Sequence: Synthetic oligonucleotide
aaggguuguaguuugccaa

SEQ ID NO: 2596022 - RNA, 19 nt, Artificial Sequence
  Description of Artificial Sequence: Synthetic oligonucleotide
ugagcacugacaaaugaau

SEQ ID NO: 2596023 - RNA, 19 nt, Artificial Sequence
  Description of Artificial Sequence: Synthetic oligonucleotide
ugaaugauauuauuccuuu

SEQ ID NO: 2596024 - RNA, 19 nt, Artificial Sequence
  Description of Artificial Sequence: Synthetic oligonucleotide
uuauaaaguuauauccaau

SEQ ID NO: 2596025 - RNA, 19 nt, Artificial Sequence
  Description of Artificial Sequence: Synthetic oligonucleotide
uaguggaguacacugauuu

SEQ ID NO: 2596026 - RNA, 19 nt, Artificial Sequence
  Description of Artificial Sequence: Synthetic oligonucleotide
cuuuaguaguuuuaggaga

SEQ ID NO: 2596027 - RNA, 19 nt, Artificial Sequence
  Description of Artificial Sequence: Synthetic oligonucleotide
uccaaugcuccugaagugg

SEQ ID NO: 2596028 - RNA, 19 nt, Artificial Sequence
  Description of Artificial Sequence: Synthetic oligonucleotide
acuugaguaccucuguaug

SEQ ID NO: 2596029 - RNA, 19 nt, Artificial Sequence
  Description of Artificial Sequence: Synthetic oligonucleotide
uuguaguuugccaaggauu

SEQ ID NO: 2596030 - RNA, 19 nt, Artificial Sequence
  Description of Artificial Sequence: Synthetic oligonucleotide
uacuucuguuguuucagag

SEQ ID NO: 2596031 - RNA, 19 nt, Artificial Sequence
  Description of Artificial Sequence: Synthetic oligonucleotide
uuguuucagaguuuguccu

SEQ ID NO: 2596032 - RNA, 19 nt, Artificial Sequence
  Description of Artificial Sequence: Synthetic oligonucleotide
agcauguuuauuauaaagu

SEQ ID NO: 2596033 - RNA, 19 nt, Artificial Sequence
  Description of Artificial Sequence: Synthetic oligonucleotide
uauccaaucuguucugcca

SEQ ID NO: 2596034 - RNA, 19 nt, Artificial Sequence
  Description of Artificial Sequence: Synthetic oligonucleotide
ucuaccaggggaggaaugg

SEQ ID NO: 2596035 - RNA, 19 nt, Artificial Sequence
  Description of Artificial Sequence: Synthetic oligonucleotide
  modified_base (3)..(3): a, c, u, g, unknown or other
ucngaaaugccuucuggau

SEQ ID NO: 2596036 - RNA, 19 nt, Artificial Sequence
  Description of Artificial Sequence: Synthetic oligonucleotide
  modified_base (9)..(9): a, c, u, g, unknown or other
uucuuuucngaaaugccuu

SEQ ID NO: 2596037 - RNA, 19 nt, Artificial Sequence
  Description of Artificial Sequence: Synthetic oligonucleotide
cucggaaaguguguaaucg

SEQ ID NO: 2596038 - RNA, 19 nt, Artificial Sequence
  Description of Artificial Sequence: Synthetic oligonucleotide
aaagaucuaccaggggagg

SEQ ID NO: 2596039 - RNA, 19 nt, Artificial Sequence
  Description of Artificial Sequence: Synthetic oligonucleotide
cuuccauugcuauagcauc

SEQ ID NO: 2596040 - RNA, 19 nt, Artificial Sequence
  Description of Artificial Sequence: Synthetic oligonucleotide
uggaguacacugauuuuca

SEQ ID NO: 2596041 - RNA, 19 nt, Artificial Sequence
  Description of Artificial Sequence: Synthetic oligonucleotide
gaaagcagcgaaguggaug

SEQ ID NO: 2596042 - RNA, 19 nt, Artificial Sequence
  Description of Artificial Sequence: Synthetic oligonucleotide
uaggagaucuuuaguuaag

SEQ ID NO: 2596043 - RNA, 19 nt, Artificial Sequence
  Description of Artificial Sequence: Synthetic oligonucleotide
ugccaaggauuccacagcc

SEQ ID NO: 2596044 - RNA, 19 nt, Artificial Sequence
  Description of Artificial Sequence: Synthetic oligonucleotide
gaguacaaugaugaugcag

SEQ ID NO: 2596045 - RNA, 19 nt, Artificial Sequence
  Description of Artificial Sequence: Synthetic oligonucleotide
uaguaguuuuaggagaucu

SEQ ID NO: 2596046 - RNA, 19 nt, Artificial Sequence
  Description of Artificial Sequence: Synthetic oligonucleotide
caucgcaccuuucacuugg

SEQ ID NO: 2596047 - RNA, 19 nt, Artificial Sequence
  Description of Artificial Sequence: Synthetic oligonucleotide
uaguugaaaggccuuuagu

SEQ ID NO: 2596048 - RNA, 19 nt, Artificial Sequence
  Description of Artificial Sequence: Synthetic oligonucleotide
gauuccacagccaucgcac

SEQ ID NO: 2596049 - RNA, 19 nt, Artificial Sequence
  Description of Artificial Sequence: Synthetic oligonucleotide
acugacaaaugaaugauau

SEQ ID NO: 2596050 - RNA, 19 nt, Artificial Sequence
  Description of Artificial Sequence: Synthetic oligonucleotide
uguaaucggcuuugaagca

SEQ ID NO: 2596051 - RNA, 19 nt, Artificial Sequence
  Description of Artificial Sequence: Synthetic oligonucleotide
caucuauuauauacuugag

SEQ ID NO: 2596052 - RNA, 19 nt, Artificial Sequence
  Description of Artificial Sequence: Synthetic oligonucleotide
gacagucgauuccagggag

SEQ ID NO: 2596053 - RNA, 19 nt, Artificial Sequence
  Description of Artificial Sequence: Synthetic oligonucleotide
acagacagucgauuccagg

SEQ ID NO: 2596054 - RNA, 19 nt, Artificial Sequence
  Description of Artificial Sequence: Synthetic oligonucleotide
aaaguguguaaucggcuuu

SEQ ID NO: 2596055 - RNA, 19 nt, Artificial Sequence
  Description of Artificial Sequence: Synthetic oligonucleotide
uguagcugaggacaucuau

SEQ ID NO: 2596056 - RNA, 19 nt, Artificial Sequence
  Description of Artificial Sequence: Synthetic oligonucleotide
uccaguuggcaccaagaga

SEQ ID NO: 2596057 - RNA, 19 nt, Artificial Sequence
  Description of Artificial Sequence: Synthetic oligonucleotide
auugucacggccaacuuca

SEQ ID NO: 2596058 - RNA, 19 nt, Artificial Sequence
  Description of Artificial Sequence: Synthetic oligonucleotide
uauugucacggccaacuuc

SEQ ID NO: 2596059 - RNA, 19 nt, Artificial Sequence
  Description of Artificial Sequence: Synthetic oligonucleotide
uguuucagaguuuguccug

SEQ ID NO: 2596060 - RNA, 19 nt, Artificial Sequence
  Description of Artificial Sequence: Synthetic oligonucleotide
cacuuggacacugagcugc

SEQ ID NO: 2596061 - RNA, 19 nt, Artificial Sequence
  Description of Artificial Sequence: Synthetic oligonucleotide
agugcuacggcuccuugcu

SEQ ID NO: 2596062 - RNA, 19 nt, Artificial Sequence
  Description of Artificial Sequence: Synthetic oligonucleotide
uuaaaggguuguaguuugc

SEQ ID NO: 2596063 - RNA, 19 nt, Artificial Sequence
  Description of Artificial Sequence: Synthetic oligonucleotide
aguggcggcaaguaguagu

SEQ ID NO: 2596064 - RNA, 19 nt, Artificial Sequence
  Description of Artificial Sequence: Synthetic oligonucleotide
auuguagcugaggacaucu

SEQ ID NO: 2596065 - RNA, 19 nt, Artificial Sequence
  Description of Artificial Sequence: Synthetic oligonucleotide
uaaucggcuuugaagcaga

SEQ ID NO: 2596066 - RNA, 19 nt, Artificial Sequence
  Description of Artificial Sequence: Synthetic oligonucleotide
aguaguggaguacacugau

SEQ ID NO: 2596067 - RNA, 19 nt, Artificial Sequence
  Description of Artificial Sequence: Synthetic oligonucleotide
ucugccauauacuucuguu

SEQ ID NO: 2596068 - RNA, 19 nt, Artificial Sequence
  Description of Artificial Sequence: Synthetic oligonucleotide
ugcuacggcuccuugcucc

SEQ ID NO: 2596069 - RNA, 19 nt, Artificial Sequence
  Description of Artificial Sequence: Synthetic oligonucleotide
cuggauuaaaggguuguag

SEQ ID NO: 2596070 - RNA, 19 nt, Artificial Sequence
  Description of Artificial Sequence: Synthetic oligonucleotide
gcaccuuucacuuggacac

SEQ ID NO: 2596071 - RNA, 19 nt, Artificial Sequence
  Description of Artificial Sequence: Synthetic oligonucleotide
uaguuuuaggagaucuuua

SEQ ID NO: 2596072 - RNA, 19 nt, Artificial Sequence
  Description of Artificial Sequence: Synthetic oligonucleotide
gacaucuauuauauacuug

SEQ ID NO: 2596073 - RNA, 19 nt, Artificial Sequence
  Description of Artificial Sequence: Synthetic oligonucleotide
uuggcaccaagagaaaaca

SEQ ID NO: 2596074 - RNA, 19 nt, Artificial Sequence
  Description of Artificial Sequence: Synthetic oligonucleotide
gagaucuuuaguuaaguuu

SEQ ID NO: 2596075 - RNA, 19 nt, Artificial Sequence
  Description of Artificial Sequence: Synthetic oligonucleotide
auaucuguuuucuccaguu

SEQ ID NO: 2596076 - RNA, 19 nt, Artificial Sequence
  Description of Artificial Sequence: Synthetic oligonucleotide
acuucagcgauuguagcug

SEQ ID NO: 2596077 - RNA, 19 nt, Artificial Sequence
  Description of Artificial Sequence: Synthetic oligonucleotide
cauauacuucuguuguuuc

SEQ ID NO: 2596078 - RNA, 19 nt, Artificial Sequence
  Description of Artificial Sequence: Synthetic oligonucleotide
acauuuaguugaaaggccu

SEQ ID NO: 2596079 - RNA, 19 nt, Artificial Sequence
  Description of Artificial Sequence: Synthetic oligonucleotide
auauacuugaguaccucug

SEQ ID NO: 2596080 - RNA, 19 nt, Artificial Sequence
  Description of Artificial Sequence: Synthetic oligonucleotide
cagguacugaauagugucc

SEQ ID NO: 2596081 - RNA, 19 nt, Artificial Sequence
  Description of Artificial Sequence: Synthetic oligonucleotide
uauauccaaucuguucugc

SEQ ID NO: 2596082 - RNA, 19 nt, Artificial Sequence
  Description of Artificial Sequence: Synthetic oligonucleotide
uaccaggggaggaauggcc

SEQ ID NO: 2596083 - RNA, 19 nt, Artificial Sequence
  Description of Artificial Sequence: Synthetic oligonucleotide
  modified_base (8)..(8): a, c, u, g, unknown or other
ucuuuucngaaaugccuuc

SEQ ID NO: 2596084 - RNA, 19 nt, Artificial Sequence
  Description of Artificial Sequence: Synthetic oligonucleotide
aauggccccuuccauugcu

SEQ ID NO: 2596085 - RNA, 19 nt, Artificial Sequence
  Description of Artificial Sequence: Synthetic oligonucleotide
aaguaguaguggaguacac

SEQ ID NO: 2596086 - RNA, 19 nt, Artificial Sequence
  Description of Artificial Sequence: Synthetic oligonucleotide
ugcacgucccuauugucac

SEQ ID NO: 2596087 - RNA, 19 nt, Artificial Sequence
  Description of Artificial Sequence: Synthetic oligonucleotide
uacuugaguaccucuguau

SEQ ID NO: 2596088 - RNA, 19 nt, Artificial Sequence
  Description of Artificial Sequence: Synthetic oligonucleotide
cugccauauacuucuguug

SEQ ID NO: 2596089 - RNA, 19 nt, Artificial Sequence
  Description of Artificial Sequence: Synthetic oligonucleotide
ugaaaggccuuuaguaguu

SEQ ID NO: 2596090 - RNA, 19 nt, Artificial Sequence
  Description of Artificial Sequence: Synthetic oligonucleotide
aaaugugagcacugacaaa

SEQ ID NO: 2596091 - RNA, 19 nt, Artificial Sequence
  Description of Artificial Sequence: Synthetic oligonucleotide
cucuagcaagcucggaucc

SEQ ID NO: 2596092 - RNA, 19 nt, Artificial Sequence
  Description of Artificial Sequence: Synthetic oligonucleotide
uagcugaggacaucuauua

SEQ ID NO: 2596093 - RNA, 19 nt, Artificial Sequence
  Description of Artificial Sequence: Synthetic oligonucleotide
uucagaguuuguccugcca

SEQ ID NO: 2596094 - RNA, 19 nt, Artificial Sequence
  Description of Artificial Sequence: Synthetic oligonucleotide
agaguuuguccugccaagg

SEQ ID NO: 2596095 - RNA, 19 nt, Artificial Sequence
  Description of Artificial Sequence: Synthetic oligonucleotide
aaaggccuuuaguaguuuu

SEQ ID NO: 2596096 - RNA, 19 nt, Artificial Sequence
  Description of Artificial Sequence: Synthetic oligonucleotide
uuccugcagaguacaauga

SEQ ID NO: 2596097 - RNA, 19 nt, Artificial Sequence
  Description of Artificial Sequence: Synthetic oligonucleotide
uugaguaccucuguaugaa

SEQ ID NO: 2596098 - RNA, 19 nt, Artificial Sequence
  Description of Artificial Sequence: Synthetic oligonucleotide
aggacaucuauuauauacu

SEQ ID NO: 2596099 - RNA, 19 nt, Artificial Sequence
  Description of Artificial Sequence: Synthetic oligonucleotide
ugagcugcuucccuuuaaa

SEQ ID NO: 2596100 - RNA, 19 nt, Artificial Sequence
  Description of Artificial Sequence: Synthetic oligonucleotide
cuugaguaccucuguauga

SEQ ID NO: 2596101 - RNA, 19 nt, Artificial Sequence
  Description of Artificial Sequence: Synthetic oligonucleotide
guaaucggcuuugaagcag

SEQ ID NO: 2596102 - RNA, 19 nt, Artificial Sequence
  Description of Artificial Sequence: Synthetic oligonucleotide
uucuggauuaaaggguugu

SEQ ID NO: 2596103 - RNA, 19 nt, Artificial Sequence
  Description of Artificial Sequence: Synthetic oligonucleotide
cuccaguuggcaccaagag

SEQ ID NO: 2596104 - RNA, 19 nt, Artificial Sequence
  Description of Artificial Sequence: Synthetic oligonucleotide
uccuugcuccuuaacauuu

SEQ ID NO: 2596105 - RNA, 19 nt, Artificial Sequence
  Description of Artificial Sequence: Synthetic oligonucleotide
uaguguccaaugcuccuga

SEQ ID NO: 2596106 - RNA, 19 nt, Artificial Sequence
  Description of Artificial Sequence: Synthetic oligonucleotide
agacagucgauuccaggga

SEQ ID NO: 2596107 - RNA, 19 nt, Artificial Sequence
  Description of Artificial Sequence: Synthetic oligonucleotide
uccugcacgucccuauugu

SEQ ID NO: 2596108 - RNA, 19 nt, Artificial Sequence
  Description of Artificial Sequence: Synthetic oligonucleotide
cagaguuuguccugccaag

SEQ ID NO: 2596109 - RNA, 19 nt, Artificial Sequence
  Description of Artificial Sequence: Synthetic oligonucleotide
guuucagaguuuguccugc

SEQ ID NO: 2596110 - RNA, 19 nt, Artificial Sequence
  Description of Artificial Sequence: Synthetic oligonucleotide
aguaguaguggaguacacu

SEQ ID NO: 2596111 - RNA, 19 nt, Artificial Sequence
  Description of Artificial Sequence: Synthetic oligonucleotide
cuuuaguuaaguuucuuuu

SEQ ID NO: 2596112 - RNA, 19 nt, Artificial Sequence
  Description of Artificial Sequence: Synthetic oligonucleotide
uccuuaacauuuaguugaa

SEQ ID NO: 2596113 - RNA, 19 nt, Artificial Sequence
  Description of Artificial Sequence: Synthetic oligonucleotide
aggccuuuaguaguuuuag

SEQ ID NO: 2596114 - RNA, 19 nt, Artificial Sequence
  Description of Artificial Sequence: Synthetic oligonucleotide
uccugcagaguacaaugau

SEQ ID NO: 2596115 - RNA, 19 nt, Artificial Sequence
  Description of Artificial Sequence: Synthetic oligonucleotide
guuggcaccaagagaaaac

SEQ ID NO: 2596116 - RNA, 19 nt, Artificial Sequence
  Description of Artificial Sequence: Synthetic oligonucleotide
guggaguacacugauuuuc

SEQ ID NO: 2596117 - RNA, 19 nt, Artificial Sequence
  Description of Artificial Sequence: Synthetic oligonucleotide
uuuaguugaaaggccuuua

SEQ ID NO: 2596118 - RNA, 19 nt, Artificial Sequence
  Description of Artificial Sequence: Synthetic oligonucleotide
ggaauggccccuuccauug

SEQ ID NO: 2596119 - RNA, 19 nt, Artificial Sequence
  Description of Artificial Sequence: Synthetic oligonucleotide
ucucggaaaguguguaauc

SEQ ID NO: 2596120 - RNA, 19 nt, Artificial Sequence
  Description of Artificial Sequence: Synthetic oligonucleotide
auuuucagcuguggccucg

SEQ ID NO: 2596121 - RNA, 19 nt, Artificial Sequence
  Description of Artificial Sequence: Synthetic oligonucleotide
uuucagaguuuguccugcc

SEQ ID NO: 2596122 - RNA, 19 nt, Artificial Sequence
  Description of Artificial Sequence: Synthetic oligonucleotide
guguccaaugcuccugaag

SEQ ID NO: 2596123 - RNA, 19 nt, Artificial Sequence
  Description of Artificial Sequence: Synthetic oligonucleotide
auccaaucuguucugccau

SEQ ID NO: 2596124 - RNA, 19 nt, Artificial Sequence
  Description of Artificial Sequence: Synthetic oligonucleotide
uucucggaaaguguguaau

SEQ ID NO: 2596125 - RNA, 19 nt, Artificial Sequence
  Description of Artificial Sequence: Synthetic oligonucleotide
uuuguccugccaaggccca

SEQ ID NO: 2596126 - RNA, 19 nt, Artificial Sequence
  Description of Artificial Sequence: Synthetic oligonucleotide
aucggcuuugaagcagagc

SEQ ID NO: 2596127 - RNA, 19 nt, Artificial Sequence
  Description of Artificial Sequence: Synthetic oligonucleotide
cagagcagacagacagucg

SEQ ID NO: 2596128 - RNA, 19 nt, Artificial Sequence
  Description of Artificial Sequence: Synthetic oligonucleotide
agacagacagucgauucca

SEQ ID NO: 2596129 - RNA, 19 nt, Artificial Sequence
  Description of Artificial Sequence: Synthetic oligonucleotide
accucuguaugaaauguga

SEQ ID NO: 2596130 - RNA, 19 nt, Artificial Sequence
  Description of Artificial Sequence: Synthetic oligonucleotide
ucggauccuuccugcagag

SEQ ID NO: 2596131 - RNA, 19 nt, Artificial Sequence
  Description of Artificial Sequence: Synthetic oligonucleotide
uuuucagcuguggccucgg

SEQ ID NO: 2596132 - RNA, 19 nt, Artificial Sequence
  Description of Artificial Sequence: Synthetic oligonucleotide
agguacugaauagugucca

SEQ ID NO: 2596133 - RNA, 19 nt, Artificial Sequence
  Description of Artificial Sequence: Synthetic oligonucleotide
auacuucuguuguuucaga

SEQ ID NO: 2596134 - RNA, 19 nt, Artificial Sequence
  Description of Artificial Sequence: Synthetic oligonucleotide
aguuugccaaggauuccac

SEQ ID NO: 2596135 - RNA, 19 nt, Artificial Sequence
  Description of Artificial Sequence: Synthetic oligonucleotide
caagcucggauccuuccug

SEQ ID NO: 2596136 - RNA, 19 nt, Artificial Sequence
  Description of Artificial Sequence: Synthetic oligonucleotide
ugcagauguugucguagaa

SEQ ID NO: 2596137 - RNA, 19 nt, Artificial Sequence
  Description of Artificial Sequence: Synthetic oligonucleotide
uugcuauagcauccugcac

SEQ ID NO: 2596138 - RNA, 19 nt, Artificial Sequence
  Description of Artificial Sequence: Synthetic oligonucleotide
gaaugauauuauuccuuua

SEQ ID NO: 2596139 - RNA, 19 nt, Artificial Sequence
  Description of Artificial Sequence: Synthetic oligonucleotide
guccaaugcuccugaagug

SEQ ID NO: 2596140 - RNA, 19 nt, Artificial Sequence
  Description of Artificial Sequence: Synthetic oligonucleotide
cacgucccuauugucacgg

SEQ ID NO: 2596141 - RNA, 19 nt, Artificial Sequence
  Description of Artificial Sequence: Synthetic oligonucleotide
cuguucugccauauacuuc

SEQ ID NO: 2596142 - RNA, 19 nt, Artificial Sequence
  Description of Artificial Sequence: Synthetic oligonucleotide
gucguagaaagcagcgaag

SEQ ID NO: 2596143 - RNA, 19 nt, Artificial Sequence
  Description of Artificial Sequence: Synthetic oligonucleotide
aggauuccacagccaucgc

SEQ ID NO: 2596144 - RNA, 19 nt, Artificial Sequence
  Description of Artificial Sequence: Synthetic oligonucleotide
auacuugaguaccucugua

SEQ ID NO: 2596145 - RNA, 19 nt, Artificial Sequence
  Description of Artificial Sequence: Synthetic oligonucleotide
ucuucucggaaagugugua

SEQ ID NO: 2596146 - RNA, 19 nt, Artificial Sequence
  Description of Artificial Sequence: Synthetic oligonucleotide
gaaaguguguaaucggcuu

SEQ ID NO: 2596147 - RNA, 19 nt, Artificial Sequence
  Description of Artificial Sequence: Synthetic oligonucleotide
gauuaaaggguuguaguuu

SEQ ID NO: 2596148 - RNA, 19 nt, Artificial Sequence
  Description of Artificial Sequence: Synthetic oligonucleotide
uccauugcuauagcauccu

SEQ ID NO: 2596149 - RNA, 19 nt, Artificial Sequence
  Description of Artificial Sequence: Synthetic oligonucleotide
aucuguucugccauauacu

SEQ ID NO: 2596150 - RNA, 19 nt, Artificial Sequence
  Description of Artificial Sequence: Synthetic oligonucleotide
ugaguaccucuguaugaaa

SEQ ID NO: 2596151 - RNA, 19 nt, Artificial Sequence
  Description of Artificial Sequence: Synthetic oligonucleotide
cugaauaguguccaaugcu

SEQ ID NO: 2596152 - RNA, 19 nt, Artificial Sequence
  Description of Artificial Sequence: Synthetic oligonucleotide
cacugauuuucagcugugg

SEQ ID NO: 2596153 - RNA, 19 nt, Artificial Sequence
  Description of Artificial Sequence: Synthetic oligonucleotide
ggccuuuaguaguuuuagg

SEQ ID NO: 2596154 - RNA, 19 nt, Artificial Sequence
  Description of Artificial Sequence: Synthetic oligonucleotide
gacaaaugaaugauauuau

SEQ ID NO: 2596155 - RNA, 19 nt, Artificial Sequence
  Description of Artificial Sequence: Synthetic oligonucleotide
guuuuaggagaucuuuagu

SEQ ID NO: 2596156 - RNA, 19 nt, Artificial Sequence
  Description of Artificial Sequence: Synthetic oligonucleotide
caaggauuccacagccauc

SEQ ID NO: 2596157 - RNA, 19 nt, Artificial Sequence
  Description of Artificial Sequence: Synthetic oligonucleotide
aaguuauauccaaucuguu

SEQ ID NO: 2596158 - RNA, 19 nt, Artificial Sequence
  Description of Artificial Sequence: Synthetic oligonucleotide
ugcagaguacaaugaugau

SEQ ID NO: 2596159 - RNA, 19 nt, Artificial Sequence
  Description of Artificial Sequence: Synthetic oligonucleotide
aggaauggccccuuccauu

SEQ ID NO: 2596160 - RNA, 19 nt, Artificial Sequence
  Description of Artificial Sequence: Synthetic oligonucleotide
gcgauuguagcugaggaca

SEQ ID NO: 2596161 - RNA, 19 nt, Artificial Sequence
  Description of Artificial Sequence: Synthetic oligonucleotide
cuuugaagcagagcagaca

SEQ ID NO: 2596162 - RNA, 19 nt, Artificial Sequence
  Description of Artificial Sequence: Synthetic oligonucleotide
ucacggccaacuucagcga

SEQ ID NO: 2596163 - RNA, 19 nt, Artificial Sequence
  Description of Artificial Sequence: Synthetic oligonucleotide
uuaguaguuuuaggagauc

SEQ ID NO: 2596164 - RNA, 19 nt, Artificial Sequence
  Description of Artificial Sequence: Synthetic oligonucleotide
ggaguacacugauuuucag

SEQ ID NO: 2596165 - RNA, 19 nt, Artificial Sequence
  Description of Artificial Sequence: Synthetic oligonucleotide
ccucuguaugaaaugugag

SEQ ID NO: 2596166 - RNA, 19 nt, Artificial Sequence
  Description of Artificial Sequence: Synthetic oligonucleotide
ucccuauugucacggccaa

SEQ ID NO: 2596167 - RNA, 19 nt, Artificial Sequence
  Description of Artificial Sequence: Synthetic oligonucleotide
auccugcacgucccuauug

SEQ ID NO: 2596168 - RNA, 19 nt, Artificial Sequence
  Description of Artificial Sequence: Synthetic oligonucleotide
aaucggcuuugaagcagag

SEQ ID NO: 2596169 - RNA, 19 nt, Artificial Sequence
  Description of Artificial Sequence: Synthetic oligonucleotide
aaggccuuuaguaguuuua

SEQ ID NO: 2596170 - RNA, 19 nt, Artificial Sequence
  Description of Artificial Sequence: Synthetic oligonucleotide
ggauccuuccugcagagua

SEQ ID NO: 2596171 - RNA, 19 nt, Artificial Sequence
  Description of Artificial Sequence: Synthetic oligonucleotide
guaguuugccaaggauucc

SEQ ID NO: 2596172 - RNA, 19 nt, Artificial Sequence
  Description of Artificial Sequence: Synthetic oligonucleotide
cagcgauuguagcugagga

SEQ ID NO: 2596173 - RNA, 19 nt, Artificial Sequence
  Description of Artificial Sequence: Synthetic oligonucleotide
guggcggcaaguaguagug

SEQ ID NO: 2596174 - RNA, 19 nt, Artificial Sequence
  Description of Artificial Sequence: Synthetic oligonucleotide
aguuggcaccaagagaaaa

SEQ ID NO: 2596175 - RNA, 19 nt, Artificial Sequence
  Description of Artificial Sequence: Synthetic oligonucleotide
acgucccuauugucacggc

SEQ ID NO: 2596176 - RNA, 19 nt, Artificial Sequence
  Description of Artificial Sequence: Synthetic oligonucleotide
gaauggccccuuccauugc

SEQ ID NO: 2596177 - RNA, 19 nt, Artificial Sequence
  Description of Artificial Sequence: Synthetic oligonucleotide
gacagacagucgauuccag

SEQ ID NO: 2596178 - RNA, 19 nt, Artificial Sequence
  Description of Artificial Sequence: Synthetic oligonucleotide
ucuagcaagcucggauccu

SEQ ID NO: 2596179 - RNA, 19 nt, Artificial Sequence
  Description of Artificial Sequence: Synthetic oligonucleotide
agaguacaaugaugaugca

SEQ ID NO: 2596180 - RNA, 19 nt, Artificial Sequence
  Description of Artificial Sequence: Synthetic oligonucleotide
gcugaggacaucuauuaua

SEQ ID NO: 2596181 - RNA, 19 nt, Artificial Sequence
  Description of Artificial Sequence: Synthetic oligonucleotide
guuugccaaggauuccaca

SEQ ID NO: 2596182 - RNA, 19 nt, Artificial Sequence
  Description of Artificial Sequence: Synthetic oligonucleotide
uugucacggccaacuucag

SEQ ID NO: 2596183 - RNA, 19 nt, Artificial Sequence
  Description of Artificial Sequence: Synthetic oligonucleotide
ccagguguagagguguugg

SEQ ID NO: 2596184 - RNA, 19 nt, Artificial Sequence
  Description of Artificial Sequence: Synthetic oligonucleotide
gcagacagacagucgauuc

SEQ ID NO: 2596185 - RNA, 19 nt, Artificial Sequence
  Description of Artificial Sequence: Synthetic oligonucleotide
ugaugcagauguugucgua

SEQ ID NO: 2596186 - RNA, 19 nt, Artificial Sequence
  Description of Artificial Sequence: Synthetic oligonucleotide
cuaccaggggaggaauggc

SEQ ID NO: 2596187 - RNA, 19 nt, Artificial Sequence
  Description of Artificial Sequence: Synthetic oligonucleotide
ugaggacaucuauuauaua

SEQ ID NO: 2596188 - RNA, 19 nt, Artificial Sequence
  Description of Artificial Sequence: Synthetic oligonucleotide
gugagcacugacaaaugaa

SEQ ID NO: 2596189 - RNA, 19 nt, Artificial Sequence
  Description of Artificial Sequence: Synthetic oligonucleotide
guaguuuuaggagaucuuu

SEQ ID NO: 2596190 - RNA, 19 nt, Artificial Sequence
  Description of Artificial Sequence: Synthetic oligonucleotide
uccaaucuguucugccaua

SEQ ID NO: 2596191 - RNA, 19 nt, Artificial Sequence
  Description of Artificial Sequence: Synthetic oligonucleotide
gccccuuccauugcuauag

SEQ ID NO: 2596192 - RNA, 19 nt, Artificial Sequence
  Description of Artificial Sequence: Synthetic oligonucleotide
ucgcaccuuucacuuggac

SEQ ID NO: 2596193 - RNA, 19 nt, Artificial Sequence
  Description of Artificial Sequence: Synthetic oligonucleotide
ggauuccacagccaucgca

SEQ ID NO: 2596194 - RNA, 19 nt, Artificial Sequence
  Description of Artificial Sequence: Synthetic oligonucleotide
uggcggcaaguaguagugg

SEQ ID NO: 2596195 - RNA, 19 nt, Artificial Sequence
  Description of Artificial Sequence: Synthetic oligonucleotide
uuguagcugaggacaucua

SEQ ID NO: 2596196 - RNA, 19 nt, Artificial Sequence
  Description of Artificial Sequence: Synthetic oligonucleotide
uagcaagcucggauccuuc

SEQ ID NO: 2596197 - RNA, 19 nt, Artificial Sequence
  Description of Artificial Sequence: Synthetic oligonucleotide
uacggcuccuugcuccuua

SEQ ID NO: 2596198 - RNA, 19 nt, Artificial Sequence
  Description of Artificial Sequence: Synthetic oligonucleotide
gaaguggcggcaaguagua

SEQ ID NO: 2596199 - RNA, 19 nt, Artificial Sequence
  Description of Artificial Sequence: Synthetic oligonucleotide
gcaaguaguaguggaguac

SEQ ID NO: 2596200 - RNA, 19 nt, Artificial Sequence
  Description of Artificial Sequence: Synthetic oligonucleotide
  modified_base (7)..(7): a, c, u, g, unknown or other
cuuuucngaaaugccuucu

SEQ ID NO: 2596201 - RNA, 19 nt, Artificial Sequence
  Description of Artificial Sequence: Synthetic oligonucleotide
ccucuagcaagcucggauc

SEQ ID NO: 2596202 - RNA, 19 nt, Artificial Sequence
  Description of Artificial Sequence: Synthetic oligonucleotide
augugagcacugacaaaug

SEQ ID NO: 2596203 - RNA, 19 nt, Artificial Sequence
  Description of Artificial Sequence: Synthetic oligonucleotide
ggcggcaaguaguagugga

SEQ ID NO: 2596204 - RNA, 19 nt, Artificial Sequence
  Description of Artificial Sequence: Synthetic oligonucleotide
agcucggauccuuccugca

SEQ ID NO: 2596205 - RNA, 19 nt, Artificial Sequence
  Description of Artificial Sequence: Synthetic oligonucleotide
aguguguaaucggcuuuga

SEQ ID NO: 2596206 - RNA, 19 nt, Artificial Sequence
  Description of Artificial Sequence: Synthetic oligonucleotide
uguccugccaaggcccaaa

SEQ ID NO: 2596207 - RNA, 19 nt, Artificial Sequence
  Description of Artificial Sequence: Synthetic oligonucleotide
cuucucggaaaguguguaa

SEQ ID NO: 2596208 - RNA, 19 nt, Artificial Sequence
  Description of Artificial Sequence: Synthetic oligonucleotide
agcagacagacagucgauu

SEQ ID NO: 2596209 - RNA, 19 nt, Artificial Sequence
  Description of Artificial Sequence: Synthetic oligonucleotide
ggccucggccucuagcaag

SEQ ID NO: 2596210 - RNA, 19 nt, Artificial Sequence
  Description of Artificial Sequence: Synthetic oligonucleotide
guguguaaucggcuuugaa

SEQ ID NO: 2596211 - RNA, 19 nt, Artificial Sequence
  Description of Artificial Sequence: Synthetic oligonucleotide
aucuaccaggggaggaaug

SEQ ID NO: 2596212 - RNA, 19 nt, Artificial Sequence
  Description of Artificial Sequence: Synthetic oligonucleotide
cagucgauuccagggagca

SEQ ID NO: 2596213 - RNA, 19 nt, Artificial Sequence
  Description of Artificial Sequence: Synthetic oligonucleotide
uggccccuuccauugcuau

SEQ ID NO: 2596214 - RNA, 19 nt, Artificial Sequence
  Description of Artificial Sequence: Synthetic oligonucleotide
uagcauccugcacgucccu

SEQ ID NO: 2596215 - RNA, 19 nt, Artificial Sequence
  Description of Artificial Sequence: Synthetic oligonucleotide
  modified_base (2)..(2): a, c, u, g, unknown or other
cngaaaugccuucuggauu

SEQ ID NO: 2596216 - RNA, 19 nt, Artificial Sequence
  Description of Artificial Sequence: Synthetic oligonucleotide
ggacaucuauuauauacuu

SEQ ID NO: 2596217 - RNA, 19 nt, Artificial Sequence
  Description of Artificial Sequence: Synthetic oligonucleotide
ccucucuucucggaaagug

SEQ ID NO: 2596218 - RNA, 19 nt, Artificial Sequence
  Description of Artificial Sequence: Synthetic oligonucleotide
gcuauagcauccugcacgu

SEQ ID NO: 2596219 - RNA, 19 nt, Artificial Sequence
  Description of Artificial Sequence: Synthetic oligonucleotide
ggcaaguaguaguggagua

SEQ ID NO: 2596220 - RNA, 19 nt, Artificial Sequence
  Description of Artificial Sequence: Synthetic oligonucleotide
cguagaaagcagcgaagug

SEQ ID NO: 2596221 - RNA, 19 nt, Artificial Sequence
  Description of Artificial Sequence: Synthetic oligonucleotide
gaggaauggccccuuccau

SEQ ID NO: 2596222 - RNA, 19 nt, Artificial Sequence
  Description of Artificial Sequence: Synthetic oligonucleotide
cauuuaguugaaaggccuu

SEQ ID NO: 2596223 - RNA, 19 nt, Artificial Sequence
  Description of Artificial Sequence: Synthetic oligonucleotide
gcagauguugucguagaaa

SEQ ID NO: 2596224 - RNA, 19 nt, Artificial Sequence
  Description of Artificial Sequence: Synthetic oligonucleotide
gcggcaaguaguaguggag

SEQ ID NO: 2596225 - RNA, 19 nt, Artificial Sequence
  Description of Artificial Sequence: Synthetic oligonucleotide
gccaacuucagcgauugua

SEQ ID NO: 2596226 - RNA, 19 nt, Artificial Sequence
  Description of Artificial Sequence: Synthetic oligonucleotide
guacugaauaguguccaau

SEQ ID NO: 2596227 - RNA, 19 nt, Artificial Sequence
  Description of Artificial Sequence: Synthetic oligonucleotide
guagcugaggacaucuauu

SEQ ID NO: 2596228 - RNA, 19 nt, Artificial Sequence
  Description of Artificial Sequence: Synthetic oligonucleotide
ggaaaguguguaaucggcu

SEQ ID NO: 2596229 - RNA, 19 nt, Artificial Sequence
  Description of Artificial Sequence: Synthetic oligonucleotide
cucuucucggaaagugugu

SEQ ID NO: 2596230 - RNA, 19 nt, Artificial Sequence
  Description of Artificial Sequence: Synthetic oligonucleotide
gcagcgaaguggaugggca

SEQ ID NO: 2596231 - RNA, 19 nt, Artificial Sequence
  Description of Artificial Sequence: Synthetic oligonucleotide
acuuggacacugagcugcu

SEQ ID NO: 2596232 - RNA, 19 nt, Artificial Sequence
  Description of Artificial Sequence: Synthetic oligonucleotide
cugacaaaugaaugauauu

SEQ ID NO: 2596233 - RNA, 19 nt, Artificial Sequence
  Description of Artificial Sequence: Synthetic oligonucleotide
gcacgucccuauugucacg

SEQ ID NO: 2596234 - RNA, 19 nt, Artificial Sequence
  Description of Artificial Sequence: Synthetic oligonucleotide
ggagaucuuuaguuaaguu

SEQ ID NO: 2596235 - RNA, 19 nt, Artificial Sequence
  Description of Artificial Sequence: Synthetic oligonucleotide
cgucccuauugucacggcc

SEQ ID NO: 2596236 - RNA, 19 nt, Artificial Sequence
  Description of Artificial Sequence: Synthetic oligonucleotide
ccuuccauugcuauagcau

SEQ ID NO: 2596237 - RNA, 19 nt, Artificial Sequence
  Description of Artificial Sequence: Synthetic oligonucleotide
gaucuaccaggggaggaau

SEQ ID NO: 2596238 - RNA, 19 nt, Artificial Sequence
  Description of Artificial Sequence: Synthetic oligonucleotide
cagccucucuucucggaaa

SEQ ID NO: 2596239 - RNA, 19 nt, Artificial Sequence
  Description of Artificial Sequence: Synthetic oligonucleotide
caaucuguucugccauaua

SEQ ID NO: 2596240 - RNA, 19 nt, Artificial Sequence
  Description of Artificial Sequence: Synthetic oligonucleotide
ccuauugucacggccaacu

SEQ ID NO: 2596241 - RNA, 19 nt, Artificial Sequence
  Description of Artificial Sequence: Synthetic oligonucleotide
ccauugcuauagcauccug

SEQ ID NO: 2596242 - RNA, 19 nt, Artificial Sequence
  Description of Artificial Sequence: Synthetic oligonucleotide
cugagcugcuucccuuuaa

SEQ ID NO: 2596243 - RNA, 19 nt, Artificial Sequence
  Description of Artificial Sequence: Synthetic oligonucleotide
cuauagcauccugcacguc

SEQ ID NO: 2596244 - RNA, 19 nt, Artificial Sequence
  Description of Artificial Sequence: Synthetic oligonucleotide
agucgauuccagggagcaa

SEQ ID NO: 2596245 - RNA, 19 nt, Artificial Sequence
  Description of Artificial Sequence: Synthetic oligonucleotide
agaaagcagcgaaguggau

SEQ ID NO: 2596246 - RNA, 19 nt, Artificial Sequence
  Description of Artificial Sequence: Synthetic oligonucleotide
acggcuccuugcuccuuaa

SEQ ID NO: 2596247 - RNA, 19 nt, Artificial Sequence
  Description of Artificial Sequence: Synthetic oligonucleotide
gcacugacaaaugaaugau

SEQ ID NO: 2596248 - RNA, 19 nt, Artificial Sequence
  Description of Artificial Sequence: Synthetic oligonucleotide
gccucuagcaagcucggau

SEQ ID NO: 2596249 - RNA, 19 nt, Artificial Sequence
  Description of Artificial Sequence: Synthetic oligonucleotide
caguuggcaccaagagaaa

SEQ ID NO: 2596250 - RNA, 19 nt, Artificial Sequence
  Description of Artificial Sequence: Synthetic oligonucleotide
gugcuacggcuccuugcuc

SEQ ID NO: 2596251 - RNA, 19 nt, Artificial Sequence
  Description of Artificial Sequence: Synthetic oligonucleotide
cggcuuugaagcagagcag

SEQ ID NO: 2596252 - RNA, 19 nt, Artificial Sequence
  Description of Artificial Sequence: Synthetic oligonucleotide
cccuuccauugcuauagca

SEQ ID NO: 2596253 - RNA, 19 nt, Artificial Sequence
  Description of Artificial Sequence: Synthetic oligonucleotide
cuccuugcuccuuaacauu

SEQ ID NO: 2596254 - RNA, 19 nt, Artificial Sequence
  Description of Artificial Sequence: Synthetic oligonucleotide
gccucggccucuagcaagc

SEQ ID NO: 2596255 - RNA, 19 nt, Artificial Sequence
  Description of Artificial Sequence: Synthetic oligonucleotide
gcccaaagugcuacggcuc

SEQ ID NO: 2596256 - RNA, 19 nt, Artificial Sequence
  Description of Artificial Sequence: Synthetic oligonucleotide
uuguccugccaaggcccaa

SEQ ID NO: 2596257 - RNA, 19 nt, Artificial Sequence
  Description of Artificial Sequence: Synthetic oligonucleotide
ccaucgcaccuuucacuug

SEQ ID NO: 2596258 - RNA, 19 nt, Artificial Sequence
  Description of Artificial Sequence: Synthetic oligonucleotide
gccaucgcaccuuucacuu

SEQ ID NO: 2596259 - RNA, 19 nt, Artificial Sequence
  Description of Artificial Sequence: Synthetic oligonucleotide
aucgcaccuuucacuugga

SEQ ID NO: 2596260 - RNA, 19 nt, Artificial Sequence
  Description of Artificial Sequence: Synthetic oligonucleotide
gcaagcucggauccuuccu

SEQ ID NO: 2596261 - RNA, 19 nt, Artificial Sequence
  Description of Artificial Sequence: Synthetic oligonucleotide
gaaaggccuuuaguaguuu

SEQ ID NO: 2596262 - RNA, 19 nt, Artificial Sequence
  Description of Artificial Sequence: Synthetic oligonucleotide
acggccaacuucagcgauu

SEQ ID NO: 2596263 - RNA, 19 nt, Artificial Sequence
  Description of Artificial Sequence: Synthetic oligonucleotide
ccagggagcaagccugaca

SEQ ID NO: 2596264 - RNA, 19 nt, Artificial Sequence
  Description of Artificial Sequence: Synthetic oligonucleotide
guaguggaguacacugauu

SEQ ID NO: 2596265 - RNA, 19 nt, Artificial Sequence
  Description of Artificial Sequence: Synthetic oligonucleotide
cggccaacuucagcgauug

SEQ ID NO: 2596266 - RNA, 19 nt, Artificial Sequence
  Description of Artificial Sequence: Synthetic oligonucleotide
cagcgaaguggaugggcau

SEQ ID NO: 2596267 - RNA, 19 nt, Artificial Sequence
  Description of Artificial Sequence: Synthetic oligonucleotide
gccauauacuucuguuguu

SEQ ID NO: 2596268 - RNA, 19 nt, Artificial Sequence
  Description of Artificial Sequence: Synthetic oligonucleotide
cacggccaacuucagcgau

SEQ ID NO: 2596269 - RNA, 19 nt, Artificial Sequence
  Description of Artificial Sequence: Synthetic oligonucleotide
cggccucuagcaagcucgg

SEQ ID NO: 2596270 - RNA, 19 nt, Artificial Sequence
  Description of Artificial Sequence: Synthetic oligonucleotide
ggggaggaauggccccuuc

SEQ ID NO: 2596271 - RNA, 19 nt, Artificial Sequence
  Description of Artificial Sequence: Synthetic oligonucleotide
gcuacggcuccuugcuccu

SEQ ID NO: 2596272 - RNA, 19 nt, Artificial Sequence
  Description of Artificial Sequence: Synthetic oligonucleotide
caagccugacaggccaggu

SEQ ID NO: 2596273 - RNA, 19 nt, Artificial Sequence
  Description of Artificial Sequence: Synthetic oligonucleotide
ggccccuuccauugcuaua

SEQ ID NO: 2596274 - RNA, 19 nt, Artificial Sequence
  Description of Artificial Sequence: Synthetic oligonucleotide
cauccugcacgucccuauu

SEQ ID NO: 2596275 - RNA, 19 nt, Artificial Sequence
  Description of Artificial Sequence: Synthetic oligonucleotide
cccuauugucacggccaac

SEQ ID NO: 2596276 - RNA, 19 nt, Artificial Sequence
  Description of Artificial Sequence: Synthetic oligonucleotide
ccuuccugcagaguacaau

SEQ ID NO: 2596277 - RNA, 19 nt, Artificial Sequence
  Description of Artificial Sequence: Synthetic oligonucleotide
ggccucuagcaagcucgga

SEQ ID NO: 2596278 - RNA, 19 nt, Artificial Sequence
  Description of Artificial Sequence: Synthetic oligonucleotide
cggcaaguaguaguggagu

SEQ ID NO: 2596279 - RNA, 19 nt, Artificial Sequence
  Description of Artificial Sequence: Synthetic oligonucleotide
cuuggacacugagcugcuu

SEQ ID NO: 2596280 - RNA, 19 nt, Artificial Sequence
  Description of Artificial Sequence: Synthetic oligonucleotide
gccugacaggccaggugua

SEQ ID NO: 2596281 - RNA, 19 nt, Artificial Sequence
  Description of Artificial Sequence: Synthetic oligonucleotide
gccucucuucucggaaagu

SEQ ID NO: 2596282 - RNA, 19 nt, Artificial Sequence
  Description of Artificial Sequence: Synthetic oligonucleotide
ggccaacuucagcgauugu

SEQ ID NO: 2596283 - RNA, 19 nt, Artificial Sequence
  Description of Artificial Sequence: Synthetic oligonucleotide
cggauccuuccugcagagu

SEQ ID NO: 2596284 - RNA, 19 nt, Artificial Sequence
  Description of Artificial Sequence: Synthetic oligonucleotide
  modified_base (1)..(1): a, c, u, g, unknown or other
ngaaaugccuucuggauua

SEQ ID NO: 2596285 - RNA, 19 nt, Artificial Sequence
  Description of Artificial Sequence: Synthetic oligonucleotide
gauaucuucaaacacuugg

SEQ ID NO: 2596286 - RNA, 19 nt, Artificial Sequence
  Description of Artificial Sequence: Synthetic oligonucleotide
uuaauauuuucgaagcggg

SEQ ID NO: 2596287 - RNA, 19 nt, Artificial Sequence
  Description of Artificial Sequence: Synthetic oligonucleotide
cauguuaagagcuucaagc

SEQ ID NO: 2596288 - RNA, 19 nt, Artificial Sequence
  Description of Artificial Sequence: Synthetic oligonucleotide
gauauuaugcugcaauugg

SEQ ID NO: 2596289 - RNA, 19 nt, Artificial Sequence
  Description of Artificial Sequence: Synthetic oligonucleotide
uaaacaauauuccaaguga

SEQ ID NO: 2596290 - RNA, 19 nt, Artificial Sequence
  Description of Artificial Sequence: Synthetic oligonucleotide
aauuaaagagaaggaaacc

SEQ ID NO: 2596291 - RNA, 19 nt, Artificial Sequence
  Description of Artificial Sequence: Synthetic oligonucleotide
ccuucaauaauuaaaaugg

SEQ ID NO: 2596292 - RNA, 19 nt, Artificial Sequence
  Description of Artificial Sequence: Synthetic oligonucleotide
aucuaugucuauuucagac

SEQ ID NO: 2596293 - RNA, 19 nt, Artificial Sequence
  Description of Artificial Sequence: Synthetic oligonucleotide
uaauuaaagagaaggaaac

SEQ ID NO: 2596294 - RNA, 19 nt, Artificial Sequence
  Description of Artificial Sequence: Synthetic oligonucleotide
uuacucacaaaccaguuug

SEQ ID NO: 2596295 - RNA, 19 nt, Artificial Sequence
  Description of Artificial Sequence: Synthetic oligonucleotide
ucuagguaaacaauauucc

SEQ ID NO: 2596296 - RNA, 19 nt, Artificial Sequence
  Description of Artificial Sequence: Synthetic oligonucleotide
ugcacuguuacucacaaac

SEQ ID NO: 2596297 - RNA, 19 nt, Artificial Sequence
  Description of Artificial Sequence: Synthetic oligonucleotide
uuauaauuaaagagaagga

SEQ ID NO: 2596298 - RNA, 19 nt, Artificial Sequence
  Description of Artificial Sequence: Synthetic oligonucleotide
aaaaugggaacccuuugag

SEQ ID NO: 2596299 - RNA, 19 nt, Artificial Sequence
  Description of Artificial Sequence: Synthetic oligonucleotide
aaugggaacccuuugagaa

SEQ ID NO: 2596300 - RNA, 19 nt, Artificial Sequence
  Description of Artificial Sequence: Synthetic oligonucleotide
guggcuuauaauuaaagag

SEQ ID NO: 2596301 - RNA, 19 nt, Artificial Sequence
  Description of Artificial Sequence: Synthetic oligonucleotide
uaaguuucuuaauccaucg

SEQ ID NO: 2596302 - RNA, 19 nt, Artificial Sequence
  Description of Artificial Sequence: Synthetic oligonucleotide
uucaauaauuaaaauggga

SEQ ID NO: 2596303 - RNA, 19 nt, Artificial Sequence
  Description of Artificial Sequence: Synthetic oligonucleotide
uggcuuauaauuaaagaga

SEQ ID NO: 2596304 - RNA, 19 nt, Artificial Sequence
  Description of Artificial Sequence: Synthetic oligonucleotide
ucuaauucuugcuugauau

SEQ ID NO: 2596305 - RNA, 19 nt, Artificial Sequence
  Description of Artificial Sequence: Synthetic oligonucleotide
accuucaauaauuaaaaug

SEQ ID NO: 2596306 - RNA, 19 nt, Artificial Sequence
  Description of Artificial Sequence: Synthetic oligonucleotide
cuuaauauuuucgaagcgg

SEQ ID NO: 2596307 - RNA, 19 nt, Artificial Sequence
  Description of Artificial Sequence: Synthetic oligonucleotide
caaauguuuucauaauugg

SEQ ID NO: 2596308 - RNA, 19 nt, Artificial Sequence
  Description of Artificial Sequence: Synthetic oligonucleotide
aaacacuugggaaaggagg

SEQ ID NO: 2596309 - RNA, 19 nt, Artificial Sequence
  Description of Artificial Sequence: Synthetic oligonucleotide
ucauccugagauauuaugc

SEQ ID NO: 2596310 - RNA, 19 nt, Artificial Sequence
  Description of Artificial Sequence: Synthetic oligonucleotide
aucaaaguacccuggaggg

SEQ ID NO: 2596311 - RNA, 19 nt, Artificial Sequence
  Description of Artificial Sequence: Synthetic oligonucleotide
uauggaauggucaggaagu

SEQ ID NO: 2596312 - RNA, 19 nt, Artificial Sequence
  Description of Artificial Sequence: Synthetic oligonucleotide
gaagaaaucauccugagau

SEQ ID NO: 2596313 - RNA, 19 nt, Artificial Sequence
  Description of Artificial Sequence: Synthetic oligonucleotide
aucuagguaaacaauauuc

SEQ ID NO: 2596314 - RNA, 19 nt, Artificial Sequence
  Description of Artificial Sequence: Synthetic oligonucleotide
uuugagaacuuuccaaagc

SEQ ID NO: 2596315 - RNA, 19 nt, Artificial Sequence
  Description of Artificial Sequence: Synthetic oligonucleotide
ucauaauuggccuuggaaa

SEQ ID NO: 2596316 - RNA, 19 nt, Artificial Sequence
  Description of Artificial Sequence: Synthetic oligonucleotide
ugugcuuuagguacauggg

SEQ ID NO: 2596317 - RNA, 19 nt, Artificial Sequence
  Description of Artificial Sequence: Synthetic oligonucleotide
aaguuucuuaauccaucgc

SEQ ID NO: 2596318 - RNA, 19 nt, Artificial Sequence
  Description of Artificial Sequence: Synthetic oligonucleotide
ucuucauauggaaugguca

SEQ ID NO: 2596319 - RNA, 19 nt, Artificial Sequence
  Description of Artificial Sequence: Synthetic oligonucleotide
aauauuccaagugauggug

SEQ ID NO: 2596320 - RNA, 19 nt, Artificial Sequence
  Description of Artificial Sequence: Synthetic oligonucleotide
caucaaaguacccuggagg

SEQ ID NO: 2596321 - RNA, 19 nt, Artificial Sequence
  Description of Artificial Sequence: Synthetic oligonucleotide
ugagauauuaugcugcaau

SEQ ID NO: 2596322 - RNA, 19 nt, Artificial Sequence
  Description of Artificial Sequence: Synthetic oligonucleotide
aaucacgucuucuuaauau

SEQ ID NO: 2596323 - RNA, 19 nt, Artificial Sequence
  Description of Artificial Sequence: Synthetic oligonucleotide
agguaaacaauauuccaag

SEQ ID NO: 2596324 - RNA, 19 nt, Artificial Sequence
  Description of Artificial Sequence: Synthetic oligonucleotide
ucacaaaccaguuugcuuc

SEQ ID NO: 2596325 - RNA, 19 nt, Artificial Sequence
  Description of Artificial Sequence: Synthetic oligonucleotide
auauuuucgaagcggguuc

SEQ ID NO: 2596326 - RNA, 19 nt, Artificial Sequence
  Description of Artificial Sequence: Synthetic oligonucleotide
uugagaacuuuccaaagcu

SEQ ID NO: 2596327 - RNA, 19 nt, Artificial Sequence
  Description of Artificial Sequence: Synthetic oligonucleotide
aguuucuuaauccaucgca

SEQ ID NO: 2596328 - RNA, 19 nt, Artificial Sequence
  Description of Artificial Sequence: Synthetic oligonucleotide
auugggaaguuguuucugc

SEQ ID NO: 2596329 - RNA, 19 nt, Artificial Sequence
  Description of Artificial Sequence: Synthetic oligonucleotide
cugugcuuuagguacaugg

SEQ ID NO: 2596330 - RNA, 19 nt, Artificial Sequence
  Description of Artificial Sequence: Synthetic oligonucleotide
cuucaauaauuaaaauggg

SEQ ID NO: 2596331 - RNA, 19 nt, Artificial Sequence
  Description of Artificial Sequence: Synthetic oligonucleotide
ucagacuccggcuugaaga

SEQ ID NO: 2596332 - RNA, 19 nt, Artificial Sequence
  Description of Artificial Sequence: Synthetic oligonucleotide
uauuaugcugcaauuggga

SEQ ID NO: 2596333 - RNA, 19 nt, Artificial Sequence
  Description of Artificial Sequence: Synthetic oligonucleotide
auuaaagagaaggaaaccu

SEQ ID NO: 2596334 - RNA, 19 nt, Artificial Sequence
  Description of Artificial Sequence: Synthetic oligonucleotide
aaauggcugacaucauuuc

SEQ ID NO: 2596335 - RNA, 19 nt, Artificial Sequence
  Description of Artificial Sequence: Synthetic oligonucleotide
uaaaaugggaacccuuuga

SEQ ID NO: 2596336 - RNA, 19 nt, Artificial Sequence
  Description of Artificial Sequence: Synthetic oligonucleotide
uugucugugcuuuagguac

SEQ ID NO: 2596337 - RNA, 19 nt, Artificial Sequence
  Description of Artificial Sequence: Synthetic oligonucleotide
aacccuuugagaacuuucc

SEQ ID NO: 2596338 - RNA, 19 nt, Artificial Sequence
  Description of Artificial Sequence: Synthetic oligonucleotide
uuaaguuucuuaauccauc

SEQ ID NO: 2596339 - RNA, 19 nt, Artificial Sequence
  Description of Artificial Sequence: Synthetic oligonucleotide
ugcuuuagguacaugggcc

SEQ ID NO: 2596340 - RNA, 19 nt, Artificial Sequence
  Description of Artificial Sequence: Synthetic oligonucleotide
uccugagauauuaugcugc

SEQ ID NO: 2596341 - RNA, 19 nt, Artificial Sequence
  Description of Artificial Sequence: Synthetic oligonucleotide
uguuucugcaaguucuuag

SEQ ID NO: 2596342 - RNA, 19 nt, Artificial Sequence
  Description of Artificial Sequence: Synthetic oligonucleotide
aaguuguuucugcaaguuc

SEQ ID NO: 2596343 - RNA, 19 nt, Artificial Sequence
  Description of Artificial Sequence: Synthetic oligonucleotide
aacaugaaauggcugacau

SEQ ID NO: 2596344 - RNA, 19 nt, Artificial Sequence
  Description of Artificial Sequence: Synthetic oligonucleotide
uucauaauuggccuuggaa

SEQ ID NO: 2596345 - RNA, 19 nt, Artificial Sequence
  Description of Artificial Sequence: Synthetic oligonucleotide
uaauucuugcuugauaucu

SEQ ID NO: 2596346 - RNA, 19 nt, Artificial Sequence
  Description of Artificial Sequence: Synthetic oligonucleotide
uuaaaaugggaacccuuug

SEQ ID NO: 2596347 - RNA, 19 nt, Artificial Sequence
  Description of Artificial Sequence: Synthetic oligonucleotide
caugaaauggcugacauca

SEQ ID NO: 2596348 - RNA, 19 nt, Artificial Sequence
  Description of Artificial Sequence: Synthetic oligonucleotide
acaaauguuuucauaauug

SEQ ID NO: 2596349 - RNA, 19 nt, Artificial Sequence
  Description of Artificial Sequence: Synthetic oligonucleotide
auggucaggaaguaacuuc

SEQ ID NO: 2596350 - RNA, 19 nt, Artificial Sequence
  Description of Artificial Sequence: Synthetic oligonucleotide
uguuaagagcuucaagcac

SEQ ID NO: 2596351 - RNA, 19 nt, Artificial Sequence
  Description of Artificial Sequence: Synthetic oligonucleotide
uugcuugauaucuucaaac

SEQ ID NO: 2596352 - RNA, 19 nt, Artificial Sequence
  Description of Artificial Sequence: Synthetic oligonucleotide
cuuaauccaucgcaggagg

SEQ ID NO: 2596353 - RNA, 19 nt, Artificial Sequence
  Description of Artificial Sequence: Synthetic oligonucleotide
uucuuaauccaucgcagga

SEQ ID NO: 2596354 - RNA, 19 nt, Artificial Sequence
  Description of Artificial Sequence: Synthetic oligonucleotide
aauggcugacaucauuucu

SEQ ID NO: 2596355 - RNA, 19 nt, Artificial Sequence
  Description of Artificial Sequence: Synthetic oligonucleotide
ucuauuucagacuccggcu

SEQ ID NO: 2596356 - RNA, 19 nt, Artificial Sequence
  Description of Artificial Sequence: Synthetic oligonucleotide
aguggcuuauaauuaaaga

SEQ ID NO: 2596357 - RNA, 19 nt, Artificial Sequence
  Description of Artificial Sequence: Synthetic oligonucleotide
uuaaagagaaggaaaccuu

SEQ ID NO: 2596358 - RNA, 19 nt, Artificial Sequence
  Description of Artificial Sequence: Synthetic oligonucleotide
uuucugcaaguucuuagcc

SEQ ID NO: 2596359 - RNA, 19 nt, Artificial Sequence
  Description of Artificial Sequence: Synthetic oligonucleotide
gucuauuucagacuccggc

SEQ ID NO: 2596360 - RNA, 19 nt, Artificial Sequence
  Description of Artificial Sequence: Synthetic oligonucleotide
uaucuucaaacacuuggga

SEQ ID NO: 2596361 - RNA, 19 nt, Artificial Sequence
  Description of Artificial Sequence: Synthetic oligonucleotide
ucuaugucuauuucagacu

SEQ ID NO: 2596362 - RNA, 19 nt, Artificial Sequence
  Description of Artificial Sequence: Synthetic oligonucleotide
ugcuugauaucuucaaaca

SEQ ID NO: 2596363 - RNA, 19 nt, Artificial Sequence
  Description of Artificial Sequence: Synthetic oligonucleotide
ucauauacccuuguacucc

SEQ ID NO: 2596364 - RNA, 19 nt, Artificial Sequence
  Description of Artificial Sequence: Synthetic oligonucleotide
uucuuccauguuaagagcu

SEQ ID NO: 2596365 - RNA, 19 nt, Artificial Sequence
  Description of Artificial Sequence: Synthetic oligonucleotide
aguaacuucuguuccauau

SEQ ID NO: 2596366 - RNA, 19 nt, Artificial Sequence
  Description of Artificial Sequence: Synthetic oligonucleotide
aauauuuucgaagcggguu

SEQ ID NO: 2596367 - RNA, 19 nt, Artificial Sequence
  Description of Artificial Sequence: Synthetic oligonucleotide
auguuaagagcuucaagca

SEQ ID NO: 2596368 - RNA, 19 nt, Artificial Sequence
  Description of Artificial Sequence: Synthetic oligonucleotide
uuggccuuggaaaucacgu

SEQ ID NO: 2596369 - RNA, 19 nt, Artificial Sequence
  Description of Artificial Sequence: Synthetic oligonucleotide
aaaugggaacccuuugaga

SEQ ID NO: 2596370 - RNA, 19 nt, Artificial Sequence
  Description of Artificial Sequence: Synthetic oligonucleotide
cacauggccaucaaaguac

SEQ ID NO: 2596371 - RNA, 19 nt, Artificial Sequence
  Description of Artificial Sequence: Synthetic oligonucleotide
uccaucuagguaaacaaua

SEQ ID NO: 2596372 - RNA, 19 nt, Artificial Sequence
  Description of Artificial Sequence: Synthetic oligonucleotide
ucuucuuaauauuuucgaa

SEQ ID NO: 2596373 - RNA, 19 nt, Artificial Sequence
  Description of Artificial Sequence: Synthetic oligonucleotide
auguuuucauaauuggccu

SEQ ID NO: 2596374 - RNA, 19 nt, Artificial Sequence
  Description of Artificial Sequence: Synthetic oligonucleotide
uugauaucuucaaacacuu

SEQ ID NO: 2596375 - RNA, 19 nt, Artificial Sequence
  Description of Artificial Sequence: Synthetic oligonucleotide
ugagaacuuuccaaagcug

SEQ ID NO: 2596376 - RNA, 19 nt, Artificial Sequence
  Description of Artificial Sequence: Synthetic oligonucleotide
uaugcugcaauugggaagu

SEQ ID NO: 2596377 - RNA, 19 nt, Artificial Sequence
  Description of Artificial Sequence: Synthetic oligonucleotide
ucuuaauccaucgcaggag

SEQ ID NO: 2596378 - RNA, 19 nt, Artificial Sequence
  Description of Artificial Sequence: Synthetic oligonucleotide
uuuucaucuaugucuauuu

SEQ ID NO: 2596379 - RNA, 19 nt, Artificial Sequence
  Description of Artificial Sequence: Synthetic oligonucleotide
agugaugguguucauuucu

SEQ ID NO: 2596380 - RNA, 19 nt, Artificial Sequence
  Description of Artificial Sequence: Synthetic oligonucleotide
acgucuucuuaauauuuuc

SEQ ID NO: 2596381 - RNA, 19 nt, Artificial Sequence
  Description of Artificial Sequence: Synthetic oligonucleotide
aaaucauccugagauauua

SEQ ID NO: 2596382 - RNA, 19 nt, Artificial Sequence
  Description of Artificial Sequence: Synthetic oligonucleotide
uggucaggaaguaacuucu

SEQ ID NO: 2596383 - RNA, 19 nt, Artificial Sequence
  Description of Artificial Sequence: Synthetic oligonucleotide
ucauauggaauggucagga

SEQ ID NO: 2596384 - RNA, 19 nt, Artificial Sequence
  Description of Artificial Sequence: Synthetic oligonucleotide
guuucugcaaguucuuagc

SEQ ID NO: 2596385 - RNA, 19 nt, Artificial Sequence
  Description of Artificial Sequence: Synthetic oligonucleotide
uccaucguugcacuguuac

SEQ ID NO: 2596386 - RNA, 19 nt, Artificial Sequence
  Description of Artificial Sequence: Synthetic oligonucleotide
uuucuuccauguuaagagc

SEQ ID NO: 2596387 - RNA, 19 nt, Artificial Sequence
  Description of Artificial Sequence: Synthetic oligonucleotide
uccauaugguguccagugg

SEQ ID NO: 2596388 - RNA, 19 nt, Artificial Sequence
  Description of Artificial Sequence: Synthetic oligonucleotide
agauauuaugcugcaauug

SEQ ID NO: 2596389 - RNA, 19 nt, Artificial Sequence
  Description of Artificial Sequence: Synthetic oligonucleotide
aagugaugguguucauuuc

SEQ ID NO: 2596390 - RNA, 19 nt, Artificial Sequence
  Description of Artificial Sequence: Synthetic oligonucleotide
augucuauuucagacuccg

SEQ ID NO: 2596391 - RNA, 19 nt, Artificial Sequence
  Description of Artificial Sequence: Synthetic oligonucleotide
uauacccuuguacuccgcc

SEQ ID NO: 2596392 - RNA, 19 nt, Artificial Sequence
  Description of Artificial Sequence: Synthetic oligonucleotide
auauuaugcugcaauuggg

SEQ ID NO: 2596393 - RNA, 19 nt, Artificial Sequence
  Description of Artificial Sequence: Synthetic oligonucleotide
aguuguuucugcaaguucu

SEQ ID NO: 2596394 - RNA, 19 nt, Artificial Sequence
  Description of Artificial Sequence: Synthetic oligonucleotide
gacuugcugcauuccaucg

SEQ ID NO: 2596395 - RNA, 19 nt, Artificial Sequence
  Description of Artificial Sequence: Synthetic oligonucleotide
uucuucauauggaaugguc

SEQ ID NO: 2596396 - RNA, 19 nt, Artificial Sequence
  Description of Artificial Sequence: Synthetic oligonucleotide
aacacuugggaaaggaggu

SEQ ID NO: 2596397 - RNA, 19 nt, Artificial Sequence
  Description of Artificial Sequence: Synthetic oligonucleotide
uuagccagaguugucuucc

SEQ ID NO: 2596398 - RNA, 19 nt, Artificial Sequence
  Description of Artificial Sequence: Synthetic oligonucleotide
uucuugucugugcuuuagg

SEQ ID NO: 2596399 - RNA, 19 nt, Artificial Sequence
  Description of Artificial Sequence: Synthetic oligonucleotide
uucauauggaauggucagg

SEQ ID NO: 2596400 - RNA, 19 nt, Artificial Sequence
  Description of Artificial Sequence: Synthetic oligonucleotide
uccucuuacauucuucaua

SEQ ID NO: 2596401 - RNA, 19 nt, Artificial Sequence
  Description of Artificial Sequence: Synthetic oligonucleotide
uaauauuuucgaagcgggu

SEQ ID NO: 2596402 - RNA, 19 nt, Artificial Sequence
  Description of Artificial Sequence: Synthetic oligonucleotide
ucaaacacuugggaaagga

SEQ ID NO: 2596403 - RNA, 19 nt, Artificial Sequence
  Description of Artificial Sequence: Synthetic oligonucleotide
uauuuucgaagcggguucg

SEQ ID NO: 2596404 - RNA, 19 nt, Artificial Sequence
  Description of Artificial Sequence: Synthetic oligonucleotide
aaacaauauuccaagugau

SEQ ID NO: 2596405 - RNA, 19 nt, Artificial Sequence
  Description of Artificial Sequence: Synthetic oligonucleotide
caggaaguaacuucuguuc

SEQ ID NO: 2596406 - RNA, 19 nt, Artificial Sequence
  Description of Artificial Sequence: Synthetic oligonucleotide
cuagguaaacaauauucca

SEQ ID NO: 2596407 - RNA, 19 nt, Artificial Sequence
  Description of Artificial Sequence: Synthetic oligonucleotide
uuugucacaccgccaauuc

SEQ ID NO: 2596408 - RNA, 19 nt, Artificial Sequence
  Description of Artificial Sequence: Synthetic oligonucleotide
cagaucuuguuccaucuag

SEQ ID NO: 2596409 - RNA, 19 nt, Artificial Sequence
  Description of Artificial Sequence: Synthetic oligonucleotide
uucugcaaguucuuagcca

SEQ ID NO: 2596410 - RNA, 19 nt, Artificial Sequence
  Description of Artificial Sequence: Synthetic oligonucleotide
caaacacuugggaaaggag

SEQ ID NO: 2596411 - RNA, 19 nt, Artificial Sequence
  Description of Artificial Sequence: Synthetic oligonucleotide
uaugucuauuucagacucc

SEQ ID NO: 2596412 - RNA, 19 nt, Artificial Sequence
  Description of Artificial Sequence: Synthetic oligonucleotide
uucgaagcggguucgaguc

SEQ ID NO: 2596413 - RNA, 19 nt, Artificial Sequence
  Description of Artificial Sequence: Synthetic oligonucleotide
aauugggaaguuguuucug

SEQ ID NO: 2596414 - RNA, 19 nt, Artificial Sequence
  Description of Artificial Sequence: Synthetic oligonucleotide
guucauuucuugucugugc

SEQ ID NO: 2596415 - RNA, 19 nt, Artificial Sequence
  Description of Artificial Sequence: Synthetic oligonucleotide
cuugauaucuucaaacacu

SEQ ID NO: 2596416 - RNA, 19 nt, Artificial Sequence
  Description of Artificial Sequence: Synthetic oligonucleotide
aauuccaaugacaaauguu

SEQ ID NO: 2596417 - RNA, 19 nt, Artificial Sequence
  Description of Artificial Sequence: Synthetic oligonucleotide
uuccauccaacaugaaaug

SEQ ID NO: 2596418 - RNA, 19 nt, Artificial Sequence
  Description of Artificial Sequence: Synthetic oligonucleotide
uuucaucuaugucuauuuc

SEQ ID NO: 2596419 - RNA, 19 nt, Artificial Sequence
  Description of Artificial Sequence: Synthetic oligonucleotide
cacaccgccaauuccaaug

SEQ ID NO: 2596420 - RNA, 19 nt, Artificial Sequence
  Description of Artificial Sequence: Synthetic oligonucleotide
acaugaaauggcugacauc

SEQ ID NO: 2596421 - RNA, 19 nt, Artificial Sequence
  Description of Artificial Sequence: Synthetic oligonucleotide
augggaacccuuugagaac

SEQ ID NO: 2596422 - RNA, 19 nt, Artificial Sequence
  Description of Artificial Sequence: Synthetic oligonucleotide
uaauuggccuuggaaauca

SEQ ID NO: 2596423 - RNA, 19 nt, Artificial Sequence
  Description of Artificial Sequence: Synthetic oligonucleotide
auuaugcugcaauugggaa

SEQ ID NO: 2596424 - RNA, 19 nt, Artificial Sequence
  Description of Artificial Sequence: Synthetic oligonucleotide
uucuguuccauaugguguc

SEQ ID NO: 2596425 - RNA, 19 nt, Artificial Sequence
  Description of Artificial Sequence: Synthetic oligonucleotide
guuaagagcuucaagcaca

SEQ ID NO: 2596426 - RNA, 19 nt, Artificial Sequence
  Description of Artificial Sequence: Synthetic oligonucleotide
ucaggaaguaacuucuguu

SEQ ID NO: 2596427 - RNA, 19 nt, Artificial Sequence
  Description of Artificial Sequence: Synthetic oligonucleotide
uuuucauaauuggccuugg

SEQ ID NO: 2596428 - RNA, 19 nt, Artificial Sequence
  Description of Artificial Sequence: Synthetic oligonucleotide
aguucuuagccagaguugu

SEQ ID NO: 2596429 - RNA, 19 nt, Artificial Sequence
  Description of Artificial Sequence: Synthetic oligonucleotide
aauuaaaaugggaacccuu

SEQ ID NO: 2596430 - RNA, 19 nt, Artificial Sequence
  Description of Artificial Sequence: Synthetic oligonucleotide
agagaaggaaaccuucaau

SEQ ID NO: 2596431 - RNA, 19 nt, Artificial Sequence
  Description of Artificial Sequence: Synthetic oligonucleotide
auaauuggccuuggaaauc

SEQ ID NO: 2596432 - RNA, 19 nt, Artificial Sequence
  Description of Artificial Sequence: Synthetic oligonucleotide
caguggcuuauaauuaaag

SEQ ID NO: 2596433 - RNA, 19 nt, Artificial Sequence
  Description of Artificial Sequence: Synthetic oligonucleotide
uuccaagugaugguguuca

SEQ ID NO: 2596434 - RNA, 19 nt, Artificial Sequence
  Description of Artificial Sequence: Synthetic oligonucleotide
cucauauacccuuguacuc

SEQ ID NO: 2596435 - RNA, 19 nt, Artificial Sequence
  Description of Artificial Sequence: Synthetic oligonucleotide
ugucuauuucagacuccgg

SEQ ID NO: 2596436 - RNA, 19 nt, Artificial Sequence
  Description of Artificial Sequence: Synthetic oligonucleotide
acuguuacucacaaaccag

SEQ ID NO: 2596437 - RNA, 19 nt, Artificial Sequence
  Description of Artificial Sequence: Synthetic oligonucleotide
auccugagauauuaugcug

SEQ ID NO: 2596438 - RNA, 19 nt, Artificial Sequence
  Description of Artificial Sequence: Synthetic oligonucleotide
uaauuaaaaugggaacccu

SEQ ID NO: 2596439 - RNA, 19 nt, Artificial Sequence
  Description of Artificial Sequence: Synthetic oligonucleotide
ugcaaguucuuagccagag

SEQ ID NO: 2596440 - RNA, 19 nt, Artificial Sequence
  Description of Artificial Sequence: Synthetic oligonucleotide
aaaggaggucuucuucaga

SEQ ID NO: 2596441 - RNA, 19 nt, Artificial Sequence
  Description of Artificial Sequence: Synthetic oligonucleotide
uacucacaaaccaguuugc

SEQ ID NO: 2596442 - RNA, 19 nt, Artificial Sequence
  Description of Artificial Sequence: Synthetic oligonucleotide
gugcuuuagguacaugggc

SEQ ID NO: 2596443 - RNA, 19 nt, Artificial Sequence
  Description of Artificial Sequence: Synthetic oligonucleotide
uuaauccaucgcaggagga

SEQ ID NO: 2596444 - RNA, 19 nt, Artificial Sequence
  Description of Artificial Sequence: Synthetic oligonucleotide
uuggaaaucacgucuucuu

SEQ ID NO: 2596445 - RNA, 19 nt, Artificial Sequence
  Description of Artificial Sequence: Synthetic oligonucleotide
aggaggacuugcugcauuc

SEQ ID NO: 2596446 - RNA, 19 nt, Artificial Sequence
  Description of Artificial Sequence: Synthetic oligonucleotide
ugauaucuucaaacacuug

SEQ ID NO: 2596447 - RNA, 19 nt, Artificial Sequence
  Description of Artificial Sequence: Synthetic oligonucleotide
aauccaucgcaggaggacu

SEQ ID NO: 2596448 - RNA, 19 nt, Artificial Sequence
  Description of Artificial Sequence: Synthetic oligonucleotide
uuaagagcuucaagcacau

SEQ ID NO: 2596449 - RNA, 19 nt, Artificial Sequence
  Description of Artificial Sequence: Synthetic oligonucleotide
uggguuuuccauccaacau

SEQ ID NO: 2596450 - RNA, 19 nt, Artificial Sequence
  Description of Artificial Sequence: Synthetic oligonucleotide
ugaugguguucauuucuug

SEQ ID NO: 2596451 - RNA, 19 nt, Artificial Sequence
  Description of Artificial Sequence: Synthetic oligonucleotide
aaguucuuagccagaguug

SEQ ID NO: 2596452 - RNA, 19 nt, Artificial Sequence
  Description of Artificial Sequence: Synthetic oligonucleotide
uuucgaagcggguucgagu

SEQ ID NO: 2596453 - RNA, 19 nt, Artificial Sequence
  Description of Artificial Sequence: Synthetic oligonucleotide
uguuccauaugguguccag

SEQ ID NO: 2596454 - RNA, 19 nt, Artificial Sequence
  Description of Artificial Sequence: Synthetic oligonucleotide
aguccuccccggcagggcc

SEQ ID NO: 2596455 - RNA, 19 nt, Artificial Sequence
  Description of Artificial Sequence: Synthetic oligonucleotide
aaaucacgucuucuuaaua

SEQ ID NO: 2596456 - RNA, 19 nt, Artificial Sequence
  Description of Artificial Sequence: Synthetic oligonucleotide
uccaguggcuuauaauuaa

SEQ ID NO: 2596457 - RNA, 19 nt, Artificial Sequence
  Description of Artificial Sequence: Synthetic oligonucleotide
uugucacaccgccaauucc

SEQ ID NO: 2596458 - RNA, 19 nt, Artificial Sequence
  Description of Artificial Sequence: Synthetic oligonucleotide
caucguugcacuguuacuc

SEQ ID NO: 2596459 - RNA, 19 nt, Artificial Sequence
  Description of Artificial Sequence: Synthetic oligonucleotide
aaccaguuugcuucucuaa

SEQ ID NO: 2596460 - RNA, 19 nt, Artificial Sequence
  Description of Artificial Sequence: Synthetic oligonucleotide
ucgcaggaggacuugcugc

SEQ ID NO: 2596461 - RNA, 19 nt, Artificial Sequence
  Description of Artificial Sequence: Synthetic oligonucleotide
ucacgucuucuuaauauuu

SEQ ID NO: 2596462 - RNA, 19 nt, Artificial Sequence
  Description of Artificial Sequence: Synthetic oligonucleotide
uguuacucacaaaccaguu

SEQ ID NO: 2596463 - RNA, 19 nt, Artificial Sequence
  Description of Artificial Sequence: Synthetic oligonucleotide
agaucuuguuccaucuagg

SEQ ID NO: 2596464 - RNA, 19 nt, Artificial Sequence
  Description of Artificial Sequence: Synthetic oligonucleotide
caguuugcuucucuaauuc

SEQ ID NO: 2596465 - RNA, 19 nt, Artificial Sequence
  Description of Artificial Sequence: Synthetic oligonucleotide
gaacuuuccaaagcugcug

SEQ ID NO: 2596466 - RNA, 19 nt, Artificial Sequence
  Description of Artificial Sequence: Synthetic oligonucleotide
ggucaggaggcucauauac

SEQ ID NO: 2596467 - RNA, 19 nt, Artificial Sequence
  Description of Artificial Sequence: Synthetic oligonucleotide
ggguuuuccauccaacaug

SEQ ID NO: 2596468 - RNA, 19 nt, Artificial Sequence
  Description of Artificial Sequence: Synthetic oligonucleotide
aaaccaguuugcuucucua

SEQ ID NO: 2596469 - RNA, 19 nt, Artificial Sequence
  Description of Artificial Sequence: Synthetic oligonucleotide
uccggcuugaagaaaucau

SEQ ID NO: 2596470 - RNA, 19 nt, Artificial Sequence
  Description of Artificial Sequence: Synthetic oligonucleotide
gggaaguuguuucugcaag

SEQ ID NO: 2596471 - RNA, 19 nt, Artificial Sequence
  Description of Artificial Sequence: Synthetic oligonucleotide
cacuguuacucacaaacca

SEQ ID NO: 2596472 - RNA, 19 nt, Artificial Sequence
  Description of Artificial Sequence: Synthetic oligonucleotide
acauggccaucaaaguacc

SEQ ID NO: 2596473 - RNA, 19 nt, Artificial Sequence
  Description of Artificial Sequence: Synthetic oligonucleotide
cuaauucuugcuugauauc

SEQ ID NO: 2596474 - RNA, 19 nt, Artificial Sequence
  Description of Artificial Sequence: Synthetic oligonucleotide
agcggguucgaguccuccc

SEQ ID NO: 2596475 - RNA, 19 nt, Artificial Sequence
  Description of Artificial Sequence: Synthetic oligonucleotide
acacauggccaucaaagua

SEQ ID NO: 2596476 - RNA, 19 nt, Artificial Sequence
  Description of Artificial Sequence: Synthetic oligonucleotide
aauggucaggaaguaacuu

SEQ ID NO: 2596477 - RNA, 19 nt, Artificial Sequence
  Description of Artificial Sequence: Synthetic oligonucleotide
gcaauugggaaguuguuuc

SEQ ID NO: 2596478 - RNA, 19 nt, Artificial Sequence
  Description of Artificial Sequence: Synthetic oligonucleotide
gaugguguucauuucuugu

SEQ ID NO: 2596479 - RNA, 19 nt, Artificial Sequence
  Description of Artificial Sequence: Synthetic oligonucleotide
uuuucgaagcggguucgag

SEQ ID NO: 2596480 - RNA, 19 nt, Artificial Sequence
  Description of Artificial Sequence: Synthetic oligonucleotide
uaauccaucgcaggaggac

SEQ ID NO: 2596481 - RNA, 19 nt, Artificial Sequence
  Description of Artificial Sequence: Synthetic oligonucleotide
acccuuguacuccgccucc

SEQ ID NO: 2596482 - RNA, 19 nt, Artificial Sequence
  Description of Artificial Sequence: Synthetic oligonucleotide
ugggaacccuuugagaacu

SEQ ID NO: 2596483 - RNA, 19 nt, Artificial Sequence
  Description of Artificial Sequence: Synthetic oligonucleotide
ggaauggucaggaaguaac

SEQ ID NO: 2596484 - RNA, 19 nt, Artificial Sequence
  Description of Artificial Sequence: Synthetic oligonucleotide
accaguuugcuucucuaau

SEQ ID NO: 2596485 - RNA, 19 nt, Artificial Sequence
  Description of Artificial Sequence: Synthetic oligonucleotide
ugcauuccaucguugcacu

SEQ ID NO: 2596486 - RNA, 19 nt, Artificial Sequence
  Description of Artificial Sequence: Synthetic oligonucleotide
gcuugauaucuucaaacac

SEQ ID NO: 2596487 - RNA, 19 nt, Artificial Sequence
  Description of Artificial Sequence: Synthetic oligonucleotide
aucguugcacuguuacuca

SEQ ID NO: 2596488 - RNA, 19 nt, Artificial Sequence
  Description of Artificial Sequence: Synthetic oligonucleotide
uguuuucauaauuggccuu

SEQ ID NO: 2596489 - RNA, 19 nt, Artificial Sequence
  Description of Artificial Sequence: Synthetic oligonucleotide
ggcucauauacccuuguac

SEQ ID NO: 2596490 - RNA, 19 nt, Artificial Sequence
  Description of Artificial Sequence: Synthetic oligonucleotide
auuccaagugaugguguuc

SEQ ID NO: 2596491 - RNA, 19 nt, Artificial Sequence
  Description of Artificial Sequence: Synthetic oligonucleotide
gcugacaucauuucuucca

SEQ ID NO: 2596492 - RNA, 19 nt, Artificial Sequence
  Description of Artificial Sequence: Synthetic oligonucleotide
ucuuccauguuaagagcuu

SEQ ID NO: 2596493 - RNA, 19 nt, Artificial Sequence
  Description of Artificial Sequence: Synthetic oligonucleotide
aucacgucuucuuaauauu

SEQ ID NO: 2596494 - RNA, 19 nt, Artificial Sequence
  Description of Artificial Sequence: Synthetic oligonucleotide
ugggaaguuguuucugcaa

SEQ ID NO: 2596495 - RNA, 19 nt, Artificial Sequence
  Description of Artificial Sequence: Synthetic oligonucleotide
aucgcaggaggacuugcug

SEQ ID NO: 2596496 - RNA, 19 nt, Artificial Sequence
  Description of Artificial Sequence: Synthetic oligonucleotide
uuuagguacaugggccaca

SEQ ID NO: 2596497 - RNA, 19 nt, Artificial Sequence
  Description of Artificial Sequence: Synthetic oligonucleotide
aagcggguucgaguccucc

SEQ ID NO: 2596498 - RNA, 19 nt, Artificial Sequence
  Description of Artificial Sequence: Synthetic oligonucleotide
ugcaauugggaaguuguuu

SEQ ID NO: 2596499 - RNA, 19 nt, Artificial Sequence
  Description of Artificial Sequence: Synthetic oligonucleotide
acuugcugcauuccaucgu

SEQ ID NO: 2596500 - RNA, 19 nt, Artificial Sequence
  Description of Artificial Sequence: Synthetic oligonucleotide
aucuuguuccaucuaggua

SEQ ID NO: 2596501 - RNA, 19 nt, Artificial Sequence
  Description of Artificial Sequence: Synthetic oligonucleotide
aauuggccuuggaaaucac

SEQ ID NO: 2596502 - RNA, 19 nt, Artificial Sequence
  Description of Artificial Sequence: Synthetic oligonucleotide
uacccuuguacuccgccuc

SEQ ID NO: 2596503 - RNA, 19 nt, Artificial Sequence
  Description of Artificial Sequence: Synthetic oligonucleotide
gaucuuguuccaucuaggu

SEQ ID NO: 2596504 - RNA, 19 nt, Artificial Sequence
  Description of Artificial Sequence: Synthetic oligonucleotide
uaugguguccaguggcuua

SEQ ID NO: 2596505 - RNA, 19 nt, Artificial Sequence
  Description of Artificial Sequence: Synthetic oligonucleotide
auacccuuguacuccgccu

SEQ ID NO: 2596506 - RNA, 19 nt, Artificial Sequence
  Description of Artificial Sequence: Synthetic oligonucleotide
gaacccuuugagaacuuuc

SEQ ID NO: 2596507 - RNA, 19 nt, Artificial Sequence
  Description of Artificial Sequence: Synthetic oligonucleotide
cauaauuggccuuggaaau

SEQ ID NO: 2596508 - RNA, 19 nt, Artificial Sequence
  Description of Artificial Sequence: Synthetic oligonucleotide
cuuagccagaguugucuuc

SEQ ID NO: 2596509 - RNA, 19 nt, Artificial Sequence
  Description of Artificial Sequence: Synthetic oligonucleotide
acaccgccaauuccaauga

SEQ ID NO: 2596510 - RNA, 19 nt, Artificial Sequence
  Description of Artificial Sequence: Synthetic oligonucleotide
cuucccaccauuugucaca

SEQ ID NO: 2596511 - RNA, 19 nt, Artificial Sequence
  Description of Artificial Sequence: Synthetic oligonucleotide
agaacuuuccaaagcugcu

SEQ ID NO: 2596512 - RNA, 19 nt, Artificial Sequence
  Description of Artificial Sequence: Synthetic oligonucleotide
cgucuucuuaauauuuucg

SEQ ID NO: 2596513 - RNA, 19 nt, Artificial Sequence
  Description of Artificial Sequence: Synthetic oligonucleotide
ccauaugguguccaguggc

SEQ ID NO: 2596514 - RNA, 19 nt, Artificial Sequence
  Description of Artificial Sequence: Synthetic oligonucleotide
guugcacuguuacucacaa

SEQ ID NO: 2596515 - RNA, 19 nt, Artificial Sequence
  Description of Artificial Sequence: Synthetic oligonucleotide
acccuuugagaacuuucca

SEQ ID NO: 2596516 - RNA, 19 nt, Artificial Sequence
  Description of Artificial Sequence: Synthetic oligonucleotide
cuuaaguuucuuaauccau

SEQ ID NO: 2596517 - RNA, 19 nt, Artificial Sequence
  Description of Artificial Sequence: Synthetic oligonucleotide
gaaaucacgucuucuuaau

SEQ ID NO: 2596518 - RNA, 19 nt, Artificial Sequence
  Description of Artificial Sequence: Synthetic oligonucleotide
agaguugucuucccaccau

SEQ ID NO: 2596519 - RNA, 19 nt, Artificial Sequence
  Description of Artificial Sequence: Synthetic oligonucleotide
ugcagagugcccuggguuu

SEQ ID NO: 2596520 - RNA, 19 nt, Artificial Sequence
  Description of Artificial Sequence: Synthetic oligonucleotide
auauuccaagugauggugu

SEQ ID NO: 2596521 - RNA, 19 nt, Artificial Sequence
  Description of Artificial Sequence: Synthetic oligonucleotide
ggcuuauaauuaaagagaa

SEQ ID NO: 2596522 - RNA, 19 nt, Artificial Sequence
  Description of Artificial Sequence: Synthetic oligonucleotide
caaguucuuagccagaguu

SEQ ID NO: 2596523 - RNA, 19 nt, Artificial Sequence
  Description of Artificial Sequence: Synthetic oligonucleotide
uccauguuaagagcuucaa

SEQ ID NO: 2596524 - RNA, 19 nt, Artificial Sequence
  Description of Artificial Sequence: Synthetic oligonucleotide
ucuguuccauauggugucc

SEQ ID NO: 2596525 - RNA, 19 nt, Artificial Sequence
  Description of Artificial Sequence: Synthetic oligonucleotide
gguuuuccauccaacauga

SEQ ID NO: 2596526 - RNA, 19 nt, Artificial Sequence
  Description of Artificial Sequence: Synthetic oligonucleotide
uugcugcauuccaucguug

SEQ ID NO: 2596527 - RNA, 19 nt, Artificial Sequence
  Description of Artificial Sequence: Synthetic oligonucleotide
gaaauggcugacaucauuu

SEQ ID NO: 2596528 - RNA, 19 nt, Artificial Sequence
  Description of Artificial Sequence: Synthetic oligonucleotide
ucgaagcggguucgagucc

SEQ ID NO: 2596529 - RNA, 19 nt, Artificial Sequence
  Description of Artificial Sequence: Synthetic oligonucleotide
cuugucugugcuuuaggua

SEQ ID NO: 2596530 - RNA, 19 nt, Artificial Sequence
  Description of Artificial Sequence: Synthetic oligonucleotide
gucaggaggcucauauacc

SEQ ID NO: 2596531 - RNA, 19 nt, Artificial Sequence
  Description of Artificial Sequence: Synthetic oligonucleotide
acucacaaaccaguuugcu

SEQ ID NO: 2596532 - RNA, 19 nt, Artificial Sequence
  Description of Artificial Sequence: Synthetic oligonucleotide
ccaauuccaaugacaaaug

SEQ ID NO: 2596533 - RNA, 19 nt, Artificial Sequence
  Description of Artificial Sequence: Synthetic oligonucleotide
gagauauuaugcugcaauu

SEQ ID NO: 2596534 - RNA, 19 nt, Artificial Sequence
  Description of Artificial Sequence: Synthetic oligonucleotide
aaucauccugagauauuau

SEQ ID NO: 2596535 - RNA, 19 nt, Artificial Sequence
  Description of Artificial Sequence: Synthetic oligonucleotide
uguacuccgccuccucuua

SEQ ID NO: 2596536 - RNA, 19 nt, Artificial Sequence
  Description of Artificial Sequence: Synthetic oligonucleotide
ugcugcaauugggaaguug

SEQ ID NO: 2596537 - RNA, 19 nt, Artificial Sequence
  Description of Artificial Sequence: Synthetic oligonucleotide
gcucauauacccuuguacu

SEQ ID NO: 2596538 - RNA, 19 nt, Artificial Sequence
  Description of Artificial Sequence: Synthetic oligonucleotide
gcuuauaauuaaagagaag

SEQ ID NO: 2596539 - RNA, 19 nt, Artificial Sequence
  Description of Artificial Sequence: Synthetic oligonucleotide
agugcccuggguuuuccau

SEQ ID NO: 2596540 - RNA, 19 nt, Artificial Sequence
  Description of Artificial Sequence: Synthetic oligonucleotide
auucuucauauggaauggu

SEQ ID NO: 2596541 - RNA, 19 nt, Artificial Sequence
  Description of Artificial Sequence: Synthetic oligonucleotide
ucgaguccuccccggcagg

SEQ ID NO: 2596542 - RNA, 19 nt, Artificial Sequence
  Description of Artificial Sequence: Synthetic oligonucleotide
auuccaucguugcacuguu

SEQ ID NO: 2596543 - RNA, 19 nt, Artificial Sequence
  Description of Artificial Sequence: Synthetic oligonucleotide
uacuccgccuccucuuaca

SEQ ID NO: 2596544 - RNA, 19 nt, Artificial Sequence
  Description of Artificial Sequence: Synthetic oligonucleotide
auuugucacaccgccaauu

SEQ ID NO: 2596545 - RNA, 19 nt, Artificial Sequence
  Description of Artificial Sequence: Synthetic oligonucleotide
cuuuagguacaugggccac

SEQ ID NO: 2596546 - RNA, 19 nt, Artificial Sequence
  Description of Artificial Sequence: Synthetic oligonucleotide
cauggccaucaaaguaccc

SEQ ID NO: 2596547 - RNA, 19 nt, Artificial Sequence
  Description of Artificial Sequence: Synthetic oligonucleotide
uacccuggagggucaggag

SEQ ID NO: 2596548 - RNA, 19 nt, Artificial Sequence
  Description of Artificial Sequence: Synthetic oligonucleotide
agagcuucaagcacaucau

SEQ ID NO: 2596549 - RNA, 19 nt, Artificial Sequence
  Description of Artificial Sequence: Synthetic oligonucleotide
ucguugcacuguuacucac

SEQ ID NO: 2596550 - RNA, 19 nt, Artificial Sequence
  Description of Artificial Sequence: Synthetic oligonucleotide
ccuuaaguuucuuaaucca

SEQ ID NO: 2596551 - RNA, 19 nt, Artificial Sequence
  Description of Artificial Sequence: Synthetic oligonucleotide
uggaauggucaggaaguaa

SEQ ID NO: 2596552 - RNA, 19 nt, Artificial Sequence
  Description of Artificial Sequence: Synthetic oligonucleotide
agagugcccuggguuuucc

SEQ ID NO: 2596553 - RNA, 19 nt, Artificial Sequence
  Description of Artificial Sequence: Synthetic oligonucleotide
auauacccuuguacuccgc

SEQ ID NO: 2596554 - RNA, 19 nt, Artificial Sequence
  Description of Artificial Sequence: Synthetic oligonucleotide
auggcugacaucauuucuu

SEQ ID NO: 2596555 - RNA, 19 nt, Artificial Sequence
  Description of Artificial Sequence: Synthetic oligonucleotide
caucuaugucuauuucaga

SEQ ID NO: 2596556 - RNA, 19 nt, Artificial Sequence
  Description of Artificial Sequence: Synthetic oligonucleotide
cuguuacucacaaaccagu

SEQ ID NO: 2596557 - RNA, 19 nt, Artificial Sequence
  Description of Artificial Sequence: Synthetic oligonucleotide
ucucuaauucuugcuugau

SEQ ID NO: 2596558 - RNA, 19 nt, Artificial Sequence
  Description of Artificial Sequence: Synthetic oligonucleotide
ccauguuaagagcuucaag

SEQ ID NO: 2596559 - RNA, 19 nt, Artificial Sequence
  Description of Artificial Sequence: Synthetic oligonucleotide
ccaaugacaaauguuuuca

SEQ ID NO: 2596560 - RNA, 19 nt, Artificial Sequence
  Description of Artificial Sequence: Synthetic oligonucleotide
auuucagacuccggcuuga

SEQ ID NO: 2596561 - RNA, 19 nt, Artificial Sequence
  Description of Artificial Sequence: Synthetic oligonucleotide
ccagaguugucuucccacc

SEQ ID NO: 2596562 - RNA, 19 nt, Artificial Sequence
  Description of Artificial Sequence: Synthetic oligonucleotide
gcuuuagguacaugggcca

SEQ ID NO: 2596563 - RNA, 19 nt, Artificial Sequence
  Description of Artificial Sequence: Synthetic oligonucleotide
uucccaccauuugucacac

SEQ ID NO: 2596564 - RNA, 19 nt, Artificial Sequence
  Description of Artificial Sequence: Synthetic oligonucleotide
ggaaaccuucaauaauuaa

SEQ ID NO: 2596565 - RNA, 19 nt, Artificial Sequence
  Description of Artificial Sequence: Synthetic oligonucleotide
uagccagaguugucuuccc

SEQ ID NO: 2596566 - RNA, 19 nt, Artificial Sequence
  Description of Artificial Sequence: Synthetic oligonucleotide
acaaaccaguuugcuucuc

SEQ ID NO: 2596567 - RNA, 19 nt, Artificial Sequence
  Description of Artificial Sequence: Synthetic oligonucleotide
gaauggucaggaaguaacu

SEQ ID NO: 2596568 - RNA, 19 nt, Artificial Sequence
  Description of Artificial Sequence: Synthetic oligonucleotide
guuacucacaaaccaguuu

SEQ ID NO: 2596569 - RNA, 19 nt, Artificial Sequence
  Description of Artificial Sequence: Synthetic oligonucleotide
aggaaaccuucaauaauua

SEQ ID NO: 2596570 - RNA, 19 nt, Artificial Sequence
  Description of Artificial Sequence: Synthetic oligonucleotide
caauuccaaugacaaaugu

SEQ ID NO: 2596571 - RNA, 19 nt, Artificial Sequence
  Description of Artificial Sequence: Synthetic oligonucleotide
ccggcuugaagaaaucauc

SEQ ID NO: 2596572 - RNA, 19 nt, Artificial Sequence
  Description of Artificial Sequence: Synthetic oligonucleotide
cagaguugucuucccacca

SEQ ID NO: 2596573 - RNA, 19 nt, Artificial Sequence
  Description of Artificial Sequence: Synthetic oligonucleotide
gaaguaacuucuguuccau

SEQ ID NO: 2596574 - RNA, 19 nt, Artificial Sequence
  Description of Artificial Sequence: Synthetic oligonucleotide
caugggccacacauggcca

SEQ ID NO: 2596575 - RNA, 19 nt, Artificial Sequence
  Description of Artificial Sequence: Synthetic oligonucleotide
cagacuccggcuugaagaa

SEQ ID NO: 2596576 - RNA, 19 nt, Artificial Sequence
  Description of Artificial Sequence: Synthetic oligonucleotide
aguacccuggagggucagg

SEQ ID NO: 2596577 - RNA, 19 nt, Artificial Sequence
  Description of Artificial Sequence: Synthetic oligonucleotide
gagcuucaagcacaucaua

SEQ ID NO: 2596578 - RNA, 19 nt, Artificial Sequence
  Description of Artificial Sequence: Synthetic oligonucleotide
guacccuggagggucagga

SEQ ID NO: 2596579 - RNA, 19 nt, Artificial Sequence
  Description of Artificial Sequence: Synthetic oligonucleotide
guucgaguccuccccggca

SEQ ID NO: 2596580 - RNA, 19 nt, Artificial Sequence
  Description of Artificial Sequence: Synthetic oligonucleotide
caacaugaaauggcugaca

SEQ ID NO: 2596581 - RNA, 19 nt, Artificial Sequence
  Description of Artificial Sequence: Synthetic oligonucleotide
cauaugguguccaguggcu

SEQ ID NO: 2596582 - RNA, 19 nt, Artificial Sequence
  Description of Artificial Sequence: Synthetic oligonucleotide
gaaguuguuucugcaaguu

SEQ ID NO: 2596583 - RNA, 19 nt, Artificial Sequence
  Description of Artificial Sequence: Synthetic oligonucleotide
ggcugacaucauuucuucc

SEQ ID NO: 2596584 - RNA, 19 nt, Artificial Sequence
  Description of Artificial Sequence: Synthetic oligonucleotide
caauugggaaguuguuucu

SEQ ID NO: 2596585 - RNA, 19 nt, Artificial Sequence
  Description of Artificial Sequence: Synthetic oligonucleotide
cacacauggccaucaaagu

SEQ ID NO: 2596586 - RNA, 19 nt, Artificial Sequence
  Description of Artificial Sequence: Synthetic oligonucleotide
acuccggcuugaagaaauc

SEQ ID NO: 2596587 - RNA, 19 nt, Artificial Sequence
  Description of Artificial Sequence: Synthetic oligonucleotide
gugcccuggguuuuccauc

SEQ ID NO: 2596588 - RNA, 19 nt, Artificial Sequence
  Description of Artificial Sequence: Synthetic oligonucleotide
ggccuuggaaaucacgucu

SEQ ID NO: 2596589 - RNA, 19 nt, Artificial Sequence
  Description of Artificial Sequence: Synthetic oligonucleotide
aggacuugcugcauuccau

SEQ ID NO: 2596590 - RNA, 19 nt, Artificial Sequence
  Description of Artificial Sequence: Synthetic oligonucleotide
ccaccauuugucacaccgc

SEQ ID NO: 2596591 - RNA, 19 nt, Artificial Sequence
  Description of Artificial Sequence: Synthetic oligonucleotide
augggccacacauggccau

SEQ ID NO: 2596592 - RNA, 19 nt, Artificial Sequence
  Description of Artificial Sequence: Synthetic oligonucleotide
gcugcaauugggaaguugu

SEQ ID NO: 2596593 - RNA, 19 nt, Artificial Sequence
  Description of Artificial Sequence: Synthetic oligonucleotide
auuuucgaagcggguucga

SEQ ID NO: 2596594 - RNA, 19 nt, Artificial Sequence
  Description of Artificial Sequence: Synthetic oligonucleotide
accauuugucacaccgcca

SEQ ID NO: 2596595 - RNA, 19 nt, Artificial Sequence
  Description of Artificial Sequence: Synthetic oligonucleotide
ccuccucuuacauucuuca

SEQ ID NO: 2596596 - RNA, 19 nt, Artificial Sequence
  Description of Artificial Sequence: Synthetic oligonucleotide
auaugguguccaguggcuu

SEQ ID NO: 2596597 - RNA, 19 nt, Artificial Sequence
  Description of Artificial Sequence: Synthetic oligonucleotide
aggcucauauacccuugua

SEQ ID NO: 2596598 - RNA, 19 nt, Artificial Sequence
  Description of Artificial Sequence: Synthetic oligonucleotide
uccaagugaugguguucau

SEQ ID NO: 2596599 - RNA, 19 nt, Artificial Sequence
  Description of Artificial Sequence: Synthetic oligonucleotide
cucacaaaccaguuugcuu

SEQ ID NO: 2596600 - RNA, 19 nt, Artificial Sequence
  Description of Artificial Sequence: Synthetic oligonucleotide
cuuggaaaucacgucuucu

SEQ ID NO: 2596601 - RNA, 19 nt, Artificial Sequence
  Description of Artificial Sequence: Synthetic oligonucleotide
ucacaccgccaauuccaau

SEQ ID NO: 2596602 - RNA, 19 nt, Artificial Sequence
  Description of Artificial Sequence: Synthetic oligonucleotide
ggaaguuguuucugcaagu

SEQ ID NO: 2596603 - RNA, 19 nt, Artificial Sequence
  Description of Artificial Sequence: Synthetic oligonucleotide
cuauuucagacuccggcuu

SEQ ID NO: 2596604 - RNA, 19 nt, Artificial Sequence
  Description of Artificial Sequence: Synthetic oligonucleotide
gguucgaguccuccccggc

SEQ ID NO: 2596605 - RNA, 19 nt, Artificial Sequence
  Description of Artificial Sequence: Synthetic oligonucleotide
ccauuugucacaccgccaa

SEQ ID NO: 2596606 - RNA, 19 nt, Artificial Sequence
  Description of Artificial Sequence: Synthetic oligonucleotide
caaaccaguuugcuucucu

SEQ ID NO: 2596607 - RNA, 19 nt, Artificial Sequence
  Description of Artificial Sequence: Synthetic oligonucleotide
gcugcauuccaucguugca

SEQ ID NO: 2596608 - RNA, 19 nt, Artificial Sequence
  Description of Artificial Sequence: Synthetic oligonucleotide
ggguucgaguccuccccgg

SEQ ID NO: 2596609 - RNA, 19 nt, Artificial Sequence
  Description of Artificial Sequence: Synthetic oligonucleotide
uuucagacuccggcuugaa

SEQ ID NO: 2596610 - RNA, 19 nt, Artificial Sequence
  Description of Artificial Sequence: Synthetic oligonucleotide
augguguccaguggcuuau

SEQ ID NO: 2596611 - RNA, 19 nt, Artificial Sequence
  Description of Artificial Sequence: Synthetic oligonucleotide
gcggguucgaguccucccc

SEQ ID NO: 2596612 - RNA, 19 nt, Artificial Sequence
  Description of Artificial Sequence: Synthetic oligonucleotide
gacuccggcuugaagaaau

SEQ ID NO: 2596613 - RNA, 19 nt, Artificial Sequence
  Description of Artificial Sequence: Synthetic oligonucleotide
gaggcucauauacccuugu

SEQ ID NO: 2596614 - RNA, 19 nt, Artificial Sequence
  Description of Artificial Sequence: Synthetic oligonucleotide
cauuccaucguugcacugu

SEQ ID NO: 2596615 - RNA, 19 nt, Artificial Sequence
  Description of Artificial Sequence: Synthetic oligonucleotide
auggaauggucaggaagua

SEQ ID NO: 2596616 - RNA, 19 nt, Artificial Sequence
  Description of Artificial Sequence: Synthetic oligonucleotide
ccugagauauuaugcugca

SEQ ID NO: 2596617 - RNA, 19 nt, Artificial Sequence
  Description of Artificial Sequence: Synthetic oligonucleotide
cccuuugagaacuuuccaa

SEQ ID NO: 2596618 - RNA, 19 nt, Artificial Sequence
  Description of Artificial Sequence: Synthetic oligonucleotide
uuccaucguugcacuguua

SEQ ID NO: 2596619 - RNA, 19 nt, Artificial Sequence
  Description of Artificial Sequence: Synthetic oligonucleotide
cuuguacuccgccuccucu

SEQ ID NO: 2596620 - RNA, 19 nt, Artificial Sequence
  Description of Artificial Sequence: Synthetic oligonucleotide
ccgccaauuccaaugacaa

SEQ ID NO: 2596621 - RNA, 19 nt, Artificial Sequence
  Description of Artificial Sequence: Synthetic oligonucleotide
cuccggcuugaagaaauca

SEQ ID NO: 2596622 - RNA, 19 nt, Artificial Sequence
  Description of Artificial Sequence: Synthetic oligonucleotide
cugguccugcagagugccc

SEQ ID NO: 2596623 - RNA, 19 nt, Artificial Sequence
  Description of Artificial Sequence: Synthetic oligonucleotide
caucuagguaaacaauauu

SEQ ID NO: 2596624 - RNA, 19 nt, Artificial Sequence
  Description of Artificial Sequence: Synthetic oligonucleotide
ggaggcucauauacccuug

SEQ ID NO: 2596625 - RNA, 19 nt, Artificial Sequence
  Description of Artificial Sequence: Synthetic oligonucleotide
gaaaucauccugagauauu

SEQ ID NO: 2596626 - RNA, 19 nt, Artificial Sequence
  Description of Artificial Sequence: Synthetic oligonucleotide
cacaaaccaguuugcuucu

SEQ ID NO: 2596627 - RNA, 19 nt, Artificial Sequence
  Description of Artificial Sequence: Synthetic oligonucleotide
ggucaggaaguaacuucug

SEQ ID NO: 2596628 - RNA, 19 nt, Artificial Sequence
  Description of Artificial Sequence: Synthetic oligonucleotide
gaguugucuucccaccauu

SEQ ID NO: 2596629 - RNA, 19 nt, Artificial Sequence
  Description of Artificial Sequence: Synthetic oligonucleotide
ggaggacuugcugcauucc

SEQ ID NO: 2596630 - RNA, 19 nt, Artificial Sequence
  Description of Artificial Sequence: Synthetic oligonucleotide
gagugcccuggguuuucca

SEQ ID NO: 2596631 - RNA, 19 nt, Artificial Sequence
  Description of Artificial Sequence: Synthetic oligonucleotide
guguccaguggcuuauaau

SEQ ID NO: 2596632 - RNA, 19 nt, Artificial Sequence
  Description of Artificial Sequence: Synthetic oligonucleotide
guuccauaugguguccagu

SEQ ID NO: 2596633 - RNA, 19 nt, Artificial Sequence
  Description of Artificial Sequence: Synthetic oligonucleotide
augaaauggcugacaucau

SEQ ID NO: 2596634 - RNA, 19 nt, Artificial Sequence
  Description of Artificial Sequence: Synthetic oligonucleotide
gguguccaguggcuuauaa

SEQ ID NO: 2596635 - RNA, 19 nt, Artificial Sequence
  Description of Artificial Sequence: Synthetic oligonucleotide
caagcacaucauacugcaa

SEQ ID NO: 2596636 - RNA, 19 nt, Artificial Sequence
  Description of Artificial Sequence: Synthetic oligonucleotide
ucccaccauuugucacacc

SEQ ID NO: 2596637 - RNA, 19 nt, Artificial Sequence
  Description of Artificial Sequence: Synthetic oligonucleotide
ccuuggaaaucacgucuuc

SEQ ID NO: 2596638 - RNA, 19 nt, Artificial Sequence
  Description of Artificial Sequence: Synthetic oligonucleotide
cugagauauuaugcugcaa

SEQ ID NO: 2596639 - RNA, 19 nt, Artificial Sequence
  Description of Artificial Sequence: Synthetic oligonucleotide
auccaucgcaggaggacuu

SEQ ID NO: 2596640 - RNA, 19 nt, Artificial Sequence
  Description of Artificial Sequence: Synthetic oligonucleotide
ccaucuagguaaacaauau

SEQ ID NO: 2596641 - RNA, 19 nt, Artificial Sequence
  Description of Artificial Sequence: Synthetic oligonucleotide
gucacaccgccaauuccaa

SEQ ID NO: 2596642 - RNA, 19 nt, Artificial Sequence
  Description of Artificial Sequence: Synthetic oligonucleotide
caucgcaggaggacuugcu

SEQ ID NO: 2596643 - RNA, 19 nt, Artificial Sequence
  Description of Artificial Sequence: Synthetic oligonucleotide
agacuccggcuugaagaaa

SEQ ID NO: 2596644 - RNA, 19 nt, Artificial Sequence
  Description of Artificial Sequence: Synthetic oligonucleotide
ccaguggcuuauaauuaaa

SEQ ID NO: 2596645 - RNA, 19 nt, Artificial Sequence
  Description of Artificial Sequence: Synthetic oligonucleotide
guuguuucugcaaguucuu

SEQ ID NO: 2596646 - RNA, 19 nt, Artificial Sequence
  Description of Artificial Sequence: Synthetic oligonucleotide
caggaggcucauauacccu

SEQ ID NO: 2596647 - RNA, 19 nt, Artificial Sequence
  Description of Artificial Sequence: Synthetic oligonucleotide
gugaugguguucauuucuu

SEQ ID NO: 2596648 - RNA, 19 nt, Artificial Sequence
  Description of Artificial Sequence: Synthetic oligonucleotide
uccuccccggcagggccgc

SEQ ID NO: 2596649 - RNA, 19 nt, Artificial Sequence
  Description of Artificial Sequence: Synthetic oligonucleotide
cugcagagugcccuggguu

SEQ ID NO: 2596650 - RNA, 19 nt, Artificial Sequence
  Description of Artificial Sequence: Synthetic oligonucleotide
guuuuccauccaacaugaa

SEQ ID NO: 2596651 - RNA, 19 nt, Artificial Sequence
  Description of Artificial Sequence: Synthetic oligonucleotide
ccaucgcaggaggacuugc

SEQ ID NO: 2596652 - RNA, 19 nt, Artificial Sequence
  Description of Artificial Sequence: Synthetic oligonucleotide
cuccucuuacauucuucau

SEQ ID NO: 2596653 - RNA, 19 nt, Artificial Sequence
  Description of Artificial Sequence: Synthetic oligonucleotide
gccuccucuuacauucuuc

SEQ ID NO: 2596654 - RNA, 19 nt, Artificial Sequence
  Description of Artificial Sequence: Synthetic oligonucleotide
gcaaguucuuagccagagu

SEQ ID NO: 2596655 - RNA, 19 nt, Artificial Sequence
  Description of Artificial Sequence: Synthetic oligonucleotide
cggguucgaguccuccccg

SEQ ID NO: 2596656 - RNA, 19 nt, Artificial Sequence
  Description of Artificial Sequence: Synthetic oligonucleotide
cauuugucacaccgccaau

SEQ ID NO: 2596657 - RNA, 19 nt, Artificial Sequence
  Description of Artificial Sequence: Synthetic oligonucleotide
cgcaggaggacuugcugca

SEQ ID NO: 2596658 - RNA, 19 nt, Artificial Sequence
  Description of Artificial Sequence: Synthetic oligonucleotide
gaggucuucuucagaucuu

SEQ ID NO: 2596659 - RNA, 19 nt, Artificial Sequence
  Description of Artificial Sequence: Synthetic oligonucleotide
ugguguccaguggcuuaua

SEQ ID NO: 2596660 - RNA, 19 nt, Artificial Sequence
  Description of Artificial Sequence: Synthetic oligonucleotide
gggucaggaggcucauaua

SEQ ID NO: 2596661 - RNA, 19 nt, Artificial Sequence
  Description of Artificial Sequence: Synthetic oligonucleotide
gggccacacauggccauca

SEQ ID NO: 2596662 - RNA, 19 nt, Artificial Sequence
  Description of Artificial Sequence: Synthetic oligonucleotide
ccaucguugcacuguuacu

SEQ ID NO: 2596663 - RNA, 19 nt, Artificial Sequence
  Description of Artificial Sequence: Synthetic oligonucleotide
gagggucaggaggcucaua

SEQ ID NO: 2596664 - RNA, 19 nt, Artificial Sequence
  Description of Artificial Sequence: Synthetic oligonucleotide
augcugcaauugggaaguu

SEQ ID NO: 2596665 - RNA, 19 nt, Artificial Sequence
  Description of Artificial Sequence: Synthetic oligonucleotide
ggccacacauggccaucaa

SEQ ID NO: 2596666 - RNA, 19 nt, Artificial Sequence
  Description of Artificial Sequence: Synthetic oligonucleotide
ggaacccuuugagaacuuu

SEQ ID NO: 2596667 - RNA, 19 nt, Artificial Sequence
  Description of Artificial Sequence: Synthetic oligonucleotide
gccuuggaaaucacgucuu

SEQ ID NO: 2596668 - RNA, 19 nt, Artificial Sequence
  Description of Artificial Sequence: Synthetic oligonucleotide
cuccgccuccucuuacauu

SEQ ID NO: 2596669 - RNA, 19 nt, Artificial Sequence
  Description of Artificial Sequence: Synthetic oligonucleotide
cgccaauuccaaugacaaa

SEQ ID NO: 2596670 - RNA, 19 nt, Artificial Sequence
  Description of Artificial Sequence: Synthetic oligonucleotide
ccugcagagugcccugggu

SEQ ID NO: 2596671 - RNA, 19 nt, Artificial Sequence
  Description of Artificial Sequence: Synthetic oligonucleotide
ccaagugaugguguucauu

SEQ ID NO: 2596672 - RNA, 19 nt, Artificial Sequence
  Description of Artificial Sequence: Synthetic oligonucleotide
gcccuggguuuuccaucca

SEQ ID NO: 2596673 - RNA, 19 nt, Artificial Sequence
  Description of Artificial Sequence: Synthetic oligonucleotide
gcagagugcccuggguuuu

SEQ ID NO: 2596674 - RNA, 19 nt, Artificial Sequence
  Description of Artificial Sequence: Synthetic oligonucleotide
ccgccuccucuuacauucu

SEQ ID NO: 2596675 - RNA, 19 nt, Artificial Sequence
  Description of Artificial Sequence: Synthetic oligonucleotide
aaaguaaacacugagguca

SEQ ID NO: 2596676 - RNA, 19 nt, Artificial Sequence
  Description of Artificial Sequence: Synthetic oligonucleotide
agaaaguaaacacugaggu

SEQ ID NO: 2596677 - RNA, 19 nt, Artificial Sequence
  Description of Artificial Sequence: Synthetic oligonucleotide
aucagagucgcccugauuc

SEQ ID NO: 2596678 - RNA, 19 nt, Artificial Sequence
  Description of Artificial Sequence: Synthetic oligonucleotide
ugauguaucgagcaacagg

SEQ ID NO: 2596679 - RNA, 19 nt, Artificial Sequence
  Description of Artificial Sequence: Synthetic oligonucleotide
ucgagcaacaggcagaaag

SEQ ID NO: 2596680 - RNA, 19 nt, Artificial Sequence
  Description of Artificial Sequence: Synthetic oligonucleotide
gauguaucgagcaacaggc

SEQ ID NO: 2596681 - RNA, 19 nt, Artificial Sequence
  Description of Artificial Sequence: Synthetic oligonucleotide
aaagaagggauuaucauca

SEQ ID NO: 2596682 - RNA, 19 nt, Artificial Sequence
  Description of Artificial Sequence: Synthetic oligonucleotide
uuaucaucagccucaaugc

SEQ ID NO: 2596683 - RNA, 19 nt, Artificial Sequence
  Description of Artificial Sequence: Synthetic oligonucleotide
gaagggauuaucaucagcc

SEQ ID NO: 2596684 - RNA, 19 nt, Artificial Sequence
  Description of Artificial Sequence: Synthetic oligonucleotide
aaugccauaguacuccaca

SEQ ID NO: 2596685 - RNA, 19 nt, Artificial Sequence
  Description of Artificial Sequence: Synthetic oligonucleotide
uguaaggagauccugccca

SEQ ID NO: 2596686 - RNA, 19 nt, Artificial Sequence
  Description of Artificial Sequence: Synthetic oligonucleotide
acaacuguggcagagcggc

SEQ ID NO: 2596687 - RNA, 19 nt, Artificial Sequence
  Description of Artificial Sequence: Synthetic oligonucleotide
uguaucgagcaacaggcag

SEQ ID NO: 2596688 - RNA, 19 nt, Artificial Sequence
  Description of Artificial Sequence: Synthetic oligonucleotide
agugaguccauccuguaag

SEQ ID NO: 2596689 - RNA, 19 nt, Artificial Sequence
  Description of Artificial Sequence: Synthetic oligonucleotide
cuuuggggaguauugaggg

SEQ ID NO: 2596690 - RNA, 19 nt, Artificial Sequence
  Description of Artificial Sequence: Synthetic oligonucleotide
gaaucuuuggccuccgaag

SEQ ID NO: 2596691 - RNA, 19 nt, Artificial Sequence
  Description of Artificial Sequence: Synthetic oligonucleotide
ucgcagaucaugaggaagg

SEQ ID NO: 2596692 - RNA, 19 nt, Artificial Sequence
  Description of Artificial Sequence: Synthetic oligonucleotide
gagacugccauccccaggg

SEQ ID NO: 2596693 - RNA, 19 nt, Artificial Sequence
  Description of Artificial Sequence: Synthetic oligonucleotide
cagaaaguaaacacugagg

SEQ ID NO: 2596694 - RNA, 19 nt, Artificial Sequence
  Description of Artificial Sequence: Synthetic oligonucleotide
aguuggggcagauaucucg

SEQ ID NO: 2596695 - RNA, 19 nt, Artificial Sequence
  Description of Artificial Sequence: Synthetic oligonucleotide
aauacucagggucgucugg

SEQ ID NO: 2596696 - RNA, 19 nt, Artificial Sequence
  Description of Artificial Sequence: Synthetic oligonucleotide
agaagggauuaucaucagc

SEQ ID NO: 2596697 - RNA, 19 nt, Artificial Sequence
  Description of Artificial Sequence: Synthetic oligonucleotide
guugaugugggucugugug

SEQ ID NO: 2596698 - RNA, 19 nt, Artificial Sequence
  Description of Artificial Sequence: Synthetic oligonucleotide
ugcgcagugaaccagcacu

SEQ ID NO: 2596699 - RNA, 19 nt, Artificial Sequence
  Description of Artificial Sequence: Synthetic oligonucleotide
agaaagccugaguuggggc

SEQ ID NO: 2596700 - RNA, 19 nt, Artificial Sequence
  Description of Artificial Sequence: Synthetic oligonucleotide
caaagaagggauuaucauc

SEQ ID NO: 2596701 - RNA, 19 nt, Artificial Sequence
  Description of Artificial Sequence: Synthetic oligonucleotide
uguacugccggcuuccagc

SEQ ID NO: 2596702 - RNA, 19 nt, Artificial Sequence
  Description of Artificial Sequence: Synthetic oligonucleotide
uaaacacugaggucaaaga

SEQ ID NO: 2596703 - RNA, 19 nt, Artificial Sequence
  Description of Artificial Sequence: Synthetic oligonucleotide
ucugcagugaggcuagugu

SEQ ID NO: 2596704 - RNA, 19 nt, Artificial Sequence
  Description of Artificial Sequence: Synthetic oligonucleotide
aucucggugggccugcacc

SEQ ID NO: 2596705 - RNA, 19 nt, Artificial Sequence
  Description of Artificial Sequence: Synthetic oligonucleotide
aaauacucagggucgucug

SEQ ID NO: 2596706 - RNA, 19 nt, Artificial Sequence
  Description of Artificial Sequence: Synthetic oligonucleotide
agggauuaucaucagccuc

SEQ ID NO: 2596707 - RNA, 19 nt, Artificial Sequence
  Description of Artificial Sequence: Synthetic oligonucleotide
ucugauguaucgagcaaca

SEQ ID NO: 2596708 - RNA, 19 nt, Artificial Sequence
  Description of Artificial Sequence: Synthetic oligonucleotide
gaguccauccuguaaggag

SEQ ID NO: 2596709 - RNA, 19 nt, Artificial Sequence
  Description of Artificial Sequence: Synthetic oligonucleotide
ucaaagaagggauuaucau

SEQ ID NO: 2596710 - RNA, 19 nt, Artificial Sequence
  Description of Artificial Sequence: Synthetic oligonucleotide
aguuccacggaccucguug

SEQ ID NO: 2596711 - RNA, 19 nt, Artificial Sequence
  Description of Artificial Sequence: Synthetic oligonucleotide
aguacuccacagaaguucc

SEQ ID NO: 2596712 - RNA, 19 nt, Artificial Sequence
  Description of Artificial Sequence: Synthetic oligonucleotide
cagccuguuguccagaacc

SEQ ID NO: 2596713 - RNA, 19 nt, Artificial Sequence
  Description of Artificial Sequence: Synthetic oligonucleotide
uccuguaaggagauccugc

SEQ ID NO: 2596714 - RNA, 19 nt, Artificial Sequence
  Description of Artificial Sequence: Synthetic oligonucleotide
uggagcgcugacuugcugg

SEQ ID NO: 2596715 - RNA, 19 nt, Artificial Sequence
  Description of Artificial Sequence: Synthetic oligonucleotide
uaucaucagccucaaugcc

SEQ ID NO: 2596716 - RNA, 19 nt, Artificial Sequence
  Description of Artificial Sequence: Synthetic oligonucleotide
cuccacagaaguuccacgg

SEQ ID NO: 2596717 - RNA, 19 nt, Artificial Sequence
  Description of Artificial Sequence: Synthetic oligonucleotide
gaaaguaaacacugagguc

SEQ ID NO: 2596718 - RNA, 19 nt, Artificial Sequence
  Description of Artificial Sequence: Synthetic oligonucleotide
uugaugugggucugugugg

SEQ ID NO: 2596719 - RNA, 19 nt, Artificial Sequence
  Description of Artificial Sequence: Synthetic oligonucleotide
ucaggcgcucccuaaauca

SEQ ID NO: 2596720 - RNA, 19 nt, Artificial Sequence
  Description of Artificial Sequence: Synthetic oligonucleotide
cagaucaugaggaaggcca

SEQ ID NO: 2596721 - RNA, 19 nt, Artificial Sequence
  Description of Artificial Sequence: Synthetic oligonucleotide
acugccggcuuccagccgc

SEQ ID NO: 2596722 - RNA, 19 nt, Artificial Sequence
  Description of Artificial Sequence: Synthetic oligonucleotide
aagggauuaucaucagccu

SEQ ID NO: 2596723 - RNA, 19 nt, Artificial Sequence
  Description of Artificial Sequence: Synthetic oligonucleotide
cucaacugccccaugaauc

SEQ ID NO: 2596724 - RNA, 19 nt, Artificial Sequence
  Description of Artificial Sequence: Synthetic oligonucleotide
ugaaucuuuggccuccgaa

SEQ ID NO: 2596725 - RNA, 19 nt, Artificial Sequence
  Description of Artificial Sequence: Synthetic oligonucleotide
ucgagguugggccacgcug

SEQ ID NO: 2596726 - RNA, 19 nt, Artificial Sequence
  Description of Artificial Sequence: Synthetic oligonucleotide
gcagaaaguaaacacugag

SEQ ID NO: 2596727 - RNA, 19 nt, Artificial Sequence
  Description of Artificial Sequence: Synthetic oligonucleotide
agugucauguucucgcaga

SEQ ID NO: 2596728 - RNA, 19 nt, Artificial Sequence
  Description of Artificial Sequence: Synthetic oligonucleotide
ucggcuuuggggaguauug

SEQ ID NO: 2596729 - RNA, 19 nt, Artificial Sequence
  Description of Artificial Sequence: Synthetic oligonucleotide
uuguccagaaccuggaguu

SEQ ID NO: 2596730 - RNA, 19 nt, Artificial Sequence
  Description of Artificial Sequence: Synthetic oligonucleotide
uaguacuccacagaaguuc

SEQ ID NO: 2596731 - RNA, 19 nt, Artificial Sequence
  Description of Artificial Sequence: Synthetic oligonucleotide
ugcagugaguccauccugu

SEQ ID NO: 2596732 - RNA, 19 nt, Artificial Sequence
  Description of Artificial Sequence: Synthetic oligonucleotide
acagaaguuccacggaccu

SEQ ID NO: 2596733 - RNA, 19 nt, Artificial Sequence
  Description of Artificial Sequence: Synthetic oligonucleotide
uguucucgcagaucaugag

SEQ ID NO: 2596734 - RNA, 19 nt, Artificial Sequence
  Description of Artificial Sequence: Synthetic oligonucleotide
  modified_base (11)..(11): a, c, u, g, unknown or other
augcuguuucnguggagac

SEQ ID NO: 2596735 - RNA, 19 nt, Artificial Sequence
  Description of Artificial Sequence: Synthetic oligonucleotide
ggaguugucggagaaagcc

SEQ ID NO: 2596736 - RNA, 19 nt, Artificial Sequence
  Description of Artificial Sequence: Synthetic oligonucleotide
cacagaaguuccacggacc

SEQ ID NO: 2596737 - RNA, 19 nt, Artificial Sequence
  Description of Artificial Sequence: Synthetic oligonucleotide
cuggaguugucggagaaag

SEQ ID NO: 2596738 - RNA, 19 nt, Artificial Sequence
  Description of Artificial Sequence: Synthetic oligonucleotide
aaagccugaguuggggcag

SEQ ID NO: 2596739 - RNA, 19 nt, Artificial Sequence
  Description of Artificial Sequence: Synthetic oligonucleotide
aguauugagggcaucucug

SEQ ID NO: 2596740 - RNA, 19 nt, Artificial Sequence
  Description of Artificial Sequence: Synthetic oligonucleotide
  modified_base (12)..(12): a, c, u, g, unknown or other
gaugcuguuucnguggaga

SEQ ID NO: 2596741 - RNA, 19 nt, Artificial Sequence
  Description of Artificial Sequence: Synthetic oligonucleotide
aguguguacugccggcuuc

SEQ ID NO: 2596742 - RNA, 19 nt, Artificial Sequence
  Description of Artificial Sequence: Synthetic oligonucleotide
ugccauaguacuccacaga

SEQ ID NO: 2596743 - RNA, 19 nt, Artificial Sequence
  Description of Artificial Sequence: Synthetic oligonucleotide
cagugaaccagcacucggc

SEQ ID NO: 2596744 - RNA, 19 nt, Artificial Sequence
  Description of Artificial Sequence: Synthetic oligonucleotide
agugaggcuagugugggug

SEQ ID NO: 2596745 - RNA, 19 nt, Artificial Sequence
  Description of Artificial Sequence: Synthetic oligonucleotide
caggcuguagucuucucug

SEQ ID NO: 2596746 - RNA, 19 nt, Artificial Sequence
  Description of Artificial Sequence: Synthetic oligonucleotide
ugauucccgccucagccug

SEQ ID NO: 2596747 - RNA, 19 nt, Artificial Sequence
  Description of Artificial Sequence: Synthetic oligonucleotide
aggcagaaaguaaacacug

SEQ ID NO: 2596748 - RNA, 19 nt, Artificial Sequence
  Description of Artificial Sequence: Synthetic oligonucleotide
cauugcgcagugaaccagc

SEQ ID NO: 2596749 - RNA, 19 nt, Artificial Sequence
  Description of Artificial Sequence: Synthetic oligonucleotide
ggacaacuguggcagagcg

SEQ ID NO: 2596750 - RNA, 19 nt, Artificial Sequence
  Description of Artificial Sequence: Synthetic oligonucleotide
agugaaccagcacucggcu

SEQ ID NO: 2596751 - RNA, 19 nt, Artificial Sequence
  Description of Artificial Sequence: Synthetic oligonucleotide
uccacagaaguuccacgga

SEQ ID NO: 2596752 - RNA, 19 nt, Artificial Sequence
  Description of Artificial Sequence: Synthetic oligonucleotide
cucccuaaaucagagucgc

SEQ ID NO: 2596753 - RNA, 19 nt, Artificial Sequence
  Description of Artificial Sequence: Synthetic oligonucleotide
uaaaucagagucgcccuga

SEQ ID NO: 2596754 - RNA, 19 nt, Artificial Sequence
  Description of Artificial Sequence: Synthetic oligonucleotide
agaaccuggaguugucgga

SEQ ID NO: 2596755 - RNA, 19 nt, Artificial Sequence
  Description of Artificial Sequence: Synthetic oligonucleotide
agccucaaugccauaguac

SEQ ID NO: 2596756 - RNA, 19 nt, Artificial Sequence
  Description of Artificial Sequence: Synthetic oligonucleotide
ggggcagauaucucggugg

SEQ ID NO: 2596757 - RNA, 19 nt, Artificial Sequence
  Description of Artificial Sequence: Synthetic oligonucleotide
augugggucuguguggugg

SEQ ID NO: 2596758 - RNA, 19 nt, Artificial Sequence
  Description of Artificial Sequence: Synthetic oligonucleotide
guuggggcagauaucucgg

SEQ ID NO: 2596759 - RNA, 19 nt, Artificial Sequence
  Description of Artificial Sequence: Synthetic oligonucleotide
uggggcagauaucucggug

SEQ ID NO: 2596760 - RNA, 19 nt, Artificial Sequence
  Description of Artificial Sequence: Synthetic oligonucleotide
cuguguggugguccgacgg

SEQ ID NO: 2596761 - RNA, 19 nt, Artificial Sequence
  Description of Artificial Sequence: Synthetic oligonucleotide
cuaaaucagagucgcccug

SEQ ID NO: 2596762 - RNA, 19 nt, Artificial Sequence
  Description of Artificial Sequence: Synthetic oligonucleotide
  modified_base (9)..(9): a, c, u, g, unknown or other
gcuguuucnguggagacug

SEQ ID NO: 2596763 - RNA, 19 nt, Artificial Sequence
  Description of Artificial Sequence: Synthetic oligonucleotide
uauugagggcaucucugau

SEQ ID NO: 2596764 - RNA, 19 nt, Artificial Sequence
  Description of Artificial Sequence: Synthetic oligonucleotide
ucuguguggugguccgacg

SEQ ID NO: 2596765 - RNA, 19 nt, Artificial Sequence
  Description of Artificial Sequence: Synthetic oligonucleotide
cuuuggccuccgaaggucc

SEQ ID NO: 2596766 - RNA, 19 nt, Artificial Sequence
  Description of Artificial Sequence: Synthetic oligonucleotide
  modified_base (13)..(13): a, c, u, g, unknown or other
ugaugcuguuucnguggag

SEQ ID NO: 2596767 - RNA, 19 nt, Artificial Sequence
  Description of Artificial Sequence: Synthetic oligonucleotide
gucgucuggaaacagcaga

SEQ ID NO: 2596768 - RNA, 19 nt, Artificial Sequence
  Description of Artificial Sequence: Synthetic oligonucleotide
ugguccgacggacccacag

SEQ ID NO: 2596769 - RNA, 19 nt, Artificial Sequence
  Description of Artificial Sequence: Synthetic oligonucleotide
guaaggagauccugcccag

SEQ ID NO: 2596770 - RNA, 19 nt, Artificial Sequence
  Description of Artificial Sequence: Synthetic oligonucleotide
cucugauguaucgagcaac

SEQ ID NO: 2596771 - RNA, 19 nt, Artificial Sequence
  Description of Artificial Sequence: Synthetic oligonucleotide
  modified_base (10)..(10): a, c, u, g, unknown or other
ugcuguuucnguggagacu

SEQ ID NO: 2596772 - RNA, 19 nt, Artificial Sequence
  Description of Artificial Sequence: Synthetic oligonucleotide
ucucugauguaucgagcaa

SEQ ID NO: 2596773 - RNA, 19 nt, Artificial Sequence
  Description of Artificial Sequence: Synthetic oligonucleotide
uguguggugguccgacgga

SEQ ID NO: 2596774 - RNA, 19 nt, Artificial Sequence
  Description of Artificial Sequence: Synthetic oligonucleotide
uggcgggacaccucaacug

SEQ ID NO: 2596775 - RNA, 19 nt, Artificial Sequence
  Description of Artificial Sequence: Synthetic oligonucleotide
caggcaguguguacugccg

SEQ ID NO: 2596776 - RNA, 19 nt, Artificial Sequence
  Description of Artificial Sequence: Synthetic oligonucleotide
aggcaguguguacugccgg

SEQ ID NO: 2596777 - RNA, 19 nt, Artificial Sequence
  Description of Artificial Sequence: Synthetic oligonucleotide
ccuguuguccagaaccugg

SEQ ID NO: 2596778 - RNA, 19 nt, Artificial Sequence
  Description of Artificial Sequence: Synthetic oligonucleotide
gccugcaccgucuggaugg

SEQ ID NO: 2596779 - RNA, 19 nt, Artificial Sequence
  Description of Artificial Sequence: Synthetic oligonucleotide
uggcagagcggcuuacccc

SEQ ID NO: 2596780 - RNA, 19 nt, Artificial Sequence
  Description of Artificial Sequence: Synthetic oligonucleotide
cauguucucgcagaucaug

SEQ ID NO: 2596781 - RNA, 19 nt, Artificial Sequence
  Description of Artificial Sequence: Synthetic oligonucleotide
uguggugguccgacggacc

SEQ ID NO: 2596782 - RNA, 19 nt, Artificial Sequence
  Description of Artificial Sequence: Synthetic oligonucleotide
aguugucggagaaagccug

SEQ ID NO: 2596783 - RNA, 19 nt, Artificial Sequence
  Description of Artificial Sequence: Synthetic oligonucleotide
aaaucagagucgcccugau

SEQ ID NO: 2596784 - RNA, 19 nt, Artificial Sequence
  Description of Artificial Sequence: Synthetic oligonucleotide
cuguaaggagauccugccc

SEQ ID NO: 2596785 - RNA, 19 nt, Artificial Sequence
  Description of Artificial Sequence: Synthetic oligonucleotide
  modified_base (18)..(18): a, c, u, g, unknown or other
acacuugaugcuguuucng

SEQ ID NO: 2596786 - RNA, 19 nt, Artificial Sequence
  Description of Artificial Sequence: Synthetic oligonucleotide
acggaccucguugaugugg

SEQ ID NO: 2596787 - RNA, 19 nt, Artificial Sequence
  Description of Artificial Sequence: Synthetic oligonucleotide
ugucggagaaagccugagu

SEQ ID NO: 2596788 - RNA, 19 nt, Artificial Sequence
  Description of Artificial Sequence: Synthetic oligonucleotide
uggaguugucggagaaagc

SEQ ID NO: 2596789 - RNA, 19 nt, Artificial Sequence
  Description of Artificial Sequence: Synthetic oligonucleotide
gcagauaucucggugggcc

SEQ ID NO: 2596790 - RNA, 19 nt, Artificial Sequence
  Description of Artificial Sequence: Synthetic oligonucleotide
ugaugugggucuguguggu

SEQ ID NO: 2596791 - RNA, 19 nt, Artificial Sequence
  Description of Artificial Sequence: Synthetic oligonucleotide
ucugacaggcaguguguac

SEQ ID NO: 2596792 - RNA, 19 nt, Artificial Sequence
  Description of Artificial Sequence: Synthetic oligonucleotide
ugaggucaaagaagggauu

SEQ ID NO: 2596793 - RNA, 19 nt, Artificial Sequence
  Description of Artificial Sequence: Synthetic oligonucleotide
cucgcagaucaugaggaag

SEQ ID NO: 2596794 - RNA, 19 nt, Artificial Sequence
  Description of Artificial Sequence: Synthetic oligonucleotide
ggcaggucgagguugggcc

SEQ ID NO: 2596795 - RNA, 19 nt, Artificial Sequence
  Description of Artificial Sequence: Synthetic oligonucleotide
uaucgagcaacaggcagaa

SEQ ID NO: 2596796 - RNA, 19 nt, Artificial Sequence
  Description of Artificial Sequence: Synthetic oligonucleotide
gacaacuguggcagagcgg

SEQ ID NO: 2596797 - RNA, 19 nt, Artificial Sequence
  Description of Artificial Sequence: Synthetic oligonucleotide
gugaggcuagugugggugg

SEQ ID NO: 2596798 - RNA, 19 nt, Artificial Sequence
  Description of Artificial Sequence: Synthetic oligonucleotide
uucaggcgcucccuaaauc

SEQ ID NO: 2596799 - RNA, 19 nt, Artificial Sequence
  Description of Artificial Sequence: Synthetic oligonucleotide
uagucuucucugacaggca

SEQ ID NO: 2596800 - RNA, 19 nt, Artificial Sequence
  Description of Artificial Sequence: Synthetic oligonucleotide
ggagauccugcccaggcug

SEQ ID NO: 2596801 - RNA, 19 nt, Artificial Sequence
  Description of Artificial Sequence: Synthetic oligonucleotide
gcuuuggggaguauugagg

SEQ ID NO: 2596802 - RNA, 19 nt, Artificial Sequence
  Description of Artificial Sequence: Synthetic oligonucleotide
ccuguaaggagauccugcc

SEQ ID NO: 2596803 - RNA, 19 nt, Artificial Sequence
  Description of Artificial Sequence: Synthetic oligonucleotide
agggucgucuggaaacagc

SEQ ID NO: 2596804 - RNA, 19 nt, Artificial Sequence
  Description of Artificial Sequence: Synthetic oligonucleotide
aucuuuggccuccgaaggu

SEQ ID NO: 2596805 - RNA, 19 nt, Artificial Sequence
  Description of Artificial Sequence: Synthetic oligonucleotide
caguggagcgcugacuugc

SEQ ID NO: 2596806 - RNA, 19 nt, Artificial Sequence
  Description of Artificial Sequence: Synthetic oligonucleotide
ucccgccucagccuguugu

SEQ ID NO: 2596807 - RNA, 19 nt, Artificial Sequence
  Description of Artificial Sequence: Synthetic oligonucleotide
ucuuuggccuccgaagguc

SEQ ID NO: 2596808 - RNA, 19 nt, Artificial Sequence
  Description of Artificial Sequence: Synthetic oligonucleotide
aaccuggaguugucggaga

SEQ ID NO: 2596809 - RNA, 19 nt, Artificial Sequence
  Description of Artificial Sequence: Synthetic oligonucleotide
guggcagagcggcuuaccc

SEQ ID NO: 2596810 - RNA, 19 nt, Artificial Sequence
  Description of Artificial Sequence: Synthetic oligonucleotide
ucucugcacacuugaugcu

SEQ ID NO: 2596811 - RNA, 19 nt, Artificial Sequence
  Description of Artificial Sequence: Synthetic oligonucleotide
cccuaaaucagagucgccc

SEQ ID NO: 2596812 - RNA, 19 nt, Artificial Sequence
  Description of Artificial Sequence: Synthetic oligonucleotide
guacugccggcuuccagcc

SEQ ID NO: 2596813 - RNA, 19 nt, Artificial Sequence
  Description of Artificial Sequence: Synthetic oligonucleotide
uugucggagaaagccugag

SEQ ID NO: 2596814 - RNA, 19 nt, Artificial Sequence
  Description of Artificial Sequence: Synthetic oligonucleotide
gaguauugagggcaucucu

SEQ ID NO: 2596815 - RNA, 19 nt, Artificial Sequence
  Description of Artificial Sequence: Synthetic oligonucleotide
gcagugaaccagcacucgg

SEQ ID NO: 2596816 - RNA, 19 nt, Artificial Sequence
  Description of Artificial Sequence: Synthetic oligonucleotide
ugaguccauccuguaagga

SEQ ID NO: 2596817 - RNA, 19 nt, Artificial Sequence
  Description of Artificial Sequence: Synthetic oligonucleotide
aggcaggucgagguugggc

SEQ ID NO: 2596818 - RNA, 19 nt, Artificial Sequence
  Description of Artificial Sequence: Synthetic oligonucleotide
ugcaccgucuggauggcuu

SEQ ID NO: 2596819 - RNA, 19 nt, Artificial Sequence
  Description of Artificial Sequence: Synthetic oligonucleotide
gggauuaucaucagccuca

SEQ ID NO: 2596820 - RNA, 19 nt, Artificial Sequence
  Description of Artificial Sequence: Synthetic oligonucleotide
agacugccauccccagggc

SEQ ID NO: 2596821 - RNA, 19 nt, Artificial Sequence
  Description of Artificial Sequence: Synthetic oligonucleotide
guaucgagcaacaggcaga

SEQ ID NO: 2596822 - RNA, 19 nt, Artificial Sequence
  Description of Artificial Sequence: Synthetic oligonucleotide
guggugguccgacggaccc

SEQ ID NO: 2596823 - RNA, 19 nt, Artificial Sequence
  Description of Artificial Sequence: Synthetic oligonucleotide
gccccaugaaucuuuggcc

SEQ ID NO: 2596824 - RNA, 19 nt, Artificial Sequence
  Description of Artificial Sequence: Synthetic oligonucleotide
aaucagagucgcccugauu

SEQ ID NO: 2596825 - RNA, 19 nt, Artificial Sequence
  Description of Artificial Sequence: Synthetic oligonucleotide
ucagggucgucuggaaaca

SEQ ID NO: 2596826 - RNA, 19 nt, Artificial Sequence
  Description of Artificial Sequence: Synthetic oligonucleotide
caggcgcucccuaaaucag

SEQ ID NO: 2596827 - RNA, 19 nt, Artificial Sequence
  Description of Artificial Sequence: Synthetic oligonucleotide
agcgcugacuugcuggaaa

SEQ ID NO: 2596828 - RNA, 19 nt, Artificial Sequence
  Description of Artificial Sequence: Synthetic oligonucleotide
ggggucagggcuucaggcg

SEQ ID NO: 2596829 - RNA, 19 nt, Artificial Sequence
  Description of Artificial Sequence: Synthetic oligonucleotide
cucugcacacuugaugcug

SEQ ID NO: 2596830 - RNA, 19 nt, Artificial Sequence
  Description of Artificial Sequence: Synthetic oligonucleotide
ucagccuguuguccagaac

SEQ ID NO: 2596831 - RNA, 19 nt, Artificial Sequence
  Description of Artificial Sequence: Synthetic oligonucleotide
ugugggucugugugguggu

SEQ ID NO: 2596832 - RNA, 19 nt, Artificial Sequence
  Description of Artificial Sequence: Synthetic oligonucleotide
cagugucauguucucgcag

SEQ ID NO: 2596833 - RNA, 19 nt, Artificial Sequence
  Description of Artificial Sequence: Synthetic oligonucleotide
ucccuaaaucagagucgcc

SEQ ID NO: 2596834 - RNA, 19 nt, Artificial Sequence
  Description of Artificial Sequence: Synthetic oligonucleotide
gggcaucucugauguaucg

SEQ ID NO: 2596835 - RNA, 19 nt, Artificial Sequence
  Description of Artificial Sequence: Synthetic oligonucleotide
uuuggccuccgaagguccu

SEQ ID NO: 2596836 - RNA, 19 nt, Artificial Sequence
  Description of Artificial Sequence: Synthetic oligonucleotide
uccacggaccucguugaug

SEQ ID NO: 2596837 - RNA, 19 nt, Artificial Sequence
  Description of Artificial Sequence: Synthetic oligonucleotide
gggcagauaucucgguggg

SEQ ID NO: 2596838 - RNA, 19 nt, Artificial Sequence
  Description of Artificial Sequence: Synthetic oligonucleotide
guuccacggaccucguuga

SEQ ID NO: 2596839 - RNA, 19 nt, Artificial Sequence
  Description of Artificial Sequence: Synthetic oligonucleotide
aggagauccugcccaggcu

SEQ ID NO: 2596840 - RNA, 19 nt, Artificial Sequence
  Description of Artificial Sequence: Synthetic oligonucleotide
gucggagaaagccugaguu

SEQ ID NO: 2596841 - RNA, 19 nt, Artificial Sequence
  Description of Artificial Sequence: Synthetic oligonucleotide
agauaucucggugggccug

SEQ ID NO: 2596842 - RNA, 19 nt, Artificial Sequence
  Description of Artificial Sequence: Synthetic oligonucleotide
gcucccuaaaucagagucg

SEQ ID NO: 2596843 - RNA, 19 nt, Artificial Sequence
  Description of Artificial Sequence: Synthetic oligonucleotide
cuaccagugucauguucuc

SEQ ID NO: 2596844 - RNA, 19 nt, Artificial Sequence
  Description of Artificial Sequence: Synthetic oligonucleotide
ucguugaugugggucugug

SEQ ID NO: 2596845 - RNA, 19 nt, Artificial Sequence
  Description of Artificial Sequence: Synthetic oligonucleotide
caugaaucuuuggccuccg

SEQ ID NO: 2596846 - RNA, 19 nt, Artificial Sequence
  Description of Artificial Sequence: Synthetic oligonucleotide
agagucgcccugauucccg

SEQ ID NO: 2596847 - RNA, 19 nt, Artificial Sequence
  Description of Artificial Sequence: Synthetic oligonucleotide
cugaggucaaagaagggau

SEQ ID NO: 2596848 - RNA, 19 nt, Artificial Sequence
  Description of Artificial Sequence: Synthetic oligonucleotide
ucauguucucgcagaucau

SEQ ID NO: 2596849 - RNA, 19 nt, Artificial Sequence
  Description of Artificial Sequence: Synthetic oligonucleotide
auacucagggucgucugga

SEQ ID NO: 2596850 - RNA, 19 nt, Artificial Sequence
  Description of Artificial Sequence: Synthetic oligonucleotide
guccgacggacccacagca

SEQ ID NO: 2596851 - RNA, 19 nt, Artificial Sequence
  Description of Artificial Sequence: Synthetic oligonucleotide
ggcgggacaccucaacugc

SEQ ID NO: 2596852 - RNA, 19 nt, Artificial Sequence
  Description of Artificial Sequence: Synthetic oligonucleotide
aacuguggcagagcggcuu

SEQ ID NO: 2596853 - RNA, 19 nt, Artificial Sequence
  Description of Artificial Sequence: Synthetic oligonucleotide
guugggccacgcuggagug

SEQ ID NO: 2596854 - RNA, 19 nt, Artificial Sequence
  Description of Artificial Sequence: Synthetic oligonucleotide
  modified_base (19)..(19): a, c, u, g, unknown or other
cacacuugaugcuguuucn

SEQ ID NO: 2596855 - RNA, 19 nt, Artificial Sequence
  Description of Artificial Sequence: Synthetic oligonucleotide
cugauguaucgagcaacag

SEQ ID NO: 2596856 - RNA, 19 nt, Artificial Sequence
  Description of Artificial Sequence: Synthetic oligonucleotide
ucucgcagaucaugaggaa

SEQ ID NO: 2596857 - RNA, 19 nt, Artificial Sequence
  Description of Artificial Sequence: Synthetic oligonucleotide
cugaguuggggcagauauc

SEQ ID NO: 2596858 - RNA, 19 nt, Artificial Sequence
  Description of Artificial Sequence: Synthetic oligonucleotide
auccuguaaggagauccug

SEQ ID NO: 2596859 - RNA, 19 nt, Artificial Sequence
  Description of Artificial Sequence: Synthetic oligonucleotide
accucaacugccccaugaa

SEQ ID NO: 2596860 - RNA, 19 nt, Artificial Sequence
  Description of Artificial Sequence: Synthetic oligonucleotide
gaugugggucuguguggug

SEQ ID NO: 2596861 - RNA, 19 nt, Artificial Sequence
  Description of Artificial Sequence: Synthetic oligonucleotide
gggucagggcuucaggcgc

SEQ ID NO: 2596862 - RNA, 19 nt, Artificial Sequence
  Description of Artificial Sequence: Synthetic oligonucleotide
uacugccggcuuccagccg

SEQ ID NO: 2596863 - RNA, 19 nt, Artificial Sequence
  Description of Artificial Sequence: Synthetic oligonucleotide
uuggggcagauaucucggu

SEQ ID NO: 2596864 - RNA, 19 nt, Artificial Sequence
  Description of Artificial Sequence: Synthetic oligonucleotide
ccauaguacuccacagaag

SEQ ID NO: 2596865 - RNA, 19 nt, Artificial Sequence
  Description of Artificial Sequence: Synthetic oligonucleotide
ugggccacgcuggagugga

SEQ ID NO: 2596866 - RNA, 19 nt, Artificial Sequence
  Description of Artificial Sequence: Synthetic oligonucleotide
uggggaguauugagggcau

SEQ ID NO: 2596867 - RNA, 19 nt, Artificial Sequence
  Description of Artificial Sequence: Synthetic oligonucleotide
uugcgcagugaaccagcac

SEQ ID NO: 2596868 - RNA, 19 nt, Artificial Sequence
  Description of Artificial Sequence: Synthetic oligonucleotide
ggucaaagaagggauuauc

SEQ ID NO: 2596869 - RNA, 19 nt, Artificial Sequence
  Description of Artificial Sequence: Synthetic oligonucleotide
gccucaaugccauaguacu

SEQ ID NO: 2596870 - RNA, 19 nt, Artificial Sequence
  Description of Artificial Sequence: Synthetic oligonucleotide
gagucgcccugauucccgc

SEQ ID NO: 2596871 - RNA, 19 nt, Artificial Sequence
  Description of Artificial Sequence: Synthetic oligonucleotide
ccccauugcgcagugaacc

SEQ ID NO: 2596872 - RNA, 19 nt, Artificial Sequence
  Description of Artificial Sequence: Synthetic oligonucleotide
accuggaguugucggagaa

SEQ ID NO: 2596873 - RNA, 19 nt, Artificial Sequence
  Description of Artificial Sequence: Synthetic oligonucleotide
gggucuguguggugguccg

SEQ ID NO: 2596874 - RNA, 19 nt, Artificial Sequence
  Description of Artificial Sequence: Synthetic oligonucleotide
acggacccacagcaaucuc

SEQ ID NO: 2596875 - RNA, 19 nt, Artificial Sequence
  Description of Artificial Sequence: Synthetic oligonucleotide
gccacgcuggaguggaggg

SEQ ID NO: 2596876 - RNA, 19 nt, Artificial Sequence
  Description of Artificial Sequence: Synthetic oligonucleotide
guguacugccggcuuccag

SEQ ID NO: 2596877 - RNA, 19 nt, Artificial Sequence
  Description of Artificial Sequence: Synthetic oligonucleotide
gacaggcaguguguacugc

SEQ ID NO: 2596878 - RNA, 19 nt, Artificial Sequence
  Description of Artificial Sequence: Synthetic oligonucleotide
uugggccacgcuggagugg

SEQ ID NO: 2596879 - RNA, 19 nt, Artificial Sequence
  Description of Artificial Sequence: Synthetic oligonucleotide
ccacagaaguuccacggac

SEQ ID NO: 2596880 - RNA, 19 nt, Artificial Sequence
  Description of Artificial Sequence: Synthetic oligonucleotide
uacucagggucgucuggaa

SEQ ID NO: 2596881 - RNA, 19 nt, Artificial Sequence
  Description of Artificial Sequence: Synthetic oligonucleotide
auccugcccaggcuguagu

SEQ ID NO: 2596882 - RNA, 19 nt, Artificial Sequence
  Description of Artificial Sequence: Synthetic oligonucleotide
ggcaguguguacugccggc

SEQ ID NO: 2596883 - RNA, 19 nt, Artificial Sequence
  Description of Artificial Sequence: Synthetic oligonucleotide
gagggcaucucugauguau

SEQ ID NO: 2596884 - RNA, 19 nt, Artificial Sequence
  Description of Artificial Sequence: Synthetic oligonucleotide
cgcucccuaaaucagaguc

SEQ ID NO: 2596885 - RNA, 19 nt, Artificial Sequence
  Description of Artificial Sequence: Synthetic oligonucleotide
ggagaaagccugaguuggg

SEQ ID NO: 2596886 - RNA, 19 nt, Artificial Sequence
  Description of Artificial Sequence: Synthetic oligonucleotide
ggacccacagcaaucucug

SEQ ID NO: 2596887 - RNA, 19 nt, Artificial Sequence
  Description of Artificial Sequence: Synthetic oligonucleotide
augaaucuuuggccuccga

SEQ ID NO: 2596888 - RNA, 19 nt, Artificial Sequence
  Description of Artificial Sequence: Synthetic oligonucleotide
cugccccaugaaucuuugg

SEQ ID NO: 2596889 - RNA, 19 nt, Artificial Sequence
  Description of Artificial Sequence: Synthetic oligonucleotide
cgagguugggccacgcugg

SEQ ID NO: 2596890 - RNA, 19 nt, Artificial Sequence
  Description of Artificial Sequence: Synthetic oligonucleotide
uaucucggugggccugcac

SEQ ID NO: 2596891 - RNA, 19 nt, Artificial Sequence
  Description of Artificial Sequence: Synthetic oligonucleotide
auaguacuccacagaaguu

SEQ ID NO: 2596892 - RNA, 19 nt, Artificial Sequence
  Description of Artificial Sequence: Synthetic oligonucleotide
ggcgcucccuaaaucagag

SEQ ID NO: 2596893 - RNA, 19 nt, Artificial Sequence
  Description of Artificial Sequence: Synthetic oligonucleotide
uccgacggacccacagcaa

SEQ ID NO: 2596894 - RNA, 19 nt, Artificial Sequence
  Description of Artificial Sequence: Synthetic oligonucleotide
caccucaacugccccauga

SEQ ID NO: 2596895 - RNA, 19 nt, Artificial Sequence
  Description of Artificial Sequence: Synthetic oligonucleotide
aaccagcacucggcuuugg

SEQ ID NO: 2596896 - RNA, 19 nt, Artificial Sequence
  Description of Artificial Sequence: Synthetic oligonucleotide
cugguggcgggacaccuca

SEQ ID NO: 2596897 - RNA, 19 nt, Artificial Sequence
  Description of Artificial Sequence: Synthetic oligonucleotide
gucuguguggugguccgac

SEQ ID NO: 2596898 - RNA, 19 nt, Artificial Sequence
  Description of Artificial Sequence: Synthetic oligonucleotide
gaguugucggagaaagccu

SEQ ID NO: 2596899 - RNA, 19 nt, Artificial Sequence
  Description of Artificial Sequence: Synthetic oligonucleotide
acuguggcagagcggcuua

SEQ ID NO: 2596900 - RNA, 19 nt, Artificial Sequence
  Description of Artificial Sequence: Synthetic oligonucleotide
agccgccugucucugcaca

SEQ ID NO: 2596901 - RNA, 19 nt, Artificial Sequence
  Description of Artificial Sequence: Synthetic oligonucleotide
uggccuccgaagguccugc

SEQ ID NO: 2596902 - RNA, 19 nt, Artificial Sequence
  Description of Artificial Sequence: Synthetic oligonucleotide
auugcgcagugaaccagca

SEQ ID NO: 2596903 - RNA, 19 nt, Artificial Sequence
  Description of Artificial Sequence: Synthetic oligonucleotide
agccuguuguccagaaccu

SEQ ID NO: 2596904 - RNA, 19 nt, Artificial Sequence
  Description of Artificial Sequence: Synthetic oligonucleotide
aaguuccacggaccucguu

SEQ ID NO: 2596905 - RNA, 19 nt, Artificial Sequence
  Description of Artificial Sequence: Synthetic oligonucleotide
aggcuaguguggguggcug

SEQ ID NO: 2596906 - RNA, 19 nt, Artificial Sequence
  Description of Artificial Sequence: Synthetic oligonucleotide
ccaugaaucuuuggccucc

SEQ ID NO: 2596907 - RNA, 19 nt, Artificial Sequence
  Description of Artificial Sequence: Synthetic oligonucleotide
auguaucgagcaacaggca

SEQ ID NO: 2596908 - RNA, 19 nt, Artificial Sequence
  Description of Artificial Sequence: Synthetic oligonucleotide
gguccgacggacccacagc

SEQ ID NO: 2596909 - RNA, 19 nt, Artificial Sequence
  Description of Artificial Sequence: Synthetic oligonucleotide
uuggccuccgaagguccug

SEQ ID NO: 2596910 - RNA, 19 nt, Artificial Sequence
  Description of Artificial Sequence: Synthetic oligonucleotide
cugacaggcaguguguacu

SEQ ID NO: 2596911 - RNA, 19 nt, Artificial Sequence
  Description of Artificial Sequence: Synthetic oligonucleotide
gggucgucuggaaacagca

SEQ ID NO: 2596912 - RNA, 19 nt, Artificial Sequence
  Description of Artificial Sequence: Synthetic oligonucleotide
ugcacacuugaugcuguuu

SEQ ID NO: 2596913 - RNA, 19 nt, Artificial Sequence
  Description of Artificial Sequence: Synthetic oligonucleotide
uguguacugccggcuucca

SEQ ID NO: 2596914 - RNA, 19 nt, Artificial Sequence
  Description of Artificial Sequence: Synthetic oligonucleotide
gaggaaggccaggacaacu

SEQ ID NO: 2596915 - RNA, 19 nt, Artificial Sequence
  Description of Artificial Sequence: Synthetic oligonucleotide
gcagaucaugaggaaggcc

SEQ ID NO: 2596916 - RNA, 19 nt, Artificial Sequence
  Description of Artificial Sequence: Synthetic oligonucleotide
gggacaccucaacugcccc

SEQ ID NO: 2596917 - RNA, 19 nt, Artificial Sequence
  Description of Artificial Sequence: Synthetic oligonucleotide
uggcuucuaccagugucau

SEQ ID NO: 2596918 - RNA, 19 nt, Artificial Sequence
  Description of Artificial Sequence: Synthetic oligonucleotide
cauccuguaaggagauccu

SEQ ID NO: 2596919 - RNA, 19 nt, Artificial Sequence
  Description of Artificial Sequence: Synthetic oligonucleotide
cucaguggagcgcugacuu

SEQ ID NO: 2596920 - RNA, 19 nt, Artificial Sequence
  Description of Artificial Sequence: Synthetic oligonucleotide
guugucggagaaagccuga

SEQ ID NO: 2596921 - RNA, 19 nt, Artificial Sequence
  Description of Artificial Sequence: Synthetic oligonucleotide
gacggacccacagcaaucu

SEQ ID NO: 2596922 - RNA, 19 nt, Artificial Sequence
  Description of Artificial Sequence: Synthetic oligonucleotide
uccgaagguccugcuucug

SEQ ID NO: 2596923 - RNA, 19 nt, Artificial Sequence
  Description of Artificial Sequence: Synthetic oligonucleotide
aagccugaguuggggcaga

SEQ ID NO: 2596924 - RNA, 19 nt, Artificial Sequence
  Description of Artificial Sequence: Synthetic oligonucleotide
guguggugguccgacggac

SEQ ID NO: 2596925 - RNA, 19 nt, Artificial Sequence
  Description of Artificial Sequence: Synthetic oligonucleotide
ggcagaaaguaaacacuga

SEQ ID NO: 2596926 - RNA, 19 nt, Artificial Sequence
  Description of Artificial Sequence: Synthetic oligonucleotide
ggaguauugagggcaucuc

SEQ ID NO: 2596927 - RNA, 19 nt, Artificial Sequence
  Description of Artificial Sequence: Synthetic oligonucleotide
guggagcgcugacuugcug

SEQ ID NO: 2596928 - RNA, 19 nt, Artificial Sequence
  Description of Artificial Sequence: Synthetic oligonucleotide
gagguugggccacgcugga

SEQ ID NO: 2596929 - RNA, 19 nt, Artificial Sequence
  Description of Artificial Sequence: Synthetic oligonucleotide
ggagcgcugacuugcugga

SEQ ID NO: 2596930 - RNA, 19 nt, Artificial Sequence
  Description of Artificial Sequence: Synthetic oligonucleotide
uuccacggaccucguugau

SEQ ID NO: 2596931 - RNA, 19 nt, Artificial Sequence
  Description of Artificial Sequence: Synthetic oligonucleotide
ccugaguuggggcagauau

SEQ ID NO: 2596932 - RNA, 19 nt, Artificial Sequence
  Description of Artificial Sequence: Synthetic oligonucleotide
cggaccucguugauguggg

SEQ ID NO: 2596933 - RNA, 19 nt, Artificial Sequence
  Description of Artificial Sequence: Synthetic oligonucleotide
ccugucucugcacacuuga

SEQ ID NO: 2596934 - RNA, 19 nt, Artificial Sequence
  Description of Artificial Sequence: Synthetic oligonucleotide
gguggcgggacaccucaac

SEQ ID NO: 2596935 - RNA, 19 nt, Artificial Sequence
  Description of Artificial Sequence: Synthetic oligonucleotide
ggucgucuggaaacagcag

SEQ ID NO: 2596936 - RNA, 19 nt, Artificial Sequence
  Description of Artificial Sequence: Synthetic oligonucleotide
ucgcccugauucccgccuc

SEQ ID NO: 2596937 - RNA, 19 nt, Artificial Sequence
  Description of Artificial Sequence: Synthetic oligonucleotide
aguaaacacugaggucaaa

SEQ ID NO: 2596938 - RNA, 19 nt, Artificial Sequence
  Description of Artificial Sequence: Synthetic oligonucleotide
acaccucaacugccccaug

SEQ ID NO: 2596939 - RNA, 19 nt, Artificial Sequence
  Description of Artificial Sequence: Synthetic oligonucleotide
ggccaggacaacuguggca

SEQ ID NO: 2596940 - RNA, 19 nt, Artificial Sequence
  Description of Artificial Sequence: Synthetic oligonucleotide
guggcgggacaccucaacu

SEQ ID NO: 2596941 - RNA, 19 nt, Artificial Sequence
  Description of Artificial Sequence: Synthetic oligonucleotide
uuccagccgccugucucug

SEQ ID NO: 2596942 - RNA, 19 nt, Artificial Sequence
  Description of Artificial Sequence: Synthetic oligonucleotide
uggugguccgacggaccca

SEQ ID NO: 2596943 - RNA, 19 nt, Artificial Sequence
  Description of Artificial Sequence: Synthetic oligonucleotide
cugauucccgccucagccu

SEQ ID NO: 2596944 - RNA, 19 nt, Artificial Sequence
  Description of Artificial Sequence: Synthetic oligonucleotide
cagccucaaugccauagua

SEQ ID NO: 2596945 - RNA, 19 nt, Artificial Sequence
  Description of Artificial Sequence: Synthetic oligonucleotide
cccaugaaucuuuggccuc

SEQ ID NO: 2596946 - RNA, 19 nt, Artificial Sequence
  Description of Artificial Sequence: Synthetic oligonucleotide
gacaccucaacugccccau

SEQ ID NO: 2596947 - RNA, 19 nt, Artificial Sequence
  Description of Artificial Sequence: Synthetic oligonucleotide
cgucuggauggcuucuacc

SEQ ID NO: 2596948 - RNA, 19 nt, Artificial Sequence
  Description of Artificial Sequence: Synthetic oligonucleotide
cucagccuguuguccagaa

SEQ ID NO: 2596949 - RNA, 19 nt, Artificial Sequence
  Description of Artificial Sequence: Synthetic oligonucleotide
ggacaccucaacugcccca

SEQ ID NO: 2596950 - RNA, 19 nt, Artificial Sequence
  Description of Artificial Sequence: Synthetic oligonucleotide
ggcaucucugauguaucga

SEQ ID NO: 2596951 - RNA, 19 nt, Artificial Sequence
  Description of Artificial Sequence: Synthetic oligonucleotide
aguggagcgcugacuugcu

SEQ ID NO: 2596952 - RNA, 19 nt, Artificial Sequence
  Description of Artificial Sequence: Synthetic oligonucleotide
caggucgagguugggccac

SEQ ID NO: 2596953 - RNA, 19 nt, Artificial Sequence
  Description of Artificial Sequence: Synthetic oligonucleotide
aggucgagguugggccacg

SEQ ID NO: 2596954 - RNA, 19 nt, Artificial Sequence
  Description of Artificial Sequence: Synthetic oligonucleotide
aggcgcucccuaaaucaga

SEQ ID NO: 2596955 - RNA, 19 nt, Artificial Sequence
  Description of Artificial Sequence: Synthetic oligonucleotide
ggugguccgacggacccac

SEQ ID NO: 2596956 - RNA, 19 nt, Artificial Sequence
  Description of Artificial Sequence: Synthetic oligonucleotide
ccuaaaucagagucgcccu

SEQ ID NO: 2596957 - RNA, 19 nt, Artificial Sequence
  Description of Artificial Sequence: Synthetic oligonucleotide
guccagaaccuggaguugu

SEQ ID NO: 2596958 - RNA, 19 nt, Artificial Sequence
  Description of Artificial Sequence: Synthetic oligonucleotide
cugccggcuuccagccgcc

SEQ ID NO: 2596959 - RNA, 19 nt, Artificial Sequence
  Description of Artificial Sequence: Synthetic oligonucleotide
gccucagccuguuguccag

SEQ ID NO: 2596960 - RNA, 19 nt, Artificial Sequence
  Description of Artificial Sequence: Synthetic oligonucleotide
ggcuucuaccagugucaug

SEQ ID NO: 2596961 - RNA, 19 nt, Artificial Sequence
  Description of Artificial Sequence: Synthetic oligonucleotide
uucccgccucagccuguug

SEQ ID NO: 2596962 - RNA, 19 nt, Artificial Sequence
  Description of Artificial Sequence: Synthetic oligonucleotide
ccauugcgcagugaaccag

SEQ ID NO: 2596963 - RNA, 19 nt, Artificial Sequence
  Description of Artificial Sequence: Synthetic oligonucleotide
guacuccacagaaguucca

SEQ ID NO: 2596964 - RNA, 19 nt, Artificial Sequence
  Description of Artificial Sequence: Synthetic oligonucleotide
gggaguauugagggcaucu

SEQ ID NO: 2596965 - RNA, 19 nt, Artificial Sequence
  Description of Artificial Sequence: Synthetic oligonucleotide
cgggacaccucaacugccc

SEQ ID NO: 2596966 - RNA, 19 nt, Artificial Sequence
  Description of Artificial Sequence: Synthetic oligonucleotide
ggcagauaucucggugggc

SEQ ID NO: 2596967 - RNA, 19 nt, Artificial Sequence
  Description of Artificial Sequence: Synthetic oligonucleotide
cacggaccucguugaugug

SEQ ID NO: 2596968 - RNA, 19 nt, Artificial Sequence
  Description of Artificial Sequence: Synthetic oligonucleotide
cagauaucucggugggccu

SEQ ID NO: 2596969 - RNA, 19 nt, Artificial Sequence
  Description of Artificial Sequence: Synthetic oligonucleotide
ugguggcgggacaccucaa

SEQ ID NO: 2596970 - RNA, 19 nt, Artificial Sequence
  Description of Artificial Sequence: Synthetic oligonucleotide
gucgcccugauucccgccu

SEQ ID NO: 2596971 - RNA, 19 nt, Artificial Sequence
  Description of Artificial Sequence: Synthetic oligonucleotide
ccacggaccucguugaugu

SEQ ID NO: 2596972 - RNA, 19 nt, Artificial Sequence
  Description of Artificial Sequence: Synthetic oligonucleotide
ggccugcaccgucuggaug

SEQ ID NO: 2596973 - RNA, 19 nt, Artificial Sequence
  Description of Artificial Sequence: Synthetic oligonucleotide
gcaccgucuggauggcuuc

SEQ ID NO: 2596974 - RNA, 19 nt, Artificial Sequence
  Description of Artificial Sequence: Synthetic oligonucleotide
cuguggcagagcggcuuac

SEQ ID NO: 2596975 - RNA, 19 nt, Artificial Sequence
  Description of Artificial Sequence: Synthetic oligonucleotide
gccuguuguccagaaccug

SEQ ID NO: 2596976 - RNA, 19 nt, Artificial Sequence
  Description of Artificial Sequence: Synthetic oligonucleotide
cuucaggcgcucccuaaau

SEQ ID NO: 2596977 - RNA, 19 nt, Artificial Sequence
  Description of Artificial Sequence: Synthetic oligonucleotide
cccauugcgcagugaacca

SEQ ID NO: 2596978 - RNA, 19 nt, Artificial Sequence
  Description of Artificial Sequence: Synthetic oligonucleotide
auaucucggugggccugca

SEQ ID NO: 2596979 - RNA, 19 nt, Artificial Sequence
  Description of Artificial Sequence: Synthetic oligonucleotide
caggcaggucgagguuggg

SEQ ID NO: 2596980 - RNA, 19 nt, Artificial Sequence
  Description of Artificial Sequence: Synthetic oligonucleotide
cccugauucccgccucagc

SEQ ID NO: 2596981 - RNA, 19 nt, Artificial Sequence
  Description of Artificial Sequence: Synthetic oligonucleotide
gaggcuaguguggguggcu

SEQ ID NO: 2596982 - RNA, 19 nt, Artificial Sequence
  Description of Artificial Sequence: Synthetic oligonucleotide
gcgcagugaaccagcacuc

SEQ ID NO: 2596983 - RNA, 19 nt, Artificial Sequence
  Description of Artificial Sequence: Synthetic oligonucleotide
gcgcugacuugcuggaaaa

SEQ ID NO: 2596984 - RNA, 19 nt, Artificial Sequence
  Description of Artificial Sequence: Synthetic oligonucleotide
gcgggacaccucaacugcc

SEQ ID NO: 2596985 - RNA, 19 nt, Artificial Sequence
  Description of Artificial Sequence: Synthetic oligonucleotide
gccucaguggagcgcugac

SEQ ID NO: 2596986 - RNA, 19 nt, Artificial Sequence
  Description of Artificial Sequence: Synthetic oligonucleotide
gccgccugucucugcacac

SEQ ID NO: 2596987 - RNA, 19 nt, Artificial Sequence
  Description of Artificial Sequence: Synthetic oligonucleotide
ccgucuggauggcuucuac

SEQ ID NO: 2596988 - RNA, 19 nt, Artificial Sequence
  Description of Artificial Sequence: Synthetic oligonucleotide
cgcagaucaugaggaaggc

SEQ ID NO: 2596989 - RNA, 19 nt, Artificial Sequence
  Description of Artificial Sequence: Synthetic oligonucleotide
ggcuucaggcgcucccuaa

SEQ ID NO: 2596990 - RNA, 19 nt, Artificial Sequence
  Description of Artificial Sequence: Synthetic oligonucleotide
cgagcaacaggcagaaagu

SEQ ID NO: 2596991 - RNA, 19 nt, Artificial Sequence
  Description of Artificial Sequence: Synthetic oligonucleotide
cgcagugaaccagcacucg

SEQ ID NO: 2596992 - RNA, 19 nt, Artificial Sequence
  Description of Artificial Sequence: Synthetic oligonucleotide
auucccgccucagccuguu

SEQ ID NO: 2596993 - RNA, 19 nt, Artificial Sequence
  Description of Artificial Sequence: Synthetic oligonucleotide
gugaaccagcacucggcuu

SEQ ID NO: 2596994 - RNA, 19 nt, Artificial Sequence
  Description of Artificial Sequence: Synthetic oligonucleotide
cgacggacccacagcaauc

SEQ ID NO: 2596995 - RNA, 19 nt, Artificial Sequence
  Description of Artificial Sequence: Synthetic oligonucleotide
gccggcuuccagccgccug

SEQ ID NO: 2596996 - RNA, 19 nt, Artificial Sequence
  Description of Artificial Sequence: Synthetic oligonucleotide
accgucuggauggcuucua

SEQ ID NO: 2596997 - RNA, 19 nt, Artificial Sequence
  Description of Artificial Sequence: Synthetic oligonucleotide
gucgagguugggccacgcu

SEQ ID NO: 2596998 - RNA, 19 nt, Artificial Sequence
  Description of Artificial Sequence: Synthetic oligonucleotide
cccgccucagccuguuguc

SEQ ID NO: 2596999 - RNA, 19 nt, Artificial Sequence
  Description of Artificial Sequence: Synthetic oligonucleotide
gugggucuguguggugguc

SEQ ID NO: 2597000 - RNA, 19 nt, Artificial Sequence
  Description of Artificial Sequence: Synthetic oligonucleotide
gcagugaguccauccugua

SEQ ID NO: 2597001 - RNA, 19 nt, Artificial Sequence
  Description of Artificial Sequence: Synthetic oligonucleotide
gaaguuccacggaccucgu

SEQ ID NO: 2597002 - RNA, 19 nt, Artificial Sequence
  Description of Artificial Sequence: Synthetic oligonucleotide
gccugucucugcacacuug

SEQ ID NO: 2597003 - RNA, 19 nt, Artificial Sequence
  Description of Artificial Sequence: Synthetic oligonucleotide
gucagggcuucaggcgcuc

SEQ ID NO: 2597004 - RNA, 19 nt, Artificial Sequence
  Description of Artificial Sequence: Synthetic oligonucleotide
gagcgcugacuugcuggaa

SEQ ID NO: 2597005 - RNA, 19 nt, Artificial Sequence
  Description of Artificial Sequence: Synthetic oligonucleotide
ccgccucagccuguugucc

SEQ ID NO: 2597006 - RNA, 19 nt, Artificial Sequence
  Description of Artificial Sequence: Synthetic oligonucleotide
ggucgagguugggccacgc

SEQ ID NO: 2597007 - RNA, 19 nt, Artificial Sequence
  Description of Artificial Sequence: Synthetic oligonucleotide
aucgagcaacaggcagaaa

SEQ ID NO: 2597008 - RNA, 19 nt, Artificial Sequence
  Description of Artificial Sequence: Synthetic oligonucleotide
gcccugauucccgccucag

SEQ ID NO: 2597009 - RNA, 19 nt, Artificial Sequence
  Description of Artificial Sequence: Synthetic oligonucleotide
agccugaguuggggcagau

SEQ ID NO: 2597010 - RNA, 19 nt, Artificial Sequence
  Description of Artificial Sequence: Synthetic oligonucleotide
gauucccgccucagccugu

SEQ ID NO: 2597011 - RNA, 19 nt, Artificial Sequence
  Description of Artificial Sequence: Synthetic oligonucleotide
ccucguugaugugggucug

SEQ ID NO: 2597012 - RNA, 19 nt, Artificial Sequence
  Description of Artificial Sequence: Synthetic oligonucleotide
gcaguguguacugccggcu

SEQ ID NO: 2597013 - RNA, 19 nt, Artificial Sequence
  Description of Artificial Sequence: Synthetic oligonucleotide
caacuguggcagagcggcu

SEQ ID NO: 2597014 - RNA, 19 nt, Artificial Sequence
  Description of Artificial Sequence: Synthetic oligonucleotide
cucggcuuuggggaguauu

SEQ ID NO: 2597015 - RNA, 19 nt, Artificial Sequence
  Description of Artificial Sequence: Synthetic oligonucleotide
caguguguacugccggcuu

SEQ ID NO: 2597016 - RNA, 19 nt, Artificial Sequence
  Description of Artificial Sequence: Synthetic oligonucleotide
cuucuaccagugucauguu

SEQ ID NO: 2597017 - RNA, 19 nt, Artificial Sequence
  Description of Artificial Sequence: Synthetic oligonucleotide
cucguugaugugggucugu

SEQ ID NO: 2597018 - RNA, 19 nt, Artificial Sequence
  Description of Artificial Sequence: Synthetic oligonucleotide
cuucucugacaggcagugu

SEQ ID NO: 2597019 - RNA, 19 nt, Artificial Sequence
  Description of Artificial Sequence: Synthetic oligonucleotide
gcugguggcgggacaccuc

SEQ ID NO: 2597020 - RNA, 19 nt, Artificial Sequence
  Description of Artificial Sequence: Synthetic oligonucleotide
ccucaacugccccaugaau

SEQ ID NO: 2597021 - RNA, 19 nt, Artificial Sequence
  Description of Artificial Sequence: Synthetic oligonucleotide
ccaggacaacuguggcaga

SEQ ID NO: 2597022 - RNA, 19 nt, Artificial Sequence
  Description of Artificial Sequence: Synthetic oligonucleotide
cugcacacuugaugcuguu

SEQ ID NO: 2597023 - RNA, 19 nt, Artificial Sequence
  Description of Artificial Sequence: Synthetic oligonucleotide
cgccucagccuguugucca

SEQ ID NO: 2597024 - RNA, 19 nt, Artificial Sequence
  Description of Artificial Sequence: Synthetic oligonucleotide
ccuggaguugucggagaaa

SEQ ID NO: 2597025 - RNA, 19 nt, Artificial Sequence
  Description of Artificial Sequence: Synthetic oligonucleotide
acucggcuuuggggaguau

SEQ ID NO: 2597026 - RNA, 19 nt, Artificial Sequence
  Description of Artificial Sequence: Synthetic oligonucleotide
ccgacggacccacagcaau

SEQ ID NO: 2597027 - RNA, 19 nt, Artificial Sequence
  Description of Artificial Sequence: Synthetic oligonucleotide
ccacagcaaucucugcagu

SEQ ID NO: 2597028 - RNA, 19 nt, Artificial Sequence
  Description of Artificial Sequence: Synthetic oligonucleotide
ggucagggcuucaggcgcu

SEQ ID NO: 2597029 - RNA, 19 nt, Artificial Sequence
  Description of Artificial Sequence: Synthetic oligonucleotide
ccagggccaggcaggucga

SEQ ID NO: 2597030 - RNA, 19 nt, Artificial Sequence
  Description of Artificial Sequence: Synthetic oligonucleotide
caccgucuggauggcuucu

SEQ ID NO: 2597031 - RNA, 19 nt, Artificial Sequence
  Description of Artificial Sequence: Synthetic oligonucleotide
ggaccucguugaugugggu

SEQ ID NO: 2597032 - RNA, 19 nt, Artificial Sequence
  Description of Artificial Sequence: Synthetic oligonucleotide
gcgcucccuaaaucagagu

SEQ ID NO: 2597033 - RNA, 19 nt, Artificial Sequence
  Description of Artificial Sequence: Synthetic oligonucleotide
caacugccccaugaaucuu

SEQ ID NO: 2597034 - RNA, 19 nt, Artificial Sequence
  Description of Artificial Sequence: Synthetic oligonucleotide
cggcuuuggggaguauuga

SEQ ID NO: 2597035 - RNA, 19 nt, Artificial Sequence
  Description of Artificial Sequence: Synthetic oligonucleotide
gugguccgacggacccaca

SEQ ID NO: 2597036 - RNA, 19 nt, Artificial Sequence
  Description of Artificial Sequence: Synthetic oligonucleotide
ccucagccuguuguccaga

SEQ ID NO: 2597037 - RNA, 19 nt, Artificial Sequence
  Description of Artificial Sequence: Synthetic oligonucleotide
gcccaggcuguagucuucu

SEQ ID NO: 2597038 - RNA, 19 nt, Artificial Sequence
  Description of Artificial Sequence: Synthetic oligonucleotide
ccucaguggagcgcugacu

SEQ ID NO: 2597039 - RNA, 19 nt, Artificial Sequence
  Description of Artificial Sequence: Synthetic oligonucleotide
gccuccgaagguccugcuu

SEQ ID NO: 2597040 - RNA, 19 nt, Artificial Sequence
  Description of Artificial Sequence: Synthetic oligonucleotide
gccugaguuggggcagaua

SEQ ID NO: 2597041 - RNA, 19 nt, Artificial Sequence
  Description of Artificial Sequence: Synthetic oligonucleotide
gcacucggcuuuggggagu

SEQ ID NO: 2597042 - RNA, 19 nt, Artificial Sequence
  Description of Artificial Sequence: Synthetic oligonucleotide
cugcaccgucuggauggcu

SEQ ID NO: 2597043 - RNA, 19 nt, Artificial Sequence
  Description of Artificial Sequence: Synthetic oligonucleotide
ccgccugucucugcacacu

SEQ ID NO: 2597044 - RNA, 19 nt, Artificial Sequence
  Description of Artificial Sequence: Synthetic oligonucleotide
ugauaagagaugaucaggg

SEQ ID NO: 2597045 - RNA, 19 nt, Artificial Sequence
  Description of Artificial Sequence: Synthetic oligonucleotide
auuacuuuccuugaugagc

SEQ ID NO: 2597046 - RNA, 19 nt, Artificial Sequence
  Description of Artificial Sequence: Synthetic oligonucleotide
acuauagacauccuuuggg

SEQ ID NO: 2597047 - RNA, 19 nt, Artificial Sequence
  Description of Artificial Sequence: Synthetic oligonucleotide
aacaaauagugcaccaucc

SEQ ID NO: 2597048 - RNA, 19 nt, Artificial Sequence
  Description of Artificial Sequence: Synthetic oligonucleotide
uuagacgagaagaagcugc

SEQ ID NO: 2597049 - RNA, 19 nt, Artificial Sequence
  Description of Artificial Sequence: Synthetic oligonucleotide
uucuuagacgagaagaagc

SEQ ID NO: 2597050 - RNA, 19 nt, Artificial Sequence
  Description of Artificial Sequence: Synthetic oligonucleotide
uaagagaugaucaggguac

SEQ ID NO: 2597051 - RNA, 19 nt, Artificial Sequence
  Description of Artificial Sequence: Synthetic oligonucleotide
uucugauaagagaugauca

SEQ ID NO: 2597052 - RNA, 19 nt, Artificial Sequence
  Description of Artificial Sequence: Synthetic oligonucleotide
ucugauaagagaugaucag

SEQ ID NO: 2597053 - RNA, 19 nt, Artificial Sequence
  Description of Artificial Sequence: Synthetic oligonucleotide
uucuaacaaugacacagcg

SEQ ID NO: 2597054 - RNA, 19 nt, Artificial Sequence
  Description of Artificial Sequence: Synthetic oligonucleotide
auagacauccuuuggguag

SEQ ID NO: 2597055 - RNA, 19 nt, Artificial Sequence
  Description of Artificial Sequence: Synthetic oligonucleotide
ucgccauuuucucacaagg

SEQ ID NO: 2597056 - RNA, 19 nt, Artificial Sequence
  Description of Artificial Sequence: Synthetic oligonucleotide
acuucaagcugccacuggc

SEQ ID NO: 2597057 - RNA, 19 nt, Artificial Sequence
  Description of Artificial Sequence: Synthetic oligonucleotide
gacgagaagaagcugcccg

SEQ ID NO: 2597058 - RNA, 19 nt, Artificial Sequence
  Description of Artificial Sequence: Synthetic oligonucleotide
ucuuagacgagaagaagcu

SEQ ID NO: 2597059 - RNA, 19 nt, Artificial Sequence
  Description of Artificial Sequence: Synthetic oligonucleotide
uauucuuccgccauuuccu

SEQ ID NO: 2597060 - RNA, 19 nt, Artificial Sequence
  Description of Artificial Sequence: Synthetic oligonucleotide
ucaggaauggagaacuucu

SEQ ID NO: 2597061 - RNA, 19 nt, Artificial Sequence
  Description of Artificial Sequence: Synthetic oligonucleotide
ucuaacaaugacacagcgc

SEQ ID NO: 2597062 - RNA, 19 nt, Artificial Sequence
  Description of Artificial Sequence: Synthetic oligonucleotide
uccgggaacaaauagugca

SEQ ID NO: 2597063 - RNA, 19 nt, Artificial Sequence
  Description of Artificial Sequence: Synthetic oligonucleotide
cucacaaggaguucacucg

SEQ ID NO: 2597064 - RNA, 19 nt, Artificial Sequence
  Description of Artificial Sequence: Synthetic oligonucleotide
ucuaggucaggaauggaga

SEQ ID NO: 2597065 - RNA, 19 nt, Artificial Sequence
  Description of Artificial Sequence: Synthetic oligonucleotide
cuagucaccgccaucuucc

SEQ ID NO: 2597066 - RNA, 19 nt, Artificial Sequence
  Description of Artificial Sequence: Synthetic oligonucleotide
acagagacacuauagacau

SEQ ID NO: 2597067 - RNA, 19 nt, Artificial Sequence
  Description of Artificial Sequence: Synthetic oligonucleotide
ucugucuaggucaggaaug

SEQ ID NO: 2597068 - RNA, 19 nt, Artificial Sequence
  Description of Artificial Sequence: Synthetic oligonucleotide
uagugcaccauccucuucc

SEQ ID NO: 2597069 - RNA, 19 nt, Artificial Sequence
  Description of Artificial Sequence: Synthetic oligonucleotide
uuuucuacucgccauuuuc

SEQ ID NO: 2597070 - RNA, 19 nt, Artificial Sequence
  Description of Artificial Sequence: Synthetic oligonucleotide
uuuggcuucugauaagaga

SEQ ID NO: 2597071 - RNA, 19 nt, Artificial Sequence
  Description of Artificial Sequence: Synthetic oligonucleotide
aaauagugcaccauccucu

SEQ ID NO: 2597072 - RNA, 19 nt, Artificial Sequence
  Description of Artificial Sequence: Synthetic oligonucleotide
augagcucagaccccaggc

SEQ ID NO: 2597073 - RNA, 19 nt, Artificial Sequence
  Description of Artificial Sequence: Synthetic oligonucleotide
cuaacaaugacacagcgcu

SEQ ID NO: 2597074 - RNA, 19 nt, Artificial Sequence
  Description of Artificial Sequence: Synthetic oligonucleotide
gacacagcgcucuuucugg

SEQ ID NO: 2597075 - RNA, 19 nt, Artificial Sequence
  Description of Artificial Sequence: Synthetic oligonucleotide
cuuucugggccacagagac

SEQ ID NO: 2597076 - RNA, 19 nt, Artificial Sequence
  Description of Artificial Sequence: Synthetic oligonucleotide
augaagaugggauuggcau

SEQ ID NO: 2597077 - RNA, 19 nt, Artificial Sequence
  Description of Artificial Sequence: Synthetic oligonucleotide
uuucgaauccgccacugga

SEQ ID NO: 2597078 - RNA, 19 nt, Artificial Sequence
  Description of Artificial Sequence: Synthetic oligonucleotide
uguagcucugacucagccg

SEQ ID NO: 2597079 - RNA, 19 nt, Artificial Sequence
  Description of Artificial Sequence: Synthetic oligonucleotide
uccuugaugagcucagacc

SEQ ID NO: 2597080 - RNA, 19 nt, Artificial Sequence
  Description of Artificial Sequence: Synthetic oligonucleotide
acagcgcucuuucugggcc

SEQ ID NO: 2597081 - RNA, 19 nt, Artificial Sequence
  Description of Artificial Sequence: Synthetic oligonucleotide
uuuucucacaaggaguuca

SEQ ID NO: 2597082 - RNA, 19 nt, Artificial Sequence
  Description of Artificial Sequence: Synthetic oligonucleotide
cauccgggaacaaauagug

SEQ ID NO: 2597083 - RNA, 19 nt, Artificial Sequence
  Description of Artificial Sequence: Synthetic oligonucleotide
uuguuggucguucuaacaa

SEQ ID NO: 2597084 - RNA, 19 nt, Artificial Sequence
  Description of Artificial Sequence: Synthetic oligonucleotide
auaagagaugaucagggua

SEQ ID NO: 2597085 - RNA, 19 nt, Artificial Sequence
  Description of Artificial Sequence: Synthetic oligonucleotide
gaacaaauagugcaccauc

SEQ ID NO: 2597086 - RNA, 19 nt, Artificial Sequence
  Description of Artificial Sequence: Synthetic oligonucleotide
uuggcgugagcaaagcuca

SEQ ID NO: 2597087 - RNA, 19 nt, Artificial Sequence
  Description of Artificial Sequence: Synthetic oligonucleotide
guauucuuccgccauuucc

SEQ ID NO: 2597088 - RNA, 19 nt, Artificial Sequence
  Description of Artificial Sequence: Synthetic oligonucleotide
uuucuacucgccauuuucu

SEQ ID NO: 2597089 - RNA, 19 nt, Artificial Sequence
  Description of Artificial Sequence: Synthetic oligonucleotide
cugauaagagaugaucagg

SEQ ID NO: 2597090 - RNA, 19 nt, Artificial Sequence
  Description of Artificial Sequence: Synthetic oligonucleotide
aagcccacaagucucaguu

SEQ ID NO: 2597091 - RNA, 19 nt, Artificial Sequence
  Description of Artificial Sequence: Synthetic oligonucleotide
uucucaucguauucuuccg

SEQ ID NO: 2597092 - RNA, 19 nt, Artificial Sequence
  Description of Artificial Sequence: Synthetic oligonucleotide
uacugggucuuacaguccc

SEQ ID NO: 2597093 - RNA, 19 nt, Artificial Sequence
  Description of Artificial Sequence: Synthetic oligonucleotide
uuuguuggucguucuaaca

SEQ ID NO: 2597094 - RNA, 19 nt, Artificial Sequence
  Description of Artificial Sequence: Synthetic oligonucleotide
ucucacaaggaguucacuc

SEQ ID NO: 2597095 - RNA, 19 nt, Artificial Sequence
  Description of Artificial Sequence: Synthetic oligonucleotide
acacuauagacauccuuug

SEQ ID NO: 2597096 - RNA, 19 nt, Artificial Sequence
  Description of Artificial Sequence: Synthetic oligonucleotide
gucguucuaacaaugacac

SEQ ID NO: 2597097 - RNA, 19 nt, Artificial Sequence
  Description of Artificial Sequence: Synthetic oligonucleotide
uucaagcugccacuggccc

SEQ ID NO: 2597098 - RNA, 19 nt, Artificial Sequence
  Description of Artificial Sequence: Synthetic oligonucleotide
ugacacagcgcucuuucug

SEQ ID NO: 2597099 - RNA, 19 nt, Artificial Sequence
  Description of Artificial Sequence: Synthetic oligonucleotide
ucuuacaguccccaucacu

SEQ ID NO: 2597100 - RNA, 19 nt, Artificial Sequence
  Description of Artificial Sequence: Synthetic oligonucleotide
cucuuucugggccacagag

SEQ ID NO: 2597101 - RNA, 19 nt, Artificial Sequence
  Description of Artificial Sequence: Synthetic oligonucleotide
acauccuuuggguagggga

SEQ ID NO: 2597102 - RNA, 19 nt, Artificial Sequence
  Description of Artificial Sequence: Synthetic oligonucleotide
cauccuuuggguaggggag

SEQ ID NO: 2597103 - RNA, 19 nt, Artificial Sequence
  Description of Artificial Sequence: Synthetic oligonucleotide
uagacgagaagaagcugcc

SEQ ID NO: 2597104 - RNA, 19 nt, Artificial Sequence
  Description of Artificial Sequence: Synthetic oligonucleotide
uggcccaaggcucccaggg

SEQ ID NO: 2597105 - RNA, 19 nt, Artificial Sequence
  Description of Artificial Sequence: Synthetic oligonucleotide
ucuacucgccauuuucuca

SEQ ID NO: 2597106 - RNA, 19 nt, Artificial Sequence
  Description of Artificial Sequence: Synthetic oligonucleotide
gagguuucgaauccgccac

SEQ ID NO: 2597107 - RNA, 19 nt, Artificial Sequence
  Description of Artificial Sequence: Synthetic oligonucleotide
ccuugaugagcucagaccc

SEQ ID NO: 2597108 - RNA, 19 nt, Artificial Sequence
  Description of Artificial Sequence: Synthetic oligonucleotide
uugcgcaugaagaugggau

SEQ ID NO: 2597109 - RNA, 19 nt, Artificial Sequence
  Description of Artificial Sequence: Synthetic oligonucleotide
cuucugauaagagaugauc

SEQ ID NO: 2597110 - RNA, 19 nt, Artificial Sequence
  Description of Artificial Sequence: Synthetic oligonucleotide
acaaauagugcaccauccu

SEQ ID NO: 2597111 - RNA, 19 nt, Artificial Sequence
  Description of Artificial Sequence: Synthetic oligonucleotide
uuuuguuggucguucuaac

SEQ ID NO: 2597112 - RNA, 19 nt, Artificial Sequence
  Description of Artificial Sequence: Synthetic oligonucleotide
gaucaggguacaguuggcg

SEQ ID NO: 2597113 - RNA, 19 nt, Artificial Sequence
  Description of Artificial Sequence: Synthetic oligonucleotide
agaugaucaggguacaguu

SEQ ID NO: 2597114 - RNA, 19 nt, Artificial Sequence
  Description of Artificial Sequence: Synthetic oligonucleotide
ucucaucguauucuuccgc

SEQ ID NO: 2597115 - RNA, 19 nt, Artificial Sequence
  Description of Artificial Sequence: Synthetic oligonucleotide
caaauagugcaccauccuc

SEQ ID NO: 2597116 - RNA, 19 nt, Artificial Sequence
  Description of Artificial Sequence: Synthetic oligonucleotide
cacagagacacuauagaca

SEQ ID NO: 2597117 - RNA, 19 nt, Artificial Sequence
  Description of Artificial Sequence: Synthetic oligonucleotide
ucacaaggaguucacucgu

SEQ ID NO: 2597118 - RNA, 19 nt, Artificial Sequence
  Description of Artificial Sequence: Synthetic oligonucleotide
cacuauagacauccuuugg

SEQ ID NO: 2597119 - RNA, 19 nt, Artificial Sequence
  Description of Artificial Sequence: Synthetic oligonucleotide
cuacucgccauuuucucac

SEQ ID NO: 2597120 - RNA, 19 nt, Artificial Sequence
  Description of Artificial Sequence: Synthetic oligonucleotide
uuggcauuacuuuccuuga

SEQ ID NO: 2597121 - RNA, 19 nt, Artificial Sequence
  Description of Artificial Sequence: Synthetic oligonucleotide
uauagacauccuuugggua

SEQ ID NO: 2597122 - RNA, 19 nt, Artificial Sequence
  Description of Artificial Sequence: Synthetic oligonucleotide
ucccacuucaagcugccac

SEQ ID NO: 2597123 - RNA, 19 nt, Artificial Sequence
  Description of Artificial Sequence: Synthetic oligonucleotide
uggucguucuaacaaugac

SEQ ID NO: 2597124 - RNA, 19 nt, Artificial Sequence
  Description of Artificial Sequence: Synthetic oligonucleotide
agugcaccauccucuuccc

SEQ ID NO: 2597125 - RNA, 19 nt, Artificial Sequence
  Description of Artificial Sequence: Synthetic oligonucleotide
ugcaccauccucuucccgu

SEQ ID NO: 2597126 - RNA, 19 nt, Artificial Sequence
  Description of Artificial Sequence: Synthetic oligonucleotide
gaagcuggugucugucuag

SEQ ID NO: 2597127 - RNA, 19 nt, Artificial Sequence
  Description of Artificial Sequence: Synthetic oligonucleotide
aauagugcaccauccucuu

SEQ ID NO: 2597128 - RNA, 19 nt, Artificial Sequence
  Description of Artificial Sequence: Synthetic oligonucleotide
ugggauuggcauuacuuuc

SEQ ID NO: 2597129 - RNA, 19 nt, Artificial Sequence
  Description of Artificial Sequence: Synthetic oligonucleotide
cauuacuuuccuugaugag

SEQ ID NO: 2597130 - RNA, 19 nt, Artificial Sequence
  Description of Artificial Sequence: Synthetic oligonucleotide
caaggcucaggacagcuac

SEQ ID NO: 2597131 - RNA, 19 nt, Artificial Sequence
  Description of Artificial Sequence: Synthetic oligonucleotide
uuggucguucuaacaauga

SEQ ID NO: 2597132 - RNA, 19 nt, Artificial Sequence
  Description of Artificial Sequence: Synthetic oligonucleotide
uuuccuucccauccgggaa

SEQ ID NO: 2597133 - RNA, 19 nt, Artificial Sequence
  Description of Artificial Sequence: Synthetic oligonucleotide
agcagcgccgucuucucgg

SEQ ID NO: 2597134 - RNA, 19 nt, Artificial Sequence
  Description of Artificial Sequence: Synthetic oligonucleotide
aucauccagaggaagcugg

SEQ ID NO: 2597135 - RNA, 19 nt, Artificial Sequence
  Description of Artificial Sequence: Synthetic oligonucleotide
cguucuaacaaugacacag

SEQ ID NO: 2597136 - RNA, 19 nt, Artificial Sequence
  Description of Artificial Sequence: Synthetic oligonucleotide
gucuaggucaggaauggag

SEQ ID NO: 2597137 - RNA, 19 nt, Artificial Sequence
  Description of Artificial Sequence: Synthetic oligonucleotide
uucgaauccgccacuggaa

SEQ ID NO: 2597138 - RNA, 19 nt, Artificial Sequence
  Description of Artificial Sequence: Synthetic oligonucleotide
uagacauccuuuggguagg

SEQ ID NO: 2597139 - RNA, 19 nt, Artificial Sequence
  Description of Artificial Sequence: Synthetic oligonucleotide
uucccauccgggaacaaau

SEQ ID NO: 2597140 - RNA, 19 nt, Artificial Sequence
  Description of Artificial Sequence: Synthetic oligonucleotide
ugcccgugccagaagagcc

SEQ ID NO: 2597141 - RNA, 19 nt, Artificial Sequence
  Description of Artificial Sequence: Synthetic oligonucleotide
uccgccacuggaaacuugu

SEQ ID NO: 2597142 - RNA, 19 nt, Artificial Sequence
  Description of Artificial Sequence: Synthetic oligonucleotide
uuucucacaaggaguucac

SEQ ID NO: 2597143 - RNA, 19 nt, Artificial Sequence
  Description of Artificial Sequence: Synthetic oligonucleotide
ucagaccccaggcucccgg

SEQ ID NO: 2597144 - RNA, 19 nt, Artificial Sequence
  Description of Artificial Sequence: Synthetic oligonucleotide
cuucaagcugccacuggcc

SEQ ID NO: 2597145 - RNA, 19 nt, Artificial Sequence
  Description of Artificial Sequence: Synthetic oligonucleotide
uuacaguccccaucacugc

SEQ ID NO: 2597146 - RNA, 19 nt, Artificial Sequence
  Description of Artificial Sequence: Synthetic oligonucleotide
aaucauccagaggaagcug

SEQ ID NO: 2597147 - RNA, 19 nt, Artificial Sequence
  Description of Artificial Sequence: Synthetic oligonucleotide
guucuuagacgagaagaag

SEQ ID NO: 2597148 - RNA, 19 nt, Artificial Sequence
  Description of Artificial Sequence: Synthetic oligonucleotide
uucccguccugcagcagcg

SEQ ID NO: 2597149 - RNA, 19 nt, Artificial Sequence
  Description of Artificial Sequence: Synthetic oligonucleotide
aggucaggaauggagaacu

SEQ ID NO: 2597150 - RNA, 19 nt, Artificial Sequence
  Description of Artificial Sequence: Synthetic oligonucleotide
uucucggcagcccgcaagc

SEQ ID NO: 2597151 - RNA, 19 nt, Artificial Sequence
  Description of Artificial Sequence: Synthetic oligonucleotide
uguuggucguucuaacaau

SEQ ID NO: 2597152 - RNA, 19 nt, Artificial Sequence
  Description of Artificial Sequence: Synthetic oligonucleotide
guaggggagguuucgaauc

SEQ ID NO: 2597153 - RNA, 19 nt, Artificial Sequence
  Description of Artificial Sequence: Synthetic oligonucleotide
gcucaggacagcuacuggg

SEQ ID NO: 2597154 - RNA, 19 nt, Artificial Sequence
  Description of Artificial Sequence: Synthetic oligonucleotide
augggauuggcauuacuuu

SEQ ID NO: 2597155 - RNA, 19 nt, Artificial Sequence
  Description of Artificial Sequence: Synthetic oligonucleotide
gcuacugggucuuacaguc

SEQ ID NO: 2597156 - RNA, 19 nt, Artificial Sequence
  Description of Artificial Sequence: Synthetic oligonucleotide
aucaggguacaguuggcgu

SEQ ID NO: 2597157 - RNA, 19 nt, Artificial Sequence
  Description of Artificial Sequence: Synthetic oligonucleotide
cuuuggcuucugauaagag

SEQ ID NO: 2597158 - RNA, 19 nt, Artificial Sequence
  Description of Artificial Sequence: Synthetic oligonucleotide
ucggcagcccgcaagcucu

SEQ ID NO: 2597159 - RNA, 19 nt, Artificial Sequence
  Description of Artificial Sequence: Synthetic oligonucleotide
cauuuccuucccauccggg

SEQ ID NO: 2597160 - RNA, 19 nt, Artificial Sequence
  Description of Artificial Sequence: Synthetic oligonucleotide
gaugaucaggguacaguug

SEQ ID NO: 2597161 - RNA, 19 nt, Artificial Sequence
  Description of Artificial Sequence: Synthetic oligonucleotide
aagaagcugcccgugccag

SEQ ID NO: 2597162 - RNA, 19 nt, Artificial Sequence
  Description of Artificial Sequence: Synthetic oligonucleotide
gagaagaagcugcccgugc

SEQ ID NO: 2597163 - RNA, 19 nt, Artificial Sequence
  Description of Artificial Sequence: Synthetic oligonucleotide
uggagaacuucuuguagua

SEQ ID NO: 2597164 - RNA, 19 nt, Artificial Sequence
  Description of Artificial Sequence: Synthetic oligonucleotide
ucugacucagccgccagga

SEQ ID NO: 2597165 - RNA, 19 nt, Artificial Sequence
  Description of Artificial Sequence: Synthetic oligonucleotide
gaauggagaacuucuugua

SEQ ID NO: 2597166 - RNA, 19 nt, Artificial Sequence
  Description of Artificial Sequence: Synthetic oligonucleotide
guccccaucacugcugugg

SEQ ID NO: 2597167 - RNA, 19 nt, Artificial Sequence
  Description of Artificial Sequence: Synthetic oligonucleotide
aguucacucgucuucucau

SEQ ID NO: 2597168 - RNA, 19 nt, Artificial Sequence
  Description of Artificial Sequence: Synthetic oligonucleotide
cucucccacuucaagcugc

SEQ ID NO: 2597169 - RNA, 19 nt, Artificial Sequence
  Description of Artificial Sequence: Synthetic oligonucleotide
uccucuucccguccugcag

SEQ ID NO: 2597170 - RNA, 19 nt, Artificial Sequence
  Description of Artificial Sequence: Synthetic oligonucleotide
ucuuuaccuucuuuagcuc

SEQ ID NO: 2597171 - RNA, 19 nt, Artificial Sequence
  Description of Artificial Sequence: Synthetic oligonucleotide
gaagagccaagcccacaag

SEQ ID NO: 2597172 - RNA, 19 nt, Artificial Sequence
  Description of Artificial Sequence: Synthetic oligonucleotide
guucuaacaaugacacagc

SEQ ID NO: 2597173 - RNA, 19 nt, Artificial Sequence
  Description of Artificial Sequence: Synthetic oligonucleotide
cugucuaggucaggaaugg

SEQ ID NO: 2597174 - RNA, 19 nt, Artificial Sequence
  Description of Artificial Sequence: Synthetic oligonucleotide
ucgaauccgccacuggaaa

SEQ ID NO: 2597175 - RNA, 19 nt, Artificial Sequence
  Description of Artificial Sequence: Synthetic oligonucleotide
guuucgaauccgccacugg

SEQ ID NO: 2597176 - RNA, 19 nt, Artificial Sequence
  Description of Artificial Sequence: Synthetic oligonucleotide
ugaagaugggauuggcauu

SEQ ID NO: 2597177 - RNA, 19 nt, Artificial Sequence
  Description of Artificial Sequence: Synthetic oligonucleotide
uucuacucgccauuuucuc

SEQ ID NO: 2597178 - RNA, 19 nt, Artificial Sequence
  Description of Artificial Sequence: Synthetic oligonucleotide
uugaugagcucagacccca

SEQ ID NO: 2597179 - RNA, 19 nt, Artificial Sequence
  Description of Artificial Sequence: Synthetic oligonucleotide
aguucuuagacgagaagaa

SEQ ID NO: 2597180 - RNA, 19 nt, Artificial Sequence
  Description of Artificial Sequence: Synthetic oligonucleotide
ggcauuacuuuccuugaug

SEQ ID NO: 2597181 - RNA, 19 nt, Artificial Sequence
  Description of Artificial Sequence: Synthetic oligonucleotide
guuggcgugagcaaagcuc

SEQ ID NO: 2597182 - RNA, 19 nt, Artificial Sequence
  Description of Artificial Sequence: Synthetic oligonucleotide
gucaccgccaucuuccauc

SEQ ID NO: 2597183 - RNA, 19 nt, Artificial Sequence
  Description of Artificial Sequence: Synthetic oligonucleotide
guuggucguucuaacaaug

SEQ ID NO: 2597184 - RNA, 19 nt, Artificial Sequence
  Description of Artificial Sequence: Synthetic oligonucleotide
gguacaguuggcgugagca

SEQ ID NO: 2597185 - RNA, 19 nt, Artificial Sequence
  Description of Artificial Sequence: Synthetic oligonucleotide
cuucccguccugcagcagc

SEQ ID NO: 2597186 - RNA, 19 nt, Artificial Sequence
  Description of Artificial Sequence: Synthetic oligonucleotide
uuggguaggggagguuucg

SEQ ID NO: 2597187 - RNA, 19 nt, Artificial Sequence
  Description of Artificial Sequence: Synthetic oligonucleotide
auuuucucacaaggaguuc

SEQ ID NO: 2597188 - RNA, 19 nt, Artificial Sequence
  Description of Artificial Sequence: Synthetic oligonucleotide
gcauuacuuuccuugauga

SEQ ID NO: 2597189 - RNA, 19 nt, Artificial Sequence
  Description of Artificial Sequence: Synthetic oligonucleotide
agacgagaagaagcugccc

SEQ ID NO: 2597190 - RNA, 19 nt, Artificial Sequence
  Description of Artificial Sequence: Synthetic oligonucleotide
gauaagagaugaucagggu

SEQ ID NO: 2597191 - RNA, 19 nt, Artificial Sequence
  Description of Artificial Sequence: Synthetic oligonucleotide
ucaccgccaucuuccaucc

SEQ ID NO: 2597192 - RNA, 19 nt, Artificial Sequence
  Description of Artificial Sequence: Synthetic oligonucleotide
acagcuacugggucuuaca

SEQ ID NO: 2597193 - RNA, 19 nt, Artificial Sequence
  Description of Artificial Sequence: Synthetic oligonucleotide
ucauccagaggaagcuggu

SEQ ID NO: 2597194 - RNA, 19 nt, Artificial Sequence
  Description of Artificial Sequence: Synthetic oligonucleotide
cagcuacugggucuuacag

SEQ ID NO: 2597195 - RNA, 19 nt, Artificial Sequence
  Description of Artificial Sequence: Synthetic oligonucleotide
gaagaugggauuggcauua

SEQ ID NO: 2597196 - RNA, 19 nt, Artificial Sequence
  Description of Artificial Sequence: Synthetic oligonucleotide
caugaagaugggauuggca

SEQ ID NO: 2597197 - RNA, 19 nt, Artificial Sequence
  Description of Artificial Sequence: Synthetic oligonucleotide
agcgccgucuucucggcag

SEQ ID NO: 2597198 - RNA, 19 nt, Artificial Sequence
  Description of Artificial Sequence: Synthetic oligonucleotide
gcucagugcagaaucaucc

SEQ ID NO: 2597199 - RNA, 19 nt, Artificial Sequence
  Description of Artificial Sequence: Synthetic oligonucleotide
uugguguccuugcgcauga

SEQ ID NO: 2597200 - RNA, 19 nt, Artificial Sequence
  Description of Artificial Sequence: Synthetic oligonucleotide
acgagaagaagcugcccgu

SEQ ID NO: 2597201 - RNA, 19 nt, Artificial Sequence
  Description of Artificial Sequence: Synthetic oligonucleotide
uacaguuggcgugagcaaa

SEQ ID NO: 2597202 - RNA, 19 nt, Artificial Sequence
  Description of Artificial Sequence: Synthetic oligonucleotide
cuauagacauccuuugggu

SEQ ID NO: 2597203 - RNA, 19 nt, Artificial Sequence
  Description of Artificial Sequence: Synthetic oligonucleotide
uccuucuguagcucugacu

SEQ ID NO: 2597204 - RNA, 19 nt, Artificial Sequence
  Description of Artificial Sequence: Synthetic oligonucleotide
gaguucacucgucuucuca

SEQ ID NO: 2597205 - RNA, 19 nt, Artificial Sequence
  Description of Artificial Sequence: Synthetic oligonucleotide
ucucccacuucaagcugcc

SEQ ID NO: 2597206 - RNA, 19 nt, Artificial Sequence
  Description of Artificial Sequence: Synthetic oligonucleotide
aagaugggauuggcauuac

SEQ ID NO: 2597207 - RNA, 19 nt, Artificial Sequence
  Description of Artificial Sequence: Synthetic oligonucleotide
agcucagaccccaggcucc

SEQ ID NO: 2597208 - RNA, 19 nt, Artificial Sequence
  Description of Artificial Sequence: Synthetic oligonucleotide
cacuggaggugcaaggcuc

SEQ ID NO: 2597209 - RNA, 19 nt, Artificial Sequence
  Description of Artificial Sequence: Synthetic oligonucleotide
uaacaaugacacagcgcuc

SEQ ID NO: 2597210 - RNA, 19 nt, Artificial Sequence
  Description of Artificial Sequence: Synthetic oligonucleotide
cuuagacgagaagaagcug

SEQ ID NO: 2597211 - RNA, 19 nt, Artificial Sequence
  Description of Artificial Sequence: Synthetic oligonucleotide
aagagaugaucaggguaca

SEQ ID NO: 2597212 - RNA, 19 nt, Artificial Sequence
  Description of Artificial Sequence: Synthetic oligonucleotide
ccacagagacacuauagac

SEQ ID NO: 2597213 - RNA, 19 nt, Artificial Sequence
  Description of Artificial Sequence: Synthetic oligonucleotide
agcccgcaagcucuccagc

SEQ ID NO: 2597214 - RNA, 19 nt, Artificial Sequence
  Description of Artificial Sequence: Synthetic oligonucleotide
ugccacuggcccaaggcuc

SEQ ID NO: 2597215 - RNA, 19 nt, Artificial Sequence
  Description of Artificial Sequence: Synthetic oligonucleotide
ugcgcaugaagaugggauu

SEQ ID NO: 2597216 - RNA, 19 nt, Artificial Sequence
  Description of Artificial Sequence: Synthetic oligonucleotide
aguuggcgugagcaaagcu

SEQ ID NO: 2597217 - RNA, 19 nt, Artificial Sequence
  Description of Artificial Sequence: Synthetic oligonucleotide
gaaucauccagaggaagcu

SEQ ID NO: 2597218 - RNA, 19 nt, Artificial Sequence
  Description of Artificial Sequence: Synthetic oligonucleotide
cuccuuuggcuucugauaa

SEQ ID NO: 2597219 - RNA, 19 nt, Artificial Sequence
  Description of Artificial Sequence: Synthetic oligonucleotide
cuucucggcagcccgcaag

SEQ ID NO: 2597220 - RNA, 19 nt, Artificial Sequence
  Description of Artificial Sequence: Synthetic oligonucleotide
cuccugagagcacuggcuc

SEQ ID NO: 2597221 - RNA, 19 nt, Artificial Sequence
  Description of Artificial Sequence: Synthetic oligonucleotide
ggaggugcaaggcucagga

SEQ ID NO: 2597222 - RNA, 19 nt, Artificial Sequence
  Description of Artificial Sequence: Synthetic oligonucleotide
ugggccgucuuuaccuucu

SEQ ID NO: 2597223 - RNA, 19 nt, Artificial Sequence
  Description of Artificial Sequence: Synthetic oligonucleotide
ugagagcacuggcucuccc

SEQ ID NO: 2597224 - RNA, 19 nt, Artificial Sequence
  Description of Artificial Sequence: Synthetic oligonucleotide
ugcaaggcucaggacagcu

SEQ ID NO: 2597225 - RNA, 19 nt, Artificial Sequence
  Description of Artificial Sequence: Synthetic oligonucleotide
uuucugggccacagagaca

SEQ ID NO: 2597226 - RNA, 19 nt, Artificial Sequence
  Description of Artificial Sequence: Synthetic oligonucleotide
ggaauggagaacuucuugu

SEQ ID NO: 2597227 - RNA, 19 nt, Artificial Sequence
  Description of Artificial Sequence: Synthetic oligonucleotide
ugucugucuaggucaggaa

SEQ ID NO: 2597228 - RNA, 19 nt, Artificial Sequence
  Description of Artificial Sequence: Synthetic oligonucleotide
uaggucaggaauggagaac

SEQ ID NO: 2597229 - RNA, 19 nt, Artificial Sequence
  Description of Artificial Sequence: Synthetic oligonucleotide
accccaggcucccggcucc

SEQ ID NO: 2597230 - RNA, 19 nt, Artificial Sequence
  Description of Artificial Sequence: Synthetic oligonucleotide
uccugagagcacuggcucu

SEQ ID NO: 2597231 - RNA, 19 nt, Artificial Sequence
  Description of Artificial Sequence: Synthetic oligonucleotide
acaguuggcgugagcaaag

SEQ ID NO: 2597232 - RNA, 19 nt, Artificial Sequence
  Description of Artificial Sequence: Synthetic oligonucleotide
ggucguucuaacaaugaca

SEQ ID NO: 2597233 - RNA, 19 nt, Artificial Sequence
  Description of Artificial Sequence: Synthetic oligonucleotide
agagaugaucaggguacag

SEQ ID NO: 2597234 - RNA, 19 nt, Artificial Sequence
  Description of Artificial Sequence: Synthetic oligonucleotide
ucguucuaacaaugacaca

SEQ ID NO: 2597235 - RNA, 19 nt, Artificial Sequence
  Description of Artificial Sequence: Synthetic oligonucleotide
gggauuggcauuacuuucc

SEQ ID NO: 2597236 - RNA, 19 nt, Artificial Sequence
  Description of Artificial Sequence: Synthetic oligonucleotide
ucacucgucuucucaucgu

SEQ ID NO: 2597237 - RNA, 19 nt, Artificial Sequence
  Description of Artificial Sequence: Synthetic oligonucleotide
gaugggauuggcauuacuu

SEQ ID NO: 2597238 - RNA, 19 nt, Artificial Sequence
  Description of Artificial Sequence: Synthetic oligonucleotide
cacuucaagcugccacugg

SEQ ID NO: 2597239 - RNA, 19 nt, Artificial Sequence
  Description of Artificial Sequence: Synthetic oligonucleotide
cuaggucaggaauggagaa

SEQ ID NO: 2597240 - RNA, 19 nt, Artificial Sequence
  Description of Artificial Sequence: Synthetic oligonucleotide
ggagguuucgaauccgcca

SEQ ID NO: 2597241 - RNA, 19 nt, Artificial Sequence
  Description of Artificial Sequence: Synthetic oligonucleotide
aggaguucacucgucuucu

SEQ ID NO: 2597242 - RNA, 19 nt, Artificial Sequence
  Description of Artificial Sequence: Synthetic oligonucleotide
agcugcccgugccagaaga

SEQ ID NO: 2597243 - RNA, 19 nt, Artificial Sequence
  Description of Artificial Sequence: Synthetic oligonucleotide
agaugggauuggcauuacu

SEQ ID NO: 2597244 - RNA, 19 nt, Artificial Sequence
  Description of Artificial Sequence: Synthetic oligonucleotide
uggcauuacuuuccuugau

SEQ ID NO: 2597245 - RNA, 19 nt, Artificial Sequence
  Description of Artificial Sequence: Synthetic oligonucleotide
cucagugcagaaucaucca

SEQ ID NO: 2597246 - RNA, 19 nt, Artificial Sequence
  Description of Artificial Sequence: Synthetic oligonucleotide
gacauccuuuggguagggg

SEQ ID NO: 2597247 - RNA, 19 nt, Artificial Sequence
  Description of Artificial Sequence: Synthetic oligonucleotide
gcgugagcaaagcucagug

SEQ ID NO: 2597248 - RNA, 19 nt, Artificial Sequence
  Description of Artificial Sequence: Synthetic oligonucleotide
gagaugaucaggguacagu

SEQ ID NO: 2597249 - RNA, 19 nt, Artificial Sequence
  Description of Artificial Sequence: Synthetic oligonucleotide
agcaaagcucagugcagaa

SEQ ID NO: 2597250 - RNA, 19 nt, Artificial Sequence
  Description of Artificial Sequence: Synthetic oligonucleotide
gguguccuugcgcaugaag

SEQ ID NO: 2597251 - RNA, 19 nt, Artificial Sequence
  Description of Artificial Sequence: Synthetic oligonucleotide
gagcaaagcucagugcaga

SEQ ID NO: 2597252 - RNA, 19 nt, Artificial Sequence
  Description of Artificial Sequence: Synthetic oligonucleotide
acugggucuuacagucccc

SEQ ID NO: 2597253 - RNA, 19 nt, Artificial Sequence
  Description of Artificial Sequence: Synthetic oligonucleotide
gagccaagcccacaagucu

SEQ ID NO: 2597254 - RNA, 19 nt, Artificial Sequence
  Description of Artificial Sequence: Synthetic oligonucleotide
uuuugguguccuugcgcau

SEQ ID NO: 2597255 - RNA, 19 nt, Artificial Sequence
  Description of Artificial Sequence: Synthetic oligonucleotide
guucacucgucuucucauc

SEQ ID NO: 2597256 - RNA, 19 nt, Artificial Sequence
  Description of Artificial Sequence: Synthetic oligonucleotide
augacacagcgcucuuucu

SEQ ID NO: 2597257 - RNA, 19 nt, Artificial Sequence
  Description of Artificial Sequence: Synthetic oligonucleotide
ucguauucuuccgccauuu

SEQ ID NO: 2597258 - RNA, 19 nt, Artificial Sequence
  Description of Artificial Sequence: Synthetic oligonucleotide
uucucacaaggaguucacu

SEQ ID NO: 2597259 - RNA, 19 nt, Artificial Sequence
  Description of Artificial Sequence: Synthetic oligonucleotide
cacaaggaguucacucguc

SEQ ID NO: 2597260 - RNA, 19 nt, Artificial Sequence
  Description of Artificial Sequence: Synthetic oligonucleotide
gcugccacuggcccaaggc

SEQ ID NO: 2597261 - RNA, 19 nt, Artificial Sequence
  Description of Artificial Sequence: Synthetic oligonucleotide
ccgucuuuaccuucuuuag

SEQ ID NO: 2597262 - RNA, 19 nt, Artificial Sequence
  Description of Artificial Sequence: Synthetic oligonucleotide
aggggagguuucgaauccg

SEQ ID NO: 2597263 - RNA, 19 nt, Artificial Sequence
  Description of Artificial Sequence: Synthetic oligonucleotide
ggccacagagacacuauag

SEQ ID NO: 2597264 - RNA, 19 nt, Artificial Sequence
  Description of Artificial Sequence: Synthetic oligonucleotide
guccuugcgcaugaagaug

SEQ ID NO: 2597265 - RNA, 19 nt, Artificial Sequence
  Description of Artificial Sequence: Synthetic oligonucleotide
gggaacaaauagugcacca

SEQ ID NO: 2597266 - RNA, 19 nt, Artificial Sequence
  Description of Artificial Sequence: Synthetic oligonucleotide
uggcgugagcaaagcucag

SEQ ID NO: 2597267 - RNA, 19 nt, Artificial Sequence
  Description of Artificial Sequence: Synthetic oligonucleotide
auucuuccgccauuuccuu

SEQ ID NO: 2597268 - RNA, 19 nt, Artificial Sequence
  Description of Artificial Sequence: Synthetic oligonucleotide
ggcuucugauaagagauga

SEQ ID NO: 2597269 - RNA, 19 nt, Artificial Sequence
  Description of Artificial Sequence: Synthetic oligonucleotide
gacagcuacugggucuuac

SEQ ID NO: 2597270 - RNA, 19 nt, Artificial Sequence
  Description of Artificial Sequence: Synthetic oligonucleotide
aguuuccuccacacuggag

SEQ ID NO: 2597271 - RNA, 19 nt, Artificial Sequence
  Description of Artificial Sequence: Synthetic oligonucleotide
aagcugcccgugccagaag

SEQ ID NO: 2597272 - RNA, 19 nt, Artificial Sequence
  Description of Artificial Sequence: Synthetic oligonucleotide
ucccauccgggaacaaaua

SEQ ID NO: 2597273 - RNA, 19 nt, Artificial Sequence
  Description of Artificial Sequence: Synthetic oligonucleotide
cauccucuucccguccugc

SEQ ID NO: 2597274 - RNA, 19 nt, Artificial Sequence
  Description of Artificial Sequence: Synthetic oligonucleotide
gaggugcaaggcucaggac

SEQ ID NO: 2597275 - RNA, 19 nt, Artificial Sequence
  Description of Artificial Sequence: Synthetic oligonucleotide
agguuucgaauccgccacu

SEQ ID NO: 2597276 - RNA, 19 nt, Artificial Sequence
  Description of Artificial Sequence: Synthetic oligonucleotide
gaagcugcccgugccagaa

SEQ ID NO: 2597277 - RNA, 19 nt, Artificial Sequence
  Description of Artificial Sequence: Synthetic oligonucleotide
ccacacuggaggugcaagg

SEQ ID NO: 2597278 - RNA, 19 nt, Artificial Sequence
  Description of Artificial Sequence: Synthetic oligonucleotide
uagucaccgccaucuucca

SEQ ID NO: 2597279 - RNA, 19 nt, Artificial Sequence
  Description of Artificial Sequence: Synthetic oligonucleotide
cccauccgggaacaaauag

SEQ ID NO: 2597280 - RNA, 19 nt, Artificial Sequence
  Description of Artificial Sequence: Synthetic oligonucleotide
uccuuuggguaggggaggu

SEQ ID NO: 2597281 - RNA, 19 nt, Artificial Sequence
  Description of Artificial Sequence: Synthetic oligonucleotide
gucugucuaggucaggaau

SEQ ID NO: 2597282 - RNA, 19 nt, Artificial Sequence
  Description of Artificial Sequence: Synthetic oligonucleotide
gacucagccgccaggaccu

SEQ ID NO: 2597283 - RNA, 19 nt, Artificial Sequence
  Description of Artificial Sequence: Synthetic oligonucleotide
cagcccgcaagcucuccag

SEQ ID NO: 2597284 - RNA, 19 nt, Artificial Sequence
  Description of Artificial Sequence: Synthetic oligonucleotide
acucgccauuuucucacaa

SEQ ID NO: 2597285 - RNA, 19 nt, Artificial Sequence
  Description of Artificial Sequence: Synthetic oligonucleotide
ccgggaacaaauagugcac

SEQ ID NO: 2597286 - RNA, 19 nt, Artificial Sequence
  Description of Artificial Sequence: Synthetic oligonucleotide
gugcaccauccucuucccg

SEQ ID NO: 2597287 - RNA, 19 nt, Artificial Sequence
  Description of Artificial Sequence: Synthetic oligonucleotide
ugcugugggccgucuuuac

SEQ ID NO: 2597288 - RNA, 19 nt, Artificial Sequence
  Description of Artificial Sequence: Synthetic oligonucleotide
guacaguuggcgugagcaa

SEQ ID NO: 2597289 - RNA, 19 nt, Artificial Sequence
  Description of Artificial Sequence: Synthetic oligonucleotide
agacauccuuuggguaggg

SEQ ID NO: 2597290 - RNA, 19 nt, Artificial Sequence
  Description of Artificial Sequence: Synthetic oligonucleotide
cauccagaggaagcuggug

SEQ ID NO: 2597291 - RNA, 19 nt, Artificial Sequence
  Description of Artificial Sequence: Synthetic oligonucleotide
aaggcucaggacagcuacu

SEQ ID NO: 2597292 - RNA, 19 nt, Artificial Sequence
  Description of Artificial Sequence: Synthetic oligonucleotide
agaagcugcccgugccaga

SEQ ID NO: 2597293 - RNA, 19 nt, Artificial Sequence
  Description of Artificial Sequence: Synthetic oligonucleotide
ccauuuccuucccauccgg

SEQ ID NO: 2597294 - RNA, 19 nt, Artificial Sequence
  Description of Artificial Sequence: Synthetic oligonucleotide
aauccgccacuggaaacuu

SEQ ID NO: 2597295 - RNA, 19 nt, Artificial Sequence
  Description of Artificial Sequence: Synthetic oligonucleotide
agcgcucuuucugggccac

SEQ ID NO: 2597296 - RNA, 19 nt, Artificial Sequence
  Description of Artificial Sequence: Synthetic oligonucleotide
cucaggacagcuacugggu

SEQ ID NO: 2597297 - RNA, 19 nt, Artificial Sequence
  Description of Artificial Sequence: Synthetic oligonucleotide
cucggcagcccgcaagcuc

SEQ ID NO: 2597298 - RNA, 19 nt, Artificial Sequence
  Description of Artificial Sequence: Synthetic oligonucleotide
acuggaggugcaaggcuca

SEQ ID NO: 2597299 - RNA, 19 nt, Artificial Sequence
  Description of Artificial Sequence: Synthetic oligonucleotide
gccgucuuuaccuucuuua

SEQ ID NO: 2597300 - RNA, 19 nt, Artificial Sequence
  Description of Artificial Sequence: Synthetic oligonucleotide
uccuucccauccgggaaca

SEQ ID NO: 2597301 - RNA, 19 nt, Artificial Sequence
  Description of Artificial Sequence: Synthetic oligonucleotide
ggagaacuucuuguaguac

SEQ ID NO: 2597302 - RNA, 19 nt, Artificial Sequence
  Description of Artificial Sequence: Synthetic oligonucleotide
gguuucgaauccgccacug

SEQ ID NO: 2597303 - RNA, 19 nt, Artificial Sequence
  Description of Artificial Sequence: Synthetic oligonucleotide
uggguaggggagguuucga

SEQ ID NO: 2597304 - RNA, 19 nt, Artificial Sequence
  Description of Artificial Sequence: Synthetic oligonucleotide
uacuuuccuugaugagcuc

SEQ ID NO: 2597305 - RNA, 19 nt, Artificial Sequence
  Description of Artificial Sequence: Synthetic oligonucleotide
ggcuccugagagcacuggc

SEQ ID NO: 2597306 - RNA, 19 nt, Artificial Sequence
  Description of Artificial Sequence: Synthetic oligonucleotide
caguuggcgugagcaaagc

SEQ ID NO: 2597307 - RNA, 19 nt, Artificial Sequence
  Description of Artificial Sequence: Synthetic oligonucleotide
caggcucccggcuccugag

SEQ ID NO: 2597308 - RNA, 19 nt, Artificial Sequence
  Description of Artificial Sequence: Synthetic oligonucleotide
uuccgccauuuccuuccca

SEQ ID NO: 2597309 - RNA, 19 nt, Artificial Sequence
  Description of Artificial Sequence: Synthetic oligonucleotide
ugggucuuacaguccccau

SEQ ID NO: 2597310 - RNA, 19 nt, Artificial Sequence
  Description of Artificial Sequence: Synthetic oligonucleotide
gcuagucaccgccaucuuc

SEQ ID NO: 2597311 - RNA, 19 nt, Artificial Sequence
  Description of Artificial Sequence: Synthetic oligonucleotide
cuuccgccauuuccuuccc

SEQ ID NO: 2597312 - RNA, 19 nt, Artificial Sequence
  Description of Artificial Sequence: Synthetic oligonucleotide
gcgcaugaagaugggauug

SEQ ID NO: 2597313 - RNA, 19 nt, Artificial Sequence
  Description of Artificial Sequence: Synthetic oligonucleotide
caccauccucuucccgucc

SEQ ID NO: 2597314 - RNA, 19 nt, Artificial Sequence
  Description of Artificial Sequence: Synthetic oligonucleotide
cccacaagucucaguuucc

SEQ ID NO: 2597315 - RNA, 19 nt, Artificial Sequence
  Description of Artificial Sequence: Synthetic oligonucleotide
cagagacacuauagacauc

SEQ ID NO: 2597316 - RNA, 19 nt, Artificial Sequence
  Description of Artificial Sequence: Synthetic oligonucleotide
cgugagcaaagcucagugc

SEQ ID NO: 2597317 - RNA, 19 nt, Artificial Sequence
  Description of Artificial Sequence: Synthetic oligonucleotide
ccucuucccguccugcagc

SEQ ID NO: 2597318 - RNA, 19 nt, Artificial Sequence
  Description of Artificial Sequence: Synthetic oligonucleotide
gcaugaagaugggauuggc

SEQ ID NO: 2597319 - RNA, 19 nt, Artificial Sequence
  Description of Artificial Sequence: Synthetic oligonucleotide
aggacagcuacugggucuu

SEQ ID NO: 2597320 - RNA, 19 nt, Artificial Sequence
  Description of Artificial Sequence: Synthetic oligonucleotide
cugagagcacuggcucucc

SEQ ID NO: 2597321 - RNA, 19 nt, Artificial Sequence
  Description of Artificial Sequence: Synthetic oligonucleotide
cacuggcucucccacuuca

SEQ ID NO: 2597322 - RNA, 19 nt, Artificial Sequence
  Description of Artificial Sequence: Synthetic oligonucleotide
gaccccaggcucccggcuc

SEQ ID NO: 2597323 - RNA, 19 nt, Artificial Sequence
  Description of Artificial Sequence: Synthetic oligonucleotide
cuugcgcaugaagauggga

SEQ ID NO: 2597324 - RNA, 19 nt, Artificial Sequence
  Description of Artificial Sequence: Synthetic oligonucleotide
gucuuacaguccccaucac

SEQ ID NO: 2597325 - RNA, 19 nt, Artificial Sequence
  Description of Artificial Sequence: Synthetic oligonucleotide
ggcucucccacuucaagcu

SEQ ID NO: 2597326 - RNA, 19 nt, Artificial Sequence
  Description of Artificial Sequence: Synthetic oligonucleotide
ccgucuucucggcagcccg

SEQ ID NO: 2597327 - RNA, 19 nt, Artificial Sequence
  Description of Artificial Sequence: Synthetic oligonucleotide
cugacucagccgccaggac

SEQ ID NO: 2597328 - RNA, 19 nt, Artificial Sequence
  Description of Artificial Sequence: Synthetic oligonucleotide
gggagguuucgaauccgcc

SEQ ID NO: 2597329 - RNA, 19 nt, Artificial Sequence
  Description of Artificial Sequence: Synthetic oligonucleotide
caggguacaguuggcguga

SEQ ID NO: 2597330 - RNA, 19 nt, Artificial Sequence
  Description of Artificial Sequence: Synthetic oligonucleotide
ccaucacugcugugggccg

SEQ ID NO: 2597331 - RNA, 19 nt, Artificial Sequence
  Description of Artificial Sequence: Synthetic oligonucleotide
agucaccgccaucuuccau

SEQ ID NO: 2597332 - RNA, 19 nt, Artificial Sequence
  Description of Artificial Sequence: Synthetic oligonucleotide
acucgucuucucaucguau

SEQ ID NO: 2597333 - RNA, 19 nt, Artificial Sequence
  Description of Artificial Sequence: Synthetic oligonucleotide
caggacagcuacugggucu

SEQ ID NO: 2597334 - RNA, 19 nt, Artificial Sequence
  Description of Artificial Sequence: Synthetic oligonucleotide
gcccgcaagcucuccagcc

SEQ ID NO: 2597335 - RNA, 19 nt, Artificial Sequence
  Description of Artificial Sequence: Synthetic oligonucleotide
cugggucuuacagucccca

SEQ ID NO: 2597336 - RNA, 19 nt, Artificial Sequence
  Description of Artificial Sequence: Synthetic oligonucleotide
agcccacaagucucaguuu

SEQ ID NO: 2597337 - RNA, 19 nt, Artificial Sequence
  Description of Artificial Sequence: Synthetic oligonucleotide
ggaagcuggugucugucua

SEQ ID NO: 2597338 - RNA, 19 nt, Artificial Sequence
  Description of Artificial Sequence: Synthetic oligonucleotide
cgugccagaagagccaagc

SEQ ID NO: 2597339 - RNA, 19 nt, Artificial Sequence
  Description of Artificial Sequence: Synthetic oligonucleotide
caguuuccuccacacugga

SEQ ID NO: 2597340 - RNA, 19 nt, Artificial Sequence
  Description of Artificial Sequence: Synthetic oligonucleotide
cagcuagucaccgccaucu

SEQ ID NO: 2597341 - RNA, 19 nt, Artificial Sequence
  Description of Artificial Sequence: Synthetic oligonucleotide
cucuucccguccugcagca

SEQ ID NO: 2597342 - RNA, 19 nt, Artificial Sequence
  Description of Artificial Sequence: Synthetic oligonucleotide
aaggcucccagggcauuuu

SEQ ID NO: 2597343 - RNA, 19 nt, Artificial Sequence
  Description of Artificial Sequence: Synthetic oligonucleotide
cacucgucuucucaucgua

SEQ ID NO: 2597344 - RNA, 19 nt, Artificial Sequence
  Description of Artificial Sequence: Synthetic oligonucleotide
aguccccaucacugcugug

SEQ ID NO: 2597345 - RNA, 19 nt, Artificial Sequence
  Description of Artificial Sequence: Synthetic oligonucleotide
caagcugccacuggcccaa

SEQ ID NO: 2597346 - RNA, 19 nt, Artificial Sequence
  Description of Artificial Sequence: Synthetic oligonucleotide
cuucccauccgggaacaaa

SEQ ID NO: 2597347 - RNA, 19 nt, Artificial Sequence
  Description of Artificial Sequence: Synthetic oligonucleotide
ggggagguuucgaauccgc

SEQ ID NO: 2597348 - RNA, 19 nt, Artificial Sequence
  Description of Artificial Sequence: Synthetic oligonucleotide
ccguccugcagcagcgccg

SEQ ID NO: 2597349 - RNA, 19 nt, Artificial Sequence
  Description of Artificial Sequence: Synthetic oligonucleotide
cuggaggugcaaggcucag

SEQ ID NO: 2597350 - RNA, 19 nt, Artificial Sequence
  Description of Artificial Sequence: Synthetic oligonucleotide
gguaggggagguuucgaau

SEQ ID NO: 2597351 - RNA, 19 nt, Artificial Sequence
  Description of Artificial Sequence: Synthetic oligonucleotide
ucucggcagcccgcaagcu

SEQ ID NO: 2597352 - RNA, 19 nt, Artificial Sequence
  Description of Artificial Sequence: Synthetic oligonucleotide
gaccuccuuuggcuucuga

SEQ ID NO: 2597353 - RNA, 19 nt, Artificial Sequence
  Description of Artificial Sequence: Synthetic oligonucleotide
gccaggaccuccuuuggcu

SEQ ID NO: 2597354 - RNA, 19 nt, Artificial Sequence
  Description of Artificial Sequence: Synthetic oligonucleotide
gauuggcauuacuuuccuu

SEQ ID NO: 2597355 - RNA, 19 nt, Artificial Sequence
  Description of Artificial Sequence: Synthetic oligonucleotide
cuuuggguaggggagguuu

SEQ ID NO: 2597356 - RNA, 19 nt, Artificial Sequence
  Description of Artificial Sequence: Synthetic oligonucleotide
agcuagucaccgccaucuu

SEQ ID NO: 2597357 - RNA, 19 nt, Artificial Sequence
  Description of Artificial Sequence: Synthetic oligonucleotide
ggauuggcauuacuuuccu

SEQ ID NO: 2597358 - RNA, 19 nt, Artificial Sequence
  Description of Artificial Sequence: Synthetic oligonucleotide
cgggaacaaauagugcacc

SEQ ID NO: 2597359 - RNA, 19 nt, Artificial Sequence
  Description of Artificial Sequence: Synthetic oligonucleotide
aggguacaguuggcgugag

SEQ ID NO: 2597360 - RNA, 19 nt, Artificial Sequence
  Description of Artificial Sequence: Synthetic oligonucleotide
gcaccauccucuucccguc

SEQ ID NO: 2597361 - RNA, 19 nt, Artificial Sequence
  Description of Artificial Sequence: Synthetic oligonucleotide
cgcaugaagaugggauugg

SEQ ID NO: 2597362 - RNA, 19 nt, Artificial Sequence
  Description of Artificial Sequence: Synthetic oligonucleotide
ccgcaagcucuccagccag

SEQ ID NO: 2597363 - RNA, 19 nt, Artificial Sequence
  Description of Artificial Sequence: Synthetic oligonucleotide
ggcccaaggcucccagggc

SEQ ID NO: 2597364 - RNA, 19 nt, Artificial Sequence
  Description of Artificial Sequence: Synthetic oligonucleotide
aggcucccggcuccugaga

SEQ ID NO: 2597365 - RNA, 19 nt, Artificial Sequence
  Description of Artificial Sequence: Synthetic oligonucleotide
cugccacuggcccaaggcu

SEQ ID NO: 2597366 - RNA, 19 nt, Artificial Sequence
  Description of Artificial Sequence: Synthetic oligonucleotide
gucuucucggcagcccgca

SEQ ID NO: 2597367 - RNA, 19 nt, Artificial Sequence
  Description of Artificial Sequence: Synthetic oligonucleotide
cgaauccgccacuggaaac

SEQ ID NO: 2597368 - RNA, 19 nt, Artificial Sequence
  Description of Artificial Sequence: Synthetic oligonucleotide
cugggccacagagacacua

SEQ ID NO: 2597369 - RNA, 19 nt, Artificial Sequence
  Description of Artificial Sequence: Synthetic oligonucleotide
cucagaccccaggcucccg

SEQ ID NO: 2597370 - RNA, 19 nt, Artificial Sequence
  Description of Artificial Sequence: Synthetic oligonucleotide
ccauccgggaacaaauagu

SEQ ID NO: 2597371 - RNA, 19 nt, Artificial Sequence
  Description of Artificial Sequence: Synthetic oligonucleotide
ccugagagcacuggcucuc

SEQ ID NO: 2597372 - RNA, 19 nt, Artificial Sequence
  Description of Artificial Sequence: Synthetic oligonucleotide
cagcgcucuuucugggcca

SEQ ID NO: 2597373 - RNA, 19 nt, Artificial Sequence
  Description of Artificial Sequence: Synthetic oligonucleotide
caggaauggagaacuucuu

SEQ ID NO: 2597374 - RNA, 19 nt, Artificial Sequence
  Description of Artificial Sequence: Synthetic oligonucleotide
gagacacuauagacauccu

SEQ ID NO: 2597375 - RNA, 19 nt, Artificial Sequence
  Description of Artificial Sequence: Synthetic oligonucleotide
ggguacaguuggcgugagc

SEQ ID NO: 2597376 - RNA, 19 nt, Artificial Sequence
  Description of Artificial Sequence: Synthetic oligonucleotide
agccagcuagucaccgcca

SEQ ID NO: 2597377 - RNA, 19 nt, Artificial Sequence
  Description of Artificial Sequence: Synthetic oligonucleotide
auccgccacuggaaacuug

SEQ ID NO: 2597378 - RNA, 19 nt, Artificial Sequence
  Description of Artificial Sequence: Synthetic oligonucleotide
caagcccacaagucucagu

SEQ ID NO: 2597379 - RNA, 19 nt, Artificial Sequence
  Description of Artificial Sequence: Synthetic oligonucleotide
gugcaaggcucaggacagc

SEQ ID NO: 2597380 - RNA, 19 nt, Artificial Sequence
  Description of Artificial Sequence: Synthetic oligonucleotide
agccgccaggaccuccuuu

SEQ ID NO: 2597381 - RNA, 19 nt, Artificial Sequence
  Description of Artificial Sequence: Synthetic oligonucleotide
ccacuucaagcugccacug

SEQ ID NO: 2597382 - RNA, 19 nt, Artificial Sequence
  Description of Artificial Sequence: Synthetic oligonucleotide
gcugcccgugccagaagag

SEQ ID NO: 2597383 - RNA, 19 nt, Artificial Sequence
  Description of Artificial Sequence: Synthetic oligonucleotide
gcagcgccgucuucucggc

SEQ ID NO: 2597384 - RNA, 19 nt, Artificial Sequence
  Description of Artificial Sequence: Synthetic oligonucleotide
aagcugccacuggcccaag

SEQ ID NO: 2597385 - RNA, 19 nt, Artificial Sequence
  Description of Artificial Sequence: Synthetic oligonucleotide
cccguccugcagcagcgcc

SEQ ID NO: 2597386 - RNA, 19 nt, Artificial Sequence
  Description of Artificial Sequence: Synthetic oligonucleotide
caagcucuccagccagcua

SEQ ID NO: 2597387 - RNA, 19 nt, Artificial Sequence
  Description of Artificial Sequence: Synthetic oligonucleotide
gcagcccgcaagcucucca

SEQ ID NO: 2597388 - RNA, 19 nt, Artificial Sequence
  Description of Artificial Sequence: Synthetic oligonucleotide
ccagcuagucaccgccauc

SEQ ID NO: 2597389 - RNA, 19 nt, Artificial Sequence
  Description of Artificial Sequence: Synthetic oligonucleotide
cccacuucaagcugccacu

SEQ ID NO: 2597390 - RNA, 19 nt, Artificial Sequence
  Description of Artificial Sequence: Synthetic oligonucleotide
gggccacagagacacuaua

SEQ ID NO: 2597391 - RNA, 19 nt, Artificial Sequence
  Description of Artificial Sequence: Synthetic oligonucleotide
gcucagaccccaggcuccc

SEQ ID NO: 2597392 - RNA, 19 nt, Artificial Sequence
  Description of Artificial Sequence: Synthetic oligonucleotide
cgagaagaagcugcccgug

SEQ ID NO: 2597393 - RNA, 19 nt, Artificial Sequence
  Description of Artificial Sequence: Synthetic oligonucleotide
ccgccaggaccuccuuugg

SEQ ID NO: 2597394 - RNA, 19 nt, Artificial Sequence
  Description of Artificial Sequence: Synthetic oligonucleotide
gcuccugagagcacuggcu

SEQ ID NO: 2597395 - RNA, 19 nt, Artificial Sequence
  Description of Artificial Sequence: Synthetic oligonucleotide
ccauccucuucccguccug

SEQ ID NO: 2597396 - RNA, 19 nt, Artificial Sequence
  Description of Artificial Sequence: Synthetic oligonucleotide
ugguguccuugcgcaugaa

SEQ ID NO: 2597397 - RNA, 19 nt, Artificial Sequence
  Description of Artificial Sequence: Synthetic oligonucleotide
cguauucuuccgccauuuc

SEQ ID NO: 2597398 - RNA, 19 nt, Artificial Sequence
  Description of Artificial Sequence: Synthetic oligonucleotide
gccgucuucucggcagccc

SEQ ID NO: 2597399 - RNA, 19 nt, Artificial Sequence
  Description of Artificial Sequence: Synthetic oligonucleotide
ccaagcccacaagucucag

SEQ ID NO: 2597400 - RNA, 19 nt, Artificial Sequence
  Description of Artificial Sequence: Synthetic oligonucleotide
cgcaagcucuccagccagc

SEQ ID NO: 2597401 - RNA, 19 nt, Artificial Sequence
  Description of Artificial Sequence: Synthetic oligonucleotide
gcgccgucuucucggcagc

SEQ ID NO: 2597402 - RNA, 19 nt, Artificial Sequence
  Description of Artificial Sequence: Synthetic oligonucleotide
cccgcaagcucuccagcca

SEQ ID NO: 2597403 - RNA, 19 nt, Artificial Sequence
  Description of Artificial Sequence: Synthetic oligonucleotide
ccggcuccugagagcacug

SEQ ID NO: 2597404 - RNA, 19 nt, Artificial Sequence
  Description of Artificial Sequence: Synthetic oligonucleotide
gcaaagcucagugcagaau

SEQ ID NO: 2597405 - RNA, 19 nt, Artificial Sequence
  Description of Artificial Sequence: Synthetic oligonucleotide
gcuucugauaagagaugau

SEQ ID NO: 2597406 - RNA, 19 nt, Artificial Sequence
  Description of Artificial Sequence: Synthetic oligonucleotide
ggcgugagcaaagcucagu

SEQ ID NO: 2597407 - RNA, 19 nt, Artificial Sequence
  Description of Artificial Sequence: Synthetic oligonucleotide
ccgugccagaagagccaag

SEQ ID NO: 2597408 - RNA, 19 nt, Artificial Sequence
  Description of Artificial Sequence: Synthetic oligonucleotide
gcccgugccagaagagcca

SEQ ID NO: 2597409 - RNA, 19 nt, Artificial Sequence
  Description of Artificial Sequence: Synthetic oligonucleotide
gcaaggcucaggacagcua

SEQ ID NO: 2597410 - RNA, 19 nt, Artificial Sequence
  Description of Artificial Sequence: Synthetic oligonucleotide
cagcgccgucuucucggca

SEQ ID NO: 2597411 - RNA, 19 nt, Artificial Sequence
  Description of Artificial Sequence: Synthetic oligonucleotide
ggcagcccgcaagcucucc

SEQ ID NO: 2597412 - RNA, 19 nt, Artificial Sequence
  Description of Artificial Sequence: Synthetic oligonucleotide
caucacugcugugggccgu

SEQ ID NO: 2597413 - RNA, 19 nt, Artificial Sequence
  Description of Artificial Sequence: Synthetic oligonucleotide
ccaggcucccggcuccuga

SEQ ID NO: 2597414 - RNA, 19 nt, Artificial Sequence
  Description of Artificial Sequence: Synthetic oligonucleotide
gccagcuagucaccgccau

SEQ ID NO: 2597415 - RNA, 19 nt, Artificial Sequence
  Description of Artificial Sequence: Synthetic oligonucleotide
caaggcucccagggcauuu

SEQ ID NO: 2597416 - RNA, 19 nt, Artificial Sequence
  Description of Artificial Sequence: Synthetic oligonucleotide
ggaccuccuuuggcuucug

SEQ ID NO: 2597417 - RNA, 19 nt, Artificial Sequence
  Description of Artificial Sequence: Synthetic oligonucleotide
cccgugccagaagagccaa

SEQ ID NO: 2597418 - RNA, 19 nt, Artificial Sequence
  Description of Artificial Sequence: Synthetic oligonucleotide
cacugcugugggccgucuu

SEQ ID NO: 2597419 - RNA, 19 nt, Artificial Sequence
  Description of Artificial Sequence: Synthetic oligonucleotide
cgccgucuucucggcagcc

SEQ ID NO: 2597420 - RNA, 19 nt, Artificial Sequence
  Description of Artificial Sequence: Synthetic oligonucleotide
cccggcuccugagagcacu

SEQ ID NO: 2597421 - RNA, 19 nt, Artificial Sequence
  Description of Artificial Sequence: Synthetic oligonucleotide
cggcagcccgcaagcucuc

SEQ ID NO: 2597422 - RNA, 19 nt, Artificial Sequence
  Description of Artificial Sequence: Synthetic oligonucleotide
gggccgucuuuaccuucuu

SEQ ID NO: 2597423 - RNA, 19 nt, Artificial Sequence
  Description of Artificial Sequence: Synthetic oligonucleotide
ccuucccauccgggaacaa

SEQ ID NO: 2597424 - RNA, 19 nt, Artificial Sequence
  Description of Artificial Sequence: Synthetic oligonucleotide
ccgccacuggaaacuuguu

SEQ ID NO: 2597425 - RNA, 19 nt, Artificial Sequence
  Description of Artificial Sequence: Synthetic oligonucleotide
ccuuuggguaggggagguu

SEQ ID NO: 2597426 - RNA, 19 nt, Artificial Sequence
  Description of Artificial Sequence: Synthetic oligonucleotide
ccaaggcucccagggcauu

SEQ ID NO: 2597427 - RNA, 19 nt, Artificial Sequence
  Description of Artificial Sequence: Synthetic oligonucleotide
uuccauaucaaugagaacg

SEQ ID NO: 2597428 - RNA, 19 nt, Artificial Sequence
  Description of Artificial Sequence: Synthetic oligonucleotide
uguuauuguacccuugacg

SEQ ID NO: 2597429 - RNA, 19 nt, Artificial Sequence
  Description of Artificial Sequence: Synthetic oligonucleotide
guuauuguacccuugacgc

SEQ ID NO: 2597430 - RNA, 19 nt, Artificial Sequence
  Description of Artificial Sequence: Synthetic oligonucleotide
agaacguuguuauuguacc

SEQ ID NO: 2597431 - RNA, 19 nt, Artificial Sequence
  Description of Artificial Sequence: Synthetic oligonucleotide
uuuuccauaucaaugagaa

SEQ ID NO: 2597432 - RNA, 19 nt, Artificial Sequence
  Description of Artificial Sequence: Synthetic oligonucleotide
uucaucacuaucuuuauga

SEQ ID NO: 2597433 - RNA, 19 nt, Artificial Sequence
  Description of Artificial Sequence: Synthetic oligonucleotide
uuucuugggaucauugugg

SEQ ID NO: 2597434 - RNA, 19 nt, Artificial Sequence
  Description of Artificial Sequence: Synthetic oligonucleotide
aaugagaacguuguuauug

SEQ ID NO: 2597435 - RNA, 19 nt, Artificial Sequence
  Description of Artificial Sequence: Synthetic oligonucleotide
gguagugucacucuuaagg

SEQ ID NO: 2597436 - RNA, 19 nt, Artificial Sequence
  Description of Artificial Sequence: Synthetic oligonucleotide
auccaugaggccuugaaac

SEQ ID NO: 2597437 - RNA, 19 nt, Artificial Sequence
  Description of Artificial Sequence: Synthetic oligonucleotide
agauuucacacccugcagc

SEQ ID NO: 2597438 - RNA, 19 nt, Artificial Sequence
  Description of Artificial Sequence: Synthetic oligonucleotide
uugaagauaauccuuccca

SEQ ID NO: 2597439 - RNA, 19 nt, Artificial Sequence
  Description of Artificial Sequence: Synthetic oligonucleotide
uucaaaugccaucugaaca

SEQ ID NO: 2597440 - RNA, 19 nt, Artificial Sequence
  Description of Artificial Sequence: Synthetic oligonucleotide
aagauaauccuucccaccu

SEQ ID NO: 2597441 - RNA, 19 nt, Artificial Sequence
  Description of Artificial Sequence: Synthetic oligonucleotide
uuuucuugggaucauugug

SEQ ID NO: 2597442 - RNA, 19 nt, Artificial Sequence
  Description of Artificial Sequence: Synthetic oligonucleotide
ucuuuaugagaacuguuug

SEQ ID NO: 2597443 - RNA, 19 nt, Artificial Sequence
  Description of Artificial Sequence: Synthetic oligonucleotide
cuuuaugagaacuguuugg

SEQ ID NO: 2597444 - RNA, 19 nt, Artificial Sequence
  Description of Artificial Sequence: Synthetic oligonucleotide
guuacaggaacccaguggc

SEQ ID NO: 2597445 - RNA, 19 nt, Artificial Sequence
  Description of Artificial Sequence: Synthetic oligonucleotide
cauuuugagacucugccag

SEQ ID NO: 2597446 - RNA, 19 nt, Artificial Sequence
  Description of Artificial Sequence: Synthetic oligonucleotide
guuaggacagauuucacac

SEQ ID NO: 2597447 - RNA, 19 nt, Artificial Sequence
  Description of Artificial Sequence: Synthetic oligonucleotide
acucuuaaggucugacucc

SEQ ID NO: 2597448 - RNA, 19 nt, Artificial Sequence
  Description of Artificial Sequence: Synthetic oligonucleotide
auuugguucucccaguaag

SEQ ID NO: 2597449 - RNA, 19 nt, Artificial Sequence
  Description of Artificial Sequence: Synthetic oligonucleotide
cucauuuugagacucugcc

SEQ ID NO: 2597450 - RNA, 19 nt, Artificial Sequence
  Description of Artificial Sequence: Synthetic oligonucleotide
uuugaagauaauccuuccc

SEQ ID NO: 2597451 - RNA, 19 nt, Artificial Sequence
  Description of Artificial Sequence: Synthetic oligonucleotide
uaggacagauuucacaccc

SEQ ID NO: 2597452 - RNA, 19 nt, Artificial Sequence
  Description of Artificial Sequence: Synthetic oligonucleotide
ucaaugagaacguuguuau

SEQ ID NO: 2597453 - RNA, 19 nt, Artificial Sequence
  Description of Artificial Sequence: Synthetic oligonucleotide
cuuuugaagauaauccuuc

SEQ ID NO: 2597454 - RNA, 19 nt, Artificial Sequence
  Description of Artificial Sequence: Synthetic oligonucleotide
ugcauaucugagaugaggu

SEQ ID NO: 2597455 - RNA, 19 nt, Artificial Sequence
  Description of Artificial Sequence: Synthetic oligonucleotide
cauaucaaugagaacguug

SEQ ID NO: 2597456 - RNA, 19 nt, Artificial Sequence
  Description of Artificial Sequence: Synthetic oligonucleotide
ugaaacacuugcagcaugc

SEQ ID NO: 2597457 - RNA, 19 nt, Artificial Sequence
  Description of Artificial Sequence: Synthetic oligonucleotide
uguuuucuugggaucauug

SEQ ID NO: 2597458 - RNA, 19 nt, Artificial Sequence
  Description of Artificial Sequence: Synthetic oligonucleotide
aguucucuccuuuugaaga

SEQ ID NO: 2597459 - RNA, 19 nt, Artificial Sequence
  Description of Artificial Sequence: Synthetic oligonucleotide
uuuaugagaacuguuuggu

SEQ ID NO: 2597460 - RNA, 19 nt, Artificial Sequence
  Description of Artificial Sequence: Synthetic oligonucleotide
gaugaggucucucacugcc

SEQ ID NO: 2597461 - RNA, 19 nt, Artificial Sequence
  Description of Artificial Sequence: Synthetic oligonucleotide
ucuaugguugggaagugca

SEQ ID NO: 2597462 - RNA, 19 nt, Artificial Sequence
  Description of Artificial Sequence: Synthetic oligonucleotide
gaggccuugaaacacuugc

SEQ ID NO: 2597463 - RNA, 19 nt, Artificial Sequence
  Description of Artificial Sequence: Synthetic oligonucleotide
uguuaggacagauuucaca

SEQ ID NO: 2597464 - RNA, 19 nt, Artificial Sequence
  Description of Artificial Sequence: Synthetic oligonucleotide
aaguucucuccuuuugaag

SEQ ID NO: 2597465 - RNA, 19 nt, Artificial Sequence
  Description of Artificial Sequence: Synthetic oligonucleotide
gaagauaauccuucccacc

SEQ ID NO: 2597466 - RNA, 19 nt, Artificial Sequence
  Description of Artificial Sequence: Synthetic oligonucleotide
uauuguacccuugacgcag

SEQ ID NO: 2597467 - RNA, 19 nt, Artificial Sequence
  Description of Artificial Sequence: Synthetic oligonucleotide
ugccaggcuguucauaacg

SEQ ID NO: 2597468 - RNA, 19 nt, Artificial Sequence
  Description of Artificial Sequence: Synthetic oligonucleotide
uccuuguuaggacagauuu

SEQ ID NO: 2597469 - RNA, 19 nt, Artificial Sequence
  Description of Artificial Sequence: Synthetic oligonucleotide
cucacuguguauuugguuc

SEQ ID NO: 2597470 - RNA, 19 nt, Artificial Sequence
  Description of Artificial Sequence: Synthetic oligonucleotide
uuuugaagauaauccuucc

SEQ ID NO: 2597471 - RNA, 19 nt, Artificial Sequence
  Description of Artificial Sequence: Synthetic oligonucleotide
auuucuaugguugggaagu

SEQ ID NO: 2597472 - RNA, 19 nt, Artificial Sequence
  Description of Artificial Sequence: Synthetic oligonucleotide
cauaacgucuuccuucucc

SEQ ID NO: 2597473 - RNA, 19 nt, Artificial Sequence
  Description of Artificial Sequence: Synthetic oligonucleotide
uccuuuugaagauaauccu

SEQ ID NO: 2597474 - RNA, 19 nt, Artificial Sequence
  Description of Artificial Sequence: Synthetic oligonucleotide
agugaugcugcauaucuga

SEQ ID NO: 2597475 - RNA, 19 nt, Artificial Sequence
  Description of Artificial Sequence: Synthetic oligonucleotide
uuuucuuccucacugugua

SEQ ID NO: 2597476 - RNA, 19 nt, Artificial Sequence
  Description of Artificial Sequence: Synthetic oligonucleotide
ucaucacuaucuuuaugag

SEQ ID NO: 2597477 - RNA, 19 nt, Artificial Sequence
  Description of Artificial Sequence: Synthetic oligonucleotide
gagaugaggucucucacug

SEQ ID NO: 2597478 - RNA, 19 nt, Artificial Sequence
  Description of Artificial Sequence: Synthetic oligonucleotide
ugaagauaauccuucccac

SEQ ID NO: 2597479 - RNA, 19 nt, Artificial Sequence
  Description of Artificial Sequence: Synthetic oligonucleotide
acagauuucacacccugca

SEQ ID NO: 2597480 - RNA, 19 nt, Artificial Sequence
  Description of Artificial Sequence: Synthetic oligonucleotide
uuggaguccaggaauuccc

SEQ ID NO: 2597481 - RNA, 19 nt, Artificial Sequence
  Description of Artificial Sequence: Synthetic oligonucleotide
uuccucacuguguauuugg

SEQ ID NO: 2597482 - RNA, 19 nt, Artificial Sequence
  Description of Artificial Sequence: Synthetic oligonucleotide
aguaaguucucuccuuuug

SEQ ID NO: 2597483 - RNA, 19 nt, Artificial Sequence
  Description of Artificial Sequence: Synthetic oligonucleotide
uucuugggaucauuguggg

SEQ ID NO: 2597484 - RNA, 19 nt, Artificial Sequence
  Description of Artificial Sequence: Synthetic oligonucleotide
aaacacuugcagcaugccu

SEQ ID NO: 2597485 - RNA, 19 nt, Artificial Sequence
  Description of Artificial Sequence: Synthetic oligonucleotide
augccuuucacaucuggag

SEQ ID NO: 2597486 - RNA, 19 nt, Artificial Sequence
  Description of Artificial Sequence: Synthetic oligonucleotide
ucuggagcucggaagauac

SEQ ID NO: 2597487 - RNA, 19 nt, Artificial Sequence
  Description of Artificial Sequence: Synthetic oligonucleotide
guucauaacgucuuccuuc

SEQ ID NO: 2597488 - RNA, 19 nt, Artificial Sequence
  Description of Artificial Sequence: Synthetic oligonucleotide
aggucugacuccuuguuag

SEQ ID NO: 2597489 - RNA, 19 nt, Artificial Sequence
  Description of Artificial Sequence: Synthetic oligonucleotide
uccauaucaaugagaacgu

SEQ ID NO: 2597490 - RNA, 19 nt, Artificial Sequence
  Description of Artificial Sequence: Synthetic oligonucleotide
auaucaaugagaacguugu

SEQ ID NO: 2597491 - RNA, 19 nt, Artificial Sequence
  Description of Artificial Sequence: Synthetic oligonucleotide
cuccagcucauuuugagac

SEQ ID NO: 2597492 - RNA, 19 nt, Artificial Sequence
  Description of Artificial Sequence: Synthetic oligonucleotide
uucauaacgucuuccuucu

SEQ ID NO: 2597493 - RNA, 19 nt, Artificial Sequence
  Description of Artificial Sequence: Synthetic oligonucleotide
aacccaguggcguugggca

SEQ ID NO: 2597494 - RNA, 19 nt, Artificial Sequence
  Description of Artificial Sequence: Synthetic oligonucleotide
cacucuuaaggucugacuc

SEQ ID NO: 2597495 - RNA, 19 nt, Artificial Sequence
  Description of Artificial Sequence: Synthetic oligonucleotide
aacguuguuauuguacccu

SEQ ID NO: 2597496 - RNA, 19 nt, Artificial Sequence
  Description of Artificial Sequence: Synthetic oligonucleotide
ugggaagugcaagugaugc

SEQ ID NO: 2597497 - RNA, 19 nt, Artificial Sequence
  Description of Artificial Sequence: Synthetic oligonucleotide
uaugguugggaagugcaag

SEQ ID NO: 2597498 - RNA, 19 nt, Artificial Sequence
  Description of Artificial Sequence: Synthetic oligonucleotide
ucauuuugagacucugcca

SEQ ID NO: 2597499 - RNA, 19 nt, Artificial Sequence
  Description of Artificial Sequence: Synthetic oligonucleotide
uuaugagaacuguuuggug

SEQ ID NO: 2597500 - RNA, 19 nt, Artificial Sequence
  Description of Artificial Sequence: Synthetic oligonucleotide
ucacucuucuucuuggagu

SEQ ID NO: 2597501 - RNA, 19 nt, Artificial Sequence
  Description of Artificial Sequence: Synthetic oligonucleotide
aguccaggaauucccacag

SEQ ID NO: 2597502 - RNA, 19 nt, Artificial Sequence
  Description of Artificial Sequence: Synthetic oligonucleotide
uucuccagcucauuuugag

SEQ ID NO: 2597503 - RNA, 19 nt, Artificial Sequence
  Description of Artificial Sequence: Synthetic oligonucleotide
uguguauuugguucuccca

SEQ ID NO: 2597504 - RNA, 19 nt, Artificial Sequence
  Description of Artificial Sequence: Synthetic oligonucleotide
uugagacucugccaggcug

SEQ ID NO: 2597505 - RNA, 19 nt, Artificial Sequence
  Description of Artificial Sequence: Synthetic oligonucleotide
uuugguucucccaguaagu

SEQ ID NO: 2597506 - RNA, 19 nt, Artificial Sequence
  Description of Artificial Sequence: Synthetic oligonucleotide
uccuucaaaugccaucuga

SEQ ID NO: 2597507 - RNA, 19 nt, Artificial Sequence
  Description of Artificial Sequence: Synthetic oligonucleotide
uugacgcaggguuacagga

SEQ ID NO: 2597508 - RNA, 19 nt, Artificial Sequence
  Description of Artificial Sequence: Synthetic oligonucleotide
cuucaaaugccaucugaac

SEQ ID NO: 2597509 - RNA, 19 nt, Artificial Sequence
  Description of Artificial Sequence: Synthetic oligonucleotide
gauuucacacccugcagca

SEQ ID NO: 2597510 - RNA, 19 nt, Artificial Sequence
  Description of Artificial Sequence: Synthetic oligonucleotide
auuguggguagugucacuc

SEQ ID NO: 2597511 - RNA, 19 nt, Artificial Sequence
  Description of Artificial Sequence: Synthetic oligonucleotide
uuaggacagauuucacacc

SEQ ID NO: 2597512 - RNA, 19 nt, Artificial Sequence
  Description of Artificial Sequence: Synthetic oligonucleotide
ugccaucugaacauuuucu

SEQ ID NO: 2597513 - RNA, 19 nt, Artificial Sequence
  Description of Artificial Sequence: Synthetic oligonucleotide
uuucacaucuggagcucgg

SEQ ID NO: 2597514 - RNA, 19 nt, Artificial Sequence
  Description of Artificial Sequence: Synthetic oligonucleotide
cuuguuaggacagauuuca

SEQ ID NO: 2597515 - RNA, 19 nt, Artificial Sequence
  Description of Artificial Sequence: Synthetic oligonucleotide
ucuucuuggaguccaggaa

SEQ ID NO: 2597516 - RNA, 19 nt, Artificial Sequence
  Description of Artificial Sequence: Synthetic oligonucleotide
uucucuguuuucuugggau

SEQ ID NO: 2597517 - RNA, 19 nt, Artificial Sequence
  Description of Artificial Sequence: Synthetic oligonucleotide
auuuugagacucugccagg

SEQ ID NO: 2597518 - RNA, 19 nt, Artificial Sequence
  Description of Artificial Sequence: Synthetic oligonucleotide
gguuacaggaacccagugg

SEQ ID NO: 2597519 - RNA, 19 nt, Artificial Sequence
  Description of Artificial Sequence: Synthetic oligonucleotide
augccaucugaacauuuuc

SEQ ID NO: 2597520 - RNA, 19 nt, Artificial Sequence
  Description of Artificial Sequence: Synthetic oligonucleotide
cuuaaggucugacuccuug

SEQ ID NO: 2597521 - RNA, 19 nt, Artificial Sequence
  Description of Artificial Sequence: Synthetic oligonucleotide
gaucauuguggguaguguc

SEQ ID NO: 2597522 - RNA, 19 nt, Artificial Sequence
  Description of Artificial Sequence: Synthetic oligonucleotide
uuacaggaacccaguggcg

SEQ ID NO: 2597523 - RNA, 19 nt, Artificial Sequence
  Description of Artificial Sequence: Synthetic oligonucleotide
cauuucuaugguugggaag

SEQ ID NO: 2597524 - RNA, 19 nt, Artificial Sequence
  Description of Artificial Sequence: Synthetic oligonucleotide
gauaauccuucccaccuuc

SEQ ID NO: 2597525 - RNA, 19 nt, Artificial Sequence
  Description of Artificial Sequence: Synthetic oligonucleotide
gagaacguuguuauuguac

SEQ ID NO: 2597526 - RNA, 19 nt, Artificial Sequence
  Description of Artificial Sequence: Synthetic oligonucleotide
gaacguuguuauuguaccc

SEQ ID NO: 2597527 - RNA, 19 nt, Artificial Sequence
  Description of Artificial Sequence: Synthetic oligonucleotide
acuucucuguuuucuuggg

SEQ ID NO: 2597528 - RNA, 19 nt, Artificial Sequence
  Description of Artificial Sequence: Synthetic oligonucleotide
auaacgucuuccuucuccu

SEQ ID NO: 2597529 - RNA, 19 nt, Artificial Sequence
  Description of Artificial Sequence: Synthetic oligonucleotide
cuugacgcaggguuacagg

SEQ ID NO: 2597530 - RNA, 19 nt, Artificial Sequence
  Description of Artificial Sequence: Synthetic oligonucleotide
acaucuggagcucggaaga

SEQ ID NO: 2597531 - RNA, 19 nt, Artificial Sequence
  Description of Artificial Sequence: Synthetic oligonucleotide
auacuucucuguuuucuug

SEQ ID NO: 2597532 - RNA, 19 nt, Artificial Sequence
  Description of Artificial Sequence: Synthetic oligonucleotide
cugcauaucugagaugagg

SEQ ID NO: 2597533 - RNA, 19 nt, Artificial Sequence
  Description of Artificial Sequence: Synthetic oligonucleotide
ugacuccuuguuaggacag

SEQ ID NO: 2597534 - RNA, 19 nt, Artificial Sequence
  Description of Artificial Sequence: Synthetic oligonucleotide
cacaucuggagcucggaag

SEQ ID NO: 2597535 - RNA, 19 nt, Artificial Sequence
  Description of Artificial Sequence: Synthetic oligonucleotide
ugagaugaggucucucacu

SEQ ID NO: 2597536 - RNA, 19 nt, Artificial Sequence
  Description of Artificial Sequence: Synthetic oligonucleotide
aacacuugcagcaugccuu

SEQ ID NO: 2597537 - RNA, 19 nt, Artificial Sequence
  Description of Artificial Sequence: Synthetic oligonucleotide
agugucacucuuaaggucu

SEQ ID NO: 2597538 - RNA, 19 nt, Artificial Sequence
  Description of Artificial Sequence: Synthetic oligonucleotide
augagaacguuguuauugu

SEQ ID NO: 2597539 - RNA, 19 nt, Artificial Sequence
  Description of Artificial Sequence: Synthetic oligonucleotide
cucccaguaaguucucucc

SEQ ID NO: 2597540 - RNA, 19 nt, Artificial Sequence
  Description of Artificial Sequence: Synthetic oligonucleotide
aguccuucaaaugccaucu

SEQ ID NO: 2597541 - RNA, 19 nt, Artificial Sequence
  Description of Artificial Sequence: Synthetic oligonucleotide
ucugccaggcuguucauaa

SEQ ID NO: 2597542 - RNA, 19 nt, Artificial Sequence
  Description of Artificial Sequence: Synthetic oligonucleotide
agaugaggucucucacugc

SEQ ID NO: 2597543 - RNA, 19 nt, Artificial Sequence
  Description of Artificial Sequence: Synthetic oligonucleotide
guuguuauuguacccuuga

SEQ ID NO: 2597544 - RNA, 19 nt, Artificial Sequence
  Description of Artificial Sequence: Synthetic oligonucleotide
uccaugaggccuugaaaca

SEQ ID NO: 2597545 - RNA, 19 nt, Artificial Sequence
  Description of Artificial Sequence: Synthetic oligonucleotide
uuaaggucugacuccuugu

SEQ ID NO: 2597546 - RNA, 19 nt, Artificial Sequence
  Description of Artificial Sequence: Synthetic oligonucleotide
caggguuacaggaacccag

SEQ ID NO: 2597547 - RNA, 19 nt, Artificial Sequence
  Description of Artificial Sequence: Synthetic oligonucleotide
ucugacuccuuguuaggac

SEQ ID NO: 2597548 - RNA, 19 nt, Artificial Sequence
  Description of Artificial Sequence: Synthetic oligonucleotide
ucucuccuuuugaagauaa

SEQ ID NO: 2597549 - RNA, 19 nt, Artificial Sequence
  Description of Artificial Sequence: Synthetic oligonucleotide
gaugcugcauaucugagau

SEQ ID NO: 2597550 - RNA, 19 nt, Artificial Sequence
  Description of Artificial Sequence: Synthetic oligonucleotide
gacucugccaggcuguuca

SEQ ID NO: 2597551 - RNA, 19 nt, Artificial Sequence
  Description of Artificial Sequence: Synthetic oligonucleotide
uuauuguacccuugacgca

SEQ ID NO: 2597552 - RNA, 19 nt, Artificial Sequence
  Description of Artificial Sequence: Synthetic oligonucleotide
uaucuuuaugagaacuguu

SEQ ID NO: 2597553 - RNA, 19 nt, Artificial Sequence
  Description of Artificial Sequence: Synthetic oligonucleotide
cuguguauuugguucuccc

SEQ ID NO: 2597554 - RNA, 19 nt, Artificial Sequence
  Description of Artificial Sequence: Synthetic oligonucleotide
acuaucuuuaugagaacug

SEQ ID NO: 2597555 - RNA, 19 nt, Artificial Sequence
  Description of Artificial Sequence: Synthetic oligonucleotide
uuguuauuguacccuugac

SEQ ID NO: 2597556 - RNA, 19 nt, Artificial Sequence
  Description of Artificial Sequence: Synthetic oligonucleotide
ucggaagauacuucucugu

SEQ ID NO: 2597557 - RNA, 19 nt, Artificial Sequence
  Description of Artificial Sequence: Synthetic oligonucleotide
cugaacauuuucuuccuca

SEQ ID NO: 2597558 - RNA, 19 nt, Artificial Sequence
  Description of Artificial Sequence: Synthetic oligonucleotide
auaucugagaugaggucuc

SEQ ID NO: 2597559 - RNA, 19 nt, Artificial Sequence
  Description of Artificial Sequence: Synthetic oligonucleotide
ugagacucugccaggcugu

SEQ ID NO: 2597560 - RNA, 19 nt, Artificial Sequence
  Description of Artificial Sequence: Synthetic oligonucleotide
ucacuguguauuugguucu

SEQ ID NO: 2597561 - RNA, 19 nt, Artificial Sequence
  Description of Artificial Sequence: Synthetic oligonucleotide
uugggaucauuguggguag

SEQ ID NO: 2597562 - RNA, 19 nt, Artificial Sequence
  Description of Artificial Sequence: Synthetic oligonucleotide
ucacucuuaaggucugacu

SEQ ID NO: 2597563 - RNA, 19 nt, Artificial Sequence
  Description of Artificial Sequence: Synthetic oligonucleotide
aucaaugagaacguuguua

SEQ ID NO: 2597564 - RNA, 19 nt, Artificial Sequence
  Description of Artificial Sequence: Synthetic oligonucleotide
cauuuucuuccucacugug

SEQ ID NO: 2597565 - RNA, 19 nt, Artificial Sequence
  Description of Artificial Sequence: Synthetic oligonucleotide
gaagauacuucucuguuuu

SEQ ID NO: 2597566 - RNA, 19 nt, Artificial Sequence
  Description of Artificial Sequence: Synthetic oligonucleotide
ucuccagcucauuuugaga

SEQ ID NO: 2597567 - RNA, 19 nt, Artificial Sequence
  Description of Artificial Sequence: Synthetic oligonucleotide
guaaguucucuccuuuuga

SEQ ID NO: 2597568 - RNA, 19 nt, Artificial Sequence
  Description of Artificial Sequence: Synthetic oligonucleotide
gacgcaggguuacaggaac

SEQ ID NO: 2597569 - RNA, 19 nt, Artificial Sequence
  Description of Artificial Sequence: Synthetic oligonucleotide
cacucuucuucuuggaguc

SEQ ID NO: 2597570 - RNA, 19 nt, Artificial Sequence
  Description of Artificial Sequence: Synthetic oligonucleotide
uuucacacccugcagcauu

SEQ ID NO: 2597571 - RNA, 19 nt, Artificial Sequence
  Description of Artificial Sequence: Synthetic oligonucleotide
uauuugguucucccaguaa

SEQ ID NO: 2597572 - RNA, 19 nt, Artificial Sequence
  Description of Artificial Sequence: Synthetic oligonucleotide
uggguagugucacucuuaa

SEQ ID NO: 2597573 - RNA, 19 nt, Artificial Sequence
  Description of Artificial Sequence: Synthetic oligonucleotide
cccacaguccuucaaaugc

SEQ ID NO: 2597574 - RNA, 19 nt, Artificial Sequence
  Description of Artificial Sequence: Synthetic oligonucleotide
uugggaagugcaagugaug

SEQ ID NO: 2597575 - RNA, 19 nt, Artificial Sequence
  Description of Artificial Sequence: Synthetic oligonucleotide
aucugaacauuuucuuccu

SEQ ID NO: 2597576 - RNA, 19 nt, Artificial Sequence
  Description of Artificial Sequence: Synthetic oligonucleotide
cuuggaguccaggaauucc

SEQ ID NO: 2597577 - RNA, 19 nt, Artificial Sequence
  Description of Artificial Sequence: Synthetic oligonucleotide
aauucccacaguccuucaa

SEQ ID NO: 2597578 - RNA, 19 nt, Artificial Sequence
  Description of Artificial Sequence: Synthetic oligonucleotide
ugaggucucucacugccuc

SEQ ID NO: 2597579 - RNA, 19 nt, Artificial Sequence
  Description of Artificial Sequence: Synthetic oligonucleotide
augguugggaagugcaagu

SEQ ID NO: 2597580 - RNA, 19 nt, Artificial Sequence
  Description of Artificial Sequence: Synthetic oligonucleotide
uuugagacucugccaggcu

SEQ ID NO: 2597581 - RNA, 19 nt, Artificial Sequence
  Description of Artificial Sequence: Synthetic oligonucleotide
ggaagugcaagugaugcug

SEQ ID NO: 2597582 - RNA, 19 nt, Artificial Sequence
  Description of Artificial Sequence: Synthetic oligonucleotide
uagugucacucuuaagguc

SEQ ID NO: 2597583 - RNA, 19 nt, Artificial Sequence
  Description of Artificial Sequence: Synthetic oligonucleotide
cucggaagauacuucucug

SEQ ID NO: 2597584 - RNA, 19 nt, Artificial Sequence
  Description of Artificial Sequence: Synthetic oligonucleotide
auucccacaguccuucaaa

SEQ ID NO: 2597585 - RNA, 19 nt, Artificial Sequence
  Description of Artificial Sequence: Synthetic oligonucleotide
ucccaguaaguucucuccu

SEQ ID NO: 2597586 - RNA, 19 nt, Artificial Sequence
  Description of Artificial Sequence: Synthetic oligonucleotide
ucuucuucuuggaguccag

SEQ ID NO: 2597587 - RNA, 19 nt, Artificial Sequence
  Description of Artificial Sequence: Synthetic oligonucleotide
gaagugcaagugaugcugc

SEQ ID NO: 2597588 - RNA, 19 nt, Artificial Sequence
  Description of Artificial Sequence: Synthetic oligonucleotide
aucuuuaugagaacuguuu

SEQ ID NO: 2597589 - RNA, 19 nt, Artificial Sequence
  Description of Artificial Sequence: Synthetic oligonucleotide
gaguccaggaauucccaca

SEQ ID NO: 2597590 - RNA, 19 nt, Artificial Sequence
  Description of Artificial Sequence: Synthetic oligonucleotide
ucucuguuuucuugggauc

SEQ ID NO: 2597591 - RNA, 19 nt, Artificial Sequence
  Description of Artificial Sequence: Synthetic oligonucleotide
cuugggaucauugugggua

SEQ ID NO: 2597592 - RNA, 19 nt, Artificial Sequence
  Description of Artificial Sequence: Synthetic oligonucleotide
uggcguugggcauccauga

SEQ ID NO: 2597593 - RNA, 19 nt, Artificial Sequence
  Description of Artificial Sequence: Synthetic oligonucleotide
aaggucugacuccuuguua

SEQ ID NO: 2597594 - RNA, 19 nt, Artificial Sequence
  Description of Artificial Sequence: Synthetic oligonucleotide
agcauuucuaugguuggga

SEQ ID NO: 2597595 - RNA, 19 nt, Artificial Sequence
  Description of Artificial Sequence: Synthetic oligonucleotide
cagauuucacacccugcag

SEQ ID NO: 2597596 - RNA, 19 nt, Artificial Sequence
  Description of Artificial Sequence: Synthetic oligonucleotide
ucccacaguccuucaaaug

SEQ ID NO: 2597597 - RNA, 19 nt, Artificial Sequence
  Description of Artificial Sequence: Synthetic oligonucleotide
gacagauuucacacccugc

SEQ ID NO: 2597598 - RNA, 19 nt, Artificial Sequence
  Description of Artificial Sequence: Synthetic oligonucleotide
ucucccaguaaguucucuc

SEQ ID NO: 2597599 - RNA, 19 nt, Artificial Sequence
  Description of Artificial Sequence: Synthetic oligonucleotide
cugagaugaggucucucac

SEQ ID NO: 2597600 - RNA, 19 nt, Artificial Sequence
  Description of Artificial Sequence: Synthetic oligonucleotide
caucacuaucuuuaugaga

SEQ ID NO: 2597601 - RNA, 19 nt, Artificial Sequence
  Description of Artificial Sequence: Synthetic oligonucleotide
ggccuugaaacacuugcag

SEQ ID NO: 2597602 - RNA, 19 nt, Artificial Sequence
  Description of Artificial Sequence: Synthetic oligonucleotide
aucauuguggguaguguca

SEQ ID NO: 2597603 - RNA, 19 nt, Artificial Sequence
  Description of Artificial Sequence: Synthetic oligonucleotide
ugcaagugaugcugcauau

SEQ ID NO: 2597604 - RNA, 19 nt, Artificial Sequence
  Description of Artificial Sequence: Synthetic oligonucleotide
cuuucacaucuggagcucg

SEQ ID NO: 2597605 - RNA, 19 nt, Artificial Sequence
  Description of Artificial Sequence: Synthetic oligonucleotide
uuguuaggacagauuucac

SEQ ID NO: 2597606 - RNA, 19 nt, Artificial Sequence
  Description of Artificial Sequence: Synthetic oligonucleotide
ugguucucccaguaaguuc

SEQ ID NO: 2597607 - RNA, 19 nt, Artificial Sequence
  Description of Artificial Sequence: Synthetic oligonucleotide
ucacaucuggagcucggaa

SEQ ID NO: 2597608 - RNA, 19 nt, Artificial Sequence
  Description of Artificial Sequence: Synthetic oligonucleotide
uucuuggaguccaggaauu

SEQ ID NO: 2597609 - RNA, 19 nt, Artificial Sequence
  Description of Artificial Sequence: Synthetic oligonucleotide
uucuaugguugggaagugc

SEQ ID NO: 2597610 - RNA, 19 nt, Artificial Sequence
  Description of Artificial Sequence: Synthetic oligonucleotide
guagugucacucuuaaggu

SEQ ID NO: 2597611 - RNA, 19 nt, Artificial Sequence
  Description of Artificial Sequence: Synthetic oligonucleotide
aaugccaucugaacauuuu

SEQ ID NO: 2597612 - RNA, 19 nt, Artificial Sequence
  Description of Artificial Sequence: Synthetic oligonucleotide
caagugaugcugcauaucu

SEQ ID NO: 2597613 - RNA, 19 nt, Artificial Sequence
  Description of Artificial Sequence: Synthetic oligonucleotide
gaaacacuugcagcaugcc

SEQ ID NO: 2597614 - RNA, 19 nt, Artificial Sequence
  Description of Artificial Sequence: Synthetic oligonucleotide
auuuucuuccucacugugu

SEQ ID NO: 2597615 - RNA, 19 nt, Artificial Sequence
  Description of Artificial Sequence: Synthetic oligonucleotide
ucucacugccucucucugc

SEQ ID NO: 2597616 - RNA, 19 nt, Artificial Sequence
  Description of Artificial Sequence: Synthetic oligonucleotide
uuguacccuugacgcaggg

SEQ ID NO: 2597617 - RNA, 19 nt, Artificial Sequence
  Description of Artificial Sequence: Synthetic oligonucleotide
uguggguagugucacucuu

SEQ ID NO: 2597618 - RNA, 19 nt, Artificial Sequence
  Description of Artificial Sequence: Synthetic oligonucleotide
uccucacuguguauuuggu

SEQ ID NO: 2597619 - RNA, 19 nt, Artificial Sequence
  Description of Artificial Sequence: Synthetic oligonucleotide
ugaggccuugaaacacuug

SEQ ID NO: 2597620 - RNA, 19 nt, Artificial Sequence
  Description of Artificial Sequence: Synthetic oligonucleotide
cugacuccuuguuaggaca

SEQ ID NO: 2597621 - RNA, 19 nt, Artificial Sequence
  Description of Artificial Sequence: Synthetic oligonucleotide
uccagcucauuuugagacu

SEQ ID NO: 2597622 - RNA, 19 nt, Artificial Sequence
  Description of Artificial Sequence: Synthetic oligonucleotide
ugguugggaagugcaagug

SEQ ID NO: 2597623 - RNA, 19 nt, Artificial Sequence
  Description of Artificial Sequence: Synthetic oligonucleotide
caguccuucaaaugccauc

SEQ ID NO: 2597624 - RNA, 19 nt, Artificial Sequence
  Description of Artificial Sequence: Synthetic oligonucleotide
acgucuuccuucuccuuca

SEQ ID NO: 2597625 - RNA, 19 nt, Artificial Sequence
  Description of Artificial Sequence: Synthetic oligonucleotide
uaucaaugagaacguuguu

SEQ ID NO: 2597626 - RNA, 19 nt, Artificial Sequence
  Description of Artificial Sequence: Synthetic oligonucleotide
ggacagauuucacacccug

SEQ ID NO: 2597627 - RNA, 19 nt, Artificial Sequence
  Description of Artificial Sequence: Synthetic oligonucleotide
uucccacaguccuucaaau

SEQ ID NO: 2597628 - RNA, 19 nt, Artificial Sequence
  Description of Artificial Sequence: Synthetic oligonucleotide
ugacgcaggguuacaggaa

SEQ ID NO: 2597629 - RNA, 19 nt, Artificial Sequence
  Description of Artificial Sequence: Synthetic oligonucleotide
gccuugaaacacuugcagc

SEQ ID NO: 2597630 - RNA, 19 nt, Artificial Sequence
  Description of Artificial Sequence: Synthetic oligonucleotide
caugccuuucacaucugga

SEQ ID NO: 2597631 - RNA, 19 nt, Artificial Sequence
  Description of Artificial Sequence: Synthetic oligonucleotide
ucuuccucacuguguauuu

SEQ ID NO: 2597632 - RNA, 19 nt, Artificial Sequence
  Description of Artificial Sequence: Synthetic oligonucleotide
uuguggguagugucacucu

SEQ ID NO: 2597633 - RNA, 19 nt, Artificial Sequence
  Description of Artificial Sequence: Synthetic oligonucleotide
uggagcucggaagauacuu

SEQ ID NO: 2597634 - RNA, 19 nt, Artificial Sequence
  Description of Artificial Sequence: Synthetic oligonucleotide
ugagaacguuguuauugua

SEQ ID NO: 2597635 - RNA, 19 nt, Artificial Sequence
  Description of Artificial Sequence: Synthetic oligonucleotide
uuucuaugguugggaagug

SEQ ID NO: 2597636 - RNA, 19 nt, Artificial Sequence
  Description of Artificial Sequence: Synthetic oligonucleotide
cuucuucuuggaguccagg

SEQ ID NO: 2597637 - RNA, 19 nt, Artificial Sequence
  Description of Artificial Sequence: Synthetic oligonucleotide
ccaggaauucccacagucc

SEQ ID NO: 2597638 - RNA, 19 nt, Artificial Sequence
  Description of Artificial Sequence: Synthetic oligonucleotide
agcucauuuugagacucug

SEQ ID NO: 2597639 - RNA, 19 nt, Artificial Sequence
  Description of Artificial Sequence: Synthetic oligonucleotide
ucuugggaucauugugggu

SEQ ID NO: 2597640 - RNA, 19 nt, Artificial Sequence
  Description of Artificial Sequence: Synthetic oligonucleotide
acccuugacgcaggguuac

SEQ ID NO: 2597641 - RNA, 19 nt, Artificial Sequence
  Description of Artificial Sequence: Synthetic oligonucleotide
agauaauccuucccaccuu

SEQ ID NO: 2597642 - RNA, 19 nt, Artificial Sequence
  Description of Artificial Sequence: Synthetic oligonucleotide
uugcagcaugccuuucaca

SEQ ID NO: 2597643 - RNA, 19 nt, Artificial Sequence
  Description of Artificial Sequence: Synthetic oligonucleotide
uucacacccugcagcauuu

SEQ ID NO: 2597644 - RNA, 19 nt, Artificial Sequence
  Description of Artificial Sequence: Synthetic oligonucleotide
aaaugccaucugaacauuu

SEQ ID NO: 2597645 - RNA, 19 nt, Artificial Sequence
  Description of Artificial Sequence: Synthetic oligonucleotide
aggucucucacugccucuc

SEQ ID NO: 2597646 - RNA, 19 nt, Artificial Sequence
  Description of Artificial Sequence: Synthetic oligonucleotide
cucuguuuucuugggauca

SEQ ID NO: 2597647 - RNA, 19 nt, Artificial Sequence
  Description of Artificial Sequence: Synthetic oligonucleotide
cguugggcauccaugaggc

SEQ ID NO: 2597648 - RNA, 19 nt, Artificial Sequence
  Description of Artificial Sequence: Synthetic oligonucleotide
cagcauuucuaugguuggg

SEQ ID NO: 2597649 - RNA, 19 nt, Artificial Sequence
  Description of Artificial Sequence: Synthetic oligonucleotide
uucacaucuggagcucgga

SEQ ID NO: 2597650 - RNA, 19 nt, Artificial Sequence
  Description of Artificial Sequence: Synthetic oligonucleotide
uugguucucccaguaaguu

SEQ ID NO: 2597651 - RNA, 19 nt, Artificial Sequence
  Description of Artificial Sequence: Synthetic oligonucleotide
auuguacccuugacgcagg

SEQ ID NO: 2597652 - RNA, 19 nt, Artificial Sequence
  Description of Artificial Sequence: Synthetic oligonucleotide
ccaucugaacauuuucuuc

SEQ ID NO: 2597653 - RNA, 19 nt, Artificial Sequence
  Description of Artificial Sequence: Synthetic oligonucleotide
gauacuucucuguuuucuu

SEQ ID NO: 2597654 - RNA, 19 nt, Artificial Sequence
  Description of Artificial Sequence: Synthetic oligonucleotide
gagcucggaagauacuucu

SEQ ID NO: 2597655 - RNA, 19 nt, Artificial Sequence
  Description of Artificial Sequence: Synthetic oligonucleotide
ggucugacuccuuguuagg

SEQ ID NO: 2597656 - RNA, 19 nt, Artificial Sequence
  Description of Artificial Sequence: Synthetic oligonucleotide
acguuguuauuguacccuu

SEQ ID NO: 2597657 - RNA, 19 nt, Artificial Sequence
  Description of Artificial Sequence: Synthetic oligonucleotide
acugccucucucugcuucu

SEQ ID NO: 2597658 - RNA, 19 nt, Artificial Sequence
  Description of Artificial Sequence: Synthetic oligonucleotide
ccacaguccuucaaaugcc

SEQ ID NO: 2597659 - RNA, 19 nt, Artificial Sequence
  Description of Artificial Sequence: Synthetic oligonucleotide
aguggcguugggcauccau

SEQ ID NO: 2597660 - RNA, 19 nt, Artificial Sequence
  Description of Artificial Sequence: Synthetic oligonucleotide
guauuugguucucccagua

SEQ ID NO: 2597661 - RNA, 19 nt, Artificial Sequence
  Description of Artificial Sequence: Synthetic oligonucleotide
caggaauucccacaguccu

SEQ ID NO: 2597662 - RNA, 19 nt, Artificial Sequence
  Description of Artificial Sequence: Synthetic oligonucleotide
ucuuggaguccaggaauuc

SEQ ID NO: 2597663 - RNA, 19 nt, Artificial Sequence
  Description of Artificial Sequence: Synthetic oligonucleotide
cuaucuuuaugagaacugu

SEQ ID NO: 2597664 - RNA, 19 nt, Artificial Sequence
  Description of Artificial Sequence: Synthetic oligonucleotide
acgcaggguuacaggaacc

SEQ ID NO: 2597665 - RNA, 19 nt, Artificial Sequence
  Description of Artificial Sequence: Synthetic oligonucleotide
gcaugccuuucacaucugg

SEQ ID NO: 2597666 - RNA, 19 nt, Artificial Sequence
  Description of Artificial Sequence: Synthetic oligonucleotide
gucacucuuaaggucugac

SEQ ID NO: 2597667 - RNA, 19 nt, Artificial Sequence
  Description of Artificial Sequence: Synthetic oligonucleotide
guggcguugggcauccaug

SEQ ID NO: 2597668 - RNA, 19 nt, Artificial Sequence
  Description of Artificial Sequence: Synthetic oligonucleotide
uacccuugacgcaggguua

SEQ ID NO: 2597669 - RNA, 19 nt, Artificial Sequence
  Description of Artificial Sequence: Synthetic oligonucleotide
cacaguccuucaaaugcca

SEQ ID NO: 2597670 - RNA, 19 nt, Artificial Sequence
  Description of Artificial Sequence: Synthetic oligonucleotide
guacccuugacgcaggguu

SEQ ID NO: 2597671 - RNA, 19 nt, Artificial Sequence
  Description of Artificial Sequence: Synthetic oligonucleotide
gcuguucauaacgucuucc

SEQ ID NO: 2597672 - RNA, 19 nt, Artificial Sequence
  Description of Artificial Sequence: Synthetic oligonucleotide
caggcuguucauaacgucu

SEQ ID NO: 2597673 - RNA, 19 nt, Artificial Sequence
  Description of Artificial Sequence: Synthetic oligonucleotide
gguugggaagugcaaguga

SEQ ID NO: 2597674 - RNA, 19 nt, Artificial Sequence
  Description of Artificial Sequence: Synthetic oligonucleotide
cagcaugccuuucacaucu

SEQ ID NO: 2597675 - RNA, 19 nt, Artificial Sequence
  Description of Artificial Sequence: Synthetic oligonucleotide
ggaauucccacaguccuuc

SEQ ID NO: 2597676 - RNA, 19 nt, Artificial Sequence
  Description of Artificial Sequence: Synthetic oligonucleotide
agcucggaagauacuucuc

SEQ ID NO: 2597677 - RNA, 19 nt, Artificial Sequence
  Description of Artificial Sequence: Synthetic oligonucleotide
cuguucauaacgucuuccu

SEQ ID NO: 2597678 - RNA, 19 nt, Artificial Sequence
  Description of Artificial Sequence: Synthetic oligonucleotide
acuccuuguuaggacagau

SEQ ID NO: 2597679 - RNA, 19 nt, Artificial Sequence
  Description of Artificial Sequence: Synthetic oligonucleotide
uguacccuugacgcagggu

SEQ ID NO: 2597680 - RNA, 19 nt, Artificial Sequence
  Description of Artificial Sequence: Synthetic oligonucleotide
cacugccucucucugcuuc

SEQ ID NO: 2597681 - RNA, 19 nt, Artificial Sequence
  Description of Artificial Sequence: Synthetic oligonucleotide
cuucuuggaguccaggaau

SEQ ID NO: 2597682 - RNA, 19 nt, Artificial Sequence
  Description of Artificial Sequence: Synthetic oligonucleotide
agugcaagugaugcugcau

SEQ ID NO: 2597683 - RNA, 19 nt, Artificial Sequence
  Description of Artificial Sequence: Synthetic oligonucleotide
ucuguuuucuugggaucau

SEQ ID NO: 2597684 - RNA, 19 nt, Artificial Sequence
  Description of Artificial Sequence: Synthetic oligonucleotide
augcugcauaucugagaug

SEQ ID NO: 2597685 - RNA, 19 nt, Artificial Sequence
  Description of Artificial Sequence: Synthetic oligonucleotide
cuuccucacuguguauuug

SEQ ID NO: 2597686 - RNA, 19 nt, Artificial Sequence
  Description of Artificial Sequence: Synthetic oligonucleotide
cauccaugaggccuugaaa

SEQ ID NO: 2597687 - RNA, 19 nt, Artificial Sequence
  Description of Artificial Sequence: Synthetic oligonucleotide
gguucucccaguaaguucu

SEQ ID NO: 2597688 - RNA, 19 nt, Artificial Sequence
  Description of Artificial Sequence: Synthetic oligonucleotide
cuaugguugggaagugcaa

SEQ ID NO: 2597689 - RNA, 19 nt, Artificial Sequence
  Description of Artificial Sequence: Synthetic oligonucleotide
acaggaacccaguggcguu

SEQ ID NO: 2597690 - RNA, 19 nt, Artificial Sequence
  Description of Artificial Sequence: Synthetic oligonucleotide
ucauaacgucuuccuucuc

SEQ ID NO: 2597691 - RNA, 19 nt, Artificial Sequence
  Description of Artificial Sequence: Synthetic oligonucleotide
cacuaucuuuaugagaacu

SEQ ID NO: 2597692 - RNA, 19 nt, Artificial Sequence
  Description of Artificial Sequence: Synthetic oligonucleotide
ucccaccuucaucacuauc

SEQ ID NO: 2597693 - RNA, 19 nt, Artificial Sequence
  Description of Artificial Sequence: Synthetic oligonucleotide
auaauccuucccaccuuca

SEQ ID NO: 2597694 - RNA, 19 nt, Artificial Sequence
  Description of Artificial Sequence: Synthetic oligonucleotide
aggguuacaggaacccagu

SEQ ID NO: 2597695 - RNA, 19 nt, Artificial Sequence
  Description of Artificial Sequence: Synthetic oligonucleotide
gaauucccacaguccuuca

SEQ ID NO: 2597696 - RNA, 19 nt, Artificial Sequence
  Description of Artificial Sequence: Synthetic oligonucleotide
uucucuccuuuugaagaua

SEQ ID NO: 2597697 - RNA, 19 nt, Artificial Sequence
  Description of Artificial Sequence: Synthetic oligonucleotide
gucugacuccuuguuagga

SEQ ID NO: 2597698 - RNA, 19 nt, Artificial Sequence
  Description of Artificial Sequence: Synthetic oligonucleotide
aggaacccaguggcguugg

SEQ ID NO: 2597699 - RNA, 19 nt, Artificial Sequence
  Description of Artificial Sequence: Synthetic oligonucleotide
cucucugcuucuccagcuc

SEQ ID NO: 2597700 - RNA, 19 nt, Artificial Sequence
  Description of Artificial Sequence: Synthetic oligonucleotide
ccuuguuaggacagauuuc

SEQ ID NO: 2597701 - RNA, 19 nt, Artificial Sequence
  Description of Artificial Sequence: Synthetic oligonucleotide
aggccuugaaacacuugca

SEQ ID NO: 2597702 - RNA, 19 nt, Artificial Sequence
  Description of Artificial Sequence: Synthetic oligonucleotide
guugggaagugcaagugau

SEQ ID NO: 2597703 - RNA, 19 nt, Artificial Sequence
  Description of Artificial Sequence: Synthetic oligonucleotide
ccuucaaaugccaucugaa

SEQ ID NO: 2597704 - RNA, 19 nt, Artificial Sequence
  Description of Artificial Sequence: Synthetic oligonucleotide
ucuuaaggucugacuccuu

SEQ ID NO: 2597705 - RNA, 19 nt, Artificial Sequence
  Description of Artificial Sequence: Synthetic oligonucleotide
cuucuccagcucauuuuga

SEQ ID NO: 2597706 - RNA, 19 nt, Artificial Sequence
  Description of Artificial Sequence: Synthetic oligonucleotide
uucucccaguaaguucucu

SEQ ID NO: 2597707 - RNA, 19 nt, Artificial Sequence
  Description of Artificial Sequence: Synthetic oligonucleotide
guugggcauccaugaggcc

SEQ ID NO: 2597708 - RNA, 19 nt, Artificial Sequence
  Description of Artificial Sequence: Synthetic oligonucleotide
ugucacucuuaaggucuga

SEQ ID NO: 2597709 - RNA, 19 nt, Artificial Sequence
  Description of Artificial Sequence: Synthetic oligonucleotide
gcucauuuugagacucugc

SEQ ID NO: 2597710 - RNA, 19 nt, Artificial Sequence
  Description of Artificial Sequence: Synthetic oligonucleotide
gggaucauuguggguagug

SEQ ID NO: 2597711 - RNA, 19 nt, Artificial Sequence
  Description of Artificial Sequence: Synthetic oligonucleotide
ggguuacaggaacccagug

SEQ ID NO: 2597712 - RNA, 19 nt, Artificial Sequence
  Description of Artificial Sequence: Synthetic oligonucleotide
guucucuccuuuugaagau

SEQ ID NO: 2597713 - RNA, 19 nt, Artificial Sequence
  Description of Artificial Sequence: Synthetic oligonucleotide
gcauuucuaugguugggaa

SEQ ID NO: 2597714 - RNA, 19 nt, Artificial Sequence
  Description of Artificial Sequence: Synthetic oligonucleotide
caugaggccuugaaacacu

SEQ ID NO: 2597715 - RNA, 19 nt, Artificial Sequence
  Description of Artificial Sequence: Synthetic oligonucleotide
uaacgucuuccuucuccuu

SEQ ID NO: 2597716 - RNA, 19 nt, Artificial Sequence
  Description of Artificial Sequence: Synthetic oligonucleotide
cugccaggcuguucauaac

SEQ ID NO: 2597717 - RNA, 19 nt, Artificial Sequence
  Description of Artificial Sequence: Synthetic oligonucleotide
agacucugccaggcuguuc

SEQ ID NO: 2597718 - RNA, 19 nt, Artificial Sequence
  Description of Artificial Sequence: Synthetic oligonucleotide
gugucacucuuaaggucug

SEQ ID NO: 2597719 - RNA, 19 nt, Artificial Sequence
  Description of Artificial Sequence: Synthetic oligonucleotide
gcucggaagauacuucucu

SEQ ID NO: 2597720 - RNA, 19 nt, Artificial Sequence
  Description of Artificial Sequence: Synthetic oligonucleotide
aggcuguucauaacgucuu

SEQ ID NO: 2597721 - RNA, 19 nt, Artificial Sequence
  Description of Artificial Sequence: Synthetic oligonucleotide
ucugcuucuccagcucauu

SEQ ID NO: 2597722 - RNA, 19 nt, Artificial Sequence
  Description of Artificial Sequence: Synthetic oligonucleotide
caggaacccaguggcguug

SEQ ID NO: 2597723 - RNA, 19 nt, Artificial Sequence
  Description of Artificial Sequence: Synthetic oligonucleotide
ggguagugucacucuuaag

SEQ ID NO: 2597724 - RNA, 19 nt, Artificial Sequence
  Description of Artificial Sequence: Synthetic oligonucleotide
aggacagauuucacacccu

SEQ ID NO: 2597725 - RNA, 19 nt, Artificial Sequence
  Description of Artificial Sequence: Synthetic oligonucleotide
gccuuucacaucuggagcu

SEQ ID NO: 2597726 - RNA, 19 nt, Artificial Sequence
  Description of Artificial Sequence: Synthetic oligonucleotide
auuucacacccugcagcau

SEQ ID NO: 2597727 - RNA, 19 nt, Artificial Sequence
  Description of Artificial Sequence: Synthetic oligonucleotide
acaguccuucaaaugccau

SEQ ID NO: 2597728 - RNA, 19 nt, Artificial Sequence
  Description of Artificial Sequence: Synthetic oligonucleotide
ggcguugggcauccaugag

SEQ ID NO: 2597729 - RNA, 19 nt, Artificial Sequence
  Description of Artificial Sequence: Synthetic oligonucleotide
cucuuaaggucugacuccu

SEQ ID NO: 2597730 - RNA, 19 nt, Artificial Sequence
  Description of Artificial Sequence: Synthetic oligonucleotide
cacuguguauuugguucuc

SEQ ID NO: 2597731 - RNA, 19 nt, Artificial Sequence
  Description of Artificial Sequence: Synthetic oligonucleotide
gacuccuuguuaggacaga

SEQ ID NO: 2597732 - RNA, 19 nt, Artificial Sequence
  Description of Artificial Sequence: Synthetic oligonucleotide
augaggucucucacugccu

SEQ ID NO: 2597733 - RNA, 19 nt, Artificial Sequence
  Description of Artificial Sequence: Synthetic oligonucleotide
gcauccaugaggccuugaa

SEQ ID NO: 2597734 - RNA, 19 nt, Artificial Sequence
  Description of Artificial Sequence: Synthetic oligonucleotide
aucuggagcucggaagaua

SEQ ID NO: 2597735 - RNA, 19 nt, Artificial Sequence
  Description of Artificial Sequence: Synthetic oligonucleotide
ggaagauacuucucuguuu

SEQ ID NO: 2597736 - RNA, 19 nt, Artificial Sequence
  Description of Artificial Sequence: Synthetic oligonucleotide
ggagcucggaagauacuuc

SEQ ID NO: 2597737 - RNA, 19 nt, Artificial Sequence
  Description of Artificial Sequence: Synthetic oligonucleotide
uucccaccuucaucacuau

SEQ ID NO: 2597738 - RNA, 19 nt, Artificial Sequence
  Description of Artificial Sequence: Synthetic oligonucleotide
ccaggcuguucauaacguc

SEQ ID NO: 2597739 - RNA, 19 nt, Artificial Sequence
  Description of Artificial Sequence: Synthetic oligonucleotide
cguuguuauuguacccuug

SEQ ID NO: 2597740 - RNA, 19 nt, Artificial Sequence
  Description of Artificial Sequence: Synthetic oligonucleotide
aggaauucccacaguccuu

SEQ ID NO: 2597741 - RNA, 19 nt, Artificial Sequence
  Description of Artificial Sequence: Synthetic oligonucleotide
ccuugacgcaggguuacag

SEQ ID NO: 2597742 - RNA, 19 nt, Artificial Sequence
  Description of Artificial Sequence: Synthetic oligonucleotide
ugggaucauuguggguagu

SEQ ID NO: 2597743 - RNA, 19 nt, Artificial Sequence
  Description of Artificial Sequence: Synthetic oligonucleotide
augaggccuugaaacacuu

SEQ ID NO: 2597744 - RNA, 19 nt, Artificial Sequence
  Description of Artificial Sequence: Synthetic oligonucleotide
ggcuguucauaacgucuuc

SEQ ID NO: 2597745 - RNA, 19 nt, Artificial Sequence
  Description of Artificial Sequence: Synthetic oligonucleotide
gaggucucucacugccucu

SEQ ID NO: 2597746 - RNA, 19 nt, Artificial Sequence
  Description of Artificial Sequence: Synthetic oligonucleotide
ccuuuugaagauaauccuu

SEQ ID NO: 2597747 - RNA, 19 nt, Artificial Sequence
  Description of Artificial Sequence: Synthetic oligonucleotide
gcaagugaugcugcauauc

SEQ ID NO: 2597748 - RNA, 19 nt, Artificial Sequence
  Description of Artificial Sequence: Synthetic oligonucleotide
acucugccaggcuguucau

SEQ ID NO: 2597749 - RNA, 19 nt, Artificial Sequence
  Description of Artificial Sequence: Synthetic oligonucleotide
guggguagugucacucuua

SEQ ID NO: 2597750 - RNA, 19 nt, Artificial Sequence
  Description of Artificial Sequence: Synthetic oligonucleotide
ggaucauuguggguagugu

SEQ ID NO: 2597751 - RNA, 19 nt, Artificial Sequence
  Description of Artificial Sequence: Synthetic oligonucleotide
gggaagugcaagugaugcu

SEQ ID NO: 2597752 - RNA, 19 nt, Artificial Sequence
  Description of Artificial Sequence: Synthetic oligonucleotide
agcaugccuuucacaucug

SEQ ID NO: 2597753 - RNA, 19 nt, Artificial Sequence
  Description of Artificial Sequence: Synthetic oligonucleotide
cauuguggguagugucacu

SEQ ID NO: 2597754 - RNA, 19 nt, Artificial Sequence
  Description of Artificial Sequence: Synthetic oligonucleotide
ccuuucacaucuggagcuc

SEQ ID NO: 2597755 - RNA, 19 nt, Artificial Sequence
  Description of Artificial Sequence: Synthetic oligonucleotide
gcaggguuacaggaaccca

SEQ ID NO: 2597756 - RNA, 19 nt, Artificial Sequence
  Description of Artificial Sequence: Synthetic oligonucleotide
caguaaguucucuccuuuu

SEQ ID NO: 2597757 - RNA, 19 nt, Artificial Sequence
  Description of Artificial Sequence: Synthetic oligonucleotide
guucucccaguaaguucuc

SEQ ID NO: 2597758 - RNA, 19 nt, Artificial Sequence
  Description of Artificial Sequence: Synthetic oligonucleotide
cuccuuguuaggacagauu

SEQ ID NO: 2597759 - RNA, 19 nt, Artificial Sequence
  Description of Artificial Sequence: Synthetic oligonucleotide
caaugagaacguuguuauu

SEQ ID NO: 2597760 - RNA, 19 nt, Artificial Sequence
  Description of Artificial Sequence: Synthetic oligonucleotide
cugccucucucugcuucuc

SEQ ID NO: 2597761 - RNA, 19 nt, Artificial Sequence
  Description of Artificial Sequence: Synthetic oligonucleotide
ccaguggcguugggcaucc

SEQ ID NO: 2597762 - RNA, 19 nt, Artificial Sequence
  Description of Artificial Sequence: Synthetic oligonucleotide
cugcuucuccagcucauuu

SEQ ID NO: 2597763 - RNA, 19 nt, Artificial Sequence
  Description of Artificial Sequence: Synthetic oligonucleotide
cagcucauuuugagacucu

SEQ ID NO: 2597764 - RNA, 19 nt, Artificial Sequence
  Description of Artificial Sequence: Synthetic oligonucleotide
cuggagcucggaagauacu

SEQ ID NO: 2597765 - RNA, 19 nt, Artificial Sequence
  Description of Artificial Sequence: Synthetic oligonucleotide
guccaggaauucccacagu

SEQ ID NO: 2597766 - RNA, 19 nt, Artificial Sequence
  Description of Artificial Sequence: Synthetic oligonucleotide
caaaugccaucugaacauu

SEQ ID NO: 2597767 - RNA, 19 nt, Artificial Sequence
  Description of Artificial Sequence: Synthetic oligonucleotide
caccuucaucacuaucuuu

SEQ ID NO: 2597768 - RNA, 19 nt, Artificial Sequence
  Description of Artificial Sequence: Synthetic oligonucleotide
gccaggcuguucauaacgu

SEQ ID NO: 2597769 - RNA, 19 nt, Artificial Sequence
  Description of Artificial Sequence: Synthetic oligonucleotide
cucugccaggcuguucaua

SEQ ID NO: 2597770 - RNA, 19 nt, Artificial Sequence
  Description of Artificial Sequence: Synthetic oligonucleotide
ccaguaaguucucuccuuu

SEQ ID NO: 2597771 - RNA, 19 nt, Artificial Sequence
  Description of Artificial Sequence: Synthetic oligonucleotide
cccaguggcguugggcauc

SEQ ID NO: 2597772 - RNA, 19 nt, Artificial Sequence
  Description of Artificial Sequence: Synthetic oligonucleotide
ggucucucacugccucucu

SEQ ID NO: 2597773 - RNA, 19 nt, Artificial Sequence
  Description of Artificial Sequence: Synthetic oligonucleotide
cuguuuucuugggaucauu

SEQ ID NO: 2597774 - RNA, 19 nt, Artificial Sequence
  Description of Artificial Sequence: Synthetic oligonucleotide
caucuggagcucggaagau

SEQ ID NO: 2597775 - RNA, 19 nt, Artificial Sequence
  Description of Artificial Sequence: Synthetic oligonucleotide
ccucacuguguauuugguu

SEQ ID NO: 2597776 - RNA, 19 nt, Artificial Sequence
  Description of Artificial Sequence: Synthetic oligonucleotide
cccaguaaguucucuccuu

SEQ ID NO: 2597777 - RNA, 19 nt, Artificial Sequence
  Description of Artificial Sequence: Synthetic oligonucleotide
cggaagauacuucucuguu

SEQ ID NO: 2597778 - RNA, 19 nt, Artificial Sequence
  Description of Artificial Sequence: Synthetic oligonucleotide
ccaccuucaucacuaucuu

SEQ ID NO: 2597779 - RNA, 19 nt, Artificial Sequence
  Description of Artificial Sequence: Synthetic oligonucleotide
ccauaucaaugagaacguu

SEQ ID NO: 2597780 - RNA, 19 nt, Artificial Sequence
  Description of Artificial Sequence: Synthetic oligonucleotide
cccuugacgcaggguuaca

SEQ ID NO: 2597781 - RNA, 19 nt, Artificial Sequence
  Description of Artificial Sequence: Synthetic oligonucleotide
caguggcguugggcaucca

SEQ ID NO: 2597782 - RNA, 19 nt, Artificial Sequence
  Description of Artificial Sequence: Synthetic oligonucleotide
gaagcaaugguacugaggg

SEQ ID NO: 2597783 - RNA, 19 nt, Artificial Sequence
  Description of Artificial Sequence: Synthetic oligonucleotide
agcaaggugguccugaucc

SEQ ID NO: 2597784 - RNA, 19 nt, Artificial Sequence
  Description of Artificial Sequence: Synthetic oligonucleotide
ucuaucacaaccauggcca

SEQ ID NO: 2597785 - RNA, 19 nt, Artificial Sequence
  Description of Artificial Sequence: Synthetic oligonucleotide
auaguguccacccagcuuc

SEQ ID NO: 2597786 - RNA, 19 nt, Artificial Sequence
  Description of Artificial Sequence: Synthetic oligonucleotide
uggaacuacacucagguac

SEQ ID NO: 2597787 - RNA, 19 nt, Artificial Sequence
  Description of Artificial Sequence: Synthetic oligonucleotide
gaguuaagcagcaaggugg

SEQ ID NO: 2597788 - RNA, 19 nt, Artificial Sequence
  Description of Artificial Sequence: Synthetic oligonucleotide
auuguaaauaguguccacc

SEQ ID NO: 2597789 - RNA, 19 nt, Artificial Sequence
  Description of Artificial Sequence: Synthetic oligonucleotide
aagucuugcaaagaagugg

SEQ ID NO: 2597790 - RNA, 19 nt, Artificial Sequence
  Description of Artificial Sequence: Synthetic oligonucleotide
uguggaacuacacucaggu

SEQ ID NO: 2597791 - RNA, 19 nt, Artificial Sequence
  Description of Artificial Sequence: Synthetic oligonucleotide
ugcauuguaaauagugucc

SEQ ID NO: 2597792 - RNA, 19 nt, Artificial Sequence
  Description of Artificial Sequence: Synthetic oligonucleotide
acuacacucagguaccagc

SEQ ID NO: 2597793 - RNA, 19 nt, Artificial Sequence
  Description of Artificial Sequence: Synthetic oligonucleotide
uuguaaauaguguccaccc

SEQ ID NO: 2597794 - RNA, 19 nt, Artificial Sequence
  Description of Artificial Sequence: Synthetic oligonucleotide
auuccuucaagagcuaucc

SEQ ID NO: 2597795 - RNA, 19 nt, Artificial Sequence
  Description of Artificial Sequence: Synthetic oligonucleotide
uaauggaugaagcaauggu

SEQ ID NO: 2597796 - RNA, 19 nt, Artificial Sequence
  Description of Artificial Sequence: Synthetic oligonucleotide
ugaggcaccgugcugagag

SEQ ID NO: 2597797 - RNA, 19 nt, Artificial Sequence
  Description of Artificial Sequence: Synthetic oligonucleotide
guaaauaguguccacccag

SEQ ID NO: 2597798 - RNA, 19 nt, Artificial Sequence
  Description of Artificial Sequence: Synthetic oligonucleotide
ugagaguugaggcugucgc

SEQ ID NO: 2597799 - RNA, 19 nt, Artificial Sequence
  Description of Artificial Sequence: Synthetic oligonucleotide
ugugcauuguaaauagugu

SEQ ID NO: 2597800 - RNA, 19 nt, Artificial Sequence
  Description of Artificial Sequence: Synthetic oligonucleotide
ugaagcaaugguacugagg

SEQ ID NO: 2597801 - RNA, 19 nt, Artificial Sequence
  Description of Artificial Sequence: Synthetic oligonucleotide
uuaagcagcaagguggucc

SEQ ID NO: 2597802 - RNA, 19 nt, Artificial Sequence
  Description of Artificial Sequence: Synthetic oligonucleotide
ugaacggagaucccugggg

SEQ ID NO: 2597803 - RNA, 19 nt, Artificial Sequence
  Description of Artificial Sequence: Synthetic oligonucleotide
aacuccggagaugacagcg

SEQ ID NO: 2597804 - RNA, 19 nt, Artificial Sequence
  Description of Artificial Sequence: Synthetic oligonucleotide
gauccgauagagcugggcc

SEQ ID NO: 2597805 - RNA, 19 nt, Artificial Sequence
  Description of Artificial Sequence: Synthetic oligonucleotide
auggaugaagcaaugguac

SEQ ID NO: 2597806 - RNA, 19 nt, Artificial Sequence
  Description of Artificial Sequence: Synthetic oligonucleotide
cugugcauuguaaauagug

SEQ ID NO: 2597807 - RNA, 19 nt, Artificial Sequence
  Description of Artificial Sequence: Synthetic oligonucleotide
uaaauaguguccacccagc

SEQ ID NO: 2597808 - RNA, 19 nt, Artificial Sequence
  Description of Artificial Sequence: Synthetic oligonucleotide
uguggaaccaucugaggca

SEQ ID NO: 2597809 - RNA, 19 nt, Artificial Sequence
  Description of Artificial Sequence: Synthetic oligonucleotide
cauggagcaagaucggccg

SEQ ID NO: 2597810 - RNA, 19 nt, Artificial Sequence
  Description of Artificial Sequence: Synthetic oligonucleotide
caaacuccggagaugacag

SEQ ID NO: 2597811 - RNA, 19 nt, Artificial Sequence
  Description of Artificial Sequence: Synthetic oligonucleotide
cucuaucacaaccauggcc

SEQ ID NO: 2597812 - RNA, 19 nt, Artificial Sequence
  Description of Artificial Sequence: Synthetic oligonucleotide
agucuugcaaagaaguggg

SEQ ID NO: 2597813 - RNA, 19 nt, Artificial Sequence
  Description of Artificial Sequence: Synthetic oligonucleotide
gaugacagcgucuccccgg

SEQ ID NO: 2597814 - RNA, 19 nt, Artificial Sequence
  Description of Artificial Sequence: Synthetic oligonucleotide
ugggaguaauggaugaagc

SEQ ID NO: 2597815 - RNA, 19 nt, Artificial Sequence
  Description of Artificial Sequence: Synthetic oligonucleotide
ggcucuaucacaaccaugg

SEQ ID NO: 2597816 - RNA, 19 nt, Artificial Sequence
  Description of Artificial Sequence: Synthetic oligonucleotide
cuguggaaccaucugaggc

SEQ ID NO: 2597817 - RNA, 19 nt, Artificial Sequence
  Description of Artificial Sequence: Synthetic oligonucleotide
aaauaguguccacccagcu

SEQ ID NO: 2597818 - RNA, 19 nt, Artificial Sequence
  Description of Artificial Sequence: Synthetic oligonucleotide
agaucggccguccacuggg

SEQ ID NO: 2597819 - RNA, 19 nt, Artificial Sequence
  Description of Artificial Sequence: Synthetic oligonucleotide
aaagucuugcaaagaagug

SEQ ID NO: 2597820 - RNA, 19 nt, Artificial Sequence
  Description of Artificial Sequence: Synthetic oligonucleotide
ucaaacuccggagaugaca

SEQ ID NO: 2597821 - RNA, 19 nt, Artificial Sequence
  Description of Artificial Sequence: Synthetic oligonucleotide
aaacuccggagaugacagc

SEQ ID NO: 2597822 - RNA, 19 nt, Artificial Sequence
  Description of Artificial Sequence: Synthetic oligonucleotide
ucgcuagugggaguaaugg

SEQ ID NO: 2597823 - RNA, 19 nt, Artificial Sequence
  Description of Artificial Sequence: Synthetic oligonucleotide
aagugggagacagggugcc

SEQ ID NO: 2597824 - RNA, 19 nt, Artificial Sequence
  Description of Artificial Sequence: Synthetic oligonucleotide
gaagucucgucugacuggg

SEQ ID NO: 2597825 - RNA, 19 nt, Artificial Sequence
  Description of Artificial Sequence: Synthetic oligonucleotide
acugagggaagucucgucu

SEQ ID NO: 2597826 - RNA, 19 nt, Artificial Sequence
  Description of Artificial Sequence: Synthetic oligonucleotide
aaccaucugaggcaccgug

SEQ ID NO: 2597827 - RNA, 19 nt, Artificial Sequence
  Description of Artificial Sequence: Synthetic oligonucleotide
aauaguguccacccagcuu

SEQ ID NO: 2597828 - RNA, 19 nt, Artificial Sequence
  Description of Artificial Sequence: Synthetic oligonucleotide
cucuguggaaccaucugag

SEQ ID NO: 2597829 - RNA, 19 nt, Artificial Sequence
  Description of Artificial Sequence: Synthetic oligonucleotide
agcaagaucggccguccac

SEQ ID NO: 2597830 - RNA, 19 nt, Artificial Sequence
  Description of Artificial Sequence: Synthetic oligonucleotide
guaauggaugaagcaaugg

SEQ ID NO: 2597831 - RNA, 19 nt, Artificial Sequence
  Description of Artificial Sequence: Synthetic oligonucleotide
guggaguuaagcagcaagg

SEQ ID NO: 2597832 - RNA, 19 nt, Artificial Sequence
  Description of Artificial Sequence: Synthetic oligonucleotide
cauaaggccuggcugcugg

SEQ ID NO: 2597833 - RNA, 19 nt, Artificial Sequence
  Description of Artificial Sequence: Synthetic oligonucleotide
agucucgucugacugggag

SEQ ID NO: 2597834 - RNA, 19 nt, Artificial Sequence
  Description of Artificial Sequence: Synthetic oligonucleotide
gugcauuguaaauaguguc

SEQ ID NO: 2597835 - RNA, 19 nt, Artificial Sequence
  Description of Artificial Sequence: Synthetic oligonucleotide
cuugcaaagaagugggaga

SEQ ID NO: 2597836 - RNA, 19 nt, Artificial Sequence
  Description of Artificial Sequence: Synthetic oligonucleotide
aagaucggccguccacugg

SEQ ID NO: 2597837 - RNA, 19 nt, Artificial Sequence
  Description of Artificial Sequence: Synthetic oligonucleotide
ucgcugugcacgcagcugc

SEQ ID NO: 2597838 - RNA, 19 nt, Artificial Sequence
  Description of Artificial Sequence: Synthetic oligonucleotide
uaagcagcaaggugguccu

SEQ ID NO: 2597839 - RNA, 19 nt, Artificial Sequence
  Description of Artificial Sequence: Synthetic oligonucleotide
caaagucuugcaaagaagu

SEQ ID NO: 2597840 - RNA, 19 nt, Artificial Sequence
  Description of Artificial Sequence: Synthetic oligonucleotide
ugcugaacggagaucccug

SEQ ID NO: 2597841 - RNA, 19 nt, Artificial Sequence
  Description of Artificial Sequence: Synthetic oligonucleotide
agcaaugguacugagggaa

SEQ ID NO: 2597842 - RNA, 19 nt, Artificial Sequence
  Description of Artificial Sequence: Synthetic oligonucleotide
gaugaagcaaugguacuga

SEQ ID NO: 2597843 - RNA, 19 nt, Artificial Sequence
  Description of Artificial Sequence: Synthetic oligonucleotide
uguccacccagcuucggca

SEQ ID NO: 2597844 - RNA, 19 nt, Artificial Sequence
  Description of Artificial Sequence: Synthetic oligonucleotide
acaaccauggccagggucu

SEQ ID NO: 2597845 - RNA, 19 nt, Artificial Sequence
  Description of Artificial Sequence: Synthetic oligonucleotide
gcugcaaagucuugcaaag

SEQ ID NO: 2597846 - RNA, 19 nt, Artificial Sequence
  Description of Artificial Sequence: Synthetic oligonucleotide
uagugggaguaauggauga

SEQ ID NO: 2597847 - RNA, 19 nt, Artificial Sequence
  Description of Artificial Sequence: Synthetic oligonucleotide
ccagcuucggcauaaggcc

SEQ ID NO: 2597848 - RNA, 19 nt, Artificial Sequence
  Description of Artificial Sequence: Synthetic oligonucleotide
agugagcguggaguuaagc

SEQ ID NO: 2597849 - RNA, 19 nt, Artificial Sequence
  Description of Artificial Sequence: Synthetic oligonucleotide
uggaugaagcaaugguacu

SEQ ID NO: 2597850 - RNA, 19 nt, Artificial Sequence
  Description of Artificial Sequence: Synthetic oligonucleotide
uggaguuaagcagcaaggu

SEQ ID NO: 2597851 - RNA, 19 nt, Artificial Sequence
  Description of Artificial Sequence: Synthetic oligonucleotide
uccugauccgauagagcug

SEQ ID NO: 2597852 - RNA, 19 nt, Artificial Sequence
  Description of Artificial Sequence: Synthetic oligonucleotide
agggaccgcggucaaacuc

SEQ ID NO: 2597853 - RNA, 19 nt, Artificial Sequence
  Description of Artificial Sequence: Synthetic oligonucleotide
ugucagguccagauguaaa

SEQ ID NO: 2597854 - RNA, 19 nt, Artificial Sequence
  Description of Artificial Sequence: Synthetic oligonucleotide
ugagggaagucucgucuga

SEQ ID NO: 2597855 - RNA, 19 nt, Artificial Sequence
  Description of Artificial Sequence: Synthetic oligonucleotide
gugagcguggaguuaagca

SEQ ID NO: 2597856 - RNA, 19 nt, Artificial Sequence
  Description of Artificial Sequence: Synthetic oligonucleotide
gcaaagaagugggagacag

SEQ ID NO: 2597857 - RNA, 19 nt, Artificial Sequence
  Description of Artificial Sequence: Synthetic oligonucleotide
augacagcgucuccccggg

SEQ ID NO: 2597858 - RNA, 19 nt, Artificial Sequence
  Description of Artificial Sequence: Synthetic oligonucleotide
uccucguccagcucgcugu

SEQ ID NO: 2597859 - RNA, 19 nt, Artificial Sequence
  Description of Artificial Sequence: Synthetic oligonucleotide
cauuguaaauaguguccac

SEQ ID NO: 2597860 - RNA, 19 nt, Artificial Sequence
  Description of Artificial Sequence: Synthetic oligonucleotide
cucagguaccagcagcagc

SEQ ID NO: 2597861 - RNA, 19 nt, Artificial Sequence
  Description of Artificial Sequence: Synthetic oligonucleotide
aguaauggaugaagcaaug

SEQ ID NO: 2597862 - RNA, 19 nt, Artificial Sequence
  Description of Artificial Sequence: Synthetic oligonucleotide
ucucgucugacugggagcu

SEQ ID NO: 2597863 - RNA, 19 nt, Artificial Sequence
  Description of Artificial Sequence: Synthetic oligonucleotide
uccgauagagcugggccag

SEQ ID NO: 2597864 - RNA, 19 nt, Artificial Sequence
  Description of Artificial Sequence: Synthetic oligonucleotide
agaugacagcgucuccccg

SEQ ID NO: 2597865 - RNA, 19 nt, Artificial Sequence
  Description of Artificial Sequence: Synthetic oligonucleotide
gaagugggagacagggugc

SEQ ID NO: 2597866 - RNA, 19 nt, Artificial Sequence
  Description of Artificial Sequence: Synthetic oligonucleotide
aagcaaugguacugaggga

SEQ ID NO: 2597867 - RNA, 19 nt, Artificial Sequence
  Description of Artificial Sequence: Synthetic oligonucleotide
ugguucugugcauuguaaa

SEQ ID NO: 2597868 - RNA, 19 nt, Artificial Sequence
  Description of Artificial Sequence: Synthetic oligonucleotide
aacuacacucagguaccag

SEQ ID NO: 2597869 - RNA, 19 nt, Artificial Sequence
  Description of Artificial Sequence: Synthetic oligonucleotide
ucugugcauuguaaauagu

SEQ ID NO: 2597870 - RNA, 19 nt, Artificial Sequence
  Description of Artificial Sequence: Synthetic oligonucleotide
ggaagucucgucugacugg

SEQ ID NO: 2597871 - RNA, 19 nt, Artificial Sequence
  Description of Artificial Sequence: Synthetic oligonucleotide
gcuguccucacccuccucg

SEQ ID NO: 2597872 - RNA, 19 nt, Artificial Sequence
  Description of Artificial Sequence: Synthetic oligonucleotide
guccugauccgauagagcu

SEQ ID NO: 2597873 - RNA, 19 nt, Artificial Sequence
  Description of Artificial Sequence: Synthetic oligonucleotide
accaucugaggcaccgugc

SEQ ID NO: 2597874 - RNA, 19 nt, Artificial Sequence
  Description of Artificial Sequence: Synthetic oligonucleotide
uaguguccacccagcuucg

SEQ ID NO: 2597875 - RNA, 19 nt, Artificial Sequence
  Description of Artificial Sequence: Synthetic oligonucleotide
accgcggucaaacuccgga

SEQ ID NO: 2597876 - RNA, 19 nt, Artificial Sequence
  Description of Artificial Sequence: Synthetic oligonucleotide
agcugaagggaccgcgguc

SEQ ID NO: 2597877 - RNA, 19 nt, Artificial Sequence
  Description of Artificial Sequence: Synthetic oligonucleotide
cccagcuucggcauaaggc

SEQ ID NO: 2597878 - RNA, 19 nt, Artificial Sequence
  Description of Artificial Sequence: Synthetic oligonucleotide
aggcugucgcugcucuucc

SEQ ID NO: 2597879 - RNA, 19 nt, Artificial Sequence
  Description of Artificial Sequence: Synthetic oligonucleotide
uccugugcugaacggagau

SEQ ID NO: 2597880 - RNA, 19 nt, Artificial Sequence
  Description of Artificial Sequence: Synthetic oligonucleotide
ggugguccugauccgauag

SEQ ID NO: 2597881 - RNA, 19 nt, Artificial Sequence
  Description of Artificial Sequence: Synthetic oligonucleotide
gggaagucucgucugacug

SEQ ID NO: 2597882 - RNA, 19 nt, Artificial Sequence
  Description of Artificial Sequence: Synthetic oligonucleotide
uugaggcugucgcugcucu

SEQ ID NO: 2597883 - RNA, 19 nt, Artificial Sequence
  Description of Artificial Sequence: Synthetic oligonucleotide
cugaacggagaucccuggg

SEQ ID NO: 2597884 - RNA, 19 nt, Artificial Sequence
  Description of Artificial Sequence: Synthetic oligonucleotide
ggaacuacacucagguacc

SEQ ID NO: 2597885 - RNA, 19 nt, Artificial Sequence
  Description of Artificial Sequence: Synthetic oligonucleotide
cucgcuagugggaguaaug

SEQ ID NO: 2597886 - RNA, 19 nt, Artificial Sequence
  Description of Artificial Sequence: Synthetic oligonucleotide
aucggccguccacugggcc

SEQ ID NO: 2597887 - RNA, 19 nt, Artificial Sequence
  Description of Artificial Sequence: Synthetic oligonucleotide
gguacugagggaagucucg

SEQ ID NO: 2597888 - RNA, 19 nt, Artificial Sequence
  Description of Artificial Sequence: Synthetic oligonucleotide
ggaugaagcaaugguacug

SEQ ID NO: 2597889 - RNA, 19 nt, Artificial Sequence
  Description of Artificial Sequence: Synthetic oligonucleotide
ugucgcugcucuuccgcag

SEQ ID NO: 2597890 - RNA, 19 nt, Artificial Sequence
  Description of Artificial Sequence: Synthetic oligonucleotide
gucagguccagauguaaaa

SEQ ID NO: 2597891 - RNA, 19 nt, Artificial Sequence
  Description of Artificial Sequence: Synthetic oligonucleotide
ugauccgauagagcugggc

SEQ ID NO: 2597892 - RNA, 19 nt, Artificial Sequence
  Description of Artificial Sequence: Synthetic oligonucleotide
ccugauccgauagagcugg

SEQ ID NO: 2597893 - RNA, 19 nt, Artificial Sequence
  Description of Artificial Sequence: Synthetic oligonucleotide
uccauggagcaagaucggc

SEQ ID NO: 2597894 - RNA, 19 nt, Artificial Sequence
  Description of Artificial Sequence: Synthetic oligonucleotide
aguuaagcagcaagguggu

SEQ ID NO: 2597895 - RNA, 19 nt, Artificial Sequence
  Description of Artificial Sequence: Synthetic oligonucleotide
gucucgucugacugggagc

SEQ ID NO: 2597896 - RNA, 19 nt, Artificial Sequence
  Description of Artificial Sequence: Synthetic oligonucleotide
cugcucuuccgcaggagug

SEQ ID NO: 2597897 - RNA, 19 nt, Artificial Sequence
  Description of Artificial Sequence: Synthetic oligonucleotide
cuggccuggaauguguaug

SEQ ID NO: 2597898 - RNA, 19 nt, Artificial Sequence
  Description of Artificial Sequence: Synthetic oligonucleotide
ccauggagcaagaucggcc

SEQ ID NO: 2597899 - RNA, 19 nt, Artificial Sequence
  Description of Artificial Sequence: Synthetic oligonucleotide
ggaguaauggaugaagcaa

SEQ ID NO: 2597900 - RNA, 19 nt, Artificial Sequence
  Description of Artificial Sequence: Synthetic oligonucleotide
gucgcugcucuuccgcagg

SEQ ID NO: 2597901 - RNA, 19 nt, Artificial Sequence
  Description of Artificial Sequence: Synthetic oligonucleotide
ucugaggcaccgugcugag

SEQ ID NO: 2597902 - RNA, 19 nt, Artificial Sequence
  Description of Artificial Sequence: Synthetic oligonucleotide
acccagcuucggcauaagg

SEQ ID NO: 2597903 - RNA, 19 nt, Artificial Sequence
  Description of Artificial Sequence: Synthetic oligonucleotide
agggaagucucgucugacu

SEQ ID NO: 2597904 - RNA, 19 nt, Artificial Sequence
  Description of Artificial Sequence: Synthetic oligonucleotide
accgugcugagaguugagg

SEQ ID NO: 2597905 - RNA, 19 nt, Artificial Sequence
  Description of Artificial Sequence: Synthetic oligonucleotide
uccggagaugacagcgucu

SEQ ID NO: 2597906 - RNA, 19 nt, Artificial Sequence
  Description of Artificial Sequence: Synthetic oligonucleotide
agcagcucgcuagugggag

SEQ ID NO: 2597907 - RNA, 19 nt, Artificial Sequence
  Description of Artificial Sequence: Synthetic oligonucleotide
gugcugagaguugaggcug

SEQ ID NO: 2597908 - RNA, 19 nt, Artificial Sequence
  Description of Artificial Sequence: Synthetic oligonucleotide
cacaaccauggccaggguc

SEQ ID NO: 2597909 - RNA, 19 nt, Artificial Sequence
  Description of Artificial Sequence: Synthetic oligonucleotide
ucgucugacugggagcuga

SEQ ID NO: 2597910 - RNA, 19 nt, Artificial Sequence
  Description of Artificial Sequence: Synthetic oligonucleotide
gcagaguccauggagcaag

SEQ ID NO: 2597911 - RNA, 19 nt, Artificial Sequence
  Description of Artificial Sequence: Synthetic oligonucleotide
ggcagcagcucgcuagugg

SEQ ID NO: 2597912 - RNA, 19 nt, Artificial Sequence
  Description of Artificial Sequence: Synthetic oligonucleotide
ucggccguccacugggccc

SEQ ID NO: 2597913 - RNA, 19 nt, Artificial Sequence
  Description of Artificial Sequence: Synthetic oligonucleotide
ggucaaacuccggagauga

SEQ ID NO: 2597914 - RNA, 19 nt, Artificial Sequence
  Description of Artificial Sequence: Synthetic oligonucleotide
cugggagcugaagggaccg

SEQ ID NO: 2597915 - RNA, 19 nt, Artificial Sequence
  Description of Artificial Sequence: Synthetic oligonucleotide
uccccgggcucuaucacaa

SEQ ID NO: 2597916 - RNA, 19 nt, Artificial Sequence
  Description of Artificial Sequence: Synthetic oligonucleotide
aagggaccgcggucaaacu

SEQ ID NO: 2597917 - RNA, 19 nt, Artificial Sequence
  Description of Artificial Sequence: Synthetic oligonucleotide
ugcaaagaagugggagaca

SEQ ID NO: 2597918 - RNA, 19 nt, Artificial Sequence
  Description of Artificial Sequence: Synthetic oligonucleotide
gcugccgagucucuucagg

SEQ ID NO: 2597919 - RNA, 19 nt, Artificial Sequence
  Description of Artificial Sequence: Synthetic oligonucleotide
gcugaacggagaucccugg

SEQ ID NO: 2597920 - RNA, 19 nt, Artificial Sequence
  Description of Artificial Sequence: Synthetic oligonucleotide
uacugagggaagucucguc

SEQ ID NO: 2597921 - RNA, 19 nt, Artificial Sequence
  Description of Artificial Sequence: Synthetic oligonucleotide
gggaggcucaggcugcacg

SEQ ID NO: 2597922 - RNA, 19 nt, Artificial Sequence
  Description of Artificial Sequence: Synthetic oligonucleotide
ugcugagaguugaggcugu

SEQ ID NO: 2597923 - RNA, 19 nt, Artificial Sequence
  Description of Artificial Sequence: Synthetic oligonucleotide
gaggcagugagcguggagu

SEQ ID NO: 2597924 - RNA, 19 nt, Artificial Sequence
  Description of Artificial Sequence: Synthetic oligonucleotide
caagaucggccguccacug

SEQ ID NO: 2597925 - RNA, 19 nt, Artificial Sequence
  Description of Artificial Sequence: Synthetic oligonucleotide
ggagacagggugccauagg

SEQ ID NO: 2597926 - RNA, 19 nt, Artificial Sequence
  Description of Artificial Sequence: Synthetic oligonucleotide
cguggaguuaagcagcaag

SEQ ID NO: 2597927 - RNA, 19 nt, Artificial Sequence
  Description of Artificial Sequence: Synthetic oligonucleotide
guguccacccagcuucggc

SEQ ID NO: 2597928 - RNA, 19 nt, Artificial Sequence
  Description of Artificial Sequence: Synthetic oligonucleotide
ggaggcucaggcugcacgc

SEQ ID NO: 2597929 - RNA, 19 nt, Artificial Sequence
  Description of Artificial Sequence: Synthetic oligonucleotide
gccuggaauguguaugccc

SEQ ID NO: 2597930 - RNA, 19 nt, Artificial Sequence
  Description of Artificial Sequence: Synthetic oligonucleotide
aggcaugggugcugucagg

SEQ ID NO: 2597931 - RNA, 19 nt, Artificial Sequence
  Description of Artificial Sequence: Synthetic oligonucleotide
gaggcugucgcugcucuuc

SEQ ID NO: 2597932 - RNA, 19 nt, Artificial Sequence
  Description of Artificial Sequence: Synthetic oligonucleotide
ccgugcugagaguugaggc

SEQ ID NO: 2597933 - RNA, 19 nt, Artificial Sequence
  Description of Artificial Sequence: Synthetic oligonucleotide
ucuccccgggcucuaucac

SEQ ID NO: 2597934 - RNA, 19 nt, Artificial Sequence
  Description of Artificial Sequence: Synthetic oligonucleotide
ggagcugcaaagucuugca

SEQ ID NO: 2597935 - RNA, 19 nt, Artificial Sequence
  Description of Artificial Sequence: Synthetic oligonucleotide
cccacagcaacuguggaac

SEQ ID NO: 2597936 - RNA, 19 nt, Artificial Sequence
  Description of Artificial Sequence: Synthetic oligonucleotide
guccauggagcaagaucgg

SEQ ID NO: 2597937 - RNA, 19 nt, Artificial Sequence
  Description of Artificial Sequence: Synthetic oligonucleotide
gaggcgccaggcaugggug

SEQ ID NO: 2597938 - RNA, 19 nt, Artificial Sequence
  Description of Artificial Sequence: Synthetic oligonucleotide
uggagcaagaucggccguc

SEQ ID NO: 2597939 - RNA, 19 nt, Artificial Sequence
  Description of Artificial Sequence: Synthetic oligonucleotide
uggaaccaucugaggcacc

SEQ ID NO: 2597940 - RNA, 19 nt, Artificial Sequence
  Description of Artificial Sequence: Synthetic oligonucleotide
cuccggagaugacagcguc

SEQ ID NO: 2597941 - RNA, 19 nt, Artificial Sequence
  Description of Artificial Sequence: Synthetic oligonucleotide
cugguucugugcauuguaa

SEQ ID NO: 2597942 - RNA, 19 nt, Artificial Sequence
  Description of Artificial Sequence: Synthetic oligonucleotide
accgguggcucuaccacag

SEQ ID NO: 2597943 - RNA, 19 nt, Artificial Sequence
  Description of Artificial Sequence: Synthetic oligonucleotide
gggaccgcggucaaacucc

SEQ ID NO: 2597944 - RNA, 19 nt, Artificial Sequence
  Description of Artificial Sequence: Synthetic oligonucleotide
gcaaggugguccugauccg

SEQ ID NO: 2597945 - RNA, 19 nt, Artificial Sequence
  Description of Artificial Sequence: Synthetic oligonucleotide
gagggaagucucgucugac

SEQ ID NO: 2597946 - RNA, 19 nt, Artificial Sequence
  Description of Artificial Sequence: Synthetic oligonucleotide
gcccagaggcagcagcucg

SEQ ID NO: 2597947 - RNA, 19 nt, Artificial Sequence
  Description of Artificial Sequence: Synthetic oligonucleotide
gcugucgcugcucuuccgc

SEQ ID NO: 2597948 - RNA, 19 nt, Artificial Sequence
  Description of Artificial Sequence: Synthetic oligonucleotide
auggagcaagaucggccgu

SEQ ID NO: 2597949 - RNA, 19 nt, Artificial Sequence
  Description of Artificial Sequence: Synthetic oligonucleotide
agacagggugccauaggca

SEQ ID NO: 2597950 - RNA, 19 nt, Artificial Sequence
  Description of Artificial Sequence: Synthetic oligonucleotide
gugcugucagguccagaug

SEQ ID NO: 2597951 - RNA, 19 nt, Artificial Sequence
  Description of Artificial Sequence: Synthetic oligonucleotide
aaggugguccugauccgau

SEQ ID NO: 2597952 - RNA, 19 nt, Artificial Sequence
  Description of Artificial Sequence: Synthetic oligonucleotide
gggagcugaagggaccgcg

SEQ ID NO: 2597953 - RNA, 19 nt, Artificial Sequence
  Description of Artificial Sequence: Synthetic oligonucleotide
caucugaggcaccgugcug

SEQ ID NO: 2597954 - RNA, 19 nt, Artificial Sequence
  Description of Artificial Sequence: Synthetic oligonucleotide
ucgcugcucuuccgcagga

SEQ ID NO: 2597955 - RNA, 19 nt, Artificial Sequence
  Description of Artificial Sequence: Synthetic oligonucleotide
agugggaguaauggaugaa

SEQ ID NO: 2597956 - RNA, 19 nt, Artificial Sequence
  Description of Artificial Sequence: Synthetic oligonucleotide
gucuccccgggcucuauca

SEQ ID NO: 2597957 - RNA, 19 nt, Artificial Sequence
  Description of Artificial Sequence: Synthetic oligonucleotide
agcuucggcauaaggccug

SEQ ID NO: 2597958 - RNA, 19 nt, Artificial Sequence
  Description of Artificial Sequence: Synthetic oligonucleotide
aggcagugagcguggaguu

SEQ ID NO: 2597959 - RNA, 19 nt, Artificial Sequence
  Description of Artificial Sequence: Synthetic oligonucleotide
gauagagcugggccagggu

SEQ ID NO: 2597960 - RNA, 19 nt, Artificial Sequence
  Description of Artificial Sequence: Synthetic oligonucleotide
gaacuacacucagguacca

SEQ ID NO: 2597961 - RNA, 19 nt, Artificial Sequence
  Description of Artificial Sequence: Synthetic oligonucleotide
cagcucgcugugcacgcag

SEQ ID NO: 2597962 - RNA, 19 nt, Artificial Sequence
  Description of Artificial Sequence: Synthetic oligonucleotide
gguucugugcauuguaaau

SEQ ID NO: 2597963 - RNA, 19 nt, Artificial Sequence
  Description of Artificial Sequence: Synthetic oligonucleotide
ucacaaccauggccagggu

SEQ ID NO: 2597964 - RNA, 19 nt, Artificial Sequence
  Description of Artificial Sequence: Synthetic oligonucleotide
aguguccacccagcuucgg

SEQ ID NO: 2597965 - RNA, 19 nt, Artificial Sequence
  Description of Artificial Sequence: Synthetic oligonucleotide
cugauccgauagagcuggg

SEQ ID NO: 2597966 - RNA, 19 nt, Artificial Sequence
  Description of Artificial Sequence: Synthetic oligonucleotide
gcucuaucacaaccauggc

SEQ ID NO: 2597967 - RNA, 19 nt, Artificial Sequence
  Description of Artificial Sequence: Synthetic oligonucleotide
cccgggcucuaucacaacc

SEQ ID NO: 2597968 - RNA, 19 nt, Artificial Sequence
  Description of Artificial Sequence: Synthetic oligonucleotide
cucgcugugcacgcagcug

SEQ ID NO: 2597969 - RNA, 19 nt, Artificial Sequence
  Description of Artificial Sequence: Synthetic oligonucleotide
cggcauaaggccuggcugc

SEQ ID NO: 2597970 - RNA, 19 nt, Artificial Sequence
  Description of Artificial Sequence: Synthetic oligonucleotide
ccagggucucuguggaacc

SEQ ID NO: 2597971 - RNA, 19 nt, Artificial Sequence
  Description of Artificial Sequence: Synthetic oligonucleotide
agcguggaguuaagcagca

SEQ ID NO: 2597972 - RNA, 19 nt, Artificial Sequence
  Description of Artificial Sequence: Synthetic oligonucleotide
gguccugauccgauagagc

SEQ ID NO: 2597973 - RNA, 19 nt, Artificial Sequence
  Description of Artificial Sequence: Synthetic oligonucleotide
ugacagcgucuccccgggc

SEQ ID NO: 2597974 - RNA, 19 nt, Artificial Sequence
  Description of Artificial Sequence: Synthetic oligonucleotide
augggugcugucaggucca

SEQ ID NO: 2597975 - RNA, 19 nt, Artificial Sequence
  Description of Artificial Sequence: Synthetic oligonucleotide
gucugacugggagcugaag

SEQ ID NO: 2597976 - RNA, 19 nt, Artificial Sequence
  Description of Artificial Sequence: Synthetic oligonucleotide
caccgugcugagaguugag

SEQ ID NO: 2597977 - RNA, 19 nt, Artificial Sequence
  Description of Artificial Sequence: Synthetic oligonucleotide
gcaccgguggcucuaccac

SEQ ID NO: 2597978 - RNA, 19 nt, Artificial Sequence
  Description of Artificial Sequence: Synthetic oligonucleotide
gugguccugauccgauaga

SEQ ID NO: 2597979 - RNA, 19 nt, Artificial Sequence
  Description of Artificial Sequence: Synthetic oligonucleotide
gggguggagcugcaaaguc

SEQ ID NO: 2597980 - RNA, 19 nt, Artificial Sequence
  Description of Artificial Sequence: Synthetic oligonucleotide
gcuagugggaguaauggau

SEQ ID NO: 2597981 - RNA, 19 nt, Artificial Sequence
  Description of Artificial Sequence: Synthetic oligonucleotide
caaggugguccugauccga

SEQ ID NO: 2597982 - RNA, 19 nt, Artificial Sequence
  Description of Artificial Sequence: Synthetic oligonucleotide
acuccggagaugacagcgu

SEQ ID NO: 2597983 - RNA, 19 nt, Artificial Sequence
  Description of Artificial Sequence: Synthetic oligonucleotide
guugaggcugucgcugcuc

SEQ ID NO: 2597984 - RNA, 19 nt, Artificial Sequence
  Description of Artificial Sequence: Synthetic oligonucleotide
gagcugaagggaccgcggu

SEQ ID NO: 2597985 - RNA, 19 nt, Artificial Sequence
  Description of Artificial Sequence: Synthetic oligonucleotide
uccacccagcuucggcaua

SEQ ID NO: 2597986 - RNA, 19 nt, Artificial Sequence
  Description of Artificial Sequence: Synthetic oligonucleotide
guggaacuacacucaggua

SEQ ID NO: 2597987 - RNA, 19 nt, Artificial Sequence
  Description of Artificial Sequence: Synthetic oligonucleotide
gaucggccguccacugggc

SEQ ID NO: 2597988 - RNA, 19 nt, Artificial Sequence
  Description of Artificial Sequence: Synthetic oligonucleotide
cuccccgggcucuaucaca

SEQ ID NO: 2597989 - RNA, 19 nt, Artificial Sequence
  Description of Artificial Sequence: Synthetic oligonucleotide
cagcaaggugguccugauc

SEQ ID NO: 2597990 - RNA, 19 nt, Artificial Sequence
  Description of Artificial Sequence: Synthetic oligonucleotide
ggcaccgguggcucuacca

SEQ ID NO: 2597991 - RNA, 19 nt, Artificial Sequence
  Description of Artificial Sequence: Synthetic oligonucleotide
aggugguccugauccgaua

SEQ ID NO: 2597992 - RNA, 19 nt, Artificial Sequence
  Description of Artificial Sequence: Synthetic oligonucleotide
caccgguggcucuaccaca

SEQ ID NO: 2597993 - RNA, 19 nt, Artificial Sequence
  Description of Artificial Sequence: Synthetic oligonucleotide
gcugguucugugcauugua

SEQ ID NO: 2597994 - RNA, 19 nt, Artificial Sequence
  Description of Artificial Sequence: Synthetic oligonucleotide
cccagaggcagcagcucgc

SEQ ID NO: 2597995 - RNA, 19 nt, Artificial Sequence
  Description of Artificial Sequence: Synthetic oligonucleotide
guuaagcagcaaggugguc

SEQ ID NO: 2597996 - RNA, 19 nt, Artificial Sequence
  Description of Artificial Sequence: Synthetic oligonucleotide
gucuugcaaagaaguggga

SEQ ID NO: 2597997 - RNA, 19 nt, Artificial Sequence
  Description of Artificial Sequence: Synthetic oligonucleotide
aggcaccgugcugagaguu

SEQ ID NO: 2597998 - RNA, 19 nt, Artificial Sequence
  Description of Artificial Sequence: Synthetic oligonucleotide
cgguggcucuaccacaggg

SEQ ID NO: 2597999 - RNA, 19 nt, Artificial Sequence
  Description of Artificial Sequence: Synthetic oligonucleotide
ggcugucgcugcucuuccg

SEQ ID NO: 2598000 - RNA, 19 nt, Artificial Sequence
  Description of Artificial Sequence: Synthetic oligonucleotide
gcugcacgcuggcuggggc

SEQ ID NO: 2598001 - RNA, 19 nt, Artificial Sequence
  Description of Artificial Sequence: Synthetic oligonucleotide
gucaaacuccggagaugac

SEQ ID NO: 2598002 - RNA, 19 nt, Artificial Sequence
  Description of Artificial Sequence: Synthetic oligonucleotide
agggucucuguggaaccau

SEQ ID NO: 2598003 - RNA, 19 nt, Artificial Sequence
  Description of Artificial Sequence: Synthetic oligonucleotide
ggggaggcgccaggcaugg

SEQ ID NO: 2598004 - RNA, 19 nt, Artificial Sequence
  Description of Artificial Sequence: Synthetic oligonucleotide
cugucagguccagauguaa

SEQ ID NO: 2598005 - RNA, 19 nt, Artificial Sequence
  Description of Artificial Sequence: Synthetic oligonucleotide
aagucucgucugacuggga

SEQ ID NO: 2598006 - RNA, 19 nt, Artificial Sequence
  Description of Artificial Sequence: Synthetic oligonucleotide
ccggagaugacagcgucuc

SEQ ID NO: 2598007 - RNA, 19 nt, Artificial Sequence
  Description of Artificial Sequence: Synthetic oligonucleotide
ggaccgcggucaaacuccg

SEQ ID NO: 2598008 - RNA, 19 nt, Artificial Sequence
  Description of Artificial Sequence: Synthetic oligonucleotide
ccgcggucaaacuccggag

SEQ ID NO: 2598009 - RNA, 19 nt, Artificial Sequence
  Description of Artificial Sequence: Synthetic oligonucleotide
gaccgcggucaaacuccgg

SEQ ID NO: 2598010 - RNA, 19 nt, Artificial Sequence
  Description of Artificial Sequence: Synthetic oligonucleotide
ugggugcugucagguccag

SEQ ID NO: 2598011 - RNA, 19 nt, Artificial Sequence
  Description of Artificial Sequence: Synthetic oligonucleotide
guacugagggaagucucgu

SEQ ID NO: 2598012 - RNA, 19 nt, Artificial Sequence
  Description of Artificial Sequence: Synthetic oligonucleotide
cacgcuggcuggggcacag

SEQ ID NO: 2598013 - RNA, 19 nt, Artificial Sequence
  Description of Artificial Sequence: Synthetic oligonucleotide
cucguccagcucgcugugc

SEQ ID NO: 2598014 - RNA, 19 nt, Artificial Sequence
  Description of Artificial Sequence: Synthetic oligonucleotide
cuucggcauaaggccuggc

SEQ ID NO: 2598015 - RNA, 19 nt, Artificial Sequence
  Description of Artificial Sequence: Synthetic oligonucleotide
gggcucuaucacaaccaug

SEQ ID NO: 2598016 - RNA, 19 nt, Artificial Sequence
  Description of Artificial Sequence: Synthetic oligonucleotide
gcuucggcauaaggccugg

SEQ ID NO: 2598017 - RNA, 19 nt, Artificial Sequence
  Description of Artificial Sequence: Synthetic oligonucleotide
ggaggcgccaggcaugggu

SEQ ID NO: 2598018 - RNA, 19 nt, Artificial Sequence
  Description of Artificial Sequence: Synthetic oligonucleotide
cacagcaacuguggaacua

SEQ ID NO: 2598019 - RNA, 19 nt, Artificial Sequence
  Description of Artificial Sequence: Synthetic oligonucleotide
cagcagcucgcuaguggga

SEQ ID NO: 2598020 - RNA, 19 nt, Artificial Sequence
  Description of Artificial Sequence: Synthetic oligonucleotide
gugcugaacggagaucccu

SEQ ID NO: 2598021 - RNA, 19 nt, Artificial Sequence
  Description of Artificial Sequence: Synthetic oligonucleotide
ccgggcucuaucacaacca

SEQ ID NO: 2598022 - RNA, 19 nt, Artificial Sequence
  Description of Artificial Sequence: Synthetic oligonucleotide
ggccuggaauguguaugcc

SEQ ID NO: 2598023 - RNA, 19 nt, Artificial Sequence
  Description of Artificial Sequence: Synthetic oligonucleotide
acaggcaccgguggcucua

SEQ ID NO: 2598024 - RNA, 19 nt, Artificial Sequence
  Description of Artificial Sequence: Synthetic oligonucleotide
ccguccacugggcccagag

SEQ ID NO: 2598025 - RNA, 19 nt, Artificial Sequence
  Description of Artificial Sequence: Synthetic oligonucleotide
gcugcucuuccgcaggagu

SEQ ID NO: 2598026 - RNA, 19 nt, Artificial Sequence
  Description of Artificial Sequence: Synthetic oligonucleotide
ggcaccgugcugagaguug

SEQ ID NO: 2598027 - RNA, 19 nt, Artificial Sequence
  Description of Artificial Sequence: Synthetic oligonucleotide
gcaagaucggccguccacu

SEQ ID NO: 2598028 - RNA, 19 nt, Artificial Sequence
  Description of Artificial Sequence: Synthetic oligonucleotide
cgauagagcugggccaggg

SEQ ID NO: 2598029 - RNA, 19 nt, Artificial Sequence
  Description of Artificial Sequence: Synthetic oligonucleotide
gcaugggugcugucagguc

SEQ ID NO: 2598030 - RNA, 19 nt, Artificial Sequence
  Description of Artificial Sequence: Synthetic oligonucleotide
cagggucucuguggaacca

SEQ ID NO: 2598031 - RNA, 19 nt, Artificial Sequence
  Description of Artificial Sequence: Synthetic oligonucleotide
ggcaugggugcugucaggu

SEQ ID NO: 2598032 - RNA, 19 nt, Artificial Sequence
  Description of Artificial Sequence: Synthetic oligonucleotide
gaggcaccgugcugagagu

SEQ ID NO: 2598033 - RNA, 19 nt, Artificial Sequence
  Description of Artificial Sequence: Synthetic oligonucleotide
gugggagacagggugccau

SEQ ID NO: 2598034 - RNA, 19 nt, Artificial Sequence
  Description of Artificial Sequence: Synthetic oligonucleotide
cucgucugacugggagcug

SEQ ID NO: 2598035 - RNA, 19 nt, Artificial Sequence
  Description of Artificial Sequence: Synthetic oligonucleotide
cugaagggaccgcggucaa

SEQ ID NO: 2598036 - RNA, 19 nt, Artificial Sequence
  Description of Artificial Sequence: Synthetic oligonucleotide
gaaccaucugaggcaccgu

SEQ ID NO: 2598037 - RNA, 19 nt, Artificial Sequence
  Description of Artificial Sequence: Synthetic oligonucleotide
cguccacugggcccagagg

SEQ ID NO: 2598038 - RNA, 19 nt, Artificial Sequence
  Description of Artificial Sequence: Synthetic oligonucleotide
cagcucgcuagugggagua

SEQ ID NO: 2598039 - RNA, 19 nt, Artificial Sequence
  Description of Artificial Sequence: Synthetic oligonucleotide
ggucucuguggaaccaucu

SEQ ID NO: 2598040 - RNA, 19 nt, Artificial Sequence
  Description of Artificial Sequence: Synthetic oligonucleotide
gggucucuguggaaccauc

SEQ ID NO: 2598041 - RNA, 19 nt, Artificial Sequence
  Description of Artificial Sequence: Synthetic oligonucleotide
guccacccagcuucggcau

SEQ ID NO: 2598042 - RNA, 19 nt, Artificial Sequence
  Description of Artificial Sequence: Synthetic oligonucleotide
agcucgcuagugggaguaa

SEQ ID NO: 2598043 - RNA, 19 nt, Artificial Sequence
  Description of Artificial Sequence: Synthetic oligonucleotide
cgugcugagaguugaggcu

SEQ ID NO: 2598044 - RNA, 19 nt, Artificial Sequence
  Description of Artificial Sequence: Synthetic oligonucleotide
cgcuagugggaguaaugga

SEQ ID NO: 2598045 - RNA, 19 nt, Artificial Sequence
  Description of Artificial Sequence: Synthetic oligonucleotide
caggcaccgguggcucuac

SEQ ID NO: 2598046 - RNA, 19 nt, Artificial Sequence
  Description of Artificial Sequence: Synthetic oligonucleotide
cacccuccucguccagcuc

SEQ ID NO: 2598047 - RNA, 19 nt, Artificial Sequence
  Description of Artificial Sequence: Synthetic oligonucleotide
gcacaggcaccgguggcuc

SEQ ID NO: 2598048 - RNA, 19 nt, Artificial Sequence
  Description of Artificial Sequence: Synthetic oligonucleotide
ccgguggcucuaccacagg

SEQ ID NO: 2598049 - RNA, 19 nt, Artificial Sequence
  Description of Artificial Sequence: Synthetic oligonucleotide
ccucguccagcucgcugug

SEQ ID NO: 2598050 - RNA, 19 nt, Artificial Sequence
  Description of Artificial Sequence: Synthetic oligonucleotide
cggagaugacagcgucucc

SEQ ID NO: 2598051 - RNA, 19 nt, Artificial Sequence
  Description of Artificial Sequence: Synthetic oligonucleotide
gcuggggcacaggcaccgg

SEQ ID NO: 2598052 - RNA, 19 nt, Artificial Sequence
  Description of Artificial Sequence: Synthetic oligonucleotide
ccgauagagcugggccagg

SEQ ID NO: 2598053 - RNA, 19 nt, Artificial Sequence
  Description of Artificial Sequence: Synthetic oligonucleotide
agggugccauaggcagagu

SEQ ID NO: 2598054 - RNA, 19 nt, Artificial Sequence
  Description of Artificial Sequence: Synthetic oligonucleotide
cggucaaacuccggagaug

SEQ ID NO: 2598055 - RNA, 19 nt, Artificial Sequence
  Description of Artificial Sequence: Synthetic oligonucleotide
cugaggcaccgugcugaga

SEQ ID NO: 2598056 - RNA, 19 nt, Artificial Sequence
  Description of Artificial Sequence: Synthetic oligonucleotide
gcucgcugugcacgcagcu

SEQ ID NO: 2598057 - RNA, 19 nt, Artificial Sequence
  Description of Artificial Sequence: Synthetic oligonucleotide
agcuggcagcugaggcacu

SEQ ID NO: 2598058 - RNA, 19 nt, Artificial Sequence
  Description of Artificial Sequence: Synthetic oligonucleotide
ggcagugagcguggaguua

SEQ ID NO: 2598059 - RNA, 19 nt, Artificial Sequence
  Description of Artificial Sequence: Synthetic oligonucleotide
gcuggccuggaauguguau

SEQ ID NO: 2598060 - RNA, 19 nt, Artificial Sequence
  Description of Artificial Sequence: Synthetic oligonucleotide
cacaggcaccgguggcucu

SEQ ID NO: 2598061 - RNA, 19 nt, Artificial Sequence
  Description of Artificial Sequence: Synthetic oligonucleotide
gcagcucgcuagugggagu

SEQ ID NO: 2598062 - RNA, 19 nt, Artificial Sequence
  Description of Artificial Sequence: Synthetic oligonucleotide
agcgucuccccgggcucua

SEQ ID NO: 2598063 - RNA, 19 nt, Artificial Sequence
  Description of Artificial Sequence: Synthetic oligonucleotide
ggccagggucucuguggaa

SEQ ID NO: 2598064 - RNA, 19 nt, Artificial Sequence
  Description of Artificial Sequence: Synthetic oligonucleotide
gcucuuccgcaggaguggu

SEQ ID NO: 2598065 - RNA, 19 nt, Artificial Sequence
  Description of Artificial Sequence: Synthetic oligonucleotide
ccccgggcucuaucacaac

SEQ ID NO: 2598066 - RNA, 19 nt, Artificial Sequence
  Description of Artificial Sequence: Synthetic oligonucleotide
gcucgcuagugggaguaau

SEQ ID NO: 2598067 - RNA, 19 nt, Artificial Sequence
  Description of Artificial Sequence: Synthetic oligonucleotide
gccaggcaugggugcuguc

SEQ ID NO: 2598068 - RNA, 19 nt, Artificial Sequence
  Description of Artificial Sequence: Synthetic oligonucleotide
cgucuccccgggcucuauc

SEQ ID NO: 2598069 - RNA, 19 nt, Artificial Sequence
  Description of Artificial Sequence: Synthetic oligonucleotide
gcguggaguuaagcagcaa

SEQ ID NO: 2598070 - RNA, 19 nt, Artificial Sequence
  Description of Artificial Sequence: Synthetic oligonucleotide
ccagaggcagcagcucgcu

SEQ ID NO: 2598071 - RNA, 19 nt, Artificial Sequence
  Description of Artificial Sequence: Synthetic oligonucleotide
ccagcucgcugugcacgca

SEQ ID NO: 2598072 - RNA, 19 nt, Artificial Sequence
  Description of Artificial Sequence: Synthetic oligonucleotide
gcacgcuggcuggggcaca

SEQ ID NO: 2598073 - RNA, 19 nt, Artificial Sequence
  Description of Artificial Sequence: Synthetic oligonucleotide
cgggcucuaucacaaccau

SEQ ID NO: 2598074 - RNA, 19 nt, Artificial Sequence
  Description of Artificial Sequence: Synthetic oligonucleotide
ggccguccacugggcccag

SEQ ID NO: 2598075 - RNA, 19 nt, Artificial Sequence
  Description of Artificial Sequence: Synthetic oligonucleotide
gccguccacugggcccaga

SEQ ID NO: 2598076 - RNA, 19 nt, Artificial Sequence
  Description of Artificial Sequence: Synthetic oligonucleotide
cgccaggcaugggugcugu

SEQ ID NO: 2598077 - RNA, 19 nt, Artificial Sequence
  Description of Artificial Sequence: Synthetic oligonucleotide
aauguauccauguucaucc

SEQ ID NO: 2598078 - RNA, 19 nt, Artificial Sequence
  Description of Artificial Sequence: Synthetic oligonucleotide
uuaaaagggagccuaaaag

SEQ ID NO: 2598079 - RNA, 19 nt, Artificial Sequence
  Description of Artificial Sequence: Synthetic oligonucleotide
uaaaagggagccuaaaagg

SEQ ID NO: 2598080 - RNA, 19 nt, Artificial Sequence
  Description of Artificial Sequence: Synthetic oligonucleotide
guuacaaaggcacagguag

SEQ ID NO: 2598081 - RNA, 19 nt, Artificial Sequence
  Description of Artificial Sequence: Synthetic oligonucleotide
ucuagauuugguuggaggg

SEQ ID NO: 2598082 - RNA, 19 nt, Artificial Sequence
  Description of Artificial Sequence: Synthetic oligonucleotide
aaaagggagccuaaaaggc

SEQ ID NO: 2598083 - RNA, 19 nt, Artificial Sequence
  Description of Artificial Sequence: Synthetic oligonucleotide
ugagaagugcuucacaucc

SEQ ID NO: 2598084 - RNA, 19 nt, Artificial Sequence
  Description of Artificial Sequence: Synthetic oligonucleotide
gacaucuagauuugguugg

SEQ ID NO: 2598085 - RNA, 19 nt, Artificial Sequence
  Description of Artificial Sequence: Synthetic oligonucleotide
aaacgcuggucaaagaggc

SEQ ID NO: 2598086 - RNA, 19 nt, Artificial Sequence
  Description of Artificial Sequence: Synthetic oligonucleotide
uuucuagagagguguaugg

SEQ ID NO: 2598087 - RNA, 19 nt, Artificial Sequence
  Description of Artificial Sequence: Synthetic oligonucleotide
cagauaggcuuuuaaaagg

SEQ ID NO: 2598088 - RNA, 19 nt, Artificial Sequence
  Description of Artificial Sequence: Synthetic oligonucleotide
ugacaucuagauuugguug

SEQ ID NO: 2598089 - RNA, 19 nt, Artificial Sequence
  Description of Artificial Sequence: Synthetic oligonucleotide
gauugggacaucuggcugg

SEQ ID NO: 2598090 - RNA, 19 nt, Artificial Sequence
  Description of Artificial Sequence: Synthetic oligonucleotide
uuuaaaagggagccuaaaa

SEQ ID NO: 2598091 - RNA, 19 nt, Artificial Sequence
  Description of Artificial Sequence: Synthetic oligonucleotide
aggggaacugucuugacag

SEQ ID NO: 2598092 - RNA, 19 nt, Artificial Sequence
  Description of Artificial Sequence: Synthetic oligonucleotide
uaggcuuuuaaaagggagc

SEQ ID NO: 2598093 - RNA, 19 nt, Artificial Sequence
  Description of Artificial Sequence: Synthetic oligonucleotide
aucuagauuugguuggagg

SEQ ID NO: 2598094 - RNA, 19 nt, Artificial Sequence
  Description of Artificial Sequence: Synthetic oligonucleotide
uggggugacaucuagauuu

SEQ ID NO: 2598095 - RNA, 19 nt, Artificial Sequence
  Description of Artificial Sequence: Synthetic oligonucleotide
aggcuuuuaaaagggagcc

SEQ ID NO: 2598096 - RNA, 19 nt, Artificial Sequence
  Description of Artificial Sequence: Synthetic oligonucleotide
accaccuugacagagaucu

SEQ ID NO: 2598097 - RNA, 19 nt, Artificial Sequence
  Description of Artificial Sequence: Synthetic oligonucleotide
uaaaaggcuucccagguuc

SEQ ID NO: 2598098 - RNA, 19 nt, Artificial Sequence
  Description of Artificial Sequence: Synthetic oligonucleotide
ugcguggaccuccacaugg

SEQ ID NO: 2598099 - RNA, 19 nt, Artificial Sequence
  Description of Artificial Sequence: Synthetic oligonucleotide
uguauccauguucauccgg

SEQ ID NO: 2598100 - RNA, 19 nt, Artificial Sequence
  Description of Artificial Sequence: Synthetic oligonucleotide
uuacaaaggcacagguagg

SEQ ID NO: 2598101 - RNA, 19 nt, Artificial Sequence
  Description of Artificial Sequence: Synthetic oligonucleotide
guggaaagguccuaugggg

SEQ ID NO: 2598102 - RNA, 19 nt, Artificial Sequence
  Description of Artificial Sequence: Synthetic oligonucleotide
uccauguucauccgggcgc

SEQ ID NO: 2598103 - RNA, 19 nt, Artificial Sequence
  Description of Artificial Sequence: Synthetic oligonucleotide
uccuguaaugcccggaccc

SEQ ID NO: 2598104 - RNA, 19 nt, Artificial Sequence
  Description of Artificial Sequence: Synthetic oligonucleotide
cuucacauccagcagcacg

SEQ ID NO: 2598105 - RNA, 19 nt, Artificial Sequence
  Description of Artificial Sequence: Synthetic oligonucleotide
gaaacgcuggucaaagagg

SEQ ID NO: 2598106 - RNA, 19 nt, Artificial Sequence
  Description of Artificial Sequence: Synthetic oligonucleotide
aaaauacccaggguccgcg

SEQ ID NO: 2598107 - RNA, 19 nt, Artificial Sequence
  Description of Artificial Sequence: Synthetic oligonucleotide
acugucuugacagcgauug

SEQ ID NO: 2598108 - RNA, 19 nt, Artificial Sequence
  Description of Artificial Sequence: Synthetic oligonucleotide
uuuucuagagagguguaug

SEQ ID NO: 2598109 - RNA, 19 nt, Artificial Sequence
  Description of Artificial Sequence: Synthetic oligonucleotide
uaugggugggaccugaaau

SEQ ID NO: 2598110 - RNA, 19 nt, Artificial Sequence
  Description of Artificial Sequence: Synthetic oligonucleotide
agauaggcuuuuaaaaggg

SEQ ID NO: 2598111 - RNA, 19 nt, Artificial Sequence
  Description of Artificial Sequence: Synthetic oligonucleotide
uauggggugacaucuagau

SEQ ID NO: 2598112 - RNA, 19 nt, Artificial Sequence
  Description of Artificial Sequence: Synthetic oligonucleotide
cuagagagguguaugggug

SEQ ID NO: 2598113 - RNA, 19 nt, Artificial Sequence
  Description of Artificial Sequence: Synthetic oligonucleotide
uaggguuuuggguggaaag

SEQ ID NO: 2598114 - RNA, 19 nt, Artificial Sequence
  Description of Artificial Sequence: Synthetic oligonucleotide
agaagugcuucacauccag

SEQ ID NO: 2598115 - RNA, 19 nt, Artificial Sequence
  Description of Artificial Sequence: Synthetic oligonucleotide
augggugggaccugaaauc

SEQ ID NO: 2598116 - RNA, 19 nt, Artificial Sequence
  Description of Artificial Sequence: Synthetic oligonucleotide
acucucgcgcaauguaucc

SEQ ID NO: 2598117 - RNA, 19 nt, Artificial Sequence
  Description of Artificial Sequence: Synthetic oligonucleotide
uugacagagaucuccucug

SEQ ID NO: 2598118 - RNA, 19 nt, Artificial Sequence
  Description of Artificial Sequence: Synthetic oligonucleotide
auggauaggacacccucag

SEQ ID NO: 2598119 - RNA, 19 nt, Artificial Sequence
  Description of Artificial Sequence: Synthetic oligonucleotide
guauccauguucauccggg

SEQ ID NO: 2598120 - RNA, 19 nt, Artificial Sequence
  Description of Artificial Sequence: Synthetic oligonucleotide
auaggcuuuuaaaagggag

SEQ ID NO: 2598121 - RNA, 19 nt, Artificial Sequence
  Description of Artificial Sequence: Synthetic oligonucleotide
acagagaucuccucuggug

SEQ ID NO: 2598122 - RNA, 19 nt, Artificial Sequence
  Description of Artificial Sequence: Synthetic oligonucleotide
gucagauaggcuuuuaaaa

SEQ ID NO: 2598123 - RNA, 19 nt, Artificial Sequence
  Description of Artificial Sequence: Synthetic oligonucleotide
uucgguccuguaaugcccg

SEQ ID NO: 2598124 - RNA, 19 nt, Artificial Sequence
  Description of Artificial Sequence: Synthetic oligonucleotide
uucuagagagguguauggg

SEQ ID NO: 2598125 - RNA, 19 nt, Artificial Sequence
  Description of Artificial Sequence: Synthetic oligonucleotide
cuagauuugguuggagggg

SEQ ID NO: 2598126 - RNA, 19 nt, Artificial Sequence
  Description of Artificial Sequence: Synthetic oligonucleotide
acgcuggucaaagaggcgc

SEQ ID NO: 2598127 - RNA, 19 nt, Artificial Sequence
  Description of Artificial Sequence: Synthetic oligonucleotide
ugguuacaaaggcacaggu

SEQ ID NO: 2598128 - RNA, 19 nt, Artificial Sequence
  Description of Artificial Sequence: Synthetic oligonucleotide
gguggaaagguccuauggg

SEQ ID NO: 2598129 - RNA, 19 nt, Artificial Sequence
  Description of Artificial Sequence: Synthetic oligonucleotide
uugguuacaaaggcacagg

SEQ ID NO: 2598130 - RNA, 19 nt, Artificial Sequence
  Description of Artificial Sequence: Synthetic oligonucleotide
auccauguucauccgggcg

SEQ ID NO: 2598131 - RNA, 19 nt, Artificial Sequence
  Description of Artificial Sequence: Synthetic oligonucleotide
agucagauaggcuuuuaaa

SEQ ID NO: 2598132 - RNA, 19 nt, Artificial Sequence
  Description of Artificial Sequence: Synthetic oligonucleotide
uaggacacccucaggagac

SEQ ID NO: 2598133 - RNA, 19 nt, Artificial Sequence
  Description of Artificial Sequence: Synthetic oligonucleotide
aaauacccaggguccgcgg

SEQ ID NO: 2598134 - RNA, 19 nt, Artificial Sequence
  Description of Artificial Sequence: Synthetic oligonucleotide
agccuaaaaggcuucccag

SEQ ID NO: 2598135 - RNA, 19 nt, Artificial Sequence
  Description of Artificial Sequence: Synthetic oligonucleotide
ugggacaucuggcugggca

SEQ ID NO: 2598136 - RNA, 19 nt, Artificial Sequence
  Description of Artificial Sequence: Synthetic oligonucleotide
uuuuggguggaaagguccu

SEQ ID NO: 2598137 - RNA, 19 nt, Artificial Sequence
  Description of Artificial Sequence: Synthetic oligonucleotide
agcgauugggacaucuggc

SEQ ID NO: 2598138 - RNA, 19 nt, Artificial Sequence
  Description of Artificial Sequence: Synthetic oligonucleotide
agcggagucagauaggcuu

SEQ ID NO: 2598139 - RNA, 19 nt, Artificial Sequence
  Description of Artificial Sequence: Synthetic oligonucleotide
cacauggccgccaaccacc

SEQ ID NO: 2598140 - RNA, 19 nt, Artificial Sequence
  Description of Artificial Sequence: Synthetic oligonucleotide
cuuacggagggugucuugg

SEQ ID NO: 2598141 - RNA, 19 nt, Artificial Sequence
  Description of Artificial Sequence: Synthetic oligonucleotide
guuuuggguggaaaggucc

SEQ ID NO: 2598142 - RNA, 19 nt, Artificial Sequence
  Description of Artificial Sequence: Synthetic oligonucleotide
uggucaaagaggcgcccgg

SEQ ID NO: 2598143 - RNA, 19 nt, Artificial Sequence
  Description of Artificial Sequence: Synthetic oligonucleotide
aacucucgcgcaauguauc

SEQ ID NO: 2598144 - RNA, 19 nt, Artificial Sequence
  Description of Artificial Sequence: Synthetic oligonucleotide
gucuugguuacaaaggcac

SEQ ID NO: 2598145 - RNA, 19 nt, Artificial Sequence
  Description of Artificial Sequence: Synthetic oligonucleotide
auggccgccaaccaccuug

SEQ ID NO: 2598146 - RNA, 19 nt, Artificial Sequence
  Description of Artificial Sequence: Synthetic oligonucleotide
ggugucuugguuacaaagg

SEQ ID NO: 2598147 - RNA, 19 nt, Artificial Sequence
  Description of Artificial Sequence: Synthetic oligonucleotide
agagguguaugggugggac

SEQ ID NO: 2598148 - RNA, 19 nt, Artificial Sequence
  Description of Artificial Sequence: Synthetic oligonucleotide
aaaaggcuucccagguucg

SEQ ID NO: 2598149 - RNA, 19 nt, Artificial Sequence
  Description of Artificial Sequence: Synthetic oligonucleotide
agagaucuccucuggugag

SEQ ID NO: 2598150 - RNA, 19 nt, Artificial Sequence
  Description of Artificial Sequence: Synthetic oligonucleotide
aggguuuuggguggaaagg

SEQ ID NO: 2598151 - RNA, 19 nt, Artificial Sequence
  Description of Artificial Sequence: Synthetic oligonucleotide
auacccaggguccgcgggc

SEQ ID NO: 2598152 - RNA, 19 nt, Artificial Sequence
  Description of Artificial Sequence: Synthetic oligonucleotide
gacagugccgaggucacag

SEQ ID NO: 2598153 - RNA, 19 nt, Artificial Sequence
  Description of Artificial Sequence: Synthetic oligonucleotide
cagcgauugggacaucugg

SEQ ID NO: 2598154 - RNA, 19 nt, Artificial Sequence
  Description of Artificial Sequence: Synthetic oligonucleotide
ggcagagccaggcuuacgg

SEQ ID NO: 2598155 - RNA, 19 nt, Artificial Sequence
  Description of Artificial Sequence: Synthetic oligonucleotide
uccucuggugagaagugcu

SEQ ID NO: 2598156 - RNA, 19 nt, Artificial Sequence
  Description of Artificial Sequence: Synthetic oligonucleotide
cugugcugcgggcagagcc

SEQ ID NO: 2598157 - RNA, 19 nt, Artificial Sequence
  Description of Artificial Sequence: Synthetic oligonucleotide
uggauaggacacccucagg

SEQ ID NO: 2598158 - RNA, 19 nt, Artificial Sequence
  Description of Artificial Sequence: Synthetic oligonucleotide
ccgccaaccaccuugacag

SEQ ID NO: 2598159 - RNA, 19 nt, Artificial Sequence
  Description of Artificial Sequence: Synthetic oligonucleotide
ggauaggacacccucagga

SEQ ID NO: 2598160 - RNA, 19 nt, Artificial Sequence
  Description of Artificial Sequence: Synthetic oligonucleotide
uuugguuggaggggaacug

SEQ ID NO: 2598161 - RNA, 19 nt, Artificial Sequence
  Description of Artificial Sequence: Synthetic oligonucleotide
aaagguccuauggggugac

SEQ ID NO: 2598162 - RNA, 19 nt, Artificial Sequence
  Description of Artificial Sequence: Synthetic oligonucleotide
cuugacagcgauugggaca

SEQ ID NO: 2598163 - RNA, 19 nt, Artificial Sequence
  Description of Artificial Sequence: Synthetic oligonucleotide
ugcccggaccccuacuugg

SEQ ID NO: 2598164 - RNA, 19 nt, Artificial Sequence
  Description of Artificial Sequence: Synthetic oligonucleotide
uugacagcgauugggacau

SEQ ID NO: 2598165 - RNA, 19 nt, Artificial Sequence
  Description of Artificial Sequence: Synthetic oligonucleotide
ucuugacagcgauugggac

SEQ ID NO: 2598166 - RNA, 19 nt, Artificial Sequence
  Description of Artificial Sequence: Synthetic oligonucleotide
accccuacuuggcagcagg

SEQ ID NO: 2598167 - RNA, 19 nt, Artificial Sequence
  Description of Artificial Sequence: Synthetic oligonucleotide
auguauccauguucauccg

SEQ ID NO: 2598168 - RNA, 19 nt, Artificial Sequence
  Description of Artificial Sequence: Synthetic oligonucleotide
caauguauccauguucauc

SEQ ID NO: 2598169 - RNA, 19 nt, Artificial Sequence
  Description of Artificial Sequence: Synthetic oligonucleotide
caccuugacagagaucucc

SEQ ID NO: 2598170 - RNA, 19 nt, Artificial Sequence
  Description of Artificial Sequence: Synthetic oligonucleotide
ucuccucuggugagaagug

SEQ ID NO: 2598171 - RNA, 19 nt, Artificial Sequence
  Description of Artificial Sequence: Synthetic oligonucleotide
ugugcugcgggcagagcca

SEQ ID NO: 2598172 - RNA, 19 nt, Artificial Sequence
  Description of Artificial Sequence: Synthetic oligonucleotide
gagccuaaaaggcuuccca

SEQ ID NO: 2598173 - RNA, 19 nt, Artificial Sequence
  Description of Artificial Sequence: Synthetic oligonucleotide
auccgggcgcuccucaugg

SEQ ID NO: 2598174 - RNA, 19 nt, Artificial Sequence
  Description of Artificial Sequence: Synthetic oligonucleotide
cagguaggguuuugggugg

SEQ ID NO: 2598175 - RNA, 19 nt, Artificial Sequence
  Description of Artificial Sequence: Synthetic oligonucleotide
ggguggaaagguccuaugg

SEQ ID NO: 2598176 - RNA, 19 nt, Artificial Sequence
  Description of Artificial Sequence: Synthetic oligonucleotide
gggugucuugguuacaaag

SEQ ID NO: 2598177 - RNA, 19 nt, Artificial Sequence
  Description of Artificial Sequence: Synthetic oligonucleotide
auguucauccgggcgcucc

SEQ ID NO: 2598178 - RNA, 19 nt, Artificial Sequence
  Description of Artificial Sequence: Synthetic oligonucleotide
gagccaggcuuacggaggg

SEQ ID NO: 2598179 - RNA, 19 nt, Artificial Sequence
  Description of Artificial Sequence: Synthetic oligonucleotide
aaugcccggaccccuacuu

SEQ ID NO: 2598180 - RNA, 19 nt, Artificial Sequence
  Description of Artificial Sequence: Synthetic oligonucleotide
cuccucauggcgugcgugg

SEQ ID NO: 2598181 - RNA, 19 nt, Artificial Sequence
  Description of Artificial Sequence: Synthetic oligonucleotide
agguguaugggugggaccu

SEQ ID NO: 2598182 - RNA, 19 nt, Artificial Sequence
  Description of Artificial Sequence: Synthetic oligonucleotide
aaaggcacagguaggguuu

SEQ ID NO: 2598183 - RNA, 19 nt, Artificial Sequence
  Description of Artificial Sequence: Synthetic oligonucleotide
uccacauggccgccaacca

SEQ ID NO: 2598184 - RNA, 19 nt, Artificial Sequence
  Description of Artificial Sequence: Synthetic oligonucleotide
cuggauggauaggacaccc

SEQ ID NO: 2598185 - RNA, 19 nt, Artificial Sequence
  Description of Artificial Sequence: Synthetic oligonucleotide
agagagguguauggguggg

SEQ ID NO: 2598186 - RNA, 19 nt, Artificial Sequence
  Description of Artificial Sequence: Synthetic oligonucleotide
agagccaggcuuacggagg

SEQ ID NO: 2598187 - RNA, 19 nt, Artificial Sequence
  Description of Artificial Sequence: Synthetic oligonucleotide
auggcgugcguggaccucc

SEQ ID NO: 2598188 - RNA, 19 nt, Artificial Sequence
  Description of Artificial Sequence: Synthetic oligonucleotide
gauggauaggacacccuca

SEQ ID NO: 2598189 - RNA, 19 nt, Artificial Sequence
  Description of Artificial Sequence: Synthetic oligonucleotide
gaggggaacugucuugaca

SEQ ID NO: 2598190 - RNA, 19 nt, Artificial Sequence
  Description of Artificial Sequence: Synthetic oligonucleotide
ucgcgcaauguauccaugu

SEQ ID NO: 2598191 - RNA, 19 nt, Artificial Sequence
  Description of Artificial Sequence: Synthetic oligonucleotide
cagcagguggugauggcag

SEQ ID NO: 2598192 - RNA, 19 nt, Artificial Sequence
  Description of Artificial Sequence: Synthetic oligonucleotide
cuccacauggccgccaacc

SEQ ID NO: 2598193 - RNA, 19 nt, Artificial Sequence
  Description of Artificial Sequence: Synthetic oligonucleotide
gauaggcuuuuaaaaggga

SEQ ID NO: 2598194 - RNA, 19 nt, Artificial Sequence
  Description of Artificial Sequence: Synthetic oligonucleotide
aggcuucccagguucgguc

SEQ ID NO: 2598195 - RNA, 19 nt, Artificial Sequence
  Description of Artificial Sequence: Synthetic oligonucleotide
ucucgcgcaauguauccau

SEQ ID NO: 2598196 - RNA, 19 nt, Artificial Sequence
  Description of Artificial Sequence: Synthetic oligonucleotide
gagguguaugggugggacc

SEQ ID NO: 2598197 - RNA, 19 nt, Artificial Sequence
  Description of Artificial Sequence: Synthetic oligonucleotide
ugggugggaccugaaaucu

SEQ ID NO: 2598198 - RNA, 19 nt, Artificial Sequence
  Description of Artificial Sequence: Synthetic oligonucleotide
gggaacugucuugacagcg

SEQ ID NO: 2598199 - RNA, 19 nt, Artificial Sequence
  Description of Artificial Sequence: Synthetic oligonucleotide
aacgcuggucaaagaggcg

SEQ ID NO: 2598200 - RNA, 19 nt, Artificial Sequence
  Description of Artificial Sequence: Synthetic oligonucleotide
cagagaucuccucugguga

SEQ ID NO: 2598201 - RNA, 19 nt, Artificial Sequence
  Description of Artificial Sequence: Synthetic oligonucleotide
guucgguccuguaaugccc

SEQ ID NO: 2598202 - RNA, 19 nt, Artificial Sequence
  Description of Artificial Sequence: Synthetic oligonucleotide
aagggagccuaaaaggcuu

SEQ ID NO: 2598203 - RNA, 19 nt, Artificial Sequence
  Description of Artificial Sequence: Synthetic oligonucleotide
gggcagcggagucagauag

SEQ ID NO: 2598204 - RNA, 19 nt, Artificial Sequence
  Description of Artificial Sequence: Synthetic oligonucleotide
uguucauccgggcgcuccu

SEQ ID NO: 2598205 - RNA, 19 nt, Artificial Sequence
  Description of Artificial Sequence: Synthetic oligonucleotide
cucgccgaaacgcugguca

SEQ ID NO: 2598206 - RNA, 19 nt, Artificial Sequence
  Description of Artificial Sequence: Synthetic oligonucleotide
agcagccccucgccgaaac

SEQ ID NO: 2598207 - RNA, 19 nt, Artificial Sequence
  Description of Artificial Sequence: Synthetic oligonucleotide
gauuugguuggaggggaac

SEQ ID NO: 2598208 - RNA, 19 nt, Artificial Sequence
  Description of Artificial Sequence: Synthetic oligonucleotide
cucauggcgugcguggacc

SEQ ID NO: 2598209 - RNA, 19 nt, Artificial Sequence
  Description of Artificial Sequence: Synthetic oligonucleotide
agcgacgccagcucagccu

SEQ ID NO: 2598210 - RNA, 19 nt, Artificial Sequence
  Description of Artificial Sequence: Synthetic oligonucleotide
cuuuuaaaagggagccuaa

SEQ ID NO: 2598211 - RNA, 19 nt, Artificial Sequence
  Description of Artificial Sequence: Synthetic oligonucleotide
ggauggauaggacacccuc

SEQ ID NO: 2598212 - RNA, 19 nt, Artificial Sequence
  Description of Artificial Sequence: Synthetic oligonucleotide
gugagaagugcuucacauc

SEQ ID NO: 2598213 - RNA, 19 nt, Artificial Sequence
  Description of Artificial Sequence: Synthetic oligonucleotide
uggauggauaggacacccu

SEQ ID NO: 2598214 - RNA, 19 nt, Artificial Sequence
  Description of Artificial Sequence: Synthetic oligonucleotide
uccagcagccccucgccga

SEQ ID NO: 2598215 - RNA, 19 nt, Artificial Sequence
  Description of Artificial Sequence: Synthetic oligonucleotide
cuugacagagaucuccucu

SEQ ID NO: 2598216 - RNA, 19 nt, Artificial Sequence
  Description of Artificial Sequence: Synthetic oligonucleotide
uggguggaaagguccuaug

SEQ ID NO: 2598217 - RNA, 19 nt, Artificial Sequence
  Description of Artificial Sequence: Synthetic oligonucleotide
gugccgaggucacagcagc

SEQ ID NO: 2598218 - RNA, 19 nt, Artificial Sequence
  Description of Artificial Sequence: Synthetic oligonucleotide
cgaaacgcuggucaaagag

SEQ ID NO: 2598219 - RNA, 19 nt, Artificial Sequence
  Description of Artificial Sequence: Synthetic oligonucleotide
ugguuggaggggaacuguc

SEQ ID NO: 2598220 - RNA, 19 nt, Artificial Sequence
  Description of Artificial Sequence: Synthetic oligonucleotide
ggcggcaggagguagcgcc

SEQ ID NO: 2598221 - RNA, 19 nt, Artificial Sequence
  Description of Artificial Sequence: Synthetic oligonucleotide
uguaaugcccggaccccua

SEQ ID NO: 2598222 - RNA, 19 nt, Artificial Sequence
  Description of Artificial Sequence: Synthetic oligonucleotide
gcaggguccaccccaggcg

SEQ ID NO: 2598223 - RNA, 19 nt, Artificial Sequence
  Description of Artificial Sequence: Synthetic oligonucleotide
ggucacagcagcagggucc

SEQ ID NO: 2598224 - RNA, 19 nt, Artificial Sequence
  Description of Artificial Sequence: Synthetic oligonucleotide
uugguuggaggggaacugu

SEQ ID NO: 2598225 - RNA, 19 nt, Artificial Sequence
  Description of Artificial Sequence: Synthetic oligonucleotide
uggugauggcaguggggcc

SEQ ID NO: 2598226 - RNA, 19 nt, Artificial Sequence
  Description of Artificial Sequence: Synthetic oligonucleotide
ggggcgcgcagauaguagg

SEQ ID NO: 2598227 - RNA, 19 nt, Artificial Sequence
  Description of Artificial Sequence: Synthetic oligonucleotide
uuacggagggugucuuggu

SEQ ID NO: 2598228 - RNA, 19 nt, Artificial Sequence
  Description of Artificial Sequence: Synthetic oligonucleotide
cugucuugacagcgauugg

SEQ ID NO: 2598229 - RNA, 19 nt, Artificial Sequence
  Description of Artificial Sequence: Synthetic oligonucleotide
cuggucaaagaggcgcccg

SEQ ID NO: 2598230 - RNA, 19 nt, Artificial Sequence
  Description of Artificial Sequence: Synthetic oligonucleotide
acggagggugucuugguua

SEQ ID NO: 2598231 - RNA, 19 nt, Artificial Sequence
  Description of Artificial Sequence: Synthetic oligonucleotide
uggaacucucgcgcaaugu

SEQ ID NO: 2598232 - RNA, 19 nt, Artificial Sequence
  Description of Artificial Sequence: Synthetic oligonucleotide
uguaugggugggaccugaa

SEQ ID NO: 2598233 - RNA, 19 nt, Artificial Sequence
  Description of Artificial Sequence: Synthetic oligonucleotide
guccuguaaugcccggacc

SEQ ID NO: 2598234 - RNA, 19 nt, Artificial Sequence
  Description of Artificial Sequence: Synthetic oligonucleotide
caucuagauuugguuggag

SEQ ID NO: 2598235 - RNA, 19 nt, Artificial Sequence
  Description of Artificial Sequence: Synthetic oligonucleotide
acaucuagauuugguugga

SEQ ID NO: 2598236 - RNA, 19 nt, Artificial Sequence
  Description of Artificial Sequence: Synthetic oligonucleotide
uaaugcccggaccccuacu

SEQ ID NO: 2598237 - RNA, 19 nt, Artificial Sequence
  Description of Artificial Sequence: Synthetic oligonucleotide
uacggagggugucuugguu

SEQ ID NO: 2598238 - RNA, 19 nt, Artificial Sequence
  Description of Artificial Sequence: Synthetic oligonucleotide
cauccagcagcacggaaaa

SEQ ID NO: 2598239 - RNA, 19 nt, Artificial Sequence
  Description of Artificial Sequence: Synthetic oligonucleotide
cuauggggugacaucuaga

SEQ ID NO: 2598240 - RNA, 19 nt, Artificial Sequence
  Description of Artificial Sequence: Synthetic oligonucleotide
ucgguccuguaaugcccgg

SEQ ID NO: 2598241 - RNA, 19 nt, Artificial Sequence
  Description of Artificial Sequence: Synthetic oligonucleotide
uggccuggauggauaggac

SEQ ID NO: 2598242 - RNA, 19 nt, Artificial Sequence
  Description of Artificial Sequence: Synthetic oligonucleotide
gguccuguaaugcccggac

SEQ ID NO: 2598243 - RNA, 19 nt, Artificial Sequence
  Description of Artificial Sequence: Synthetic oligonucleotide
gauggcaguggggccuggg

SEQ ID NO: 2598244 - RNA, 19 nt, Artificial Sequence
  Description of Artificial Sequence: Synthetic oligonucleotide
gccgguggaacucucgcgc

SEQ ID NO: 2598245 - RNA, 19 nt, Artificial Sequence
  Description of Artificial Sequence: Synthetic oligonucleotide
ucauggcgugcguggaccu

SEQ ID NO: 2598246 - RNA, 19 nt, Artificial Sequence
  Description of Artificial Sequence: Synthetic oligonucleotide
gagacagugccgaggucac

SEQ ID NO: 2598247 - RNA, 19 nt, Artificial Sequence
  Description of Artificial Sequence: Synthetic oligonucleotide
ggugagaagugcuucacau

SEQ ID NO: 2598248 - RNA, 19 nt, Artificial Sequence
  Description of Artificial Sequence: Synthetic oligonucleotide
cagguucgguccuguaaug

SEQ ID NO: 2598249 - RNA, 19 nt, Artificial Sequence
  Description of Artificial Sequence: Synthetic oligonucleotide
guggaacucucgcgcaaug

SEQ ID NO: 2598250 - RNA, 19 nt, Artificial Sequence
  Description of Artificial Sequence: Synthetic oligonucleotide
gagguagcgccgguggaac

SEQ ID NO: 2598251 - RNA, 19 nt, Artificial Sequence
  Description of Artificial Sequence: Synthetic oligonucleotide
cgcaauguauccauguuca

SEQ ID NO: 2598252 - RNA, 19 nt, Artificial Sequence
  Description of Artificial Sequence: Synthetic oligonucleotide
aggagacagugccgagguc

SEQ ID NO: 2598253 - RNA, 19 nt, Artificial Sequence
  Description of Artificial Sequence: Synthetic oligonucleotide
gcgcaauguauccauguuc

SEQ ID NO: 2598254 - RNA, 19 nt, Artificial Sequence
  Description of Artificial Sequence: Synthetic oligonucleotide
accuugacagagaucuccu

SEQ ID NO: 2598255 - RNA, 19 nt, Artificial Sequence
  Description of Artificial Sequence: Synthetic oligonucleotide
cuccucuggugagaagugc

SEQ ID NO: 2598256 - RNA, 19 nt, Artificial Sequence
  Description of Artificial Sequence: Synthetic oligonucleotide
cagccccucgccgaaacgc

SEQ ID NO: 2598257 - RNA, 19 nt, Artificial Sequence
  Description of Artificial Sequence: Synthetic oligonucleotide
gcagcggagucagauaggc

SEQ ID NO: 2598258 - RNA, 19 nt, Artificial Sequence
  Description of Artificial Sequence: Synthetic oligonucleotide
ccuauggggugacaucuag

SEQ ID NO: 2598259 - RNA, 19 nt, Artificial Sequence
  Description of Artificial Sequence: Synthetic oligonucleotide
gugggaccugaaaucuggg

SEQ ID NO: 2598260 - RNA, 19 nt, Artificial Sequence
  Description of Artificial Sequence: Synthetic oligonucleotide
guaaugcccggaccccuac

SEQ ID NO: 2598261 - RNA, 19 nt, Artificial Sequence
  Description of Artificial Sequence: Synthetic oligonucleotide
ugccgaggucacagcagca

SEQ ID NO: 2598262 - RNA, 19 nt, Artificial Sequence
  Description of Artificial Sequence: Synthetic oligonucleotide
uccuauggggugacaucua

SEQ ID NO: 2598263 - RNA, 19 nt, Artificial Sequence
  Description of Artificial Sequence: Synthetic oligonucleotide
augcccggaccccuacuug

SEQ ID NO: 2598264 - RNA, 19 nt, Artificial Sequence
  Description of Artificial Sequence: Synthetic oligonucleotide
cacagguaggguuuugggu

SEQ ID NO: 2598265 - RNA, 19 nt, Artificial Sequence
  Description of Artificial Sequence: Synthetic oligonucleotide
gacagagaucuccucuggu

SEQ ID NO: 2598266 - RNA, 19 nt, Artificial Sequence
  Description of Artificial Sequence: Synthetic oligonucleotide
cucgcgcaauguauccaug

SEQ ID NO: 2598267 - RNA, 19 nt, Artificial Sequence
  Description of Artificial Sequence: Synthetic oligonucleotide
gagcgacgccagcucagcc

SEQ ID NO: 2598268 - RNA, 19 nt, Artificial Sequence
  Description of Artificial Sequence: Synthetic oligonucleotide
auggggugacaucuagauu

SEQ ID NO: 2598269 - RNA, 19 nt, Artificial Sequence
  Description of Artificial Sequence: Synthetic oligonucleotide
gaacugucuugacagcgau

SEQ ID NO: 2598270 - RNA, 19 nt, Artificial Sequence
  Description of Artificial Sequence: Synthetic oligonucleotide
acagcgauugggacaucug

SEQ ID NO: 2598271 - RNA, 19 nt, Artificial Sequence
  Description of Artificial Sequence: Synthetic oligonucleotide
agggagccuaaaaggcuuc

SEQ ID NO: 2598272 - RNA, 19 nt, Artificial Sequence
  Description of Artificial Sequence: Synthetic oligonucleotide
gccgaaacgcuggucaaag

SEQ ID NO: 2598273 - RNA, 19 nt, Artificial Sequence
  Description of Artificial Sequence: Synthetic oligonucleotide
agguccuauggggugacau

SEQ ID NO: 2598274 - RNA, 19 nt, Artificial Sequence
  Description of Artificial Sequence: Synthetic oligonucleotide
uuuggguggaaagguccua

SEQ ID NO: 2598275 - RNA, 19 nt, Artificial Sequence
  Description of Artificial Sequence: Synthetic oligonucleotide
guaugggugggaccugaaa

SEQ ID NO: 2598276 - RNA, 19 nt, Artificial Sequence
  Description of Artificial Sequence: Synthetic oligonucleotide
aggagguagcgccggugga

SEQ ID NO: 2598277 - RNA, 19 nt, Artificial Sequence
  Description of Artificial Sequence: Synthetic oligonucleotide
caggcggcaggagguagcg

SEQ ID NO: 2598278 - RNA, 19 nt, Artificial Sequence
  Description of Artificial Sequence: Synthetic oligonucleotide
gaugguggccgggcaggag

SEQ ID NO: 2598279 - RNA, 19 nt, Artificial Sequence
  Description of Artificial Sequence: Synthetic oligonucleotide
gagaucuccucuggugaga

SEQ ID NO: 2598280 - RNA, 19 nt, Artificial Sequence
  Description of Artificial Sequence: Synthetic oligonucleotide
guccuauggggugacaucu

SEQ ID NO: 2598281 - RNA, 19 nt, Artificial Sequence
  Description of Artificial Sequence: Synthetic oligonucleotide
ggaacucucgcgcaaugua

SEQ ID NO: 2598282 - RNA, 19 nt, Artificial Sequence
  Description of Artificial Sequence: Synthetic oligonucleotide
ucgccgaaacgcuggucaa

SEQ ID NO: 2598283 - RNA, 19 nt, Artificial Sequence
  Description of Artificial Sequence: Synthetic oligonucleotide
ugcugcgggcagagccacg

SEQ ID NO: 2598284 - RNA, 19 nt, Artificial Sequence
  Description of Artificial Sequence: Synthetic oligonucleotide
uccucauggcgugcgugga

SEQ ID NO: 2598285 - RNA, 19 nt, Artificial Sequence
  Description of Artificial Sequence: Synthetic oligonucleotide
gguccuauggggugacauc

SEQ ID NO: 2598286 - RNA, 19 nt, Artificial Sequence
  Description of Artificial Sequence: Synthetic oligonucleotide
caaaggcacagguaggguu

SEQ ID NO: 2598287 - RNA, 19 nt, Artificial Sequence
  Description of Artificial Sequence: Synthetic oligonucleotide
agggugucuugguuacaaa

SEQ ID NO: 2598288 - RNA, 19 nt, Artificial Sequence
  Description of Artificial Sequence: Synthetic oligonucleotide
gaacucucgcgcaauguau

SEQ ID NO: 2598289 - RNA, 19 nt, Artificial Sequence
  Description of Artificial Sequence: Synthetic oligonucleotide
ggagccuaaaaggcuuccc

SEQ ID NO: 2598290 - RNA, 19 nt, Artificial Sequence
  Description of Artificial Sequence: Synthetic oligonucleotide
gacagcgauugggacaucu

SEQ ID NO: 2598291 - RNA, 19 nt, Artificial Sequence
  Description of Artificial Sequence: Synthetic oligonucleotide
cauccgggcgcuccucaug

SEQ ID NO: 2598292 - RNA, 19 nt, Artificial Sequence
  Description of Artificial Sequence: Synthetic oligonucleotide
cagugccgaggucacagca

SEQ ID NO: 2598293 - RNA, 19 nt, Artificial Sequence
  Description of Artificial Sequence: Synthetic oligonucleotide
ccgaggucacagcagcagg

SEQ ID NO: 2598294 - RNA, 19 nt, Artificial Sequence
  Description of Artificial Sequence: Synthetic oligonucleotide
gguuuuggguggaaagguc

SEQ ID NO: 2598295 - RNA, 19 nt, Artificial Sequence
  Description of Artificial Sequence: Synthetic oligonucleotide
aacugucuugacagcgauu

SEQ ID NO: 2598296 - RNA, 19 nt, Artificial Sequence
  Description of Artificial Sequence: Synthetic oligonucleotide
ggcgcgcagauaguagggg

SEQ ID NO: 2598297 - RNA, 19 nt, Artificial Sequence
  Description of Artificial Sequence: Synthetic oligonucleotide
caggcuuacggaggguguc

SEQ ID NO: 2598298 - RNA, 19 nt, Artificial Sequence
  Description of Artificial Sequence: Synthetic oligonucleotide
caggagacagugccgaggu

SEQ ID NO: 2598299 - RNA, 19 nt, Artificial Sequence
  Description of Artificial Sequence: Synthetic oligonucleotide
guaggguuuuggguggaaa

SEQ ID NO: 2598300 - RNA, 19 nt, Artificial Sequence
  Description of Artificial Sequence: Synthetic oligonucleotide
aaggcacagguaggguuuu

SEQ ID NO: 2598301 - RNA, 19 nt, Artificial Sequence
  Description of Artificial Sequence: Synthetic oligonucleotide
ggcgaugguggccgggcag

SEQ ID NO: 2598302 - RNA, 19 nt, Artificial Sequence
  Description of Artificial Sequence: Synthetic oligonucleotide
aggcuuacggagggugucu

SEQ ID NO: 2598303 - RNA, 19 nt, Artificial Sequence
  Description of Artificial Sequence: Synthetic oligonucleotide
agguagcgccgguggaacu

SEQ ID NO: 2598304 - RNA, 19 nt, Artificial Sequence
  Description of Artificial Sequence: Synthetic oligonucleotide
ucauccgggcgcuccucau

SEQ ID NO: 2598305 - RNA, 19 nt, Artificial Sequence
  Description of Artificial Sequence: Synthetic oligonucleotide
aggguccaccccaggcggc

SEQ ID NO: 2598306 - RNA, 19 nt, Artificial Sequence
  Description of Artificial Sequence: Synthetic oligonucleotide
gguuacaaaggcacaggua

SEQ ID NO: 2598307 - RNA, 19 nt, Artificial Sequence
  Description of Artificial Sequence: Synthetic oligonucleotide
guggggccugggccgaugc

SEQ ID NO: 2598308 - RNA, 19 nt, Artificial Sequence
  Description of Artificial Sequence: Synthetic oligonucleotide
accuccacauggccgccaa

SEQ ID NO: 2598309 - RNA, 19 nt, Artificial Sequence
  Description of Artificial Sequence: Synthetic oligonucleotide
gggugacaucuagauuugg

SEQ ID NO: 2598310 - RNA, 19 nt, Artificial Sequence
  Description of Artificial Sequence: Synthetic oligonucleotide
gccgaggucacagcagcag

SEQ ID NO: 2598311 - RNA, 19 nt, Artificial Sequence
  Description of Artificial Sequence: Synthetic oligonucleotide
gcgggcagagccacgcugg

SEQ ID NO: 2598312 - RNA, 19 nt, Artificial Sequence
  Description of Artificial Sequence: Synthetic oligonucleotide
gccgccaaccaccuugaca

SEQ ID NO: 2598313 - RNA, 19 nt, Artificial Sequence
  Description of Artificial Sequence: Synthetic oligonucleotide
guguaugggugggaccuga

SEQ ID NO: 2598314 - RNA, 19 nt, Artificial Sequence
  Description of Artificial Sequence: Synthetic oligonucleotide
ggggugacaucuagauuug

SEQ ID NO: 2598315 - RNA, 19 nt, Artificial Sequence
  Description of Artificial Sequence: Synthetic oligonucleotide
acccaggguccgcgggcac

SEQ ID NO: 2598316 - RNA, 19 nt, Artificial Sequence
  Description of Artificial Sequence: Synthetic oligonucleotide
gaccccuacuuggcagcag

SEQ ID NO: 2598317 - RNA, 19 nt, Artificial Sequence
  Description of Artificial Sequence: Synthetic oligonucleotide
gugcguggaccuccacaug

SEQ ID NO: 2598318 - RNA, 19 nt, Artificial Sequence
  Description of Artificial Sequence: Synthetic oligonucleotide
gcuuacggagggugucuug

SEQ ID NO: 2598319 - RNA, 19 nt, Artificial Sequence
  Description of Artificial Sequence: Synthetic oligonucleotide
gggcgcgcagauaguaggg

SEQ ID NO: 2598320 - RNA, 19 nt, Artificial Sequence
  Description of Artificial Sequence: Synthetic oligonucleotide
gaugcagguguggccugga

SEQ ID NO: 2598321 - RNA, 19 nt, Artificial Sequence
  Description of Artificial Sequence: Synthetic oligonucleotide
aggguccgcgggcaccugu

SEQ ID NO: 2598322 - RNA, 19 nt, Artificial Sequence
  Description of Artificial Sequence: Synthetic oligonucleotide
gccaggcuuacggagggug

SEQ ID NO: 2598323 - RNA, 19 nt, Artificial Sequence
  Description of Artificial Sequence: Synthetic oligonucleotide
agauuugguuggaggggaa

SEQ ID NO: 2598324 - RNA, 19 nt, Artificial Sequence
  Description of Artificial Sequence: Synthetic oligonucleotide
uucccagguucgguccugu

SEQ ID NO: 2598325 - RNA, 19 nt, Artificial Sequence
  Description of Artificial Sequence: Synthetic oligonucleotide
uccgggcgcuccucauggc

SEQ ID NO: 2598326 - RNA, 19 nt, Artificial Sequence
  Description of Artificial Sequence: Synthetic oligonucleotide
ugauggcaguggggccugg

SEQ ID NO: 2598327 - RNA, 19 nt, Artificial Sequence
  Description of Artificial Sequence: Synthetic oligonucleotide
ccuaaaaggcuucccaggu

SEQ ID NO: 2598328 - RNA, 19 nt, Artificial Sequence
  Description of Artificial Sequence: Synthetic oligonucleotide
gugauggcaguggggccug

SEQ ID NO: 2598329 - RNA, 19 nt, Artificial Sequence
  Description of Artificial Sequence: Synthetic oligonucleotide
aagguccuauggggugaca

SEQ ID NO: 2598330 - RNA, 19 nt, Artificial Sequence
  Description of Artificial Sequence: Synthetic oligonucleotide
ccuggauggauaggacacc

SEQ ID NO: 2598331 - RNA, 19 nt, Artificial Sequence
  Description of Artificial Sequence: Synthetic oligonucleotide
ggcagcggagucagauagg

SEQ ID NO: 2598332 - RNA, 19 nt, Artificial Sequence
  Description of Artificial Sequence: Synthetic oligonucleotide
cgauugggacaucuggcug

SEQ ID NO: 2598333 - RNA, 19 nt, Artificial Sequence
  Description of Artificial Sequence: Synthetic oligonucleotide
ccccucgccgaaacgcugg

SEQ ID NO: 2598334 - RNA, 19 nt, Artificial Sequence
  Description of Artificial Sequence: Synthetic oligonucleotide
ccggaccccuacuuggcag

SEQ ID NO: 2598335 - RNA, 19 nt, Artificial Sequence
  Description of Artificial Sequence: Synthetic oligonucleotide
caaccaccuugacagagau

SEQ ID NO: 2598336 - RNA, 19 nt, Artificial Sequence
  Description of Artificial Sequence: Synthetic oligonucleotide
cuucccagguucgguccug

SEQ ID NO: 2598337 - RNA, 19 nt, Artificial Sequence
  Description of Artificial Sequence: Synthetic oligonucleotide
gguagcgccgguggaacuc

SEQ ID NO: 2598338 - RNA, 19 nt, Artificial Sequence
  Description of Artificial Sequence: Synthetic oligonucleotide
cuaaaaggcuucccagguu

SEQ ID NO: 2598339 - RNA, 19 nt, Artificial Sequence
  Description of Artificial Sequence: Synthetic oligonucleotide
ccuugacagagaucuccuc

SEQ ID NO: 2598340 - RNA, 19 nt, Artificial Sequence
  Description of Artificial Sequence: Synthetic oligonucleotide
gacgccagcucagccucca

SEQ ID NO: 2598341 - RNA, 19 nt, Artificial Sequence
  Description of Artificial Sequence: Synthetic oligonucleotide
gggagccuaaaaggcuucc

SEQ ID NO: 2598342 - RNA, 19 nt, Artificial Sequence
  Description of Artificial Sequence: Synthetic oligonucleotide
gcagguggugauggcagug

SEQ ID NO: 2598343 - RNA, 19 nt, Artificial Sequence
  Description of Artificial Sequence: Synthetic oligonucleotide
cucucgcgcaauguaucca

SEQ ID NO: 2598344 - RNA, 19 nt, Artificial Sequence
  Description of Artificial Sequence: Synthetic oligonucleotide
acauggccgccaaccaccu

SEQ ID NO: 2598345 - RNA, 19 nt, Artificial Sequence
  Description of Artificial Sequence: Synthetic oligonucleotide
ccacauggccgccaaccac

SEQ ID NO: 2598346 - RNA, 19 nt, Artificial Sequence
  Description of Artificial Sequence: Synthetic oligonucleotide
gcgacgccagcucagccuc

SEQ ID NO: 2598347 - RNA, 19 nt, Artificial Sequence
  Description of Artificial Sequence: Synthetic oligonucleotide
gcagcagguggugauggca

SEQ ID NO: 2598348 - RNA, 19 nt, Artificial Sequence
  Description of Artificial Sequence: Synthetic oligonucleotide
cagcagcaggguccacccc

SEQ ID NO: 2598349 - RNA, 19 nt, Artificial Sequence
  Description of Artificial Sequence: Synthetic oligonucleotide
ggguuuuggguggaaaggu

SEQ ID NO: 2598350 - RNA, 19 nt, Artificial Sequence
  Description of Artificial Sequence: Synthetic oligonucleotide
ccaggcggcaggagguagc

SEQ ID NO: 2598351 - RNA, 19 nt, Artificial Sequence
  Description of Artificial Sequence: Synthetic oligonucleotide
ggaggggaacugucuugac

SEQ ID NO: 2598352 - RNA, 19 nt, Artificial Sequence
  Description of Artificial Sequence: Synthetic oligonucleotide
gcagccccucgccgaaacg

SEQ ID NO: 2598353 - RNA, 19 nt, Artificial Sequence
  Description of Artificial Sequence: Synthetic oligonucleotide
gcgccgguggaacucucgc

SEQ ID NO: 2598354 - RNA, 19 nt, Artificial Sequence
  Description of Artificial Sequence: Synthetic oligonucleotide
ggagcgacgccagcucagc

SEQ ID NO: 2598355 - RNA, 19 nt, Artificial Sequence
  Description of Artificial Sequence: Synthetic oligonucleotide
ggugauggcaguggggccu

SEQ ID NO: 2598356 - RNA, 19 nt, Artificial Sequence
  Description of Artificial Sequence: Synthetic oligonucleotide
gcuggucaaagaggcgccc

SEQ ID NO: 2598357 - RNA, 19 nt, Artificial Sequence
  Description of Artificial Sequence: Synthetic oligonucleotide
agccccucgccgaaacgcu

SEQ ID NO: 2598358 - RNA, 19 nt, Artificial Sequence
  Description of Artificial Sequence: Synthetic oligonucleotide
aggacacccucaggagaca

SEQ ID NO: 2598359 - RNA, 19 nt, Artificial Sequence
  Description of Artificial Sequence: Synthetic oligonucleotide
agguaggguuuugggugga

SEQ ID NO: 2598360 - RNA, 19 nt, Artificial Sequence
  Description of Artificial Sequence: Synthetic oligonucleotide
cgcuggucaaagaggcgcc

SEQ ID NO: 2598361 - RNA, 19 nt, Artificial Sequence
  Description of Artificial Sequence: Synthetic oligonucleotide
gcgugcguggaccuccaca

SEQ ID NO: 2598362 - RNA, 19 nt, Artificial Sequence
  Description of Artificial Sequence: Synthetic oligonucleotide
uugggacaucuggcugggc

SEQ ID NO: 2598363 - RNA, 19 nt, Artificial Sequence
  Description of Artificial Sequence: Synthetic oligonucleotide
cggagggugucuugguuac

SEQ ID NO: 2598364 - RNA, 19 nt, Artificial Sequence
  Description of Artificial Sequence: Synthetic oligonucleotide
gguguaugggugggaccug

SEQ ID NO: 2598365 - RNA, 19 nt, Artificial Sequence
  Description of Artificial Sequence: Synthetic oligonucleotide
cauggcgugcguggaccuc

SEQ ID NO: 2598366 - RNA, 19 nt, Artificial Sequence
  Description of Artificial Sequence: Synthetic oligonucleotide
guggccgggcaggagcgac

SEQ ID NO: 2598367 - RNA, 19 nt, Artificial Sequence
  Description of Artificial Sequence: Synthetic oligonucleotide
agacagugccgaggucaca

SEQ ID NO: 2598368 - RNA, 19 nt, Artificial Sequence
  Description of Artificial Sequence: Synthetic oligonucleotide
ccucaggagacagugccga

SEQ ID NO: 2598369 - RNA, 19 nt, Artificial Sequence
  Description of Artificial Sequence: Synthetic oligonucleotide
ucccagguucgguccugua

SEQ ID NO: 2598370 - RNA, 19 nt, Artificial Sequence
  Description of Artificial Sequence: Synthetic oligonucleotide
aggcacagguaggguuuug

SEQ ID NO: 2598371 - RNA, 19 nt, Artificial Sequence
  Description of Artificial Sequence: Synthetic oligonucleotide
gcggcaggagguagcgccg

SEQ ID NO: 2598372 - RNA, 19 nt, Artificial Sequence
  Description of Artificial Sequence: Synthetic oligonucleotide
gcuccucauggcgugcgug

SEQ ID NO: 2598373 - RNA, 19 nt, Artificial Sequence
  Description of Artificial Sequence: Synthetic oligonucleotide
uagcgccgguggaacucuc

SEQ ID NO: 2598374 - RNA, 19 nt, Artificial Sequence
  Description of Artificial Sequence: Synthetic oligonucleotide
ggagguagcgccgguggaa

SEQ ID NO: 2598375 - RNA, 19 nt, Artificial Sequence
  Description of Artificial Sequence: Synthetic oligonucleotide
gguccgcgggcaccugugc

SEQ ID NO: 2598376 - RNA, 19 nt, Artificial Sequence
  Description of Artificial Sequence: Synthetic oligonucleotide
guucauccgggcgcuccuc

SEQ ID NO: 2598377 - RNA, 19 nt, Artificial Sequence
  Description of Artificial Sequence: Synthetic oligonucleotide
gugcugcgggcagagccac

SEQ ID NO: 2598378 - RNA, 19 nt, Artificial Sequence
  Description of Artificial Sequence: Synthetic oligonucleotide
cggaccccuacuuggcagc

SEQ ID NO: 2598379 - RNA, 19 nt, Artificial Sequence
  Description of Artificial Sequence: Synthetic oligonucleotide
gguuggaggggaacugucu

SEQ ID NO: 2598380 - RNA, 19 nt, Artificial Sequence
  Description of Artificial Sequence: Synthetic oligonucleotide
cauguucauccgggcgcuc

SEQ ID NO: 2598381 - RNA, 19 nt, Artificial Sequence
  Description of Artificial Sequence: Synthetic oligonucleotide
ccucauggcgugcguggac

SEQ ID NO: 2598382 - RNA, 19 nt, Artificial Sequence
  Description of Artificial Sequence: Synthetic oligonucleotide
cgccgguggaacucucgcg

SEQ ID NO: 2598383 - RNA, 19 nt, Artificial Sequence
  Description of Artificial Sequence: Synthetic oligonucleotide
gccgaugcagguguggccu

SEQ ID NO: 2598384 - RNA, 19 nt, Artificial Sequence
  Description of Artificial Sequence: Synthetic oligonucleotide
ccagguucgguccuguaau

SEQ ID NO: 2598385 - RNA, 19 nt, Artificial Sequence
  Description of Artificial Sequence: Synthetic oligonucleotide
cuguaaugcccggaccccu

SEQ ID NO: 2598386 - RNA, 19 nt, Artificial Sequence
  Description of Artificial Sequence: Synthetic oligonucleotide
guagcgccgguggaacucu

SEQ ID NO: 2598387 - RNA, 19 nt, Artificial Sequence
  Description of Artificial Sequence: Synthetic oligonucleotide
ggccgggcaggagcgacgc

SEQ ID NO: 2598388 - RNA, 19 nt, Artificial Sequence
  Description of Artificial Sequence: Synthetic oligonucleotide
cccagguucgguccuguaa

SEQ ID NO: 2598389 - RNA, 19 nt, Artificial Sequence
  Description of Artificial Sequence: Synthetic oligonucleotide
gcgcuccucauggcgugcg

SEQ ID NO: 2598390 - RNA, 19 nt, Artificial Sequence
  Description of Artificial Sequence: Synthetic oligonucleotide
gggcagagccaggcuuacg

SEQ ID NO: 2598391 - RNA, 19 nt, Artificial Sequence
  Description of Artificial Sequence: Synthetic oligonucleotide
guccgcgggcaccugugcu

SEQ ID NO: 2598392 - RNA, 19 nt, Artificial Sequence
  Description of Artificial Sequence: Synthetic oligonucleotide
gcaauguauccauguucau

SEQ ID NO: 2598393 - RNA, 19 nt, Artificial Sequence
  Description of Artificial Sequence: Synthetic oligonucleotide
agccaggcuuacggagggu

SEQ ID NO: 2598394 - RNA, 19 nt, Artificial Sequence
  Description of Artificial Sequence: Synthetic oligonucleotide
cagcggagucagauaggcu

SEQ ID NO: 2598395 - RNA, 19 nt, Artificial Sequence
  Description of Artificial Sequence: Synthetic oligonucleotide
ccaccuugacagagaucuc

SEQ ID NO: 2598396 - RNA, 19 nt, Artificial Sequence
  Description of Artificial Sequence: Synthetic oligonucleotide
ggguccgcgggcaccugug

SEQ ID NO: 2598397 - RNA, 19 nt, Artificial Sequence
  Description of Artificial Sequence: Synthetic oligonucleotide
ccgaugcagguguggccug

SEQ ID NO: 2598398 - RNA, 19 nt, Artificial Sequence
  Description of Artificial Sequence: Synthetic oligonucleotide
ccgaaacgcuggucaaaga

SEQ ID NO: 2598399 - RNA, 19 nt, Artificial Sequence
  Description of Artificial Sequence: Synthetic oligonucleotide
gcccggaccccuacuuggc

SEQ ID NO: 2598400 - RNA, 19 nt, Artificial Sequence
  Description of Artificial Sequence: Synthetic oligonucleotide
gguccaccccaggcggcag

SEQ ID NO: 2598401 - RNA, 19 nt, Artificial Sequence
  Description of Artificial Sequence: Synthetic oligonucleotide
ccgggcaggagcgacgcca

SEQ ID NO: 2598402 - RNA, 19 nt, Artificial Sequence
  Description of Artificial Sequence: Synthetic oligonucleotide
ggaccuccacauggccgcc

SEQ ID NO: 2598403 - RNA, 19 nt, Artificial Sequence
  Description of Artificial Sequence: Synthetic oligonucleotide
cgaugcagguguggccugg

SEQ ID NO: 2598404 - RNA, 19 nt, Artificial Sequence
  Description of Artificial Sequence: Synthetic oligonucleotide
ccgguggaacucucgcgca

SEQ ID NO: 2598405 - RNA, 19 nt, Artificial Sequence
  Description of Artificial Sequence: Synthetic oligonucleotide
ggagucagauaggcuuuua

SEQ ID NO: 2598406 - RNA, 19 nt, Artificial Sequence
  Description of Artificial Sequence: Synthetic oligonucleotide
cgugcguggaccuccacau

SEQ ID NO: 2598407 - RNA, 19 nt, Artificial Sequence
  Description of Artificial Sequence: Synthetic oligonucleotide
ggcgcuccucauggcgugc

SEQ ID NO: 2598408 - RNA, 19 nt, Artificial Sequence
  Description of Artificial Sequence: Synthetic oligonucleotide
gguggaacucucgcgcaau

SEQ ID NO: 2598409 - RNA, 19 nt, Artificial Sequence
  Description of Artificial Sequence: Synthetic oligonucleotide
cgggcagagccacgcuggg

SEQ ID NO: 2598410 - RNA, 19 nt, Artificial Sequence
  Description of Artificial Sequence: Synthetic oligonucleotide
gggcgaugguggccgggca

SEQ ID NO: 2598411 - RNA, 19 nt, Artificial Sequence
  Description of Artificial Sequence: Synthetic oligonucleotide
ggagggugucuugguuaca

SEQ ID NO: 2598412 - RNA, 19 nt, Artificial Sequence
  Description of Artificial Sequence: Synthetic oligonucleotide
gccccucgccgaaacgcug

SEQ ID NO: 2598413 - RNA, 19 nt, Artificial Sequence
  Description of Artificial Sequence: Synthetic oligonucleotide
ccaggcuuacggagggugu

SEQ ID NO: 2598414 - RNA, 19 nt, Artificial Sequence
  Description of Artificial Sequence: Synthetic oligonucleotide
ccuccacauggccgccaac

SEQ ID NO: 2598415 - RNA, 19 nt, Artificial Sequence
  Description of Artificial Sequence: Synthetic oligonucleotide
cccggaccccuacuuggca

SEQ ID NO: 2598416 - RNA, 19 nt, Artificial Sequence
  Description of Artificial Sequence: Synthetic oligonucleotide
ggccgccaaccaccuugac

SEQ ID NO: 2598417 - RNA, 19 nt, Artificial Sequence
  Description of Artificial Sequence: Synthetic oligonucleotide
cggcaggagguagcgccgg

SEQ ID NO: 2598418 - RNA, 19 nt, Artificial Sequence
  Description of Artificial Sequence: Synthetic oligonucleotide
gcggagucagauaggcuuu

SEQ ID NO: 2598419 - RNA, 19 nt, Artificial Sequence
  Description of Artificial Sequence: Synthetic oligonucleotide
ccauguucauccgggcgcu

SEQ ID NO: 2598420 - RNA, 19 nt, Artificial Sequence
  Description of Artificial Sequence: Synthetic oligonucleotide
cgacgccagcucagccucc

SEQ ID NO: 2598421 - RNA, 19 nt, Artificial Sequence
  Description of Artificial Sequence: Synthetic oligonucleotide
gccgggcaggagcgacgcc

SEQ ID NO: 2598422 - RNA, 19 nt, Artificial Sequence
  Description of Artificial Sequence: Synthetic oligonucleotide
ccucgccgaaacgcugguc

SEQ ID NO: 2598423 - RNA, 19 nt, Artificial Sequence
  Description of Artificial Sequence: Synthetic oligonucleotide
cugcgggcagagccacgcu

SEQ ID NO: 2598424 - RNA, 19 nt, Artificial Sequence
  Description of Artificial Sequence: Synthetic oligonucleotide
gguggccgggcaggagcga

SEQ ID NO: 2598425 - RNA, 19 nt, Artificial Sequence
  Description of Artificial Sequence: Synthetic oligonucleotide
ggcuuacggagggugucuu

SEQ ID NO: 2598426 - RNA, 19 nt, Artificial Sequence
  Description of Artificial Sequence: Synthetic oligonucleotide
ccaccccaggcggcaggag

SEQ ID NO: 2598427 - RNA, 19 nt, Artificial Sequence
  Description of Artificial Sequence: Synthetic oligonucleotide
ccccuacuuggcagcaggu

SEQ ID NO: 2598428 - RNA, 19 nt, Artificial Sequence
  Description of Artificial Sequence: Synthetic oligonucleotide
cgguggaacucucgcgcaa

SEQ ID NO: 2598429 - RNA, 19 nt, Artificial Sequence
  Description of Artificial Sequence: Synthetic oligonucleotide
cgcgcaauguauccauguu

SEQ ID NO: 2598430 - RNA, 19 nt, Artificial Sequence
  Description of Artificial Sequence: Synthetic oligonucleotide
cagcagccccucgccgaaa

SEQ ID NO: 2598431 - RNA, 19 nt, Artificial Sequence
  Description of Artificial Sequence: Synthetic oligonucleotide
cauggccgccaaccaccuu

SEQ ID NO: 2598432 - RNA, 19 nt, Artificial Sequence
  Description of Artificial Sequence: Synthetic oligonucleotide
cgccaaccaccuugacaga

SEQ ID NO: 2598433 - RNA, 19 nt, Artificial Sequence
  Description of Artificial Sequence: Synthetic oligonucleotide
gcugggcagcggagucaga

SEQ ID NO: 2598434 - RNA, 19 nt, Artificial Sequence
  Description of Artificial Sequence: Synthetic oligonucleotide
cgccgaaacgcuggucaaa

SEQ ID NO: 2598435 - RNA, 19 nt, Artificial Sequence
  Description of Artificial Sequence: Synthetic oligonucleotide
cgaugguggccgggcagga

SEQ ID NO: 2598436 - RNA, 19 nt, Artificial Sequence
  Description of Artificial Sequence: Synthetic oligonucleotide
cccucgccgaaacgcuggu

SEQ ID NO: 2598437 - RNA, 19 nt, Artificial Sequence
  Description of Artificial Sequence: Synthetic oligonucleotide
cggagucagauaggcuuuu

SEQ ID NO: 2598438 - RNA, 19 nt, Artificial Sequence
  Description of Artificial Sequence: Synthetic oligonucleotide
cgcuccucauggcgugcgu

SEQ ID NO: 2598439 - RNA, 19 nt, Artificial Sequence
  Description of Artificial Sequence: Synthetic oligonucleotide
  modified_base (9)..(9): a, c, u, g, unknown or other
auacugaanguucagggcc

SEQ ID NO: 2598440 - RNA, 19 nt, Artificial Sequence
  Description of Artificial Sequence: Synthetic oligonucleotide
acuuauaacacucuggucu

SEQ ID NO: 2598441 - RNA, 19 nt, Artificial Sequence
  Description of Artificial Sequence: Synthetic oligonucleotide
aacacucuggucuagaucu

SEQ ID NO: 2598442 - RNA, 19 nt, Artificial Sequence
  Description of Artificial Sequence: Synthetic oligonucleotide
aguuucaucccauuggggc

SEQ ID NO: 2598443 - RNA, 19 nt, Artificial Sequence
  Description of Artificial Sequence: Synthetic oligonucleotide
aacaguuucaucccauugg

SEQ ID NO: 2598444 - RNA, 19 nt, Artificial Sequence
  Description of Artificial Sequence: Synthetic oligonucleotide
aaaacugcagaggagauag

SEQ ID NO: 2598445 - RNA, 19 nt, Artificial Sequence
  Description of Artificial Sequence: Synthetic oligonucleotide
uuaugcaucaucuagggaa

SEQ ID NO: 2598446 - RNA, 19 nt, Artificial Sequence
  Description of Artificial Sequence: Synthetic oligonucleotide
uguuuaugcaucaucuagg

SEQ ID NO: 2598447 - RNA, 19 nt, Artificial Sequence
  Description of Artificial Sequence: Synthetic oligonucleotide
ucugauaucgaugccaugg

SEQ ID NO: 2598448 - RNA, 19 nt, Artificial Sequence
  Description of Artificial Sequence: Synthetic oligonucleotide
uguaaugcugguuuuauga

SEQ ID NO: 2598449 - RNA, 19 nt, Artificial Sequence
  Description of Artificial Sequence: Synthetic oligonucleotide
  modified_base (10)..(10): a, c, u, g, unknown or other
gauacugaanguucagggc

SEQ ID NO: 2598450 - RNA, 19 nt, Artificial Sequence
  Description of Artificial Sequence: Synthetic oligonucleotide
uuuaugaacaccagugaca

SEQ ID NO: 2598451 - RNA, 19 nt, Artificial Sequence
  Description of Artificial Sequence: Synthetic oligonucleotide
cuggucuagaucuagagag

SEQ ID NO: 2598452 - RNA, 19 nt, Artificial Sequence
  Description of Artificial Sequence: Synthetic oligonucleotide
ucuagagaggaguagacga

SEQ ID NO: 2598453 - RNA, 19 nt, Artificial Sequence
  Description of Artificial Sequence: Synthetic oligonucleotide
uuuuaugaacaccagugac

SEQ ID NO: 2598454 - RNA, 19 nt, Artificial Sequence
  Description of Artificial Sequence: Synthetic oligonucleotide
cacaauaagcuccuggucg

SEQ ID NO: 2598455 - RNA, 19 nt, Artificial Sequence
  Description of Artificial Sequence: Synthetic oligonucleotide
  modified_base (3)..(3): a, c, u, g, unknown or other
aanguucagggccauuguc

SEQ ID NO: 2598456 - RNA, 19 nt, Artificial Sequence
  Description of Artificial Sequence: Synthetic oligonucleotide
aagucuucagaacuuauaa

SEQ ID NO: 2598457 - RNA, 19 nt, Artificial Sequence
  Description of Artificial Sequence: Synthetic oligonucleotide
ucuguguucaaagacuggg

SEQ ID NO: 2598458 - RNA, 19 nt, Artificial Sequence
  Description of Artificial Sequence: Synthetic oligonucleotide
guuuaugcaucaucuaggg

SEQ ID NO: 2598459 - RNA, 19 nt, Artificial Sequence
  Description of Artificial Sequence: Synthetic oligonucleotide
  modified_base (18)..(18): a, c, u, g, unknown or other
accuccaggauacugaang

SEQ ID NO: 2598460 - RNA, 19 nt, Artificial Sequence
  Description of Artificial Sequence: Synthetic oligonucleotide
uucagaacuuauaacacuc

SEQ ID NO: 2598461 - RNA, 19 nt, Artificial Sequence
  Description of Artificial Sequence: Synthetic oligonucleotide
aaaucuccgaagcugcuug

SEQ ID NO: 2598462 - RNA, 19 nt, Artificial Sequence
  Description of Artificial Sequence: Synthetic oligonucleotide
gacaucaaaucuccgaagc

SEQ ID NO: 2598463 - RNA, 19 nt, Artificial Sequence
  Description of Artificial Sequence: Synthetic oligonucleotide
aagagcucuguguucaaag

SEQ ID NO: 2598464 - RNA, 19 nt, Artificial Sequence
  Description of Artificial Sequence: Synthetic oligonucleotide
acaguuucaucccauuggg

SEQ ID NO: 2598465 - RNA, 19 nt, Artificial Sequence
  Description of Artificial Sequence: Synthetic oligonucleotide
aacuuauaacacucugguc

SEQ ID NO: 2598466 - RNA, 19 nt, Artificial Sequence
  Description of Artificial Sequence: Synthetic oligonucleotide
ucuucagaacuuauaacac

SEQ ID NO: 2598467 - RNA, 19 nt, Artificial Sequence
  Description of Artificial Sequence: Synthetic oligonucleotide
uucacaauaagcuccuggu

SEQ ID NO: 2598468 - RNA, 19 nt, Artificial Sequence
  Description of Artificial Sequence: Synthetic oligonucleotide
acuuugauggguuucacaa

SEQ ID NO: 2598469 - RNA, 19 nt, Artificial Sequence
  Description of Artificial Sequence: Synthetic oligonucleotide
agggccauugucuucgggc

SEQ ID NO: 2598470 - RNA, 19 nt, Artificial Sequence
  Description of Artificial Sequence: Synthetic oligonucleotide
agucuucagaacuuauaac

SEQ ID NO: 2598471 - RNA, 19 nt, Artificial Sequence
  Description of Artificial Sequence: Synthetic oligonucleotide
uuugauggguuucacaaua

SEQ ID NO: 2598472 - RNA, 19 nt, Artificial Sequence
  Description of Artificial Sequence: Synthetic oligonucleotide
uuuccaaggauguucuuca

SEQ ID NO: 2598473 - RNA, 19 nt, Artificial Sequence
  Description of Artificial Sequence: Synthetic oligonucleotide
  modified_base (11)..(11): a, c, u, g, unknown or other
ggauacugaanguucaggg

SEQ ID NO: 2598474 - RNA, 19 nt, Artificial Sequence
  Description of Artificial Sequence: Synthetic oligonucleotide
cuguuuaugcaucaucuag

SEQ ID NO: 2598475 - RNA, 19 nt, Artificial Sequence
  Description of Artificial Sequence: Synthetic oligonucleotide
aaugcugguuuuaugaaca

SEQ ID NO: 2598476 - RNA, 19 nt, Artificial Sequence
  Description of Artificial Sequence: Synthetic oligonucleotide
ccagagaacaguuucaucc

SEQ ID NO: 2598477 - RNA, 19 nt, Artificial Sequence
  Description of Artificial Sequence: Synthetic oligonucleotide
auagacaagagcucugugu

SEQ ID NO: 2598478 - RNA, 19 nt, Artificial Sequence
  Description of Artificial Sequence: Synthetic oligonucleotide
aucuagggaaaccugcagg

SEQ ID NO: 2598479 - RNA, 19 nt, Artificial Sequence
  Description of Artificial Sequence: Synthetic oligonucleotide
aguacaaagggcagaauuc

SEQ ID NO: 2598480 - RNA, 19 nt, Artificial Sequence
  Description of Artificial Sequence: Synthetic oligonucleotide
cagguucugauaucgaugc

SEQ ID NO: 2598481 - RNA, 19 nt, Artificial Sequence
  Description of Artificial Sequence: Synthetic oligonucleotide
  modified_base (5)..(5): a, c, u, g, unknown or other
ugaanguucagggccauug

SEQ ID NO: 2598482 - RNA, 19 nt, Artificial Sequence
  Description of Artificial Sequence: Synthetic oligonucleotide
gauggguuucacaauaagc

SEQ ID NO: 2598483 - RNA, 19 nt, Artificial Sequence
  Description of Artificial Sequence: Synthetic oligonucleotide
ucuagaucuagagaggagu

SEQ ID NO: 2598484 - RNA, 19 nt, Artificial Sequence
  Description of Artificial Sequence: Synthetic oligonucleotide
agaacuuauaacacucugg

SEQ ID NO: 2598485 - RNA, 19 nt, Artificial Sequence
  Description of Artificial Sequence: Synthetic oligonucleotide
aucaaaucuccgaagcugc

SEQ ID NO: 2598486 - RNA, 19 nt, Artificial Sequence
  Description of Artificial Sequence: Synthetic oligonucleotide
uccaaggauguucuucagg

SEQ ID NO: 2598487 - RNA, 19 nt, Artificial Sequence
  Description of Artificial Sequence: Synthetic oligonucleotide
agugacaucaaaucuccga

SEQ ID NO: 2598488 - RNA, 19 nt, Artificial Sequence
  Description of Artificial Sequence: Synthetic oligonucleotide
agaauucucggaaugugac

SEQ ID NO: 2598489 - RNA, 19 nt, Artificial Sequence
  Description of Artificial Sequence: Synthetic oligonucleotide
ugaggucauagacaagagc

SEQ ID NO: 2598490 - RNA, 19 nt, Artificial Sequence
  Description of Artificial Sequence: Synthetic oligonucleotide
uaguacaaagggcagaauu

SEQ ID NO: 2598491 - RNA, 19 nt, Artificial Sequence
  Description of Artificial Sequence: Synthetic oligonucleotide
gguuuuaugaacaccagug

SEQ ID NO: 2598492 - RNA, 19 nt, Artificial Sequence
  Description of Artificial Sequence: Synthetic oligonucleotide
ugauggguuucacaauaag

SEQ ID NO: 2598493 - RNA, 19 nt, Artificial Sequence
  Description of Artificial Sequence: Synthetic oligonucleotide
ucuggucuagaucuagaga

SEQ ID NO: 2598494 - RNA, 19 nt, Artificial Sequence
  Description of Artificial Sequence: Synthetic oligonucleotide
gaacuuauaacacucuggu

SEQ ID NO: 2598495 - RNA, 19 nt, Artificial Sequence
  Description of Artificial Sequence: Synthetic oligonucleotide
uuaugaacaccagugacau

SEQ ID NO: 2598496 - RNA, 19 nt, Artificial Sequence
  Description of Artificial Sequence: Synthetic oligonucleotide
uggucuagaucuagagagg

SEQ ID NO: 2598497 - RNA, 19 nt, Artificial Sequence
  Description of Artificial Sequence: Synthetic oligonucleotide
agaaggacuguuuaugcau

SEQ ID NO: 2598498 - RNA, 19 nt, Artificial Sequence
  Description of Artificial Sequence: Synthetic oligonucleotide
cacacuacuggccagagca

SEQ ID NO: 2598499 - RNA, 19 nt, Artificial Sequence
  Description of Artificial Sequence: Synthetic oligonucleotide
caaagggcagaauucucgg

SEQ ID NO: 2598500 - RNA, 19 nt, Artificial Sequence
  Description of Artificial Sequence: Synthetic oligonucleotide
gauaucgaugccaugguca

SEQ ID NO: 2598501 - RNA, 19 nt, Artificial Sequence
  Description of Artificial Sequence: Synthetic oligonucleotide
aaugugacagguucugaua

SEQ ID NO: 2598502 - RNA, 19 nt, Artificial Sequence
  Description of Artificial Sequence: Synthetic oligonucleotide
uagacaagagcucuguguu

SEQ ID NO: 2598503 - RNA, 19 nt, Artificial Sequence
  Description of Artificial Sequence: Synthetic oligonucleotide
caagccagagcuguaaugc

SEQ ID NO: 2598504 - RNA, 19 nt, Artificial Sequence
  Description of Artificial Sequence: Synthetic oligonucleotide
aagggcagaauucucggaa

SEQ ID NO: 2598505 - RNA, 19 nt, Artificial Sequence
  Description of Artificial Sequence: Synthetic oligonucleotide
agggaacuguggcaggugc

SEQ ID NO: 2598506 - RNA, 19 nt, Artificial Sequence
  Description of Artificial Sequence: Synthetic oligonucleotide
uaaugcugguuuuaugaac

SEQ ID NO: 2598507 - RNA, 19 nt, Artificial Sequence
  Description of Artificial Sequence: Synthetic oligonucleotide
aggaguagacgaucuuccc

SEQ ID NO: 2598508 - RNA, 19 nt, Artificial Sequence
  Description of Artificial Sequence: Synthetic oligonucleotide
ugacaucaaaucuccgaag

SEQ ID NO: 2598509 - RNA, 19 nt, Artificial Sequence
  Description of Artificial Sequence: Synthetic oligonucleotide
gaacaguuucaucccauug

SEQ ID NO: 2598510 - RNA, 19 nt, Artificial Sequence
  Description of Artificial Sequence: Synthetic oligonucleotide
cagaggagauaguacaaag

SEQ ID NO: 2598511 - RNA, 19 nt, Artificial Sequence
  Description of Artificial Sequence: Synthetic oligonucleotide
agaggaguagacgaucuuc

SEQ ID NO: 2598512 - RNA, 19 nt, Artificial Sequence
  Description of Artificial Sequence: Synthetic oligonucleotide
uugucaucuccagagaaca

SEQ ID NO: 2598513 - RNA, 19 nt, Artificial Sequence
  Description of Artificial Sequence: Synthetic oligonucleotide
gugacagguucugauaucg

SEQ ID NO: 2598514 - RNA, 19 nt, Artificial Sequence
  Description of Artificial Sequence: Synthetic oligonucleotide
ugguuuuaugaacaccagu

SEQ ID NO: 2598515 - RNA, 19 nt, Artificial Sequence
  Description of Artificial Sequence: Synthetic oligonucleotide
agaggagauaguacaaagg

SEQ ID NO: 2598516 - RNA, 19 nt, Artificial Sequence
  Description of Artificial Sequence: Synthetic oligonucleotide
gaucccauucaccucaaca

SEQ ID NO: 2598517 - RNA, 19 nt, Artificial Sequence
  Description of Artificial Sequence: Synthetic oligonucleotide
uccucccuggcaaugaaga

SEQ ID NO: 2598518 - RNA, 19 nt, Artificial Sequence
  Description of Artificial Sequence: Synthetic oligonucleotide
ucagaacuuauaacacucu

SEQ ID NO: 2598519 - RNA, 19 nt, Artificial Sequence
  Description of Artificial Sequence: Synthetic oligonucleotide
  modified_base (8)..(8): a, c, u, g, unknown or other
uacugaanguucagggcca

SEQ ID NO: 2598520 - RNA, 19 nt, Artificial Sequence
  Description of Artificial Sequence: Synthetic oligonucleotide
cagagaacaguuucauccc

SEQ ID NO: 2598521 - RNA, 19 nt, Artificial Sequence
  Description of Artificial Sequence: Synthetic oligonucleotide
uugaggucauagacaagag

SEQ ID NO: 2598522 - RNA, 19 nt, Artificial Sequence
  Description of Artificial Sequence: Synthetic oligonucleotide
cuugaggucauagacaaga

SEQ ID NO: 2598523 - RNA, 19 nt, Artificial Sequence
  Description of Artificial Sequence: Synthetic oligonucleotide
cucggaaugugacagguuc

SEQ ID NO: 2598524 - RNA, 19 nt, Artificial Sequence
  Description of Artificial Sequence: Synthetic oligonucleotide
ucaacugguccacacuacu

SEQ ID NO: 2598525 - RNA, 19 nt, Artificial Sequence
  Description of Artificial Sequence: Synthetic oligonucleotide
uuuaugcaucaucuaggga

SEQ ID NO: 2598526 - RNA, 19 nt, Artificial Sequence
  Description of Artificial Sequence: Synthetic oligonucleotide
  modified_base (2)..(2): a, c, u, g, unknown or other
anguucagggccauugucu

SEQ ID NO: 2598527 - RNA, 19 nt, Artificial Sequence
  Description of Artificial Sequence: Synthetic oligonucleotide
gacucgagggaacuguggc

SEQ ID NO: 2598528 - RNA, 19 nt, Artificial Sequence
  Description of Artificial Sequence: Synthetic oligonucleotide
guuuuaugaacaccaguga

SEQ ID NO: 2598529 - RNA, 19 nt, Artificial Sequence
  Description of Artificial Sequence: Synthetic oligonucleotide
acaauaagcuccuggucga

SEQ ID NO: 2598530 - RNA, 19 nt, Artificial Sequence
  Description of Artificial Sequence: Synthetic oligonucleotide
ccaaggauguucuucaggc

SEQ ID NO: 2598531 - RNA, 19 nt, Artificial Sequence
  Description of Artificial Sequence: Synthetic oligonucleotide
aaggacuguuuaugcauca

SEQ ID NO: 2598532 - RNA, 19 nt, Artificial Sequence
  Description of Artificial Sequence: Synthetic oligonucleotide
cuugucaucuccagagaac

SEQ ID NO: 2598533 - RNA, 19 nt, Artificial Sequence
  Description of Artificial Sequence: Synthetic oligonucleotide
ugacucgagggaacugugg

SEQ ID NO: 2598534 - RNA, 19 nt, Artificial Sequence
  Description of Artificial Sequence: Synthetic oligonucleotide
caucaaaucuccgaagcug

SEQ ID NO: 2598535 - RNA, 19 nt, Artificial Sequence
  Description of Artificial Sequence: Synthetic oligonucleotide
ggagauaguacaaagggca

SEQ ID NO: 2598536 - RNA, 19 nt, Artificial Sequence
  Description of Artificial Sequence: Synthetic oligonucleotide
  modified_base (12)..(12): a, c, u, g, unknown or other
aggauacugaanguucagg

SEQ ID NO: 2598537 - RNA, 19 nt, Artificial Sequence
  Description of Artificial Sequence: Synthetic oligonucleotide
auaagcuccuggucgaagu

SEQ ID NO: 2598538 - RNA, 19 nt, Artificial Sequence
  Description of Artificial Sequence: Synthetic oligonucleotide
gaggaguagacgaucuucc

SEQ ID NO: 2598539 - RNA, 19 nt, Artificial Sequence
  Description of Artificial Sequence: Synthetic oligonucleotide
aauaagcuccuggucgaag

SEQ ID NO: 2598540 - RNA, 19 nt, Artificial Sequence
  Description of Artificial Sequence: Synthetic oligonucleotide
uggucaagguuuccaagga

SEQ ID NO: 2598541 - RNA, 19 nt, Artificial Sequence
  Description of Artificial Sequence: Synthetic oligonucleotide
acugcagaggagauaguac

SEQ ID NO: 2598542 - RNA, 19 nt, Artificial Sequence
  Description of Artificial Sequence: Synthetic oligonucleotide
cagaacuuauaacacucug

SEQ ID NO: 2598543 - RNA, 19 nt, Artificial Sequence
  Description of Artificial Sequence: Synthetic oligonucleotide
cucuggucuagaucuagag

SEQ ID NO: 2598544 - RNA, 19 nt, Artificial Sequence
  Description of Artificial Sequence: Synthetic oligonucleotide
gauaguacaaagggcagaa

SEQ ID NO: 2598545 - RNA, 19 nt, Artificial Sequence
  Description of Artificial Sequence: Synthetic oligonucleotide
aucuagagaggaguagacg

SEQ ID NO: 2598546 - RNA, 19 nt, Artificial Sequence
  Description of Artificial Sequence: Synthetic oligonucleotide
ucccauucaccucaacacu

SEQ ID NO: 2598547 - RNA, 19 nt, Artificial Sequence
  Description of Artificial Sequence: Synthetic oligonucleotide
uagacgaucuuccccuugu

SEQ ID NO: 2598548 - RNA, 19 nt, Artificial Sequence
  Description of Artificial Sequence: Synthetic oligonucleotide
cuccgaagcugcuuguucc

SEQ ID NO: 2598549 - RNA, 19 nt, Artificial Sequence
  Description of Artificial Sequence: Synthetic oligonucleotide
gucaagguuuccaaggaug

SEQ ID NO: 2598550 - RNA, 19 nt, Artificial Sequence
  Description of Artificial Sequence: Synthetic oligonucleotide
gagauaguacaaagggcag

SEQ ID NO: 2598551 - RNA, 19 nt, Artificial Sequence
  Description of Artificial Sequence: Synthetic oligonucleotide
augugacagguucugauau

SEQ ID NO: 2598552 - RNA, 19 nt, Artificial Sequence
  Description of Artificial Sequence: Synthetic oligonucleotide
aaugaagacacgagcugga

SEQ ID NO: 2598553 - RNA, 19 nt, Artificial Sequence
  Description of Artificial Sequence: Synthetic oligonucleotide
cauggucaagguuuccaag

SEQ ID NO: 2598554 - RNA, 19 nt, Artificial Sequence
  Description of Artificial Sequence: Synthetic oligonucleotide
agaucuagagaggaguaga

SEQ ID NO: 2598555 - RNA, 19 nt, Artificial Sequence
  Description of Artificial Sequence: Synthetic oligonucleotide
cauuggggcuccaagccag

SEQ ID NO: 2598556 - RNA, 19 nt, Artificial Sequence
  Description of Artificial Sequence: Synthetic oligonucleotide
uggccagagcacuugaggu

SEQ ID NO: 2598557 - RNA, 19 nt, Artificial Sequence
  Description of Artificial Sequence: Synthetic oligonucleotide
ucgggcaccuccaggauac

SEQ ID NO: 2598558 - RNA, 19 nt, Artificial Sequence
  Description of Artificial Sequence: Synthetic oligonucleotide
agcuggaaaacugcagagg

SEQ ID NO: 2598559 - RNA, 19 nt, Artificial Sequence
  Description of Artificial Sequence: Synthetic oligonucleotide
ugauaucgaugccaugguc

SEQ ID NO: 2598560 - RNA, 19 nt, Artificial Sequence
  Description of Artificial Sequence: Synthetic oligonucleotide
augcugguuuuaugaacac

SEQ ID NO: 2598561 - RNA, 19 nt, Artificial Sequence
  Description of Artificial Sequence: Synthetic oligonucleotide
ucauagacaagagcucugu

SEQ ID NO: 2598562 - RNA, 19 nt, Artificial Sequence
  Description of Artificial Sequence: Synthetic oligonucleotide
agagcucuguguucaaaga

SEQ ID NO: 2598563 - RNA, 19 nt, Artificial Sequence
  Description of Artificial Sequence: Synthetic oligonucleotide
gaauucucggaaugugaca

SEQ ID NO: 2598564 - RNA, 19 nt, Artificial Sequence
  Description of Artificial Sequence: Synthetic oligonucleotide
acgaucuuccccuugucau

SEQ ID NO: 2598565 - RNA, 19 nt, Artificial Sequence
  Description of Artificial Sequence: Synthetic oligonucleotide
auaucgaugccauggucaa

SEQ ID NO: 2598566 - RNA, 19 nt, Artificial Sequence
  Description of Artificial Sequence: Synthetic oligonucleotide
  modified_base (13)..(13): a, c, u, g, unknown or other
caggauacugaanguucag

SEQ ID NO: 2598567 - RNA, 19 nt, Artificial Sequence
  Description of Artificial Sequence: Synthetic oligonucleotide
auucucggaaugugacagg

SEQ ID NO: 2598568 - RNA, 19 nt, Artificial Sequence
  Description of Artificial Sequence: Synthetic oligonucleotide
gugacaucaaaucuccgaa

SEQ ID NO: 2598569 - RNA, 19 nt, Artificial Sequence
  Description of Artificial Sequence: Synthetic oligonucleotide
acacgagcuggaaaacugc

SEQ ID NO: 2598570 - RNA, 19 nt, Artificial Sequence
  Description of Artificial Sequence: Synthetic oligonucleotide
agagaacaguuucauccca

SEQ ID NO: 2598571 - RNA, 19 nt, Artificial Sequence
  Description of Artificial Sequence: Synthetic oligonucleotide
ugcagaggagauaguacaa

SEQ ID NO: 2598572 - RNA, 19 nt, Artificial Sequence
  Description of Artificial Sequence: Synthetic oligonucleotide
uugacucgagggaacugug

SEQ ID NO: 2598573 - RNA, 19 nt, Artificial Sequence
  Description of Artificial Sequence: Synthetic oligonucleotide
cacuugaggucauagacaa

SEQ ID NO: 2598574 - RNA, 19 nt, Artificial Sequence
  Description of Artificial Sequence: Synthetic oligonucleotide
uacaaagggcagaauucuc

SEQ ID NO: 2598575 - RNA, 19 nt, Artificial Sequence
  Description of Artificial Sequence: Synthetic oligonucleotide
ucgggcacgaucccauuca

SEQ ID NO: 2598576 - RNA, 19 nt, Artificial Sequence
  Description of Artificial Sequence: Synthetic oligonucleotide
uauaacacucuggucuaga

SEQ ID NO: 2598577 - RNA, 19 nt, Artificial Sequence
  Description of Artificial Sequence: Synthetic oligonucleotide
aggggcgagacucgggcac

SEQ ID NO: 2598578 - RNA, 19 nt, Artificial Sequence
  Description of Artificial Sequence: Synthetic oligonucleotide
agguucugauaucgaugcc

SEQ ID NO: 2598579 - RNA, 19 nt, Artificial Sequence
  Description of Artificial Sequence: Synthetic oligonucleotide
cugguuuuaugaacaccag

SEQ ID NO: 2598580 - RNA, 19 nt, Artificial Sequence
  Description of Artificial Sequence: Synthetic oligonucleotide
cugcagaggagauaguaca

SEQ ID NO: 2598581 - RNA, 19 nt, Artificial Sequence
  Description of Artificial Sequence: Synthetic oligonucleotide
ucaaaucuccgaagcugcu

SEQ ID NO: 2598582 - RNA, 19 nt, Artificial Sequence
  Description of Artificial Sequence: Synthetic oligonucleotide
ucggaaugugacagguucu

SEQ ID NO: 2598583 - RNA, 19 nt, Artificial Sequence
  Description of Artificial Sequence: Synthetic oligonucleotide
uugauggguuucacaauaa

SEQ ID NO: 2598584 - RNA, 19 nt, Artificial Sequence
  Description of Artificial Sequence: Synthetic oligonucleotide
gaucuagagaggaguagac

SEQ ID NO: 2598585 - RNA, 19 nt, Artificial Sequence
  Description of Artificial Sequence: Synthetic oligonucleotide
agggaguugacucgaggga

SEQ ID NO: 2598586 - RNA, 19 nt, Artificial Sequence
  Description of Artificial Sequence: Synthetic oligonucleotide
auucaccucaacacugggg

SEQ ID NO: 2598587 - RNA, 19 nt, Artificial Sequence
  Description of Artificial Sequence: Synthetic oligonucleotide
ggguuucacaauaagcucc

SEQ ID NO: 2598588 - RNA, 19 nt, Artificial Sequence
  Description of Artificial Sequence: Synthetic oligonucleotide
agagcacuugaggucauag

SEQ ID NO: 2598589 - RNA, 19 nt, Artificial Sequence
  Description of Artificial Sequence: Synthetic oligonucleotide
caucaucuagggaaaccug

SEQ ID NO: 2598590 - RNA, 19 nt, Artificial Sequence
  Description of Artificial Sequence: Synthetic oligonucleotide
acagguucugauaucgaug

SEQ ID NO: 2598591 - RNA, 19 nt, Artificial Sequence
  Description of Artificial Sequence: Synthetic oligonucleotide
uccugguuccaccuucugu

SEQ ID NO: 2598592 - RNA, 19 nt, Artificial Sequence
  Description of Artificial Sequence: Synthetic oligonucleotide
ccagugacaucaaaucucc

SEQ ID NO: 2598593 - RNA, 19 nt, Artificial Sequence
  Description of Artificial Sequence: Synthetic oligonucleotide
caguuucaucccauugggg

SEQ ID NO: 2598594 - RNA, 19 nt, Artificial Sequence
  Description of Artificial Sequence: Synthetic oligonucleotide
cauucaccucaacacuggg

SEQ ID NO: 2598595 - RNA, 19 nt, Artificial Sequence
  Description of Artificial Sequence: Synthetic oligonucleotide
uucucggaaugugacaggu

SEQ ID NO: 2598596 - RNA, 19 nt, Artificial Sequence
  Description of Artificial Sequence: Synthetic oligonucleotide
auaacacucuggucuagau

SEQ ID NO: 2598597 - RNA, 19 nt, Artificial Sequence
  Description of Artificial Sequence: Synthetic oligonucleotide
ucuccuggucuggagaccc

SEQ ID NO: 2598598 - RNA, 19 nt, Artificial Sequence
  Description of Artificial Sequence: Synthetic oligonucleotide
guuuccaaggauguucuuc

SEQ ID NO: 2598599 - RNA, 19 nt, Artificial Sequence
  Description of Artificial Sequence: Synthetic oligonucleotide
caucuagggaaaccugcag

SEQ ID NO: 2598600 - RNA, 19 nt, Artificial Sequence
  Description of Artificial Sequence: Synthetic oligonucleotide
aaucuccgaagcugcuugu

SEQ ID NO: 2598601 - RNA, 19 nt, Artificial Sequence
  Description of Artificial Sequence: Synthetic oligonucleotide
aucccauuggggcuccaag

SEQ ID NO: 2598602 - RNA, 19 nt, Artificial Sequence
  Description of Artificial Sequence: Synthetic oligonucleotide
gacucgggcaccuccagga

SEQ ID NO: 2598603 - RNA, 19 nt, Artificial Sequence
  Description of Artificial Sequence: Synthetic oligonucleotide
gcuggaaaacugcagagga

SEQ ID NO: 2598604 - RNA, 19 nt, Artificial Sequence
  Description of Artificial Sequence: Synthetic oligonucleotide
uggucgaagucuucagaac

SEQ ID NO: 2598605 - RNA, 19 nt, Artificial Sequence
  Description of Artificial Sequence: Synthetic oligonucleotide
gcagaaggacuguuuaugc

SEQ ID NO: 2598606 - RNA, 19 nt, Artificial Sequence
  Description of Artificial Sequence: Synthetic oligonucleotide
gggaacucggagcagggag

SEQ ID NO: 2598607 - RNA, 19 nt, Artificial Sequence
  Description of Artificial Sequence: Synthetic oligonucleotide
ugcucaacugguccacacu

SEQ ID NO: 2598608 - RNA, 19 nt, Artificial Sequence
  Description of Artificial Sequence: Synthetic oligonucleotide
guaaugcugguuuuaugaa

SEQ ID NO: 2598609 - RNA, 19 nt, Artificial Sequence
  Description of Artificial Sequence: Synthetic oligonucleotide
uuauaacacucuggucuag

SEQ ID NO: 2598610 - RNA, 19 nt, Artificial Sequence
  Description of Artificial Sequence: Synthetic oligonucleotide
ugcugguuuuaugaacacc

SEQ ID NO: 2598611 - RNA, 19 nt, Artificial Sequence
  Description of Artificial Sequence: Synthetic oligonucleotide
caacugguccacacuacug

SEQ ID NO: 2598612 - RNA, 19 nt, Artificial Sequence
  Description of Artificial Sequence: Synthetic oligonucleotide
ucuucgggcacgaucccau

SEQ ID NO: 2598613 - RNA, 19 nt, Artificial Sequence
  Description of Artificial Sequence: Synthetic oligonucleotide
uccuggucgaagucuucag

SEQ ID NO: 2598614 - RNA, 19 nt, Artificial Sequence
  Description of Artificial Sequence: Synthetic oligonucleotide
agauaguacaaagggcaga

SEQ ID NO: 2598615 - RNA, 19 nt, Artificial Sequence
  Description of Artificial Sequence: Synthetic oligonucleotide
cuuauaacacucuggucua

SEQ ID NO: 2598616 - RNA, 19 nt, Artificial Sequence
  Description of Artificial Sequence: Synthetic oligonucleotide
uaagcuccuggucgaaguc

SEQ ID NO: 2598617 - RNA, 19 nt, Artificial Sequence
  Description of Artificial Sequence: Synthetic oligonucleotide
gagacccugugcucaacug

SEQ ID NO: 2598618 - RNA, 19 nt, Artificial Sequence
  Description of Artificial Sequence: Synthetic oligonucleotide
cagaauucucggaauguga

SEQ ID NO: 2598619 - RNA, 19 nt, Artificial Sequence
  Description of Artificial Sequence: Synthetic oligonucleotide
agcucuguguucaaagacu

SEQ ID NO: 2598620 - RNA, 19 nt, Artificial Sequence
  Description of Artificial Sequence: Synthetic oligonucleotide
ugacagguucugauaucga

SEQ ID NO: 2598621 - RNA, 19 nt, Artificial Sequence
  Description of Artificial Sequence: Synthetic oligonucleotide
gaaggacuguuuaugcauc

SEQ ID NO: 2598622 - RNA, 19 nt, Artificial Sequence
  Description of Artificial Sequence: Synthetic oligonucleotide
cuguaaugcugguuuuaug

SEQ ID NO: 2598623 - RNA, 19 nt, Artificial Sequence
  Description of Artificial Sequence: Synthetic oligonucleotide
ugugacagguucugauauc

SEQ ID NO: 2598624 - RNA, 19 nt, Artificial Sequence
  Description of Artificial Sequence: Synthetic oligonucleotide
gaaugugacagguucugau

SEQ ID NO: 2598625 - RNA, 19 nt, Artificial Sequence
  Description of Artificial Sequence: Synthetic oligonucleotide
cacgaucccauucaccuca

SEQ ID NO: 2598626 - RNA, 19 nt, Artificial Sequence
  Description of Artificial Sequence: Synthetic oligonucleotide
agacgaucuuccccuuguc

SEQ ID NO: 2598627 - RNA, 19 nt, Artificial Sequence
  Description of Artificial Sequence: Synthetic oligonucleotide
uagagaggaguagacgauc

SEQ ID NO: 2598628 - RNA, 19 nt, Artificial Sequence
  Description of Artificial Sequence: Synthetic oligonucleotide
agaacaguuucaucccauu

SEQ ID NO: 2598629 - RNA, 19 nt, Artificial Sequence
  Description of Artificial Sequence: Synthetic oligonucleotide
acucgagggaacuguggca

SEQ ID NO: 2598630 - RNA, 19 nt, Artificial Sequence
  Description of Artificial Sequence: Synthetic oligonucleotide
ucgagggaacuguggcagg

SEQ ID NO: 2598631 - RNA, 19 nt, Artificial Sequence
  Description of Artificial Sequence: Synthetic oligonucleotide
gcugccaccagggaacucg

SEQ ID NO: 2598632 - RNA, 19 nt, Artificial Sequence
  Description of Artificial Sequence: Synthetic oligonucleotide
agacucgggcaccuccagg

SEQ ID NO: 2598633 - RNA, 19 nt, Artificial Sequence
  Description of Artificial Sequence: Synthetic oligonucleotide
ccugguuccaccuucuguc

SEQ ID NO: 2598634 - RNA, 19 nt, Artificial Sequence
  Description of Artificial Sequence: Synthetic oligonucleotide
agagaggaguagacgaucu

SEQ ID NO: 2598635 - RNA, 19 nt, Artificial Sequence
  Description of Artificial Sequence: Synthetic oligonucleotide
uuucaucccauuggggcuc

SEQ ID NO: 2598636 - RNA, 19 nt, Artificial Sequence
  Description of Artificial Sequence: Synthetic oligonucleotide
ggcagaaggacuguuuaug

SEQ ID NO: 2598637 - RNA, 19 nt, Artificial Sequence
  Description of Artificial Sequence: Synthetic oligonucleotide
gguucugauaucgaugcca

SEQ ID NO: 2598638 - RNA, 19 nt, Artificial Sequence
  Description of Artificial Sequence: Synthetic oligonucleotide
uucugauaucgaugccaug

SEQ ID NO: 2598639 - RNA, 19 nt, Artificial Sequence
  Description of Artificial Sequence: Synthetic oligonucleotide
cagaaggacuguuuaugca

SEQ ID NO: 2598640 - RNA, 19 nt, Artificial Sequence
  Description of Artificial Sequence: Synthetic oligonucleotide
  modified_base (4)..(4): a, c, u, g, unknown or other
gaanguucagggccauugu

SEQ ID NO: 2598641 - RNA, 19 nt, Artificial Sequence
  Description of Artificial Sequence: Synthetic oligonucleotide
uccgaagcugcuuguuccu

SEQ ID NO: 2598642 - RNA, 19 nt, Artificial Sequence
  Description of Artificial Sequence: Synthetic oligonucleotide
cagggaacucggagcaggg

SEQ ID NO: 2598643 - RNA, 19 nt, Artificial Sequence
  Description of Artificial Sequence: Synthetic oligonucleotide
acucggagcagggaguuga

SEQ ID NO: 2598644 - RNA, 19 nt, Artificial Sequence
  Description of Artificial Sequence: Synthetic oligonucleotide
caccucaacacugggguug

SEQ ID NO: 2598645 - RNA, 19 nt, Artificial Sequence
  Description of Artificial Sequence: Synthetic oligonucleotide
uacuggccagagcacuuga

SEQ ID NO: 2598646 - RNA, 19 nt, Artificial Sequence
  Description of Artificial Sequence: Synthetic oligonucleotide
uucgggcacgaucccauuc

SEQ ID NO: 2598647 - RNA, 19 nt, Artificial Sequence
  Description of Artificial Sequence: Synthetic oligonucleotide
cagugacaucaaaucuccg

SEQ ID NO: 2598648 - RNA, 19 nt, Artificial Sequence
  Description of Artificial Sequence: Synthetic oligonucleotide
gagcacuugaggucauaga

SEQ ID NO: 2598649 - RNA, 19 nt, Artificial Sequence
  Description of Artificial Sequence: Synthetic oligonucleotide
guuucaucccauuggggcu

SEQ ID NO: 2598650 - RNA, 19 nt, Artificial Sequence
  Description of Artificial Sequence: Synthetic oligonucleotide
gucuagaucuagagaggag

SEQ ID NO: 2598651 - RNA, 19 nt, Artificial Sequence
  Description of Artificial Sequence: Synthetic oligonucleotide
guagacgaucuuccccuug

SEQ ID NO: 2598652 - RNA, 19 nt, Artificial Sequence
  Description of Artificial Sequence: Synthetic oligonucleotide
gacagguucugauaucgau

SEQ ID NO: 2598653 - RNA, 19 nt, Artificial Sequence
  Description of Artificial Sequence: Synthetic oligonucleotide
gucauagacaagagcucug

SEQ ID NO: 2598654 - RNA, 19 nt, Artificial Sequence
  Description of Artificial Sequence: Synthetic oligonucleotide
agggcagaauucucggaau

SEQ ID NO: 2598655 - RNA, 19 nt, Artificial Sequence
  Description of Artificial Sequence: Synthetic oligonucleotide
ugucuucgggcacgauccc

SEQ ID NO: 2598656 - RNA, 19 nt, Artificial Sequence
  Description of Artificial Sequence: Synthetic oligonucleotide
uccacacuacuggccagag

SEQ ID NO: 2598657 - RNA, 19 nt, Artificial Sequence
  Description of Artificial Sequence: Synthetic oligonucleotide
ggcacgaucccauucaccu

SEQ ID NO: 2598658 - RNA, 19 nt, Artificial Sequence
  Description of Artificial Sequence: Synthetic oligonucleotide
ucgaagucuucagaacuua

SEQ ID NO: 2598659 - RNA, 19 nt, Artificial Sequence
  Description of Artificial Sequence: Synthetic oligonucleotide
ggacuguuuaugcaucauc

SEQ ID NO: 2598660 - RNA, 19 nt, Artificial Sequence
  Description of Artificial Sequence: Synthetic oligonucleotide
augcaucaucuagggaaac

SEQ ID NO: 2598661 - RNA, 19 nt, Artificial Sequence
  Description of Artificial Sequence: Synthetic oligonucleotide
acgagcuggaaaacugcag

SEQ ID NO: 2598662 - RNA, 19 nt, Artificial Sequence
  Description of Artificial Sequence: Synthetic oligonucleotide
  modified_base (14)..(14): a, c, u, g, unknown or other
ccaggauacugaanguuca

SEQ ID NO: 2598663 - RNA, 19 nt, Artificial Sequence
  Description of Artificial Sequence: Synthetic oligonucleotide
uugcucuccuggucuggag

SEQ ID NO: 2598664 - RNA, 19 nt, Artificial Sequence
  Description of Artificial Sequence: Synthetic oligonucleotide
ugggguugcucuccugguc

SEQ ID NO: 2598665 - RNA, 19 nt, Artificial Sequence
  Description of Artificial Sequence: Synthetic oligonucleotide
guacaaagggcagaauucu

SEQ ID NO: 2598666 - RNA, 19 nt, Artificial Sequence
  Description of Artificial Sequence: Synthetic oligonucleotide
cacuuugauggguuucaca

SEQ ID NO: 2598667 - RNA, 19 nt, Artificial Sequence
  Description of Artificial Sequence: Synthetic oligonucleotide
uaucgaugccauggucaag

SEQ ID NO: 2598668 - RNA, 19 nt, Artificial Sequence
  Description of Artificial Sequence: Synthetic oligonucleotide
gaaaacugcagaggagaua

SEQ ID NO: 2598669 - RNA, 19 nt, Artificial Sequence
  Description of Artificial Sequence: Synthetic oligonucleotide
acacuacuggccagagcac

SEQ ID NO: 2598670 - RNA, 19 nt, Artificial Sequence
  Description of Artificial Sequence: Synthetic oligonucleotide
gcucuguguucaaagacug

SEQ ID NO: 2598671 - RNA, 19 nt, Artificial Sequence
  Description of Artificial Sequence: Synthetic oligonucleotide
cacgagcuggaaaacugca

SEQ ID NO: 2598672 - RNA, 19 nt, Artificial Sequence
  Description of Artificial Sequence: Synthetic oligonucleotide
agccagagcuguaaugcug

SEQ ID NO: 2598673 - RNA, 19 nt, Artificial Sequence
  Description of Artificial Sequence: Synthetic oligonucleotide
ucagggccauugucuucgg

SEQ ID NO: 2598674 - RNA, 19 nt, Artificial Sequence
  Description of Artificial Sequence: Synthetic oligonucleotide
cacucuggucuagaucuag

SEQ ID NO: 2598675 - RNA, 19 nt, Artificial Sequence
  Description of Artificial Sequence: Synthetic oligonucleotide
caccagggaacucggagca

SEQ ID NO: 2598676 - RNA, 19 nt, Artificial Sequence
  Description of Artificial Sequence: Synthetic oligonucleotide
cugccaccagggaacucgg

SEQ ID NO: 2598677 - RNA, 19 nt, Artificial Sequence
  Description of Artificial Sequence: Synthetic oligonucleotide
aagcugcuuguuccucccu

SEQ ID NO: 2598678 - RNA, 19 nt, Artificial Sequence
  Description of Artificial Sequence: Synthetic oligonucleotide
aguugacucgagggaacug

SEQ ID NO: 2598679 - RNA, 19 nt, Artificial Sequence
  Description of Artificial Sequence: Synthetic oligonucleotide
ggucuagaucuagagagga

SEQ ID NO: 2598680 - RNA, 19 nt, Artificial Sequence
  Description of Artificial Sequence: Synthetic oligonucleotide
gggcagaauucucggaaug

SEQ ID NO: 2598681 - RNA, 19 nt, Artificial Sequence
  Description of Artificial Sequence: Synthetic oligonucleotide
cucaacacugggguugcuc

SEQ ID NO: 2598682 - RNA, 19 nt, Artificial Sequence
  Description of Artificial Sequence: Synthetic oligonucleotide
uuguuccucccuggcaaug

SEQ ID NO: 2598683 - RNA, 19 nt, Artificial Sequence
  Description of Artificial Sequence: Synthetic oligonucleotide
ugugcucaacugguccaca

SEQ ID NO: 2598684 - RNA, 19 nt, Artificial Sequence
  Description of Artificial Sequence: Synthetic oligonucleotide
gcuuguuccucccuggcaa

SEQ ID NO: 2598685 - RNA, 19 nt, Artificial Sequence
  Description of Artificial Sequence: Synthetic oligonucleotide
guugacucgagggaacugu

SEQ ID NO: 2598686 - RNA, 19 nt, Artificial Sequence
  Description of Artificial Sequence: Synthetic oligonucleotide
  modified_base (7)..(7): a, c, u, g, unknown or other
acugaanguucagggccau

SEQ ID NO: 2598687 - RNA, 19 nt, Artificial Sequence
  Description of Artificial Sequence: Synthetic oligonucleotide
ugguuccaccuucugucuu

SEQ ID NO: 2598688 - RNA, 19 nt, Artificial Sequence
  Description of Artificial Sequence: Synthetic oligonucleotide
gccauugucuucgggcacg

SEQ ID NO: 2598689 - RNA, 19 nt, Artificial Sequence
  Description of Artificial Sequence: Synthetic oligonucleotide
cuacuggccagagcacuug

SEQ ID NO: 2598690 - RNA, 19 nt, Artificial Sequence
  Description of Artificial Sequence: Synthetic oligonucleotide
caggcagaaggacuguuua

SEQ ID NO: 2598691 - RNA, 19 nt, Artificial Sequence
  Description of Artificial Sequence: Synthetic oligonucleotide
aacucggagcagggaguug

SEQ ID NO: 2598692 - RNA, 19 nt, Artificial Sequence
  Description of Artificial Sequence: Synthetic oligonucleotide
ucaccucaacacugggguu

SEQ ID NO: 2598693 - RNA, 19 nt, Artificial Sequence
  Description of Artificial Sequence: Synthetic oligonucleotide
cccugugcucaacuggucc

SEQ ID NO: 2598694 - RNA, 19 nt, Artificial Sequence
  Description of Artificial Sequence: Synthetic oligonucleotide
gggccauugucuucgggca

SEQ ID NO: 2598695 - RNA, 19 nt, Artificial Sequence
  Description of Artificial Sequence: Synthetic oligonucleotide
acaagagcucuguguucaa

SEQ ID NO: 2598696 - RNA, 19 nt, Artificial Sequence
  Description of Artificial Sequence: Synthetic oligonucleotide
aaacugcagaggagauagu

SEQ ID NO: 2598697 - RNA, 19 nt, Artificial Sequence
  Description of Artificial Sequence: Synthetic oligonucleotide
uucaggcagaaggacuguu

SEQ ID NO: 2598698 - RNA, 19 nt, Artificial Sequence
  Description of Artificial Sequence: Synthetic oligonucleotide
ggucuggagacccugugcu

SEQ ID NO: 2598699 - RNA, 19 nt, Artificial Sequence
  Description of Artificial Sequence: Synthetic oligonucleotide
acucuggucuagaucuaga

SEQ ID NO: 2598700 - RNA, 19 nt, Artificial Sequence
  Description of Artificial Sequence: Synthetic oligonucleotide
gcucuccuggucuggagac

SEQ ID NO: 2598701 - RNA, 19 nt, Artificial Sequence
  Description of Artificial Sequence: Synthetic oligonucleotide
gcucaacugguccacacua

SEQ ID NO: 2598702 - RNA, 19 nt, Artificial Sequence
  Description of Artificial Sequence: Synthetic oligonucleotide
ggucauagacaagagcucu

SEQ ID NO: 2598703 - RNA, 19 nt, Artificial Sequence
  Description of Artificial Sequence: Synthetic oligonucleotide
ccaggggcgagacucgggc

SEQ ID NO: 2598704 - RNA, 19 nt, Artificial Sequence
  Description of Artificial Sequence: Synthetic oligonucleotide
cucggagcagggaguugac

SEQ ID NO: 2598705 - RNA, 19 nt, Artificial Sequence
  Description of Artificial Sequence: Synthetic oligonucleotide
ggccagagcacuugagguc

SEQ ID NO: 2598706 - RNA, 19 nt, Artificial Sequence
  Description of Artificial Sequence: Synthetic oligonucleotide
cagggccauugucuucggg

SEQ ID NO: 2598707 - RNA, 19 nt, Artificial Sequence
  Description of Artificial Sequence: Synthetic oligonucleotide
agcuguaaugcugguuuua

SEQ ID NO: 2598708 - RNA, 19 nt, Artificial Sequence
  Description of Artificial Sequence: Synthetic oligonucleotide
gcacuugaggucauagaca

SEQ ID NO: 2598709 - RNA, 19 nt, Artificial Sequence
  Description of Artificial Sequence: Synthetic oligonucleotide
aggacuguuuaugcaucau

SEQ ID NO: 2598710 - RNA, 19 nt, Artificial Sequence
  Description of Artificial Sequence: Synthetic oligonucleotide
ggaacuguggcaggugcuc

SEQ ID NO: 2598711 - RNA, 19 nt, Artificial Sequence
  Description of Artificial Sequence: Synthetic oligonucleotide
gacccugugcucaacuggu

SEQ ID NO: 2598712 - RNA, 19 nt, Artificial Sequence
  Description of Artificial Sequence: Synthetic oligonucleotide
guucugauaucgaugccau

SEQ ID NO: 2598713 - RNA, 19 nt, Artificial Sequence
  Description of Artificial Sequence: Synthetic oligonucleotide
cugauaucgaugccauggu

SEQ ID NO: 2598714 - RNA, 19 nt, Artificial Sequence
  Description of Artificial Sequence: Synthetic oligonucleotide
gccagagcacuugagguca

SEQ ID NO: 2598715 - RNA, 19 nt, Artificial Sequence
  Description of Artificial Sequence: Synthetic oligonucleotide
cuuugauggguuucacaau

SEQ ID NO: 2598716 - RNA, 19 nt, Artificial Sequence
  Description of Artificial Sequence: Synthetic oligonucleotide
cucuccuggucuggagacc

SEQ ID NO: 2598717 - RNA, 19 nt, Artificial Sequence
  Description of Artificial Sequence: Synthetic oligonucleotide
gcgagacucgggcaccucc

SEQ ID NO: 2598718 - RNA, 19 nt, Artificial Sequence
  Description of Artificial Sequence: Synthetic oligonucleotide
uuccaccuucugucuuucu

SEQ ID NO: 2598719 - RNA, 19 nt, Artificial Sequence
  Description of Artificial Sequence: Synthetic oligonucleotide
cggagcagggaguugacuc

SEQ ID NO: 2598720 - RNA, 19 nt, Artificial Sequence
  Description of Artificial Sequence: Synthetic oligonucleotide
ggaguugacucgagggaac

SEQ ID NO: 2598721 - RNA, 19 nt, Artificial Sequence
  Description of Artificial Sequence: Synthetic oligonucleotide
ugccaccagggaacucgga

SEQ ID NO: 2598722 - RNA, 19 nt, Artificial Sequence
  Description of Artificial Sequence: Synthetic oligonucleotide
gcaucaucuagggaaaccu

SEQ ID NO: 2598723 - RNA, 19 nt, Artificial Sequence
  Description of Artificial Sequence: Synthetic oligonucleotide
ugccauggucaagguuucc

SEQ ID NO: 2598724 - RNA, 19 nt, Artificial Sequence
  Description of Artificial Sequence: Synthetic oligonucleotide
gagaacaguuucaucccau

SEQ ID NO: 2598725 - RNA, 19 nt, Artificial Sequence
  Description of Artificial Sequence: Synthetic oligonucleotide
acuacuggccagagcacuu

SEQ ID NO: 2598726 - RNA, 19 nt, Artificial Sequence
  Description of Artificial Sequence: Synthetic oligonucleotide
ccuggcaaugaagacacga

SEQ ID NO: 2598727 - RNA, 19 nt, Artificial Sequence
  Description of Artificial Sequence: Synthetic oligonucleotide
guugcucuccuggucugga

SEQ ID NO: 2598728 - RNA, 19 nt, Artificial Sequence
  Description of Artificial Sequence: Synthetic oligonucleotide
gaguugacucgagggaacu

SEQ ID NO: 2598729 - RNA, 19 nt, Artificial Sequence
  Description of Artificial Sequence: Synthetic oligonucleotide
acucgggcaccuccaggau

SEQ ID NO: 2598730 - RNA, 19 nt, Artificial Sequence
  Description of Artificial Sequence: Synthetic oligonucleotide
gguugcucuccuggucugg

SEQ ID NO: 2598731 - RNA, 19 nt, Artificial Sequence
  Description of Artificial Sequence: Synthetic oligonucleotide
cgagcuggaaaacugcaga

SEQ ID NO: 2598732 - RNA, 19 nt, Artificial Sequence
  Description of Artificial Sequence: Synthetic oligonucleotide
acccugugcucaacugguc

SEQ ID NO: 2598733 - RNA, 19 nt, Artificial Sequence
  Description of Artificial Sequence: Synthetic oligonucleotide
accagggaacucggagcag

SEQ ID NO: 2598734 - RNA, 19 nt, Artificial Sequence
  Description of Artificial Sequence: Synthetic oligonucleotide
cuccugguuccaccuucug

SEQ ID NO: 2598735 - RNA, 19 nt, Artificial Sequence
  Description of Artificial Sequence: Synthetic oligonucleotide
  modified_base (16)..(16): a, c, u, g, unknown or other
cuccaggauacugaanguu

SEQ ID NO: 2598736 - RNA, 19 nt, Artificial Sequence
  Description of Artificial Sequence: Synthetic oligonucleotide
agggaacucggagcaggga

SEQ ID NO: 2598737 - RNA, 19 nt, Artificial Sequence
  Description of Artificial Sequence: Synthetic oligonucleotide
agcagggaguugacucgag

SEQ ID NO: 2598738 - RNA, 19 nt, Artificial Sequence
  Description of Artificial Sequence: Synthetic oligonucleotide
gccauggucaagguuucca

SEQ ID NO: 2598739 - RNA, 19 nt, Artificial Sequence
  Description of Artificial Sequence: Synthetic oligonucleotide
gcagaggagauaguacaaa

SEQ ID NO: 2598740 - RNA, 19 nt, Artificial Sequence
  Description of Artificial Sequence: Synthetic oligonucleotide
ggguugcucuccuggucug

SEQ ID NO: 2598741 - RNA, 19 nt, Artificial Sequence
  Description of Artificial Sequence: Synthetic oligonucleotide
ggccauugucuucgggcac

SEQ ID NO: 2598742 - RNA, 19 nt, Artificial Sequence
  Description of Artificial Sequence: Synthetic oligonucleotide
gucuucgggcacgauccca

SEQ ID NO: 2598743 - RNA, 19 nt, Artificial Sequence
  Description of Artificial Sequence: Synthetic oligonucleotide
uggagacccugugcucaac

SEQ ID NO: 2598744 - RNA, 19 nt, Artificial Sequence
  Description of Artificial Sequence: Synthetic oligonucleotide
accuggcgggccaggggcg

SEQ ID NO: 2598745 - RNA, 19 nt, Artificial Sequence
  Description of Artificial Sequence: Synthetic oligonucleotide
cugguuccaccuucugucu

SEQ ID NO: 2598746 - RNA, 19 nt, Artificial Sequence
  Description of Artificial Sequence: Synthetic oligonucleotide
caagagcucuguguucaaa

SEQ ID NO: 2598747 - RNA, 19 nt, Artificial Sequence
  Description of Artificial Sequence: Synthetic oligonucleotide
ggcagaauucucggaaugu

SEQ ID NO: 2598748 - RNA, 19 nt, Artificial Sequence
  Description of Artificial Sequence: Synthetic oligonucleotide
gucgaagucuucagaacuu

SEQ ID NO: 2598749 - RNA, 19 nt, Artificial Sequence
  Description of Artificial Sequence: Synthetic oligonucleotide
gagcuguaaugcugguuuu

SEQ ID NO: 2598750 - RNA, 19 nt, Artificial Sequence
  Description of Artificial Sequence: Synthetic oligonucleotide
cgaucuuccccuugucauc

SEQ ID NO: 2598751 - RNA, 19 nt, Artificial Sequence
  Description of Artificial Sequence: Synthetic oligonucleotide
gcacgaucccauucaccuc

SEQ ID NO: 2598752 - RNA, 19 nt, Artificial Sequence
  Description of Artificial Sequence: Synthetic oligonucleotide
cuggagacccugugcucaa

SEQ ID NO: 2598753 - RNA, 19 nt, Artificial Sequence
  Description of Artificial Sequence: Synthetic oligonucleotide
cggaaugugacagguucug

SEQ ID NO: 2598754 - RNA, 19 nt, Artificial Sequence
  Description of Artificial Sequence: Synthetic oligonucleotide
ggucaagguuuccaaggau

SEQ ID NO: 2598755 - RNA, 19 nt, Artificial Sequence
  Description of Artificial Sequence: Synthetic oligonucleotide
cucgggcaccuccaggaua

SEQ ID NO: 2598756 - RNA, 19 nt, Artificial Sequence
  Description of Artificial Sequence: Synthetic oligonucleotide
gggcacgaucccauucacc

SEQ ID NO: 2598757 - RNA, 19 nt, Artificial Sequence
  Description of Artificial Sequence: Synthetic oligonucleotide
cacuacuggccagagcacu

SEQ ID NO: 2598758 - RNA, 19 nt, Artificial Sequence
  Description of Artificial Sequence: Synthetic oligonucleotide
gaacucggagcagggaguu

SEQ ID NO: 2598759 - RNA, 19 nt, Artificial Sequence
  Description of Artificial Sequence: Synthetic oligonucleotide
caauaagcuccuggucgaa

SEQ ID NO: 2598760 - RNA, 19 nt, Artificial Sequence
  Description of Artificial Sequence: Synthetic oligonucleotide
ggagacccugugcucaacu

SEQ ID NO: 2598761 - RNA, 19 nt, Artificial Sequence
  Description of Artificial Sequence: Synthetic oligonucleotide
ggcuccaagccagagcugu

SEQ ID NO: 2598762 - RNA, 19 nt, Artificial Sequence
  Description of Artificial Sequence: Synthetic oligonucleotide
ccacacuacuggccagagc

SEQ ID NO: 2598763 - RNA, 19 nt, Artificial Sequence
  Description of Artificial Sequence: Synthetic oligonucleotide
ggaaaacugcagaggagau

SEQ ID NO: 2598764 - RNA, 19 nt, Artificial Sequence
  Description of Artificial Sequence: Synthetic oligonucleotide
  modified_base (19)..(19): a, c, u, g, unknown or other
caccuccaggauacugaan

SEQ ID NO: 2598765 - RNA, 19 nt, Artificial Sequence
  Description of Artificial Sequence: Synthetic oligonucleotide
gccaccacaccuggcgggc

SEQ ID NO: 2598766 - RNA, 19 nt, Artificial Sequence
  Description of Artificial Sequence: Synthetic oligonucleotide
gcuguaaugcugguuuuau

SEQ ID NO: 2598767 - RNA, 19 nt, Artificial Sequence
  Description of Artificial Sequence: Synthetic oligonucleotide
ggaacucggagcagggagu

SEQ ID NO: 2598768 - RNA, 19 nt, Artificial Sequence
  Description of Artificial Sequence: Synthetic oligonucleotide
caaaucuccgaagcugcuu

SEQ ID NO: 2598769 - RNA, 19 nt, Artificial Sequence
  Description of Artificial Sequence: Synthetic oligonucleotide
cgggccaggggcgagacuc

SEQ ID NO: 2598770 - RNA, 19 nt, Artificial Sequence
  Description of Artificial Sequence: Synthetic oligonucleotide
ucaucccauuggggcucca

SEQ ID NO: 2598771 - RNA, 19 nt, Artificial Sequence
  Description of Artificial Sequence: Synthetic oligonucleotide
ggggcgagacucgggcacc

SEQ ID NO: 2598772 - RNA, 19 nt, Artificial Sequence
  Description of Artificial Sequence: Synthetic oligonucleotide
caucccauuggggcuccaa

SEQ ID NO: 2598773 - RNA, 19 nt, Artificial Sequence
  Description of Artificial Sequence: Synthetic oligonucleotide
gccaggggcgagacucggg

SEQ ID NO: 2598774 - RNA, 19 nt, Artificial Sequence
  Description of Artificial Sequence: Synthetic oligonucleotide
acgaucccauucaccucaa

SEQ ID NO: 2598775 - RNA, 19 nt, Artificial Sequence
  Description of Artificial Sequence: Synthetic oligonucleotide
cuucaggcagaaggacugu

SEQ ID NO: 2598776 - RNA, 19 nt, Artificial Sequence
  Description of Artificial Sequence: Synthetic oligonucleotide
cccuugucaucuccagaga

SEQ ID NO: 2598777 - RNA, 19 nt, Artificial Sequence
  Description of Artificial Sequence: Synthetic oligonucleotide
  modified_base (17)..(17): a, c, u, g, unknown or other
ccuccaggauacugaangu

SEQ ID NO: 2598778 - RNA, 19 nt, Artificial Sequence
  Description of Artificial Sequence: Synthetic oligonucleotide
cgagacucgggcaccucca

SEQ ID NO: 2598779 - RNA, 19 nt, Artificial Sequence
  Description of Artificial Sequence: Synthetic oligonucleotide
ccgaagcugcuuguuccuc

SEQ ID NO: 2598780 - RNA, 19 nt, Artificial Sequence
  Description of Artificial Sequence: Synthetic oligonucleotide
cgggcacgaucccauucac

SEQ ID NO: 2598781 - RNA, 19 nt, Artificial Sequence
  Description of Artificial Sequence: Synthetic oligonucleotide
cagagcacuugaggucaua

SEQ ID NO: 2598782 - RNA, 19 nt, Artificial Sequence
  Description of Artificial Sequence: Synthetic oligonucleotide
cuccuggucuggagacccu

SEQ ID NO: 2598783 - RNA, 19 nt, Artificial Sequence
  Description of Artificial Sequence: Synthetic oligonucleotide
gcuccuggucgaagucuuc

SEQ ID NO: 2598784 - RNA, 19 nt, Artificial Sequence
  Description of Artificial Sequence: Synthetic oligonucleotide
ccauugucuucgggcacga

SEQ ID NO: 2598785 - RNA, 19 nt, Artificial Sequence
  Description of Artificial Sequence: Synthetic oligonucleotide
cuucgggcacgaucccauu

SEQ ID NO: 2598786 - RNA, 19 nt, Artificial Sequence
  Description of Artificial Sequence: Synthetic oligonucleotide
cgaucccauucaccucaac

SEQ ID NO: 2598787 - RNA, 19 nt, Artificial Sequence
  Description of Artificial Sequence: Synthetic oligonucleotide
  modified_base (6)..(6): a, c, u, g, unknown or other
cugaanguucagggccauu

SEQ ID NO: 2598788 - RNA, 19 nt, Artificial Sequence
  Description of Artificial Sequence: Synthetic oligonucleotide
gugcuccugguuccaccuu

SEQ ID NO: 2598789 - RNA, 19 nt, Artificial Sequence
  Description of Artificial Sequence: Synthetic oligonucleotide
ggcgagacucgggcaccuc

SEQ ID NO: 2598790 - RNA, 19 nt, Artificial Sequence
  Description of Artificial Sequence: Synthetic oligonucleotide
cauugucuucgggcacgau

SEQ ID NO: 2598791 - RNA, 19 nt, Artificial Sequence
  Description of Artificial Sequence: Synthetic oligonucleotide
ggcugccaccagggaacuc

SEQ ID NO: 2598792 - RNA, 19 nt, Artificial Sequence
  Description of Artificial Sequence: Synthetic oligonucleotide
cgagggaacuguggcaggu

SEQ ID NO: 2598793 - RNA, 19 nt, Artificial Sequence
  Description of Artificial Sequence: Synthetic oligonucleotide
gggcgagacucgggcaccu

SEQ ID NO: 2598794 - RNA, 19 nt, Artificial Sequence
  Description of Artificial Sequence: Synthetic oligonucleotide
ccagagcacuugaggucau

SEQ ID NO: 2598795 - RNA, 19 nt, Artificial Sequence
  Description of Artificial Sequence: Synthetic oligonucleotide
gcgggccaggggcgagacu

SEQ ID NO: 2598796 - RNA, 19 nt, Artificial Sequence
  Description of Artificial Sequence: Synthetic oligonucleotide
cgggcaccuccaggauacu

SEQ ID NO: 2598797 - RNA, 19 nt, Artificial Sequence
  Description of Artificial Sequence: Synthetic oligonucleotide
ucauaagucaggaugacag

SEQ ID NO: 2598798 - RNA, 19 nt, Artificial Sequence
  Description of Artificial Sequence: Synthetic oligonucleotide
cauauggagauguugaagg

SEQ ID NO: 2598799 - RNA, 19 nt, Artificial Sequence
  Description of Artificial Sequence: Synthetic oligonucleotide
aagcagagacguuuuaccc

SEQ ID NO: 2598800 - RNA, 19 nt, Artificial Sequence
  Description of Artificial Sequence: Synthetic oligonucleotide
uuggaagagacacagcugc

SEQ ID NO: 2598801 - RNA, 19 nt, Artificial Sequence
  Description of Artificial Sequence: Synthetic oligonucleotide
gauuuaguccuuuugggug

SEQ ID NO: 2598802 - RNA, 19 nt, Artificial Sequence
  Description of Artificial Sequence: Synthetic oligonucleotide
agacguuuuacccacguuc

SEQ ID NO: 2598803 - RNA, 19 nt, Artificial Sequence
  Description of Artificial Sequence: Synthetic oligonucleotide
agcacaucugcucagcggc

SEQ ID NO: 2598804 - RNA, 19 nt, Artificial Sequence
  Description of Artificial Sequence: Synthetic oligonucleotide
uuuguuucccacaauggca

SEQ ID NO: 2598805 - RNA, 19 nt, Artificial Sequence
  Description of Artificial Sequence: Synthetic oligonucleotide
guuauauccacaaucuggg

SEQ ID NO: 2598806 - RNA, 19 nt, Artificial Sequence
  Description of Artificial Sequence: Synthetic oligonucleotide
caaacaaggucucaaacag

SEQ ID NO: 2598807 - RNA, 19 nt, Artificial Sequence
  Description of Artificial Sequence: Synthetic oligonucleotide
aagucaggaugacagcagc

SEQ ID NO: 2598808 - RNA, 19 nt, Artificial Sequence
  Description of Artificial Sequence: Synthetic oligonucleotide
aggaucuucuuguaaaggg

SEQ ID NO: 2598809 - RNA, 19 nt, Artificial Sequence
  Description of Artificial Sequence: Synthetic oligonucleotide
aguacauggagcccaggcc

SEQ ID NO: 2598810 - RNA, 19 nt, Artificial Sequence
  Description of Artificial Sequence: Synthetic oligonucleotide
cacaauggcaaacaaacag

SEQ ID NO: 2598811 - RNA, 19 nt, Artificial Sequence
  Description of Artificial Sequence: Synthetic oligonucleotide
uuuacccacguucaugucc

SEQ ID NO: 2598812 - RNA, 19 nt, Artificial Sequence
  Description of Artificial Sequence: Synthetic oligonucleotide
aggagguccacguuguacc

SEQ ID NO: 2598813 - RNA, 19 nt, Artificial Sequence
  Description of Artificial Sequence: Synthetic oligonucleotide
auggcaaacaaacagucgu

SEQ ID NO: 2598814 - RNA, 19 nt, Artificial Sequence
  Description of Artificial Sequence: Synthetic oligonucleotide
aaacaaacagucguuguug

SEQ ID NO: 2598815 - RNA, 19 nt, Artificial Sequence
  Description of Artificial Sequence: Synthetic oligonucleotide
auauccacaaucugggaug

SEQ ID NO: 2598816 - RNA, 19 nt, Artificial Sequence
  Description of Artificial Sequence: Synthetic oligonucleotide
aaagcacaucugcucagcg

SEQ ID NO: 2598817 - RNA, 19 nt, Artificial Sequence
  Description of Artificial Sequence: Synthetic oligonucleotide
cuuuguuucccacaauggc

SEQ ID NO: 2598818 - RNA, 19 nt, Artificial Sequence
  Description of Artificial Sequence: Synthetic oligonucleotide
uucucccugaucuccaugg

SEQ ID NO: 2598819 - RNA, 19 nt, Artificial Sequence
  Description of Artificial Sequence: Synthetic oligonucleotide
gguuauauccacaaucugg

SEQ ID NO: 2598820 - RNA, 19 nt, Artificial Sequence
  Description of Artificial Sequence: Synthetic oligonucleotide
cagauuuaguccuuuuggg

SEQ ID NO: 2598821 - RNA, 19 nt, Artificial Sequence
  Description of Artificial Sequence: Synthetic oligonucleotide
gaagcgacgcuccauguag

SEQ ID NO: 2598822 - RNA, 19 nt, Artificial Sequence
  Description of Artificial Sequence: Synthetic oligonucleotide
ucccauauggagauguuga

SEQ ID NO: 2598823 - RNA, 19 nt, Artificial Sequence
  Description of Artificial Sequence: Synthetic oligonucleotide
ucuagcugcaccugccugg

SEQ ID NO: 2598824 - RNA, 19 nt, Artificial Sequence
  Description of Artificial Sequence: Synthetic oligonucleotide
aaacagucguuguuggcug

SEQ ID NO: 2598825 - RNA, 19 nt, Artificial Sequence
  Description of Artificial Sequence: Synthetic oligonucleotide
uuacccacguucauguccc

SEQ ID NO: 2598826 - RNA, 19 nt, Artificial Sequence
  Description of Artificial Sequence: Synthetic oligonucleotide
agaagcacgaucuucccgu

SEQ ID NO: 2598827 - RNA, 19 nt, Artificial Sequence
  Description of Artificial Sequence: Synthetic oligonucleotide
uaagucaggaugacagcag

SEQ ID NO: 2598828 - RNA, 19 nt, Artificial Sequence
  Description of Artificial Sequence: Synthetic oligonucleotide
ugguucacaucauaaguca

SEQ ID NO: 2598829 - RNA, 19 nt, Artificial Sequence
  Description of Artificial Sequence: Synthetic oligonucleotide
ugcggugucccauauggag

SEQ ID NO: 2598830 - RNA, 19 nt, Artificial Sequence
  Description of Artificial Sequence: Synthetic oligonucleotide
guuguacccgguuuuggcg

SEQ ID NO: 2598831 - RNA, 19 nt, Artificial Sequence
  Description of Artificial Sequence: Synthetic oligonucleotide
ucccugaucuccauggccc

SEQ ID NO: 2598832 - RNA, 19 nt, Artificial Sequence
  Description of Artificial Sequence: Synthetic oligonucleotide
acaaacagucguuguuggc

SEQ ID NO: 2598833 - RNA, 19 nt, Artificial Sequence
  Description of Artificial Sequence: Synthetic oligonucleotide
auggagauguugaaggaac

SEQ ID NO: 2598834 - RNA, 19 nt, Artificial Sequence
  Description of Artificial Sequence: Synthetic oligonucleotide
aggugcagcacccagauuu

SEQ ID NO: 2598835 - RNA, 19 nt, Artificial Sequence
  Description of Artificial Sequence: Synthetic oligonucleotide
uucuuguaaagggccaugg

SEQ ID NO: 2598836 - RNA, 19 nt, Artificial Sequence
  Description of Artificial Sequence: Synthetic oligonucleotide
agcacgaucuucccguccg

SEQ ID NO: 2598837 - RNA, 19 nt, Artificial Sequence
  Description of Artificial Sequence: Synthetic oligonucleotide
ucugucaggcccagaaacc

SEQ ID NO: 2598838 - RNA, 19 nt, Artificial Sequence
  Description of Artificial Sequence: Synthetic oligonucleotide
auuuaguccuuuugggugu

SEQ ID NO: 2598839 - RNA, 19 nt, Artificial Sequence
  Description of Artificial Sequence: Synthetic oligonucleotide
cucggcaguacauggagcc

SEQ ID NO: 2598840 - RNA, 19 nt, Artificial Sequence
  Description of Artificial Sequence: Synthetic oligonucleotide
cuuugccgggcaaucaugg

SEQ ID NO: 2598841 - RNA, 19 nt, Artificial Sequence
  Description of Artificial Sequence: Synthetic oligonucleotide
gagauguugaaggaacgcc

SEQ ID NO: 2598842 - RNA, 19 nt, Artificial Sequence
  Description of Artificial Sequence: Synthetic oligonucleotide
ucugggauggcuccucagc

SEQ ID NO: 2598843 - RNA, 19 nt, Artificial Sequence
  Description of Artificial Sequence: Synthetic oligonucleotide
aagcacgaucuucccgucc

SEQ ID NO: 2598844 - RNA, 19 nt, Artificial Sequence
  Description of Artificial Sequence: Synthetic oligonucleotide
ucuuguaaagggccauggc

SEQ ID NO: 2598845 - RNA, 19 nt, Artificial Sequence
  Description of Artificial Sequence: Synthetic oligonucleotide
uuuuggguguuuugcagcu

SEQ ID NO: 2598846 - RNA, 19 nt, Artificial Sequence
  Description of Artificial Sequence: Synthetic oligonucleotide
ucucaaagcacaucugcuc

SEQ ID NO: 2598847 - RNA, 19 nt, Artificial Sequence
  Description of Artificial Sequence: Synthetic oligonucleotide
ugcuucagguagaaggcgc

SEQ ID NO: 2598848 - RNA, 19 nt, Artificial Sequence
  Description of Artificial Sequence: Synthetic oligonucleotide
auaagucaggaugacagca

SEQ ID NO: 2598849 - RNA, 19 nt, Artificial Sequence
  Description of Artificial Sequence: Synthetic oligonucleotide
acuuuguuucccacaaugg

SEQ ID NO: 2598850 - RNA, 19 nt, Artificial Sequence
  Description of Artificial Sequence: Synthetic oligonucleotide
ugguuauauccacaaucug

SEQ ID NO: 2598851 - RNA, 19 nt, Artificial Sequence
  Description of Artificial Sequence: Synthetic oligonucleotide
caucuugugcuucaggauc

SEQ ID NO: 2598852 - RNA, 19 nt, Artificial Sequence
  Description of Artificial Sequence: Synthetic oligonucleotide
ccagauuuaguccuuuugg

SEQ ID NO: 2598853 - RNA, 19 nt, Artificial Sequence
  Description of Artificial Sequence: Synthetic oligonucleotide
cauaagucaggaugacagc

SEQ ID NO: 2598854 - RNA, 19 nt, Artificial Sequence
  Description of Artificial Sequence: Synthetic oligonucleotide
uugccgggcaaucaugggc

SEQ ID NO: 2598855 - RNA, 19 nt, Artificial Sequence
  Description of Artificial Sequence: Synthetic oligonucleotide
aagagacacagcugcccag

SEQ ID NO: 2598856 - RNA, 19 nt, Artificial Sequence
  Description of Artificial Sequence: Synthetic oligonucleotide
gguaccuuggaagagacac

SEQ ID NO: 2598857 - RNA, 19 nt, Artificial Sequence
  Description of Artificial Sequence: Synthetic oligonucleotide
ucuagcaucuugugcuuca

SEQ ID NO: 2598858 - RNA, 19 nt, Artificial Sequence
  Description of Artificial Sequence: Synthetic oligonucleotide
uuguacccgguuuuggcgc

SEQ ID NO: 2598859 - RNA, 19 nt, Artificial Sequence
  Description of Artificial Sequence: Synthetic oligonucleotide
agagacacagcugcccagc

SEQ ID NO: 2598860 - RNA, 19 nt, Artificial Sequence
  Description of Artificial Sequence: Synthetic oligonucleotide
agcagagacguuuuaccca

SEQ ID NO: 2598861 - RNA, 19 nt, Artificial Sequence
  Description of Artificial Sequence: Synthetic oligonucleotide
auauggagauguugaagga

SEQ ID NO: 2598862 - RNA, 19 nt, Artificial Sequence
  Description of Artificial Sequence: Synthetic oligonucleotide
gcugguuauauccacaauc

SEQ ID NO: 2598863 - RNA, 19 nt, Artificial Sequence
  Description of Artificial Sequence: Synthetic oligonucleotide
agaaaccuguccuccagcu

SEQ ID NO: 2598864 - RNA, 19 nt, Artificial Sequence
  Description of Artificial Sequence: Synthetic oligonucleotide
gucaggaugacagcagccg

SEQ ID NO: 2598865 - RNA, 19 nt, Artificial Sequence
  Description of Artificial Sequence: Synthetic oligonucleotide
cugagggugguucacauca

SEQ ID NO: 2598866 - RNA, 19 nt, Artificial Sequence
  Description of Artificial Sequence: Synthetic oligonucleotide
cacaaucugggauggcucc

SEQ ID NO: 2598867 - RNA, 19 nt, Artificial Sequence
  Description of Artificial Sequence: Synthetic oligonucleotide
acaauggcaaacaaacagu

SEQ ID NO: 2598868 - RNA, 19 nt, Artificial Sequence
  Description of Artificial Sequence: Synthetic oligonucleotide
ucagguagaaggcgccgcc

SEQ ID NO: 2598869 - RNA, 19 nt, Artificial Sequence
  Description of Artificial Sequence: Synthetic oligonucleotide
gaaggcgccgcccacggug

SEQ ID NO: 2598870 - RNA, 19 nt, Artificial Sequence
  Description of Artificial Sequence: Synthetic oligonucleotide
ugccgggcaaucaugggca

SEQ ID NO: 2598871 - RNA, 19 nt, Artificial Sequence
  Description of Artificial Sequence: Synthetic oligonucleotide
uccuuuuggguguuuugca

SEQ ID NO: 2598872 - RNA, 19 nt, Artificial Sequence
  Description of Artificial Sequence: Synthetic oligonucleotide
cucccucucaucuagcauc

SEQ ID NO: 2598873 - RNA, 19 nt, Artificial Sequence
  Description of Artificial Sequence: Synthetic oligonucleotide
aggccauggaacugcuccc

SEQ ID NO: 2598874 - RNA, 19 nt, Artificial Sequence
  Description of Artificial Sequence: Synthetic oligonucleotide
ucucaucuagcaucuugug

SEQ ID NO: 2598875 - RNA, 19 nt, Artificial Sequence
  Description of Artificial Sequence: Synthetic oligonucleotide
agcgcugaagcagagacgu

SEQ ID NO: 2598876 - RNA, 19 nt, Artificial Sequence
  Description of Artificial Sequence: Synthetic oligonucleotide
gaagagacacagcugccca

SEQ ID NO: 2598877 - RNA, 19 nt, Artificial Sequence
  Description of Artificial Sequence: Synthetic oligonucleotide
cauggaacugcucccgccc

SEQ ID NO: 2598878 - RNA, 19 nt, Artificial Sequence
  Description of Artificial Sequence: Synthetic oligonucleotide
guugaaggaacgccacugc

SEQ ID NO: 2598879 - RNA, 19 nt, Artificial Sequence
  Description of Artificial Sequence: Synthetic oligonucleotide
agguccacguuguacccgg

SEQ ID NO: 2598880 - RNA, 19 nt, Artificial Sequence
  Description of Artificial Sequence: Synthetic oligonucleotide
ggucucaaagcacaucugc

SEQ ID NO: 2598881 - RNA, 19 nt, Artificial Sequence
  Description of Artificial Sequence: Synthetic oligonucleotide
ucaggugcagcacccagau

SEQ ID NO: 2598882 - RNA, 19 nt, Artificial Sequence
  Description of Artificial Sequence: Synthetic oligonucleotide
uuugccgggcaaucauggg

SEQ ID NO: 2598883 - RNA, 19 nt, Artificial Sequence
  Description of Artificial Sequence: Synthetic oligonucleotide
cuccucagcccuuugccgg

SEQ ID NO: 2598884 - RNA, 19 nt, Artificial Sequence
  Description of Artificial Sequence: Synthetic oligonucleotide
uccacaaucugggauggcu

SEQ ID NO: 2598885 - RNA, 19 nt, Artificial Sequence
  Description of Artificial Sequence: Synthetic oligonucleotide
agucguuguuggcuguuuc

SEQ ID NO: 2598886 - RNA, 19 nt, Artificial Sequence
  Description of Artificial Sequence: Synthetic oligonucleotide
cauggcccgauccauggcc

SEQ ID NO: 2598887 - RNA, 19 nt, Artificial Sequence
  Description of Artificial Sequence: Synthetic oligonucleotide
aggaugacagcagccgccc

SEQ ID NO: 2598888 - RNA, 19 nt, Artificial Sequence
  Description of Artificial Sequence: Synthetic oligonucleotide
uccauguagcgcugaagca

SEQ ID NO: 2598889 - RNA, 19 nt, Artificial Sequence
  Description of Artificial Sequence: Synthetic oligonucleotide
aacugcucccgcccugcgg

SEQ ID NO: 2598890 - RNA, 19 nt, Artificial Sequence
  Description of Artificial Sequence: Synthetic oligonucleotide
uagcgcugaagcagagacg

SEQ ID NO: 2598891 - RNA, 19 nt, Artificial Sequence
  Description of Artificial Sequence: Synthetic oligonucleotide
guuucugucaggcccagaa

SEQ ID NO: 2598892 - RNA, 19 nt, Artificial Sequence
  Description of Artificial Sequence: Synthetic oligonucleotide
guuuuacccacguucaugu

SEQ ID NO: 2598893 - RNA, 19 nt, Artificial Sequence
  Description of Artificial Sequence: Synthetic oligonucleotide
agauguugaaggaacgcca

SEQ ID NO: 2598894 - RNA, 19 nt, Artificial Sequence
  Description of Artificial Sequence: Synthetic oligonucleotide
uguaaagggccauggcauc

SEQ ID NO: 2598895 - RNA, 19 nt, Artificial Sequence
  Description of Artificial Sequence: Synthetic oligonucleotide
uggcgcuggucucaaagca

SEQ ID NO: 2598896 - RNA, 19 nt, Artificial Sequence
  Description of Artificial Sequence: Synthetic oligonucleotide
uggaagagacacagcugcc

SEQ ID NO: 2598897 - RNA, 19 nt, Artificial Sequence
  Description of Artificial Sequence: Synthetic oligonucleotide
cugggauggcuccucagcc

SEQ ID NO: 2598898 - RNA, 19 nt, Artificial Sequence
  Description of Artificial Sequence: Synthetic oligonucleotide
uccucuagcugcaccugcc

SEQ ID NO: 2598899 - RNA, 19 nt, Artificial Sequence
  Description of Artificial Sequence: Synthetic oligonucleotide
uuggcgcuggucucaaagc

SEQ ID NO: 2598900 - RNA, 19 nt, Artificial Sequence
  Description of Artificial Sequence: Synthetic oligonucleotide
agcgacgcuccauguagcg

SEQ ID NO: 2598901 - RNA, 19 nt, Artificial Sequence
  Description of Artificial Sequence: Synthetic oligonucleotide
aggcccagaaaccuguccu

SEQ ID NO: 2598902 - RNA, 19 nt, Artificial Sequence
  Description of Artificial Sequence: Synthetic oligonucleotide
agagacguuuuacccacgu

SEQ ID NO: 2598903 - RNA, 19 nt, Artificial Sequence
  Description of Artificial Sequence: Synthetic oligonucleotide
gacguuuuacccacguuca

SEQ ID NO: 2598904 - RNA, 19 nt, Artificial Sequence
  Description of Artificial Sequence: Synthetic oligonucleotide
aacgccacugcuucaggua

SEQ ID NO: 2598905 - RNA, 19 nt, Artificial Sequence
  Description of Artificial Sequence: Synthetic oligonucleotide
cagaagcacgaucuucccg

SEQ ID NO: 2598906 - RNA, 19 nt, Artificial Sequence
  Description of Artificial Sequence: Synthetic oligonucleotide
caggaucuucuuguaaagg

SEQ ID NO: 2598907 - RNA, 19 nt, Artificial Sequence
  Description of Artificial Sequence: Synthetic oligonucleotide
ugcagcugguuauauccac

SEQ ID NO: 2598908 - RNA, 19 nt, Artificial Sequence
  Description of Artificial Sequence: Synthetic oligonucleotide
cugguuauauccacaaucu

SEQ ID NO: 2598909 - RNA, 19 nt, Artificial Sequence
  Description of Artificial Sequence: Synthetic oligonucleotide
ucguuguuggcuguuucug

SEQ ID NO: 2598910 - RNA, 19 nt, Artificial Sequence
  Description of Artificial Sequence: Synthetic oligonucleotide
uggucucaaagcacaucug

SEQ ID NO: 2598911 - RNA, 19 nt, Artificial Sequence
  Description of Artificial Sequence: Synthetic oligonucleotide
aagcgacgcuccauguagc

SEQ ID NO: 2598912 - RNA, 19 nt, Artificial Sequence
  Description of Artificial Sequence: Synthetic oligonucleotide
gugguucacaucauaaguc

SEQ ID NO: 2598913 - RNA, 19 nt, Artificial Sequence
  Description of Artificial Sequence: Synthetic oligonucleotide
agagagaccucagccauca

SEQ ID NO: 2598914 - RNA, 19 nt, Artificial Sequence
  Description of Artificial Sequence: Synthetic oligonucleotide
acaucugcucagcggcugg

SEQ ID NO: 2598915 - RNA, 19 nt, Artificial Sequence
  Description of Artificial Sequence: Synthetic oligonucleotide
ucccucucaucuagcaucu

SEQ ID NO: 2598916 - RNA, 19 nt, Artificial Sequence
  Description of Artificial Sequence: Synthetic oligonucleotide
guccuuuuggguguuuugc

SEQ ID NO: 2598917 - RNA, 19 nt, Artificial Sequence
  Description of Artificial Sequence: Synthetic oligonucleotide
uuucugucaggcccagaaa

SEQ ID NO: 2598918 - RNA, 19 nt, Artificial Sequence
  Description of Artificial Sequence: Synthetic oligonucleotide
uccacguuguacccgguuu

SEQ ID NO: 2598919 - RNA, 19 nt, Artificial Sequence
  Description of Artificial Sequence: Synthetic oligonucleotide
acugcucccgcccugcggu

SEQ ID NO: 2598920 - RNA, 19 nt, Artificial Sequence
  Description of Artificial Sequence: Synthetic oligonucleotide
aacagucguuguuggcugu

SEQ ID NO: 2598921 - RNA, 19 nt, Artificial Sequence
  Description of Artificial Sequence: Synthetic oligonucleotide
ugggauggcuccucagccc

SEQ ID NO: 2598922 - RNA, 19 nt, Artificial Sequence
  Description of Artificial Sequence: Synthetic oligonucleotide
cccagaagcacgaucuucc

SEQ ID NO: 2598923 - RNA, 19 nt, Artificial Sequence
  Description of Artificial Sequence: Synthetic oligonucleotide
ggaucuucuuguaaagggc

SEQ ID NO: 2598924 - RNA, 19 nt, Artificial Sequence
  Description of Artificial Sequence: Synthetic oligonucleotide
caaucaugggcaccaccag

SEQ ID NO: 2598925 - RNA, 19 nt, Artificial Sequence
  Description of Artificial Sequence: Synthetic oligonucleotide
cucccugaucuccauggcc

SEQ ID NO: 2598926 - RNA, 19 nt, Artificial Sequence
  Description of Artificial Sequence: Synthetic oligonucleotide
uccucagcccuuugccggg

SEQ ID NO: 2598927 - RNA, 19 nt, Artificial Sequence
  Description of Artificial Sequence: Synthetic oligonucleotide
cagcacccagauuuagucc

SEQ ID NO: 2598928 - RNA, 19 nt, Artificial Sequence
  Description of Artificial Sequence: Synthetic oligonucleotide
guaaagggccauggcaucc

SEQ ID NO: 2598929 - RNA, 19 nt, Artificial Sequence
  Description of Artificial Sequence: Synthetic oligonucleotide
uggcaaacaaacagucguu

SEQ ID NO: 2598930 - RNA, 19 nt, Artificial Sequence
  Description of Artificial Sequence: Synthetic oligonucleotide
cauguagcgcugaagcaga

SEQ ID NO: 2598931 - RNA, 19 nt, Artificial Sequence
  Description of Artificial Sequence: Synthetic oligonucleotide
acggugcugaccguguccg

SEQ ID NO: 2598932 - RNA, 19 nt, Artificial Sequence
  Description of Artificial Sequence: Synthetic oligonucleotide
aucauaagucaggaugaca

SEQ ID NO: 2598933 - RNA, 19 nt, Artificial Sequence
  Description of Artificial Sequence: Synthetic oligonucleotide
gcuccaacaggcucugagg

SEQ ID NO: 2598934 - RNA, 19 nt, Artificial Sequence
  Description of Artificial Sequence: Synthetic oligonucleotide
ucucccugaucuccauggc

SEQ ID NO: 2598935 - RNA, 19 nt, Artificial Sequence
  Description of Artificial Sequence: Synthetic oligonucleotide
aucaugggcaccaccaggu

SEQ ID NO: 2598936 - RNA, 19 nt, Artificial Sequence
  Description of Artificial Sequence: Synthetic oligonucleotide
uccaacaggcucugagggu

SEQ ID NO: 2598937 - RNA, 19 nt, Artificial Sequence
  Description of Artificial Sequence: Synthetic oligonucleotide
uucccguccggcuuccgca

SEQ ID NO: 2598938 - RNA, 19 nt, Artificial Sequence
  Description of Artificial Sequence: Synthetic oligonucleotide
accguguccgggaagcgac

SEQ ID NO: 2598939 - RNA, 19 nt, Artificial Sequence
  Description of Artificial Sequence: Synthetic oligonucleotide
gggugguucacaucauaag

SEQ ID NO: 2598940 - RNA, 19 nt, Artificial Sequence
  Description of Artificial Sequence: Synthetic oligonucleotide
cagaaaccuguccuccagc

SEQ ID NO: 2598941 - RNA, 19 nt, Artificial Sequence
  Description of Artificial Sequence: Synthetic oligonucleotide
gcagagacguuuuacccac

SEQ ID NO: 2598942 - RNA, 19 nt, Artificial Sequence
  Description of Artificial Sequence: Synthetic oligonucleotide
auguugaaggaacgccacu

SEQ ID NO: 2598943 - RNA, 19 nt, Artificial Sequence
  Description of Artificial Sequence: Synthetic oligonucleotide
aaggcgccgcccacggugc

SEQ ID NO: 2598944 - RNA, 19 nt, Artificial Sequence
  Description of Artificial Sequence: Synthetic oligonucleotide
gaaaccuguccuccagcuc

SEQ ID NO: 2598945 - RNA, 19 nt, Artificial Sequence
  Description of Artificial Sequence: Synthetic oligonucleotide
ucucccucucaucuagcau

SEQ ID NO: 2598946 - RNA, 19 nt, Artificial Sequence
  Description of Artificial Sequence: Synthetic oligonucleotide
uucccacaauggcaaacaa

SEQ ID NO: 2598947 - RNA, 19 nt, Artificial Sequence
  Description of Artificial Sequence: Synthetic oligonucleotide
cuucagguagaaggcgccg

SEQ ID NO: 2598948 - RNA, 19 nt, Artificial Sequence
  Description of Artificial Sequence: Synthetic oligonucleotide
aaggaacgccacugcuuca

SEQ ID NO: 2598949 - RNA, 19 nt, Artificial Sequence
  Description of Artificial Sequence: Synthetic oligonucleotide
guagaaggcgccgcccacg

SEQ ID NO: 2598950 - RNA, 19 nt, Artificial Sequence
  Description of Artificial Sequence: Synthetic oligonucleotide
aucuugugcuucaggaucu

SEQ ID NO: 2598951 - RNA, 19 nt, Artificial Sequence
  Description of Artificial Sequence: Synthetic oligonucleotide
agguagaaggcgccgccca

SEQ ID NO: 2598952 - RNA, 19 nt, Artificial Sequence
  Description of Artificial Sequence: Synthetic oligonucleotide
ggagauguugaaggaacgc

SEQ ID NO: 2598953 - RNA, 19 nt, Artificial Sequence
  Description of Artificial Sequence: Synthetic oligonucleotide
ugcucagcggcuggcaucu

SEQ ID NO: 2598954 - RNA, 19 nt, Artificial Sequence
  Description of Artificial Sequence: Synthetic oligonucleotide
ggcaccaccaggucaaaca

SEQ ID NO: 2598955 - RNA, 19 nt, Artificial Sequence
  Description of Artificial Sequence: Synthetic oligonucleotide
ggcaaacaaacagucguug

SEQ ID NO: 2598956 - RNA, 19 nt, Artificial Sequence
  Description of Artificial Sequence: Synthetic oligonucleotide
cuagcugcaccugccuggg

SEQ ID NO: 2598957 - RNA, 19 nt, Artificial Sequence
  Description of Artificial Sequence: Synthetic oligonucleotide
gagguccacguuguacccg

SEQ ID NO: 2598958 - RNA, 19 nt, Artificial Sequence
  Description of Artificial Sequence: Synthetic oligonucleotide
caacaggcucugagggugg

SEQ ID NO: 2598959 - RNA, 19 nt, Artificial Sequence
  Description of Artificial Sequence: Synthetic oligonucleotide
acgaucuucccguccggcu

SEQ ID NO: 2598960 - RNA, 19 nt, Artificial Sequence
  Description of Artificial Sequence: Synthetic oligonucleotide
uaaagggccauggcauccu

SEQ ID NO: 2598961 - RNA, 19 nt, Artificial Sequence
  Description of Artificial Sequence: Synthetic oligonucleotide
uuuuacccacguucauguc

SEQ ID NO: 2598962 - RNA, 19 nt, Artificial Sequence
  Description of Artificial Sequence: Synthetic oligonucleotide
caccaccaggucaaacaag

SEQ ID NO: 2598963 - RNA, 19 nt, Artificial Sequence
  Description of Artificial Sequence: Synthetic oligonucleotide
gguucacaucauaagucag

SEQ ID NO: 2598964 - RNA, 19 nt, Artificial Sequence
  Description of Artificial Sequence: Synthetic oligonucleotide
caucauaagucaggaugac

SEQ ID NO: 2598965 - RNA, 19 nt, Artificial Sequence
  Description of Artificial Sequence: Synthetic oligonucleotide
gguguuuugcagcugguua

SEQ ID NO: 2598966 - RNA, 19 nt, Artificial Sequence
  Description of Artificial Sequence: Synthetic oligonucleotide
uggcuccucagcccuuugc

SEQ ID NO: 2598967 - RNA, 19 nt, Artificial Sequence
  Description of Artificial Sequence: Synthetic oligonucleotide
uguacccgguuuuggcgcu

SEQ ID NO: 2598968 - RNA, 19 nt, Artificial Sequence
  Description of Artificial Sequence: Synthetic oligonucleotide
uggaacugcucccgcccug

SEQ ID NO: 2598969 - RNA, 19 nt, Artificial Sequence
  Description of Artificial Sequence: Synthetic oligonucleotide
guuucccacaauggcaaac

SEQ ID NO: 2598970 - RNA, 19 nt, Artificial Sequence
  Description of Artificial Sequence: Synthetic oligonucleotide
gaucuucccguccggcuuc

SEQ ID NO: 2598971 - RNA, 19 nt, Artificial Sequence
  Description of Artificial Sequence: Synthetic oligonucleotide
cucagcggcuggcaucucc

SEQ ID NO: 2598972 - RNA, 19 nt, Artificial Sequence
  Description of Artificial Sequence: Synthetic oligonucleotide
acguuguacccgguuuugg

SEQ ID NO: 2598973 - RNA, 19 nt, Artificial Sequence
  Description of Artificial Sequence: Synthetic oligonucleotide
aucugggauggcuccucag

SEQ ID NO: 2598974 - RNA, 19 nt, Artificial Sequence
  Description of Artificial Sequence: Synthetic oligonucleotide
ucugagggugguucacauc

SEQ ID NO: 2598975 - RNA, 19 nt, Artificial Sequence
  Description of Artificial Sequence: Synthetic oligonucleotide
uguuuugcagcugguuaua

SEQ ID NO: 2598976 - RNA, 19 nt, Artificial Sequence
  Description of Artificial Sequence: Synthetic oligonucleotide
ggccauggcauccucuagc

SEQ ID NO: 2598977 - RNA, 19 nt, Artificial Sequence
  Description of Artificial Sequence: Synthetic oligonucleotide
cucuagcugcaccugccug

SEQ ID NO: 2598978 - RNA, 19 nt, Artificial Sequence
  Description of Artificial Sequence: Synthetic oligonucleotide
caggcccagaaaccugucc

SEQ ID NO: 2598979 - RNA, 19 nt, Artificial Sequence
  Description of Artificial Sequence: Synthetic oligonucleotide
acaaggucucaaacaggag

SEQ ID NO: 2598980 - RNA, 19 nt, Artificial Sequence
  Description of Artificial Sequence: Synthetic oligonucleotide
uuuggguguuuugcagcug

SEQ ID NO: 2598981 - RNA, 19 nt, Artificial Sequence
  Description of Artificial Sequence: Synthetic oligonucleotide
uguccgggaagcgacgcuc

SEQ ID NO: 2598982 - RNA, 19 nt, Artificial Sequence
  Description of Artificial Sequence: Synthetic oligonucleotide
caugggcaccaccagguca

SEQ ID NO: 2598983 - RNA, 19 nt, Artificial Sequence
  Description of Artificial Sequence: Synthetic oligonucleotide
ucccagaggccucucuuuu

SEQ ID NO: 2598984 - RNA, 19 nt, Artificial Sequence
  Description of Artificial Sequence: Synthetic oligonucleotide
caggagguccacguuguac

SEQ ID NO: 2598985 - RNA, 19 nt, Artificial Sequence
  Description of Artificial Sequence: Synthetic oligonucleotide
gaacugcucccgcccugcg

SEQ ID NO: 2598986 - RNA, 19 nt, Artificial Sequence
  Description of Artificial Sequence: Synthetic oligonucleotide
gaagcacgaucuucccguc

SEQ ID NO: 2598987 - RNA, 19 nt, Artificial Sequence
  Description of Artificial Sequence: Synthetic oligonucleotide
cuucccguccggcuuccgc

SEQ ID NO: 2598988 - RNA, 19 nt, Artificial Sequence
  Description of Artificial Sequence: Synthetic oligonucleotide
ccauauggagauguugaag

SEQ ID NO: 2598989 - RNA, 19 nt, Artificial Sequence
  Description of Artificial Sequence: Synthetic oligonucleotide
cagagacguuuuacccacg

SEQ ID NO: 2598990 - RNA, 19 nt, Artificial Sequence
  Description of Artificial Sequence: Synthetic oligonucleotide
agggccauggcauccucua

SEQ ID NO: 2598991 - RNA, 19 nt, Artificial Sequence
  Description of Artificial Sequence: Synthetic oligonucleotide
ugagggugguucacaucau

SEQ ID NO: 2598992 - RNA, 19 nt, Artificial Sequence
  Description of Artificial Sequence: Synthetic oligonucleotide
cccagauuuaguccuuuug

SEQ ID NO: 2598993 - RNA, 19 nt, Artificial Sequence
  Description of Artificial Sequence: Synthetic oligonucleotide
guguuuugcagcugguuau

SEQ ID NO: 2598994 - RNA, 19 nt, Artificial Sequence
  Description of Artificial Sequence: Synthetic oligonucleotide
agcugguuauauccacaau

SEQ ID NO: 2598995 - RNA, 19 nt, Artificial Sequence
  Description of Artificial Sequence: Synthetic oligonucleotide
caaacaaacagucguuguu

SEQ ID NO: 2598996 - RNA, 19 nt, Artificial Sequence
  Description of Artificial Sequence: Synthetic oligonucleotide
ugucccauauggagauguu

SEQ ID NO: 2598997 - RNA, 19 nt, Artificial Sequence
  Description of Artificial Sequence: Synthetic oligonucleotide
acacagcugcccagcuucc

SEQ ID NO: 2598998 - RNA, 19 nt, Artificial Sequence
  Description of Artificial Sequence: Synthetic oligonucleotide
ugaccguguccgggaagcg

SEQ ID NO: 2598999 - RNA, 19 nt, Artificial Sequence
  Description of Artificial Sequence: Synthetic oligonucleotide
cagcugguuauauccacaa

SEQ ID NO: 2599000 - RNA, 19 nt, Artificial Sequence
  Description of Artificial Sequence: Synthetic oligonucleotide
ggucaaacaaggucucaaa

SEQ ID NO: 2599001 - RNA, 19 nt, Artificial Sequence
  Description of Artificial Sequence: Synthetic oligonucleotide
ggagguccacguuguaccc

SEQ ID NO: 2599002 - RNA, 19 nt, Artificial Sequence
  Description of Artificial Sequence: Synthetic oligonucleotide
ucuccauggcccgauccau

SEQ ID NO: 2599003 - RNA, 19 nt, Artificial Sequence
  Description of Artificial Sequence: Synthetic oligonucleotide
acguuuuacccacguucau

SEQ ID NO: 2599004 - RNA, 19 nt, Artificial Sequence
  Description of Artificial Sequence: Synthetic oligonucleotide
auccacaaucugggauggc

SEQ ID NO: 2599005 - RNA, 19 nt, Artificial Sequence
  Description of Artificial Sequence: Synthetic oligonucleotide
acaaucugggauggcuccu

SEQ ID NO: 2599006 - RNA, 19 nt, Artificial Sequence
  Description of Artificial Sequence: Synthetic oligonucleotide
uacccgguuuuggcgcugg

SEQ ID NO: 2599007 - RNA, 19 nt, Artificial Sequence
  Description of Artificial Sequence: Synthetic oligonucleotide
uccgggaagcgacgcucca

SEQ ID NO: 2599008 - RNA, 19 nt, Artificial Sequence
  Description of Artificial Sequence: Synthetic oligonucleotide
cguuguacccgguuuuggc

SEQ ID NO: 2599009 - RNA, 19 nt, Artificial Sequence
  Description of Artificial Sequence: Synthetic oligonucleotide
agcagccgccccucggcag

SEQ ID NO: 2599010 - RNA, 19 nt, Artificial Sequence
  Description of Artificial Sequence: Synthetic oligonucleotide
ucaggcccagaaaccuguc

SEQ ID NO: 2599011 - RNA, 19 nt, Artificial Sequence
  Description of Artificial Sequence: Synthetic oligonucleotide
ggaacgccacugcuucagg

SEQ ID NO: 2599012 - RNA, 19 nt, Artificial Sequence
  Description of Artificial Sequence: Synthetic oligonucleotide
ggcauccucuagcugcacc

SEQ ID NO: 2599013 - RNA, 19 nt, Artificial Sequence
  Description of Artificial Sequence: Synthetic oligonucleotide
cacgaucuucccguccggc

SEQ ID NO: 2599014 - RNA, 19 nt, Artificial Sequence
  Description of Artificial Sequence: Synthetic oligonucleotide
ccgcccacggugcugaccg

SEQ ID NO: 2599015 - RNA, 19 nt, Artificial Sequence
  Description of Artificial Sequence: Synthetic oligonucleotide
cacguuguacccgguuuug

SEQ ID NO: 2599016 - RNA, 19 nt, Artificial Sequence
  Description of Artificial Sequence: Synthetic oligonucleotide
aucaggugcagcacccaga

SEQ ID NO: 2599017 - RNA, 19 nt, Artificial Sequence
  Description of Artificial Sequence: Synthetic oligonucleotide
ucagcccuuugccgggcaa

SEQ ID NO: 2599018 - RNA, 19 nt, Artificial Sequence
  Description of Artificial Sequence: Synthetic oligonucleotide
aagggccauggcauccucu

SEQ ID NO: 2599019 - RNA, 19 nt, Artificial Sequence
  Description of Artificial Sequence: Synthetic oligonucleotide
gaacgccacugcuucaggu

SEQ ID NO: 2599020 - RNA, 19 nt, Artificial Sequence
  Description of Artificial Sequence: Synthetic oligonucleotide
aucuucccguccggcuucc

SEQ ID NO: 2599021 - RNA, 19 nt, Artificial Sequence
  Description of Artificial Sequence: Synthetic oligonucleotide
uaguccuuuuggguguuuu

SEQ ID NO: 2599022 - RNA, 19 nt, Artificial Sequence
  Description of Artificial Sequence: Synthetic oligonucleotide
gagggugguucacaucaua

SEQ ID NO: 2599023 - RNA, 19 nt, Artificial Sequence
  Description of Artificial Sequence: Synthetic oligonucleotide
cacaucugcucagcggcug

SEQ ID NO: 2599024 - RNA, 19 nt, Artificial Sequence
  Description of Artificial Sequence: Synthetic oligonucleotide
ugcugaccguguccgggaa

SEQ ID NO: 2599025 - RNA, 19 nt, Artificial Sequence
  Description of Artificial Sequence: Synthetic oligonucleotide
uggcccgauccauggccag

SEQ ID NO: 2599026 - RNA, 19 nt, Artificial Sequence
  Description of Artificial Sequence: Synthetic oligonucleotide
cugcucagcggcuggcauc

SEQ ID NO: 2599027 - RNA, 19 nt, Artificial Sequence
  Description of Artificial Sequence: Synthetic oligonucleotide
cuggguaccuuggaagaga

SEQ ID NO: 2599028 - RNA, 19 nt, Artificial Sequence
  Description of Artificial Sequence: Synthetic oligonucleotide
ccgauccauggccaggucc

SEQ ID NO: 2599029 - RNA, 19 nt, Artificial Sequence
  Description of Artificial Sequence: Synthetic oligonucleotide
gucguuguuggcuguuucu

SEQ ID NO: 2599030 - RNA, 19 nt, Artificial Sequence
  Description of Artificial Sequence: Synthetic oligonucleotide
gccccucggcaguacaugg

SEQ ID NO: 2599031 - RNA, 19 nt, Artificial Sequence
  Description of Artificial Sequence: Synthetic oligonucleotide
ccagaagcacgaucuuccc

SEQ ID NO: 2599032 - RNA, 19 nt, Artificial Sequence
  Description of Artificial Sequence: Synthetic oligonucleotide
guaccuuggaagagacaca

SEQ ID NO: 2599033 - RNA, 19 nt, Artificial Sequence
  Description of Artificial Sequence: Synthetic oligonucleotide
ggccauggaacugcucccg

SEQ ID NO: 2599034 - RNA, 19 nt, Artificial Sequence
  Description of Artificial Sequence: Synthetic oligonucleotide
gagagaccucagccaucag

SEQ ID NO: 2599035 - RNA, 19 nt, Artificial Sequence
  Description of Artificial Sequence: Synthetic oligonucleotide
ccacaaucugggauggcuc

SEQ ID NO: 2599036 - RNA, 19 nt, Artificial Sequence
  Description of Artificial Sequence: Synthetic oligonucleotide
ccauggaacugcucccgcc

SEQ ID NO: 2599037 - RNA, 19 nt, Artificial Sequence
  Description of Artificial Sequence: Synthetic oligonucleotide
gcaaacaaacagucguugu

SEQ ID NO: 2599038 - RNA, 19 nt, Artificial Sequence
  Description of Artificial Sequence: Synthetic oligonucleotide
cccucggcaguacauggag

SEQ ID NO: 2599039 - RNA, 19 nt, Artificial Sequence
  Description of Artificial Sequence: Synthetic oligonucleotide
acccagauuuaguccuuuu

SEQ ID NO: 2599040 - RNA, 19 nt, Artificial Sequence
  Description of Artificial Sequence: Synthetic oligonucleotide
accugccuggguaccuugg

SEQ ID NO: 2599041 - RNA, 19 nt, Artificial Sequence
  Description of Artificial Sequence: Synthetic oligonucleotide
gugcagcacccagauuuag

SEQ ID NO: 2599042 - RNA, 19 nt, Artificial Sequence
  Description of Artificial Sequence: Synthetic oligonucleotide
ggagcccaggccauggaac

SEQ ID NO: 2599043 - RNA, 19 nt, Artificial Sequence
  Description of Artificial Sequence: Synthetic oligonucleotide
gccuggguaccuuggaaga

SEQ ID NO: 2599044 - RNA, 19 nt, Artificial Sequence
  Description of Artificial Sequence: Synthetic oligonucleotide
gacgcuccauguagcgcug

SEQ ID NO: 2599045 - RNA, 19 nt, Artificial Sequence
  Description of Artificial Sequence: Synthetic oligonucleotide
gugcugaccguguccggga

SEQ ID NO: 2599046 - RNA, 19 nt, Artificial Sequence
  Description of Artificial Sequence: Synthetic oligonucleotide
gaccguguccgggaagcga

SEQ ID NO: 2599047 - RNA, 19 nt, Artificial Sequence
  Description of Artificial Sequence: Synthetic oligonucleotide
ccuuugccgggcaaucaug

SEQ ID NO: 2599048 - RNA, 19 nt, Artificial Sequence
  Description of Artificial Sequence: Synthetic oligonucleotide
auguagcgcugaagcagag

SEQ ID NO: 2599049 - RNA, 19 nt, Artificial Sequence
  Description of Artificial Sequence: Synthetic oligonucleotide
uacccacguucaugucccc

SEQ ID NO: 2599050 - RNA, 19 nt, Artificial Sequence
  Description of Artificial Sequence: Synthetic oligonucleotide
cguuuuacccacguucaug

SEQ ID NO: 2599051 - RNA, 19 nt, Artificial Sequence
  Description of Artificial Sequence: Synthetic oligonucleotide
caccugccuggguaccuug

SEQ ID NO: 2599052 - RNA, 19 nt, Artificial Sequence
  Description of Artificial Sequence: Synthetic oligonucleotide
cccugaucuccauggcccg

SEQ ID NO: 2599053 - RNA, 19 nt, Artificial Sequence
  Description of Artificial Sequence: Synthetic oligonucleotide
auggcuccucagcccuuug

SEQ ID NO: 2599054 - RNA, 19 nt, Artificial Sequence
  Description of Artificial Sequence: Synthetic oligonucleotide
uuuuggcgcuggucucaaa

SEQ ID NO: 2599055 - RNA, 19 nt, Artificial Sequence
  Description of Artificial Sequence: Synthetic oligonucleotide
gccaucaggugcagcaccc

SEQ ID NO: 2599056 - RNA, 19 nt, Artificial Sequence
  Description of Artificial Sequence: Synthetic oligonucleotide
ccucggcaguacauggagc

SEQ ID NO: 2599057 - RNA, 19 nt, Artificial Sequence
  Description of Artificial Sequence: Synthetic oligonucleotide
auggcccgauccauggcca

SEQ ID NO: 2599058 - RNA, 19 nt, Artificial Sequence
  Description of Artificial Sequence: Synthetic oligonucleotide
acauggagcccaggccaug

SEQ ID NO: 2599059 - RNA, 19 nt, Artificial Sequence
  Description of Artificial Sequence: Synthetic oligonucleotide
cucagccaucaggugcagc

SEQ ID NO: 2599060 - RNA, 19 nt, Artificial Sequence
  Description of Artificial Sequence: Synthetic oligonucleotide
gcccagaaaccuguccucc

SEQ ID NO: 2599061 - RNA, 19 nt, Artificial Sequence
  Description of Artificial Sequence: Synthetic oligonucleotide
guccgggaagcgacgcucc

SEQ ID NO: 2599062 - RNA, 19 nt, Artificial Sequence
  Description of Artificial Sequence: Synthetic oligonucleotide
gcuccauguagcgcugaag

SEQ ID NO: 2599063 - RNA, 19 nt, Artificial Sequence
  Description of Artificial Sequence: Synthetic oligonucleotide
ccacaauggcaaacaaaca

SEQ ID NO: 2599064 - RNA, 19 nt, Artificial Sequence
  Description of Artificial Sequence: Synthetic oligonucleotide
gguuuuggcgcuggucuca

SEQ ID NO: 2599065 - RNA, 19 nt, Artificial Sequence
  Description of Artificial Sequence: Synthetic oligonucleotide
ggcccagaaaccuguccuc

SEQ ID NO: 2599066 - RNA, 19 nt, Artificial Sequence
  Description of Artificial Sequence: Synthetic oligonucleotide
gcacgaucuucccguccgg

SEQ ID NO: 2599067 - RNA, 19 nt, Artificial Sequence
  Description of Artificial Sequence: Synthetic oligonucleotide
ucccguccggcuuccgcau

SEQ ID NO: 2599068 - RNA, 19 nt, Artificial Sequence
  Description of Artificial Sequence: Synthetic oligonucleotide
gucaggcccagaaaccugu

SEQ ID NO: 2599069 - RNA, 19 nt, Artificial Sequence
  Description of Artificial Sequence: Synthetic oligonucleotide
agcccaggccauggaacug

SEQ ID NO: 2599070 - RNA, 19 nt, Artificial Sequence
  Description of Artificial Sequence: Synthetic oligonucleotide
ucuucccguccggcuuccg

SEQ ID NO: 2599071 - RNA, 19 nt, Artificial Sequence
  Description of Artificial Sequence: Synthetic oligonucleotide
gagacguuuuacccacguu

SEQ ID NO: 2599072 - RNA, 19 nt, Artificial Sequence
  Description of Artificial Sequence: Synthetic oligonucleotide
gcugaccguguccgggaag

SEQ ID NO: 2599073 - RNA, 19 nt, Artificial Sequence
  Description of Artificial Sequence: Synthetic oligonucleotide
agaaggcgccgcccacggu

SEQ ID NO: 2599074 - RNA, 19 nt, Artificial Sequence
  Description of Artificial Sequence: Synthetic oligonucleotide
cugccuggguaccuuggaa

SEQ ID NO: 2599075 - RNA, 19 nt, Artificial Sequence
  Description of Artificial Sequence: Synthetic oligonucleotide
ggaagcgacgcuccaugua

SEQ ID NO: 2599076 - RNA, 19 nt, Artificial Sequence
  Description of Artificial Sequence: Synthetic oligonucleotide
ccuggguaccuuggaagag

SEQ ID NO: 2599077 - RNA, 19 nt, Artificial Sequence
  Description of Artificial Sequence: Synthetic oligonucleotide
acagucguuguuggcuguu

SEQ ID NO: 2599078 - RNA, 19 nt, Artificial Sequence
  Description of Artificial Sequence: Synthetic oligonucleotide
cugaagcagagacguuuua

SEQ ID NO: 2599079 - RNA, 19 nt, Artificial Sequence
  Description of Artificial Sequence: Synthetic oligonucleotide
gcggugucccauauggaga

SEQ ID NO: 2599080 - RNA, 19 nt, Artificial Sequence
  Description of Artificial Sequence: Synthetic oligonucleotide
gcccaggccauggaacugc

SEQ ID NO: 2599081 - RNA, 19 nt, Artificial Sequence
  Description of Artificial Sequence: Synthetic oligonucleotide
caggucaaacaaggucuca

SEQ ID NO: 2599082 - RNA, 19 nt, Artificial Sequence
  Description of Artificial Sequence: Synthetic oligonucleotide
uuaguccuuuuggguguuu

SEQ ID NO: 2599083 - RNA, 19 nt, Artificial Sequence
  Description of Artificial Sequence: Synthetic oligonucleotide
gggauggcuccucagcccu

SEQ ID NO: 2599084 - RNA, 19 nt, Artificial Sequence
  Description of Artificial Sequence: Synthetic oligonucleotide
gccauggcauccucuagcu

SEQ ID NO: 2599085 - RNA, 19 nt, Artificial Sequence
  Description of Artificial Sequence: Synthetic oligonucleotide
guuuuggcgcuggucucaa

SEQ ID NO: 2599086 - RNA, 19 nt, Artificial Sequence
  Description of Artificial Sequence: Synthetic oligonucleotide
gcuucaggaucuucuugua

SEQ ID NO: 2599087 - RNA, 19 nt, Artificial Sequence
  Description of Artificial Sequence: Synthetic oligonucleotide
ugcucccgcccugcggugu

SEQ ID NO: 2599088 - RNA, 19 nt, Artificial Sequence
  Description of Artificial Sequence: Synthetic oligonucleotide
ccgguuuuggcgcuggucu

SEQ ID NO: 2599089 - RNA, 19 nt, Artificial Sequence
  Description of Artificial Sequence: Synthetic oligonucleotide
gcuggucucaaagcacauc

SEQ ID NO: 2599090 - RNA, 19 nt, Artificial Sequence
  Description of Artificial Sequence: Synthetic oligonucleotide
guuuugcagcugguuauau

SEQ ID NO: 2599091 - RNA, 19 nt, Artificial Sequence
  Description of Artificial Sequence: Synthetic oligonucleotide
cccauauggagauguugaa

SEQ ID NO: 2599092 - RNA, 19 nt, Artificial Sequence
  Description of Artificial Sequence: Synthetic oligonucleotide
ggcccgauccauggccagg

SEQ ID NO: 2599093 - RNA, 19 nt, Artificial Sequence
  Description of Artificial Sequence: Synthetic oligonucleotide
caaacaggagguccacguu

SEQ ID NO: 2599094 - RNA, 19 nt, Artificial Sequence
  Description of Artificial Sequence: Synthetic oligonucleotide
gcaguacauggagcccagg

SEQ ID NO: 2599095 - RNA, 19 nt, Artificial Sequence
  Description of Artificial Sequence: Synthetic oligonucleotide
cgggaagcgacgcuccaug

SEQ ID NO: 2599096 - RNA, 19 nt, Artificial Sequence
  Description of Artificial Sequence: Synthetic oligonucleotide
ucccgcccugcgguguccc

SEQ ID NO: 2599097 - RNA, 19 nt, Artificial Sequence
  Description of Artificial Sequence: Synthetic oligonucleotide
cuucccagaggccucucuu

SEQ ID NO: 2599098 - RNA, 19 nt, Artificial Sequence
  Description of Artificial Sequence: Synthetic oligonucleotide
gcgacgcuccauguagcgc

SEQ ID NO: 2599099 - RNA, 19 nt, Artificial Sequence
  Description of Artificial Sequence: Synthetic oligonucleotide
ggcaucucccucucaucua

SEQ ID NO: 2599100 - RNA, 19 nt, Artificial Sequence
  Description of Artificial Sequence: Synthetic oligonucleotide
cccagaggccucucuuuuc

SEQ ID NO: 2599101 - RNA, 19 nt, Artificial Sequence
  Description of Artificial Sequence: Synthetic oligonucleotide
ccauggcauccucuagcug

SEQ ID NO: 2599102 - RNA, 19 nt, Artificial Sequence
  Description of Artificial Sequence: Synthetic oligonucleotide
guacccgguuuuggcgcug

SEQ ID NO: 2599103 - RNA, 19 nt, Artificial Sequence
  Description of Artificial Sequence: Synthetic oligonucleotide
ccguguccgggaagcgacg

SEQ ID NO: 2599104 - RNA, 19 nt, Artificial Sequence
  Description of Artificial Sequence: Synthetic oligonucleotide
gccucucuuuucucccuga

SEQ ID NO: 2599105 - RNA, 19 nt, Artificial Sequence
  Description of Artificial Sequence: Synthetic oligonucleotide
cugcucccgcccugcggug

SEQ ID NO: 2599106 - RNA, 19 nt, Artificial Sequence
  Description of Artificial Sequence: Synthetic oligonucleotide
ggcucugagggugguucac

SEQ ID NO: 2599107 - RNA, 19 nt, Artificial Sequence
  Description of Artificial Sequence: Synthetic oligonucleotide
ggugucccauauggagaug

SEQ ID NO: 2599108 - RNA, 19 nt, Artificial Sequence
  Description of Artificial Sequence: Synthetic oligonucleotide
acccgguuuuggcgcuggu

SEQ ID NO: 2599109 - RNA, 19 nt, Artificial Sequence
  Description of Artificial Sequence: Synthetic oligonucleotide
cucagcccuuugccgggca

SEQ ID NO: 2599110 - RNA, 19 nt, Artificial Sequence
  Description of Artificial Sequence: Synthetic oligonucleotide
gauggcuccucagcccuuu

SEQ ID NO: 2599111 - RNA, 19 nt, Artificial Sequence
  Description of Artificial Sequence: Synthetic oligonucleotide
ggugcagcacccagauuua

SEQ ID NO: 2599112 - RNA, 19 nt, Artificial Sequence
  Description of Artificial Sequence: Synthetic oligonucleotide
acaggcucugagggugguu

SEQ ID NO: 2599113 - RNA, 19 nt, Artificial Sequence
  Description of Artificial Sequence: Synthetic oligonucleotide
agccgccccucggcaguac

SEQ ID NO: 2599114 - RNA, 19 nt, Artificial Sequence
  Description of Artificial Sequence: Synthetic oligonucleotide
acgcuccauguagcgcuga

SEQ ID NO: 2599115 - RNA, 19 nt, Artificial Sequence
  Description of Artificial Sequence: Synthetic oligonucleotide
guguccgggaagcgacgcu

SEQ ID NO: 2599116 - RNA, 19 nt, Artificial Sequence
  Description of Artificial Sequence: Synthetic oligonucleotide
gggaagcgacgcuccaugu

SEQ ID NO: 2599117 - RNA, 19 nt, Artificial Sequence
  Description of Artificial Sequence: Synthetic oligonucleotide
gcccacggugcugaccgug

SEQ ID NO: 2599118 - RNA, 19 nt, Artificial Sequence
  Description of Artificial Sequence: Synthetic oligonucleotide
cgacgcuccauguagcgcu

SEQ ID NO: 2599119 - RNA, 19 nt, Artificial Sequence
  Description of Artificial Sequence: Synthetic oligonucleotide
cguguccgggaagcgacgc

SEQ ID NO: 2599120 - RNA, 19 nt, Artificial Sequence
  Description of Artificial Sequence: Synthetic oligonucleotide
gccgggcaaucaugggcac

SEQ ID NO: 2599121 - RNA, 19 nt, Artificial Sequence
  Description of Artificial Sequence: Synthetic oligonucleotide
guccacguuguacccgguu

SEQ ID NO: 2599122 - RNA, 19 nt, Artificial Sequence
  Description of Artificial Sequence: Synthetic oligonucleotide
ccgggcaaucaugggcacc

SEQ ID NO: 2599123 - RNA, 19 nt, Artificial Sequence
  Description of Artificial Sequence: Synthetic oligonucleotide
cugaucuccauggcccgau

SEQ ID NO: 2599124 - RNA, 19 nt, Artificial Sequence
  Description of Artificial Sequence: Synthetic oligonucleotide
cgguuuuggcgcuggucuc

SEQ ID NO: 2599125 - RNA, 19 nt, Artificial Sequence
  Description of Artificial Sequence: Synthetic oligonucleotide
cccgguuuuggcgcugguc

SEQ ID NO: 2599126 - RNA, 19 nt, Artificial Sequence
  Description of Artificial Sequence: Synthetic oligonucleotide
aggcgccgcccacggugcu

SEQ ID NO: 2599127 - RNA, 19 nt, Artificial Sequence
  Description of Artificial Sequence: Synthetic oligonucleotide
gcugaagcagagacguuuu

SEQ ID NO: 2599128 - RNA, 19 nt, Artificial Sequence
  Description of Artificial Sequence: Synthetic oligonucleotide
ggguaccuuggaagagaca

SEQ ID NO: 2599129 - RNA, 19 nt, Artificial Sequence
  Description of Artificial Sequence: Synthetic oligonucleotide
cguuguuggcuguuucugu

SEQ ID NO: 2599130 - RNA, 19 nt, Artificial Sequence
  Description of Artificial Sequence: Synthetic oligonucleotide
ccacugcuucagguagaag

SEQ ID NO: 2599131 - RNA, 19 nt, Artificial Sequence
  Description of Artificial Sequence: Synthetic oligonucleotide
ccacggugcugaccguguc

SEQ ID NO: 2599132 - RNA, 19 nt, Artificial Sequence
  Description of Artificial Sequence: Synthetic oligonucleotide
gcccuuugccgggcaauca

SEQ ID NO: 2599133 - RNA, 19 nt, Artificial Sequence
  Description of Artificial Sequence: Synthetic oligonucleotide
ccccucggcaguacaugga

SEQ ID NO: 2599134 - RNA, 19 nt, Artificial Sequence
  Description of Artificial Sequence: Synthetic oligonucleotide
ccucagcccuuugccgggc

SEQ ID NO: 2599135 - RNA, 19 nt, Artificial Sequence
  Description of Artificial Sequence: Synthetic oligonucleotide
gccgcccacggugcugacc

SEQ ID NO: 2599136 - RNA, 19 nt, Artificial Sequence
  Description of Artificial Sequence: Synthetic oligonucleotide
gcucccgcccugcgguguc

SEQ ID NO: 2599137 - RNA, 19 nt, Artificial Sequence
  Description of Artificial Sequence: Synthetic oligonucleotide
ggguguuuugcagcugguu

SEQ ID NO: 2599138 - RNA, 19 nt, Artificial Sequence
  Description of Artificial Sequence: Synthetic oligonucleotide
gccgccccucggcaguaca

SEQ ID NO: 2599139 - RNA, 19 nt, Artificial Sequence
  Description of Artificial Sequence: Synthetic oligonucleotide
cggugcugaccguguccgg

SEQ ID NO: 2599140 - RNA, 19 nt, Artificial Sequence
  Description of Artificial Sequence: Synthetic oligonucleotide
cagcggcuggcaucucccu

SEQ ID NO: 2599141 - RNA, 19 nt, Artificial Sequence
  Description of Artificial Sequence: Synthetic oligonucleotide
ccugaucuccauggcccga

SEQ ID NO: 2599142 - RNA, 19 nt, Artificial Sequence
  Description of Artificial Sequence: Synthetic oligonucleotide
ccaucaggugcagcaccca

SEQ ID NO: 2599143 - RNA, 19 nt, Artificial Sequence
  Description of Artificial Sequence: Synthetic oligonucleotide
gcccgauccauggccaggu

SEQ ID NO: 2599144 - RNA, 19 nt, Artificial Sequence
  Description of Artificial Sequence: Synthetic oligonucleotide
cccgauccauggccagguc

SEQ ID NO: 2599145 - RNA, 19 nt, Artificial Sequence
  Description of Artificial Sequence: Synthetic oligonucleotide
ccucuagcugcaccugccu

SEQ ID NO: 2599146 - RNA, 19 nt, Artificial Sequence
  Description of Artificial Sequence: Synthetic oligonucleotide
ccacguuguacccgguuuu

SEQ ID NO: 2599147 - RNA, 19 nt, Artificial Sequence
  Description of Artificial Sequence: Synthetic oligonucleotide
cccuuugccgggcaaucau

SEQ ID NO: 2599148 - RNA, 19 nt, Artificial Sequence
  Description of Artificial Sequence: Synthetic oligonucleotide
cacccagauuuaguccuuu

SEQ ID NO: 2599149 - RNA, 19 nt, Artificial Sequence
  Description of Artificial Sequence: Synthetic oligonucleotide
gcacaucugcucagcggcu

SEQ ID NO: 2599150 - RNA, 19 nt, Artificial Sequence
  Description of Artificial Sequence: Synthetic oligonucleotide
cgccccucggcaguacaug

SEQ ID NO: 2599151 - RNA, 19 nt, Artificial Sequence
  Description of Artificial Sequence: Synthetic oligonucleotide
gcgccgcccacggugcuga

SEQ ID NO: 2599152 - RNA, 19 nt, Artificial Sequence
  Description of Artificial Sequence: Synthetic oligonucleotide
cagucguuguuggcuguuu

SEQ ID NO: 2599153 - RNA, 19 nt, Artificial Sequence
  Description of Artificial Sequence: Synthetic oligonucleotide
cagcccuuugccgggcaau

SEQ ID NO: 2599154 - RNA, 19 nt, Artificial Sequence
  Description of Artificial Sequence: Synthetic oligonucleotide
cgcugaagcagagacguuu

SEQ ID NO: 2599155 - RNA, 19 nt, Artificial Sequence
  Description of Artificial Sequence: Synthetic oligonucleotide
ccucucuuuucucccugau

SEQ ID NO: 2599156 - RNA, 19 nt, Artificial Sequence
  Description of Artificial Sequence: Synthetic oligonucleotide
cgaucuucccguccggcuu

SEQ ID NO: 2599157 - RNA, 19 nt, Artificial Sequence
  Description of Artificial Sequence: Synthetic oligonucleotide
caggugcagcacccagauu

SEQ ID NO: 2599158 - RNA, 19 nt, Artificial Sequence
  Description of Artificial Sequence: Synthetic oligonucleotide
gcacccagauuuaguccuu

SEQ ID NO: 2599159 - RNA, 19 nt, Artificial Sequence
  Description of Artificial Sequence: Synthetic oligonucleotide
gguccacguuguacccggu

SEQ ID NO: 2599160 - RNA, 19 nt, Artificial Sequence
  Description of Artificial Sequence: Synthetic oligonucleotide
cagccgccccucggcagua

SEQ ID NO: 2599161 - RNA, 19 nt, Artificial Sequence
  Description of Artificial Sequence: Synthetic oligonucleotide
ggauggcuccucagcccuu

SEQ ID NO: 2599162 - RNA, 19 nt, Artificial Sequence
  Description of Artificial Sequence: Synthetic oligonucleotide
cgcuggucucaaagcacau

SEQ ID NO: 2599163 - RNA, 19 nt, Artificial Sequence
  Description of Artificial Sequence: Synthetic oligonucleotide
ccgccccucggcaguacau

SEQ ID NO: 2599164 - RNA, 19 nt, Artificial Sequence
  Description of Artificial Sequence: Synthetic oligonucleotide
ccgggaagcgacgcuccau

SEQ ID NO: 2599165 - RNA, 19 nt, Artificial Sequence
  Description of Artificial Sequence: Synthetic oligonucleotide
gcgcugaagcagagacguu

SEQ ID NO: 2599166 - RNA, 19 nt, Artificial Sequence
  Description of Artificial Sequence: Synthetic oligonucleotide
cgccgcccacggugcugac

SEQ ID NO: 2599167 - RNA, 19 nt, Artificial Sequence
  Description of Artificial Sequence: Synthetic oligonucleotide
ccgcccugcggugucccau

SEQ ID NO: 2599168 - RNA, 19 nt, Artificial Sequence
  Description of Artificial Sequence: Synthetic oligonucleotide
cccucucaucuagcaucuu

SEQ ID NO: 2599169 - RNA, 19 nt, Artificial Sequence
  Description of Artificial Sequence: Synthetic oligonucleotide
cgcccacggugcugaccgu

SEQ ID NO: 2599170 - RNA, 19 nt, Artificial Sequence
  Description of Artificial Sequence: Synthetic oligonucleotide
aaugacucaucacagaagg

SEQ ID NO: 2599171 - RNA, 19 nt, Artificial Sequence
  Description of Artificial Sequence: Synthetic oligonucleotide
ucuagaugacccaugcugg

SEQ ID NO: 2599172 - RNA, 19 nt, Artificial Sequence
  Description of Artificial Sequence: Synthetic oligonucleotide
aucuagaugacccaugcug

SEQ ID NO: 2599173 - RNA, 19 nt, Artificial Sequence
  Description of Artificial Sequence: Synthetic oligonucleotide
aaugggaacgccucugcuc

SEQ ID NO: 2599174 - RNA, 19 nt, Artificial Sequence
  Description of Artificial Sequence: Synthetic oligonucleotide
uacaguuccgcacccaggg

SEQ ID NO: 2599175 - RNA, 19 nt, Artificial Sequence
  Description of Artificial Sequence: Synthetic oligonucleotide
caaacaaugacucaucaca

SEQ ID NO: 2599176 - RNA, 19 nt, Artificial Sequence
  Description of Artificial Sequence: Synthetic oligonucleotide
aauggcucgaagugggguc

SEQ ID NO: 2599177 - RNA, 19 nt, Artificial Sequence
  Description of Artificial Sequence: Synthetic oligonucleotide
augggaacgccucugcucc

SEQ ID NO: 2599178 - RNA, 19 nt, Artificial Sequence
  Description of Artificial Sequence: Synthetic oligonucleotide
ugaguggccaccccuaggg

SEQ ID NO: 2599179 - RNA, 19 nt, Artificial Sequence
  Description of Artificial Sequence: Synthetic oligonucleotide
acuggcaucuagaugaccc

SEQ ID NO: 2599180 - RNA, 19 nt, Artificial Sequence
  Description of Artificial Sequence: Synthetic oligonucleotide
gaugcccuggccuugaccc

SEQ ID NO: 2599181 - RNA, 19 nt, Artificial Sequence
  Description of Artificial Sequence: Synthetic oligonucleotide
agggcugccaaacaggguc

SEQ ID NO: 2599182 - RNA, 19 nt, Artificial Sequence
  Description of Artificial Sequence: Synthetic oligonucleotide
aaacaaugacucaucacag

SEQ ID NO: 2599183 - RNA, 19 nt, Artificial Sequence
  Description of Artificial Sequence: Synthetic oligonucleotide
acagucauccuugaugugg

SEQ ID NO: 2599184 - RNA, 19 nt, Artificial Sequence
  Description of Artificial Sequence: Synthetic oligonucleotide
uuggaagugaccaggggac

SEQ ID NO: 2599185 - RNA, 19 nt, Artificial Sequence
  Description of Artificial Sequence: Synthetic oligonucleotide
acuccucucgaccuguuac

SEQ ID NO: 2599186 - RNA, 19 nt, Artificial Sequence
  Description of Artificial Sequence: Synthetic oligonucleotide
ucaggugggugacugaaug

SEQ ID NO: 2599187 - RNA, 19 nt, Artificial Sequence
  Description of Artificial Sequence: Synthetic oligonucleotide
accuguuacaguuccgcac

SEQ ID NO: 2599188 - RNA, 19 nt, Artificial Sequence
  Description of Artificial Sequence: Synthetic oligonucleotide
agauggagcgccugcauuc

SEQ ID NO: 2599189 - RNA, 19 nt, Artificial Sequence
  Description of Artificial Sequence: Synthetic oligonucleotide
acaaugacucaucacagaa

SEQ ID NO: 2599190 - RNA, 19 nt, Artificial Sequence
  Description of Artificial Sequence: Synthetic oligonucleotide
aacaaugacucaucacaga

SEQ ID NO: 2599191 - RNA, 19 nt, Artificial Sequence
  Description of Artificial Sequence: Synthetic oligonucleotide
agagcuuggcagcaucccc

SEQ ID NO: 2599192 - RNA, 19 nt, Artificial Sequence
  Description of Artificial Sequence: Synthetic oligonucleotide
aagucuggaggggugggcc

SEQ ID NO: 2599193 - RNA, 19 nt, Artificial Sequence
  Description of Artificial Sequence: Synthetic oligonucleotide
aaggccggggacuccaagg

SEQ ID NO: 2599194 - RNA, 19 nt, Artificial Sequence
  Description of Artificial Sequence: Synthetic oligonucleotide
uccacugcgggccagcucu

SEQ ID NO: 2599195 - RNA, 19 nt, Artificial Sequence
  Description of Artificial Sequence: Synthetic oligonucleotide
aguggggagcauccaaccc

SEQ ID NO: 2599196 - RNA, 19 nt, Artificial Sequence
  Description of Artificial Sequence: Synthetic oligonucleotide
augcugaagauggagcgcc

SEQ ID NO: 2599197 - RNA, 19 nt, Artificial Sequence
  Description of Artificial Sequence: Synthetic oligonucleotide
uugacuggcgagaccuucg

SEQ ID NO: 2599198 - RNA, 19 nt, Artificial Sequence
  Description of Artificial Sequence: Synthetic oligonucleotide
acuggcgagaccuucggug

SEQ ID NO: 2599199 - RNA, 19 nt, Artificial Sequence
  Description of Artificial Sequence: Synthetic oligonucleotide
ucaucacagaaggaugggg

SEQ ID NO: 2599200 - RNA, 19 nt, Artificial Sequence
  Description of Artificial Sequence: Synthetic oligonucleotide
gugggucaaagucuggagg

SEQ ID NO: 2599201 - RNA, 19 nt, Artificial Sequence
  Description of Artificial Sequence: Synthetic oligonucleotide
uggccaaucaaccuguauu

SEQ ID NO: 2599202 - RNA, 19 nt, Artificial Sequence
  Description of Artificial Sequence: Synthetic oligonucleotide
uuacaguuccgcacccagg

SEQ ID NO: 2599203 - RNA, 19 nt, Artificial Sequence
  Description of Artificial Sequence: Synthetic oligonucleotide
ugacucaucacagaaggau

SEQ ID NO: 2599204 - RNA, 19 nt, Artificial Sequence
  Description of Artificial Sequence: Synthetic oligonucleotide
agcgccugcauuccacugc

SEQ ID NO: 2599205 - RNA, 19 nt, Artificial Sequence
  Description of Artificial Sequence: Synthetic oligonucleotide
ugcugccaaacaaugacuc

SEQ ID NO: 2599206 - RNA, 19 nt, Artificial Sequence
  Description of Artificial Sequence: Synthetic oligonucleotide
guuacaguuccgcacccag

SEQ ID NO: 2599207 - RNA, 19 nt, Artificial Sequence
  Description of Artificial Sequence: Synthetic oligonucleotide
caaugacucaucacagaag

SEQ ID NO: 2599208 - RNA, 19 nt, Artificial Sequence
  Description of Artificial Sequence: Synthetic oligonucleotide
cagggucucguccacauag

SEQ ID NO: 2599209 - RNA, 19 nt, Artificial Sequence
  Description of Artificial Sequence: Synthetic oligonucleotide
aucacagaaggauggggug

SEQ ID NO: 2599210 - RNA, 19 nt, Artificial Sequence
  Description of Artificial Sequence: Synthetic oligonucleotide
uccugguggguccaacggg

SEQ ID NO: 2599211 - RNA, 19 nt, Artificial Sequence
  Description of Artificial Sequence: Synthetic oligonucleotide
acauaggaugcccuggccu

SEQ ID NO: 2599212 - RNA, 19 nt, Artificial Sequence
  Description of Artificial Sequence: Synthetic oligonucleotide
aaucaaccuguauuuguuu

SEQ ID NO: 2599213 - RNA, 19 nt, Artificial Sequence
  Description of Artificial Sequence: Synthetic oligonucleotide
gugaauggcucgaaguggg

SEQ ID NO: 2599214 - RNA, 19 nt, Artificial Sequence
  Description of Artificial Sequence: Synthetic oligonucleotide
uguccugguggguccaacg

SEQ ID NO: 2599215 - RNA, 19 nt, Artificial Sequence
  Description of Artificial Sequence: Synthetic oligonucleotide
uucugggagccccugguca

SEQ ID NO: 2599216 - RNA, 19 nt, Artificial Sequence
  Description of Artificial Sequence: Synthetic oligonucleotide
ugaauggcucgaagugggg

SEQ ID NO: 2599217 - RNA, 19 nt, Artificial Sequence
  Description of Artificial Sequence: Synthetic oligonucleotide
cuuggaagugaccagggga

SEQ ID NO: 2599218 - RNA, 19 nt, Artificial Sequence
  Description of Artificial Sequence: Synthetic oligonucleotide
ugacugaaugggaacgccu

SEQ ID NO: 2599219 - RNA, 19 nt, Artificial Sequence
  Description of Artificial Sequence: Synthetic oligonucleotide
uccacauaggaugcccugg

SEQ ID NO: 2599220 - RNA, 19 nt, Artificial Sequence
  Description of Artificial Sequence: Synthetic oligonucleotide
cagaaaaggguccagagcu

SEQ ID NO: 2599221 - RNA, 19 nt, Artificial Sequence
  Description of Artificial Sequence: Synthetic oligonucleotide
ugcgaugcugaagauggag

SEQ ID NO: 2599222 - RNA, 19 nt, Artificial Sequence
  Description of Artificial Sequence: Synthetic oligonucleotide
ugggccggguuccaguagg

SEQ ID NO: 2599223 - RNA, 19 nt, Artificial Sequence
  Description of Artificial Sequence: Synthetic oligonucleotide
gacucaucacagaaggaug

SEQ ID NO: 2599224 - RNA, 19 nt, Artificial Sequence
  Description of Artificial Sequence: Synthetic oligonucleotide
acagucucucuugacuggc

SEQ ID NO: 2599225 - RNA, 19 nt, Artificial Sequence
  Description of Artificial Sequence: Synthetic oligonucleotide
aguagggcugccaaacagg

SEQ ID NO: 2599226 - RNA, 19 nt, Artificial Sequence
  Description of Artificial Sequence: Synthetic oligonucleotide
cuggcgagaccuucggugg

SEQ ID NO: 2599227 - RNA, 19 nt, Artificial Sequence
  Description of Artificial Sequence: Synthetic oligonucleotide
ugacuggcgagaccuucgg

SEQ ID NO: 2599228 - RNA, 19 nt, Artificial Sequence
  Description of Artificial Sequence: Synthetic oligonucleotide
aaaaggguccagagcuugg

SEQ ID NO: 2599229 - RNA, 19 nt, Artificial Sequence
  Description of Artificial Sequence: Synthetic oligonucleotide
cagagaguggggagcaucc

SEQ ID NO: 2599230 - RNA, 19 nt, Artificial Sequence
  Description of Artificial Sequence: Synthetic oligonucleotide
uuggugugagguuugggau

SEQ ID NO: 2599231 - RNA, 19 nt, Artificial Sequence
  Description of Artificial Sequence: Synthetic oligonucleotide
cucuggacagucauccuug

SEQ ID NO: 2599232 - RNA, 19 nt, Artificial Sequence
  Description of Artificial Sequence: Synthetic oligonucleotide
uggugugagguuugggaug

SEQ ID NO: 2599233 - RNA, 19 nt, Artificial Sequence
  Description of Artificial Sequence: Synthetic oligonucleotide
auccuugauguggaaggcc

SEQ ID NO: 2599234 - RNA, 19 nt, Artificial Sequence
  Description of Artificial Sequence: Synthetic oligonucleotide
aguggggucucccuggggu

SEQ ID NO: 2599235 - RNA, 19 nt, Artificial Sequence
  Description of Artificial Sequence: Synthetic oligonucleotide
caugcuggggacacucagg

SEQ ID NO: 2599236 - RNA, 19 nt, Artificial Sequence
  Description of Artificial Sequence: Synthetic oligonucleotide
uccaagguccauuggucug

SEQ ID NO: 2599237 - RNA, 19 nt, Artificial Sequence
  Description of Artificial Sequence: Synthetic oligonucleotide
uguccgagaccccuccuug

SEQ ID NO: 2599238 - RNA, 19 nt, Artificial Sequence
  Description of Artificial Sequence: Synthetic oligonucleotide
uugcugccaaacaaugacu

SEQ ID NO: 2599239 - RNA, 19 nt, Artificial Sequence
  Description of Artificial Sequence: Synthetic oligonucleotide
cucgaccuguuacaguucc

SEQ ID NO: 2599240 - RNA, 19 nt, Artificial Sequence
  Description of Artificial Sequence: Synthetic oligonucleotide
uccaacggggugaauggcu

SEQ ID NO: 2599241 - RNA, 19 nt, Artificial Sequence
  Description of Artificial Sequence: Synthetic oligonucleotide
aacagggucucguccacau

SEQ ID NO: 2599242 - RNA, 19 nt, Artificial Sequence
  Description of Artificial Sequence: Synthetic oligonucleotide
ucgaaguggggucucccug

SEQ ID NO: 2599243 - RNA, 19 nt, Artificial Sequence
  Description of Artificial Sequence: Synthetic oligonucleotide
guggggagcauccaacccc

SEQ ID NO: 2599244 - RNA, 19 nt, Artificial Sequence
  Description of Artificial Sequence: Synthetic oligonucleotide
ucuucugggagccccuggu

SEQ ID NO: 2599245 - RNA, 19 nt, Artificial Sequence
  Description of Artificial Sequence: Synthetic oligonucleotide
cauccaaccccuccugggg

SEQ ID NO: 2599246 - RNA, 19 nt, Artificial Sequence
  Description of Artificial Sequence: Synthetic oligonucleotide
acucacagucucucuugac

SEQ ID NO: 2599247 - RNA, 19 nt, Artificial Sequence
  Description of Artificial Sequence: Synthetic oligonucleotide
aucaaccuguauuuguuuu

SEQ ID NO: 2599248 - RNA, 19 nt, Artificial Sequence
  Description of Artificial Sequence: Synthetic oligonucleotide
agaguggggagcauccaac

SEQ ID NO: 2599249 - RNA, 19 nt, Artificial Sequence
  Description of Artificial Sequence: Synthetic oligonucleotide
uccaguagggcugccaaac

SEQ ID NO: 2599250 - RNA, 19 nt, Artificial Sequence
  Description of Artificial Sequence: Synthetic oligonucleotide
gaguggggagcauccaacc

SEQ ID NO: 2599251 - RNA, 19 nt, Artificial Sequence
  Description of Artificial Sequence: Synthetic oligonucleotide
gguccaacggggugaaugg

SEQ ID NO: 2599252 - RNA, 19 nt, Artificial Sequence
  Description of Artificial Sequence: Synthetic oligonucleotide
gaugcugaagauggagcgc

SEQ ID NO: 2599253 - RNA, 19 nt, Artificial Sequence
  Description of Artificial Sequence: Synthetic oligonucleotide
cuugauguggaaggccggg

SEQ ID NO: 2599254 - RNA, 19 nt, Artificial Sequence
  Description of Artificial Sequence: Synthetic oligonucleotide
cugcauuccacugcgggcc

SEQ ID NO: 2599255 - RNA, 19 nt, Artificial Sequence
  Description of Artificial Sequence: Synthetic oligonucleotide
gguguggccaaucaaccug

SEQ ID NO: 2599256 - RNA, 19 nt, Artificial Sequence
  Description of Artificial Sequence: Synthetic oligonucleotide
cacagucucucuugacugg

SEQ ID NO: 2599257 - RNA, 19 nt, Artificial Sequence
  Description of Artificial Sequence: Synthetic oligonucleotide
acugcgggccagcucuacc

SEQ ID NO: 2599258 - RNA, 19 nt, Artificial Sequence
  Description of Artificial Sequence: Synthetic oligonucleotide
uugauguggaaggccgggg

SEQ ID NO: 2599259 - RNA, 19 nt, Artificial Sequence
  Description of Artificial Sequence: Synthetic oligonucleotide
aagauggagcgccugcauu

SEQ ID NO: 2599260 - RNA, 19 nt, Artificial Sequence
  Description of Artificial Sequence: Synthetic oligonucleotide
agcauccaaccccuccugg

SEQ ID NO: 2599261 - RNA, 19 nt, Artificial Sequence
  Description of Artificial Sequence: Synthetic oligonucleotide
caguagggcugccaaacag

SEQ ID NO: 2599262 - RNA, 19 nt, Artificial Sequence
  Description of Artificial Sequence: Synthetic oligonucleotide
cuggccuugacccggcagc

SEQ ID NO: 2599263 - RNA, 19 nt, Artificial Sequence
  Description of Artificial Sequence: Synthetic oligonucleotide
ucucccuggggugagguga

SEQ ID NO: 2599264 - RNA, 19 nt, Artificial Sequence
  Description of Artificial Sequence: Synthetic oligonucleotide
ugccaaacaaugacucauc

SEQ ID NO: 2599265 - RNA, 19 nt, Artificial Sequence
  Description of Artificial Sequence: Synthetic oligonucleotide
agcucuaccaggaucuuca

SEQ ID NO: 2599266 - RNA, 19 nt, Artificial Sequence
  Description of Artificial Sequence: Synthetic oligonucleotide
ucgaccuguuacaguuccg

SEQ ID NO: 2599267 - RNA, 19 nt, Artificial Sequence
  Description of Artificial Sequence: Synthetic oligonucleotide
acugaaugggaacgccucu

SEQ ID NO: 2599268 - RNA, 19 nt, Artificial Sequence
  Description of Artificial Sequence: Synthetic oligonucleotide
ugggugacugaaugggaac

SEQ ID NO: 2599269 - RNA, 19 nt, Artificial Sequence
  Description of Artificial Sequence: Synthetic oligonucleotide
guccugguggguccaacgg

SEQ ID NO: 2599270 - RNA, 19 nt, Artificial Sequence
  Description of Artificial Sequence: Synthetic oligonucleotide
uggggagcauccaaccccu

SEQ ID NO: 2599271 - RNA, 19 nt, Artificial Sequence
  Description of Artificial Sequence: Synthetic oligonucleotide
ucucucuugacuggcgaga

SEQ ID NO: 2599272 - RNA, 19 nt, Artificial Sequence
  Description of Artificial Sequence: Synthetic oligonucleotide
ccuguuacaguuccgcacc

SEQ ID NO: 2599273 - RNA, 19 nt, Artificial Sequence
  Description of Artificial Sequence: Synthetic oligonucleotide
agucuggaggggugggccg

SEQ ID NO: 2599274 - RNA, 19 nt, Artificial Sequence
  Description of Artificial Sequence: Synthetic oligonucleotide
ugacccggcagcugcuggg

SEQ ID NO: 2599275 - RNA, 19 nt, Artificial Sequence
  Description of Artificial Sequence: Synthetic oligonucleotide
uggacucacagucucucuu

SEQ ID NO: 2599276 - RNA, 19 nt, Artificial Sequence
  Description of Artificial Sequence: Synthetic oligonucleotide
agaccuucggugguccugg

SEQ ID NO: 2599277 - RNA, 19 nt, Artificial Sequence
  Description of Artificial Sequence: Synthetic oligonucleotide
gggugaauggcucgaagug

SEQ ID NO: 2599278 - RNA, 19 nt, Artificial Sequence
  Description of Artificial Sequence: Synthetic oligonucleotide
gcaucuagaugacccaugc

SEQ ID NO: 2599279 - RNA, 19 nt, Artificial Sequence
  Description of Artificial Sequence: Synthetic oligonucleotide
gggagugcgaugcugaaga

SEQ ID NO: 2599280 - RNA, 19 nt, Artificial Sequence
  Description of Artificial Sequence: Synthetic oligonucleotide
cagggugggucaaagucug

SEQ ID NO: 2599281 - RNA, 19 nt, Artificial Sequence
  Description of Artificial Sequence: Synthetic oligonucleotide
ugugagguuugggaugcug

SEQ ID NO: 2599282 - RNA, 19 nt, Artificial Sequence
  Description of Artificial Sequence: Synthetic oligonucleotide
cugguggaguccagaaaag

SEQ ID NO: 2599283 - RNA, 19 nt, Artificial Sequence
  Description of Artificial Sequence: Synthetic oligonucleotide
aaguggggucucccugggg

SEQ ID NO: 2599284 - RNA, 19 nt, Artificial Sequence
  Description of Artificial Sequence: Synthetic oligonucleotide
cucaucacagaaggauggg

SEQ ID NO: 2599285 - RNA, 19 nt, Artificial Sequence
  Description of Artificial Sequence: Synthetic oligonucleotide
ggacucuggacagucaucc

SEQ ID NO: 2599286 - RNA, 19 nt, Artificial Sequence
  Description of Artificial Sequence: Synthetic oligonucleotide
ucucuugacuggcgagacc

SEQ ID NO: 2599287 - RNA, 19 nt, Artificial Sequence
  Description of Artificial Sequence: Synthetic oligonucleotide
gugagguuugggaugcugc

SEQ ID NO: 2599288 - RNA, 19 nt, Artificial Sequence
  Description of Artificial Sequence: Synthetic oligonucleotide
uccucucgaccuguuacag

SEQ ID NO: 2599289 - RNA, 19 nt, Artificial Sequence
  Description of Artificial Sequence: Synthetic oligonucleotide
caguuccgcacccagggug

SEQ ID NO: 2599290 - RNA, 19 nt, Artificial Sequence
  Description of Artificial Sequence: Synthetic oligonucleotide
gacugaaugggaacgccuc

SEQ ID NO: 2599291 - RNA, 19 nt, Artificial Sequence
  Description of Artificial Sequence: Synthetic oligonucleotide
aaggaugggguguggccaa

SEQ ID NO: 2599292 - RNA, 19 nt, Artificial Sequence
  Description of Artificial Sequence: Synthetic oligonucleotide
uuucuuccuuggugugagg

SEQ ID NO: 2599293 - RNA, 19 nt, Artificial Sequence
  Description of Artificial Sequence: Synthetic oligonucleotide
aguuccgcacccagggugg

SEQ ID NO: 2599294 - RNA, 19 nt, Artificial Sequence
  Description of Artificial Sequence: Synthetic oligonucleotide
ucguccacauaggaugccc

SEQ ID NO: 2599295 - RNA, 19 nt, Artificial Sequence
  Description of Artificial Sequence: Synthetic oligonucleotide
uccgagaccccuccuugcu

SEQ ID NO: 2599296 - RNA, 19 nt, Artificial Sequence
  Description of Artificial Sequence: Synthetic oligonucleotide
ggugggucaaagucuggag

SEQ ID NO: 2599297 - RNA, 19 nt, Artificial Sequence
  Description of Artificial Sequence: Synthetic oligonucleotide
uuccuuggugugagguuug

SEQ ID NO: 2599298 - RNA, 19 nt, Artificial Sequence
  Description of Artificial Sequence: Synthetic oligonucleotide
gagugcgaugcugaagaug

SEQ ID NO: 2599299 - RNA, 19 nt, Artificial Sequence
  Description of Artificial Sequence: Synthetic oligonucleotide
gauggagcgccugcauucc

SEQ ID NO: 2599300 - RNA, 19 nt, Artificial Sequence
  Description of Artificial Sequence: Synthetic oligonucleotide
gcugguggaguccagaaaa

SEQ ID NO: 2599301 - RNA, 19 nt, Artificial Sequence
  Description of Artificial Sequence: Synthetic oligonucleotide
ugaggugaguggccacccc

SEQ ID NO: 2599302 - RNA, 19 nt, Artificial Sequence
  Description of Artificial Sequence: Synthetic oligonucleotide
ccuucggugguccugggcc

SEQ ID NO: 2599303 - RNA, 19 nt, Artificial Sequence
  Description of Artificial Sequence: Synthetic oligonucleotide
cacauaggaugcccuggcc

SEQ ID NO: 2599304 - RNA, 19 nt, Artificial Sequence
  Description of Artificial Sequence: Synthetic oligonucleotide
caacggggugaauggcucg

SEQ ID NO: 2599305 - RNA, 19 nt, Artificial Sequence
  Description of Artificial Sequence: Synthetic oligonucleotide
cuucggugguccugggccc

SEQ ID NO: 2599306 - RNA, 19 nt, Artificial Sequence
  Description of Artificial Sequence: Synthetic oligonucleotide
cauccuugauguggaaggc

SEQ ID NO: 2599307 - RNA, 19 nt, Artificial Sequence
  Description of Artificial Sequence: Synthetic oligonucleotide
uggagcgccugcauuccac

SEQ ID NO: 2599308 - RNA, 19 nt, Artificial Sequence
  Description of Artificial Sequence: Synthetic oligonucleotide
cagucucucuugacuggcg

SEQ ID NO: 2599309 - RNA, 19 nt, Artificial Sequence
  Description of Artificial Sequence: Synthetic oligonucleotide
gacucacagucucucuuga

SEQ ID NO: 2599310 - RNA, 19 nt, Artificial Sequence
  Description of Artificial Sequence: Synthetic oligonucleotide
gggugacugaaugggaacg

SEQ ID NO: 2599311 - RNA, 19 nt, Artificial Sequence
  Description of Artificial Sequence: Synthetic oligonucleotide
ugcgggccagcucuaccag

SEQ ID NO: 2599312 - RNA, 19 nt, Artificial Sequence
  Description of Artificial Sequence: Synthetic oligonucleotide
gacagucauccuugaugug

SEQ ID NO: 2599313 - RNA, 19 nt, Artificial Sequence
  Description of Artificial Sequence: Synthetic oligonucleotide
caucacagaaggauggggu

SEQ ID NO: 2599314 - RNA, 19 nt, Artificial Sequence
  Description of Artificial Sequence: Synthetic oligonucleotide
acccaugcuggggacacuc

SEQ ID NO: 2599315 - RNA, 19 nt, Artificial Sequence
  Description of Artificial Sequence: Synthetic oligonucleotide
ggacagucauccuugaugu

SEQ ID NO: 2599316 - RNA, 19 nt, Artificial Sequence
  Description of Artificial Sequence: Synthetic oligonucleotide
caaagucuggagggguggg

SEQ ID NO: 2599317 - RNA, 19 nt, Artificial Sequence
  Description of Artificial Sequence: Synthetic oligonucleotide
gagcauccaaccccuccug

SEQ ID NO: 2599318 - RNA, 19 nt, Artificial Sequence
  Description of Artificial Sequence: Synthetic oligonucleotide
gccugcauuccacugcggg

SEQ ID NO: 2599319 - RNA, 19 nt, Artificial Sequence
  Description of Artificial Sequence: Synthetic oligonucleotide
gaccuguuacaguuccgca

SEQ ID NO: 2599320 - RNA, 19 nt, Artificial Sequence
  Description of Artificial Sequence: Synthetic oligonucleotide
ggugugagguuugggaugc

SEQ ID NO: 2599321 - RNA, 19 nt, Artificial Sequence
  Description of Artificial Sequence: Synthetic oligonucleotide
cuggggugaggugaguggc

SEQ ID NO: 2599322 - RNA, 19 nt, Artificial Sequence
  Description of Artificial Sequence: Synthetic oligonucleotide
gugacugaaugggaacgcc

SEQ ID NO: 2599323 - RNA, 19 nt, Artificial Sequence
  Description of Artificial Sequence: Synthetic oligonucleotide
acacucaggugggugacug

SEQ ID NO: 2599324 - RNA, 19 nt, Artificial Sequence
  Description of Artificial Sequence: Synthetic oligonucleotide
ccaaacaaugacucaucac

SEQ ID NO: 2599325 - RNA, 19 nt, Artificial Sequence
  Description of Artificial Sequence: Synthetic oligonucleotide
aacggggugaauggcucga

SEQ ID NO: 2599326 - RNA, 19 nt, Artificial Sequence
  Description of Artificial Sequence: Synthetic oligonucleotide
gucaaagucuggaggggug

SEQ ID NO: 2599327 - RNA, 19 nt, Artificial Sequence
  Description of Artificial Sequence: Synthetic oligonucleotide
cuguuacaguuccgcaccc

SEQ ID NO: 2599328 - RNA, 19 nt, Artificial Sequence
  Description of Artificial Sequence: Synthetic oligonucleotide
gggacuccaagguccauug

SEQ ID NO: 2599329 - RNA, 19 nt, Artificial Sequence
  Description of Artificial Sequence: Synthetic oligonucleotide
uguuacaguuccgcaccca

SEQ ID NO: 2599330 - RNA, 19 nt, Artificial Sequence
  Description of Artificial Sequence: Synthetic oligonucleotide
cugaaugggaacgccucug

SEQ ID NO: 2599331 - RNA, 19 nt, Artificial Sequence
  Description of Artificial Sequence: Synthetic oligonucleotide
ugggagugcgaugcugaag

SEQ ID NO: 2599332 - RNA, 19 nt, Artificial Sequence
  Description of Artificial Sequence: Synthetic oligonucleotide
ugacccaugcuggggacac

SEQ ID NO: 2599333 - RNA, 19 nt, Artificial Sequence
  Description of Artificial Sequence: Synthetic oligonucleotide
cagucauccuugaugugga

SEQ ID NO: 2599334 - RNA, 19 nt, Artificial Sequence
  Description of Artificial Sequence: Synthetic oligonucleotide
gagaguggggagcauccaa

SEQ ID NO: 2599335 - RNA, 19 nt, Artificial Sequence
  Description of Artificial Sequence: Synthetic oligonucleotide
uccuuggugugagguuugg

SEQ ID NO: 2599336 - RNA, 19 nt, Artificial Sequence
  Description of Artificial Sequence: Synthetic oligonucleotide
ugcccuggccuugacccgg

SEQ ID NO: 2599337 - RNA, 19 nt, Artificial Sequence
  Description of Artificial Sequence: Synthetic oligonucleotide
gugaccaggggacucugga

SEQ ID NO: 2599338 - RNA, 19 nt, Artificial Sequence
  Description of Artificial Sequence: Synthetic oligonucleotide
guuccaguagggcugccaa

SEQ ID NO: 2599339 - RNA, 19 nt, Artificial Sequence
  Description of Artificial Sequence: Synthetic oligonucleotide
gccaaacagggucucgucc

SEQ ID NO: 2599340 - RNA, 19 nt, Artificial Sequence
  Description of Artificial Sequence: Synthetic oligonucleotide
cucacagucucucuugacu

SEQ ID NO: 2599341 - RNA, 19 nt, Artificial Sequence
  Description of Artificial Sequence: Synthetic oligonucleotide
gaguccagaaaagggucca

SEQ ID NO: 2599342 - RNA, 19 nt, Artificial Sequence
  Description of Artificial Sequence: Synthetic oligonucleotide
ucucgaccuguuacaguuc

SEQ ID NO: 2599343 - RNA, 19 nt, Artificial Sequence
  Description of Artificial Sequence: Synthetic oligonucleotide
gagaccuucggugguccug

SEQ ID NO: 2599344 - RNA, 19 nt, Artificial Sequence
  Description of Artificial Sequence: Synthetic oligonucleotide
cuugacuggcgagaccuuc

SEQ ID NO: 2599345 - RNA, 19 nt, Artificial Sequence
  Description of Artificial Sequence: Synthetic oligonucleotide
ugccaaacagggucucguc

SEQ ID NO: 2599346 - RNA, 19 nt, Artificial Sequence
  Description of Artificial Sequence: Synthetic oligonucleotide
uguggaaggccggggacuc

SEQ ID NO: 2599347 - RNA, 19 nt, Artificial Sequence
  Description of Artificial Sequence: Synthetic oligonucleotide
aggccggggacuccaaggu

SEQ ID NO: 2599348 - RNA, 19 nt, Artificial Sequence
  Description of Artificial Sequence: Synthetic oligonucleotide
ugcugaagauggagcgccu

SEQ ID NO: 2599349 - RNA, 19 nt, Artificial Sequence
  Description of Artificial Sequence: Synthetic oligonucleotide
cuagggguggcugguggag

SEQ ID NO: 2599350 - RNA, 19 nt, Artificial Sequence
  Description of Artificial Sequence: Synthetic oligonucleotide
uggaaggccggggacucca

SEQ ID NO: 2599351 - RNA, 19 nt, Artificial Sequence
  Description of Artificial Sequence: Synthetic oligonucleotide
caccccuagggguggcugg

SEQ ID NO: 2599352 - RNA, 19 nt, Artificial Sequence
  Description of Artificial Sequence: Synthetic oligonucleotide
ccugcauuccacugcgggc

SEQ ID NO: 2599353 - RNA, 19 nt, Artificial Sequence
  Description of Artificial Sequence: Synthetic oligonucleotide
acucaggugggugacugaa

SEQ ID NO: 2599354 - RNA, 19 nt, Artificial Sequence
  Description of Artificial Sequence: Synthetic oligonucleotide
ggguccaacggggugaaug

SEQ ID NO: 2599355 - RNA, 19 nt, Artificial Sequence
  Description of Artificial Sequence: Synthetic oligonucleotide
gccaaacaaugacucauca

SEQ ID NO: 2599356 - RNA, 19 nt, Artificial Sequence
  Description of Artificial Sequence: Synthetic oligonucleotide
ggugacugaaugggaacgc

SEQ ID NO: 2599357 - RNA, 19 nt, Artificial Sequence
  Description of Artificial Sequence: Synthetic oligonucleotide
ggacacuggcaucuagaug

SEQ ID NO: 2599358 - RNA, 19 nt, Artificial Sequence
  Description of Artificial Sequence: Synthetic oligonucleotide
ggaguccagaaaagggucc

SEQ ID NO: 2599359 - RNA, 19 nt, Artificial Sequence
  Description of Artificial Sequence: Synthetic oligonucleotide
gagcgccugcauuccacug

SEQ ID NO: 2599360 - RNA, 19 nt, Artificial Sequence
  Description of Artificial Sequence: Synthetic oligonucleotide
auguggaaggccggggacu

SEQ ID NO: 2599361 - RNA, 19 nt, Artificial Sequence
  Description of Artificial Sequence: Synthetic oligonucleotide
uggaagugaccaggggacu

SEQ ID NO: 2599362 - RNA, 19 nt, Artificial Sequence
  Description of Artificial Sequence: Synthetic oligonucleotide
uuccaguagggcugccaaa

SEQ ID NO: 2599363 - RNA, 19 nt, Artificial Sequence
  Description of Artificial Sequence: Synthetic oligonucleotide
guggaguccagaaaagggu

SEQ ID NO: 2599364 - RNA, 19 nt, Artificial Sequence
  Description of Artificial Sequence: Synthetic oligonucleotide
ugcuggggacacucaggug

SEQ ID NO: 2599365 - RNA, 19 nt, Artificial Sequence
  Description of Artificial Sequence: Synthetic oligonucleotide
cuggcaucuagaugaccca

SEQ ID NO: 2599366 - RNA, 19 nt, Artificial Sequence
  Description of Artificial Sequence: Synthetic oligonucleotide
cucucgaccuguuacaguu

SEQ ID NO: 2599367 - RNA, 19 nt, Artificial Sequence
  Description of Artificial Sequence: Synthetic oligonucleotide
cccagggugggucaaaguc

SEQ ID NO: 2599368 - RNA, 19 nt, Artificial Sequence
  Description of Artificial Sequence: Synthetic oligonucleotide
auaggaugcccuggccuug

SEQ ID NO: 2599369 - RNA, 19 nt, Artificial Sequence
  Description of Artificial Sequence: Synthetic oligonucleotide
acaguuccgcacccagggu

SEQ ID NO: 2599370 - RNA, 19 nt, Artificial Sequence
  Description of Artificial Sequence: Synthetic oligonucleotide
uggcaucuagaugacccau

SEQ ID NO: 2599371 - RNA, 19 nt, Artificial Sequence
  Description of Artificial Sequence: Synthetic oligonucleotide
caagguccauuggucuggg

SEQ ID NO: 2599372 - RNA, 19 nt, Artificial Sequence
  Description of Artificial Sequence: Synthetic oligonucleotide
agggucucguccacauagg

SEQ ID NO: 2599373 - RNA, 19 nt, Artificial Sequence
  Description of Artificial Sequence: Synthetic oligonucleotide
guccgagaccccuccuugc

SEQ ID NO: 2599374 - RNA, 19 nt, Artificial Sequence
  Description of Artificial Sequence: Synthetic oligonucleotide
gaaugggaacgccucugcu

SEQ ID NO: 2599375 - RNA, 19 nt, Artificial Sequence
  Description of Artificial Sequence: Synthetic oligonucleotide
gcgccugcauuccacugcg

SEQ ID NO: 2599376 - RNA, 19 nt, Artificial Sequence
  Description of Artificial Sequence: Synthetic oligonucleotide
cuccucucgaccuguuaca

SEQ ID NO: 2599377 - RNA, 19 nt, Artificial Sequence
  Description of Artificial Sequence: Synthetic oligonucleotide
gagaccccuccuugcugcc

SEQ ID NO: 2599378 - RNA, 19 nt, Artificial Sequence
  Description of Artificial Sequence: Synthetic oligonucleotide
auggcucgaaguggggucu

SEQ ID NO: 2599379 - RNA, 19 nt, Artificial Sequence
  Description of Artificial Sequence: Synthetic oligonucleotide
gccuugacccggcagcugc

SEQ ID NO: 2599380 - RNA, 19 nt, Artificial Sequence
  Description of Artificial Sequence: Synthetic oligonucleotide
uggcgagaccuucgguggu

SEQ ID NO: 2599381 - RNA, 19 nt, Artificial Sequence
  Description of Artificial Sequence: Synthetic oligonucleotide
cucccuggggugaggugag

SEQ ID NO: 2599382 - RNA, 19 nt, Artificial Sequence
  Description of Artificial Sequence: Synthetic oligonucleotide
ccaagguccauuggucugg

SEQ ID NO: 2599383 - RNA, 19 nt, Artificial Sequence
  Description of Artificial Sequence: Synthetic oligonucleotide
guggccaccccuaggggug

SEQ ID NO: 2599384 - RNA, 19 nt, Artificial Sequence
  Description of Artificial Sequence: Synthetic oligonucleotide
ucuggaggggugggccggg

SEQ ID NO: 2599385 - RNA, 19 nt, Artificial Sequence
  Description of Artificial Sequence: Synthetic oligonucleotide
agugaccaggggacucugg

SEQ ID NO: 2599386 - RNA, 19 nt, Artificial Sequence
  Description of Artificial Sequence: Synthetic oligonucleotide
ccuugauguggaaggccgg

SEQ ID NO: 2599387 - RNA, 19 nt, Artificial Sequence
  Description of Artificial Sequence: Synthetic oligonucleotide
gaggugaguggccaccccu

SEQ ID NO: 2599388 - RNA, 19 nt, Artificial Sequence
  Description of Artificial Sequence: Synthetic oligonucleotide
ccacauaggaugcccuggc

SEQ ID NO: 2599389 - RNA, 19 nt, Artificial Sequence
  Description of Artificial Sequence: Synthetic oligonucleotide
gaauggcucgaaguggggu

SEQ ID NO: 2599390 - RNA, 19 nt, Artificial Sequence
  Description of Artificial Sequence: Synthetic oligonucleotide
guggggucucccuggggug

SEQ ID NO: 2599391 - RNA, 19 nt, Artificial Sequence
  Description of Artificial Sequence: Synthetic oligonucleotide
agcugcugggagugcgaug

SEQ ID NO: 2599392 - RNA, 19 nt, Artificial Sequence
  Description of Artificial Sequence: Synthetic oligonucleotide
ucuugacuggcgagaccuu

SEQ ID NO: 2599393 - RNA, 19 nt, Artificial Sequence
  Description of Artificial Sequence: Synthetic oligonucleotide
cauuccacugcgggccagc

SEQ ID NO: 2599394 - RNA, 19 nt, Artificial Sequence
  Description of Artificial Sequence: Synthetic oligonucleotide
cgaaguggggucucccugg

SEQ ID NO: 2599395 - RNA, 19 nt, Artificial Sequence
  Description of Artificial Sequence: Synthetic oligonucleotide
gugggugacugaaugggaa

SEQ ID NO: 2599396 - RNA, 19 nt, Artificial Sequence
  Description of Artificial Sequence: Synthetic oligonucleotide
acggcuguccgagaccccu

SEQ ID NO: 2599397 - RNA, 19 nt, Artificial Sequence
  Description of Artificial Sequence: Synthetic oligonucleotide
gggacacucagguggguga

SEQ ID NO: 2599398 - RNA, 19 nt, Artificial Sequence
  Description of Artificial Sequence: Synthetic oligonucleotide
gaccuucggugguccuggg

SEQ ID NO: 2599399 - RNA, 19 nt, Artificial Sequence
  Description of Artificial Sequence: Synthetic oligonucleotide
uguggccaaucaaccugua

SEQ ID NO: 2599400 - RNA, 19 nt, Artificial Sequence
  Description of Artificial Sequence: Synthetic oligonucleotide
gaagauggagcgccugcau

SEQ ID NO: 2599401 - RNA, 19 nt, Artificial Sequence
  Description of Artificial Sequence: Synthetic oligonucleotide
uaggaugcccuggccuuga

SEQ ID NO: 2599402 - RNA, 19 nt, Artificial Sequence
  Description of Artificial Sequence: Synthetic oligonucleotide
uccgcacccaggguggguc

SEQ ID NO: 2599403 - RNA, 19 nt, Artificial Sequence
  Description of Artificial Sequence: Synthetic oligonucleotide
ccggguuccaguagggcug

SEQ ID NO: 2599404 - RNA, 19 nt, Artificial Sequence
  Description of Artificial Sequence: Synthetic oligonucleotide
gcugccaaacaaugacuca

SEQ ID NO: 2599405 - RNA, 19 nt, Artificial Sequence
  Description of Artificial Sequence: Synthetic oligonucleotide
gccggggacuccaaggucc

SEQ ID NO: 2599406 - RNA, 19 nt, Artificial Sequence
  Description of Artificial Sequence: Synthetic oligonucleotide
gaagugaccaggggacucu

SEQ ID NO: 2599407 - RNA, 19 nt, Artificial Sequence
  Description of Artificial Sequence: Synthetic oligonucleotide
guuugggaugcugccccug

SEQ ID NO: 2599408 - RNA, 19 nt, Artificial Sequence
  Description of Artificial Sequence: Synthetic oligonucleotide
agucauccuugauguggaa

SEQ ID NO: 2599409 - RNA, 19 nt, Artificial Sequence
  Description of Artificial Sequence: Synthetic oligonucleotide
agagaguggggagcaucca

SEQ ID NO: 2599410 - RNA, 19 nt, Artificial Sequence
  Description of Artificial Sequence: Synthetic oligonucleotide
cuccaagguccauuggucu

SEQ ID NO: 2599411 - RNA, 19 nt, Artificial Sequence
  Description of Artificial Sequence: Synthetic oligonucleotide
gggguggacucacagucuc

SEQ ID NO: 2599412 - RNA, 19 nt, Artificial Sequence
  Description of Artificial Sequence: Synthetic oligonucleotide
cucguccacauaggaugcc

SEQ ID NO: 2599413 - RNA, 19 nt, Artificial Sequence
  Description of Artificial Sequence: Synthetic oligonucleotide
uuccacugcgggccagcuc

SEQ ID NO: 2599414 - RNA, 19 nt, Artificial Sequence
  Description of Artificial Sequence: Synthetic oligonucleotide
gguggacucacagucucuc

SEQ ID NO: 2599415 - RNA, 19 nt, Artificial Sequence
  Description of Artificial Sequence: Synthetic oligonucleotide
uggccuugacccggcagcu

SEQ ID NO: 2599416 - RNA, 19 nt, Artificial Sequence
  Description of Artificial Sequence: Synthetic oligonucleotide
auggagcgccugcauucca

SEQ ID NO: 2599417 - RNA, 19 nt, Artificial Sequence
  Description of Artificial Sequence: Synthetic oligonucleotide
ggaugcccuggccuugacc

SEQ ID NO: 2599418 - RNA, 19 nt, Artificial Sequence
  Description of Artificial Sequence: Synthetic oligonucleotide
gccaaucaaccuguauuug

SEQ ID NO: 2599419 - RNA, 19 nt, Artificial Sequence
  Description of Artificial Sequence: Synthetic oligonucleotide
ggggugaauggcucgaagu

SEQ ID NO: 2599420 - RNA, 19 nt, Artificial Sequence
  Description of Artificial Sequence: Synthetic oligonucleotide
cacuggcaucuagaugacc

SEQ ID NO: 2599421 - RNA, 19 nt, Artificial Sequence
  Description of Artificial Sequence: Synthetic oligonucleotide
gggcccacuccucucgacc

SEQ ID NO: 2599422 - RNA, 19 nt, Artificial Sequence
  Description of Artificial Sequence: Synthetic oligonucleotide
guccaacggggugaauggc

SEQ ID NO: 2599423 - RNA, 19 nt, Artificial Sequence
  Description of Artificial Sequence: Synthetic oligonucleotide
gguggguccaacgggguga

SEQ ID NO: 2599424 - RNA, 19 nt, Artificial Sequence
  Description of Artificial Sequence: Synthetic oligonucleotide
gaccccuccuugcugccaa

SEQ ID NO: 2599425 - RNA, 19 nt, Artificial Sequence
  Description of Artificial Sequence: Synthetic oligonucleotide
ugggaacgccucugcucca

SEQ ID NO: 2599426 - RNA, 19 nt, Artificial Sequence
  Description of Artificial Sequence: Synthetic oligonucleotide
cauaggaugcccuggccuu

SEQ ID NO: 2599427 - RNA, 19 nt, Artificial Sequence
  Description of Artificial Sequence: Synthetic oligonucleotide
uucggugguccugggccca

SEQ ID NO: 2599428 - RNA, 19 nt, Artificial Sequence
  Description of Artificial Sequence: Synthetic oligonucleotide
gcucuguccuggugggucc

SEQ ID NO: 2599429 - RNA, 19 nt, Artificial Sequence
  Description of Artificial Sequence: Synthetic oligonucleotide
uggccaccccuaggggugg

SEQ ID NO: 2599430 - RNA, 19 nt, Artificial Sequence
  Description of Artificial Sequence: Synthetic oligonucleotide
cugccaaacaaugacucau

SEQ ID NO: 2599431 - RNA, 19 nt, Artificial Sequence
  Description of Artificial Sequence: Synthetic oligonucleotide
cgagaccccuccuugcugc

SEQ ID NO: 2599432 - RNA, 19 nt, Artificial Sequence
  Description of Artificial Sequence: Synthetic oligonucleotide
cacccagggugggucaaag

SEQ ID NO: 2599433 - RNA, 19 nt, Artificial Sequence
  Description of Artificial Sequence: Synthetic oligonucleotide
gugggccggguuccaguag

SEQ ID NO: 2599434 - RNA, 19 nt, Artificial Sequence
  Description of Artificial Sequence: Synthetic oligonucleotide
augacccaugcuggggaca

SEQ ID NO: 2599435 - RNA, 19 nt, Artificial Sequence
  Description of Artificial Sequence: Synthetic oligonucleotide
ggaagugaccaggggacuc

SEQ ID NO: 2599436 - RNA, 19 nt, Artificial Sequence
  Description of Artificial Sequence: Synthetic oligonucleotide
ggccaaucaaccuguauuu

SEQ ID NO: 2599437 - RNA, 19 nt, Artificial Sequence
  Description of Artificial Sequence: Synthetic oligonucleotide
ccaaucaaccuguauuugu

SEQ ID NO: 2599438 - RNA, 19 nt, Artificial Sequence
  Description of Artificial Sequence: Synthetic oligonucleotide
gggucucguccacauagga

SEQ ID NO: 2599439 - RNA, 19 nt, Artificial Sequence
  Description of Artificial Sequence: Synthetic oligonucleotide
ggcuguccgagaccccucc

SEQ ID NO: 2599440 - RNA, 19 nt, Artificial Sequence
  Description of Artificial Sequence: Synthetic oligonucleotide
ugggcccacuccucucgac

SEQ ID NO: 2599441 - RNA, 19 nt, Artificial Sequence
  Description of Artificial Sequence: Synthetic oligonucleotide
gucucccuggggugaggug

SEQ ID NO: 2599442 - RNA, 19 nt, Artificial Sequence
  Description of Artificial Sequence: Synthetic oligonucleotide
auuccacugcgggccagcu

SEQ ID NO: 2599443 - RNA, 19 nt, Artificial Sequence
  Description of Artificial Sequence: Synthetic oligonucleotide
acccggcagcugcugggag

SEQ ID NO: 2599444 - RNA, 19 nt, Artificial Sequence
  Description of Artificial Sequence: Synthetic oligonucleotide
cgaccuguuacaguuccgc

SEQ ID NO: 2599445 - RNA, 19 nt, Artificial Sequence
  Description of Artificial Sequence: Synthetic oligonucleotide
cuccagagaguggggagca

SEQ ID NO: 2599446 - RNA, 19 nt, Artificial Sequence
  Description of Artificial Sequence: Synthetic oligonucleotide
cuccuugcugccaaacaau

SEQ ID NO: 2599447 - RNA, 19 nt, Artificial Sequence
  Description of Artificial Sequence: Synthetic oligonucleotide
aaccccuccuggggugucu

SEQ ID NO: 2599448 - RNA, 19 nt, Artificial Sequence
  Description of Artificial Sequence: Synthetic oligonucleotide
cccuagggguggcuggugg

SEQ ID NO: 2599449 - RNA, 19 nt, Artificial Sequence
  Description of Artificial Sequence: Synthetic oligonucleotide
ccacggcuguccgagaccc

SEQ ID NO: 2599450 - RNA, 19 nt, Artificial Sequence
  Description of Artificial Sequence: Synthetic oligonucleotide
gcugaagauggagcgccug

SEQ ID NO: 2599451 - RNA, 19 nt, Artificial Sequence
  Description of Artificial Sequence: Synthetic oligonucleotide
guuccgcacccaggguggg

SEQ ID NO: 2599452 - RNA, 19 nt, Artificial Sequence
  Description of Artificial Sequence: Synthetic oligonucleotide
agggugggucaaagucugg

SEQ ID NO: 2599453 - RNA, 19 nt, Artificial Sequence
  Description of Artificial Sequence: Synthetic oligonucleotide
ccuugcugccaaacaauga

SEQ ID NO: 2599454 - RNA, 19 nt, Artificial Sequence
  Description of Artificial Sequence: Synthetic oligonucleotide
ggggacacucaggugggug

SEQ ID NO: 2599455 - RNA, 19 nt, Artificial Sequence
  Description of Artificial Sequence: Synthetic oligonucleotide
cuuccuuggugugagguuu

SEQ ID NO: 2599456 - RNA, 19 nt, Artificial Sequence
  Description of Artificial Sequence: Synthetic oligonucleotide
acagggucucguccacaua

SEQ ID NO: 2599457 - RNA, 19 nt, Artificial Sequence
  Description of Artificial Sequence: Synthetic oligonucleotide
ggcucuguccugguggguc

SEQ ID NO: 2599458 - RNA, 19 nt, Artificial Sequence
  Description of Artificial Sequence: Synthetic oligonucleotide
caucuagaugacccaugcu

SEQ ID NO: 2599459 - RNA, 19 nt, Artificial Sequence
  Description of Artificial Sequence: Synthetic oligonucleotide
ggugggugacugaauggga

SEQ ID NO: 2599460 - RNA, 19 nt, Artificial Sequence
  Description of Artificial Sequence: Synthetic oligonucleotide
cucgaaguggggucucccu

SEQ ID NO: 2599461 - RNA, 19 nt, Artificial Sequence
  Description of Artificial Sequence: Synthetic oligonucleotide
cacggcuguccgagacccc

SEQ ID NO: 2599462 - RNA, 19 nt, Artificial Sequence
  Description of Artificial Sequence: Synthetic oligonucleotide
gggacacuggcaucuagau

SEQ ID NO: 2599463 - RNA, 19 nt, Artificial Sequence
  Description of Artificial Sequence: Synthetic oligonucleotide
ccuuggugugagguuuggg

SEQ ID NO: 2599464 - RNA, 19 nt, Artificial Sequence
  Description of Artificial Sequence: Synthetic oligonucleotide
guggacucacagucucucu

SEQ ID NO: 2599465 - RNA, 19 nt, Artificial Sequence
  Description of Artificial Sequence: Synthetic oligonucleotide
cugggagugcgaugcugaa

SEQ ID NO: 2599466 - RNA, 19 nt, Artificial Sequence
  Description of Artificial Sequence: Synthetic oligonucleotide
gacccggcagcugcuggga

SEQ ID NO: 2599467 - RNA, 19 nt, Artificial Sequence
  Description of Artificial Sequence: Synthetic oligonucleotide
cacucaggugggugacuga

SEQ ID NO: 2599468 - RNA, 19 nt, Artificial Sequence
  Description of Artificial Sequence: Synthetic oligonucleotide
cuguccugguggguccaac

SEQ ID NO: 2599469 - RNA, 19 nt, Artificial Sequence
  Description of Artificial Sequence: Synthetic oligonucleotide
accccuagggguggcuggu

SEQ ID NO: 2599470 - RNA, 19 nt, Artificial Sequence
  Description of Artificial Sequence: Synthetic oligonucleotide
ccagagaguggggagcauc

SEQ ID NO: 2599471 - RNA, 19 nt, Artificial Sequence
  Description of Artificial Sequence: Synthetic oligonucleotide
gcucuaccaggaucuucac

SEQ ID NO: 2599472 - RNA, 19 nt, Artificial Sequence
  Description of Artificial Sequence: Synthetic oligonucleotide
ccuggccuugacccggcag

SEQ ID NO: 2599473 - RNA, 19 nt, Artificial Sequence
  Description of Artificial Sequence: Synthetic oligonucleotide
gccggguuccaguagggcu

SEQ ID NO: 2599474 - RNA, 19 nt, Artificial Sequence
  Description of Artificial Sequence: Synthetic oligonucleotide
uccagagaguggggagcau

SEQ ID NO: 2599475 - RNA, 19 nt, Artificial Sequence
  Description of Artificial Sequence: Synthetic oligonucleotide
ggucaaagucuggaggggu

SEQ ID NO: 2599476 - RNA, 19 nt, Artificial Sequence
  Description of Artificial Sequence: Synthetic oligonucleotide
guggccaaucaaccuguau

SEQ ID NO: 2599477 - RNA, 19 nt, Artificial Sequence
  Description of Artificial Sequence: Synthetic oligonucleotide
ggcugguggaguccagaaa

SEQ ID NO: 2599478 - RNA, 19 nt, Artificial Sequence
  Description of Artificial Sequence: Synthetic oligonucleotide
ccagggugggucaaagucu

SEQ ID NO: 2599479 - RNA, 19 nt, Artificial Sequence
  Description of Artificial Sequence: Synthetic oligonucleotide
gcucgaaguggggucuccc

SEQ ID NO: 2599480 - RNA, 19 nt, Artificial Sequence
  Description of Artificial Sequence: Synthetic oligonucleotide
uuccgcacccagggugggu

SEQ ID NO: 2599481 - RNA, 19 nt, Artificial Sequence
  Description of Artificial Sequence: Synthetic oligonucleotide
cugccaaacagggucucgu

SEQ ID NO: 2599482 - RNA, 19 nt, Artificial Sequence
  Description of Artificial Sequence: Synthetic oligonucleotide
uggggacacucaggugggu

SEQ ID NO: 2599483 - RNA, 19 nt, Artificial Sequence
  Description of Artificial Sequence: Synthetic oligonucleotide
ggugguccugggcccacuc

SEQ ID NO: 2599484 - RNA, 19 nt, Artificial Sequence
  Description of Artificial Sequence: Synthetic oligonucleotide
ggggacucuggacagucau

SEQ ID NO: 2599485 - RNA, 19 nt, Artificial Sequence
  Description of Artificial Sequence: Synthetic oligonucleotide
aggggacucuggacaguca

SEQ ID NO: 2599486 - RNA, 19 nt, Artificial Sequence
  Description of Artificial Sequence: Synthetic oligonucleotide
cccacggcuguccgagacc

SEQ ID NO: 2599487 - RNA, 19 nt, Artificial Sequence
  Description of Artificial Sequence: Synthetic oligonucleotide
guggaaggccggggacucc

SEQ ID NO: 2599488 - RNA, 19 nt, Artificial Sequence
  Description of Artificial Sequence: Synthetic oligonucleotide
gcgagaccuucgguggucc

SEQ ID NO: 2599489 - RNA, 19 nt, Artificial Sequence
  Description of Artificial Sequence: Synthetic oligonucleotide
uggcucgaaguggggucuc

SEQ ID NO: 2599490 - RNA, 19 nt, Artificial Sequence
  Description of Artificial Sequence: Synthetic oligonucleotide
ggugggccggguuccagua

SEQ ID NO: 2599491 - RNA, 19 nt, Artificial Sequence
  Description of Artificial Sequence: Synthetic oligonucleotide
gggccggguuccaguaggg

SEQ ID NO: 2599492 - RNA, 19 nt, Artificial Sequence
  Description of Artificial Sequence: Synthetic oligonucleotide
ccggcagcugcugggagug

SEQ ID NO: 2599493 - RNA, 19 nt, Artificial Sequence
  Description of Artificial Sequence: Synthetic oligonucleotide
gacacucaggugggugacu

SEQ ID NO: 2599494 - RNA, 19 nt, Artificial Sequence
  Description of Artificial Sequence: Synthetic oligonucleotide
ucggugguccugggcccac

SEQ ID NO: 2599495 - RNA, 19 nt, Artificial Sequence
  Description of Artificial Sequence: Synthetic oligonucleotide
ccgagaccccuccuugcug

SEQ ID NO: 2599496 - RNA, 19 nt, Artificial Sequence
  Description of Artificial Sequence: Synthetic oligonucleotide
cacugcgggccagcucuac

SEQ ID NO: 2599497 - RNA, 19 nt, Artificial Sequence
  Description of Artificial Sequence: Synthetic oligonucleotide
acggggugaauggcucgaa

SEQ ID NO: 2599498 - RNA, 19 nt, Artificial Sequence
  Description of Artificial Sequence: Synthetic oligonucleotide
ccccacggcuguccgagac

SEQ ID NO: 2599499 - RNA, 19 nt, Artificial Sequence
  Description of Artificial Sequence: Synthetic oligonucleotide
ggaacgccucugcuccaga

SEQ ID NO: 2599500 - RNA, 19 nt, Artificial Sequence
  Description of Artificial Sequence: Synthetic oligonucleotide
ggcccacuccucucgaccu

SEQ ID NO: 2599501 - RNA, 19 nt, Artificial Sequence
  Description of Artificial Sequence: Synthetic oligonucleotide
cacuccucucgaccuguua

SEQ ID NO: 2599502 - RNA, 19 nt, Artificial Sequence
  Description of Artificial Sequence: Synthetic oligonucleotide
cucaggugggugacugaau

SEQ ID NO: 2599503 - RNA, 19 nt, Artificial Sequence
  Description of Artificial Sequence: Synthetic oligonucleotide
ggagcgccugcauuccacu

SEQ ID NO: 2599504 - RNA, 19 nt, Artificial Sequence
  Description of Artificial Sequence: Synthetic oligonucleotide
ggcucgaaguggggucucc

SEQ ID NO: 2599505 - RNA, 19 nt, Artificial Sequence
  Description of Artificial Sequence: Synthetic oligonucleotide
ccaguagggcugccaaaca

SEQ ID NO: 2599506 - RNA, 19 nt, Artificial Sequence
  Description of Artificial Sequence: Synthetic oligonucleotide
ggccggggacuccaagguc

SEQ ID NO: 2599507 - RNA, 19 nt, Artificial Sequence
  Description of Artificial Sequence: Synthetic oligonucleotide
cugggcccacuccucucga

SEQ ID NO: 2599508 - RNA, 19 nt, Artificial Sequence
  Description of Artificial Sequence: Synthetic oligonucleotide
cccuggucaugcugggcuc

SEQ ID NO: 2599509 - RNA, 19 nt, Artificial Sequence
  Description of Artificial Sequence: Synthetic oligonucleotide
ccuagggguggcuggugga

SEQ ID NO: 2599510 - RNA, 19 nt, Artificial Sequence
  Description of Artificial Sequence: Synthetic oligonucleotide
gcccacuccucucgaccug

SEQ ID NO: 2599511 - RNA, 19 nt, Artificial Sequence
  Description of Artificial Sequence: Synthetic oligonucleotide
cggggugaauggcucgaag

SEQ ID NO: 2599512 - RNA, 19 nt, Artificial Sequence
  Description of Artificial Sequence: Synthetic oligonucleotide
cugguggguccaacggggu

SEQ ID NO: 2599513 - RNA, 19 nt, Artificial Sequence
  Description of Artificial Sequence: Synthetic oligonucleotide
ggcgagaccuucggugguc

SEQ ID NO: 2599514 - RNA, 19 nt, Artificial Sequence
  Description of Artificial Sequence: Synthetic oligonucleotide
guggguccaacggggugaa

SEQ ID NO: 2599515 - RNA, 19 nt, Artificial Sequence
  Description of Artificial Sequence: Synthetic oligonucleotide
gugcgaugcugaagaugga

SEQ ID NO: 2599516 - RNA, 19 nt, Artificial Sequence
  Description of Artificial Sequence: Synthetic oligonucleotide
cucuguccuggugggucca

SEQ ID NO: 2599517 - RNA, 19 nt, Artificial Sequence
  Description of Artificial Sequence: Synthetic oligonucleotide
aggaugggguguggccaau

SEQ ID NO: 2599518 - RNA, 19 nt, Artificial Sequence
  Description of Artificial Sequence: Synthetic oligonucleotide
ucccuggggugaggugagu

SEQ ID NO: 2599519 - RNA, 19 nt, Artificial Sequence
  Description of Artificial Sequence: Synthetic oligonucleotide
cuggacagucauccuugau

SEQ ID NO: 2599520 - RNA, 19 nt, Artificial Sequence
  Description of Artificial Sequence: Synthetic oligonucleotide
cuguccgagaccccuccuu

SEQ ID NO: 2599521 - RNA, 19 nt, Artificial Sequence
  Description of Artificial Sequence: Synthetic oligonucleotide
gguuugggaugcugccccu

SEQ ID NO: 2599522 - RNA, 19 nt, Artificial Sequence
  Description of Artificial Sequence: Synthetic oligonucleotide
caaccccuccugggguguc

SEQ ID NO: 2599523 - RNA, 19 nt, Artificial Sequence
  Description of Artificial Sequence: Synthetic oligonucleotide
ccccuggucaugcugggcu

SEQ ID NO: 2599524 - RNA, 19 nt, Artificial Sequence
  Description of Artificial Sequence: Synthetic oligonucleotide
ccaccccuagggguggcug

SEQ ID NO: 2599525 - RNA, 19 nt, Artificial Sequence
  Description of Artificial Sequence: Synthetic oligonucleotide
ggagugcgaugcugaagau

SEQ ID NO: 2599526 - RNA, 19 nt, Artificial Sequence
  Description of Artificial Sequence: Synthetic oligonucleotide
ggggugggccggguuccag

SEQ ID NO: 2599527 - RNA, 19 nt, Artificial Sequence
  Description of Artificial Sequence: Synthetic oligonucleotide
cccaugcuggggacacuca

SEQ ID NO: 2599528 - RNA, 19 nt, Artificial Sequence
  Description of Artificial Sequence: Synthetic oligonucleotide
ccggggacuccaaggucca

SEQ ID NO: 2599529 - RNA, 19 nt, Artificial Sequence
  Description of Artificial Sequence: Synthetic oligonucleotide
gggugggccggguuccagu

SEQ ID NO: 2599530 - RNA, 19 nt, Artificial Sequence
  Description of Artificial Sequence: Synthetic oligonucleotide
uggguccaacggggugaau

SEQ ID NO: 2599531 - RNA, 19 nt, Artificial Sequence
  Description of Artificial Sequence: Synthetic oligonucleotide
ccccuccuugcugccaaac

SEQ ID NO: 2599532 - RNA, 19 nt, Artificial Sequence
  Description of Artificial Sequence: Synthetic oligonucleotide
cggguuccaguagggcugc

SEQ ID NO: 2599533 - RNA, 19 nt, Artificial Sequence
  Description of Artificial Sequence: Synthetic oligonucleotide
gccccuggucaugcugggc

SEQ ID NO: 2599534 - RNA, 19 nt, Artificial Sequence
  Description of Artificial Sequence: Synthetic oligonucleotide
cgccugcauuccacugcgg

SEQ ID NO: 2599535 - RNA, 19 nt, Artificial Sequence
  Description of Artificial Sequence: Synthetic oligonucleotide
ccucucgaccuguuacagu

SEQ ID NO: 2599536 - RNA, 19 nt, Artificial Sequence
  Description of Artificial Sequence: Synthetic oligonucleotide
ggguggacucacagucucu

SEQ ID NO: 2599537 - RNA, 19 nt, Artificial Sequence
  Description of Artificial Sequence: Synthetic oligonucleotide
gcuguccgagaccccuccu

SEQ ID NO: 2599538 - RNA, 19 nt, Artificial Sequence
  Description of Artificial Sequence: Synthetic oligonucleotide
gcccuggccuugacccggc

SEQ ID NO: 2599539 - RNA, 19 nt, Artificial Sequence
  Description of Artificial Sequence: Synthetic oligonucleotide
gugugagguuugggaugcu

SEQ ID NO: 2599540 - RNA, 19 nt, Artificial Sequence
  Description of Artificial Sequence: Synthetic oligonucleotide
ccuugacccggcagcugcu

SEQ ID NO: 2599541 - RNA, 19 nt, Artificial Sequence
  Description of Artificial Sequence: Synthetic oligonucleotide
ggccaccccuagggguggc

SEQ ID NO: 2599542 - RNA, 19 nt, Artificial Sequence
  Description of Artificial Sequence: Synthetic oligonucleotide
ccccuagggguggcuggug

SEQ ID NO: 2599543 - RNA, 19 nt, Artificial Sequence
  Description of Artificial Sequence: Synthetic oligonucleotide
ccgcacccaggguggguca

SEQ ID NO: 2599544 - RNA, 19 nt, Artificial Sequence
  Description of Artificial Sequence: Synthetic oligonucleotide
cggcuguccgagaccccuc

SEQ ID NO: 2599545 - RNA, 19 nt, Artificial Sequence
  Description of Artificial Sequence: Synthetic oligonucleotide
ccaaccccuccuggggugu

SEQ ID NO: 2599546 - RNA, 19 nt, Artificial Sequence
  Description of Artificial Sequence: Synthetic oligonucleotide
ccacugcgggccagcucua

SEQ ID NO: 2599547 - RNA, 19 nt, Artificial Sequence
  Description of Artificial Sequence: Synthetic oligonucleotide
gggcucuguccuggugggu

SEQ ID NO: 2599548 - RNA, 19 nt, Artificial Sequence
  Description of Artificial Sequence: Synthetic oligonucleotide
cccuggccuugacccggca

SEQ ID NO: 2599549 - RNA, 19 nt, Artificial Sequence
  Description of Artificial Sequence: Synthetic oligonucleotide
cgagaccuucggugguccu

SEQ ID NO: 2599550 - RNA, 19 nt, Artificial Sequence
  Description of Artificial Sequence: Synthetic oligonucleotide
gccaccccuagggguggcu

SEQ ID NO: 2599551 - RNA, 19 nt, Artificial Sequence
  Description of Artificial Sequence: Synthetic oligonucleotide
cgccucugcuccagagagu

SEQ ID NO: 2599552 - RNA, 19 nt, Artificial Sequence
  Description of Artificial Sequence: Synthetic oligonucleotide
ccacuccucucgaccuguu

SEQ ID NO: 2599553 - RNA, 19 nt, Artificial Sequence
  Description of Artificial Sequence: Synthetic oligonucleotide
ccagcucuaccaggaucuu

SEQ ID NO: 2599554 - RNA, 19 nt, Artificial Sequence
  Description of Artificial Sequence: Synthetic oligonucleotide
cggggacuccaagguccau

SEQ ID NO: 2599555 - RNA, 19 nt, Artificial Sequence
  Description of Artificial Sequence: Synthetic oligonucleotide
aaaaguuagacauugacaa

SEQ ID NO: 2599556 - RNA, 19 nt, Artificial Sequence
  Description of Artificial Sequence: Synthetic oligonucleotide
aaaacucuuaaguuagccc

SEQ ID NO: 2599557 - RNA, 19 nt, Artificial Sequence
  Description of Artificial Sequence: Synthetic oligonucleotide
aaacucuuaaguuagcccu

SEQ ID NO: 2599558 - RNA, 19 nt, Artificial Sequence
  Description of Artificial Sequence: Synthetic oligonucleotide
aaguuagacauugacaagg

SEQ ID NO: 2599559 - RNA, 19 nt, Artificial Sequence
  Description of Artificial Sequence: Synthetic oligonucleotide
uaaggauuggaaaagaauc

SEQ ID NO: 2599560 - RNA, 19 nt, Artificial Sequence
  Description of Artificial Sequence: Synthetic oligonucleotide
uuaaguuagcccuugaacu

SEQ ID NO: 2599561 - RNA, 19 nt, Artificial Sequence
  Description of Artificial Sequence: Synthetic oligonucleotide
augggaugcaucuagaguc

SEQ ID NO: 2599562 - RNA, 19 nt, Artificial Sequence
  Description of Artificial Sequence: Synthetic oligonucleotide
ugcaaaaggaggauccugg

SEQ ID NO: 2599563 - RNA, 19 nt, Artificial Sequence
  Description of Artificial Sequence: Synthetic oligonucleotide
aaggauuggaaaagaaucg

SEQ ID NO: 2599564 - RNA, 19 nt, Artificial Sequence
  Description of Artificial Sequence: Synthetic oligonucleotide
uuagacauugacaaggguu

SEQ ID NO: 2599565 - RNA, 19 nt, Artificial Sequence
  Description of Artificial Sequence: Synthetic oligonucleotide
gauucaagguuccuuagug

SEQ ID NO: 2599566 - RNA, 19 nt, Artificial Sequence
  Description of Artificial Sequence: Synthetic oligonucleotide
uagagucgcaugcaaaagg

SEQ ID NO: 2599567 - RNA, 19 nt, Artificial Sequence
  Description of Artificial Sequence: Synthetic oligonucleotide
aaaguuagacauugacaag

SEQ ID NO: 2599568 - RNA, 19 nt, Artificial Sequence
  Description of Artificial Sequence: Synthetic oligonucleotide
uauggauugagacauguuu

SEQ ID NO: 2599569 - RNA, 19 nt, Artificial Sequence
  Description of Artificial Sequence: Synthetic oligonucleotide
aaggguucaaacuauucau

SEQ ID NO: 2599570 - RNA, 19 nt, Artificial Sequence
  Description of Artificial Sequence: Synthetic oligonucleotide
uuccuuagugaaauggugc

SEQ ID NO: 2599571 - RNA, 19 nt, Artificial Sequence
  Description of Artificial Sequence: Synthetic oligonucleotide
cuuaaguuagcccuugaac

SEQ ID NO: 2599572 - RNA, 19 nt, Artificial Sequence
  Description of Artificial Sequence: Synthetic oligonucleotide
aaaggaggauccugguugg

SEQ ID NO: 2599573 - RNA, 19 nt, Artificial Sequence
  Description of Artificial Sequence: Synthetic oligonucleotide
uagacauugacaaggguuc

SEQ ID NO: 2599574 - RNA, 19 nt, Artificial Sequence
  Description of Artificial Sequence: Synthetic oligonucleotide
auugacaaggguucaaacu

SEQ ID NO: 2599575 - RNA, 19 nt, Artificial Sequence
  Description of Artificial Sequence: Synthetic oligonucleotide
ugaaauggugcuaaggauu

SEQ ID NO: 2599576 - RNA, 19 nt, Artificial Sequence
  Description of Artificial Sequence: Synthetic oligonucleotide
uuucauuugguuuuccauc

SEQ ID NO: 2599577 - RNA, 19 nt, Artificial Sequence
  Description of Artificial Sequence: Synthetic oligonucleotide
uaaguuagcccuugaacug

SEQ ID NO: 2599578 - RNA, 19 nt, Artificial Sequence
  Description of Artificial Sequence: Synthetic oligonucleotide
aaguuagcccuugaacugc

SEQ ID NO: 2599579 - RNA, 19 nt, Artificial Sequence
  Description of Artificial Sequence: Synthetic oligonucleotide
caaacuauucaugggaugc

SEQ ID NO: 2599580 - RNA, 19 nt, Artificial Sequence
  Description of Artificial Sequence: Synthetic oligonucleotide
uuuuccaucuucuccacgu

SEQ ID NO: 2599581 - RNA, 19 nt, Artificial Sequence
  Description of Artificial Sequence: Synthetic oligonucleotide
aagacuucuauggauugag

SEQ ID NO: 2599582 - RNA, 19 nt, Artificial Sequence
  Description of Artificial Sequence: Synthetic oligonucleotide
aucucgugaacacaugguc

SEQ ID NO: 2599583 - RNA, 19 nt, Artificial Sequence
  Description of Artificial Sequence: Synthetic oligonucleotide
cucucucaugguuacaugg

SEQ ID NO: 2599584 - RNA, 19 nt, Artificial Sequence
  Description of Artificial Sequence: Synthetic oligonucleotide
auucaugggaugcaucuag

SEQ ID NO: 2599585 - RNA, 19 nt, Artificial Sequence
  Description of Artificial Sequence: Synthetic oligonucleotide
gacuucuauggauugagac

SEQ ID NO: 2599586 - RNA, 19 nt, Artificial Sequence
  Description of Artificial Sequence: Synthetic oligonucleotide
uucauuugguuuuccaucu

SEQ ID NO: 2599587 - RNA, 19 nt, Artificial Sequence
  Description of Artificial Sequence: Synthetic oligonucleotide
uuggugaucauggccaugg

SEQ ID NO: 2599588 - RNA, 19 nt, Artificial Sequence
  Description of Artificial Sequence: Synthetic oligonucleotide
acuucuauggauugagaca

SEQ ID NO: 2599589 - RNA, 19 nt, Artificial Sequence
  Description of Artificial Sequence: Synthetic oligonucleotide
guucaaacuauucauggga

SEQ ID NO: 2599590 - RNA, 19 nt, Artificial Sequence
  Description of Artificial Sequence: Synthetic oligonucleotide
uauugcaggucucucugag

SEQ ID NO: 2599591 - RNA, 19 nt, Artificial Sequence
  Description of Artificial Sequence: Synthetic oligonucleotide
gaacacauggucugcuggg

SEQ ID NO: 2599592 - RNA, 19 nt, Artificial Sequence
  Description of Artificial Sequence: Synthetic oligonucleotide
gauacaccugcccucacug

SEQ ID NO: 2599593 - RNA, 19 nt, Artificial Sequence
  Description of Artificial Sequence: Synthetic oligonucleotide
ucuagagucgcaugcaaaa

SEQ ID NO: 2599594 - RNA, 19 nt, Artificial Sequence
  Description of Artificial Sequence: Synthetic oligonucleotide
uucaagguuccuuagugaa

SEQ ID NO: 2599595 - RNA, 19 nt, Artificial Sequence
  Description of Artificial Sequence: Synthetic oligonucleotide
accugcuugaacuuggacu

SEQ ID NO: 2599596 - RNA, 19 nt, Artificial Sequence
  Description of Artificial Sequence: Synthetic oligonucleotide
agccgggugguguugaggc

SEQ ID NO: 2599597 - RNA, 19 nt, Artificial Sequence
  Description of Artificial Sequence: Synthetic oligonucleotide
auccugguuggauucaagg

SEQ ID NO: 2599598 - RNA, 19 nt, Artificial Sequence
  Description of Artificial Sequence: Synthetic oligonucleotide
gaaauggugcuaaggauug

SEQ ID NO: 2599599 - RNA, 19 nt, Artificial Sequence
  Description of Artificial Sequence: Synthetic oligonucleotide
ucucgugaacacauggucu

SEQ ID NO: 2599600 - RNA, 19 nt, Artificial Sequence
  Description of Artificial Sequence: Synthetic oligonucleotide
ugggaugcaucuagagucg

SEQ ID NO: 2599601 - RNA, 19 nt, Artificial Sequence
  Description of Artificial Sequence: Synthetic oligonucleotide
ucaaacuauucaugggaug

SEQ ID NO: 2599602 - RNA, 19 nt, Artificial Sequence
  Description of Artificial Sequence: Synthetic oligonucleotide
uucaaacuauucaugggau

SEQ ID NO: 2599603 - RNA, 19 nt, Artificial Sequence
  Description of Artificial Sequence: Synthetic oligonucleotide
ggguucaaacuauucaugg

SEQ ID NO: 2599604 - RNA, 19 nt, Artificial Sequence
  Description of Artificial Sequence: Synthetic oligonucleotide
ugggacauccaguugguga

SEQ ID NO: 2599605 - RNA, 19 nt, Artificial Sequence
  Description of Artificial Sequence: Synthetic oligonucleotide
ucaugggaugcaucuagag

SEQ ID NO: 2599606 - RNA, 19 nt, Artificial Sequence
  Description of Artificial Sequence: Synthetic oligonucleotide
uuuugugcgggcaucucgu

SEQ ID NO: 2599607 - RNA, 19 nt, Artificial Sequence
  Description of Artificial Sequence: Synthetic oligonucleotide
accgugcagauacaccugc

SEQ ID NO: 2599608 - RNA, 19 nt, Artificial Sequence
  Description of Artificial Sequence: Synthetic oligonucleotide
aucuucuccacguauugca

SEQ ID NO: 2599609 - RNA, 19 nt, Artificial Sequence
  Description of Artificial Sequence: Synthetic oligonucleotide
ucuuaaguuagcccuugaa

SEQ ID NO: 2599610 - RNA, 19 nt, Artificial Sequence
  Description of Artificial Sequence: Synthetic oligonucleotide
agucgcaugcaaaaggagg

SEQ ID NO: 2599611 - RNA, 19 nt, Artificial Sequence
  Description of Artificial Sequence: Synthetic oligonucleotide
agcagcgguaccgacaucg

SEQ ID NO: 2599612 - RNA, 19 nt, Artificial Sequence
  Description of Artificial Sequence: Synthetic oligonucleotide
aguccuuucauuugguuuu

SEQ ID NO: 2599613 - RNA, 19 nt, Artificial Sequence
  Description of Artificial Sequence: Synthetic oligonucleotide
aauggugcuaaggauugga

SEQ ID NO: 2599614 - RNA, 19 nt, Artificial Sequence
  Description of Artificial Sequence: Synthetic oligonucleotide
uuggugggcaacacgccgg

SEQ ID NO: 2599615 - RNA, 19 nt, Artificial Sequence
  Description of Artificial Sequence: Synthetic oligonucleotide
gauuggaaaagaaucguaa

SEQ ID NO: 2599616 - RNA, 19 nt, Artificial Sequence
  Description of Artificial Sequence: Synthetic oligonucleotide
uguccaagacuucuaugga

SEQ ID NO: 2599617 - RNA, 19 nt, Artificial Sequence
  Description of Artificial Sequence: Synthetic oligonucleotide
gguucaaacuauucauggg

SEQ ID NO: 2599618 - RNA, 19 nt, Artificial Sequence
  Description of Artificial Sequence: Synthetic oligonucleotide
agcgguaccgacaucgcgc

SEQ ID NO: 2599619 - RNA, 19 nt, Artificial Sequence
  Description of Artificial Sequence: Synthetic oligonucleotide
ucuauggauugagacaugu

SEQ ID NO: 2599620 - RNA, 19 nt, Artificial Sequence
  Description of Artificial Sequence: Synthetic oligonucleotide
uccaagacuucuauggauu

SEQ ID NO: 2599621 - RNA, 19 nt, Artificial Sequence
  Description of Artificial Sequence: Synthetic oligonucleotide
uuggauucaagguuccuua

SEQ ID NO: 2599622 - RNA, 19 nt, Artificial Sequence
  Description of Artificial Sequence: Synthetic oligonucleotide
guuggugggcaacacgccg

SEQ ID NO: 2599623 - RNA, 19 nt, Artificial Sequence
  Description of Artificial Sequence: Synthetic oligonucleotide
gcaaccaccgugcagauac

SEQ ID NO: 2599624 - RNA, 19 nt, Artificial Sequence
  Description of Artificial Sequence: Synthetic oligonucleotide
aguuagacauugacaaggg

SEQ ID NO: 2599625 - RNA, 19 nt, Artificial Sequence
  Description of Artificial Sequence: Synthetic oligonucleotide
gucacuggcgcauugaaaa

SEQ ID NO: 2599626 - RNA, 19 nt, Artificial Sequence
  Description of Artificial Sequence: Synthetic oligonucleotide
auccaguuggugaucaugg

SEQ ID NO: 2599627 - RNA, 19 nt, Artificial Sequence
  Description of Artificial Sequence: Synthetic oligonucleotide
cucucaugguuacaugggg

SEQ ID NO: 2599628 - RNA, 19 nt, Artificial Sequence
  Description of Artificial Sequence: Synthetic oligonucleotide
guugaggcccaccagcgag

SEQ ID NO: 2599629 - RNA, 19 nt, Artificial Sequence
  Description of Artificial Sequence: Synthetic oligonucleotide
uuuugcaccuucuccagua

SEQ ID NO: 2599630 - RNA, 19 nt, Artificial Sequence
  Description of Artificial Sequence: Synthetic oligonucleotide
cugguuggauucaagguuc

SEQ ID NO: 2599631 - RNA, 19 nt, Artificial Sequence
  Description of Artificial Sequence: Synthetic oligonucleotide
cucgugaacacauggucug

SEQ ID NO: 2599632 - RNA, 19 nt, Artificial Sequence
  Description of Artificial Sequence: Synthetic oligonucleotide
auucaagguuccuuaguga

SEQ ID NO: 2599633 - RNA, 19 nt, Artificial Sequence
  Description of Artificial Sequence: Synthetic oligonucleotide
uccugguuggauucaaggu

SEQ ID NO: 2599634 - RNA, 19 nt, Artificial Sequence
  Description of Artificial Sequence: Synthetic oligonucleotide
uuagugaaauggugcuaag

SEQ ID NO: 2599635 - RNA, 19 nt, Artificial Sequence
  Description of Artificial Sequence: Synthetic oligonucleotide
auggugcuuagcacgaccc

SEQ ID NO: 2599636 - RNA, 19 nt, Artificial Sequence
  Description of Artificial Sequence: Synthetic oligonucleotide
uggauucaagguuccuuag

SEQ ID NO: 2599637 - RNA, 19 nt, Artificial Sequence
  Description of Artificial Sequence: Synthetic oligonucleotide
ucagcagcgguaccgacau

SEQ ID NO: 2599638 - RNA, 19 nt, Artificial Sequence
  Description of Artificial Sequence: Synthetic oligonucleotide
cuuagcacgaccccgaucu

SEQ ID NO: 2599639 - RNA, 19 nt, Artificial Sequence
  Description of Artificial Sequence: Synthetic oligonucleotide
caaggguucaaacuauuca

SEQ ID NO: 2599640 - RNA, 19 nt, Artificial Sequence
  Description of Artificial Sequence: Synthetic oligonucleotide
cauugacaaggguucaaac

SEQ ID NO: 2599641 - RNA, 19 nt, Artificial Sequence
  Description of Artificial Sequence: Synthetic oligonucleotide
uucuccacguauugcaggu

SEQ ID NO: 2599642 - RNA, 19 nt, Artificial Sequence
  Description of Artificial Sequence: Synthetic oligonucleotide
uucagcagcgguaccgaca

SEQ ID NO: 2599643 - RNA, 19 nt, Artificial Sequence
  Description of Artificial Sequence: Synthetic oligonucleotide
aaacuauucaugggaugca

SEQ ID NO: 2599644 - RNA, 19 nt, Artificial Sequence
  Description of Artificial Sequence: Synthetic oligonucleotide
ggugcuaaggauuggaaaa

SEQ ID NO: 2599645 - RNA, 19 nt, Artificial Sequence
  Description of Artificial Sequence: Synthetic oligonucleotide
uggugcuaaggauuggaaa

SEQ ID NO: 2599646 - RNA, 19 nt, Artificial Sequence
  Description of Artificial Sequence: Synthetic oligonucleotide
aaccaccgugcagauacac

SEQ ID NO: 2599647 - RNA, 19 nt, Artificial Sequence
  Description of Artificial Sequence: Synthetic oligonucleotide
cauuugguuuuccaucuuc

SEQ ID NO: 2599648 - RNA, 19 nt, Artificial Sequence
  Description of Artificial Sequence: Synthetic oligonucleotide
ugacaaggguucaaacuau

SEQ ID NO: 2599649 - RNA, 19 nt, Artificial Sequence
  Description of Artificial Sequence: Synthetic oligonucleotide
uucaugggaugcaucuaga

SEQ ID NO: 2599650 - RNA, 19 nt, Artificial Sequence
  Description of Artificial Sequence: Synthetic oligonucleotide
ucuggcucucucaugguua

SEQ ID NO: 2599651 - RNA, 19 nt, Artificial Sequence
  Description of Artificial Sequence: Synthetic oligonucleotide
aaauggugcuaaggauugg

SEQ ID NO: 2599652 - RNA, 19 nt, Artificial Sequence
  Description of Artificial Sequence: Synthetic oligonucleotide
uguugcuuauggcucuccu

SEQ ID NO: 2599653 - RNA, 19 nt, Artificial Sequence
  Description of Artificial Sequence: Synthetic oligonucleotide
ggccagauguugcuuaugg

SEQ ID NO: 2599654 - RNA, 19 nt, Artificial Sequence
  Description of Artificial Sequence: Synthetic oligonucleotide
guuccuuagugaaauggug

SEQ ID NO: 2599655 - RNA, 19 nt, Artificial Sequence
  Description of Artificial Sequence: Synthetic oligonucleotide
acaaggguucaaacuauuc

SEQ ID NO: 2599656 - RNA, 19 nt, Artificial Sequence
  Description of Artificial Sequence: Synthetic oligonucleotide
gcaucucgugaacacaugg

SEQ ID NO: 2599657 - RNA, 19 nt, Artificial Sequence
  Description of Artificial Sequence: Synthetic oligonucleotide
cauggugcuuagcacgacc

SEQ ID NO: 2599658 - RNA, 19 nt, Artificial Sequence
  Description of Artificial Sequence: Synthetic oligonucleotide
uuauggcucuccuccaccu

SEQ ID NO: 2599659 - RNA, 19 nt, Artificial Sequence
  Description of Artificial Sequence: Synthetic oligonucleotide
ggccauggugcuuagcacg

SEQ ID NO: 2599660 - RNA, 19 nt, Artificial Sequence
  Description of Artificial Sequence: Synthetic oligonucleotide
uucuccaguagcugccuca

SEQ ID NO: 2599661 - RNA, 19 nt, Artificial Sequence
  Description of Artificial Sequence: Synthetic oligonucleotide
ugcagauacaccugcccuc

SEQ ID NO: 2599662 - RNA, 19 nt, Artificial Sequence
  Description of Artificial Sequence: Synthetic oligonucleotide
aggauuggaaaagaaucgu

SEQ ID NO: 2599663 - RNA, 19 nt, Artificial Sequence
  Description of Artificial Sequence: Synthetic oligonucleotide
ugugcgggcaucucgugaa

SEQ ID NO: 2599664 - RNA, 19 nt, Artificial Sequence
  Description of Artificial Sequence: Synthetic oligonucleotide
uccagcgucccgccgcugg

SEQ ID NO: 2599665 - RNA, 19 nt, Artificial Sequence
  Description of Artificial Sequence: Synthetic oligonucleotide
aagguuccuuagugaaaug

SEQ ID NO: 2599666 - RNA, 19 nt, Artificial Sequence
  Description of Artificial Sequence: Synthetic oligonucleotide
gaggauccugguuggauuc

SEQ ID NO: 2599667 - RNA, 19 nt, Artificial Sequence
  Description of Artificial Sequence: Synthetic oligonucleotide
gugggcaacacgccggugc

SEQ ID NO: 2599668 - RNA, 19 nt, Artificial Sequence
  Description of Artificial Sequence: Synthetic oligonucleotide
ccugcuugaacuuggacuc

SEQ ID NO: 2599669 - RNA, 19 nt, Artificial Sequence
  Description of Artificial Sequence: Synthetic oligonucleotide
auuugguuuuccaucuucu

SEQ ID NO: 2599670 - RNA, 19 nt, Artificial Sequence
  Description of Artificial Sequence: Synthetic oligonucleotide
ugcuaaggauuggaaaaga

SEQ ID NO: 2599671 - RNA, 19 nt, Artificial Sequence
  Description of Artificial Sequence: Synthetic oligonucleotide
cuauucaugggaugcaucu

SEQ ID NO: 2599672 - RNA, 19 nt, Artificial Sequence
  Description of Artificial Sequence: Synthetic oligonucleotide
cuuagugaaauggugcuaa

SEQ ID NO: 2599673 - RNA, 19 nt, Artificial Sequence
  Description of Artificial Sequence: Synthetic oligonucleotide
ugguuggauucaagguucc

SEQ ID NO: 2599674 - RNA, 19 nt, Artificial Sequence
  Description of Artificial Sequence: Synthetic oligonucleotide
acguauugcaggucucucu

SEQ ID NO: 2599675 - RNA, 19 nt, Artificial Sequence
  Description of Artificial Sequence: Synthetic oligonucleotide
agagucgcaugcaaaagga

SEQ ID NO: 2599676 - RNA, 19 nt, Artificial Sequence
  Description of Artificial Sequence: Synthetic oligonucleotide
cuagagucgcaugcaaaag

SEQ ID NO: 2599677 - RNA, 19 nt, Artificial Sequence
  Description of Artificial Sequence: Synthetic oligonucleotide
ucugggacauccaguuggu

SEQ ID NO: 2599678 - RNA, 19 nt, Artificial Sequence
  Description of Artificial Sequence: Synthetic oligonucleotide
uucagucacuggcgcauug

SEQ ID NO: 2599679 - RNA, 19 nt, Artificial Sequence
  Description of Artificial Sequence: Synthetic oligonucleotide
ucuucagucacuggcgcau

SEQ ID NO: 2599680 - RNA, 19 nt, Artificial Sequence
  Description of Artificial Sequence: Synthetic oligonucleotide
agauacaccugcccucacu

SEQ ID NO: 2599681 - RNA, 19 nt, Artificial Sequence
  Description of Artificial Sequence: Synthetic oligonucleotide
aacacgccggugcugcggu

SEQ ID NO: 2599682 - RNA, 19 nt, Artificial Sequence
  Description of Artificial Sequence: Synthetic oligonucleotide
uggugcuuagcacgacccc

SEQ ID NO: 2599683 - RNA, 19 nt, Artificial Sequence
  Description of Artificial Sequence: Synthetic oligonucleotide
ugguguugaggcccaccag

SEQ ID NO: 2599684 - RNA, 19 nt, Artificial Sequence
  Description of Artificial Sequence: Synthetic oligonucleotide
aagcucucuggcucucuca

SEQ ID NO: 2599685 - RNA, 19 nt, Artificial Sequence
  Description of Artificial Sequence: Synthetic oligonucleotide
uauggcucuccuccaccug

SEQ ID NO: 2599686 - RNA, 19 nt, Artificial Sequence
  Description of Artificial Sequence: Synthetic oligonucleotide
cuaaggauuggaaaagaau

SEQ ID NO: 2599687 - RNA, 19 nt, Artificial Sequence
  Description of Artificial Sequence: Synthetic oligonucleotide
acaccugcccucacugucc

SEQ ID NO: 2599688 - RNA, 19 nt, Artificial Sequence
  Description of Artificial Sequence: Synthetic oligonucleotide
gaguccuccuguccaagac

SEQ ID NO: 2599689 - RNA, 19 nt, Artificial Sequence
  Description of Artificial Sequence: Synthetic oligonucleotide
uccuguccaagacuucuau

SEQ ID NO: 2599690 - RNA, 19 nt, Artificial Sequence
  Description of Artificial Sequence: Synthetic oligonucleotide
accaccgugcagauacacc

SEQ ID NO: 2599691 - RNA, 19 nt, Artificial Sequence
  Description of Artificial Sequence: Synthetic oligonucleotide
uugugcgggcaucucguga

SEQ ID NO: 2599692 - RNA, 19 nt, Artificial Sequence
  Description of Artificial Sequence: Synthetic oligonucleotide
uucuauggauugagacaug

SEQ ID NO: 2599693 - RNA, 19 nt, Artificial Sequence
  Description of Artificial Sequence: Synthetic oligonucleotide
guugcuuauggcucuccuc

SEQ ID NO: 2599694 - RNA, 19 nt, Artificial Sequence
  Description of Artificial Sequence: Synthetic oligonucleotide
ugucugggacauccaguug

SEQ ID NO: 2599695 - RNA, 19 nt, Artificial Sequence
  Description of Artificial Sequence: Synthetic oligonucleotide
aggguucaaacuauucaug

SEQ ID NO: 2599696 - RNA, 19 nt, Artificial Sequence
  Description of Artificial Sequence: Synthetic oligonucleotide
gucgcaugcaaaaggagga

SEQ ID NO: 2599697 - RNA, 19 nt, Artificial Sequence
  Description of Artificial Sequence: Synthetic oligonucleotide
ggugcuuagcacgaccccg

SEQ ID NO: 2599698 - RNA, 19 nt, Artificial Sequence
  Description of Artificial Sequence: Synthetic oligonucleotide
uguugaggcccaccagcga

SEQ ID NO: 2599699 - RNA, 19 nt, Artificial Sequence
  Description of Artificial Sequence: Synthetic oligonucleotide
auggauugagacauguuuu

SEQ ID NO: 2599700 - RNA, 19 nt, Artificial Sequence
  Description of Artificial Sequence: Synthetic oligonucleotide
auugcaggucucucugagu

SEQ ID NO: 2599701 - RNA, 19 nt, Artificial Sequence
  Description of Artificial Sequence: Synthetic oligonucleotide
ugaguccuccuguccaaga

SEQ ID NO: 2599702 - RNA, 19 nt, Artificial Sequence
  Description of Artificial Sequence: Synthetic oligonucleotide
gagucgcaugcaaaaggag

SEQ ID NO: 2599703 - RNA, 19 nt, Artificial Sequence
  Description of Artificial Sequence: Synthetic oligonucleotide
augcaaaaggaggauccug

SEQ ID NO: 2599704 - RNA, 19 nt, Artificial Sequence
  Description of Artificial Sequence: Synthetic oligonucleotide
uccaguccuuucauuuggu

SEQ ID NO: 2599705 - RNA, 19 nt, Artificial Sequence
  Description of Artificial Sequence: Synthetic oligonucleotide
ggugaucauggccauggug

SEQ ID NO: 2599706 - RNA, 19 nt, Artificial Sequence
  Description of Artificial Sequence: Synthetic oligonucleotide
ucuucagcagcgguaccga

SEQ ID NO: 2599707 - RNA, 19 nt, Artificial Sequence
  Description of Artificial Sequence: Synthetic oligonucleotide
cauccaguuggugaucaug

SEQ ID NO: 2599708 - RNA, 19 nt, Artificial Sequence
  Description of Artificial Sequence: Synthetic oligonucleotide
cuucuauggauugagacau

SEQ ID NO: 2599709 - RNA, 19 nt, Artificial Sequence
  Description of Artificial Sequence: Synthetic oligonucleotide
uuugugcgggcaucucgug

SEQ ID NO: 2599710 - RNA, 19 nt, Artificial Sequence
  Description of Artificial Sequence: Synthetic oligonucleotide
ugggcaacacgccggugcu

SEQ ID NO: 2599711 - RNA, 19 nt, Artificial Sequence
  Description of Artificial Sequence: Synthetic oligonucleotide
cugccuggccagauguugc

SEQ ID NO: 2599712 - RNA, 19 nt, Artificial Sequence
  Description of Artificial Sequence: Synthetic oligonucleotide
ggugcugcgguccagcguc

SEQ ID NO: 2599713 - RNA, 19 nt, Artificial Sequence
  Description of Artificial Sequence: Synthetic oligonucleotide
auguugcuuauggcucucc

SEQ ID NO: 2599714 - RNA, 19 nt, Artificial Sequence
  Description of Artificial Sequence: Synthetic oligonucleotide
acugccuggccagauguug

SEQ ID NO: 2599715 - RNA, 19 nt, Artificial Sequence
  Description of Artificial Sequence: Synthetic oligonucleotide
accccgaucuucagcagcg

SEQ ID NO: 2599716 - RNA, 19 nt, Artificial Sequence
  Description of Artificial Sequence: Synthetic oligonucleotide
cuggcucucucaugguuac

SEQ ID NO: 2599717 - RNA, 19 nt, Artificial Sequence
  Description of Artificial Sequence: Synthetic oligonucleotide
agcuguacaccugccagcu

SEQ ID NO: 2599718 - RNA, 19 nt, Artificial Sequence
  Description of Artificial Sequence: Synthetic oligonucleotide
cuuucauuugguuuuccau

SEQ ID NO: 2599719 - RNA, 19 nt, Artificial Sequence
  Description of Artificial Sequence: Synthetic oligonucleotide
acucuuaaguuagcccuug

SEQ ID NO: 2599720 - RNA, 19 nt, Artificial Sequence
  Description of Artificial Sequence: Synthetic oligonucleotide
gucucucugaguccuccug

SEQ ID NO: 2599721 - RNA, 19 nt, Artificial Sequence
  Description of Artificial Sequence: Synthetic oligonucleotide
ucagucacuggcgcauuga

SEQ ID NO: 2599722 - RNA, 19 nt, Artificial Sequence
  Description of Artificial Sequence: Synthetic oligonucleotide
cugggcagagcuguacacc

SEQ ID NO: 2599723 - RNA, 19 nt, Artificial Sequence
  Description of Artificial Sequence: Synthetic oligonucleotide
agcucucuggcucucucau

SEQ ID NO: 2599724 - RNA, 19 nt, Artificial Sequence
  Description of Artificial Sequence: Synthetic oligonucleotide
gauccugguuggauucaag

SEQ ID NO: 2599725 - RNA, 19 nt, Artificial Sequence
  Description of Artificial Sequence: Synthetic oligonucleotide
aacucuuaaguuagcccuu

SEQ ID NO: 2599726 - RNA, 19 nt, Artificial Sequence
  Description of Artificial Sequence: Synthetic oligonucleotide
agugucugggacauccagu

SEQ ID NO: 2599727 - RNA, 19 nt, Artificial Sequence
  Description of Artificial Sequence: Synthetic oligonucleotide
uccacguauugcaggucuc

SEQ ID NO: 2599728 - RNA, 19 nt, Artificial Sequence
  Description of Artificial Sequence: Synthetic oligonucleotide
uauucaugggaugcaucua

SEQ ID NO: 2599729 - RNA, 19 nt, Artificial Sequence
  Description of Artificial Sequence: Synthetic oligonucleotide
ucgugaacacauggucugc

SEQ ID NO: 2599730 - RNA, 19 nt, Artificial Sequence
  Description of Artificial Sequence: Synthetic oligonucleotide
ucauuugguuuuccaucuu

SEQ ID NO: 2599731 - RNA, 19 nt, Artificial Sequence
  Description of Artificial Sequence: Synthetic oligonucleotide
cagcgguaccgacaucgcg

SEQ ID NO: 2599732 - RNA, 19 nt, Artificial Sequence
  Description of Artificial Sequence: Synthetic oligonucleotide
aucauggccauggugcuua

SEQ ID NO: 2599733 - RNA, 19 nt, Artificial Sequence
  Description of Artificial Sequence: Synthetic oligonucleotide
gugaaauggugcuaaggau

SEQ ID NO: 2599734 - RNA, 19 nt, Artificial Sequence
  Description of Artificial Sequence: Synthetic oligonucleotide
auacaccugcccucacugu

SEQ ID NO: 2599735 - RNA, 19 nt, Artificial Sequence
  Description of Artificial Sequence: Synthetic oligonucleotide
caccugccagcucuccucg

SEQ ID NO: 2599736 - RNA, 19 nt, Artificial Sequence
  Description of Artificial Sequence: Synthetic oligonucleotide
gaugcaucuagagucgcau

SEQ ID NO: 2599737 - RNA, 19 nt, Artificial Sequence
  Description of Artificial Sequence: Synthetic oligonucleotide
caugggaugcaucuagagu

SEQ ID NO: 2599738 - RNA, 19 nt, Artificial Sequence
  Description of Artificial Sequence: Synthetic oligonucleotide
uggugggcaacacgccggu

SEQ ID NO: 2599739 - RNA, 19 nt, Artificial Sequence
  Description of Artificial Sequence: Synthetic oligonucleotide
guauugcaggucucucuga

SEQ ID NO: 2599740 - RNA, 19 nt, Artificial Sequence
  Description of Artificial Sequence: Synthetic oligonucleotide
ggggacugcuucuucaguc

SEQ ID NO: 2599741 - RNA, 19 nt, Artificial Sequence
  Description of Artificial Sequence: Synthetic oligonucleotide
cuuggacuccaguccuuuc

SEQ ID NO: 2599742 - RNA, 19 nt, Artificial Sequence
  Description of Artificial Sequence: Synthetic oligonucleotide
guuagacauugacaagggu

SEQ ID NO: 2599743 - RNA, 19 nt, Artificial Sequence
  Description of Artificial Sequence: Synthetic oligonucleotide
caccgugcagauacaccug

SEQ ID NO: 2599744 - RNA, 19 nt, Artificial Sequence
  Description of Artificial Sequence: Synthetic oligonucleotide
cuucagcagcgguaccgac

SEQ ID NO: 2599745 - RNA, 19 nt, Artificial Sequence
  Description of Artificial Sequence: Synthetic oligonucleotide
gacauugacaaggguucaa

SEQ ID NO: 2599746 - RNA, 19 nt, Artificial Sequence
  Description of Artificial Sequence: Synthetic oligonucleotide
uggugaucauggccauggu

SEQ ID NO: 2599747 - RNA, 19 nt, Artificial Sequence
  Description of Artificial Sequence: Synthetic oligonucleotide
gagccgggugguguugagg

SEQ ID NO: 2599748 - RNA, 19 nt, Artificial Sequence
  Description of Artificial Sequence: Synthetic oligonucleotide
ugcgggcaucucgugaaca

SEQ ID NO: 2599749 - RNA, 19 nt, Artificial Sequence
  Description of Artificial Sequence: Synthetic oligonucleotide
ggggcaaccaccgugcaga

SEQ ID NO: 2599750 - RNA, 19 nt, Artificial Sequence
  Description of Artificial Sequence: Synthetic oligonucleotide
ugccagcucuccucggggu

SEQ ID NO: 2599751 - RNA, 19 nt, Artificial Sequence
  Description of Artificial Sequence: Synthetic oligonucleotide
gauguugcuuauggcucuc

SEQ ID NO: 2599752 - RNA, 19 nt, Artificial Sequence
  Description of Artificial Sequence: Synthetic oligonucleotide
gccagauguugcuuauggc

SEQ ID NO: 2599753 - RNA, 19 nt, Artificial Sequence
  Description of Artificial Sequence: Synthetic oligonucleotide
aucuagagucgcaugcaaa

SEQ ID NO: 2599754 - RNA, 19 nt, Artificial Sequence
  Description of Artificial Sequence: Synthetic oligonucleotide
caacacgccggugcugcgg

SEQ ID NO: 2599755 - RNA, 19 nt, Artificial Sequence
  Description of Artificial Sequence: Synthetic oligonucleotide
caucuagagucgcaugcaa

SEQ ID NO: 2599756 - RNA, 19 nt, Artificial Sequence
  Description of Artificial Sequence: Synthetic oligonucleotide
caagguuccuuagugaaau

SEQ ID NO: 2599757 - RNA, 19 nt, Artificial Sequence
  Description of Artificial Sequence: Synthetic oligonucleotide
caagacuucuauggauuga

SEQ ID NO: 2599758 - RNA, 19 nt, Artificial Sequence
  Description of Artificial Sequence: Synthetic oligonucleotide
ucgggguuggugggcaaca

SEQ ID NO: 2599759 - RNA, 19 nt, Artificial Sequence
  Description of Artificial Sequence: Synthetic oligonucleotide
ggcaacacgccggugcugc

SEQ ID NO: 2599760 - RNA, 19 nt, Artificial Sequence
  Description of Artificial Sequence: Synthetic oligonucleotide
uugaacugccuggccagau

SEQ ID NO: 2599761 - RNA, 19 nt, Artificial Sequence
  Description of Artificial Sequence: Synthetic oligonucleotide
caccugcuugaacuuggac

SEQ ID NO: 2599762 - RNA, 19 nt, Artificial Sequence
  Description of Artificial Sequence: Synthetic oligonucleotide
agagccgggugguguugag

SEQ ID NO: 2599763 - RNA, 19 nt, Artificial Sequence
  Description of Artificial Sequence: Synthetic oligonucleotide
agacuucuauggauugaga

SEQ ID NO: 2599764 - RNA, 19 nt, Artificial Sequence
  Description of Artificial Sequence: Synthetic oligonucleotide
ugcuuagcacgaccccgau

SEQ ID NO: 2599765 - RNA, 19 nt, Artificial Sequence
  Description of Artificial Sequence: Synthetic oligonucleotide
ucgcaugcaaaaggaggau

SEQ ID NO: 2599766 - RNA, 19 nt, Artificial Sequence
  Description of Artificial Sequence: Synthetic oligonucleotide
aggaggauccugguuggau

SEQ ID NO: 2599767 - RNA, 19 nt, Artificial Sequence
  Description of Artificial Sequence: Synthetic oligonucleotide
guccaagacuucuauggau

SEQ ID NO: 2599768 - RNA, 19 nt, Artificial Sequence
  Description of Artificial Sequence: Synthetic oligonucleotide
caucucgugaacacauggu

SEQ ID NO: 2599769 - RNA, 19 nt, Artificial Sequence
  Description of Artificial Sequence: Synthetic oligonucleotide
gcggccgagagccgggugg

SEQ ID NO: 2599770 - RNA, 19 nt, Artificial Sequence
  Description of Artificial Sequence: Synthetic oligonucleotide
cagagcuguacaccugcca

SEQ ID NO: 2599771 - RNA, 19 nt, Artificial Sequence
  Description of Artificial Sequence: Synthetic oligonucleotide
aaggaggauccugguugga

SEQ ID NO: 2599772 - RNA, 19 nt, Artificial Sequence
  Description of Artificial Sequence: Synthetic oligonucleotide
cugcuugaacuuggacucc

SEQ ID NO: 2599773 - RNA, 19 nt, Artificial Sequence
  Description of Artificial Sequence: Synthetic oligonucleotide
cacguauugcaggucucuc

SEQ ID NO: 2599774 - RNA, 19 nt, Artificial Sequence
  Description of Artificial Sequence: Synthetic oligonucleotide
ggacugcuucuucagucac

SEQ ID NO: 2599775 - RNA, 19 nt, Artificial Sequence
  Description of Artificial Sequence: Synthetic oligonucleotide
cugcgguccagcgucccgc

SEQ ID NO: 2599776 - RNA, 19 nt, Artificial Sequence
  Description of Artificial Sequence: Synthetic oligonucleotide
cgugcagauacaccugccc

SEQ ID NO: 2599777 - RNA, 19 nt, Artificial Sequence
  Description of Artificial Sequence: Synthetic oligonucleotide
auggugcuaaggauuggaa

SEQ ID NO: 2599778 - RNA, 19 nt, Artificial Sequence
  Description of Artificial Sequence: Synthetic oligonucleotide
guuggugaucauggccaug

SEQ ID NO: 2599779 - RNA, 19 nt, Artificial Sequence
  Description of Artificial Sequence: Synthetic oligonucleotide
gcuaaggauuggaaaagaa

SEQ ID NO: 2599780 - RNA, 19 nt, Artificial Sequence
  Description of Artificial Sequence: Synthetic oligonucleotide
gguaccgacaucgcgccuc

SEQ ID NO: 2599781 - RNA, 19 nt, Artificial Sequence
  Description of Artificial Sequence: Synthetic oligonucleotide
uccucgggguuggugggca

SEQ ID NO: 2599782 - RNA, 19 nt, Artificial Sequence
  Description of Artificial Sequence: Synthetic oligonucleotide
cuggcggccgagagccggg

SEQ ID NO: 2599783 - RNA, 19 nt, Artificial Sequence
  Description of Artificial Sequence: Synthetic oligonucleotide
caguccuuucauuugguuu

SEQ ID NO: 2599784 - RNA, 19 nt, Artificial Sequence
  Description of Artificial Sequence: Synthetic oligonucleotide
acuuggacuccaguccuuu

SEQ ID NO: 2599785 - RNA, 19 nt, Artificial Sequence
  Description of Artificial Sequence: Synthetic oligonucleotide
gcgguaccgacaucgcgcc

SEQ ID NO: 2599786 - RNA, 19 nt, Artificial Sequence
  Description of Artificial Sequence: Synthetic oligonucleotide
cuccacguauugcaggucu

SEQ ID NO: 2599787 - RNA, 19 nt, Artificial Sequence
  Description of Artificial Sequence: Synthetic oligonucleotide
ggauuggaaaagaaucgua

SEQ ID NO: 2599788 - RNA, 19 nt, Artificial Sequence
  Description of Artificial Sequence: Synthetic oligonucleotide
agucacuggcgcauugaaa

SEQ ID NO: 2599789 - RNA, 19 nt, Artificial Sequence
  Description of Artificial Sequence: Synthetic oligonucleotide
ccuuucauuugguuuucca

SEQ ID NO: 2599790 - RNA, 19 nt, Artificial Sequence
  Description of Artificial Sequence: Synthetic oligonucleotide
cucuuaaguuagcccuuga

SEQ ID NO: 2599791 - RNA, 19 nt, Artificial Sequence
  Description of Artificial Sequence: Synthetic oligonucleotide
gcucucucaugguuacaug

SEQ ID NO: 2599792 - RNA, 19 nt, Artificial Sequence
  Description of Artificial Sequence: Synthetic oligonucleotide
ucuccacguauugcagguc

SEQ ID NO: 2599793 - RNA, 19 nt, Artificial Sequence
  Description of Artificial Sequence: Synthetic oligonucleotide
cuccaguagcugccucagc

SEQ ID NO: 2599794 - RNA, 19 nt, Artificial Sequence
  Description of Artificial Sequence: Synthetic oligonucleotide
uuagcacgaccccgaucuu

SEQ ID NO: 2599795 - RNA, 19 nt, Artificial Sequence
  Description of Artificial Sequence: Synthetic oligonucleotide
ggauucaagguuccuuagu

SEQ ID NO: 2599796 - RNA, 19 nt, Artificial Sequence
  Description of Artificial Sequence: Synthetic oligonucleotide
gguuccuuagugaaauggu

SEQ ID NO: 2599797 - RNA, 19 nt, Artificial Sequence
  Description of Artificial Sequence: Synthetic oligonucleotide
aggauccugguuggauuca

SEQ ID NO: 2599798 - RNA, 19 nt, Artificial Sequence
  Description of Artificial Sequence: Synthetic oligonucleotide
gugcuuagcacgaccccga

SEQ ID NO: 2599799 - RNA, 19 nt, Artificial Sequence
  Description of Artificial Sequence: Synthetic oligonucleotide
gguuggugggcaacacgcc

SEQ ID NO: 2599800 - RNA, 19 nt, Artificial Sequence
  Description of Artificial Sequence: Synthetic oligonucleotide
aacuuggacuccaguccuu

SEQ ID NO: 2599801 - RNA, 19 nt, Artificial Sequence
  Description of Artificial Sequence: Synthetic oligonucleotide
gcagauacaccugcccuca

SEQ ID NO: 2599802 - RNA, 19 nt, Artificial Sequence
  Description of Artificial Sequence: Synthetic oligonucleotide
ccugggcagagcuguacac

SEQ ID NO: 2599803 - RNA, 19 nt, Artificial Sequence
  Description of Artificial Sequence: Synthetic oligonucleotide
cagucacuggcgcauugaa

SEQ ID NO: 2599804 - RNA, 19 nt, Artificial Sequence
  Description of Artificial Sequence: Synthetic oligonucleotide
gcccucacuguccugggca

SEQ ID NO: 2599805 - RNA, 19 nt, Artificial Sequence
  Description of Artificial Sequence: Synthetic oligonucleotide
gcgggcaucucgugaacac

SEQ ID NO: 2599806 - RNA, 19 nt, Artificial Sequence
  Description of Artificial Sequence: Synthetic oligonucleotide
cagcgagggcagugucugg

SEQ ID NO: 2599807 - RNA, 19 nt, Artificial Sequence
  Description of Artificial Sequence: Synthetic oligonucleotide
guacaccugccagcucucc

SEQ ID NO: 2599808 - RNA, 19 nt, Artificial Sequence
  Description of Artificial Sequence: Synthetic oligonucleotide
caaaaggaggauccugguu

SEQ ID NO: 2599809 - RNA, 19 nt, Artificial Sequence
  Description of Artificial Sequence: Synthetic oligonucleotide
cacuguccugggcagagcu

SEQ ID NO: 2599810 - RNA, 19 nt, Artificial Sequence
  Description of Artificial Sequence: Synthetic oligonucleotide
cagauacaccugcccucac

SEQ ID NO: 2599811 - RNA, 19 nt, Artificial Sequence
  Description of Artificial Sequence: Synthetic oligonucleotide
gcaucuagagucgcaugca

SEQ ID NO: 2599812 - RNA, 19 nt, Artificial Sequence
  Description of Artificial Sequence: Synthetic oligonucleotide
cagcucuccucgggguugg

SEQ ID NO: 2599813 - RNA, 19 nt, Artificial Sequence
  Description of Artificial Sequence: Synthetic oligonucleotide
ggugguguugaggcccacc

SEQ ID NO: 2599814 - RNA, 19 nt, Artificial Sequence
  Description of Artificial Sequence: Synthetic oligonucleotide
gagagccgggugguguuga

SEQ ID NO: 2599815 - RNA, 19 nt, Artificial Sequence
  Description of Artificial Sequence: Synthetic oligonucleotide
ccaccgugcagauacaccu

SEQ ID NO: 2599816 - RNA, 19 nt, Artificial Sequence
  Description of Artificial Sequence: Synthetic oligonucleotide
cucgggguuggugggcaac

SEQ ID NO: 2599817 - RNA, 19 nt, Artificial Sequence
  Description of Artificial Sequence: Synthetic oligonucleotide
cugggacauccaguuggug

SEQ ID NO: 2599818 - RNA, 19 nt, Artificial Sequence
  Description of Artificial Sequence: Synthetic oligonucleotide
ccgggugguguugaggccc

SEQ ID NO: 2599819 - RNA, 19 nt, Artificial Sequence
  Description of Artificial Sequence: Synthetic oligonucleotide
gcugcgguccagcgucccg

SEQ ID NO: 2599820 - RNA, 19 nt, Artificial Sequence
  Description of Artificial Sequence: Synthetic oligonucleotide
cccuugaacugccuggcca

SEQ ID NO: 2599821 - RNA, 19 nt, Artificial Sequence
  Description of Artificial Sequence: Synthetic oligonucleotide
acacgccggugcugcgguc

SEQ ID NO: 2599822 - RNA, 19 nt, Artificial Sequence
  Description of Artificial Sequence: Synthetic oligonucleotide
caugcaaaaggaggauccu

SEQ ID NO: 2599823 - RNA, 19 nt, Artificial Sequence
  Description of Artificial Sequence: Synthetic oligonucleotide
gacaaggguucaaacuauu

SEQ ID NO: 2599824 - RNA, 19 nt, Artificial Sequence
  Description of Artificial Sequence: Synthetic oligonucleotide
gggaugcaucuagagucgc

SEQ ID NO: 2599825 - RNA, 19 nt, Artificial Sequence
  Description of Artificial Sequence: Synthetic oligonucleotide
ugcugcgguccagcguccc

SEQ ID NO: 2599826 - RNA, 19 nt, Artificial Sequence
  Description of Artificial Sequence: Synthetic oligonucleotide
cuauggauugagacauguu

SEQ ID NO: 2599827 - RNA, 19 nt, Artificial Sequence
  Description of Artificial Sequence: Synthetic oligonucleotide
aacugccuggccagauguu

SEQ ID NO: 2599828 - RNA, 19 nt, Artificial Sequence
  Description of Artificial Sequence: Synthetic oligonucleotide
caccagcgagggcaguguc

SEQ ID NO: 2599829 - RNA, 19 nt, Artificial Sequence
  Description of Artificial Sequence: Synthetic oligonucleotide
gcaaaaggaggauccuggu

SEQ ID NO: 2599830 - RNA, 19 nt, Artificial Sequence
  Description of Artificial Sequence: Synthetic oligonucleotide
ggcaucucgugaacacaug

SEQ ID NO: 2599831 - RNA, 19 nt, Artificial Sequence
  Description of Artificial Sequence: Synthetic oligonucleotide
ccgugcagauacaccugcc

SEQ ID NO: 2599832 - RNA, 19 nt, Artificial Sequence
  Description of Artificial Sequence: Synthetic oligonucleotide
gcaacacgccggugcugcg

SEQ ID NO: 2599833 - RNA, 19 nt, Artificial Sequence
  Description of Artificial Sequence: Synthetic oligonucleotide
ggaugcaucuagagucgca

SEQ ID NO: 2599834 - RNA, 19 nt, Artificial Sequence
  Description of Artificial Sequence: Synthetic oligonucleotide
uggcucucucaugguuaca

SEQ ID NO: 2599835 - RNA, 19 nt, Artificial Sequence
  Description of Artificial Sequence: Synthetic oligonucleotide
gugcgggcaucucgugaac

SEQ ID NO: 2599836 - RNA, 19 nt, Artificial Sequence
  Description of Artificial Sequence: Synthetic oligonucleotide
cuccucgggguuggugggc

SEQ ID NO: 2599837 - RNA, 19 nt, Artificial Sequence
  Description of Artificial Sequence: Synthetic oligonucleotide
cagcgucccgccgcuggcg

SEQ ID NO: 2599838 - RNA, 19 nt, Artificial Sequence
  Description of Artificial Sequence: Synthetic oligonucleotide
ggaggauccugguuggauu

SEQ ID NO: 2599839 - RNA, 19 nt, Artificial Sequence
  Description of Artificial Sequence: Synthetic oligonucleotide
gcuuagcacgaccccgauc

SEQ ID NO: 2599840 - RNA, 19 nt, Artificial Sequence
  Description of Artificial Sequence: Synthetic oligonucleotide
ccugguuggauucaagguu

SEQ ID NO: 2599841 - RNA, 19 nt, Artificial Sequence
  Description of Artificial Sequence: Synthetic oligonucleotide
gccauggugcuuagcacga

SEQ ID NO: 2599842 - RNA, 19 nt, Artificial Sequence
  Description of Artificial Sequence: Synthetic oligonucleotide
gcagagcuguacaccugcc

SEQ ID NO: 2599843 - RNA, 19 nt, Artificial Sequence
  Description of Artificial Sequence: Synthetic oligonucleotide
caaccaccgugcagauaca

SEQ ID NO: 2599844 - RNA, 19 nt, Artificial Sequence
  Description of Artificial Sequence: Synthetic oligonucleotide
acgccggugcugcggucca

SEQ ID NO: 2599845 - RNA, 19 nt, Artificial Sequence
  Description of Artificial Sequence: Synthetic oligonucleotide
guccuccuguccaagacuu

SEQ ID NO: 2599846 - RNA, 19 nt, Artificial Sequence
  Description of Artificial Sequence: Synthetic oligonucleotide
accugcccucacuguccug

SEQ ID NO: 2599847 - RNA, 19 nt, Artificial Sequence
  Description of Artificial Sequence: Synthetic oligonucleotide
ccgaucuucagcagcggua

SEQ ID NO: 2599848 - RNA, 19 nt, Artificial Sequence
  Description of Artificial Sequence: Synthetic oligonucleotide
gccgggugguguugaggcc

SEQ ID NO: 2599849 - RNA, 19 nt, Artificial Sequence
  Description of Artificial Sequence: Synthetic oligonucleotide
ccggugcugcgguccagcg

SEQ ID NO: 2599850 - RNA, 19 nt, Artificial Sequence
  Description of Artificial Sequence: Synthetic oligonucleotide
gcaggucucucugaguccu

SEQ ID NO: 2599851 - RNA, 19 nt, Artificial Sequence
  Description of Artificial Sequence: Synthetic oligonucleotide
gcagcgguaccgacaucgc

SEQ ID NO: 2599852 - RNA, 19 nt, Artificial Sequence
  Description of Artificial Sequence: Synthetic oligonucleotide
ccagcucuccucgggguug

SEQ ID NO: 2599853 - RNA, 19 nt, Artificial Sequence
  Description of Artificial Sequence: Synthetic oligonucleotide
ggacauccaguuggugauc

SEQ ID NO: 2599854 - RNA, 19 nt, Artificial Sequence
  Description of Artificial Sequence: Synthetic oligonucleotide
cccaccagcgagggcagug

SEQ ID NO: 2599855 - RNA, 19 nt, Artificial Sequence
  Description of Artificial Sequence: Synthetic oligonucleotide
ccagcgucccgccgcuggc

SEQ ID NO: 2599856 - RNA, 19 nt, Artificial Sequence
  Description of Artificial Sequence: Synthetic oligonucleotide
gccggugcugcgguccagc

SEQ ID NO: 2599857 - RNA, 19 nt, Artificial Sequence
  Description of Artificial Sequence: Synthetic oligonucleotide
ggucucucugaguccuccu

SEQ ID NO: 2599858 - RNA, 19 nt, Artificial Sequence
  Description of Artificial Sequence: Synthetic oligonucleotide
gguuggauucaagguuccu

SEQ ID NO: 2599859 - RNA, 19 nt, Artificial Sequence
  Description of Artificial Sequence: Synthetic oligonucleotide
ccuccuguccaagacuucu

SEQ ID NO: 2599860 - RNA, 19 nt, Artificial Sequence
  Description of Artificial Sequence: Synthetic oligonucleotide
ccauggugcuuagcacgac

SEQ ID NO: 2599861 - RNA, 19 nt, Artificial Sequence
  Description of Artificial Sequence: Synthetic oligonucleotide
ccccgaucuucagcagcgg

SEQ ID NO: 2599862 - RNA, 19 nt, Artificial Sequence
  Description of Artificial Sequence: Synthetic oligonucleotide
gggcaacacgccggugcug

SEQ ID NO: 2599863 - RNA, 19 nt, Artificial Sequence
  Description of Artificial Sequence: Synthetic oligonucleotide
cagcagcgguaccgacauc

SEQ ID NO: 2599864 - RNA, 19 nt, Artificial Sequence
  Description of Artificial Sequence: Synthetic oligonucleotide
ggacuccaguccuuucauu

SEQ ID NO: 2599865 - RNA, 19 nt, Artificial Sequence
  Description of Artificial Sequence: Synthetic oligonucleotide
agcucuccucgggguuggu

SEQ ID NO: 2599866 - RNA, 19 nt, Artificial Sequence
  Description of Artificial Sequence: Synthetic oligonucleotide
gccgagagccggguggugu

SEQ ID NO: 2599867 - RNA, 19 nt, Artificial Sequence
  Description of Artificial Sequence: Synthetic oligonucleotide
gcgucccgccgcuggcggc

SEQ ID NO: 2599868 - RNA, 19 nt, Artificial Sequence
  Description of Artificial Sequence: Synthetic oligonucleotide
ccacguauugcaggucucu

SEQ ID NO: 2599869 - RNA, 19 nt, Artificial Sequence
  Description of Artificial Sequence: Synthetic oligonucleotide
cccgaucuucagcagcggu

SEQ ID NO: 2599870 - RNA, 19 nt, Artificial Sequence
  Description of Artificial Sequence: Synthetic oligonucleotide
ccaguccuuucauuugguu

SEQ ID NO: 2599871 - RNA, 19 nt, Artificial Sequence
  Description of Artificial Sequence: Synthetic oligonucleotide
cuucagucacuggcgcauu

SEQ ID NO: 2599872 - RNA, 19 nt, Artificial Sequence
  Description of Artificial Sequence: Synthetic oligonucleotide
ggccgagagccggguggug

SEQ ID NO: 2599873 - RNA, 19 nt, Artificial Sequence
  Description of Artificial Sequence: Synthetic oligonucleotide
cgagagccgggugguguug

SEQ ID NO: 2599874 - RNA, 19 nt, Artificial Sequence
  Description of Artificial Sequence: Synthetic oligonucleotide
ggcaaccaccgugcagaua

SEQ ID NO: 2599875 - RNA, 19 nt, Artificial Sequence
  Description of Artificial Sequence: Synthetic oligonucleotide
gccagcucuccucgggguu

SEQ ID NO: 2599876 - RNA, 19 nt, Artificial Sequence
  Description of Artificial Sequence: Synthetic oligonucleotide
cgggguuggugggcaacac

SEQ ID NO: 2599877 - RNA, 19 nt, Artificial Sequence
  Description of Artificial Sequence: Synthetic oligonucleotide
gggcaaccaccgugcagau

SEQ ID NO: 2599878 - RNA, 19 nt, Artificial Sequence
  Description of Artificial Sequence: Synthetic oligonucleotide
cccgccgcuggcggccgag

SEQ ID NO: 2599879 - RNA, 19 nt, Artificial Sequence
  Description of Artificial Sequence: Synthetic oligonucleotide
cgcuggcggccgagagccg

SEQ ID NO: 2599880 - RNA, 19 nt, Artificial Sequence
  Description of Artificial Sequence: Synthetic oligonucleotide
ccgagagccgggugguguu

SEQ ID NO: 2599881 - RNA, 19 nt, Artificial Sequence
  Description of Artificial Sequence: Synthetic oligonucleotide
gccuggccagauguugcuu

SEQ ID NO: 2599882 - RNA, 19 nt, Artificial Sequence
  Description of Artificial Sequence: Synthetic oligonucleotide
cggugcugcgguccagcgu

SEQ ID NO: 2599883 - RNA, 19 nt, Artificial Sequence
  Description of Artificial Sequence: Synthetic oligonucleotide
cgccggugcugcgguccag

SEQ ID NO: 2599884 - RNA, 19 nt, Artificial Sequence
  Description of Artificial Sequence: Synthetic oligonucleotide
ccgccgcuggcggccgaga

SEQ ID NO: 2599885 - RNA, 19 nt, Artificial Sequence
  Description of Artificial Sequence: Synthetic oligonucleotide
gcccaccagcgagggcagu

SEQ ID NO: 2599886 - RNA, 19 nt, Artificial Sequence
  Description of Artificial Sequence: Synthetic oligonucleotide
cggccgagagccggguggu

SEQ ID NO: 2599887 - RNA, 19 nt, Artificial Sequence
  Description of Artificial Sequence: Synthetic oligonucleotide
cgguaccgacaucgcgccu

SEQ ID NO: 2599888 - RNA, 19 nt, Artificial Sequence
  Description of Artificial Sequence: Synthetic oligonucleotide
aaugggagucuuuagagcc

SEQ ID NO: 2599889 - RNA, 19 nt, Artificial Sequence
  Description of Artificial Sequence: Synthetic oligonucleotide
aguuuaauaacuucauccc

SEQ ID NO: 2599890 - RNA, 19 nt, Artificial Sequence
  Description of Artificial Sequence: Synthetic oligonucleotide
agcucuugaacuuuguucc

SEQ ID NO: 2599891 - RNA, 19 nt, Artificial Sequence
  Description of Artificial Sequence: Synthetic oligonucleotide
uuuaaugaugcuucuagag

SEQ ID NO: 2599892 - RNA, 19 nt, Artificial Sequence
  Description of Artificial Sequence: Synthetic oligonucleotide
auaacuucaucccacagag

SEQ ID NO: 2599893 - RNA, 19 nt, Artificial Sequence
  Description of Artificial Sequence: Synthetic oligonucleotide
uugaacuuuguuccgaagg

SEQ ID NO: 2599894 - RNA, 19 nt, Artificial Sequence
  Description of Artificial Sequence: Synthetic oligonucleotide
aagaaucucugacucuucc

SEQ ID NO: 2599895 - RNA, 19 nt, Artificial Sequence
  Description of Artificial Sequence: Synthetic oligonucleotide
uuuaauaacuucaucccac

SEQ ID NO: 2599896 - RNA, 19 nt, Artificial Sequence
  Description of Artificial Sequence: Synthetic oligonucleotide
agucuuuagagcccaaggc

SEQ ID NO: 2599897 - RNA, 19 nt, Artificial Sequence
  Description of Artificial Sequence: Synthetic oligonucleotide
aauaacuucaucccacaga

SEQ ID NO: 2599898 - RNA, 19 nt, Artificial Sequence
  Description of Artificial Sequence: Synthetic oligonucleotide
uuucauuuggguuuggacu

SEQ ID NO: 2599899 - RNA, 19 nt, Artificial Sequence
  Description of Artificial Sequence: Synthetic oligonucleotide
acucgaagaggauauaaac

SEQ ID NO: 2599900 - RNA, 19 nt, Artificial Sequence
  Description of Artificial Sequence: Synthetic oligonucleotide
aaugucuuccagcugcggg

SEQ ID NO: 2599901 - RNA, 19 nt, Artificial Sequence
  Description of Artificial Sequence: Synthetic oligonucleotide
aaucuguuccagcagcaac

SEQ ID NO: 2599902 - RNA, 19 nt, Artificial Sequence
  Description of Artificial Sequence: Synthetic oligonucleotide
aaaguuggugcucagucug

SEQ ID NO: 2599903 - RNA, 19 nt, Artificial Sequence
  Description of Artificial Sequence: Synthetic oligonucleotide
uuuucgaaacccuuccagg

SEQ ID NO: 2599904 - RNA, 19 nt, Artificial Sequence
  Description of Artificial Sequence: Synthetic oligonucleotide
gaagcaacuuuaaugaugc

SEQ ID NO: 2599905 - RNA, 19 nt, Artificial Sequence
  Description of Artificial Sequence: Synthetic oligonucleotide
uguagaggaaacucgaaga

SEQ ID NO: 2599906 - RNA, 19 nt, Artificial Sequence
  Description of Artificial Sequence: Synthetic oligonucleotide
uccugaagcaacuuuaaug

SEQ ID NO: 2599907 - RNA, 19 nt, Artificial Sequence
  Description of Artificial Sequence: Synthetic oligonucleotide
agcaacuucaguuccuccc

SEQ ID NO: 2599908 - RNA, 19 nt, Artificial Sequence
  Description of Artificial Sequence: Synthetic oligonucleotide
cacagcauucguuagagcc

SEQ ID NO: 2599909 - RNA, 19 nt, Artificial Sequence
  Description of Artificial Sequence: Synthetic oligonucleotide
uuaaugaugcuucuagagu

SEQ ID NO: 2599910 - RNA, 19 nt, Artificial Sequence
  Description of Artificial Sequence: Synthetic oligonucleotide
aaagccacugcuucccugg

SEQ ID NO: 2599911 - RNA, 19 nt, Artificial Sequence
  Description of Artificial Sequence: Synthetic oligonucleotide
aagugaugaggggaaaucc

SEQ ID NO: 2599912 - RNA, 19 nt, Artificial Sequence
  Description of Artificial Sequence: Synthetic oligonucleotide
uccuucagcaaucuguucc

SEQ ID NO: 2599913 - RNA, 19 nt, Artificial Sequence
  Description of Artificial Sequence: Synthetic oligonucleotide
ugaacuuuguuccgaaggc

SEQ ID NO: 2599914 - RNA, 19 nt, Artificial Sequence
  Description of Artificial Sequence: Synthetic oligonucleotide
aacuuuguuccgaaggccc

SEQ ID NO: 2599915 - RNA, 19 nt, Artificial Sequence
  Description of Artificial Sequence: Synthetic oligonucleotide
gagaaguugagcugguggg

SEQ ID NO: 2599916 - RNA, 19 nt, Artificial Sequence
  Description of Artificial Sequence: Synthetic oligonucleotide
agaaugggagucuuuagag

SEQ ID NO: 2599917 - RNA, 19 nt, Artificial Sequence
  Description of Artificial Sequence: Synthetic oligonucleotide
ucuuuagagcccaaggcug

SEQ ID NO: 2599918 - RNA, 19 nt, Artificial Sequence
  Description of Artificial Sequence: Synthetic oligonucleotide
ucggaguuuaauaacuuca

SEQ ID NO: 2599919 - RNA, 19 nt, Artificial Sequence
  Description of Artificial Sequence: Synthetic oligonucleotide
aagaaugggagucuuuaga

SEQ ID NO: 2599920 - RNA, 19 nt, Artificial Sequence
  Description of Artificial Sequence: Synthetic oligonucleotide
aaauccaggugucaaccag

SEQ ID NO: 2599921 - RNA, 19 nt, Artificial Sequence
  Description of Artificial Sequence: Synthetic oligonucleotide
ucugaacuugccuuucugg

SEQ ID NO: 2599922 - RNA, 19 nt, Artificial Sequence
  Description of Artificial Sequence: Synthetic oligonucleotide
ugaggggaaauccaggugu

SEQ ID NO: 2599923 - RNA, 19 nt, Artificial Sequence
  Description of Artificial Sequence: Synthetic oligonucleotide
agucaccugggccugagcc

SEQ ID NO: 2599924 - RNA, 19 nt, Artificial Sequence
  Description of Artificial Sequence: Synthetic oligonucleotide
uaaugaugcuucuagagua

SEQ ID NO: 2599925 - RNA, 19 nt, Artificial Sequence
  Description of Artificial Sequence: Synthetic oligonucleotide
uucucuccaagaaugggag

SEQ ID NO: 2599926 - RNA, 19 nt, Artificial Sequence
  Description of Artificial Sequence: Synthetic oligonucleotide
auucguuagagccccaguc

SEQ ID NO: 2599927 - RNA, 19 nt, Artificial Sequence
  Description of Artificial Sequence: Synthetic oligonucleotide
aaucucugacucuucccac

SEQ ID NO: 2599928 - RNA, 19 nt, Artificial Sequence
  Description of Artificial Sequence: Synthetic oligonucleotide
uucuuuucgaaacccuucc

SEQ ID NO: 2599929 - RNA, 19 nt, Artificial Sequence
  Description of Artificial Sequence: Synthetic oligonucleotide
uuucucuccaagaauggga

SEQ ID NO: 2599930 - RNA, 19 nt, Artificial Sequence
  Description of Artificial Sequence: Synthetic oligonucleotide
aaaaguuggugcucagucu

SEQ ID NO: 2599931 - RNA, 19 nt, Artificial Sequence
  Description of Artificial Sequence: Synthetic oligonucleotide
uuucgaaacccuuccaggc

SEQ ID NO: 2599932 - RNA, 19 nt, Artificial Sequence
  Description of Artificial Sequence: Synthetic oligonucleotide
ugggauucagugcagguca

SEQ ID NO: 2599933 - RNA, 19 nt, Artificial Sequence
  Description of Artificial Sequence: Synthetic oligonucleotide
augucuuccagcugcgggc

SEQ ID NO: 2599934 - RNA, 19 nt, Artificial Sequence
  Description of Artificial Sequence: Synthetic oligonucleotide
gagucuuuagagcccaagg

SEQ ID NO: 2599935 - RNA, 19 nt, Artificial Sequence
  Description of Artificial Sequence: Synthetic oligonucleotide
uucgaaacccuuccaggcg

SEQ ID NO: 2599936 - RNA, 19 nt, Artificial Sequence
  Description of Artificial Sequence: Synthetic oligonucleotide
uggucuuguuuucauuugg

SEQ ID NO: 2599937 - RNA, 19 nt, Artificial Sequence
  Description of Artificial Sequence: Synthetic oligonucleotide
uagaguacugaucuuguuc

SEQ ID NO: 2599938 - RNA, 19 nt, Artificial Sequence
  Description of Artificial Sequence: Synthetic oligonucleotide
uucagugcaggucaguuuc

SEQ ID NO: 2599939 - RNA, 19 nt, Artificial Sequence
  Description of Artificial Sequence: Synthetic oligonucleotide
uucccgauccuucaacagg

SEQ ID NO: 2599940 - RNA, 19 nt, Artificial Sequence
  Description of Artificial Sequence: Synthetic oligonucleotide
uuggacuagcucuugaacu

SEQ ID NO: 2599941 - RNA, 19 nt, Artificial Sequence
  Description of Artificial Sequence: Synthetic oligonucleotide
aaugaugcuucuagaguac

SEQ ID NO: 2599942 - RNA, 19 nt, Artificial Sequence
  Description of Artificial Sequence: Synthetic oligonucleotide
agguguuccaaugucuucc

SEQ ID NO: 2599943 - RNA, 19 nt, Artificial Sequence
  Description of Artificial Sequence: Synthetic oligonucleotide
ugacucuucccacaaaagu

SEQ ID NO: 2599944 - RNA, 19 nt, Artificial Sequence
  Description of Artificial Sequence: Synthetic oligonucleotide
guagaggaaacucgaagag

SEQ ID NO: 2599945 - RNA, 19 nt, Artificial Sequence
  Description of Artificial Sequence: Synthetic oligonucleotide
uuaauaacuucaucccaca

SEQ ID NO: 2599946 - RNA, 19 nt, Artificial Sequence
  Description of Artificial Sequence: Synthetic oligonucleotide
uaauaacuucaucccacag

SEQ ID NO: 2599947 - RNA, 19 nt, Artificial Sequence
  Description of Artificial Sequence: Synthetic oligonucleotide
ucccuguagaggaaacucg

SEQ ID NO: 2599948 - RNA, 19 nt, Artificial Sequence
  Description of Artificial Sequence: Synthetic oligonucleotide
ucugacucuucccacaaaa

SEQ ID NO: 2599949 - RNA, 19 nt, Artificial Sequence
  Description of Artificial Sequence: Synthetic oligonucleotide
ucucgaagcaacuucaguu

SEQ ID NO: 2599950 - RNA, 19 nt, Artificial Sequence
  Description of Artificial Sequence: Synthetic oligonucleotide
uguagguguuccaaugucu

SEQ ID NO: 2599951 - RNA, 19 nt, Artificial Sequence
  Description of Artificial Sequence: Synthetic oligonucleotide
uuuggacuagcucuugaac

SEQ ID NO: 2599952 - RNA, 19 nt, Artificial Sequence
  Description of Artificial Sequence: Synthetic oligonucleotide
aucggaguuuaauaacuuc

SEQ ID NO: 2599953 - RNA, 19 nt, Artificial Sequence
  Description of Artificial Sequence: Synthetic oligonucleotide
cuuuucgaaacccuuccag

SEQ ID NO: 2599954 - RNA, 19 nt, Artificial Sequence
  Description of Artificial Sequence: Synthetic oligonucleotide
uagagccccagucaccugg

SEQ ID NO: 2599955 - RNA, 19 nt, Artificial Sequence
  Description of Artificial Sequence: Synthetic oligonucleotide
uguucaucugcuguucccg

SEQ ID NO: 2599956 - RNA, 19 nt, Artificial Sequence
  Description of Artificial Sequence: Synthetic oligonucleotide
uucuagaguacugaucuug

SEQ ID NO: 2599957 - RNA, 19 nt, Artificial Sequence
  Description of Artificial Sequence: Synthetic oligonucleotide
uucguuagagccccaguca

SEQ ID NO: 2599958 - RNA, 19 nt, Artificial Sequence
  Description of Artificial Sequence: Synthetic oligonucleotide
caggcguuguuccaaaagg

SEQ ID NO: 2599959 - RNA, 19 nt, Artificial Sequence
  Description of Artificial Sequence: Synthetic oligonucleotide
uucaacaggcccugcacag

SEQ ID NO: 2599960 - RNA, 19 nt, Artificial Sequence
  Description of Artificial Sequence: Synthetic oligonucleotide
uucauuuggguuuggacua

SEQ ID NO: 2599961 - RNA, 19 nt, Artificial Sequence
  Description of Artificial Sequence: Synthetic oligonucleotide
ucaaccagguucccuguag

SEQ ID NO: 2599962 - RNA, 19 nt, Artificial Sequence
  Description of Artificial Sequence: Synthetic oligonucleotide
gaaucucugacucuuccca

SEQ ID NO: 2599963 - RNA, 19 nt, Artificial Sequence
  Description of Artificial Sequence: Synthetic oligonucleotide
ucgaagcaacuucaguucc

SEQ ID NO: 2599964 - RNA, 19 nt, Artificial Sequence
  Description of Artificial Sequence: Synthetic oligonucleotide
ucccgauccuucaacaggc

SEQ ID NO: 2599965 - RNA, 19 nt, Artificial Sequence
  Description of Artificial Sequence: Synthetic oligonucleotide
ugcaguucuuuucgaaacc

SEQ ID NO: 2599966 - RNA, 19 nt, Artificial Sequence
  Description of Artificial Sequence: Synthetic oligonucleotide
cacagagaaguugagcugg

SEQ ID NO: 2599967 - RNA, 19 nt, Artificial Sequence
  Description of Artificial Sequence: Synthetic oligonucleotide
ucuguagguguuccaaugu

SEQ ID NO: 2599968 - RNA, 19 nt, Artificial Sequence
  Description of Artificial Sequence: Synthetic oligonucleotide
acagcauucguuagagccc

SEQ ID NO: 2599969 - RNA, 19 nt, Artificial Sequence
  Description of Artificial Sequence: Synthetic oligonucleotide
uagggguccguccuucugg

SEQ ID NO: 2599970 - RNA, 19 nt, Artificial Sequence
  Description of Artificial Sequence: Synthetic oligonucleotide
aauccaggugucaaccagg

SEQ ID NO: 2599971 - RNA, 19 nt, Artificial Sequence
  Description of Artificial Sequence: Synthetic oligonucleotide
uagagcccaaggcugauga

SEQ ID NO: 2599972 - RNA, 19 nt, Artificial Sequence
  Description of Artificial Sequence: Synthetic oligonucleotide
uccugguaaacuccaaggu

SEQ ID NO: 2599973 - RNA, 19 nt, Artificial Sequence
  Description of Artificial Sequence: Synthetic oligonucleotide
gaacuugccuuucugguca

SEQ ID NO: 2599974 - RNA, 19 nt, Artificial Sequence
  Description of Artificial Sequence: Synthetic oligonucleotide
agaggaaacucgaagagga

SEQ ID NO: 2599975 - RNA, 19 nt, Artificial Sequence
  Description of Artificial Sequence: Synthetic oligonucleotide
ugggaucggaguuuaauaa

SEQ ID NO: 2599976 - RNA, 19 nt, Artificial Sequence
  Description of Artificial Sequence: Synthetic oligonucleotide
aaccucgcguccuucagca

SEQ ID NO: 2599977 - RNA, 19 nt, Artificial Sequence
  Description of Artificial Sequence: Synthetic oligonucleotide
augagcuugggccccuggc

SEQ ID NO: 2599978 - RNA, 19 nt, Artificial Sequence
  Description of Artificial Sequence: Synthetic oligonucleotide
aacuccaaggucugaacuu

SEQ ID NO: 2599979 - RNA, 19 nt, Artificial Sequence
  Description of Artificial Sequence: Synthetic oligonucleotide
agcaacuccugaugauggc

SEQ ID NO: 2599980 - RNA, 19 nt, Artificial Sequence
  Description of Artificial Sequence: Synthetic oligonucleotide
ugaugcuucuagaguacug

SEQ ID NO: 2599981 - RNA, 19 nt, Artificial Sequence
  Description of Artificial Sequence: Synthetic oligonucleotide
uggucucgaagcaacuuca

SEQ ID NO: 2599982 - RNA, 19 nt, Artificial Sequence
  Description of Artificial Sequence: Synthetic oligonucleotide
cucgaagcaacuucaguuc

SEQ ID NO: 2599983 - RNA, 19 nt, Artificial Sequence
  Description of Artificial Sequence: Synthetic oligonucleotide
aaacucgaagaggauauaa

SEQ ID NO: 2599984 - RNA, 19 nt, Artificial Sequence
  Description of Artificial Sequence: Synthetic oligonucleotide
uggugaaagccacugcuuc

SEQ ID NO: 2599985 - RNA, 19 nt, Artificial Sequence
  Description of Artificial Sequence: Synthetic oligonucleotide
ugaagcgugggaucggagu

SEQ ID NO: 2599986 - RNA, 19 nt, Artificial Sequence
  Description of Artificial Sequence: Synthetic oligonucleotide
uaaacuccaaggucugaac

SEQ ID NO: 2599987 - RNA, 19 nt, Artificial Sequence
  Description of Artificial Sequence: Synthetic oligonucleotide
ucguuagagccccagucac

SEQ ID NO: 2599988 - RNA, 19 nt, Artificial Sequence
  Description of Artificial Sequence: Synthetic oligonucleotide
ucuuuucgaaacccuucca

SEQ ID NO: 2599989 - RNA, 19 nt, Artificial Sequence
  Description of Artificial Sequence: Synthetic oligonucleotide
ucuuggugaaagccacugc

SEQ ID NO: 2599990 - RNA, 19 nt, Artificial Sequence
  Description of Artificial Sequence: Synthetic oligonucleotide
uucuuggugaaagccacug

SEQ ID NO: 2599991 - RNA, 19 nt, Artificial Sequence
  Description of Artificial Sequence: Synthetic oligonucleotide
gaugcuucuagaguacuga

SEQ ID NO: 2599992 - RNA, 19 nt, Artificial Sequence
  Description of Artificial Sequence: Synthetic oligonucleotide
ccugaagcaacuuuaauga

SEQ ID NO: 2599993 - RNA, 19 nt, Artificial Sequence
  Description of Artificial Sequence: Synthetic oligonucleotide
uguucccgauccuucaaca

SEQ ID NO: 2599994 - RNA, 19 nt, Artificial Sequence
  Description of Artificial Sequence: Synthetic oligonucleotide
ucgaaacccuuccaggcgu

SEQ ID NO: 2599995 - RNA, 19 nt, Artificial Sequence
  Description of Artificial Sequence: Synthetic oligonucleotide
ucccacaaaaguuggugcu

SEQ ID NO: 2599996 - RNA, 19 nt, Artificial Sequence
  Description of Artificial Sequence: Synthetic oligonucleotide
uguuccgaaggcccugcag

SEQ ID NO: 2599997 - RNA, 19 nt, Artificial Sequence
  Description of Artificial Sequence: Synthetic oligonucleotide
uccaaaagggcucucccuu

SEQ ID NO: 2599998 - RNA, 19 nt, Artificial Sequence
  Description of Artificial Sequence: Synthetic oligonucleotide
gugucaaccagguucccug

SEQ ID NO: 2599999 - RNA, 19 nt, Artificial Sequence
  Description of Artificial Sequence: Synthetic oligonucleotide
uucagcaaucuguuccagc

SEQ ID NO: 2600000 - RNA, 19 nt, Artificial Sequence
  Description of Artificial Sequence: Synthetic oligonucleotide
caagaaugggagucuuuag

SEQ ID NO: 2600001 - RNA, 19 nt, Artificial Sequence
  Description of Artificial Sequence: Synthetic oligonucleotide
agccccagucaccugggcc

SEQ ID NO: 2600002 - RNA, 19 nt, Artificial Sequence
  Description of Artificial Sequence: Synthetic oligonucleotide
acuucaguuccucccgaag

SEQ ID NO: 2600003 - RNA, 19 nt, Artificial Sequence
  Description of Artificial Sequence: Synthetic oligonucleotide
gaacuuuguuccgaaggcc

SEQ ID NO: 2600004 - RNA, 19 nt, Artificial Sequence
  Description of Artificial Sequence: Synthetic oligonucleotide
ugguaaacuccaaggucug

SEQ ID NO: 2600005 - RNA, 19 nt, Artificial Sequence
  Description of Artificial Sequence: Synthetic oligonucleotide
guuccaaaagggcucuccc

SEQ ID NO: 2600006 - RNA, 19 nt, Artificial Sequence
  Description of Artificial Sequence: Synthetic oligonucleotide
ucagucugcaguucuuggu

SEQ ID NO: 2600007 - RNA, 19 nt, Artificial Sequence
  Description of Artificial Sequence: Synthetic oligonucleotide
ugaaccucgcguccuucag

SEQ ID NO: 2600008 - RNA, 19 nt, Artificial Sequence
  Description of Artificial Sequence: Synthetic oligonucleotide
uguuccaaaagggcucucc

SEQ ID NO: 2600009 - RNA, 19 nt, Artificial Sequence
  Description of Artificial Sequence: Synthetic oligonucleotide
uccaaggucugaacuugcc

SEQ ID NO: 2600010 - RNA, 19 nt, Artificial Sequence
  Description of Artificial Sequence: Synthetic oligonucleotide
cucuguagguguuccaaug

SEQ ID NO: 2600011 - RNA, 19 nt, Artificial Sequence
  Description of Artificial Sequence: Synthetic oligonucleotide
uggcugaggaggcaaguga

SEQ ID NO: 2600012 - RNA, 19 nt, Artificial Sequence
  Description of Artificial Sequence: Synthetic oligonucleotide
cuucccacaaaaguuggug

SEQ ID NO: 2600013 - RNA, 19 nt, Artificial Sequence
  Description of Artificial Sequence: Synthetic oligonucleotide
ucaucccacagagaaguug

SEQ ID NO: 2600014 - RNA, 19 nt, Artificial Sequence
  Description of Artificial Sequence: Synthetic oligonucleotide
ugcuucuagaguacugauc

SEQ ID NO: 2600015 - RNA, 19 nt, Artificial Sequence
  Description of Artificial Sequence: Synthetic oligonucleotide
aacuugccuuucuggucac

SEQ ID NO: 2600016 - RNA, 19 nt, Artificial Sequence
  Description of Artificial Sequence: Synthetic oligonucleotide
acucuucccacaaaaguug

SEQ ID NO: 2600017 - RNA, 19 nt, Artificial Sequence
  Description of Artificial Sequence: Synthetic oligonucleotide
ucuugaacuuuguuccgaa

SEQ ID NO: 2600018 - RNA, 19 nt, Artificial Sequence
  Description of Artificial Sequence: Synthetic oligonucleotide
ccaggugucaaccagguuc

SEQ ID NO: 2600019 - RNA, 19 nt, Artificial Sequence
  Description of Artificial Sequence: Synthetic oligonucleotide
ugcaguucuuggugaaagc

SEQ ID NO: 2600020 - RNA, 19 nt, Artificial Sequence
  Description of Artificial Sequence: Synthetic oligonucleotide
uggacuagcucuugaacuu

SEQ ID NO: 2600021 - RNA, 19 nt, Artificial Sequence
  Description of Artificial Sequence: Synthetic oligonucleotide
cucccgaagaaucucugac

SEQ ID NO: 2600022 - RNA, 19 nt, Artificial Sequence
  Description of Artificial Sequence: Synthetic oligonucleotide
caucccacagagaaguuga

SEQ ID NO: 2600023 - RNA, 19 nt, Artificial Sequence
  Description of Artificial Sequence: Synthetic oligonucleotide
gauggcucagcuggucucg

SEQ ID NO: 2600024 - RNA, 19 nt, Artificial Sequence
  Description of Artificial Sequence: Synthetic oligonucleotide
ucccgaagaaucucugacu

SEQ ID NO: 2600025 - RNA, 19 nt, Artificial Sequence
  Description of Artificial Sequence: Synthetic oligonucleotide
agcaacuuuaaugaugcuu

SEQ ID NO: 2600026 - RNA, 19 nt, Artificial Sequence
  Description of Artificial Sequence: Synthetic oligonucleotide
uccugaugauggcucagcu

SEQ ID NO: 2600027 - RNA, 19 nt, Artificial Sequence
  Description of Artificial Sequence: Synthetic oligonucleotide
cagucugcaguucuuggug

SEQ ID NO: 2600028 - RNA, 19 nt, Artificial Sequence
  Description of Artificial Sequence: Synthetic oligonucleotide
aacucgaagaggauauaaa

SEQ ID NO: 2600029 - RNA, 19 nt, Artificial Sequence
  Description of Artificial Sequence: Synthetic oligonucleotide
gaaauccaggugucaacca

SEQ ID NO: 2600030 - RNA, 19 nt, Artificial Sequence
  Description of Artificial Sequence: Synthetic oligonucleotide
gugaugaggggaaauccag

SEQ ID NO: 2600031 - RNA, 19 nt, Artificial Sequence
  Description of Artificial Sequence: Synthetic oligonucleotide
uccuucaacaggcccugca

SEQ ID NO: 2600032 - RNA, 19 nt, Artificial Sequence
  Description of Artificial Sequence: Synthetic oligonucleotide
augaggggaaauccaggug

SEQ ID NO: 2600033 - RNA, 19 nt, Artificial Sequence
  Description of Artificial Sequence: Synthetic oligonucleotide
gcuucuagaguacugaucu

SEQ ID NO: 2600034 - RNA, 19 nt, Artificial Sequence
  Description of Artificial Sequence: Synthetic oligonucleotide
aggcguuguuccaaaaggg

SEQ ID NO: 2600035 - RNA, 19 nt, Artificial Sequence
  Description of Artificial Sequence: Synthetic oligonucleotide
gaggcaagugaugagggga

SEQ ID NO: 2600036 - RNA, 19 nt, Artificial Sequence
  Description of Artificial Sequence: Synthetic oligonucleotide
gagcccaaggcugaugagc

SEQ ID NO: 2600037 - RNA, 19 nt, Artificial Sequence
  Description of Artificial Sequence: Synthetic oligonucleotide
augggagucuuuagagccc

SEQ ID NO: 2600038 - RNA, 19 nt, Artificial Sequence
  Description of Artificial Sequence: Synthetic oligonucleotide
cucgaagaggauauaaacu

SEQ ID NO: 2600039 - RNA, 19 nt, Artificial Sequence
  Description of Artificial Sequence: Synthetic oligonucleotide
acuccaaggucugaacuug

SEQ ID NO: 2600040 - RNA, 19 nt, Artificial Sequence
  Description of Artificial Sequence: Synthetic oligonucleotide
gucuuuagagcccaaggcu

SEQ ID NO: 2600041 - RNA, 19 nt, Artificial Sequence
  Description of Artificial Sequence: Synthetic oligonucleotide
ucuucccacaaaaguuggu

SEQ ID NO: 2600042 - RNA, 19 nt, Artificial Sequence
  Description of Artificial Sequence: Synthetic oligonucleotide
agugaugaggggaaaucca

SEQ ID NO: 2600043 - RNA, 19 nt, Artificial Sequence
  Description of Artificial Sequence: Synthetic oligonucleotide
cuggucucgaagcaacuuc

SEQ ID NO: 2600044 - RNA, 19 nt, Artificial Sequence
  Description of Artificial Sequence: Synthetic oligonucleotide
augauggcucagcuggucu

SEQ ID NO: 2600045 - RNA, 19 nt, Artificial Sequence
  Description of Artificial Sequence: Synthetic oligonucleotide
aucucugacucuucccaca

SEQ ID NO: 2600046 - RNA, 19 nt, Artificial Sequence
  Description of Artificial Sequence: Synthetic oligonucleotide
gugaaagccacugcuuccc

SEQ ID NO: 2600047 - RNA, 19 nt, Artificial Sequence
  Description of Artificial Sequence: Synthetic oligonucleotide
uuggugaaagccacugcuu

SEQ ID NO: 2600048 - RNA, 19 nt, Artificial Sequence
  Description of Artificial Sequence: Synthetic oligonucleotide
caacuccugaugauggcuc

SEQ ID NO: 2600049 - RNA, 19 nt, Artificial Sequence
  Description of Artificial Sequence: Synthetic oligonucleotide
ccagcugcgggccugaacc

SEQ ID NO: 2600050 - RNA, 19 nt, Artificial Sequence
  Description of Artificial Sequence: Synthetic oligonucleotide
caguuccucccgaagaauc

SEQ ID NO: 2600051 - RNA, 19 nt, Artificial Sequence
  Description of Artificial Sequence: Synthetic oligonucleotide
uuccucccgaagaaucucu

SEQ ID NO: 2600052 - RNA, 19 nt, Artificial Sequence
  Description of Artificial Sequence: Synthetic oligonucleotide
ucccuuuugggcccuccug

SEQ ID NO: 2600053 - RNA, 19 nt, Artificial Sequence
  Description of Artificial Sequence: Synthetic oligonucleotide
caagugaugaggggaaauc

SEQ ID NO: 2600054 - RNA, 19 nt, Artificial Sequence
  Description of Artificial Sequence: Synthetic oligonucleotide
uuugggcccuccugaagca

SEQ ID NO: 2600055 - RNA, 19 nt, Artificial Sequence
  Description of Artificial Sequence: Synthetic oligonucleotide
gaugagcuugggccccugg

SEQ ID NO: 2600056 - RNA, 19 nt, Artificial Sequence
  Description of Artificial Sequence: Synthetic oligonucleotide
uacugaucuuguucaucug

SEQ ID NO: 2600057 - RNA, 19 nt, Artificial Sequence
  Description of Artificial Sequence: Synthetic oligonucleotide
aacuucaguuccucccgaa

SEQ ID NO: 2600058 - RNA, 19 nt, Artificial Sequence
  Description of Artificial Sequence: Synthetic oligonucleotide
gaaccucgcguccuucagc

SEQ ID NO: 2600059 - RNA, 19 nt, Artificial Sequence
  Description of Artificial Sequence: Synthetic oligonucleotide
agccugaagcgugggaucg

SEQ ID NO: 2600060 - RNA, 19 nt, Artificial Sequence
  Description of Artificial Sequence: Synthetic oligonucleotide
agugcaggucaguuucucu

SEQ ID NO: 2600061 - RNA, 19 nt, Artificial Sequence
  Description of Artificial Sequence: Synthetic oligonucleotide
ggucuuguuuucauuuggg

SEQ ID NO: 2600062 - RNA, 19 nt, Artificial Sequence
  Description of Artificial Sequence: Synthetic oligonucleotide
cuguagguguuccaauguc

SEQ ID NO: 2600063 - RNA, 19 nt, Artificial Sequence
  Description of Artificial Sequence: Synthetic oligonucleotide
gcuggugggauucagugca

SEQ ID NO: 2600064 - RNA, 19 nt, Artificial Sequence
  Description of Artificial Sequence: Synthetic oligonucleotide
uuuguuccgaaggcccugc

SEQ ID NO: 2600065 - RNA, 19 nt, Artificial Sequence
  Description of Artificial Sequence: Synthetic oligonucleotide
cuuuagagcccaaggcuga

SEQ ID NO: 2600066 - RNA, 19 nt, Artificial Sequence
  Description of Artificial Sequence: Synthetic oligonucleotide
ucauuuggguuuggacuag

SEQ ID NO: 2600067 - RNA, 19 nt, Artificial Sequence
  Description of Artificial Sequence: Synthetic oligonucleotide
gucugaacuugccuuucug

SEQ ID NO: 2600068 - RNA, 19 nt, Artificial Sequence
  Description of Artificial Sequence: Synthetic oligonucleotide
caguucuuggugaaagcca

SEQ ID NO: 2600069 - RNA, 19 nt, Artificial Sequence
  Description of Artificial Sequence: Synthetic oligonucleotide
ggcccugcaguucuuuucg

SEQ ID NO: 2600070 - RNA, 19 nt, Artificial Sequence
  Description of Artificial Sequence: Synthetic oligonucleotide
cagcauucguuagagcccc

SEQ ID NO: 2600071 - RNA, 19 nt, Artificial Sequence
  Description of Artificial Sequence: Synthetic oligonucleotide
ugcuguucccgauccuuca

SEQ ID NO: 2600072 - RNA, 19 nt, Artificial Sequence
  Description of Artificial Sequence: Synthetic oligonucleotide
agggguccguccuucuggg

SEQ ID NO: 2600073 - RNA, 19 nt, Artificial Sequence
  Description of Artificial Sequence: Synthetic oligonucleotide
guucuuuucgaaacccuuc

SEQ ID NO: 2600074 - RNA, 19 nt, Artificial Sequence
  Description of Artificial Sequence: Synthetic oligonucleotide
uaacuucaucccacagaga

SEQ ID NO: 2600075 - RNA, 19 nt, Artificial Sequence
  Description of Artificial Sequence: Synthetic oligonucleotide
ugauggcucagcuggucuc

SEQ ID NO: 2600076 - RNA, 19 nt, Artificial Sequence
  Description of Artificial Sequence: Synthetic oligonucleotide
agggccucuguccugguaa

SEQ ID NO: 2600077 - RNA, 19 nt, Artificial Sequence
  Description of Artificial Sequence: Synthetic oligonucleotide
ccuucugggcaucagggcc

SEQ ID NO: 2600078 - RNA, 19 nt, Artificial Sequence
  Description of Artificial Sequence: Synthetic oligonucleotide
aagcaacuuuaaugaugcu

SEQ ID NO: 2600079 - RNA, 19 nt, Artificial Sequence
  Description of Artificial Sequence: Synthetic oligonucleotide
ugucuuccagcugcgggcc

SEQ ID NO: 2600080 - RNA, 19 nt, Artificial Sequence
  Description of Artificial Sequence: Synthetic oligonucleotide
acaaaaguuggugcucagu

SEQ ID NO: 2600081 - RNA, 19 nt, Artificial Sequence
  Description of Artificial Sequence: Synthetic oligonucleotide
agaaguugagcugguggga

SEQ ID NO: 2600082 - RNA, 19 nt, Artificial Sequence
  Description of Artificial Sequence: Synthetic oligonucleotide
cuccaaggucugaacuugc

SEQ ID NO: 2600083 - RNA, 19 nt, Artificial Sequence
  Description of Artificial Sequence: Synthetic oligonucleotide
ugucaaccagguucccugu

SEQ ID NO: 2600084 - RNA, 19 nt, Artificial Sequence
  Description of Artificial Sequence: Synthetic oligonucleotide
guuggugcucagucugcag

SEQ ID NO: 2600085 - RNA, 19 nt, Artificial Sequence
  Description of Artificial Sequence: Synthetic oligonucleotide
uagguguuccaaugucuuc

SEQ ID NO: 2600086 - RNA, 19 nt, Artificial Sequence
  Description of Artificial Sequence: Synthetic oligonucleotide
gacuagcucuugaacuuug

SEQ ID NO: 2600087 - RNA, 19 nt, Artificial Sequence
  Description of Artificial Sequence: Synthetic oligonucleotide
aaacccuuccaggcguugu

SEQ ID NO: 2600088 - RNA, 19 nt, Artificial Sequence
  Description of Artificial Sequence: Synthetic oligonucleotide
cacaaaaguuggugcucag

SEQ ID NO: 2600089 - RNA, 19 nt, Artificial Sequence
  Description of Artificial Sequence: Synthetic oligonucleotide
gggaucggaguuuaauaac

SEQ ID NO: 2600090 - RNA, 19 nt, Artificial Sequence
  Description of Artificial Sequence: Synthetic oligonucleotide
cagcuggucucgaagcaac

SEQ ID NO: 2600091 - RNA, 19 nt, Artificial Sequence
  Description of Artificial Sequence: Synthetic oligonucleotide
aaguugagcuggugggauu

SEQ ID NO: 2600092 - RNA, 19 nt, Artificial Sequence
  Description of Artificial Sequence: Synthetic oligonucleotide
ucucuccaagaaugggagu

SEQ ID NO: 2600093 - RNA, 19 nt, Artificial Sequence
  Description of Artificial Sequence: Synthetic oligonucleotide
augcuucuagaguacugau

SEQ ID NO: 2600094 - RNA, 19 nt, Artificial Sequence
  Description of Artificial Sequence: Synthetic oligonucleotide
cuucaacaggcccugcaca

SEQ ID NO: 2600095 - RNA, 19 nt, Artificial Sequence
  Description of Artificial Sequence: Synthetic oligonucleotide
uugggccccuggcugagga

SEQ ID NO: 2600096 - RNA, 19 nt, Artificial Sequence
  Description of Artificial Sequence: Synthetic oligonucleotide
ccugguaaacuccaagguc

SEQ ID NO: 2600097 - RNA, 19 nt, Artificial Sequence
  Description of Artificial Sequence: Synthetic oligonucleotide
aguucuuuucgaaacccuu

SEQ ID NO: 2600098 - RNA, 19 nt, Artificial Sequence
  Description of Artificial Sequence: Synthetic oligonucleotide
gugggaucggaguuuaaua

SEQ ID NO: 2600099 - RNA, 19 nt, Artificial Sequence
  Description of Artificial Sequence: Synthetic oligonucleotide
uugagcuggugggauucag

SEQ ID NO: 2600100 - RNA, 19 nt, Artificial Sequence
  Description of Artificial Sequence: Synthetic oligonucleotide
cuguucccgauccuucaac

SEQ ID NO: 2600101 - RNA, 19 nt, Artificial Sequence
  Description of Artificial Sequence: Synthetic oligonucleotide
uuagagcccaaggcugaug

SEQ ID NO: 2600102 - RNA, 19 nt, Artificial Sequence
  Description of Artificial Sequence: Synthetic oligonucleotide
agagcccaaggcugaugag

SEQ ID NO: 2600103 - RNA, 19 nt, Artificial Sequence
  Description of Artificial Sequence: Synthetic oligonucleotide
aacccuuccaggcguuguu

SEQ ID NO: 2600104 - RNA, 19 nt, Artificial Sequence
  Description of Artificial Sequence: Synthetic oligonucleotide
gcucuugaacuuuguuccg

SEQ ID NO: 2600105 - RNA, 19 nt, Artificial Sequence
  Description of Artificial Sequence: Synthetic oligonucleotide
agcagcaacuccugaugau

SEQ ID NO: 2600106 - RNA, 19 nt, Artificial Sequence
  Description of Artificial Sequence: Synthetic oligonucleotide
ugggcccuccugaagcaac

SEQ ID NO: 2600107 - RNA, 19 nt, Artificial Sequence
  Description of Artificial Sequence: Synthetic oligonucleotide
ggcugaugagcuugggccc

SEQ ID NO: 2600108 - RNA, 19 nt, Artificial Sequence
  Description of Artificial Sequence: Synthetic oligonucleotide
gaugauggcucagcugguc

SEQ ID NO: 2600109 - RNA, 19 nt, Artificial Sequence
  Description of Artificial Sequence: Synthetic oligonucleotide
ggcguuguuccaaaagggc

SEQ ID NO: 2600110 - RNA, 19 nt, Artificial Sequence
  Description of Artificial Sequence: Synthetic oligonucleotide
cucgcguccuucagcaauc

SEQ ID NO: 2600111 - RNA, 19 nt, Artificial Sequence
  Description of Artificial Sequence: Synthetic oligonucleotide
cccgaagaaucucugacuc

SEQ ID NO: 2600112 - RNA, 19 nt, Artificial Sequence
  Description of Artificial Sequence: Synthetic oligonucleotide
gagccugaagcgugggauc

SEQ ID NO: 2600113 - RNA, 19 nt, Artificial Sequence
  Description of Artificial Sequence: Synthetic oligonucleotide
acugcuucccuggucuugu

SEQ ID NO: 2600114 - RNA, 19 nt, Artificial Sequence
  Description of Artificial Sequence: Synthetic oligonucleotide
ccagguucccuguagagga

SEQ ID NO: 2600115 - RNA, 19 nt, Artificial Sequence
  Description of Artificial Sequence: Synthetic oligonucleotide
cuucccuggucuuguuuuc

SEQ ID NO: 2600116 - RNA, 19 nt, Artificial Sequence
  Description of Artificial Sequence: Synthetic oligonucleotide
cuccugaugauggcucagc

SEQ ID NO: 2600117 - RNA, 19 nt, Artificial Sequence
  Description of Artificial Sequence: Synthetic oligonucleotide
gggaaauccaggugucaac

SEQ ID NO: 2600118 - RNA, 19 nt, Artificial Sequence
  Description of Artificial Sequence: Synthetic oligonucleotide
uucccuggucuuguuuuca

SEQ ID NO: 2600119 - RNA, 19 nt, Artificial Sequence
  Description of Artificial Sequence: Synthetic oligonucleotide
cugcuguucccgauccuuc

SEQ ID NO: 2600120 - RNA, 19 nt, Artificial Sequence
  Description of Artificial Sequence: Synthetic oligonucleotide
cugaagcgugggaucggag

SEQ ID NO: 2600121 - RNA, 19 nt, Artificial Sequence
  Description of Artificial Sequence: Synthetic oligonucleotide
guuagagccccagucaccu

SEQ ID NO: 2600122 - RNA, 19 nt, Artificial Sequence
  Description of Artificial Sequence: Synthetic oligonucleotide
uuagagccccagucaccug

SEQ ID NO: 2600123 - RNA, 19 nt, Artificial Sequence
  Description of Artificial Sequence: Synthetic oligonucleotide
guagggguccguccuucug

SEQ ID NO: 2600124 - RNA, 19 nt, Artificial Sequence
  Description of Artificial Sequence: Synthetic oligonucleotide
cauuuggguuuggacuagc

SEQ ID NO: 2600125 - RNA, 19 nt, Artificial Sequence
  Description of Artificial Sequence: Synthetic oligonucleotide
gugggauucagugcagguc

SEQ ID NO: 2600126 - RNA, 19 nt, Artificial Sequence
  Description of Artificial Sequence: Synthetic oligonucleotide
ucaguuccucccgaagaau

SEQ ID NO: 2600127 - RNA, 19 nt, Artificial Sequence
  Description of Artificial Sequence: Synthetic oligonucleotide
aguuggugcucagucugca

SEQ ID NO: 2600128 - RNA, 19 nt, Artificial Sequence
  Description of Artificial Sequence: Synthetic oligonucleotide
caaugucuuccagcugcgg

SEQ ID NO: 2600129 - RNA, 19 nt, Artificial Sequence
  Description of Artificial Sequence: Synthetic oligonucleotide
gaagcgugggaucggaguu

SEQ ID NO: 2600130 - RNA, 19 nt, Artificial Sequence
  Description of Artificial Sequence: Synthetic oligonucleotide
uuuagagcccaaggcugau

SEQ ID NO: 2600131 - RNA, 19 nt, Artificial Sequence
  Description of Artificial Sequence: Synthetic oligonucleotide
uccagcugcgggccugaac

SEQ ID NO: 2600132 - RNA, 19 nt, Artificial Sequence
  Description of Artificial Sequence: Synthetic oligonucleotide
gaaacccuuccaggcguug

SEQ ID NO: 2600133 - RNA, 19 nt, Artificial Sequence
  Description of Artificial Sequence: Synthetic oligonucleotide
caaggucugaacuugccuu

SEQ ID NO: 2600134 - RNA, 19 nt, Artificial Sequence
  Description of Artificial Sequence: Synthetic oligonucleotide
ggagucuuuagagcccaag

SEQ ID NO: 2600135 - RNA, 19 nt, Artificial Sequence
  Description of Artificial Sequence: Synthetic oligonucleotide
acccuuccaggcguuguuc

SEQ ID NO: 2600136 - RNA, 19 nt, Artificial Sequence
  Description of Artificial Sequence: Synthetic oligonucleotide
gaggggaaauccagguguc

SEQ ID NO: 2600137 - RNA, 19 nt, Artificial Sequence
  Description of Artificial Sequence: Synthetic oligonucleotide
cguuguuccaaaagggcuc

SEQ ID NO: 2600138 - RNA, 19 nt, Artificial Sequence
  Description of Artificial Sequence: Synthetic oligonucleotide
ugcgggccugaaccucgcg

SEQ ID NO: 2600139 - RNA, 19 nt, Artificial Sequence
  Description of Artificial Sequence: Synthetic oligonucleotide
ugcuucccuggucuuguuu

SEQ ID NO: 2600140 - RNA, 19 nt, Artificial Sequence
  Description of Artificial Sequence: Synthetic oligonucleotide
uuccaggcguuguuccaaa

SEQ ID NO: 2600141 - RNA, 19 nt, Artificial Sequence
  Description of Artificial Sequence: Synthetic oligonucleotide
cuggugggauucagugcag

SEQ ID NO: 2600142 - RNA, 19 nt, Artificial Sequence
  Description of Artificial Sequence: Synthetic oligonucleotide
ccaggcguuguuccaaaag

SEQ ID NO: 2600143 - RNA, 19 nt, Artificial Sequence
  Description of Artificial Sequence: Synthetic oligonucleotide
ucccuggucuuguuuucau

SEQ ID NO: 2600144 - RNA, 19 nt, Artificial Sequence
  Description of Artificial Sequence: Synthetic oligonucleotide
agcuugggccccuggcuga

SEQ ID NO: 2600145 - RNA, 19 nt, Artificial Sequence
  Description of Artificial Sequence: Synthetic oligonucleotide
ccuucaacaggcccugcac

SEQ ID NO: 2600146 - RNA, 19 nt, Artificial Sequence
  Description of Artificial Sequence: Synthetic oligonucleotide
gauucagugcaggucaguu

SEQ ID NO: 2600147 - RNA, 19 nt, Artificial Sequence
  Description of Artificial Sequence: Synthetic oligonucleotide
acuagcucuugaacuuugu

SEQ ID NO: 2600148 - RNA, 19 nt, Artificial Sequence
  Description of Artificial Sequence: Synthetic oligonucleotide
ggaaacucgaagaggauau

SEQ ID NO: 2600149 - RNA, 19 nt, Artificial Sequence
  Description of Artificial Sequence: Synthetic oligonucleotide
ccaaggcugaugagcuugg

SEQ ID NO: 2600150 - RNA, 19 nt, Artificial Sequence
  Description of Artificial Sequence: Synthetic oligonucleotide
caaggcugaugagcuuggg

SEQ ID NO: 2600151 - RNA, 19 nt, Artificial Sequence
  Description of Artificial Sequence: Synthetic oligonucleotide
gguguuccaaugucuucca

SEQ ID NO: 2600152 - RNA, 19 nt, Artificial Sequence
  Description of Artificial Sequence: Synthetic oligonucleotide
cugaaccucgcguccuuca

SEQ ID NO: 2600153 - RNA, 19 nt, Artificial Sequence
  Description of Artificial Sequence: Synthetic oligonucleotide
cugcacagcauucguuaga

SEQ ID NO: 2600154 - RNA, 19 nt, Artificial Sequence
  Description of Artificial Sequence: Synthetic oligonucleotide
agagccccagucaccuggg

SEQ ID NO: 2600155 - RNA, 19 nt, Artificial Sequence
  Description of Artificial Sequence: Synthetic oligonucleotide
ggguccguccuucugggca

SEQ ID NO: 2600156 - RNA, 19 nt, Artificial Sequence
  Description of Artificial Sequence: Synthetic oligonucleotide
agcugcgggccugaaccuc

SEQ ID NO: 2600157 - RNA, 19 nt, Artificial Sequence
  Description of Artificial Sequence: Synthetic oligonucleotide
ccugcacagcauucguuag

SEQ ID NO: 2600158 - RNA, 19 nt, Artificial Sequence
  Description of Artificial Sequence: Synthetic oligonucleotide
gaaguugagcuggugggau

SEQ ID NO: 2600159 - RNA, 19 nt, Artificial Sequence
  Description of Artificial Sequence: Synthetic oligonucleotide
guuccucccgaagaaucuc

SEQ ID NO: 2600160 - RNA, 19 nt, Artificial Sequence
  Description of Artificial Sequence: Synthetic oligonucleotide
aagcgugggaucggaguuu

SEQ ID NO: 2600161 - RNA, 19 nt, Artificial Sequence
  Description of Artificial Sequence: Synthetic oligonucleotide
uccaggcguuguuccaaaa

SEQ ID NO: 2600162 - RNA, 19 nt, Artificial Sequence
  Description of Artificial Sequence: Synthetic oligonucleotide
auccuucaacaggcccugc

SEQ ID NO: 2600163 - RNA, 19 nt, Artificial Sequence
  Description of Artificial Sequence: Synthetic oligonucleotide
aggcaagugaugaggggaa

SEQ ID NO: 2600164 - RNA, 19 nt, Artificial Sequence
  Description of Artificial Sequence: Synthetic oligonucleotide
ccgauccuucaacaggccc

SEQ ID NO: 2600165 - RNA, 19 nt, Artificial Sequence
  Description of Artificial Sequence: Synthetic oligonucleotide
caacuuuaaugaugcuucu

SEQ ID NO: 2600166 - RNA, 19 nt, Artificial Sequence
  Description of Artificial Sequence: Synthetic oligonucleotide
cagagaaguugagcuggug

SEQ ID NO: 2600167 - RNA, 19 nt, Artificial Sequence
  Description of Artificial Sequence: Synthetic oligonucleotide
guuguuccaaaagggcucu

SEQ ID NO: 2600168 - RNA, 19 nt, Artificial Sequence
  Description of Artificial Sequence: Synthetic oligonucleotide
cacucuguagguguuccaa

SEQ ID NO: 2600169 - RNA, 19 nt, Artificial Sequence
  Description of Artificial Sequence: Synthetic oligonucleotide
uccgaaggcccugcaguuc

SEQ ID NO: 2600170 - RNA, 19 nt, Artificial Sequence
  Description of Artificial Sequence: Synthetic oligonucleotide
gaaacucgaagaggauaua

SEQ ID NO: 2600171 - RNA, 19 nt, Artificial Sequence
  Description of Artificial Sequence: Synthetic oligonucleotide
cuucugggcaucagggccu

SEQ ID NO: 2600172 - RNA, 19 nt, Artificial Sequence
  Description of Artificial Sequence: Synthetic oligonucleotide
cccaaggcugaugagcuug

SEQ ID NO: 2600173 - RNA, 19 nt, Artificial Sequence
  Description of Artificial Sequence: Synthetic oligonucleotide
gaucggaguuuaauaacuu

SEQ ID NO: 2600174 - RNA, 19 nt, Artificial Sequence
  Description of Artificial Sequence: Synthetic oligonucleotide
caacuucaguuccucccga

SEQ ID NO: 2600175 - RNA, 19 nt, Artificial Sequence
  Description of Artificial Sequence: Synthetic oligonucleotide
cccuuccaggcguuguucc

SEQ ID NO: 2600176 - RNA, 19 nt, Artificial Sequence
  Description of Artificial Sequence: Synthetic oligonucleotide
uccaggugucaaccagguu

SEQ ID NO: 2600177 - RNA, 19 nt, Artificial Sequence
  Description of Artificial Sequence: Synthetic oligonucleotide
caguucuuuucgaaacccu

SEQ ID NO: 2600178 - RNA, 19 nt, Artificial Sequence
  Description of Artificial Sequence: Synthetic oligonucleotide
gcugcgggccugaaccucg

SEQ ID NO: 2600179 - RNA, 19 nt, Artificial Sequence
  Description of Artificial Sequence: Synthetic oligonucleotide
gggccccuggcugaggagg

SEQ ID NO: 2600180 - RNA, 19 nt, Artificial Sequence
  Description of Artificial Sequence: Synthetic oligonucleotide
gcugaugagcuugggcccc

SEQ ID NO: 2600181 - RNA, 19 nt, Artificial Sequence
  Description of Artificial Sequence: Synthetic oligonucleotide
gcauucguuagagccccag

SEQ ID NO: 2600182 - RNA, 19 nt, Artificial Sequence
  Description of Artificial Sequence: Synthetic oligonucleotide
cccuguagaggaaacucga

SEQ ID NO: 2600183 - RNA, 19 nt, Artificial Sequence
  Description of Artificial Sequence: Synthetic oligonucleotide
gcucagucugcaguucuug

SEQ ID NO: 2600184 - RNA, 19 nt, Artificial Sequence
  Description of Artificial Sequence: Synthetic oligonucleotide
agguucccuguagaggaaa

SEQ ID NO: 2600185 - RNA, 19 nt, Artificial Sequence
  Description of Artificial Sequence: Synthetic oligonucleotide
guagguguuccaaugucuu

SEQ ID NO: 2600186 - RNA, 19 nt, Artificial Sequence
  Description of Artificial Sequence: Synthetic oligonucleotide
ccugcaguucuuuucgaaa

SEQ ID NO: 2600187 - RNA, 19 nt, Artificial Sequence
  Description of Artificial Sequence: Synthetic oligonucleotide
cugaagcaacuuuaaugau

SEQ ID NO: 2600188 - RNA, 19 nt, Artificial Sequence
  Description of Artificial Sequence: Synthetic oligonucleotide
gcugaggaggcaagugaug

SEQ ID NO: 2600189 - RNA, 19 nt, Artificial Sequence
  Description of Artificial Sequence: Synthetic oligonucleotide
cguuagagccccagucacc

SEQ ID NO: 2600190 - RNA, 19 nt, Artificial Sequence
  Description of Artificial Sequence: Synthetic oligonucleotide
gguucccuguagaggaaac

SEQ ID NO: 2600191 - RNA, 19 nt, Artificial Sequence
  Description of Artificial Sequence: Synthetic oligonucleotide
gggccugaaccucgcgucc

SEQ ID NO: 2600192 - RNA, 19 nt, Artificial Sequence
  Description of Artificial Sequence: Synthetic oligonucleotide
ggagguagggguccguccu

SEQ ID NO: 2600193 - RNA, 19 nt, Artificial Sequence
  Description of Artificial Sequence: Synthetic oligonucleotide
cuuccaggcguuguuccaa

SEQ ID NO: 2600194 - RNA, 19 nt, Artificial Sequence
  Description of Artificial Sequence: Synthetic oligonucleotide
caaucuguuccagcagcaa

SEQ ID NO: 2600195 - RNA, 19 nt, Artificial Sequence
  Description of Artificial Sequence: Synthetic oligonucleotide
gcaaucuguuccagcagca

SEQ ID NO: 2600196 - RNA, 19 nt, Artificial Sequence
  Description of Artificial Sequence: Synthetic oligonucleotide
ggggaaauccaggugucaa

SEQ ID NO: 2600197 - RNA, 19 nt, Artificial Sequence
  Description of Artificial Sequence: Synthetic oligonucleotide
cauucguuagagccccagu

SEQ ID NO: 2600198 - RNA, 19 nt, Artificial Sequence
  Description of Artificial Sequence: Synthetic oligonucleotide
uggcucagcuggucucgaa

SEQ ID NO: 2600199 - RNA, 19 nt, Artificial Sequence
  Description of Artificial Sequence: Synthetic oligonucleotide
ucgcguccuucagcaaucu

SEQ ID NO: 2600200 - RNA, 19 nt, Artificial Sequence
  Description of Artificial Sequence: Synthetic oligonucleotide
cagucaccugggccugagc

SEQ ID NO: 2600201 - RNA, 19 nt, Artificial Sequence
  Description of Artificial Sequence: Synthetic oligonucleotide
agcuggucucgaagcaacu

SEQ ID NO: 2600202 - RNA, 19 nt, Artificial Sequence
  Description of Artificial Sequence: Synthetic oligonucleotide
cugcgggccugaaccucgc

SEQ ID NO: 2600203 - RNA, 19 nt, Artificial Sequence
  Description of Artificial Sequence: Synthetic oligonucleotide
uccguccuucugggcauca

SEQ ID NO: 2600204 - RNA, 19 nt, Artificial Sequence
  Description of Artificial Sequence: Synthetic oligonucleotide
gcguccuucagcaaucugu

SEQ ID NO: 2600205 - RNA, 19 nt, Artificial Sequence
  Description of Artificial Sequence: Synthetic oligonucleotide
uugggcccuccugaagcaa

SEQ ID NO: 2600206 - RNA, 19 nt, Artificial Sequence
  Description of Artificial Sequence: Synthetic oligonucleotide
agcgugggaucggaguuua

SEQ ID NO: 2600207 - RNA, 19 nt, Artificial Sequence
  Description of Artificial Sequence: Synthetic oligonucleotide
gcaggucaguuucucucca

SEQ ID NO: 2600208 - RNA, 19 nt, Artificial Sequence
  Description of Artificial Sequence: Synthetic oligonucleotide
ggugggauucagugcaggu

SEQ ID NO: 2600209 - RNA, 19 nt, Artificial Sequence
  Description of Artificial Sequence: Synthetic oligonucleotide
gguaaacuccaaggucuga

SEQ ID NO: 2600210 - RNA, 19 nt, Artificial Sequence
  Description of Artificial Sequence: Synthetic oligonucleotide
uuguuccaaaagggcucuc

SEQ ID NO: 2600211 - RNA, 19 nt, Artificial Sequence
  Description of Artificial Sequence: Synthetic oligonucleotide
guugagcuggugggauuca

SEQ ID NO: 2600212 - RNA, 19 nt, Artificial Sequence
  Description of Artificial Sequence: Synthetic oligonucleotide
guucccuguagaggaaacu

SEQ ID NO: 2600213 - RNA, 19 nt, Artificial Sequence
  Description of Artificial Sequence: Synthetic oligonucleotide
cuagaguacugaucuuguu

SEQ ID NO: 2600214 - RNA, 19 nt, Artificial Sequence
  Description of Artificial Sequence: Synthetic oligonucleotide
gucaaccagguucccugua

SEQ ID NO: 2600215 - RNA, 19 nt, Artificial Sequence
  Description of Artificial Sequence: Synthetic oligonucleotide
gcguuguuccaaaagggcu

SEQ ID NO: 2600216 - RNA, 19 nt, Artificial Sequence
  Description of Artificial Sequence: Synthetic oligonucleotide
cccacaaaaguuggugcuc

SEQ ID NO: 2600217 - RNA, 19 nt, Artificial Sequence
  Description of Artificial Sequence: Synthetic oligonucleotide
caggucaguuucucuccaa

SEQ ID NO: 2600218 - RNA, 19 nt, Artificial Sequence
  Description of Artificial Sequence: Synthetic oligonucleotide
ccacaaaaguuggugcuca

SEQ ID NO: 2600219 - RNA, 19 nt, Artificial Sequence
  Description of Artificial Sequence: Synthetic oligonucleotide
cuugggccccuggcugagg

SEQ ID NO: 2600220 - RNA, 19 nt, Artificial Sequence
  Description of Artificial Sequence: Synthetic oligonucleotide
gccugagccugaagcgugg

SEQ ID NO: 2600221 - RNA, 19 nt, Artificial Sequence
  Description of Artificial Sequence: Synthetic oligonucleotide
cccugcacagcauucguua

SEQ ID NO: 2600222 - RNA, 19 nt, Artificial Sequence
  Description of Artificial Sequence: Synthetic oligonucleotide
auggcucagcuggucucga

SEQ ID NO: 2600223 - RNA, 19 nt, Artificial Sequence
  Description of Artificial Sequence: Synthetic oligonucleotide
ccuguagaggaaacucgaa

SEQ ID NO: 2600224 - RNA, 19 nt, Artificial Sequence
  Description of Artificial Sequence: Synthetic oligonucleotide
ccuggucuuguuuucauuu

SEQ ID NO: 2600225 - RNA, 19 nt, Artificial Sequence
  Description of Artificial Sequence: Synthetic oligonucleotide
gcuucccuggucuuguuuu

SEQ ID NO: 2600226 - RNA, 19 nt, Artificial Sequence
  Description of Artificial Sequence: Synthetic oligonucleotide
ccuccugaagcaacuuuaa

SEQ ID NO: 2600227 - RNA, 19 nt, Artificial Sequence
  Description of Artificial Sequence: Synthetic oligonucleotide
gccccagucaccugggccu

SEQ ID NO: 2600228 - RNA, 19 nt, Artificial Sequence
  Description of Artificial Sequence: Synthetic oligonucleotide
cagguucccuguagaggaa

SEQ ID NO: 2600229 - RNA, 19 nt, Artificial Sequence
  Description of Artificial Sequence: Synthetic oligonucleotide
caaaagggcucucccuuuu

SEQ ID NO: 2600230 - RNA, 19 nt, Artificial Sequence
  Description of Artificial Sequence: Synthetic oligonucleotide
ggucacucuguagguguuc

SEQ ID NO: 2600231 - RNA, 19 nt, Artificial Sequence
  Description of Artificial Sequence: Synthetic oligonucleotide
gcuguucccgauccuucaa

SEQ ID NO: 2600232 - RNA, 19 nt, Artificial Sequence
  Description of Artificial Sequence: Synthetic oligonucleotide
gccugaagcgugggaucgg

SEQ ID NO: 2600233 - RNA, 19 nt, Artificial Sequence
  Description of Artificial Sequence: Synthetic oligonucleotide
cuucuagaguacugaucuu

SEQ ID NO: 2600234 - RNA, 19 nt, Artificial Sequence
  Description of Artificial Sequence: Synthetic oligonucleotide
accucgcguccuucagcaa

SEQ ID NO: 2600235 - RNA, 19 nt, Artificial Sequence
  Description of Artificial Sequence: Synthetic oligonucleotide
cgggccugaaccucgcguc

SEQ ID NO: 2600236 - RNA, 19 nt, Artificial Sequence
  Description of Artificial Sequence: Synthetic oligonucleotide
cgauccuucaacaggcccu

SEQ ID NO: 2600237 - RNA, 19 nt, Artificial Sequence
  Description of Artificial Sequence: Synthetic oligonucleotide
ccaaggucugaacuugccu

SEQ ID NO: 2600238 - RNA, 19 nt, Artificial Sequence
  Description of Artificial Sequence: Synthetic oligonucleotide
gccucuguccugguaaacu

SEQ ID NO: 2600239 - RNA, 19 nt, Artificial Sequence
  Description of Artificial Sequence: Synthetic oligonucleotide
cuuccagcugcgggccuga

SEQ ID NO: 2600240 - RNA, 19 nt, Artificial Sequence
  Description of Artificial Sequence: Synthetic oligonucleotide
agcauucguuagagcccca

SEQ ID NO: 2600241 - RNA, 19 nt, Artificial Sequence
  Description of Artificial Sequence: Synthetic oligonucleotide
gagguagggguccguccuu

SEQ ID NO: 2600242 - RNA, 19 nt, Artificial Sequence
  Description of Artificial Sequence: Synthetic oligonucleotide
ggccccuggcugaggaggc

SEQ ID NO: 2600243 - RNA, 19 nt, Artificial Sequence
  Description of Artificial Sequence: Synthetic oligonucleotide
gcaagugaugaggggaaau

SEQ ID NO: 2600244 - RNA, 19 nt, Artificial Sequence
  Description of Artificial Sequence: Synthetic oligonucleotide
gcuugggccccuggcugag

SEQ ID NO: 2600245 - RNA, 19 nt, Artificial Sequence
  Description of Artificial Sequence: Synthetic oligonucleotide
gguccguccuucugggcau

SEQ ID NO: 2600246 - RNA, 19 nt, Artificial Sequence
  Description of Artificial Sequence: Synthetic oligonucleotide
ccugaagcgugggaucgga

SEQ ID NO: 2600247 - RNA, 19 nt, Artificial Sequence
  Description of Artificial Sequence: Synthetic oligonucleotide
ggccucuguccugguaaac

SEQ ID NO: 2600248 - RNA, 19 nt, Artificial Sequence
  Description of Artificial Sequence: Synthetic oligonucleotide
gguagggguccguccuucu

SEQ ID NO: 2600249 - RNA, 19 nt, Artificial Sequence
  Description of Artificial Sequence: Synthetic oligonucleotide
ccgaagaaucucugacucu

SEQ ID NO: 2600250 - RNA, 19 nt, Artificial Sequence
  Description of Artificial Sequence: Synthetic oligonucleotide
ggcccugcacagcauucgu

SEQ ID NO: 2600251 - RNA, 19 nt, Artificial Sequence
  Description of Artificial Sequence: Synthetic oligonucleotide
ccugaaccucgcguccuuc

SEQ ID NO: 2600252 - RNA, 19 nt, Artificial Sequence
  Description of Artificial Sequence: Synthetic oligonucleotide
ccgaaggcccugcaguucu

SEQ ID NO: 2600253 - RNA, 19 nt, Artificial Sequence
  Description of Artificial Sequence: Synthetic oligonucleotide
uuccagcugcgggccugaa

SEQ ID NO: 2600254 - RNA, 19 nt, Artificial Sequence
  Description of Artificial Sequence: Synthetic oligonucleotide
gcgggccugaaccucgcgu

SEQ ID NO: 2600255 - RNA, 19 nt, Artificial Sequence
  Description of Artificial Sequence: Synthetic oligonucleotide
ggauucagugcaggucagu

SEQ ID NO: 2600256 - RNA, 19 nt, Artificial Sequence
  Description of Artificial Sequence: Synthetic oligonucleotide
cuccaagaaugggagucuu

SEQ ID NO: 2600257 - RNA, 19 nt, Artificial Sequence
  Description of Artificial Sequence: Synthetic oligonucleotide
caccugggccugagccuga

SEQ ID NO: 2600258 - RNA, 19 nt, Artificial Sequence
  Description of Artificial Sequence: Synthetic oligonucleotide
cagcugcgggccugaaccu

SEQ ID NO: 2600259 - RNA, 19 nt, Artificial Sequence
  Description of Artificial Sequence: Synthetic oligonucleotide
gggccugagccugaagcgu

SEQ ID NO: 2600260 - RNA, 19 nt, Artificial Sequence
  Description of Artificial Sequence: Synthetic oligonucleotide
ggacuagcucuugaacuuu

SEQ ID NO: 2600261 - RNA, 19 nt, Artificial Sequence
  Description of Artificial Sequence: Synthetic oligonucleotide
guccguccuucugggcauc

SEQ ID NO: 2600262 - RNA, 19 nt, Artificial Sequence
  Description of Artificial Sequence: Synthetic oligonucleotide
ccucgcguccuucagcaau

SEQ ID NO: 2600263 - RNA, 19 nt, Artificial Sequence
  Description of Artificial Sequence: Synthetic oligonucleotide
gccuuucuggucacucugu

SEQ ID NO: 2600264 - RNA, 19 nt, Artificial Sequence
  Description of Artificial Sequence: Synthetic oligonucleotide
ccaaaagggcucucccuuu

SEQ ID NO: 2600265 - RNA, 19 nt, Artificial Sequence
  Description of Artificial Sequence: Synthetic oligonucleotide
gcuggucucgaagcaacuu

SEQ ID NO: 2600266 - RNA, 19 nt, Artificial Sequence
  Description of Artificial Sequence: Synthetic oligonucleotide
ccguccuucugggcaucag

SEQ ID NO: 2600267 - RNA, 19 nt, Artificial Sequence
  Description of Artificial Sequence: Synthetic oligonucleotide
cgcguccuucagcaaucug

SEQ ID NO: 2600268 - RNA, 19 nt, Artificial Sequence
  Description of Artificial Sequence: Synthetic oligonucleotide
ccccagucaccugggccug

SEQ ID NO: 2600269 - RNA, 19 nt, Artificial Sequence
  Description of Artificial Sequence: Synthetic oligonucleotide
ggccugaaccucgcguccu

SEQ ID NO: 2600270 - RNA, 19 nt, Artificial Sequence
  Description of Artificial Sequence: Synthetic oligonucleotide
gggcccuccugaagcaacu

SEQ ID NO: 2600271 - RNA, 19 nt, Artificial Sequence
  Description of Artificial Sequence: Synthetic oligonucleotide
gggagucuuuagagcccaa

SEQ ID NO: 2600272 - RNA, 19 nt, Artificial Sequence
  Description of Artificial Sequence: Synthetic oligonucleotide
cgugggaucggaguuuaau

SEQ ID NO: 2600273 - RNA, 19 nt, Artificial Sequence
  Description of Artificial Sequence: Synthetic oligonucleotide
cugcuucccuggucuuguu

SEQ ID NO: 2600274 - RNA, 19 nt, Artificial Sequence
  Description of Artificial Sequence: Synthetic oligonucleotide
cccuggucuuguuuucauu

SEQ ID NO: 2600275 - RNA, 19 nt, Artificial Sequence
  Description of Artificial Sequence: Synthetic oligonucleotide
gccugaaccucgcguccuu

SEQ ID NO: 2600276 - RNA, 19 nt, Artificial Sequence
  Description of Artificial Sequence: Synthetic oligonucleotide
gcccaaggcugaugagcuu

SEQ ID NO: 2600277 - RNA, 19 nt, Artificial Sequence
  Description of Artificial Sequence: Synthetic oligonucleotide
gcccugcacagcauucguu

SEQ ID NO: 2600278 - RNA, 19 nt, Artificial Sequence
  Description of Artificial Sequence: Synthetic oligonucleotide
gcgugggaucggaguuuaa

SEQ ID NO: 2600279 - RNA, 19 nt, Artificial Sequence
  Description of Artificial Sequence: Synthetic oligonucleotide
cccagucaccugggccuga

SEQ ID NO: 2600280 - RNA, 19 nt, Artificial Sequence
  Description of Artificial Sequence: Synthetic oligonucleotide
cgaaacccuuccaggcguu

SEQ ID NO: 2600281 - RNA, 19 nt, Artificial Sequence
  Description of Artificial Sequence: Synthetic oligonucleotide
aaguauaaaucauuuauuc

SEQ ID NO: 2600282 - RNA, 19 nt, Artificial Sequence
  Description of Artificial Sequence: Synthetic oligonucleotide
aaagauuuugccugaagac

SEQ ID NO: 2600283 - RNA, 19 nt, Artificial Sequence
  Description of Artificial Sequence: Synthetic oligonucleotide
uaaagcucagcauagaagg

SEQ ID NO: 2600284 - RNA, 19 nt, Artificial Sequence
  Description of Artificial Sequence: Synthetic oligonucleotide
aaaucauuuauucuccuuc

SEQ ID NO: 2600285 - RNA, 19 nt, Artificial Sequence
  Description of Artificial Sequence: Synthetic oligonucleotide
uaaaguauaaaucauuuau

SEQ ID NO: 2600286 - RNA, 19 nt, Artificial Sequence
  Description of Artificial Sequence: Synthetic oligonucleotide
aaaagauuuugccugaaga

SEQ ID NO: 2600287 - RNA, 19 nt, Artificial Sequence
  Description of Artificial Sequence: Synthetic oligonucleotide
uuuauucuccuucuaaucc

SEQ ID NO: 2600288 - RNA, 19 nt, Artificial Sequence
  Description of Artificial Sequence: Synthetic oligonucleotide
uauaaaucauuuauucucc

SEQ ID NO: 2600289 - RNA, 19 nt, Artificial Sequence
  Description of Artificial Sequence: Synthetic oligonucleotide
auagaaggcccucaggucc

SEQ ID NO: 2600290 - RNA, 19 nt, Artificial Sequence
  Description of Artificial Sequence: Synthetic oligonucleotide
auuuucucuagguuguugc

SEQ ID NO: 2600291 - RNA, 19 nt, Artificial Sequence
  Description of Artificial Sequence: Synthetic oligonucleotide
aaggcuucuacuuuggucu

SEQ ID NO: 2600292 - RNA, 19 nt, Artificial Sequence
  Description of Artificial Sequence: Synthetic oligonucleotide
gauaugauaaagcucagca

SEQ ID NO: 2600293 - RNA, 19 nt, Artificial Sequence
  Description of Artificial Sequence: Synthetic oligonucleotide
auugaggaaauccuccugc

SEQ ID NO: 2600294 - RNA, 19 nt, Artificial Sequence
  Description of Artificial Sequence: Synthetic oligonucleotide
gaaaugguugucuggaagg

SEQ ID NO: 2600295 - RNA, 19 nt, Artificial Sequence
  Description of Artificial Sequence: Synthetic oligonucleotide
uaauccuuagcucaguaca

SEQ ID NO: 2600296 - RNA, 19 nt, Artificial Sequence
  Description of Artificial Sequence: Synthetic oligonucleotide
ugcaaaagcugacucaggg

SEQ ID NO: 2600297 - RNA, 19 nt, Artificial Sequence
  Description of Artificial Sequence: Synthetic oligonucleotide
agcaaacagggccagaagc

SEQ ID NO: 2600298 - RNA, 19 nt, Artificial Sequence
  Description of Artificial Sequence: Synthetic oligonucleotide
gaaaaccacacuuagggac

SEQ ID NO: 2600299 - RNA, 19 nt, Artificial Sequence
  Description of Artificial Sequence: Synthetic oligonucleotide
caugugauuaccagaaugc

SEQ ID NO: 2600300 - RNA, 19 nt, Artificial Sequence
  Description of Artificial Sequence: Synthetic oligonucleotide
auuuauucuccuucuaauc

SEQ ID NO: 2600301 - RNA, 19 nt, Artificial Sequence
  Description of Artificial Sequence: Synthetic oligonucleotide
uuuggguugacaauuuucu

SEQ ID NO: 2600302 - RNA, 19 nt, Artificial Sequence
  Description of Artificial Sequence: Synthetic oligonucleotide
ucuagguuguugcugauga

SEQ ID NO: 2600303 - RNA, 19 nt, Artificial Sequence
  Description of Artificial Sequence: Synthetic oligonucleotide
gcgauaauccauuacaugg

SEQ ID NO: 2600304 - RNA, 19 nt, Artificial Sequence
  Description of Artificial Sequence: Synthetic oligonucleotide
uaauccauuacaugggucu

SEQ ID NO: 2600305 - RNA, 19 nt, Artificial Sequence
  Description of Artificial Sequence: Synthetic oligonucleotide
aguauaaaucauuuauucu

SEQ ID NO: 2600306 - RNA, 19 nt, Artificial Sequence
  Description of Artificial Sequence: Synthetic oligonucleotide
cuggaaaagauuuugccug

SEQ ID NO: 2600307 - RNA, 19 nt, Artificial Sequence
  Description of Artificial Sequence: Synthetic oligonucleotide
aaucauuuauucuccuucu

SEQ ID NO: 2600308 - RNA, 19 nt, Artificial Sequence
  Description of Artificial Sequence: Synthetic oligonucleotide
aaaugguugucuggaaggc

SEQ ID NO: 2600309 - RNA, 19 nt, Artificial Sequence
  Description of Artificial Sequence: Synthetic oligonucleotide
auuaccagaaugcauuucu

SEQ ID NO: 2600310 - RNA, 19 nt, Artificial Sequence
  Description of Artificial Sequence: Synthetic oligonucleotide
auuacaugggucuccuugg

SEQ ID NO: 2600311 - RNA, 19 nt, Artificial Sequence
  Description of Artificial Sequence: Synthetic oligonucleotide
ucagggauaugauuuuccg

SEQ ID NO: 2600312 - RNA, 19 nt, Artificial Sequence
  Description of Artificial Sequence: Synthetic oligonucleotide
agacuucuggcuuaacuac

SEQ ID NO: 2600313 - RNA, 19 nt, Artificial Sequence
  Description of Artificial Sequence: Synthetic oligonucleotide
auucacucucuccagcacc

SEQ ID NO: 2600314 - RNA, 19 nt, Artificial Sequence
  Description of Artificial Sequence: Synthetic oligonucleotide
ugaauugccaccccaaaau

SEQ ID NO: 2600315 - RNA, 19 nt, Artificial Sequence
  Description of Artificial Sequence: Synthetic oligonucleotide
uuccguggcaagaaugugg

SEQ ID NO: 2600316 - RNA, 19 nt, Artificial Sequence
  Description of Artificial Sequence: Synthetic oligonucleotide
aagauuuugccugaagaca

SEQ ID NO: 2600317 - RNA, 19 nt, Artificial Sequence
  Description of Artificial Sequence: Synthetic oligonucleotide
acacuuagggacuucuuuc

SEQ ID NO: 2600318 - RNA, 19 nt, Artificial Sequence
  Description of Artificial Sequence: Synthetic oligonucleotide
acagcauucacucucucca

SEQ ID NO: 2600319 - RNA, 19 nt, Artificial Sequence
  Description of Artificial Sequence: Synthetic oligonucleotide
uugacaauuuucucuaggu

SEQ ID NO: 2600320 - RNA, 19 nt, Artificial Sequence
  Description of Artificial Sequence: Synthetic oligonucleotide
acaugggucuccuuggagg

SEQ ID NO: 2600321 - RNA, 19 nt, Artificial Sequence
  Description of Artificial Sequence: Synthetic oligonucleotide
aaaaucauucccauccuca

SEQ ID NO: 2600322 - RNA, 19 nt, Artificial Sequence
  Description of Artificial Sequence: Synthetic oligonucleotide
ucauuuauucuccuucuaa

SEQ ID NO: 2600323 - RNA, 19 nt, Artificial Sequence
  Description of Artificial Sequence: Synthetic oligonucleotide
gagaaguacuuggaaaugg

SEQ ID NO: 2600324 - RNA, 19 nt, Artificial Sequence
  Description of Artificial Sequence: Synthetic oligonucleotide
caucucaucgccuugggug

SEQ ID NO: 2600325 - RNA, 19 nt, Artificial Sequence
  Description of Artificial Sequence: Synthetic oligonucleotide
uggguugacaauuuucucu

SEQ ID NO: 2600326 - RNA, 19 nt, Artificial Sequence
  Description of Artificial Sequence: Synthetic oligonucleotide
ugaugauaugauaaagcuc

SEQ ID NO: 2600327 - RNA, 19 nt, Artificial Sequence
  Description of Artificial Sequence: Synthetic oligonucleotide
uuuuccguggcaagaaugu

SEQ ID NO: 2600328 - RNA, 19 nt, Artificial Sequence
  Description of Artificial Sequence: Synthetic oligonucleotide
auuuugccugaagacaucc

SEQ ID NO: 2600329 - RNA, 19 nt, Artificial Sequence
  Description of Artificial Sequence: Synthetic oligonucleotide
guugacaauuuucucuagg

SEQ ID NO: 2600330 - RNA, 19 nt, Artificial Sequence
  Description of Artificial Sequence: Synthetic oligonucleotide
uccuggaaaagauuuugcc

SEQ ID NO: 2600331 - RNA, 19 nt, Artificial Sequence
  Description of Artificial Sequence: Synthetic oligonucleotide
uucuggcuuaacuacagca

SEQ ID NO: 2600332 - RNA, 19 nt, Artificial Sequence
  Description of Artificial Sequence: Synthetic oligonucleotide
cacauugaggaaauccucc

SEQ ID NO: 2600333 - RNA, 19 nt, Artificial Sequence
  Description of Artificial Sequence: Synthetic oligonucleotide
ggagagaucggccacauug

SEQ ID NO: 2600334 - RNA, 19 nt, Artificial Sequence
  Description of Artificial Sequence: Synthetic oligonucleotide
ugacucagggauaugauuu

SEQ ID NO: 2600335 - RNA, 19 nt, Artificial Sequence
  Description of Artificial Sequence: Synthetic oligonucleotide
uaugauuuuccguggcaag

SEQ ID NO: 2600336 - RNA, 19 nt, Artificial Sequence
  Description of Artificial Sequence: Synthetic oligonucleotide
uucuacuuuggucuugaca

SEQ ID NO: 2600337 - RNA, 19 nt, Artificial Sequence
  Description of Artificial Sequence: Synthetic oligonucleotide
uuauucuccuucuaauccu

SEQ ID NO: 2600338 - RNA, 19 nt, Artificial Sequence
  Description of Artificial Sequence: Synthetic oligonucleotide
uggagaggaagucaucagc

SEQ ID NO: 2600339 - RNA, 19 nt, Artificial Sequence
  Description of Artificial Sequence: Synthetic oligonucleotide
cauuacaugggucuccuug

SEQ ID NO: 2600340 - RNA, 19 nt, Artificial Sequence
  Description of Artificial Sequence: Synthetic oligonucleotide
ucgcucaugcaccaaggcg

SEQ ID NO: 2600341 - RNA, 19 nt, Artificial Sequence
  Description of Artificial Sequence: Synthetic oligonucleotide
gaaaagauuuugccugaag

SEQ ID NO: 2600342 - RNA, 19 nt, Artificial Sequence
  Description of Artificial Sequence: Synthetic oligonucleotide
uccuuagcucaguacauag

SEQ ID NO: 2600343 - RNA, 19 nt, Artificial Sequence
  Description of Artificial Sequence: Synthetic oligonucleotide
cccaaaaucauucccaucc

SEQ ID NO: 2600344 - RNA, 19 nt, Artificial Sequence
  Description of Artificial Sequence: Synthetic oligonucleotide
gauggggauguccagagga

SEQ ID NO: 2600345 - RNA, 19 nt, Artificial Sequence
  Description of Artificial Sequence: Synthetic oligonucleotide
agcauucacucucuccagc

SEQ ID NO: 2600346 - RNA, 19 nt, Artificial Sequence
  Description of Artificial Sequence: Synthetic oligonucleotide
ugugauuaccagaaugcau

SEQ ID NO: 2600347 - RNA, 19 nt, Artificial Sequence
  Description of Artificial Sequence: Synthetic oligonucleotide
aucucaucgccuugggugg

SEQ ID NO: 2600348 - RNA, 19 nt, Artificial Sequence
  Description of Artificial Sequence: Synthetic oligonucleotide
gaagcuucucauucccagg

SEQ ID NO: 2600349 - RNA, 19 nt, Artificial Sequence
  Description of Artificial Sequence: Synthetic oligonucleotide
auagauggcuucucuucac

SEQ ID NO: 2600350 - RNA, 19 nt, Artificial Sequence
  Description of Artificial Sequence: Synthetic oligonucleotide
cugagcuccccauaggcgg

SEQ ID NO: 2600351 - RNA, 19 nt, Artificial Sequence
  Description of Artificial Sequence: Synthetic oligonucleotide
uuagggacuucuuucuucu

SEQ ID NO: 2600352 - RNA, 19 nt, Artificial Sequence
  Description of Artificial Sequence: Synthetic oligonucleotide
aaaucauucccauccucaa

SEQ ID NO: 2600353 - RNA, 19 nt, Artificial Sequence
  Description of Artificial Sequence: Synthetic oligonucleotide
ucuccuucuaauccuuagc

SEQ ID NO: 2600354 - RNA, 19 nt, Artificial Sequence
  Description of Artificial Sequence: Synthetic oligonucleotide
uuagcucaguacauagaug

SEQ ID NO: 2600355 - RNA, 19 nt, Artificial Sequence
  Description of Artificial Sequence: Synthetic oligonucleotide
auaaagcucagcauagaag

SEQ ID NO: 2600356 - RNA, 19 nt, Artificial Sequence
  Description of Artificial Sequence: Synthetic oligonucleotide
gauaaagcucagcauagaa

SEQ ID NO: 2600357 - RNA, 19 nt, Artificial Sequence
  Description of Artificial Sequence: Synthetic oligonucleotide
uguggagaggaagucauca

SEQ ID NO: 2600358 - RNA, 19 nt, Artificial Sequence
  Description of Artificial Sequence: Synthetic oligonucleotide
aauccauuacaugggucuc

SEQ ID NO: 2600359 - RNA, 19 nt, Artificial Sequence
  Description of Artificial Sequence: Synthetic oligonucleotide
ugcugaugauaugauaaag

SEQ ID NO: 2600360 - RNA, 19 nt, Artificial Sequence
  Description of Artificial Sequence: Synthetic oligonucleotide
aaaaccacacuuagggacu

SEQ ID NO: 2600361 - RNA, 19 nt, Artificial Sequence
  Description of Artificial Sequence: Synthetic oligonucleotide
auaugauaaagcucagcau

SEQ ID NO: 2600362 - RNA, 19 nt, Artificial Sequence
  Description of Artificial Sequence: Synthetic oligonucleotide
cuuuggguugacaauuuuc

SEQ ID NO: 2600363 - RNA, 19 nt, Artificial Sequence
  Description of Artificial Sequence: Synthetic oligonucleotide
uucucuuugagaguccaga

SEQ ID NO: 2600364 - RNA, 19 nt, Artificial Sequence
  Description of Artificial Sequence: Synthetic oligonucleotide
uccguggcaagaaugugga

SEQ ID NO: 2600365 - RNA, 19 nt, Artificial Sequence
  Description of Artificial Sequence: Synthetic oligonucleotide
guugcugaugauaugauaa

SEQ ID NO: 2600366 - RNA, 19 nt, Artificial Sequence
  Description of Artificial Sequence: Synthetic oligonucleotide
cucagggauaugauuuucc

SEQ ID NO: 2600367 - RNA, 19 nt, Artificial Sequence
  Description of Artificial Sequence: Synthetic oligonucleotide
gacagcauucacucucucc

SEQ ID NO: 2600368 - RNA, 19 nt, Artificial Sequence
  Description of Artificial Sequence: Synthetic oligonucleotide
augauaaagcucagcauag

SEQ ID NO: 2600369 - RNA, 19 nt, Artificial Sequence
  Description of Artificial Sequence: Synthetic oligonucleotide
uuuggucuugacagcauuc

SEQ ID NO: 2600370 - RNA, 19 nt, Artificial Sequence
  Description of Artificial Sequence: Synthetic oligonucleotide
gauaugauuuuccguggca

SEQ ID NO: 2600371 - RNA, 19 nt, Artificial Sequence
  Description of Artificial Sequence: Synthetic oligonucleotide
aaagcugacucagggauau

SEQ ID NO: 2600372 - RNA, 19 nt, Artificial Sequence
  Description of Artificial Sequence: Synthetic oligonucleotide
cuaauccuuagcucaguac

SEQ ID NO: 2600373 - RNA, 19 nt, Artificial Sequence
  Description of Artificial Sequence: Synthetic oligonucleotide
cuucuaauccuuagcucag

SEQ ID NO: 2600374 - RNA, 19 nt, Artificial Sequence
  Description of Artificial Sequence: Synthetic oligonucleotide
ucacccuuuggguugacaa

SEQ ID NO: 2600375 - RNA, 19 nt, Artificial Sequence
  Description of Artificial Sequence: Synthetic oligonucleotide
ugauaugauaaagcucagc

SEQ ID NO: 2600376 - RNA, 19 nt, Artificial Sequence
  Description of Artificial Sequence: Synthetic oligonucleotide
uggaaaagauuuugccuga

SEQ ID NO: 2600377 - RNA, 19 nt, Artificial Sequence
  Description of Artificial Sequence: Synthetic oligonucleotide
uagauggcuucucuucacc

SEQ ID NO: 2600378 - RNA, 19 nt, Artificial Sequence
  Description of Artificial Sequence: Synthetic oligonucleotide
gauccaugugauuaccaga

SEQ ID NO: 2600379 - RNA, 19 nt, Artificial Sequence
  Description of Artificial Sequence: Synthetic oligonucleotide
uugucuggaaggcuucuac

SEQ ID NO: 2600380 - RNA, 19 nt, Artificial Sequence
  Description of Artificial Sequence: Synthetic oligonucleotide
caccaaggcgcgauaaucc

SEQ ID NO: 2600381 - RNA, 19 nt, Artificial Sequence
  Description of Artificial Sequence: Synthetic oligonucleotide
ugacaauuuucucuagguu

SEQ ID NO: 2600382 - RNA, 19 nt, Artificial Sequence
  Description of Artificial Sequence: Synthetic oligonucleotide
aaucauucccauccucaau

SEQ ID NO: 2600383 - RNA, 19 nt, Artificial Sequence
  Description of Artificial Sequence: Synthetic oligonucleotide
ucucuuugagaguccagac

SEQ ID NO: 2600384 - RNA, 19 nt, Artificial Sequence
  Description of Artificial Sequence: Synthetic oligonucleotide
aaacagggccagaagcuuc

SEQ ID NO: 2600385 - RNA, 19 nt, Artificial Sequence
  Description of Artificial Sequence: Synthetic oligonucleotide
cuuagggacuucuuucuuc

SEQ ID NO: 2600386 - RNA, 19 nt, Artificial Sequence
  Description of Artificial Sequence: Synthetic oligonucleotide
acauugaggaaauccuccu

SEQ ID NO: 2600387 - RNA, 19 nt, Artificial Sequence
  Description of Artificial Sequence: Synthetic oligonucleotide
caugggucuccuuggaggc

SEQ ID NO: 2600388 - RNA, 19 nt, Artificial Sequence
  Description of Artificial Sequence: Synthetic oligonucleotide
ggaaaugguugucuggaag

SEQ ID NO: 2600389 - RNA, 19 nt, Artificial Sequence
  Description of Artificial Sequence: Synthetic oligonucleotide
cugaugauaugauaaagcu

SEQ ID NO: 2600390 - RNA, 19 nt, Artificial Sequence
  Description of Artificial Sequence: Synthetic oligonucleotide
agcauagaaggcccucagg

SEQ ID NO: 2600391 - RNA, 19 nt, Artificial Sequence
  Description of Artificial Sequence: Synthetic oligonucleotide
uggcuuaacuacagcaaac

SEQ ID NO: 2600392 - RNA, 19 nt, Artificial Sequence
  Description of Artificial Sequence: Synthetic oligonucleotide
cagaaugcauuucucuuug

SEQ ID NO: 2600393 - RNA, 19 nt, Artificial Sequence
  Description of Artificial Sequence: Synthetic oligonucleotide
aguacauagauggcuucuc

SEQ ID NO: 2600394 - RNA, 19 nt, Artificial Sequence
  Description of Artificial Sequence: Synthetic oligonucleotide
uacaugggucuccuuggag

SEQ ID NO: 2600395 - RNA, 19 nt, Artificial Sequence
  Description of Artificial Sequence: Synthetic oligonucleotide
gaauugccaccccaaaauc

SEQ ID NO: 2600396 - RNA, 19 nt, Artificial Sequence
  Description of Artificial Sequence: Synthetic oligonucleotide
ucuaauccuuagcucagua

SEQ ID NO: 2600397 - RNA, 19 nt, Artificial Sequence
  Description of Artificial Sequence: Synthetic oligonucleotide
uccugcaaaagcugacuca

SEQ ID NO: 2600398 - RNA, 19 nt, Artificial Sequence
  Description of Artificial Sequence: Synthetic oligonucleotide
auucccauccucaaucuug

SEQ ID NO: 2600399 - RNA, 19 nt, Artificial Sequence
  Description of Artificial Sequence: Synthetic oligonucleotide
uacuuuggucuugacagca

SEQ ID NO: 2600400 - RNA, 19 nt, Artificial Sequence
  Description of Artificial Sequence: Synthetic oligonucleotide
gggagaaaaccacacuuag

SEQ ID NO: 2600401 - RNA, 19 nt, Artificial Sequence
  Description of Artificial Sequence: Synthetic oligonucleotide
auaauccauuacauggguc

SEQ ID NO: 2600402 - RNA, 19 nt, Artificial Sequence
  Description of Artificial Sequence: Synthetic oligonucleotide
cuccuggaaaagauuuugc

SEQ ID NO: 2600403 - RNA, 19 nt, Artificial Sequence
  Description of Artificial Sequence: Synthetic oligonucleotide
uuucucuuugagaguccag

SEQ ID NO: 2600404 - RNA, 19 nt, Artificial Sequence
  Description of Artificial Sequence: Synthetic oligonucleotide
cauaaaguauaaaucauuu

SEQ ID NO: 2600405 - RNA, 19 nt, Artificial Sequence
  Description of Artificial Sequence: Synthetic oligonucleotide
uugacagcauucacucucu

SEQ ID NO: 2600406 - RNA, 19 nt, Artificial Sequence
  Description of Artificial Sequence: Synthetic oligonucleotide
agagaucggccacauugag

SEQ ID NO: 2600407 - RNA, 19 nt, Artificial Sequence
  Description of Artificial Sequence: Synthetic oligonucleotide
gcugaugauaugauaaagc

SEQ ID NO: 2600408 - RNA, 19 nt, Artificial Sequence
  Description of Artificial Sequence: Synthetic oligonucleotide
uuaccagaaugcauuucuc

SEQ ID NO: 2600409 - RNA, 19 nt, Artificial Sequence
  Description of Artificial Sequence: Synthetic oligonucleotide
ugccaccccaaaaucauuc

SEQ ID NO: 2600410 - RNA, 19 nt, Artificial Sequence
  Description of Artificial Sequence: Synthetic oligonucleotide
gauaauccauuacaugggu

SEQ ID NO: 2600411 - RNA, 19 nt, Artificial Sequence
  Description of Artificial Sequence: Synthetic oligonucleotide
uugucuguuuccaucucau

SEQ ID NO: 2600412 - RNA, 19 nt, Artificial Sequence
  Description of Artificial Sequence: Synthetic oligonucleotide
acuacagcaaacagggcca

SEQ ID NO: 2600413 - RNA, 19 nt, Artificial Sequence
  Description of Artificial Sequence: Synthetic oligonucleotide
aucucgcucaugcaccaag

SEQ ID NO: 2600414 - RNA, 19 nt, Artificial Sequence
  Description of Artificial Sequence: Synthetic oligonucleotide
uccaucucaucgccuuggg

SEQ ID NO: 2600415 - RNA, 19 nt, Artificial Sequence
  Description of Artificial Sequence: Synthetic oligonucleotide
uuuugccugaagacaucca

SEQ ID NO: 2600416 - RNA, 19 nt, Artificial Sequence
  Description of Artificial Sequence: Synthetic oligonucleotide
gagaucggccacauugagg

SEQ ID NO: 2600417 - RNA, 19 nt, Artificial Sequence
  Description of Artificial Sequence: Synthetic oligonucleotide
uuccaucucaucgccuugg

SEQ ID NO: 2600418 - RNA, 19 nt, Artificial Sequence
  Description of Artificial Sequence: Synthetic oligonucleotide
caaucuuggggaucaggug

SEQ ID NO: 2600419 - RNA, 19 nt, Artificial Sequence
  Description of Artificial Sequence: Synthetic oligonucleotide
auuuuccguggcaagaaug

SEQ ID NO: 2600420 - RNA, 19 nt, Artificial Sequence
  Description of Artificial Sequence: Synthetic oligonucleotide
cauagaaggcccucagguc

SEQ ID NO: 2600421 - RNA, 19 nt, Artificial Sequence
  Description of Artificial Sequence: Synthetic oligonucleotide
ugucuggaaggcuucuacu

SEQ ID NO: 2600422 - RNA, 19 nt, Artificial Sequence
  Description of Artificial Sequence: Synthetic oligonucleotide
cucuucacccuuuggguug

SEQ ID NO: 2600423 - RNA, 19 nt, Artificial Sequence
  Description of Artificial Sequence: Synthetic oligonucleotide
uccuucuaauccuuagcuc

SEQ ID NO: 2600424 - RNA, 19 nt, Artificial Sequence
  Description of Artificial Sequence: Synthetic oligonucleotide
uuggucuugacagcauuca

SEQ ID NO: 2600425 - RNA, 19 nt, Artificial Sequence
  Description of Artificial Sequence: Synthetic oligonucleotide
uugcugaugauaugauaaa

SEQ ID NO: 2600426 - RNA, 19 nt, Artificial Sequence
  Description of Artificial Sequence: Synthetic oligonucleotide
ugaggaaauccuccugcaa

SEQ ID NO: 2600427 - RNA, 19 nt, Artificial Sequence
  Description of Artificial Sequence: Synthetic oligonucleotide
uuacaugggucuccuugga

SEQ ID NO: 2600428 - RNA, 19 nt, Artificial Sequence
  Description of Artificial Sequence: Synthetic oligonucleotide
cauaggcggcuucaucucg

SEQ ID NO: 2600429 - RNA, 19 nt, Artificial Sequence
  Description of Artificial Sequence: Synthetic oligonucleotide
uguugcugaugauaugaua

SEQ ID NO: 2600430 - RNA, 19 nt, Artificial Sequence
  Description of Artificial Sequence: Synthetic oligonucleotide
gggauaugauuuuccgugg

SEQ ID NO: 2600431 - RNA, 19 nt, Artificial Sequence
  Description of Artificial Sequence: Synthetic oligonucleotide
uacuuggaaaugguugucu

SEQ ID NO: 2600432 - RNA, 19 nt, Artificial Sequence
  Description of Artificial Sequence: Synthetic oligonucleotide
ggagaggaagucaucagcc

SEQ ID NO: 2600433 - RNA, 19 nt, Artificial Sequence
  Description of Artificial Sequence: Synthetic oligonucleotide
auaugauuuuccguggcaa

SEQ ID NO: 2600434 - RNA, 19 nt, Artificial Sequence
  Description of Artificial Sequence: Synthetic oligonucleotide
gcuuaacuacagcaaacag

SEQ ID NO: 2600435 - RNA, 19 nt, Artificial Sequence
  Description of Artificial Sequence: Synthetic oligonucleotide
uauucuccuucuaauccuu

SEQ ID NO: 2600436 - RNA, 19 nt, Artificial Sequence
  Description of Artificial Sequence: Synthetic oligonucleotide
uugagaguccagacuucug

SEQ ID NO: 2600437 - RNA, 19 nt, Artificial Sequence
  Description of Artificial Sequence: Synthetic oligonucleotide
uacauagauggcuucucuu

SEQ ID NO: 2600438 - RNA, 19 nt, Artificial Sequence
  Description of Artificial Sequence: Synthetic oligonucleotide
cauugaggaaauccuccug

SEQ ID NO: 2600439 - RNA, 19 nt, Artificial Sequence
  Description of Artificial Sequence: Synthetic oligonucleotide
uucucauucccagggagaa

SEQ ID NO: 2600440 - RNA, 19 nt, Artificial Sequence
  Description of Artificial Sequence: Synthetic oligonucleotide
ucaguacauagauggcuuc

SEQ ID NO: 2600441 - RNA, 19 nt, Artificial Sequence
  Description of Artificial Sequence: Synthetic oligonucleotide
ugauuuuccguggcaagaa

SEQ ID NO: 2600442 - RNA, 19 nt, Artificial Sequence
  Description of Artificial Sequence: Synthetic oligonucleotide
aauccuuagcucaguacau

SEQ ID NO: 2600443 - RNA, 19 nt, Artificial Sequence
  Description of Artificial Sequence: Synthetic oligonucleotide
uagguuguugcugaugaua

SEQ ID NO: 2600444 - RNA, 19 nt, Artificial Sequence
  Description of Artificial Sequence: Synthetic oligonucleotide
cauuucucuuugagagucc

SEQ ID NO: 2600445 - RNA, 19 nt, Artificial Sequence
  Description of Artificial Sequence: Synthetic oligonucleotide
uccugaauugccaccccaa

SEQ ID NO: 2600446 - RNA, 19 nt, Artificial Sequence
  Description of Artificial Sequence: Synthetic oligonucleotide
ugauuaccagaaugcauuu

SEQ ID NO: 2600447 - RNA, 19 nt, Artificial Sequence
  Description of Artificial Sequence: Synthetic oligonucleotide
agggaggagagaucggcca

SEQ ID NO: 2600448 - RNA, 19 nt, Artificial Sequence
  Description of Artificial Sequence: Synthetic oligonucleotide
ggcgcgauaauccauuaca

SEQ ID NO: 2600449 - RNA, 19 nt, Artificial Sequence
  Description of Artificial Sequence: Synthetic oligonucleotide
ccuucuaauccuuagcuca

SEQ ID NO: 2600450 - RNA, 19 nt, Artificial Sequence
  Description of Artificial Sequence: Synthetic oligonucleotide
ugauaaagcucagcauaga

SEQ ID NO: 2600451 - RNA, 19 nt, Artificial Sequence
  Description of Artificial Sequence: Synthetic oligonucleotide
uuggguugacaauuuucuc

SEQ ID NO: 2600452 - RNA, 19 nt, Artificial Sequence
  Description of Artificial Sequence: Synthetic oligonucleotide
ucagcauagaaggcccuca

SEQ ID NO: 2600453 - RNA, 19 nt, Artificial Sequence
  Description of Artificial Sequence: Synthetic oligonucleotide
aggucccgcaccauggccc

SEQ ID NO: 2600454 - RNA, 19 nt, Artificial Sequence
  Description of Artificial Sequence: Synthetic oligonucleotide
cauagauggcuucucuuca

SEQ ID NO: 2600455 - RNA, 19 nt, Artificial Sequence
  Description of Artificial Sequence: Synthetic oligonucleotide
augauuuuccguggcaaga

SEQ ID NO: 2600456 - RNA, 19 nt, Artificial Sequence
  Description of Artificial Sequence: Synthetic oligonucleotide
acuucuggcuuaacuacag

SEQ ID NO: 2600457 - RNA, 19 nt, Artificial Sequence
  Description of Artificial Sequence: Synthetic oligonucleotide
auccaugugauuaccagaa

SEQ ID NO: 2600458 - RNA, 19 nt, Artificial Sequence
  Description of Artificial Sequence: Synthetic oligonucleotide
agaaguacuuggaaauggu

SEQ ID NO: 2600459 - RNA, 19 nt, Artificial Sequence
  Description of Artificial Sequence: Synthetic oligonucleotide
auaggcggcuucaucucgc

SEQ ID NO: 2600460 - RNA, 19 nt, Artificial Sequence
  Description of Artificial Sequence: Synthetic oligonucleotide
ucaucucgcucaugcacca

SEQ ID NO: 2600461 - RNA, 19 nt, Artificial Sequence
  Description of Artificial Sequence: Synthetic oligonucleotide
uguuuccaucucaucgccu

SEQ ID NO: 2600462 - RNA, 19 nt, Artificial Sequence
  Description of Artificial Sequence: Synthetic oligonucleotide
ccaugugauuaccagaaug

SEQ ID NO: 2600463 - RNA, 19 nt, Artificial Sequence
  Description of Artificial Sequence: Synthetic oligonucleotide
cgauaauccauuacauggg

SEQ ID NO: 2600464 - RNA, 19 nt, Artificial Sequence
  Description of Artificial Sequence: Synthetic oligonucleotide
agcucaguacauagauggc

SEQ ID NO: 2600465 - RNA, 19 nt, Artificial Sequence
  Description of Artificial Sequence: Synthetic oligonucleotide
ggagaaaaccacacuuagg

SEQ ID NO: 2600466 - RNA, 19 nt, Artificial Sequence
  Description of Artificial Sequence: Synthetic oligonucleotide
aggcgcgauaauccauuac

SEQ ID NO: 2600467 - RNA, 19 nt, Artificial Sequence
  Description of Artificial Sequence: Synthetic oligonucleotide
accaaggcgcgauaaucca

SEQ ID NO: 2600468 - RNA, 19 nt, Artificial Sequence
  Description of Artificial Sequence: Synthetic oligonucleotide
augugauuaccagaaugca

SEQ ID NO: 2600469 - RNA, 19 nt, Artificial Sequence
  Description of Artificial Sequence: Synthetic oligonucleotide
acucagggauaugauuuuc

SEQ ID NO: 2600470 - RNA, 19 nt, Artificial Sequence
  Description of Artificial Sequence: Synthetic oligonucleotide
ugagcuccccauaggcggc

SEQ ID NO: 2600471 - RNA, 19 nt, Artificial Sequence
  Description of Artificial Sequence: Synthetic oligonucleotide
cuuagcucaguacauagau

SEQ ID NO: 2600472 - RNA, 19 nt, Artificial Sequence
  Description of Artificial Sequence: Synthetic oligonucleotide
cagacuucuggcuuaacua

SEQ ID NO: 2600473 - RNA, 19 nt, Artificial Sequence
  Description of Artificial Sequence: Synthetic oligonucleotide
agcugacucagggauauga

SEQ ID NO: 2600474 - RNA, 19 nt, Artificial Sequence
  Description of Artificial Sequence: Synthetic oligonucleotide
ggauaugauuuuccguggc

SEQ ID NO: 2600475 - RNA, 19 nt, Artificial Sequence
  Description of Artificial Sequence: Synthetic oligonucleotide
uccauuacaugggucuccu

SEQ ID NO: 2600476 - RNA, 19 nt, Artificial Sequence
  Description of Artificial Sequence: Synthetic oligonucleotide
caccccaaaaucauuccca

SEQ ID NO: 2600477 - RNA, 19 nt, Artificial Sequence
  Description of Artificial Sequence: Synthetic oligonucleotide
cuuugagaguccagacuuc

SEQ ID NO: 2600478 - RNA, 19 nt, Artificial Sequence
  Description of Artificial Sequence: Synthetic oligonucleotide
uccuccugcaaaagcugac

SEQ ID NO: 2600479 - RNA, 19 nt, Artificial Sequence
  Description of Artificial Sequence: Synthetic oligonucleotide
ucaggucccgcaccauggc

SEQ ID NO: 2600480 - RNA, 19 nt, Artificial Sequence
  Description of Artificial Sequence: Synthetic oligonucleotide
cuucuggcuuaacuacagc

SEQ ID NO: 2600481 - RNA, 19 nt, Artificial Sequence
  Description of Artificial Sequence: Synthetic oligonucleotide
cuugucuguuuccaucuca

SEQ ID NO: 2600482 - RNA, 19 nt, Artificial Sequence
  Description of Artificial Sequence: Synthetic oligonucleotide
uuuccguggcaagaaugug

SEQ ID NO: 2600483 - RNA, 19 nt, Artificial Sequence
  Description of Artificial Sequence: Synthetic oligonucleotide
auugccaccccaaaaucau

SEQ ID NO: 2600484 - RNA, 19 nt, Artificial Sequence
  Description of Artificial Sequence: Synthetic oligonucleotide
aucauuuauucuccuucua

SEQ ID NO: 2600485 - RNA, 19 nt, Artificial Sequence
  Description of Artificial Sequence: Synthetic oligonucleotide
gauuaccagaaugcauuuc

SEQ ID NO: 2600486 - RNA, 19 nt, Artificial Sequence
  Description of Artificial Sequence: Synthetic oligonucleotide
cgcucaugcaccaaggcgc

SEQ ID NO: 2600487 - RNA, 19 nt, Artificial Sequence
  Description of Artificial Sequence: Synthetic oligonucleotide
uggaaaugguugucuggaa

SEQ ID NO: 2600488 - RNA, 19 nt, Artificial Sequence
  Description of Artificial Sequence: Synthetic oligonucleotide
accccaaaaucauucccau

SEQ ID NO: 2600489 - RNA, 19 nt, Artificial Sequence
  Description of Artificial Sequence: Synthetic oligonucleotide
cuucucauucccagggaga

SEQ ID NO: 2600490 - RNA, 19 nt, Artificial Sequence
  Description of Artificial Sequence: Synthetic oligonucleotide
cuccugcaaaagcugacuc

SEQ ID NO: 2600491 - RNA, 19 nt, Artificial Sequence
  Description of Artificial Sequence: Synthetic oligonucleotide
ggcaagaauguggagagga

SEQ ID NO: 2600492 - RNA, 19 nt, Artificial Sequence
  Description of Artificial Sequence: Synthetic oligonucleotide
aaggcccucaggucccgca

SEQ ID NO: 2600493 - RNA, 19 nt, Artificial Sequence
  Description of Artificial Sequence: Synthetic oligonucleotide
uccugcuugucuguuucca

SEQ ID NO: 2600494 - RNA, 19 nt, Artificial Sequence
  Description of Artificial Sequence: Synthetic oligonucleotide
gagagaucggccacauuga

SEQ ID NO: 2600495 - RNA, 19 nt, Artificial Sequence
  Description of Artificial Sequence: Synthetic oligonucleotide
cucauucccagggagaaaa

SEQ ID NO: 2600496 - RNA, 19 nt, Artificial Sequence
  Description of Artificial Sequence: Synthetic oligonucleotide
ugucuguuuccaucucauc

SEQ ID NO: 2600497 - RNA, 19 nt, Artificial Sequence
  Description of Artificial Sequence: Synthetic oligonucleotide
gcauuucucuuugagaguc

SEQ ID NO: 2600498 - RNA, 19 nt, Artificial Sequence
  Description of Artificial Sequence: Synthetic oligonucleotide
cagcauucacucucuccag

SEQ ID NO: 2600499 - RNA, 19 nt, Artificial Sequence
  Description of Artificial Sequence: Synthetic oligonucleotide
cuuggggaucaggugcugg

SEQ ID NO: 2600500 - RNA, 19 nt, Artificial Sequence
  Description of Artificial Sequence: Synthetic oligonucleotide
auccccacgcucugagaag

SEQ ID NO: 2600501 - RNA, 19 nt, Artificial Sequence
  Description of Artificial Sequence: Synthetic oligonucleotide
aaaagcugacucagggaua

SEQ ID NO: 2600502 - RNA, 19 nt, Artificial Sequence
  Description of Artificial Sequence: Synthetic oligonucleotide
gugauuaccagaaugcauu

SEQ ID NO: 2600503 - RNA, 19 nt, Artificial Sequence
  Description of Artificial Sequence: Synthetic oligonucleotide
gagggaggagagaucggcc

SEQ ID NO: 2600504 - RNA, 19 nt, Artificial Sequence
  Description of Artificial Sequence: Synthetic oligonucleotide
gauggcuucucuucacccu

SEQ ID NO: 2600505 - RNA, 19 nt, Artificial Sequence
  Description of Artificial Sequence: Synthetic oligonucleotide
uccaugugauuaccagaau

SEQ ID NO: 2600506 - RNA, 19 nt, Artificial Sequence
  Description of Artificial Sequence: Synthetic oligonucleotide
cuggauccaugugauuacc

SEQ ID NO: 2600507 - RNA, 19 nt, Artificial Sequence
  Description of Artificial Sequence: Synthetic oligonucleotide
augauaugauaaagcucag

SEQ ID NO: 2600508 - RNA, 19 nt, Artificial Sequence
  Description of Artificial Sequence: Synthetic oligonucleotide
ccagaagcuucucauuccc

SEQ ID NO: 2600509 - RNA, 19 nt, Artificial Sequence
  Description of Artificial Sequence: Synthetic oligonucleotide
uucuaauccuuagcucagu

SEQ ID NO: 2600510 - RNA, 19 nt, Artificial Sequence
  Description of Artificial Sequence: Synthetic oligonucleotide
cuccuucuaauccuuagcu

SEQ ID NO: 2600511 - RNA, 19 nt, Artificial Sequence
  Description of Artificial Sequence: Synthetic oligonucleotide
ucaugcaccaaggcgcgau

SEQ ID NO: 2600512 - RNA, 19 nt, Artificial Sequence
  Description of Artificial Sequence: Synthetic oligonucleotide
gauuuugccugaagacauc

SEQ ID NO: 2600513 - RNA, 19 nt, Artificial Sequence
  Description of Artificial Sequence: Synthetic oligonucleotide
gguugacaauuuucucuag

SEQ ID NO: 2600514 - RNA, 19 nt, Artificial Sequence
  Description of Artificial Sequence: Synthetic oligonucleotide
ugcaccaaggcgcgauaau

SEQ ID NO: 2600515 - RNA, 19 nt, Artificial Sequence
  Description of Artificial Sequence: Synthetic oligonucleotide
gauguccagaggagcccgg

SEQ ID NO: 2600516 - RNA, 19 nt, Artificial Sequence
  Description of Artificial Sequence: Synthetic oligonucleotide
cugaauugccaccccaaaa

SEQ ID NO: 2600517 - RNA, 19 nt, Artificial Sequence
  Description of Artificial Sequence: Synthetic oligonucleotide
accacacuuagggacuucu

SEQ ID NO: 2600518 - RNA, 19 nt, Artificial Sequence
  Description of Artificial Sequence: Synthetic oligonucleotide
cagaggagcccggagggag

SEQ ID NO: 2600519 - RNA, 19 nt, Artificial Sequence
  Description of Artificial Sequence: Synthetic oligonucleotide
ggccagaagcuucucauuc

SEQ ID NO: 2600520 - RNA, 19 nt, Artificial Sequence
  Description of Artificial Sequence: Synthetic oligonucleotide
gcauagaaggcccucaggu

SEQ ID NO: 2600521 - RNA, 19 nt, Artificial Sequence
  Description of Artificial Sequence: Synthetic oligonucleotide
aaggcgcgauaauccauua

SEQ ID NO: 2600522 - RNA, 19 nt, Artificial Sequence
  Description of Artificial Sequence: Synthetic oligonucleotide
aaccacacuuagggacuuc

SEQ ID NO: 2600523 - RNA, 19 nt, Artificial Sequence
  Description of Artificial Sequence: Synthetic oligonucleotide
ggcggcuucaucucgcuca

SEQ ID NO: 2600524 - RNA, 19 nt, Artificial Sequence
  Description of Artificial Sequence: Synthetic oligonucleotide
ccugagcuccccauaggcg

SEQ ID NO: 2600525 - RNA, 19 nt, Artificial Sequence
  Description of Artificial Sequence: Synthetic oligonucleotide
ucucaucgccuuggguggg

SEQ ID NO: 2600526 - RNA, 19 nt, Artificial Sequence
  Description of Artificial Sequence: Synthetic oligonucleotide
ggagggaggagagaucggc

SEQ ID NO: 2600527 - RNA, 19 nt, Artificial Sequence
  Description of Artificial Sequence: Synthetic oligonucleotide
gagaggaagucaucagccu

SEQ ID NO: 2600528 - RNA, 19 nt, Artificial Sequence
  Description of Artificial Sequence: Synthetic oligonucleotide
ggcuuaacuacagcaaaca

SEQ ID NO: 2600529 - RNA, 19 nt, Artificial Sequence
  Description of Artificial Sequence: Synthetic oligonucleotide
uccccacgcucugagaagu

SEQ ID NO: 2600530 - RNA, 19 nt, Artificial Sequence
  Description of Artificial Sequence: Synthetic oligonucleotide
auccucaaucuuggggauc

SEQ ID NO: 2600531 - RNA, 19 nt, Artificial Sequence
  Description of Artificial Sequence: Synthetic oligonucleotide
cauccccacgcucugagaa

SEQ ID NO: 2600532 - RNA, 19 nt, Artificial Sequence
  Description of Artificial Sequence: Synthetic oligonucleotide
ggguugacaauuuucucua

SEQ ID NO: 2600533 - RNA, 19 nt, Artificial Sequence
  Description of Artificial Sequence: Synthetic oligonucleotide
acccuuuggguugacaauu

SEQ ID NO: 2600534 - RNA, 19 nt, Artificial Sequence
  Description of Artificial Sequence: Synthetic oligonucleotide
augguugucuggaaggcuu

SEQ ID NO: 2600535 - RNA, 19 nt, Artificial Sequence
  Description of Artificial Sequence: Synthetic oligonucleotide
agggagaaaaccacacuua

SEQ ID NO: 2600536 - RNA, 19 nt, Artificial Sequence
  Description of Artificial Sequence: Synthetic oligonucleotide
guacauagauggcuucucu

SEQ ID NO: 2600537 - RNA, 19 nt, Artificial Sequence
  Description of Artificial Sequence: Synthetic oligonucleotide
uggccacagcauccccacg

SEQ ID NO: 2600538 - RNA, 19 nt, Artificial Sequence
  Description of Artificial Sequence: Synthetic oligonucleotide
aaaccacacuuagggacuu

SEQ ID NO: 2600539 - RNA, 19 nt, Artificial Sequence
  Description of Artificial Sequence: Synthetic oligonucleotide
ugacagcauucacucucuc

SEQ ID NO: 2600540 - RNA, 19 nt, Artificial Sequence
  Description of Artificial Sequence: Synthetic oligonucleotide
ccacauugaggaaauccuc

SEQ ID NO: 2600541 - RNA, 19 nt, Artificial Sequence
  Description of Artificial Sequence: Synthetic oligonucleotide
guuuccaucucaucgccuu

SEQ ID NO: 2600542 - RNA, 19 nt, Artificial Sequence
  Description of Artificial Sequence: Synthetic oligonucleotide
caggucccgcaccauggcc

SEQ ID NO: 2600543 - RNA, 19 nt, Artificial Sequence
  Description of Artificial Sequence: Synthetic oligonucleotide
cucaguacauagauggcuu

SEQ ID NO: 2600544 - RNA, 19 nt, Artificial Sequence
  Description of Artificial Sequence: Synthetic oligonucleotide
cacuuagggacuucuuucu

SEQ ID NO: 2600545 - RNA, 19 nt, Artificial Sequence
  Description of Artificial Sequence: Synthetic oligonucleotide
auguggagaggaagucauc

SEQ ID NO: 2600546 - RNA, 19 nt, Artificial Sequence
  Description of Artificial Sequence: Synthetic oligonucleotide
agaggagcccggagggagg

SEQ ID NO: 2600547 - RNA, 19 nt, Artificial Sequence
  Description of Artificial Sequence: Synthetic oligonucleotide
guacuuggaaaugguuguc

SEQ ID NO: 2600548 - RNA, 19 nt, Artificial Sequence
  Description of Artificial Sequence: Synthetic oligonucleotide
ccaccccaaaaucauuccc

SEQ ID NO: 2600549 - RNA, 19 nt, Artificial Sequence
  Description of Artificial Sequence: Synthetic oligonucleotide
uaggcggcuucaucucgcu

SEQ ID NO: 2600550 - RNA, 19 nt, Artificial Sequence
  Description of Artificial Sequence: Synthetic oligonucleotide
gauuuuccguggcaagaau

SEQ ID NO: 2600551 - RNA, 19 nt, Artificial Sequence
  Description of Artificial Sequence: Synthetic oligonucleotide
cucagcauagaaggcccuc

SEQ ID NO: 2600552 - RNA, 19 nt, Artificial Sequence
  Description of Artificial Sequence: Synthetic oligonucleotide
ggcccugagcuccccauag

SEQ ID NO: 2600553 - RNA, 19 nt, Artificial Sequence
  Description of Artificial Sequence: Synthetic oligonucleotide
uucuccugcuugucuguuu

SEQ ID NO: 2600554 - RNA, 19 nt, Artificial Sequence
  Description of Artificial Sequence: Synthetic oligonucleotide
uugccaccccaaaaucauu

SEQ ID NO: 2600555 - RNA, 19 nt, Artificial Sequence
  Description of Artificial Sequence: Synthetic oligonucleotide
aggcggcuucaucucgcuc

SEQ ID NO: 2600556 - RNA, 19 nt, Artificial Sequence
  Description of Artificial Sequence: Synthetic oligonucleotide
gcucaugcaccaaggcgcg

SEQ ID NO: 2600557 - RNA, 19 nt, Artificial Sequence
  Description of Artificial Sequence: Synthetic oligonucleotide
gagcccggagggaggagag

SEQ ID NO: 2600558 - RNA, 19 nt, Artificial Sequence
  Description of Artificial Sequence: Synthetic oligonucleotide
cuccugaauugccacccca

SEQ ID NO: 2600559 - RNA, 19 nt, Artificial Sequence
  Description of Artificial Sequence: Synthetic oligonucleotide
cgcgauaauccauuacaug

SEQ ID NO: 2600560 - RNA, 19 nt, Artificial Sequence
  Description of Artificial Sequence: Synthetic oligonucleotide
cagggauaugauuuuccgu

SEQ ID NO: 2600561 - RNA, 19 nt, Artificial Sequence
  Description of Artificial Sequence: Synthetic oligonucleotide
ucucauucccagggagaaa

SEQ ID NO: 2600562 - RNA, 19 nt, Artificial Sequence
  Description of Artificial Sequence: Synthetic oligonucleotide
auccuuagcucaguacaua

SEQ ID NO: 2600563 - RNA, 19 nt, Artificial Sequence
  Description of Artificial Sequence: Synthetic oligonucleotide
cucaucgccuugggugggg

SEQ ID NO: 2600564 - RNA, 19 nt, Artificial Sequence
  Description of Artificial Sequence: Synthetic oligonucleotide
cacacuuagggacuucuuu

SEQ ID NO: 2600565 - RNA, 19 nt, Artificial Sequence
  Description of Artificial Sequence: Synthetic oligonucleotide
gcaccaaggcgcgauaauc

SEQ ID NO: 2600566 - RNA, 19 nt, Artificial Sequence
  Description of Artificial Sequence: Synthetic oligonucleotide
gggacuucuuucuucuccu

SEQ ID NO: 2600567 - RNA, 19 nt, Artificial Sequence
  Description of Artificial Sequence: Synthetic oligonucleotide
cugacucagggauaugauu

SEQ ID NO: 2600568 - RNA, 19 nt, Artificial Sequence
  Description of Artificial Sequence: Synthetic oligonucleotide
caucagccuccuggaaaag

SEQ ID NO: 2600569 - RNA, 19 nt, Artificial Sequence
  Description of Artificial Sequence: Synthetic oligonucleotide
aggcuucuacuuuggucuu

SEQ ID NO: 2600570 - RNA, 19 nt, Artificial Sequence
  Description of Artificial Sequence: Synthetic oligonucleotide
gcucaguacauagauggcu

SEQ ID NO: 2600571 - RNA, 19 nt, Artificial Sequence
  Description of Artificial Sequence: Synthetic oligonucleotide
augcaccaaggcgcgauaa

SEQ ID NO: 2600572 - RNA, 19 nt, Artificial Sequence
  Description of Artificial Sequence: Synthetic oligonucleotide
ccauaggcggcuucaucuc

SEQ ID NO: 2600573 - RNA, 19 nt, Artificial Sequence
  Description of Artificial Sequence: Synthetic oligonucleotide
auguccagaggagcccgga

SEQ ID NO: 2600574 - RNA, 19 nt, Artificial Sequence
  Description of Artificial Sequence: Synthetic oligonucleotide
uggcccugagcuccccaua

SEQ ID NO: 2600575 - RNA, 19 nt, Artificial Sequence
  Description of Artificial Sequence: Synthetic oligonucleotide
caaggcgcgauaauccauu

SEQ ID NO: 2600576 - RNA, 19 nt, Artificial Sequence
  Description of Artificial Sequence: Synthetic oligonucleotide
gggaucugggauggggaug

SEQ ID NO: 2600577 - RNA, 19 nt, Artificial Sequence
  Description of Artificial Sequence: Synthetic oligonucleotide
ccuuagcucaguacauaga

SEQ ID NO: 2600578 - RNA, 19 nt, Artificial Sequence
  Description of Artificial Sequence: Synthetic oligonucleotide
gaggagcccggagggagga

SEQ ID NO: 2600579 - RNA, 19 nt, Artificial Sequence
  Description of Artificial Sequence: Synthetic oligonucleotide
cccauaggcggcuucaucu

SEQ ID NO: 2600580 - RNA, 19 nt, Artificial Sequence
  Description of Artificial Sequence: Synthetic oligonucleotide
caguacauagauggcuucu

SEQ ID NO: 2600581 - RNA, 19 nt, Artificial Sequence
  Description of Artificial Sequence: Synthetic oligonucleotide
ggaaaagauuuugccugaa

SEQ ID NO: 2600582 - RNA, 19 nt, Artificial Sequence
  Description of Artificial Sequence: Synthetic oligonucleotide
cacgcucugagaaguacuu

SEQ ID NO: 2600583 - RNA, 19 nt, Artificial Sequence
  Description of Artificial Sequence: Synthetic oligonucleotide
guugucuggaaggcuucua

SEQ ID NO: 2600584 - RNA, 19 nt, Artificial Sequence
  Description of Artificial Sequence: Synthetic oligonucleotide
gaucaggugcuggauccau

SEQ ID NO: 2600585 - RNA, 19 nt, Artificial Sequence
  Description of Artificial Sequence: Synthetic oligonucleotide
ggcuucuacuuuggucuug

SEQ ID NO: 2600586 - RNA, 19 nt, Artificial Sequence
  Description of Artificial Sequence: Synthetic oligonucleotide
cauccucaaucuuggggau

SEQ ID NO: 2600587 - RNA, 19 nt, Artificial Sequence
  Description of Artificial Sequence: Synthetic oligonucleotide
gcaagaauguggagaggaa

SEQ ID NO: 2600588 - RNA, 19 nt, Artificial Sequence
  Description of Artificial Sequence: Synthetic oligonucleotide
ccccaaaaucauucccauc

SEQ ID NO: 2600589 - RNA, 19 nt, Artificial Sequence
  Description of Artificial Sequence: Synthetic oligonucleotide
ggugcuggauccaugugau

SEQ ID NO: 2600590 - RNA, 19 nt, Artificial Sequence
  Description of Artificial Sequence: Synthetic oligonucleotide
aggagagaucggccacauu

SEQ ID NO: 2600591 - RNA, 19 nt, Artificial Sequence
  Description of Artificial Sequence: Synthetic oligonucleotide
cauggcccugagcucccca

SEQ ID NO: 2600592 - RNA, 19 nt, Artificial Sequence
  Description of Artificial Sequence: Synthetic oligonucleotide
cacccuuuggguugacaau

SEQ ID NO: 2600593 - RNA, 19 nt, Artificial Sequence
  Description of Artificial Sequence: Synthetic oligonucleotide
caugcaccaaggcgcgaua

SEQ ID NO: 2600594 - RNA, 19 nt, Artificial Sequence
  Description of Artificial Sequence: Synthetic oligonucleotide
cuagguuguugcugaugau

SEQ ID NO: 2600595 - RNA, 19 nt, Artificial Sequence
  Description of Artificial Sequence: Synthetic oligonucleotide
caaacagggccagaagcuu

SEQ ID NO: 2600596 - RNA, 19 nt, Artificial Sequence
  Description of Artificial Sequence: Synthetic oligonucleotide
ccugaauugccaccccaaa

SEQ ID NO: 2600597 - RNA, 19 nt, Artificial Sequence
  Description of Artificial Sequence: Synthetic oligonucleotide
ccagaaugcauuucucuuu

SEQ ID NO: 2600598 - RNA, 19 nt, Artificial Sequence
  Description of Artificial Sequence: Synthetic oligonucleotide
ggagcccggagggaggaga

SEQ ID NO: 2600599 - RNA, 19 nt, Artificial Sequence
  Description of Artificial Sequence: Synthetic oligonucleotide
cccacgcucugagaaguac

SEQ ID NO: 2600600 - RNA, 19 nt, Artificial Sequence
  Description of Artificial Sequence: Synthetic oligonucleotide
ucacucucuccagcaccuu

SEQ ID NO: 2600601 - RNA, 19 nt, Artificial Sequence
  Description of Artificial Sequence: Synthetic oligonucleotide
ccguggcaagaauguggag

SEQ ID NO: 2600602 - RNA, 19 nt, Artificial Sequence
  Description of Artificial Sequence: Synthetic oligonucleotide
agcccggagggaggagaga

SEQ ID NO: 2600603 - RNA, 19 nt, Artificial Sequence
  Description of Artificial Sequence: Synthetic oligonucleotide
ccccauaggcggcuucauc

SEQ ID NO: 2600604 - RNA, 19 nt, Artificial Sequence
  Description of Artificial Sequence: Synthetic oligonucleotide
cggagggaggagagaucgg

SEQ ID NO: 2600605 - RNA, 19 nt, Artificial Sequence
  Description of Artificial Sequence: Synthetic oligonucleotide
gcauccccacgcucugaga

SEQ ID NO: 2600606 - RNA, 19 nt, Artificial Sequence
  Description of Artificial Sequence: Synthetic oligonucleotide
gcgcgauaauccauuacau

SEQ ID NO: 2600607 - RNA, 19 nt, Artificial Sequence
  Description of Artificial Sequence: Synthetic oligonucleotide
gcugacucagggauaugau

SEQ ID NO: 2600608 - RNA, 19 nt, Artificial Sequence
  Description of Artificial Sequence: Synthetic oligonucleotide
ccacgcucugagaaguacu

SEQ ID NO: 2600609 - RNA, 19 nt, Artificial Sequence
  Description of Artificial Sequence: Synthetic oligonucleotide
cccggagggaggagagauc

SEQ ID NO: 2600610 - RNA, 19 nt, Artificial Sequence
  Description of Artificial Sequence: Synthetic oligonucleotide
gguugucuggaaggcuucu

SEQ ID NO: 2600611 - RNA, 19 nt, Artificial Sequence
  Description of Artificial Sequence: Synthetic oligonucleotide
cucaugcaccaaggcgcga

SEQ ID NO: 2600612 - RNA, 19 nt, Artificial Sequence
  Description of Artificial Sequence: Synthetic oligonucleotide
ggucuccuuggaggccuug

SEQ ID NO: 2600613 - RNA, 19 nt, Artificial Sequence
  Description of Artificial Sequence: Synthetic oligonucleotide
ggucccgcaccauggcccu

SEQ ID NO: 2600614 - RNA, 19 nt, Artificial Sequence
  Description of Artificial Sequence: Synthetic oligonucleotide
caucucgcucaugcaccaa

SEQ ID NO: 2600615 - RNA, 19 nt, Artificial Sequence
  Description of Artificial Sequence: Synthetic oligonucleotide
gagcuccccauaggcggcu

SEQ ID NO: 2600616 - RNA, 19 nt, Artificial Sequence
  Description of Artificial Sequence: Synthetic oligonucleotide
cagcauccccacgcucuga

SEQ ID NO: 2600617 - RNA, 19 nt, Artificial Sequence
  Description of Artificial Sequence: Synthetic oligonucleotide
ccaaggcgcgauaauccau

SEQ ID NO: 2600618 - RNA, 19 nt, Artificial Sequence
  Description of Artificial Sequence: Synthetic oligonucleotide
ccugcuugucuguuuccau

SEQ ID NO: 2600619 - RNA, 19 nt, Artificial Sequence
  Description of Artificial Sequence: Synthetic oligonucleotide
agcuccccauaggcggcuu

SEQ ID NO: 2600620 - RNA, 19 nt, Artificial Sequence
  Description of Artificial Sequence: Synthetic oligonucleotide
gcccggagggaggagagau

SEQ ID NO: 2600621 - RNA, 19 nt, Artificial Sequence
  Description of Artificial Sequence: Synthetic oligonucleotide
gucccgcaccauggcccug

SEQ ID NO: 2600622 - RNA, 19 nt, Artificial Sequence
  Description of Artificial Sequence: Synthetic oligonucleotide
ccgcaccauggcccugagc

SEQ ID NO: 2600623 - RNA, 19 nt, Artificial Sequence
  Description of Artificial Sequence: Synthetic oligonucleotide
ccaucucaucgccuugggu

SEQ ID NO: 2600624 - RNA, 19 nt, Artificial Sequence
  Description of Artificial Sequence: Synthetic oligonucleotide
gcggcuucaucucgcucau

SEQ ID NO: 2600625 - RNA, 19 nt, Artificial Sequence
  Description of Artificial Sequence: Synthetic oligonucleotide
gcucagcauagaaggcccu

SEQ ID NO: 2600626 - RNA, 19 nt, Artificial Sequence
  Description of Artificial Sequence: Synthetic oligonucleotide
ccuuuggguugacaauuuu

SEQ ID NO: 2600627 - RNA, 19 nt, Artificial Sequence
  Description of Artificial Sequence: Synthetic oligonucleotide
cccuuuggguugacaauuu

SEQ ID NO: 2600628 - RNA, 19 nt, Artificial Sequence
  Description of Artificial Sequence: Synthetic oligonucleotide
ccacacuuagggacuucuu

SEQ ID NO: 2600629 - RNA, 19 nt, Artificial Sequence
  Description of Artificial Sequence: Synthetic oligonucleotide
ccccacgcucugagaagua

SEQ ID NO: 2600630 - RNA, 19 nt, Artificial Sequence
  Description of Artificial Sequence: Synthetic oligonucleotide
ccauuacaugggucuccuu

SEQ ID NO: 2600631 - RNA, 19 nt, Artificial Sequence
  Description of Artificial Sequence: Synthetic oligonucleotide
cggcuucaucucgcucaug

SEQ ID NO: 2600632 - RNA, 19 nt, Artificial Sequence
  Description of Artificial Sequence: Synthetic oligonucleotide
auaaucauuaaauacaauc

SEQ ID NO: 2600633 - RNA, 19 nt, Artificial Sequence
  Description of Artificial Sequence: Synthetic oligonucleotide
uaaucauuaaauacaaucc

SEQ ID NO: 2600634 - RNA, 19 nt, Artificial Sequence
  Description of Artificial Sequence: Synthetic oligonucleotide
aagguaaccaauguggacc

SEQ ID NO: 2600635 - RNA, 19 nt, Artificial Sequence
  Description of Artificial Sequence: Synthetic oligonucleotide
uuuuauuugacauaucuau

SEQ ID NO: 2600636 - RNA, 19 nt, Artificial Sequence
  Description of Artificial Sequence: Synthetic oligonucleotide
aucaauguccuuuacaauc

SEQ ID NO: 2600637 - RNA, 19 nt, Artificial Sequence
  Description of Artificial Sequence: Synthetic oligonucleotide
ugagaaauaaaauucacau

SEQ ID NO: 2600638 - RNA, 19 nt, Artificial Sequence
  Description of Artificial Sequence: Synthetic oligonucleotide
auguggaugaccuauacuc

SEQ ID NO: 2600639 - RNA, 19 nt, Artificial Sequence
  Description of Artificial Sequence: Synthetic oligonucleotide
aauuacuuuuauuugacau

SEQ ID NO: 2600640 - RNA, 19 nt, Artificial Sequence
  Description of Artificial Sequence: Synthetic oligonucleotide
ucuacuauagauuucuaca

SEQ ID NO: 2600641 - RNA, 19 nt, Artificial Sequence
  Description of Artificial Sequence: Synthetic oligonucleotide
uuuacaaucaccaucucau

SEQ ID NO: 2600642 - RNA, 19 nt, Artificial Sequence
  Description of Artificial Sequence: Synthetic oligonucleotide
auccucaucaaauaauagc

SEQ ID NO: 2600643 - RNA, 19 nt, Artificial Sequence
  Description of Artificial Sequence: Synthetic oligonucleotide
aacaauugagacuggaaug

SEQ ID NO: 2600644 - RNA, 19 nt, Artificial Sequence
  Description of Artificial Sequence: Synthetic oligonucleotide
uccucaucaaauaauagca

SEQ ID NO: 2600645 - RNA, 19 nt, Artificial Sequence
  Description of Artificial Sequence: Synthetic oligonucleotide
acuauagauuucuacaauc

SEQ ID NO: 2600646 - RNA, 19 nt, Artificial Sequence
  Description of Artificial Sequence: Synthetic oligonucleotide
aaccaggugauguucacac

SEQ ID NO: 2600647 - RNA, 19 nt, Artificial Sequence
  Description of Artificial Sequence: Synthetic oligonucleotide
uguugcuucaaucacuacc

SEQ ID NO: 2600648 - RNA, 19 nt, Artificial Sequence
  Description of Artificial Sequence: Synthetic oligonucleotide
acuuuuauuugacauaucu

SEQ ID NO: 2600649 - RNA, 19 nt, Artificial Sequence
  Description of Artificial Sequence: Synthetic oligonucleotide
ucauuaaauacaauccaug

SEQ ID NO: 2600650 - RNA, 19 nt, Artificial Sequence
  Description of Artificial Sequence: Synthetic oligonucleotide
augauugagacagauaacg

SEQ ID NO: 2600651 - RNA, 19 nt, Artificial Sequence
  Description of Artificial Sequence: Synthetic oligonucleotide
uuugacauaucuauaaaua

SEQ ID NO: 2600652 - RNA, 19 nt, Artificial Sequence
  Description of Artificial Sequence: Synthetic oligonucleotide
uaucuauaaauaaucauua

SEQ ID NO: 2600653 - RNA, 19 nt, Artificial Sequence
  Description of Artificial Sequence: Synthetic oligonucleotide
acaauugagacuggaaugc

SEQ ID NO: 2600654 - RNA, 19 nt, Artificial Sequence
  Description of Artificial Sequence: Synthetic oligonucleotide
aagcagaaagggcucacgc

SEQ ID NO: 2600655 - RNA, 19 nt, Artificial Sequence
  Description of Artificial Sequence: Synthetic oligonucleotide
auugccacuaacaaggugg

SEQ ID NO: 2600656 - RNA, 19 nt, Artificial Sequence
  Description of Artificial Sequence: Synthetic oligonucleotide
uucacuuuagacauugcca

SEQ ID NO: 2600657 - RNA, 19 nt, Artificial Sequence
  Description of Artificial Sequence: Synthetic oligonucleotide
uuaauuacuuuuauuugac

SEQ ID NO: 2600658 - RNA, 19 nt, Artificial Sequence
  Description of Artificial Sequence: Synthetic oligonucleotide
uuauuugacauaucuauaa

SEQ ID NO: 2600659 - RNA, 19 nt, Artificial Sequence
  Description of Artificial Sequence: Synthetic oligonucleotide
uuagacauugccacuaaca

SEQ ID NO: 2600660 - RNA, 19 nt, Artificial Sequence
  Description of Artificial Sequence: Synthetic oligonucleotide
ucaaucacuaccccaacgc

SEQ ID NO: 2600661 - RNA, 19 nt, Artificial Sequence
  Description of Artificial Sequence: Synthetic oligonucleotide
ugaccuauacucuuggcag

SEQ ID NO: 2600662 - RNA, 19 nt, Artificial Sequence
  Description of Artificial Sequence: Synthetic oligonucleotide
uccuuuacaaucaccaucu

SEQ ID NO: 2600663 - RNA, 19 nt, Artificial Sequence
  Description of Artificial Sequence: Synthetic oligonucleotide
caccaucucaucaugaucc

SEQ ID NO: 2600664 - RNA, 19 nt, Artificial Sequence
  Description of Artificial Sequence: Synthetic oligonucleotide
agugugaggaacucuuccc

SEQ ID NO: 2600665 - RNA, 19 nt, Artificial Sequence
  Description of Artificial Sequence: Synthetic oligonucleotide
auggugagaaauaaaauuc

SEQ ID NO: 2600666 - RNA, 19 nt, Artificial Sequence
  Description of Artificial Sequence: Synthetic oligonucleotide
uaacaauugagacuggaau

SEQ ID NO: 2600667 - RNA, 19 nt, Artificial Sequence
  Description of Artificial Sequence: Synthetic oligonucleotide
acacauggaaaacauauca

SEQ ID NO: 2600668 - RNA, 19 nt, Artificial Sequence
  Description of Artificial Sequence: Synthetic oligonucleotide
ugaacuuguagucuucuac

SEQ ID NO: 2600669 - RNA, 19 nt, Artificial Sequence
  Description of Artificial Sequence: Synthetic oligonucleotide
auugagacagauaacgccg

SEQ ID NO: 2600670 - RNA, 19 nt, Artificial Sequence
  Description of Artificial Sequence: Synthetic oligonucleotide
uaacaagguggcaagaaga

SEQ ID NO: 2600671 - RNA, 19 nt, Artificial Sequence
  Description of Artificial Sequence: Synthetic oligonucleotide
cauggaaaacauaucaaug

SEQ ID NO: 2600672 - RNA, 19 nt, Artificial Sequence
  Description of Artificial Sequence: Synthetic oligonucleotide
aauccuggcaaguuugcug

SEQ ID NO: 2600673 - RNA, 19 nt, Artificial Sequence
  Description of Artificial Sequence: Synthetic oligonucleotide
aggaagguaaccaaugugg

SEQ ID NO: 2600674 - RNA, 19 nt, Artificial Sequence
  Description of Artificial Sequence: Synthetic oligonucleotide
uugacauaucuauaaauaa

SEQ ID NO: 2600675 - RNA, 19 nt, Artificial Sequence
  Description of Artificial Sequence: Synthetic oligonucleotide
uggaaugcaugauugagac

SEQ ID NO: 2600676 - RNA, 19 nt, Artificial Sequence
  Description of Artificial Sequence: Synthetic oligonucleotide
ucaauguccuuuacaauca

SEQ ID NO: 2600677 - RNA, 19 nt, Artificial Sequence
  Description of Artificial Sequence: Synthetic oligonucleotide
accugaauggcaguggucc

SEQ ID NO: 2600678 - RNA, 19 nt, Artificial Sequence
  Description of Artificial Sequence: Synthetic oligonucleotide
gacauaucuauaaauaauc

SEQ ID NO: 2600679 - RNA, 19 nt, Artificial Sequence
  Description of Artificial Sequence: Synthetic oligonucleotide
ugacauaucuauaaauaau

SEQ ID NO: 2600680 - RNA, 19 nt, Artificial Sequence
  Description of Artificial Sequence: Synthetic oligonucleotide
uacaaucaccaucucauca

SEQ ID NO: 2600681 - RNA, 19 nt, Artificial Sequence
  Description of Artificial Sequence: Synthetic oligonucleotide
gagucuuugggucuucccg

SEQ ID NO: 2600682 - RNA, 19 nt, Artificial Sequence
  Description of Artificial Sequence: Synthetic oligonucleotide
uucaaucacuaccccaacg

SEQ ID NO: 2600683 - RNA, 19 nt, Artificial Sequence
  Description of Artificial Sequence: Synthetic oligonucleotide
ucaaccaagcacaugaguu

SEQ ID NO: 2600684 - RNA, 19 nt, Artificial Sequence
  Description of Artificial Sequence: Synthetic oligonucleotide
uggugagaaauaaaauuca

SEQ ID NO: 2600685 - RNA, 19 nt, Artificial Sequence
  Description of Artificial Sequence: Synthetic oligonucleotide
agacagauaacgccgguag

SEQ ID NO: 2600686 - RNA, 19 nt, Artificial Sequence
  Description of Artificial Sequence: Synthetic oligonucleotide
aauguccuuuacaaucacc

SEQ ID NO: 2600687 - RNA, 19 nt, Artificial Sequence
  Description of Artificial Sequence: Synthetic oligonucleotide
ugauugagacagauaacgc

SEQ ID NO: 2600688 - RNA, 19 nt, Artificial Sequence
  Description of Artificial Sequence: Synthetic oligonucleotide
agcacaugaguucuccucg

SEQ ID NO: 2600689 - RNA, 19 nt, Artificial Sequence
  Description of Artificial Sequence: Synthetic oligonucleotide
uacaauccuggcaaguuug

SEQ ID NO: 2600690 - RNA, 19 nt, Artificial Sequence
  Description of Artificial Sequence: Synthetic oligonucleotide
uagacauugccacuaacaa

SEQ ID NO: 2600691 - RNA, 19 nt, Artificial Sequence
  Description of Artificial Sequence: Synthetic oligonucleotide
agguaaccaauguggaccc

SEQ ID NO: 2600692 - RNA, 19 nt, Artificial Sequence
  Description of Artificial Sequence: Synthetic oligonucleotide
uggaaaacauaucaauguc

SEQ ID NO: 2600693 - RNA, 19 nt, Artificial Sequence
  Description of Artificial Sequence: Synthetic oligonucleotide
agucuugcuguucauuuuc

SEQ ID NO: 2600694 - RNA, 19 nt, Artificial Sequence
  Description of Artificial Sequence: Synthetic oligonucleotide
aggucaugugcacacacgg

SEQ ID NO: 2600695 - RNA, 19 nt, Artificial Sequence
  Description of Artificial Sequence: Synthetic oligonucleotide
aaauggaaccaggugaugu

SEQ ID NO: 2600696 - RNA, 19 nt, Artificial Sequence
  Description of Artificial Sequence: Synthetic oligonucleotide
aggugauguucacacaugg

SEQ ID NO: 2600697 - RNA, 19 nt, Artificial Sequence
  Description of Artificial Sequence: Synthetic oligonucleotide
aaauucacaucuguaacaa

SEQ ID NO: 2600698 - RNA, 19 nt, Artificial Sequence
  Description of Artificial Sequence: Synthetic oligonucleotide
caucuguaacaauugagac

SEQ ID NO: 2600699 - RNA, 19 nt, Artificial Sequence
  Description of Artificial Sequence: Synthetic oligonucleotide
auuaccauacacaugugug

SEQ ID NO: 2600700 - RNA, 19 nt, Artificial Sequence
  Description of Artificial Sequence: Synthetic oligonucleotide
uucuacuauagauuucuac

SEQ ID NO: 2600701 - RNA, 19 nt, Artificial Sequence
  Description of Artificial Sequence: Synthetic oligonucleotide
acauggaaaacauaucaau

SEQ ID NO: 2600702 - RNA, 19 nt, Artificial Sequence
  Description of Artificial Sequence: Synthetic oligonucleotide
uuaggaagguaaccaaugu

SEQ ID NO: 2600703 - RNA, 19 nt, Artificial Sequence
  Description of Artificial Sequence: Synthetic oligonucleotide
ugauguucacacauggaaa

SEQ ID NO: 2600704 - RNA, 19 nt, Artificial Sequence
  Description of Artificial Sequence: Synthetic oligonucleotide
accgcaaucuguuugguga

SEQ ID NO: 2600705 - RNA, 19 nt, Artificial Sequence
  Description of Artificial Sequence: Synthetic oligonucleotide
acaugaguucuccucgucg

SEQ ID NO: 2600706 - RNA, 19 nt, Artificial Sequence
  Description of Artificial Sequence: Synthetic oligonucleotide
gaggccaaggacuugcuug

SEQ ID NO: 2600707 - RNA, 19 nt, Artificial Sequence
  Description of Artificial Sequence: Synthetic oligonucleotide
uugagacagauaacgccgg

SEQ ID NO: 2600708 - RNA, 19 nt, Artificial Sequence
  Description of Artificial Sequence: Synthetic oligonucleotide
uuaccauacacaugugugu

SEQ ID NO: 2600709 - RNA, 19 nt, Artificial Sequence
  Description of Artificial Sequence: Synthetic oligonucleotide
cacaucuguaacaauugag

SEQ ID NO: 2600710 - RNA, 19 nt, Artificial Sequence
  Description of Artificial Sequence: Synthetic oligonucleotide
auagauuucuacaauccug

SEQ ID NO: 2600711 - RNA, 19 nt, Artificial Sequence
  Description of Artificial Sequence: Synthetic oligonucleotide
agauuucuacaauccuggc

SEQ ID NO: 2600712 - RNA, 19 nt, Artificial Sequence
  Description of Artificial Sequence: Synthetic oligonucleotide
cacaaauggaaccagguga

SEQ ID NO: 2600713 - RNA, 19 nt, Artificial Sequence
  Description of Artificial Sequence: Synthetic oligonucleotide
augaccuauacucuuggca

SEQ ID NO: 2600714 - RNA, 19 nt, Artificial Sequence
  Description of Artificial Sequence: Synthetic oligonucleotide
agacauugccacuaacaag

SEQ ID NO: 2600715 - RNA, 19 nt, Artificial Sequence
  Description of Artificial Sequence: Synthetic oligonucleotide
gauguucacacauggaaaa

SEQ ID NO: 2600716 - RNA, 19 nt, Artificial Sequence
  Description of Artificial Sequence: Synthetic oligonucleotide
uuggcaguucacuuuagac

SEQ ID NO: 2600717 - RNA, 19 nt, Artificial Sequence
  Description of Artificial Sequence: Synthetic oligonucleotide
gaaguucagcuccugauga

SEQ ID NO: 2600718 - RNA, 19 nt, Artificial Sequence
  Description of Artificial Sequence: Synthetic oligonucleotide
uuuggugaggcgcucuuga

SEQ ID NO: 2600719 - RNA, 19 nt, Artificial Sequence
  Description of Artificial Sequence: Synthetic oligonucleotide
cuaacaagguggcaagaag

SEQ ID NO: 2600720 - RNA, 19 nt, Artificial Sequence
  Description of Artificial Sequence: Synthetic oligonucleotide
uguggaugaccuauacucu

SEQ ID NO: 2600721 - RNA, 19 nt, Artificial Sequence
  Description of Artificial Sequence: Synthetic oligonucleotide
agucuucuacuauagauuu

SEQ ID NO: 2600722 - RNA, 19 nt, Artificial Sequence
  Description of Artificial Sequence: Synthetic oligonucleotide
uguucacacauggaaaaca

SEQ ID NO: 2600723 - RNA, 19 nt, Artificial Sequence
  Description of Artificial Sequence: Synthetic oligonucleotide
aaagcagaaagggcucacg

SEQ ID NO: 2600724 - RNA, 19 nt, Artificial Sequence
  Description of Artificial Sequence: Synthetic oligonucleotide
uguguugcuucaaucacua

SEQ ID NO: 2600725 - RNA, 19 nt, Artificial Sequence
  Description of Artificial Sequence: Synthetic oligonucleotide
acaucuguaacaauugaga

SEQ ID NO: 2600726 - RNA, 19 nt, Artificial Sequence
  Description of Artificial Sequence: Synthetic oligonucleotide
agcaguggggucugcaaac

SEQ ID NO: 2600727 - RNA, 19 nt, Artificial Sequence
  Description of Artificial Sequence: Synthetic oligonucleotide
gcaugauugagacagauaa

SEQ ID NO: 2600728 - RNA, 19 nt, Artificial Sequence
  Description of Artificial Sequence: Synthetic oligonucleotide
ucacaucuguaacaauuga

SEQ ID NO: 2600729 - RNA, 19 nt, Artificial Sequence
  Description of Artificial Sequence: Synthetic oligonucleotide
uacuauagauuucuacaau

SEQ ID NO: 2600730 - RNA, 19 nt, Artificial Sequence
  Description of Artificial Sequence: Synthetic oligonucleotide
gugugaggaacucuucccg

SEQ ID NO: 2600731 - RNA, 19 nt, Artificial Sequence
  Description of Artificial Sequence: Synthetic oligonucleotide
gaagguaaccaauguggac

SEQ ID NO: 2600732 - RNA, 19 nt, Artificial Sequence
  Description of Artificial Sequence: Synthetic oligonucleotide
uguaacaauugagacugga

SEQ ID NO: 2600733 - RNA, 19 nt, Artificial Sequence
  Description of Artificial Sequence: Synthetic oligonucleotide
acaaucaccaucucaucau

SEQ ID NO: 2600734 - RNA, 19 nt, Artificial Sequence
  Description of Artificial Sequence: Synthetic oligonucleotide
cuguucauuuucugcaccc

SEQ ID NO: 2600735 - RNA, 19 nt, Artificial Sequence
  Description of Artificial Sequence: Synthetic oligonucleotide
aauggaaccaggugauguu

SEQ ID NO: 2600736 - RNA, 19 nt, Artificial Sequence
  Description of Artificial Sequence: Synthetic oligonucleotide
guuaggaagguaaccaaug

SEQ ID NO: 2600737 - RNA, 19 nt, Artificial Sequence
  Description of Artificial Sequence: Synthetic oligonucleotide
ucugcaaaccaggucaugu

SEQ ID NO: 2600738 - RNA, 19 nt, Artificial Sequence
  Description of Artificial Sequence: Synthetic oligonucleotide
auacaauccauggugagaa

SEQ ID NO: 2600739 - RNA, 19 nt, Artificial Sequence
  Description of Artificial Sequence: Synthetic oligonucleotide
aauguggacccuucccaca

SEQ ID NO: 2600740 - RNA, 19 nt, Artificial Sequence
  Description of Artificial Sequence: Synthetic oligonucleotide
acauaucuauaaauaauca

SEQ ID NO: 2600741 - RNA, 19 nt, Artificial Sequence
  Description of Artificial Sequence: Synthetic oligonucleotide
ggaaaacauaucaaugucc

SEQ ID NO: 2600742 - RNA, 19 nt, Artificial Sequence
  Description of Artificial Sequence: Synthetic oligonucleotide
uggaugaccuauacucuug

SEQ ID NO: 2600743 - RNA, 19 nt, Artificial Sequence
  Description of Artificial Sequence: Synthetic oligonucleotide
gauaacgccgguagcagug

SEQ ID NO: 2600744 - RNA, 19 nt, Artificial Sequence
  Description of Artificial Sequence: Synthetic oligonucleotide
agaaaagcagaaagggcuc

SEQ ID NO: 2600745 - RNA, 19 nt, Artificial Sequence
  Description of Artificial Sequence: Synthetic oligonucleotide
acauaucaauguccuuuac

SEQ ID NO: 2600746 - RNA, 19 nt, Artificial Sequence
  Description of Artificial Sequence: Synthetic oligonucleotide
uugagacuggaaugcauga

SEQ ID NO: 2600747 - RNA, 19 nt, Artificial Sequence
  Description of Artificial Sequence: Synthetic oligonucleotide
aacuuguagucuucuacua

SEQ ID NO: 2600748 - RNA, 19 nt, Artificial Sequence
  Description of Artificial Sequence: Synthetic oligonucleotide
uguagucuucuacuauaga

SEQ ID NO: 2600749 - RNA, 19 nt, Artificial Sequence
  Description of Artificial Sequence: Synthetic oligonucleotide
gaguucuccucgucgacag

SEQ ID NO: 2600750 - RNA, 19 nt, Artificial Sequence
  Description of Artificial Sequence: Synthetic oligonucleotide
aaucacuaccccaacgcca

SEQ ID NO: 2600751 - RNA, 19 nt, Artificial Sequence
  Description of Artificial Sequence: Synthetic oligonucleotide
uuuagacauugccacuaac

SEQ ID NO: 2600752 - RNA, 19 nt, Artificial Sequence
  Description of Artificial Sequence: Synthetic oligonucleotide
cauggugcuggucacaguc

SEQ ID NO: 2600753 - RNA, 19 nt, Artificial Sequence
  Description of Artificial Sequence: Synthetic oligonucleotide
gauccucaucaaauaauag

SEQ ID NO: 2600754 - RNA, 19 nt, Artificial Sequence
  Description of Artificial Sequence: Synthetic oligonucleotide
aucuauaaauaaucauuaa

SEQ ID NO: 2600755 - RNA, 19 nt, Artificial Sequence
  Description of Artificial Sequence: Synthetic oligonucleotide
uacacauguguguugcuuc

SEQ ID NO: 2600756 - RNA, 19 nt, Artificial Sequence
  Description of Artificial Sequence: Synthetic oligonucleotide
aagguggcaagaagaaaag

SEQ ID NO: 2600757 - RNA, 19 nt, Artificial Sequence
  Description of Artificial Sequence: Synthetic oligonucleotide
cuggcaaguuugcugaggc

SEQ ID NO: 2600758 - RNA, 19 nt, Artificial Sequence
  Description of Artificial Sequence: Synthetic oligonucleotide
aaguuugcugaggccaagg

SEQ ID NO: 2600759 - RNA, 19 nt, Artificial Sequence
  Description of Artificial Sequence: Synthetic oligonucleotide
caucucaucaugauccuca

SEQ ID NO: 2600760 - RNA, 19 nt, Artificial Sequence
  Description of Artificial Sequence: Synthetic oligonucleotide
auugagacuggaaugcaug

SEQ ID NO: 2600761 - RNA, 19 nt, Artificial Sequence
  Description of Artificial Sequence: Synthetic oligonucleotide
auccuggcaaguuugcuga

SEQ ID NO: 2600762 - RNA, 19 nt, Artificial Sequence
  Description of Artificial Sequence: Synthetic oligonucleotide
uuugggucuucccgaaaca

SEQ ID NO: 2600763 - RNA, 19 nt, Artificial Sequence
  Description of Artificial Sequence: Synthetic oligonucleotide
aaccaagcacaugaguucu

SEQ ID NO: 2600764 - RNA, 19 nt, Artificial Sequence
  Description of Artificial Sequence: Synthetic oligonucleotide
cuacuauagauuucuacaa

SEQ ID NO: 2600765 - RNA, 19 nt, Artificial Sequence
  Description of Artificial Sequence: Synthetic oligonucleotide
cuuugggucuucccgaaac

SEQ ID NO: 2600766 - RNA, 19 nt, Artificial Sequence
  Description of Artificial Sequence: Synthetic oligonucleotide
acagauaacgccgguagca

SEQ ID NO: 2600767 - RNA, 19 nt, Artificial Sequence
  Description of Artificial Sequence: Synthetic oligonucleotide
ugggucuucccgaaacacc

SEQ ID NO: 2600768 - RNA, 19 nt, Artificial Sequence
  Description of Artificial Sequence: Synthetic oligonucleotide
uaccccaacgccagcaggc

SEQ ID NO: 2600769 - RNA, 19 nt, Artificial Sequence
  Description of Artificial Sequence: Synthetic oligonucleotide
uucauuuucugcaccccuc

SEQ ID NO: 2600770 - RNA, 19 nt, Artificial Sequence
  Description of Artificial Sequence: Synthetic oligonucleotide
caugauugagacagauaac

SEQ ID NO: 2600771 - RNA, 19 nt, Artificial Sequence
  Description of Artificial Sequence: Synthetic oligonucleotide
cauaucaauguccuuuaca

SEQ ID NO: 2600772 - RNA, 19 nt, Artificial Sequence
  Description of Artificial Sequence: Synthetic oligonucleotide
cuuuacaaucaccaucuca

SEQ ID NO: 2600773 - RNA, 19 nt, Artificial Sequence
  Description of Artificial Sequence: Synthetic oligonucleotide
caaucacuaccccaacgcc

SEQ ID NO: 2600774 - RNA, 19 nt, Artificial Sequence
  Description of Artificial Sequence: Synthetic oligonucleotide
ugugaggaacucuucccga

SEQ ID NO: 2600775 - RNA, 19 nt, Artificial Sequence
  Description of Artificial Sequence: Synthetic oligonucleotide
ucgucgacagcacccuggg

SEQ ID NO: 2600776 - RNA, 19 nt, Artificial Sequence
  Description of Artificial Sequence: Synthetic oligonucleotide
auucacaucuguaacaauu

SEQ ID NO: 2600777 - RNA, 19 nt, Artificial Sequence
  Description of Artificial Sequence: Synthetic oligonucleotide
uuguuaggaagguaaccaa

SEQ ID NO: 2600778 - RNA, 19 nt, Artificial Sequence
  Description of Artificial Sequence: Synthetic oligonucleotide
caaccaagcacaugaguuc

SEQ ID NO: 2600779 - RNA, 19 nt, Artificial Sequence
  Description of Artificial Sequence: Synthetic oligonucleotide
ucaugauccucaucaaaua

SEQ ID NO: 2600780 - RNA, 19 nt, Artificial Sequence
  Description of Artificial Sequence: Synthetic oligonucleotide
gacuugcuuguuaggaagg

SEQ ID NO: 2600781 - RNA, 19 nt, Artificial Sequence
  Description of Artificial Sequence: Synthetic oligonucleotide
ccuuaauuacuuuuauuug

SEQ ID NO: 2600782 - RNA, 19 nt, Artificial Sequence
  Description of Artificial Sequence: Synthetic oligonucleotide
aauucacaucuguaacaau

SEQ ID NO: 2600783 - RNA, 19 nt, Artificial Sequence
  Description of Artificial Sequence: Synthetic oligonucleotide
ucaccaucucaucaugauc

SEQ ID NO: 2600784 - RNA, 19 nt, Artificial Sequence
  Description of Artificial Sequence: Synthetic oligonucleotide
uugccacuaacaagguggc

SEQ ID NO: 2600785 - RNA, 19 nt, Artificial Sequence
  Description of Artificial Sequence: Synthetic oligonucleotide
gaugaccuauacucuuggc

SEQ ID NO: 2600786 - RNA, 19 nt, Artificial Sequence
  Description of Artificial Sequence: Synthetic oligonucleotide
agucuuugggucuucccga

SEQ ID NO: 2600787 - RNA, 19 nt, Artificial Sequence
  Description of Artificial Sequence: Synthetic oligonucleotide
aauaaucauuaaauacaau

SEQ ID NO: 2600788 - RNA, 19 nt, Artificial Sequence
  Description of Artificial Sequence: Synthetic oligonucleotide
uggaaccaggugauguuca

SEQ ID NO: 2600789 - RNA, 19 nt, Artificial Sequence
  Description of Artificial Sequence: Synthetic oligonucleotide
cauguguguugcuucaauc

SEQ ID NO: 2600790 - RNA, 19 nt, Artificial Sequence
  Description of Artificial Sequence: Synthetic oligonucleotide
uuucuacaauccuggcaag

SEQ ID NO: 2600791 - RNA, 19 nt, Artificial Sequence
  Description of Artificial Sequence: Synthetic oligonucleotide
aacucuucccgagucuuug

SEQ ID NO: 2600792 - RNA, 19 nt, Artificial Sequence
  Description of Artificial Sequence: Synthetic oligonucleotide
guagucuucuacuauagau

SEQ ID NO: 2600793 - RNA, 19 nt, Artificial Sequence
  Description of Artificial Sequence: Synthetic oligonucleotide
agguggcaagaagaaaagc

SEQ ID NO: 2600794 - RNA, 19 nt, Artificial Sequence
  Description of Artificial Sequence: Synthetic oligonucleotide
aaggcuucugugauggcca

SEQ ID NO: 2600795 - RNA, 19 nt, Artificial Sequence
  Description of Artificial Sequence: Synthetic oligonucleotide
auguucacacauggaaaac

SEQ ID NO: 2600796 - RNA, 19 nt, Artificial Sequence
  Description of Artificial Sequence: Synthetic oligonucleotide
caaggcuucugugauggcc

SEQ ID NO: 2600797 - RNA, 19 nt, Artificial Sequence
  Description of Artificial Sequence: Synthetic oligonucleotide
guuugcugaggccaaggac

SEQ ID NO: 2600798 - RNA, 19 nt, Artificial Sequence
  Description of Artificial Sequence: Synthetic oligonucleotide
acuuguagucuucuacuau

SEQ ID NO: 2600799 - RNA, 19 nt, Artificial Sequence
  Description of Artificial Sequence: Synthetic oligonucleotide
gacagauaacgccgguagc

SEQ ID NO: 2600800 - RNA, 19 nt, Artificial Sequence
  Description of Artificial Sequence: Synthetic oligonucleotide
cucgucgacagcacccugg

SEQ ID NO: 2600801 - RNA, 19 nt, Artificial Sequence
  Description of Artificial Sequence: Synthetic oligonucleotide
ugugauggccaccgcaauc

SEQ ID NO: 2600802 - RNA, 19 nt, Artificial Sequence
  Description of Artificial Sequence: Synthetic oligonucleotide
cauggugagaaauaaaauu

SEQ ID NO: 2600803 - RNA, 19 nt, Artificial Sequence
  Description of Artificial Sequence: Synthetic oligonucleotide
uguucauuuucugcacccc

SEQ ID NO: 2600804 - RNA, 19 nt, Artificial Sequence
  Description of Artificial Sequence: Synthetic oligonucleotide
gggucugcaaaccagguca

SEQ ID NO: 2600805 - RNA, 19 nt, Artificial Sequence
  Description of Artificial Sequence: Synthetic oligonucleotide
cuucccgagucuuuggguc

SEQ ID NO: 2600806 - RNA, 19 nt, Artificial Sequence
  Description of Artificial Sequence: Synthetic oligonucleotide
acaauccuggcaaguuugc

SEQ ID NO: 2600807 - RNA, 19 nt, Artificial Sequence
  Description of Artificial Sequence: Synthetic oligonucleotide
cacacauggaaaacauauc

SEQ ID NO: 2600808 - RNA, 19 nt, Artificial Sequence
  Description of Artificial Sequence: Synthetic oligonucleotide
aucaccaucucaucaugau

SEQ ID NO: 2600809 - RNA, 19 nt, Artificial Sequence
  Description of Artificial Sequence: Synthetic oligonucleotide
gguggcaagaagaaaagca

SEQ ID NO: 2600810 - RNA, 19 nt, Artificial Sequence
  Description of Artificial Sequence: Synthetic oligonucleotide
aauugagacuggaaugcau

SEQ ID NO: 2600811 - RNA, 19 nt, Artificial Sequence
  Description of Artificial Sequence: Synthetic oligonucleotide
caggucaugugcacacacg

SEQ ID NO: 2600812 - RNA, 19 nt, Artificial Sequence
  Description of Artificial Sequence: Synthetic oligonucleotide
gucacagucuugcuguuca

SEQ ID NO: 2600813 - RNA, 19 nt, Artificial Sequence
  Description of Artificial Sequence: Synthetic oligonucleotide
aucacuaccccaacgccag

SEQ ID NO: 2600814 - RNA, 19 nt, Artificial Sequence
  Description of Artificial Sequence: Synthetic oligonucleotide
aagggcucacgccuuaauu

SEQ ID NO: 2600815 - RNA, 19 nt, Artificial Sequence
  Description of Artificial Sequence: Synthetic oligonucleotide
gucaugugcacacacggaa

SEQ ID NO: 2600816 - RNA, 19 nt, Artificial Sequence
  Description of Artificial Sequence: Synthetic oligonucleotide
caaggacuugcuuguuagg

SEQ ID NO: 2600817 - RNA, 19 nt, Artificial Sequence
  Description of Artificial Sequence: Synthetic oligonucleotide
ugcuguucauuuucugcac

SEQ ID NO: 2600818 - RNA, 19 nt, Artificial Sequence
  Description of Artificial Sequence: Synthetic oligonucleotide
ucuacaauccuggcaaguu

SEQ ID NO: 2600819 - RNA, 19 nt, Artificial Sequence
  Description of Artificial Sequence: Synthetic oligonucleotide
caaaccaggucaugugcac

SEQ ID NO: 2600820 - RNA, 19 nt, Artificial Sequence
  Description of Artificial Sequence: Synthetic oligonucleotide
ggaugaccuauacucuugg

SEQ ID NO: 2600821 - RNA, 19 nt, Artificial Sequence
  Description of Artificial Sequence: Synthetic oligonucleotide
ggaaguucagcuccugaug

SEQ ID NO: 2600822 - RNA, 19 nt, Artificial Sequence
  Description of Artificial Sequence: Synthetic oligonucleotide
caauguggacccuucccac

SEQ ID NO: 2600823 - RNA, 19 nt, Artificial Sequence
  Description of Artificial Sequence: Synthetic oligonucleotide
uaaccaauguggacccuuc

SEQ ID NO: 2600824 - RNA, 19 nt, Artificial Sequence
  Description of Artificial Sequence: Synthetic oligonucleotide
cuggaaugcaugauugaga

SEQ ID NO: 2600825 - RNA, 19 nt, Artificial Sequence
  Description of Artificial Sequence: Synthetic oligonucleotide
cucuucccgagucuuuggg

SEQ ID NO: 2600826 - RNA, 19 nt, Artificial Sequence
  Description of Artificial Sequence: Synthetic oligonucleotide
ugugcacacacggaaguuc

SEQ ID NO: 2600827 - RNA, 19 nt, Artificial Sequence
  Description of Artificial Sequence: Synthetic oligonucleotide
gaggaacucuucccgaguc

SEQ ID NO: 2600828 - RNA, 19 nt, Artificial Sequence
  Description of Artificial Sequence: Synthetic oligonucleotide
ugcaugauugagacagaua

SEQ ID NO: 2600829 - RNA, 19 nt, Artificial Sequence
  Description of Artificial Sequence: Synthetic oligonucleotide
agggcucacgccuuaauua

SEQ ID NO: 2600830 - RNA, 19 nt, Artificial Sequence
  Description of Artificial Sequence: Synthetic oligonucleotide
caaucaccaucucaucaug

SEQ ID NO: 2600831 - RNA, 19 nt, Artificial Sequence
  Description of Artificial Sequence: Synthetic oligonucleotide
caugaguucuccucgucga

SEQ ID NO: 2600832 - RNA, 19 nt, Artificial Sequence
  Description of Artificial Sequence: Synthetic oligonucleotide
acaaauggaaccaggugau

SEQ ID NO: 2600833 - RNA, 19 nt, Artificial Sequence
  Description of Artificial Sequence: Synthetic oligonucleotide
ucuucccgagucuuugggu

SEQ ID NO: 2600834 - RNA, 19 nt, Artificial Sequence
  Description of Artificial Sequence: Synthetic oligonucleotide
acucuucccgagucuuugg

SEQ ID NO: 2600835 - RNA, 19 nt, Artificial Sequence
  Description of Artificial Sequence: Synthetic oligonucleotide
caugauccucaucaaauaa

SEQ ID NO: 2600836 - RNA, 19 nt, Artificial Sequence
  Description of Artificial Sequence: Synthetic oligonucleotide
uucugcaccccucgcauua

SEQ ID NO: 2600837 - RNA, 19 nt, Artificial Sequence
  Description of Artificial Sequence: Synthetic oligonucleotide
uaacgccgguagcaguggg

SEQ ID NO: 2600838 - RNA, 19 nt, Artificial Sequence
  Description of Artificial Sequence: Synthetic oligonucleotide
ucuuggcaguucacuuuag

SEQ ID NO: 2600839 - RNA, 19 nt, Artificial Sequence
  Description of Artificial Sequence: Synthetic oligonucleotide
acuuuagacauugccacua

SEQ ID NO: 2600840 - RNA, 19 nt, Artificial Sequence
  Description of Artificial Sequence: Synthetic oligonucleotide
aaaccaggucaugugcaca

SEQ ID NO: 2600841 - RNA, 19 nt, Artificial Sequence
  Description of Artificial Sequence: Synthetic oligonucleotide
acgccagcaggcugcaagg

SEQ ID NO: 2600842 - RNA, 19 nt, Artificial Sequence
  Description of Artificial Sequence: Synthetic oligonucleotide
ugagugugaggaacucuuc

SEQ ID NO: 2600843 - RNA, 19 nt, Artificial Sequence
  Description of Artificial Sequence: Synthetic oligonucleotide
aguucuccucgucgacagc

SEQ ID NO: 2600844 - RNA, 19 nt, Artificial Sequence
  Description of Artificial Sequence: Synthetic oligonucleotide
cugcaaaccaggucaugug

SEQ ID NO: 2600845 - RNA, 19 nt, Artificial Sequence
  Description of Artificial Sequence: Synthetic oligonucleotide
ucacgccuuaauuacuuuu

SEQ ID NO: 2600846 - RNA, 19 nt, Artificial Sequence
  Description of Artificial Sequence: Synthetic oligonucleotide
acuaacaagguggcaagaa

SEQ ID NO: 2600847 - RNA, 19 nt, Artificial Sequence
  Description of Artificial Sequence: Synthetic oligonucleotide
ugagacagauaacgccggu

SEQ ID NO: 2600848 - RNA, 19 nt, Artificial Sequence
  Description of Artificial Sequence: Synthetic oligonucleotide
gcuucugugauggccaccg

SEQ ID NO: 2600849 - RNA, 19 nt, Artificial Sequence
  Description of Artificial Sequence: Synthetic oligonucleotide
ugaguucuccucgucgaca

SEQ ID NO: 2600850 - RNA, 19 nt, Artificial Sequence
  Description of Artificial Sequence: Synthetic oligonucleotide
aggccaaggacuugcuugu

SEQ ID NO: 2600851 - RNA, 19 nt, Artificial Sequence
  Description of Artificial Sequence: Synthetic oligonucleotide
ugaauggcagugguccaug

SEQ ID NO: 2600852 - RNA, 19 nt, Artificial Sequence
  Description of Artificial Sequence: Synthetic oligonucleotide
ccaaggacuugcuuguuag

SEQ ID NO: 2600853 - RNA, 19 nt, Artificial Sequence
  Description of Artificial Sequence: Synthetic oligonucleotide
aaagggcucacgccuuaau

SEQ ID NO: 2600854 - RNA, 19 nt, Artificial Sequence
  Description of Artificial Sequence: Synthetic oligonucleotide
aaccugaauggcagugguc

SEQ ID NO: 2600855 - RNA, 19 nt, Artificial Sequence
  Description of Artificial Sequence: Synthetic oligonucleotide
ggugagaaauaaaauucac

SEQ ID NO: 2600856 - RNA, 19 nt, Artificial Sequence
  Description of Artificial Sequence: Synthetic oligonucleotide
ugcaccccucgcauuacca

SEQ ID NO: 2600857 - RNA, 19 nt, Artificial Sequence
  Description of Artificial Sequence: Synthetic oligonucleotide
agauaacgccgguagcagu

SEQ ID NO: 2600858 - RNA, 19 nt, Artificial Sequence
  Description of Artificial Sequence: Synthetic oligonucleotide
ugcacacacggaaguucag

SEQ ID NO: 2600859 - RNA, 19 nt, Artificial Sequence
  Description of Artificial Sequence: Synthetic oligonucleotide
gccuuaauuacuuuuauuu

SEQ ID NO: 2600860 - RNA, 19 nt, Artificial Sequence
  Description of Artificial Sequence: Synthetic oligonucleotide
uugggucuucccgaaacac

SEQ ID NO: 2600861 - RNA, 19 nt, Artificial Sequence
  Description of Artificial Sequence: Synthetic oligonucleotide
aacgccgguagcagugggg

SEQ ID NO: 2600862 - RNA, 19 nt, Artificial Sequence
  Description of Artificial Sequence: Synthetic oligonucleotide
acauguguguugcuucaau

SEQ ID NO: 2600863 - RNA, 19 nt, Artificial Sequence
  Description of Artificial Sequence: Synthetic oligonucleotide
uaccauacacauguguguu

SEQ ID NO: 2600864 - RNA, 19 nt, Artificial Sequence
  Description of Artificial Sequence: Synthetic oligonucleotide
augauccucaucaaauaau

SEQ ID NO: 2600865 - RNA, 19 nt, Artificial Sequence
  Description of Artificial Sequence: Synthetic oligonucleotide
cauuuucugcaccccucgc

SEQ ID NO: 2600866 - RNA, 19 nt, Artificial Sequence
  Description of Artificial Sequence: Synthetic oligonucleotide
caggugauguucacacaug

SEQ ID NO: 2600867 - RNA, 19 nt, Artificial Sequence
  Description of Artificial Sequence: Synthetic oligonucleotide
guaacaauugagacuggaa

SEQ ID NO: 2600868 - RNA, 19 nt, Artificial Sequence
  Description of Artificial Sequence: Synthetic oligonucleotide
auaacgccgguagcagugg

SEQ ID NO: 2600869 - RNA, 19 nt, Artificial Sequence
  Description of Artificial Sequence: Synthetic oligonucleotide
cagauaacgccgguagcag

SEQ ID NO: 2600870 - RNA, 19 nt, Artificial Sequence
  Description of Artificial Sequence: Synthetic oligonucleotide
acucuuggcaguucacuuu

SEQ ID NO: 2600871 - RNA, 19 nt, Artificial Sequence
  Description of Artificial Sequence: Synthetic oligonucleotide
cuaccccaacgccagcagg

SEQ ID NO: 2600872 - RNA, 19 nt, Artificial Sequence
  Description of Artificial Sequence: Synthetic oligonucleotide
uugaacuuguagucuucua

SEQ ID NO: 2600873 - RNA, 19 nt, Artificial Sequence
  Description of Artificial Sequence: Synthetic oligonucleotide
accccucgcauuaccauac

SEQ ID NO: 2600874 - RNA, 19 nt, Artificial Sequence
  Description of Artificial Sequence: Synthetic oligonucleotide
cucgcauuaccauacacau

SEQ ID NO: 2600875 - RNA, 19 nt, Artificial Sequence
  Description of Artificial Sequence: Synthetic oligonucleotide
cuucaaucacuaccccaac

SEQ ID NO: 2600876 - RNA, 19 nt, Artificial Sequence
  Description of Artificial Sequence: Synthetic oligonucleotide
uggcaaguuugcugaggcc

SEQ ID NO: 2600877 - RNA, 19 nt, Artificial Sequence
  Description of Artificial Sequence: Synthetic oligonucleotide
caauguccuuuacaaucac

SEQ ID NO: 2600878 - RNA, 19 nt, Artificial Sequence
  Description of Artificial Sequence: Synthetic oligonucleotide
ugaggcgcucuugaacuug

SEQ ID NO: 2600879 - RNA, 19 nt, Artificial Sequence
  Description of Artificial Sequence: Synthetic oligonucleotide
aggaacucuucccgagucu

SEQ ID NO: 2600880 - RNA, 19 nt, Artificial Sequence
  Description of Artificial Sequence: Synthetic oligonucleotide
ggcaguucacuuuagacau

SEQ ID NO: 2600881 - RNA, 19 nt, Artificial Sequence
  Description of Artificial Sequence: Synthetic oligonucleotide
gccaccgcaaucuguuugg

SEQ ID NO: 2600882 - RNA, 19 nt, Artificial Sequence
  Description of Artificial Sequence: Synthetic oligonucleotide
caauccauggugagaaaua

SEQ ID NO: 2600883 - RNA, 19 nt, Artificial Sequence
  Description of Artificial Sequence: Synthetic oligonucleotide
acgccuuaauuacuuuuau

SEQ ID NO: 2600884 - RNA, 19 nt, Artificial Sequence
  Description of Artificial Sequence: Synthetic oligonucleotide
ugagacuggaaugcaugau

SEQ ID NO: 2600885 - RNA, 19 nt, Artificial Sequence
  Description of Artificial Sequence: Synthetic oligonucleotide
aaugcaugauugagacaga

SEQ ID NO: 2600886 - RNA, 19 nt, Artificial Sequence
  Description of Artificial Sequence: Synthetic oligonucleotide
augagugugaggaacucuu

SEQ ID NO: 2600887 - RNA, 19 nt, Artificial Sequence
  Description of Artificial Sequence: Synthetic oligonucleotide
ggcaaguuugcugaggcca

SEQ ID NO: 2600888 - RNA, 19 nt, Artificial Sequence
  Description of Artificial Sequence: Synthetic oligonucleotide
cuguaacaauugagacugg

SEQ ID NO: 2600889 - RNA, 19 nt, Artificial Sequence
  Description of Artificial Sequence: Synthetic oligonucleotide
uccauguggaugaccuaua

SEQ ID NO: 2600890 - RNA, 19 nt, Artificial Sequence
  Description of Artificial Sequence: Synthetic oligonucleotide
ggcgcucuugaacuuguag

SEQ ID NO: 2600891 - RNA, 19 nt, Artificial Sequence
  Description of Artificial Sequence: Synthetic oligonucleotide
acggaaguucagcuccuga

SEQ ID NO: 2600892 - RNA, 19 nt, Artificial Sequence
  Description of Artificial Sequence: Synthetic oligonucleotide
acuugcuuguuaggaaggu

SEQ ID NO: 2600893 - RNA, 19 nt, Artificial Sequence
  Description of Artificial Sequence: Synthetic oligonucleotide
gcuguucauuuucugcacc

SEQ ID NO: 2600894 - RNA, 19 nt, Artificial Sequence
  Description of Artificial Sequence: Synthetic oligonucleotide
auacacauguguguugcuu

SEQ ID NO: 2600895 - RNA, 19 nt, Artificial Sequence
  Description of Artificial Sequence: Synthetic oligonucleotide
gaaccugaauggcaguggu

SEQ ID NO: 2600896 - RNA, 19 nt, Artificial Sequence
  Description of Artificial Sequence: Synthetic oligonucleotide
guucuccucgucgacagca

SEQ ID NO: 2600897 - RNA, 19 nt, Artificial Sequence
  Description of Artificial Sequence: Synthetic oligonucleotide
uggugcuggucacagucuu

SEQ ID NO: 2600898 - RNA, 19 nt, Artificial Sequence
  Description of Artificial Sequence: Synthetic oligonucleotide
gcuuguuaggaagguaacc

SEQ ID NO: 2600899 - RNA, 19 nt, Artificial Sequence
  Description of Artificial Sequence: Synthetic oligonucleotide
cacgccuuaauuacuuuua

SEQ ID NO: 2600900 - RNA, 19 nt, Artificial Sequence
  Description of Artificial Sequence: Synthetic oligonucleotide
ucuuugggucuucccgaaa

SEQ ID NO: 2600901 - RNA, 19 nt, Artificial Sequence
  Description of Artificial Sequence: Synthetic oligonucleotide
augcaugauugagacagau

SEQ ID NO: 2600902 - RNA, 19 nt, Artificial Sequence
  Description of Artificial Sequence: Synthetic oligonucleotide
cuuggcaguucacuuuaga

SEQ ID NO: 2600903 - RNA, 19 nt, Artificial Sequence
  Description of Artificial Sequence: Synthetic oligonucleotide
ccacuaacaagguggcaag

SEQ ID NO: 2600904 - RNA, 19 nt, Artificial Sequence
  Description of Artificial Sequence: Synthetic oligonucleotide
agcuccugaugagugugag

SEQ ID NO: 2600905 - RNA, 19 nt, Artificial Sequence
  Description of Artificial Sequence: Synthetic oligonucleotide
ggugaggcgcucuugaacu

SEQ ID NO: 2600906 - RNA, 19 nt, Artificial Sequence
  Description of Artificial Sequence: Synthetic oligonucleotide
uccuggcaaguuugcugag

SEQ ID NO: 2600907 - RNA, 19 nt, Artificial Sequence
  Description of Artificial Sequence: Synthetic oligonucleotide
gggcucacgccuuaauuac

SEQ ID NO: 2600908 - RNA, 19 nt, Artificial Sequence
  Description of Artificial Sequence: Synthetic oligonucleotide
aucuguuuggugaggcgcu

SEQ ID NO: 2600909 - RNA, 19 nt, Artificial Sequence
  Description of Artificial Sequence: Synthetic oligonucleotide
uacaauccauggugagaaa

SEQ ID NO: 2600910 - RNA, 19 nt, Artificial Sequence
  Description of Artificial Sequence: Synthetic oligonucleotide
gaaccaggugauguucaca

SEQ ID NO: 2600911 - RNA, 19 nt, Artificial Sequence
  Description of Artificial Sequence: Synthetic oligonucleotide
acaagguggcaagaagaaa

SEQ ID NO: 2600912 - RNA, 19 nt, Artificial Sequence
  Description of Artificial Sequence: Synthetic oligonucleotide
caccgcaaucuguuuggug

SEQ ID NO: 2600913 - RNA, 19 nt, Artificial Sequence
  Description of Artificial Sequence: Synthetic oligonucleotide
gcuucaaucacuaccccaa

SEQ ID NO: 2600914 - RNA, 19 nt, Artificial Sequence
  Description of Artificial Sequence: Synthetic oligonucleotide
gcugaggccaaggacuugc

SEQ ID NO: 2600915 - RNA, 19 nt, Artificial Sequence
  Description of Artificial Sequence: Synthetic oligonucleotide
caaauggaaccaggugaug

SEQ ID NO: 2600916 - RNA, 19 nt, Artificial Sequence
  Description of Artificial Sequence: Synthetic oligonucleotide
gcagaaagggcucacgccu

SEQ ID NO: 2600917 - RNA, 19 nt, Artificial Sequence
  Description of Artificial Sequence: Synthetic oligonucleotide
cacacacggaaguucagcu

SEQ ID NO: 2600918 - RNA, 19 nt, Artificial Sequence
  Description of Artificial Sequence: Synthetic oligonucleotide
cacaugaguucuccucguc

SEQ ID NO: 2600919 - RNA, 19 nt, Artificial Sequence
  Description of Artificial Sequence: Synthetic oligonucleotide
cuuuagacauugccacuaa

SEQ ID NO: 2600920 - RNA, 19 nt, Artificial Sequence
  Description of Artificial Sequence: Synthetic oligonucleotide
cccaacgccagcaggcugc

SEQ ID NO: 2600921 - RNA, 19 nt, Artificial Sequence
  Description of Artificial Sequence: Synthetic oligonucleotide
gaccuauacucuuggcagu

SEQ ID NO: 2600922 - RNA, 19 nt, Artificial Sequence
  Description of Artificial Sequence: Synthetic oligonucleotide
cucuuggcaguucacuuua

SEQ ID NO: 2600923 - RNA, 19 nt, Artificial Sequence
  Description of Artificial Sequence: Synthetic oligonucleotide
gugcacacacggaaguuca

SEQ ID NO: 2600924 - RNA, 19 nt, Artificial Sequence
  Description of Artificial Sequence: Synthetic oligonucleotide
ccucgcauuaccauacaca

SEQ ID NO: 2600925 - RNA, 19 nt, Artificial Sequence
  Description of Artificial Sequence: Synthetic oligonucleotide
gccacuaacaagguggcaa

SEQ ID NO: 2600926 - RNA, 19 nt, Artificial Sequence
  Description of Artificial Sequence: Synthetic oligonucleotide
uguggacccuucccacaaa

SEQ ID NO: 2600927 - RNA, 19 nt, Artificial Sequence
  Description of Artificial Sequence: Synthetic oligonucleotide
caaguuugcugaggccaag

SEQ ID NO: 2600928 - RNA, 19 nt, Artificial Sequence
  Description of Artificial Sequence: Synthetic oligonucleotide
agaaagggcucacgccuua

SEQ ID NO: 2600929 - RNA, 19 nt, Artificial Sequence
  Description of Artificial Sequence: Synthetic oligonucleotide
gcuccugaugagugugagg

SEQ ID NO: 2600930 - RNA, 19 nt, Artificial Sequence
  Description of Artificial Sequence: Synthetic oligonucleotide
caugugcacacacggaagu

SEQ ID NO: 2600931 - RNA, 19 nt, Artificial Sequence
  Description of Artificial Sequence: Synthetic oligonucleotide
ccaagcacaugaguucucc

SEQ ID NO: 2600932 - RNA, 19 nt, Artificial Sequence
  Description of Artificial Sequence: Synthetic oligonucleotide
ggccaccgcaaucuguuug

SEQ ID NO: 2600933 - RNA, 19 nt, Artificial Sequence
  Description of Artificial Sequence: Synthetic oligonucleotide
gagacagauaacgccggua

SEQ ID NO: 2600934 - RNA, 19 nt, Artificial Sequence
  Description of Artificial Sequence: Synthetic oligonucleotide
cgcucuugaacuuguaguc

SEQ ID NO: 2600935 - RNA, 19 nt, Artificial Sequence
  Description of Artificial Sequence: Synthetic oligonucleotide
ggaaccaggugauguucac

SEQ ID NO: 2600936 - RNA, 19 nt, Artificial Sequence
  Description of Artificial Sequence: Synthetic oligonucleotide
accuauacucuuggcaguu

SEQ ID NO: 2600937 - RNA, 19 nt, Artificial Sequence
  Description of Artificial Sequence: Synthetic oligonucleotide
ucuguuuggugaggcgcuc

SEQ ID NO: 2600938 - RNA, 19 nt, Artificial Sequence
  Description of Artificial Sequence: Synthetic oligonucleotide
gggaaccugaauggcagug

SEQ ID NO: 2600939 - RNA, 19 nt, Artificial Sequence
  Description of Artificial Sequence: Synthetic oligonucleotide
accaagcacaugaguucuc

SEQ ID NO: 2600940 - RNA, 19 nt, Artificial Sequence
  Description of Artificial Sequence: Synthetic oligonucleotide
ccaauguggacccuuccca

SEQ ID NO: 2600941 - RNA, 19 nt, Artificial Sequence
  Description of Artificial Sequence: Synthetic oligonucleotide
ucacagucuugcuguucau

SEQ ID NO: 2600942 - RNA, 19 nt, Artificial Sequence
  Description of Artificial Sequence: Synthetic oligonucleotide
acgccgguagcaguggggu

SEQ ID NO: 2600943 - RNA, 19 nt, Artificial Sequence
  Description of Artificial Sequence: Synthetic oligonucleotide
auggccaccgcaaucuguu

SEQ ID NO: 2600944 - RNA, 19 nt, Artificial Sequence
  Description of Artificial Sequence: Synthetic oligonucleotide
uuucugcaccccucgcauu

SEQ ID NO: 2600945 - RNA, 19 nt, Artificial Sequence
  Description of Artificial Sequence: Synthetic oligonucleotide
gucuucuacuauagauuuc

SEQ ID NO: 2600946 - RNA, 19 nt, Artificial Sequence
  Description of Artificial Sequence: Synthetic oligonucleotide
cauguggaugaccuauacu

SEQ ID NO: 2600947 - RNA, 19 nt, Artificial Sequence
  Description of Artificial Sequence: Synthetic oligonucleotide
ccauguggaugaccuauac

SEQ ID NO: 2600948 - RNA, 19 nt, Artificial Sequence
  Description of Artificial Sequence: Synthetic oligonucleotide
acauugccacuaacaaggu

SEQ ID NO: 2600949 - RNA, 19 nt, Artificial Sequence
  Description of Artificial Sequence: Synthetic oligonucleotide
cugcaccccucgcauuacc

SEQ ID NO: 2600950 - RNA, 19 nt, Artificial Sequence
  Description of Artificial Sequence: Synthetic oligonucleotide
gcacacacggaaguucagc

SEQ ID NO: 2600951 - RNA, 19 nt, Artificial Sequence
  Description of Artificial Sequence: Synthetic oligonucleotide
cucuugaacuuguagucuu

SEQ ID NO: 2600952 - RNA, 19 nt, Artificial Sequence
  Description of Artificial Sequence: Synthetic oligonucleotide
gucuuugggucuucccgaa

SEQ ID NO: 2600953 - RNA, 19 nt, Artificial Sequence
  Description of Artificial Sequence: Synthetic oligonucleotide
gcaaaccaggucaugugca

SEQ ID NO: 2600954 - RNA, 19 nt, Artificial Sequence
  Description of Artificial Sequence: Synthetic oligonucleotide
ccaggucaugugcacacac

SEQ ID NO: 2600955 - RNA, 19 nt, Artificial Sequence
  Description of Artificial Sequence: Synthetic oligonucleotide
guggaugaccuauacucuu

SEQ ID NO: 2600956 - RNA, 19 nt, Artificial Sequence
  Description of Artificial Sequence: Synthetic oligonucleotide
ucugcaccccucgcauuac

SEQ ID NO: 2600957 - RNA, 19 nt, Artificial Sequence
  Description of Artificial Sequence: Synthetic oligonucleotide
cuucuacuauagauuucua

SEQ ID NO: 2600958 - RNA, 19 nt, Artificial Sequence
  Description of Artificial Sequence: Synthetic oligonucleotide
ugccacuaacaagguggca

SEQ ID NO: 2600959 - RNA, 19 nt, Artificial Sequence
  Description of Artificial Sequence: Synthetic oligonucleotide
cuugaacuuguagucuucu

SEQ ID NO: 2600960 - RNA, 19 nt, Artificial Sequence
  Description of Artificial Sequence: Synthetic oligonucleotide
gaauggcagugguccaugu

SEQ ID NO: 2600961 - RNA, 19 nt, Artificial Sequence
  Description of Artificial Sequence: Synthetic oligonucleotide
gcgcucuugaacuuguagu

SEQ ID NO: 2600962 - RNA, 19 nt, Artificial Sequence
  Description of Artificial Sequence: Synthetic oligonucleotide
guguguugcuucaaucacu

SEQ ID NO: 2600963 - RNA, 19 nt, Artificial Sequence
  Description of Artificial Sequence: Synthetic oligonucleotide
ccgcaaucuguuuggugag

SEQ ID NO: 2600964 - RNA, 19 nt, Artificial Sequence
  Description of Artificial Sequence: Synthetic oligonucleotide
cacuuuagacauugccacu

SEQ ID NO: 2600965 - RNA, 19 nt, Artificial Sequence
  Description of Artificial Sequence: Synthetic oligonucleotide
guccauguggaugaccuau

SEQ ID NO: 2600966 - RNA, 19 nt, Artificial Sequence
  Description of Artificial Sequence: Synthetic oligonucleotide
ccuggcaaguuugcugagg

SEQ ID NO: 2600967 - RNA, 19 nt, Artificial Sequence
  Description of Artificial Sequence: Synthetic oligonucleotide
augugcacacacggaaguu

SEQ ID NO: 2600968 - RNA, 19 nt, Artificial Sequence
  Description of Artificial Sequence: Synthetic oligonucleotide
ugcugaggccaaggacuug

SEQ ID NO: 2600969 - RNA, 19 nt, Artificial Sequence
  Description of Artificial Sequence: Synthetic oligonucleotide
caguggggucugcaaacca

SEQ ID NO: 2600970 - RNA, 19 nt, Artificial Sequence
  Description of Artificial Sequence: Synthetic oligonucleotide
cuacaauccuggcaaguuu

SEQ ID NO: 2600971 - RNA, 19 nt, Artificial Sequence
  Description of Artificial Sequence: Synthetic oligonucleotide
gaaagggcucacgccuuaa

SEQ ID NO: 2600972 - RNA, 19 nt, Artificial Sequence
  Description of Artificial Sequence: Synthetic oligonucleotide
cacuaacaagguggcaaga

SEQ ID NO: 2600973 - RNA, 19 nt, Artificial Sequence
  Description of Artificial Sequence: Synthetic oligonucleotide
accaggucaugugcacaca

SEQ ID NO: 2600974 - RNA, 19 nt, Artificial Sequence
  Description of Artificial Sequence: Synthetic oligonucleotide
ccagcauggugcuggucac

SEQ ID NO: 2600975 - RNA, 19 nt, Artificial Sequence
  Description of Artificial Sequence: Synthetic oligonucleotide
gcaguggggucugcaaacc

SEQ ID NO: 2600976 - RNA, 19 nt, Artificial Sequence
  Description of Artificial Sequence: Synthetic oligonucleotide
acacggaaguucagcuccu

SEQ ID NO: 2600977 - RNA, 19 nt, Artificial Sequence
  Description of Artificial Sequence: Synthetic oligonucleotide
guaaccaauguggacccuu

SEQ ID NO: 2600978 - RNA, 19 nt, Artificial Sequence
  Description of Artificial Sequence: Synthetic oligonucleotide
caagcacaugaguucuccu

SEQ ID NO: 2600979 - RNA, 19 nt, Artificial Sequence
  Description of Artificial Sequence: Synthetic oligonucleotide
caccccucgcauuaccaua

SEQ ID NO: 2600980 - RNA, 19 nt, Artificial Sequence
  Description of Artificial Sequence: Synthetic oligonucleotide
ggucaugugcacacacgga

SEQ ID NO: 2600981 - RNA, 19 nt, Artificial Sequence
  Description of Artificial Sequence: Synthetic oligonucleotide
cacggaaguucagcuccug

SEQ ID NO: 2600982 - RNA, 19 nt, Artificial Sequence
  Description of Artificial Sequence: Synthetic oligonucleotide
accccaacgccagcaggcu

SEQ ID NO: 2600983 - RNA, 19 nt, Artificial Sequence
  Description of Artificial Sequence: Synthetic oligonucleotide
cgagucuuugggucuuccc

SEQ ID NO: 2600984 - RNA, 19 nt, Artificial Sequence
  Description of Artificial Sequence: Synthetic oligonucleotide
cccuucccacaaauggaac

SEQ ID NO: 2600985 - RNA, 19 nt, Artificial Sequence
  Description of Artificial Sequence: Synthetic oligonucleotide
cauacacauguguguugcu

SEQ ID NO: 2600986 - RNA, 19 nt, Artificial Sequence
  Description of Artificial Sequence: Synthetic oligonucleotide
cagcuccugaugaguguga

SEQ ID NO: 2600987 - RNA, 19 nt, Artificial Sequence
  Description of Artificial Sequence: Synthetic oligonucleotide
cccucgcauuaccauacac

SEQ ID NO: 2600988 - RNA, 19 nt, Artificial Sequence
  Description of Artificial Sequence: Synthetic oligonucleotide
cccacaaauggaaccaggu

SEQ ID NO: 2600989 - RNA, 19 nt, Artificial Sequence
  Description of Artificial Sequence: Synthetic oligonucleotide
ccaggugauguucacacau

SEQ ID NO: 2600990 - RNA, 19 nt, Artificial Sequence
  Description of Artificial Sequence: Synthetic oligonucleotide
uggccaccgcaaucuguuu

SEQ ID NO: 2600991 - RNA, 19 nt, Artificial Sequence
  Description of Artificial Sequence: Synthetic oligonucleotide
gaggcgcucuugaacuugu

SEQ ID NO: 2600992 - RNA, 19 nt, Artificial Sequence
  Description of Artificial Sequence: Synthetic oligonucleotide
gcaaguuugcugaggccaa

SEQ ID NO: 2600993 - RNA, 19 nt, Artificial Sequence
  Description of Artificial Sequence: Synthetic oligonucleotide
ccuuuacaaucaccaucuc

SEQ ID NO: 2600994 - RNA, 19 nt, Artificial Sequence
  Description of Artificial Sequence: Synthetic oligonucleotide
ccucaucaaauaauagcau

SEQ ID NO: 2600995 - RNA, 19 nt, Artificial Sequence
  Description of Artificial Sequence: Synthetic oligonucleotide
caauccuggcaaguuugcu

SEQ ID NO: 2600996 - RNA, 19 nt, Artificial Sequence
  Description of Artificial Sequence: Synthetic oligonucleotide
cacauguguguugcuucaa

SEQ ID NO: 2600997 - RNA, 19 nt, Artificial Sequence
  Description of Artificial Sequence: Synthetic oligonucleotide
cgcaaucuguuuggugagg

SEQ ID NO: 2600998 - RNA, 19 nt, Artificial Sequence
  Description of Artificial Sequence: Synthetic oligonucleotide
ccuauacucuuggcaguuc

SEQ ID NO: 2600999 - RNA, 19 nt, Artificial Sequence
  Description of Artificial Sequence: Synthetic oligonucleotide
ggcuucugugauggccacc

SEQ ID NO: 2601000 - RNA, 19 nt, Artificial Sequence
  Description of Artificial Sequence: Synthetic oligonucleotide
gcaggcugcaaggcuucug

SEQ ID NO: 2601001 - RNA, 19 nt, Artificial Sequence
  Description of Artificial Sequence: Synthetic oligonucleotide
cagaaagggcucacgccuu

SEQ ID NO: 2601002 - RNA, 19 nt, Artificial Sequence
  Description of Artificial Sequence: Synthetic oligonucleotide
gaacucuucccgagucuuu

SEQ ID NO: 2601003 - RNA, 19 nt, Artificial Sequence
  Description of Artificial Sequence: Synthetic oligonucleotide
gccgguagcaguggggucu

SEQ ID NO: 2601004 - RNA, 19 nt, Artificial Sequence
  Description of Artificial Sequence: Synthetic oligonucleotide
cucacgccuuaauuacuuu

SEQ ID NO: 2601005 - RNA, 19 nt, Artificial Sequence
  Description of Artificial Sequence: Synthetic oligonucleotide
ccgagucuuugggucuucc

SEQ ID NO: 2601006 - RNA, 19 nt, Artificial Sequence
  Description of Artificial Sequence: Synthetic oligonucleotide
cagcauggugcuggucaca

SEQ ID NO: 2601007 - RNA, 19 nt, Artificial Sequence
  Description of Artificial Sequence: Synthetic oligonucleotide
cugugauggccaccgcaau

SEQ ID NO: 2601008 - RNA, 19 nt, Artificial Sequence
  Description of Artificial Sequence: Synthetic oligonucleotide
cacagucuugcuguucauu

SEQ ID NO: 2601009 - RNA, 19 nt, Artificial Sequence
  Description of Artificial Sequence: Synthetic oligonucleotide
cuguuuggugaggcgcucu

SEQ ID NO: 2601010 - RNA, 19 nt, Artificial Sequence
  Description of Artificial Sequence: Synthetic oligonucleotide
gugaggcgcucuugaacuu

SEQ ID NO: 2601011 - RNA, 19 nt, Artificial Sequence
  Description of Artificial Sequence: Synthetic oligonucleotide
ccccaacgccagcaggcug

SEQ ID NO: 2601012 - RNA, 19 nt, Artificial Sequence
  Description of Artificial Sequence: Synthetic oligonucleotide
ggggaaccugaauggcagu

SEQ ID NO: 2601013 - RNA, 19 nt, Artificial Sequence
  Description of Artificial Sequence: Synthetic oligonucleotide
ccucgucgacagcacccug

SEQ ID NO: 2601014 - RNA, 19 nt, Artificial Sequence
  Description of Artificial Sequence: Synthetic oligonucleotide
cgucgacagcacccugggg

SEQ ID NO: 2601015 - RNA, 19 nt, Artificial Sequence
  Description of Artificial Sequence: Synthetic oligonucleotide
gcaccccucgcauuaccau

SEQ ID NO: 2601016 - RNA, 19 nt, Artificial Sequence
  Description of Artificial Sequence: Synthetic oligonucleotide
cggaaguucagcuccugau

SEQ ID NO: 2601017 - RNA, 19 nt, Artificial Sequence
  Description of Artificial Sequence: Synthetic oligonucleotide
ggucugcaaaccaggucau

SEQ ID NO: 2601018 - RNA, 19 nt, Artificial Sequence
  Description of Artificial Sequence: Synthetic oligonucleotide
ccgguagcaguggggucug

SEQ ID NO: 2601019 - RNA, 19 nt, Artificial Sequence
  Description of Artificial Sequence: Synthetic oligonucleotide
gguaaccaauguggacccu

SEQ ID NO: 2601020 - RNA, 19 nt, Artificial Sequence
  Description of Artificial Sequence: Synthetic oligonucleotide
cgccagcaggcugcaaggc

SEQ ID NO: 2601021 - RNA, 19 nt, Artificial Sequence
  Description of Artificial Sequence: Synthetic oligonucleotide
cgccuuaauuacuuuuauu

SEQ ID NO: 2601022 - RNA, 19 nt, Artificial Sequence
  Description of Artificial Sequence: Synthetic oligonucleotide
ccccucgcauuaccauaca

SEQ ID NO: 2601023 - RNA, 19 nt, Artificial Sequence
  Description of Artificial Sequence: Synthetic oligonucleotide
ccaacgccagcaggcugca

SEQ ID NO: 2601024 - RNA, 19 nt, Artificial Sequence
  Description of Artificial Sequence: Synthetic oligonucleotide
cgccgguagcagugggguc

SEQ ID NO: 2601025 - RNA, 19 nt, Artificial Sequence
  Description of Artificial Sequence: Synthetic oligonucleotide
cccgagucuuugggucuuc

SEQ ID NO: 2601026 - RNA, 19 nt, Artificial Sequence
  Description of Artificial Sequence: Synthetic oligonucleotide
gcaguucacuuuagacauu

SEQ ID NO: 2601027 - RNA, 19 nt, Artificial Sequence
  Description of Artificial Sequence: Synthetic oligonucleotide
caacgccagcaggcugcaa

SEQ ID NO: 2601028 - RNA, 19 nt, Artificial Sequence
  Description of Artificial Sequence: Synthetic oligonucleotide
ccaccgcaaucuguuuggu

SEQ ID NO: 2601029 - RNA, 19 nt, Artificial Sequence
  Description of Artificial Sequence: Synthetic oligonucleotide
ggccaaggacuugcuuguu

SEQ ID NO: 2601030 - RNA, 19 nt, Artificial Sequence
  Description of Artificial Sequence: Synthetic oligonucleotide
cgguagcaguggggucugc

SEQ ID NO: 2601031 - RNA, 19 nt, Artificial Sequence
  Description of Artificial Sequence: Synthetic oligonucleotide
uuugaauuuucuuugaucg

SEQ ID NO: 2601032 - RNA, 19 nt, Artificial Sequence
  Description of Artificial Sequence: Synthetic oligonucleotide
uaauauuucuuccuccucg

SEQ ID NO: 2601033 - RNA, 19 nt, Artificial Sequence
  Description of Artificial Sequence: Synthetic oligonucleotide
uagacaacgucaaugaucc

SEQ ID NO: 2601034 - RNA, 19 nt, Artificial Sequence
  Description of Artificial Sequence: Synthetic oligonucleotide
gaguacagcacucagagcc

SEQ ID NO: 2601035 - RNA, 19 nt, Artificial Sequence
  Description of Artificial Sequence: Synthetic oligonucleotide
acaauaaacaccuuuauua

SEQ ID NO: 2601036 - RNA, 19 nt, Artificial Sequence
  Description of Artificial Sequence: Synthetic oligonucleotide
uaugaaugaguuuauuugc

SEQ ID NO: 2601037 - RNA, 19 nt, Artificial Sequence
  Description of Artificial Sequence: Synthetic oligonucleotide
aauauuucuuccuccucgg

SEQ ID NO: 2601038 - RNA, 19 nt, Artificial Sequence
  Description of Artificial Sequence: Synthetic oligonucleotide
aaugcaguucuucaccagg

SEQ ID NO: 2601039 - RNA, 19 nt, Artificial Sequence
  Description of Artificial Sequence: Synthetic oligonucleotide
uauuacaugagcuaugaau

SEQ ID NO: 2601040 - RNA, 19 nt, Artificial Sequence
  Description of Artificial Sequence: Synthetic oligonucleotide
uuugaucuuccucagguag

SEQ ID NO: 2601041 - RNA, 19 nt, Artificial Sequence
  Description of Artificial Sequence: Synthetic oligonucleotide
ucgaguacagcacucagag

SEQ ID NO: 2601042 - RNA, 19 nt, Artificial Sequence
  Description of Artificial Sequence: Synthetic oligonucleotide
aaguuucccacguccaacc

SEQ ID NO: 2601043 - RNA, 19 nt, Artificial Sequence
  Description of Artificial Sequence: Synthetic oligonucleotide
aguuuauuugccuuuccgg

SEQ ID NO: 2601044 - RNA, 19 nt, Artificial Sequence
  Description of Artificial Sequence: Synthetic oligonucleotide
guuuauuugccuuuccggg

SEQ ID NO: 2601045 - RNA, 19 nt, Artificial Sequence
  Description of Artificial Sequence: Synthetic oligonucleotide
ugcauuguagacaacguca

SEQ ID NO: 2601046 - RNA, 19 nt, Artificial Sequence
  Description of Artificial Sequence: Synthetic oligonucleotide
acaccuuuauuacaugagc

SEQ ID NO: 2601047 - RNA, 19 nt, Artificial Sequence
  Description of Artificial Sequence: Synthetic oligonucleotide
uauuucuuccuccucgggg

SEQ ID NO: 2601048 - RNA, 19 nt, Artificial Sequence
  Description of Artificial Sequence: Synthetic oligonucleotide
aauacaggcaagaagcuug

SEQ ID NO: 2601049 - RNA, 19 nt, Artificial Sequence
  Description of Artificial Sequence: Synthetic oligonucleotide
uuuaauauuucuuccuccu

SEQ ID NO: 2601050 - RNA, 19 nt, Artificial Sequence
  Description of Artificial Sequence: Synthetic oligonucleotide
auuacaugagcuaugaaug

SEQ ID NO: 2601051 - RNA, 19 nt, Artificial Sequence
  Description of Artificial Sequence: Synthetic oligonucleotide
acuggccuggucuugaggc

SEQ ID NO: 2601052 - RNA, 19 nt, Artificial Sequence
  Description of Artificial Sequence: Synthetic oligonucleotide
aagaagcuugcccugcugg

SEQ ID NO: 2601053 - RNA, 19 nt, Artificial Sequence
  Description of Artificial Sequence: Synthetic oligonucleotide
gaagcgcaaagcuucacgg

SEQ ID NO: 2601054 - RNA, 19 nt, Artificial Sequence
  Description of Artificial Sequence: Synthetic oligonucleotide
ugagcuaugaaugaguuua

SEQ ID NO: 2601055 - RNA, 19 nt, Artificial Sequence
  Description of Artificial Sequence: Synthetic oligonucleotide
aaacaccuuuauuacauga

SEQ ID NO: 2601056 - RNA, 19 nt, Artificial Sequence
  Description of Artificial Sequence: Synthetic oligonucleotide
caauaaacaccuuuauuac

SEQ ID NO: 2601057 - RNA, 19 nt, Artificial Sequence
  Description of Artificial Sequence: Synthetic oligonucleotide
uguguauacgacgaggacc

SEQ ID NO: 2601058 - RNA, 19 nt, Artificial Sequence
  Description of Artificial Sequence: Synthetic oligonucleotide
gaguuuauuugccuuuccg

SEQ ID NO: 2601059 - RNA, 19 nt, Artificial Sequence
  Description of Artificial Sequence: Synthetic oligonucleotide
uguuuaauauuucuuccuc

SEQ ID NO: 2601060 - RNA, 19 nt, Artificial Sequence
  Description of Artificial Sequence: Synthetic oligonucleotide
uuuugaauuuucuuugauc

SEQ ID NO: 2601061 - RNA, 19 nt, Artificial Sequence
  Description of Artificial Sequence: Synthetic oligonucleotide
uuuauuacaugagcuauga

SEQ ID NO: 2601062 - RNA, 19 nt, Artificial Sequence
  Description of Artificial Sequence: Synthetic oligonucleotide
uuguagacaacgucaauga

SEQ ID NO: 2601063 - RNA, 19 nt, Artificial Sequence
  Description of Artificial Sequence: Synthetic oligonucleotide
cugucgaugagcacaaugc

SEQ ID NO: 2601064 - RNA, 19 nt, Artificial Sequence
  Description of Artificial Sequence: Synthetic oligonucleotide
uguguguauacgacgagga

SEQ ID NO: 2601065 - RNA, 19 nt, Artificial Sequence
  Description of Artificial Sequence: Synthetic oligonucleotide
uuuauuugccuuuccgggc

SEQ ID NO: 2601066 - RNA, 19 nt, Artificial Sequence
  Description of Artificial Sequence: Synthetic oligonucleotide
aaaguuucccacguccaac

SEQ ID NO: 2601067 - RNA, 19 nt, Artificial Sequence
  Description of Artificial Sequence: Synthetic oligonucleotide
cuugccuucuagcacauag

SEQ ID NO: 2601068 - RNA, 19 nt, Artificial Sequence
  Description of Artificial Sequence: Synthetic oligonucleotide
uauacgacgaggaccaauc

SEQ ID NO: 2601069 - RNA, 19 nt, Artificial Sequence
  Description of Artificial Sequence: Synthetic oligonucleotide
augaaugaguuuauuugcc

SEQ ID NO: 2601070 - RNA, 19 nt, Artificial Sequence
  Description of Artificial Sequence: Synthetic oligonucleotide
uagaacaauaaacaccuuu

SEQ ID NO: 2601071 - RNA, 19 nt, Artificial Sequence
  Description of Artificial Sequence: Synthetic oligonucleotide
uuguuuaauauuucuuccu

SEQ ID NO: 2601072 - RNA, 19 nt, Artificial Sequence
  Description of Artificial Sequence: Synthetic oligonucleotide
uuauuggaugcauuguaga

SEQ ID NO: 2601073 - RNA, 19 nt, Artificial Sequence
  Description of Artificial Sequence: Synthetic oligonucleotide
uauuggaugcauuguagac

SEQ ID NO: 2601074 - RNA, 19 nt, Artificial Sequence
  Description of Artificial Sequence: Synthetic oligonucleotide
cuuggugcggaccaacucg

SEQ ID NO: 2601075 - RNA, 19 nt, Artificial Sequence
  Description of Artificial Sequence: Synthetic oligonucleotide
auagccaucugcucugccg

SEQ ID NO: 2601076 - RNA, 19 nt, Artificial Sequence
  Description of Artificial Sequence: Synthetic oligonucleotide
ugccuucuagcacauagcc

SEQ ID NO: 2601077 - RNA, 19 nt, Artificial Sequence
  Description of Artificial Sequence: Synthetic oligonucleotide
ucauauuucuuuugaauuu

SEQ ID NO: 2601078 - RNA, 19 nt, Artificial Sequence
  Description of Artificial Sequence: Synthetic oligonucleotide
aaggcugcugauuuuggca

SEQ ID NO: 2601079 - RNA, 19 nt, Artificial Sequence
  Description of Artificial Sequence: Synthetic oligonucleotide
ugugcugucgaugagcaca

SEQ ID NO: 2601080 - RNA, 19 nt, Artificial Sequence
  Description of Artificial Sequence: Synthetic oligonucleotide
aucuuccucagguagaacu

SEQ ID NO: 2601081 - RNA, 19 nt, Artificial Sequence
  Description of Artificial Sequence: Synthetic oligonucleotide
uuggaugcauuguagacaa

SEQ ID NO: 2601082 - RNA, 19 nt, Artificial Sequence
  Description of Artificial Sequence: Synthetic oligonucleotide
agaggaagcgcaaagcuuc

SEQ ID NO: 2601083 - RNA, 19 nt, Artificial Sequence
  Description of Artificial Sequence: Synthetic oligonucleotide
aagcuugcccugcuggaac

SEQ ID NO: 2601084 - RNA, 19 nt, Artificial Sequence
  Description of Artificial Sequence: Synthetic oligonucleotide
aacaccuuuauuacaugag

SEQ ID NO: 2601085 - RNA, 19 nt, Artificial Sequence
  Description of Artificial Sequence: Synthetic oligonucleotide
ugcauagugggacucguac

SEQ ID NO: 2601086 - RNA, 19 nt, Artificial Sequence
  Description of Artificial Sequence: Synthetic oligonucleotide
uuauuugccuuuccgggcu

SEQ ID NO: 2601087 - RNA, 19 nt, Artificial Sequence
  Description of Artificial Sequence: Synthetic oligonucleotide
agcgcaaagcuucacgguc

SEQ ID NO: 2601088 - RNA, 19 nt, Artificial Sequence
  Description of Artificial Sequence: Synthetic oligonucleotide
cucguuauuggaugcauug

SEQ ID NO: 2601089 - RNA, 19 nt, Artificial Sequence
  Description of Artificial Sequence: Synthetic oligonucleotide
cauacuuccgcuucuugug

SEQ ID NO: 2601090 - RNA, 19 nt, Artificial Sequence
  Description of Artificial Sequence: Synthetic oligonucleotide
ugaaugaguuuauuugccu

SEQ ID NO: 2601091 - RNA, 19 nt, Artificial Sequence
  Description of Artificial Sequence: Synthetic oligonucleotide
augcauuguagacaacguc

SEQ ID NO: 2601092 - RNA, 19 nt, Artificial Sequence
  Description of Artificial Sequence: Synthetic oligonucleotide
uuacaugagcuaugaauga

SEQ ID NO: 2601093 - RNA, 19 nt, Artificial Sequence
  Description of Artificial Sequence: Synthetic oligonucleotide
cacgguacuucuuauugcc

SEQ ID NO: 2601094 - RNA, 19 nt, Artificial Sequence
  Description of Artificial Sequence: Synthetic oligonucleotide
ggaaaaguuucccacgucc

SEQ ID NO: 2601095 - RNA, 19 nt, Artificial Sequence
  Description of Artificial Sequence: Synthetic oligonucleotide
gagagaugcccaucgcucg

SEQ ID NO: 2601096 - RNA, 19 nt, Artificial Sequence
  Description of Artificial Sequence: Synthetic oligonucleotide
cuuuauuacaugagcuaug

SEQ ID NO: 2601097 - RNA, 19 nt, Artificial Sequence
  Description of Artificial Sequence: Synthetic oligonucleotide
ucauacuuccgcuucuugu

SEQ ID NO: 2601098 - RNA, 19 nt, Artificial Sequence
  Description of Artificial Sequence: Synthetic oligonucleotide
gucuugaggcaauacaggc

SEQ ID NO: 2601099 - RNA, 19 nt, Artificial Sequence
  Description of Artificial Sequence: Synthetic oligonucleotide
aggggcagugcauaguggg

SEQ ID NO: 2601100 - RNA, 19 nt, Artificial Sequence
  Description of Artificial Sequence: Synthetic oligonucleotide
uuucgaguacagcacucag

SEQ ID NO: 2601101 - RNA, 19 nt, Artificial Sequence
  Description of Artificial Sequence: Synthetic oligonucleotide
uagcacauagccaucugcu

SEQ ID NO: 2601102 - RNA, 19 nt, Artificial Sequence
  Description of Artificial Sequence: Synthetic oligonucleotide
guuauuggaugcauuguag

SEQ ID NO: 2601103 - RNA, 19 nt, Artificial Sequence
  Description of Artificial Sequence: Synthetic oligonucleotide
accaacucguuauuggaug

SEQ ID NO: 2601104 - RNA, 19 nt, Artificial Sequence
  Description of Artificial Sequence: Synthetic oligonucleotide
uuaauauuucuuccuccuc

SEQ ID NO: 2601105 - RNA, 19 nt, Artificial Sequence
  Description of Artificial Sequence: Synthetic oligonucleotide
aaaaguuucccacguccaa

SEQ ID NO: 2601106 - RNA, 19 nt, Artificial Sequence
  Description of Artificial Sequence: Synthetic oligonucleotide
ucuucguguuggcagcagg

SEQ ID NO: 2601107 - RNA, 19 nt, Artificial Sequence
  Description of Artificial Sequence: Synthetic oligonucleotide
agcacaaugcaguucuuca

SEQ ID NO: 2601108 - RNA, 19 nt, Artificial Sequence
  Description of Artificial Sequence: Synthetic oligonucleotide
acgaggaccaaucuucgug

SEQ ID NO: 2601109 - RNA, 19 nt, Artificial Sequence
  Description of Artificial Sequence: Synthetic oligonucleotide
acgucaaugauccuuguuu

SEQ ID NO: 2601110 - RNA, 19 nt, Artificial Sequence
  Description of Artificial Sequence: Synthetic oligonucleotide
uacaugagcuaugaaugag

SEQ ID NO: 2601111 - RNA, 19 nt, Artificial Sequence
  Description of Artificial Sequence: Synthetic oligonucleotide
acgacgaggaccaaucuuc

SEQ ID NO: 2601112 - RNA, 19 nt, Artificial Sequence
  Description of Artificial Sequence: Synthetic oligonucleotide
ucucaucauauuucuuuug

SEQ ID NO: 2601113 - RNA, 19 nt, Artificial Sequence
  Description of Artificial Sequence: Synthetic oligonucleotide
ugaguuuauuugccuuucc

SEQ ID NO: 2601114 - RNA, 19 nt, Artificial Sequence
  Description of Artificial Sequence: Synthetic oligonucleotide
ucaucauauuucuuuugaa

SEQ ID NO: 2601115 - RNA, 19 nt, Artificial Sequence
  Description of Artificial Sequence: Synthetic oligonucleotide
ugcucugccgcacuggccu

SEQ ID NO: 2601116 - RNA, 19 nt, Artificial Sequence
  Description of Artificial Sequence: Synthetic oligonucleotide
uacggugugcugucgauga

SEQ ID NO: 2601117 - RNA, 19 nt, Artificial Sequence
  Description of Artificial Sequence: Synthetic oligonucleotide
uucgaguacagcacucaga

SEQ ID NO: 2601118 - RNA, 19 nt, Artificial Sequence
  Description of Artificial Sequence: Synthetic oligonucleotide
guagacaacgucaaugauc

SEQ ID NO: 2601119 - RNA, 19 nt, Artificial Sequence
  Description of Artificial Sequence: Synthetic oligonucleotide
caaucuucguguuggcagc

SEQ ID NO: 2601120 - RNA, 19 nt, Artificial Sequence
  Description of Artificial Sequence: Synthetic oligonucleotide
auauuucuuccuccucggg

SEQ ID NO: 2601121 - RNA, 19 nt, Artificial Sequence
  Description of Artificial Sequence: Synthetic oligonucleotide
uagccaucugcucugccgc

SEQ ID NO: 2601122 - RNA, 19 nt, Artificial Sequence
  Description of Artificial Sequence: Synthetic oligonucleotide
uccagaaggcugcugauuu

SEQ ID NO: 2601123 - RNA, 19 nt, Artificial Sequence
  Description of Artificial Sequence: Synthetic oligonucleotide
ugggacucguaccacugcc

SEQ ID NO: 2601124 - RNA, 19 nt, Artificial Sequence
  Description of Artificial Sequence: Synthetic oligonucleotide
ucggacuguguguauacga

SEQ ID NO: 2601125 - RNA, 19 nt, Artificial Sequence
  Description of Artificial Sequence: Synthetic oligonucleotide
caaccuuagggcacgguac

SEQ ID NO: 2601126 - RNA, 19 nt, Artificial Sequence
  Description of Artificial Sequence: Synthetic oligonucleotide
cuugaggcaauacaggcaa

SEQ ID NO: 2601127 - RNA, 19 nt, Artificial Sequence
  Description of Artificial Sequence: Synthetic oligonucleotide
uugccuucuagcacauagc

SEQ ID NO: 2601128 - RNA, 19 nt, Artificial Sequence
  Description of Artificial Sequence: Synthetic oligonucleotide
uuuucgaguacagcacuca

SEQ ID NO: 2601129 - RNA, 19 nt, Artificial Sequence
  Description of Artificial Sequence: Synthetic oligonucleotide
uugugguagggcuuucucu

SEQ ID NO: 2601130 - RNA, 19 nt, Artificial Sequence
  Description of Artificial Sequence: Synthetic oligonucleotide
augaguuuauuugccuuuc

SEQ ID NO: 2601131 - RNA, 19 nt, Artificial Sequence
  Description of Artificial Sequence: Synthetic oligonucleotide
aggaaaaguuucccacguc

SEQ ID NO: 2601132 - RNA, 19 nt, Artificial Sequence
  Description of Artificial Sequence: Synthetic oligonucleotide
ugaggcaauacaggcaaga

SEQ ID NO: 2601133 - RNA, 19 nt, Artificial Sequence
  Description of Artificial Sequence: Synthetic oligonucleotide
agagaugcccaucgcucgg

SEQ ID NO: 2601134 - RNA, 19 nt, Artificial Sequence
  Description of Artificial Sequence: Synthetic oligonucleotide
cauagugggacucguacca

SEQ ID NO: 2601135 - RNA, 19 nt, Artificial Sequence
  Description of Artificial Sequence: Synthetic oligonucleotide
accuuuauuacaugagcua

SEQ ID NO: 2601136 - RNA, 19 nt, Artificial Sequence
  Description of Artificial Sequence: Synthetic oligonucleotide
cuguguguauacgacgagg

SEQ ID NO: 2601137 - RNA, 19 nt, Artificial Sequence
  Description of Artificial Sequence: Synthetic oligonucleotide
acaacgucaaugauccuug

SEQ ID NO: 2601138 - RNA, 19 nt, Artificial Sequence
  Description of Artificial Sequence: Synthetic oligonucleotide
cuuauugccuccucgaacu

SEQ ID NO: 2601139 - RNA, 19 nt, Artificial Sequence
  Description of Artificial Sequence: Synthetic oligonucleotide
caguugucccgagagaugc

SEQ ID NO: 2601140 - RNA, 19 nt, Artificial Sequence
  Description of Artificial Sequence: Synthetic oligonucleotide
auacaggcaagaagcuugc

SEQ ID NO: 2601141 - RNA, 19 nt, Artificial Sequence
  Description of Artificial Sequence: Synthetic oligonucleotide
agcuccuugccuucuagca

SEQ ID NO: 2601142 - RNA, 19 nt, Artificial Sequence
  Description of Artificial Sequence: Synthetic oligonucleotide
ggaccaaucuucguguugg

SEQ ID NO: 2601143 - RNA, 19 nt, Artificial Sequence
  Description of Artificial Sequence: Synthetic oligonucleotide
aagcgcaaagcuucacggu

SEQ ID NO: 2601144 - RNA, 19 nt, Artificial Sequence
  Description of Artificial Sequence: Synthetic oligonucleotide
uguagacaacgucaaugau

SEQ ID NO: 2601145 - RNA, 19 nt, Artificial Sequence
  Description of Artificial Sequence: Synthetic oligonucleotide
guguauacgacgaggacca

SEQ ID NO: 2601146 - RNA, 19 nt, Artificial Sequence
  Description of Artificial Sequence: Synthetic oligonucleotide
ccaaucuucguguuggcag

SEQ ID NO: 2601147 - RNA, 19 nt, Artificial Sequence
  Description of Artificial Sequence: Synthetic oligonucleotide
ggaagcgcaaagcuucacg

SEQ ID NO: 2601148 - RNA, 19 nt, Artificial Sequence
  Description of Artificial Sequence: Synthetic oligonucleotide
guagggcuuucucuuaccc

SEQ ID NO: 2601149 - RNA, 19 nt, Artificial Sequence
  Description of Artificial Sequence: Synthetic oligonucleotide
uucuuauugccuccucgaa

SEQ ID NO: 2601150 - RNA, 19 nt, Artificial Sequence
  Description of Artificial Sequence: Synthetic oligonucleotide
uagggcuuucucuuacccc

SEQ ID NO: 2601151 - RNA, 19 nt, Artificial Sequence
  Description of Artificial Sequence: Synthetic oligonucleotide
cccacguccaaccuuaggg

SEQ ID NO: 2601152 - RNA, 19 nt, Artificial Sequence
  Description of Artificial Sequence: Synthetic oligonucleotide
gaaaaguuucccacgucca

SEQ ID NO: 2601153 - RNA, 19 nt, Artificial Sequence
  Description of Artificial Sequence: Synthetic oligonucleotide
ucgaacucggacugugugu

SEQ ID NO: 2601154 - RNA, 19 nt, Artificial Sequence
  Description of Artificial Sequence: Synthetic oligonucleotide
ggacuguguguauacgacg

SEQ ID NO: 2601155 - RNA, 19 nt, Artificial Sequence
  Description of Artificial Sequence: Synthetic oligonucleotide
auugccuccucgaacucgg

SEQ ID NO: 2601156 - RNA, 19 nt, Artificial Sequence
  Description of Artificial Sequence: Synthetic oligonucleotide
gugccaguugucccgagag

SEQ ID NO: 2601157 - RNA, 19 nt, Artificial Sequence
  Description of Artificial Sequence: Synthetic oligonucleotide
acuguguguauacgacgag

SEQ ID NO: 2601158 - RNA, 19 nt, Artificial Sequence
  Description of Artificial Sequence: Synthetic oligonucleotide
gacuguguguauacgacga

SEQ ID NO: 2601159 - RNA, 19 nt, Artificial Sequence
  Description of Artificial Sequence: Synthetic oligonucleotide
uuauuacaugagcuaugaa

SEQ ID NO: 2601160 - RNA, 19 nt, Artificial Sequence
  Description of Artificial Sequence: Synthetic oligonucleotide
aggccgucccagcucauac

SEQ ID NO: 2601161 - RNA, 19 nt, Artificial Sequence
  Description of Artificial Sequence: Synthetic oligonucleotide
cuucuuauugccuccucga

SEQ ID NO: 2601162 - RNA, 19 nt, Artificial Sequence
  Description of Artificial Sequence: Synthetic oligonucleotide
agcacucagagccccagga

SEQ ID NO: 2601163 - RNA, 19 nt, Artificial Sequence
  Description of Artificial Sequence: Synthetic oligonucleotide
ucccagcucauacuuccgc

SEQ ID NO: 2601164 - RNA, 19 nt, Artificial Sequence
  Description of Artificial Sequence: Synthetic oligonucleotide
gguacuucuuauugccucc

SEQ ID NO: 2601165 - RNA, 19 nt, Artificial Sequence
  Description of Artificial Sequence: Synthetic oligonucleotide
aacgucaaugauccuuguu

SEQ ID NO: 2601166 - RNA, 19 nt, Artificial Sequence
  Description of Artificial Sequence: Synthetic oligonucleotide
ugccgcacuggccuggucu

SEQ ID NO: 2601167 - RNA, 19 nt, Artificial Sequence
  Description of Artificial Sequence: Synthetic oligonucleotide
uuccgcuucuugugguagg

SEQ ID NO: 2601168 - RNA, 19 nt, Artificial Sequence
  Description of Artificial Sequence: Synthetic oligonucleotide
uuggugcggaccaacucgu

SEQ ID NO: 2601169 - RNA, 19 nt, Artificial Sequence
  Description of Artificial Sequence: Synthetic oligonucleotide
cucgaacucggacugugug

SEQ ID NO: 2601170 - RNA, 19 nt, Artificial Sequence
  Description of Artificial Sequence: Synthetic oligonucleotide
uccgcuucuugugguaggg

SEQ ID NO: 2601171 - RNA, 19 nt, Artificial Sequence
  Description of Artificial Sequence: Synthetic oligonucleotide
ugcaguucuucaccagggu

SEQ ID NO: 2601172 - RNA, 19 nt, Artificial Sequence
  Description of Artificial Sequence: Synthetic oligonucleotide
uucuagcacauagccaucu

SEQ ID NO: 2601173 - RNA, 19 nt, Artificial Sequence
  Description of Artificial Sequence: Synthetic oligonucleotide
ugguagggcuuucucuuac

SEQ ID NO: 2601174 - RNA, 19 nt, Artificial Sequence
  Description of Artificial Sequence: Synthetic oligonucleotide
uacgacgaggaccaaucuu

SEQ ID NO: 2601175 - RNA, 19 nt, Artificial Sequence
  Description of Artificial Sequence: Synthetic oligonucleotide
ccaggaaaaguuucccacg

SEQ ID NO: 2601176 - RNA, 19 nt, Artificial Sequence
  Description of Artificial Sequence: Synthetic oligonucleotide
gcuugugccaguugucccg

SEQ ID NO: 2601177 - RNA, 19 nt, Artificial Sequence
  Description of Artificial Sequence: Synthetic oligonucleotide
aggaccaaucuucguguug

SEQ ID NO: 2601178 - RNA, 19 nt, Artificial Sequence
  Description of Artificial Sequence: Synthetic oligonucleotide
acaugagcuaugaaugagu

SEQ ID NO: 2601179 - RNA, 19 nt, Artificial Sequence
  Description of Artificial Sequence: Synthetic oligonucleotide
gaacaauaaacaccuuuau

SEQ ID NO: 2601180 - RNA, 19 nt, Artificial Sequence
  Description of Artificial Sequence: Synthetic oligonucleotide
caaugcaguucuucaccag

SEQ ID NO: 2601181 - RNA, 19 nt, Artificial Sequence
  Description of Artificial Sequence: Synthetic oligonucleotide
ugugccaguugucccgaga

SEQ ID NO: 2601182 - RNA, 19 nt, Artificial Sequence
  Description of Artificial Sequence: Synthetic oligonucleotide
ucccacguccaaccuuagg

SEQ ID NO: 2601183 - RNA, 19 nt, Artificial Sequence
  Description of Artificial Sequence: Synthetic oligonucleotide
uugaggcaauacaggcaag

SEQ ID NO: 2601184 - RNA, 19 nt, Artificial Sequence
  Description of Artificial Sequence: Synthetic oligonucleotide
aacucguuauuggaugcau

SEQ ID NO: 2601185 - RNA, 19 nt, Artificial Sequence
  Description of Artificial Sequence: Synthetic oligonucleotide
agccccaggaaaaguuucc

SEQ ID NO: 2601186 - RNA, 19 nt, Artificial Sequence
  Description of Artificial Sequence: Synthetic oligonucleotide
ucguuauuggaugcauugu

SEQ ID NO: 2601187 - RNA, 19 nt, Artificial Sequence
  Description of Artificial Sequence: Synthetic oligonucleotide
aagaggaagcgcaaagcuu

SEQ ID NO: 2601188 - RNA, 19 nt, Artificial Sequence
  Description of Artificial Sequence: Synthetic oligonucleotide
auagugggacucguaccac

SEQ ID NO: 2601189 - RNA, 19 nt, Artificial Sequence
  Description of Artificial Sequence: Synthetic oligonucleotide
cuugugguagggcuuucuc

SEQ ID NO: 2601190 - RNA, 19 nt, Artificial Sequence
  Description of Artificial Sequence: Synthetic oligonucleotide
guugucccgagagaugccc

SEQ ID NO: 2601191 - RNA, 19 nt, Artificial Sequence
  Description of Artificial Sequence: Synthetic oligonucleotide
agaugcccaucgcucggcg

SEQ ID NO: 2601192 - RNA, 19 nt, Artificial Sequence
  Description of Artificial Sequence: Synthetic oligonucleotide
cuccuugccuucuagcaca

SEQ ID NO: 2601193 - RNA, 19 nt, Artificial Sequence
  Description of Artificial Sequence: Synthetic oligonucleotide
gaaugaguuuauuugccuu

SEQ ID NO: 2601194 - RNA, 19 nt, Artificial Sequence
  Description of Artificial Sequence: Synthetic oligonucleotide
gaugagcacaaugcaguuc

SEQ ID NO: 2601195 - RNA, 19 nt, Artificial Sequence
  Description of Artificial Sequence: Synthetic oligonucleotide
uagugggacucguaccacu

SEQ ID NO: 2601196 - RNA, 19 nt, Artificial Sequence
  Description of Artificial Sequence: Synthetic oligonucleotide
cucggcgcuggcuggaaag

SEQ ID NO: 2601197 - RNA, 19 nt, Artificial Sequence
  Description of Artificial Sequence: Synthetic oligonucleotide
aaucuucguguuggcagca

SEQ ID NO: 2601198 - RNA, 19 nt, Artificial Sequence
  Description of Artificial Sequence: Synthetic oligonucleotide
uaccacugccgguacggug

SEQ ID NO: 2601199 - RNA, 19 nt, Artificial Sequence
  Description of Artificial Sequence: Synthetic oligonucleotide
ucguaccacugccgguacg

SEQ ID NO: 2601200 - RNA, 19 nt, Artificial Sequence
  Description of Artificial Sequence: Synthetic oligonucleotide
gcuggcuggaaagaggaag

SEQ ID NO: 2601201 - RNA, 19 nt, Artificial Sequence
  Description of Artificial Sequence: Synthetic oligonucleotide
gcugucgaugagcacaaug

SEQ ID NO: 2601202 - RNA, 19 nt, Artificial Sequence
  Description of Artificial Sequence: Synthetic oligonucleotide
guguguauacgacgaggac

SEQ ID NO: 2601203 - RNA, 19 nt, Artificial Sequence
  Description of Artificial Sequence: Synthetic oligonucleotide
acguccaaccuuagggcac

SEQ ID NO: 2601204 - RNA, 19 nt, Artificial Sequence
  Description of Artificial Sequence: Synthetic oligonucleotide
caccuuuauuacaugagcu

SEQ ID NO: 2601205 - RNA, 19 nt, Artificial Sequence
  Description of Artificial Sequence: Synthetic oligonucleotide
cccaggaaaaguuucccac

SEQ ID NO: 2601206 - RNA, 19 nt, Artificial Sequence
  Description of Artificial Sequence: Synthetic oligonucleotide
cugauuuuggcauucuuuu

SEQ ID NO: 2601207 - RNA, 19 nt, Artificial Sequence
  Description of Artificial Sequence: Synthetic oligonucleotide
auacgacgaggaccaaucu

SEQ ID NO: 2601208 - RNA, 19 nt, Artificial Sequence
  Description of Artificial Sequence: Synthetic oligonucleotide
uuauugccuccucgaacuc

SEQ ID NO: 2601209 - RNA, 19 nt, Artificial Sequence
  Description of Artificial Sequence: Synthetic oligonucleotide
uccucgaacucggacugug

SEQ ID NO: 2601210 - RNA, 19 nt, Artificial Sequence
  Description of Artificial Sequence: Synthetic oligonucleotide
agcucauacuuccgcuucu

SEQ ID NO: 2601211 - RNA, 19 nt, Artificial Sequence
  Description of Artificial Sequence: Synthetic oligonucleotide
uugucccgagagaugccca

SEQ ID NO: 2601212 - RNA, 19 nt, Artificial Sequence
  Description of Artificial Sequence: Synthetic oligonucleotide
caggcaagaagcuugcccu

SEQ ID NO: 2601213 - RNA, 19 nt, Artificial Sequence
  Description of Artificial Sequence: Synthetic oligonucleotide
gaugcccaucgcucggcgc

SEQ ID NO: 2601214 - RNA, 19 nt, Artificial Sequence
  Description of Artificial Sequence: Synthetic oligonucleotide
ccaacucguuauuggaugc

SEQ ID NO: 2601215 - RNA, 19 nt, Artificial Sequence
  Description of Artificial Sequence: Synthetic oligonucleotide
gcauagugggacucguacc

SEQ ID NO: 2601216 - RNA, 19 nt, Artificial Sequence
  Description of Artificial Sequence: Synthetic oligonucleotide
agcaggccgucccagcuca

SEQ ID NO: 2601217 - RNA, 19 nt, Artificial Sequence
  Description of Artificial Sequence: Synthetic oligonucleotide
ugccaguugucccgagaga

SEQ ID NO: 2601218 - RNA, 19 nt, Artificial Sequence
  Description of Artificial Sequence: Synthetic oligonucleotide
ugcugauuuuggcauucuu

SEQ ID NO: 2601219 - RNA, 19 nt, Artificial Sequence
  Description of Artificial Sequence: Synthetic oligonucleotide
caguucuucaccagggucu

SEQ ID NO: 2601220 - RNA, 19 nt, Artificial Sequence
  Description of Artificial Sequence: Synthetic oligonucleotide
caucgcucggcgcuggcug

SEQ ID NO: 2601221 - RNA, 19 nt, Artificial Sequence
  Description of Artificial Sequence: Synthetic oligonucleotide
cuugcggcgcuugugccag

SEQ ID NO: 2601222 - RNA, 19 nt, Artificial Sequence
  Description of Artificial Sequence: Synthetic oligonucleotide
aguugucccgagagaugcc

SEQ ID NO: 2601223 - RNA, 19 nt, Artificial Sequence
  Description of Artificial Sequence: Synthetic oligonucleotide
uuccgggcuuugaucuucc

SEQ ID NO: 2601224 - RNA, 19 nt, Artificial Sequence
  Description of Artificial Sequence: Synthetic oligonucleotide
uuggcagcaggccguccca

SEQ ID NO: 2601225 - RNA, 19 nt, Artificial Sequence
  Description of Artificial Sequence: Synthetic oligonucleotide
accacugccgguacggugu

SEQ ID NO: 2601226 - RNA, 19 nt, Artificial Sequence
  Description of Artificial Sequence: Synthetic oligonucleotide
ugccuuuccgggcuuugau

SEQ ID NO: 2601227 - RNA, 19 nt, Artificial Sequence
  Description of Artificial Sequence: Synthetic oligonucleotide
gaccaaucuucguguuggc

SEQ ID NO: 2601228 - RNA, 19 nt, Artificial Sequence
  Description of Artificial Sequence: Synthetic oligonucleotide
augagcuaugaaugaguuu

SEQ ID NO: 2601229 - RNA, 19 nt, Artificial Sequence
  Description of Artificial Sequence: Synthetic oligonucleotide
aucgcucggcgcuggcugg

SEQ ID NO: 2601230 - RNA, 19 nt, Artificial Sequence
  Description of Artificial Sequence: Synthetic oligonucleotide
caggggcagugcauagugg

SEQ ID NO: 2601231 - RNA, 19 nt, Artificial Sequence
  Description of Artificial Sequence: Synthetic oligonucleotide
agugggacucguaccacug

SEQ ID NO: 2601232 - RNA, 19 nt, Artificial Sequence
  Description of Artificial Sequence: Synthetic oligonucleotide
caagaagcuugcccugcug

SEQ ID NO: 2601233 - RNA, 19 nt, Artificial Sequence
  Description of Artificial Sequence: Synthetic oligonucleotide
cuuccgcuucuugugguag

SEQ ID NO: 2601234 - RNA, 19 nt, Artificial Sequence
  Description of Artificial Sequence: Synthetic oligonucleotide
gagcacaaugcaguucuuc

SEQ ID NO: 2601235 - RNA, 19 nt, Artificial Sequence
  Description of Artificial Sequence: Synthetic oligonucleotide
cacguccaaccuuagggca

SEQ ID NO: 2601236 - RNA, 19 nt, Artificial Sequence
  Description of Artificial Sequence: Synthetic oligonucleotide
uuuccgggcuuugaucuuc

SEQ ID NO: 2601237 - RNA, 19 nt, Artificial Sequence
  Description of Artificial Sequence: Synthetic oligonucleotide
cagcucauacuuccgcuuc

SEQ ID NO: 2601238 - RNA, 19 nt, Artificial Sequence
  Description of Artificial Sequence: Synthetic oligonucleotide
aacucggacuguguguaua

SEQ ID NO: 2601239 - RNA, 19 nt, Artificial Sequence
  Description of Artificial Sequence: Synthetic oligonucleotide
ggaccaacucguuauugga

SEQ ID NO: 2601240 - RNA, 19 nt, Artificial Sequence
  Description of Artificial Sequence: Synthetic oligonucleotide
cucagagccccaggaaaag

SEQ ID NO: 2601241 - RNA, 19 nt, Artificial Sequence
  Description of Artificial Sequence: Synthetic oligonucleotide
ucuugugguagggcuuucu

SEQ ID NO: 2601242 - RNA, 19 nt, Artificial Sequence
  Description of Artificial Sequence: Synthetic oligonucleotide
uuugccuuuccgggcuuug

SEQ ID NO: 2601243 - RNA, 19 nt, Artificial Sequence
  Description of Artificial Sequence: Synthetic oligonucleotide
cauagccaucugcucugcc

SEQ ID NO: 2601244 - RNA, 19 nt, Artificial Sequence
  Description of Artificial Sequence: Synthetic oligonucleotide
ccacguccaaccuuagggc

SEQ ID NO: 2601245 - RNA, 19 nt, Artificial Sequence
  Description of Artificial Sequence: Synthetic oligonucleotide
cucggacuguguguauacg

SEQ ID NO: 2601246 - RNA, 19 nt, Artificial Sequence
  Description of Artificial Sequence: Synthetic oligonucleotide
cagugcauagugggacucg

SEQ ID NO: 2601247 - RNA, 19 nt, Artificial Sequence
  Description of Artificial Sequence: Synthetic oligonucleotide
cacucagagccccaggaaa

SEQ ID NO: 2601248 - RNA, 19 nt, Artificial Sequence
  Description of Artificial Sequence: Synthetic oligonucleotide
accaaucuucguguuggca

SEQ ID NO: 2601249 - RNA, 19 nt, Artificial Sequence
  Description of Artificial Sequence: Synthetic oligonucleotide
gcacgguacuucuuauugc

SEQ ID NO: 2601250 - RNA, 19 nt, Artificial Sequence
  Description of Artificial Sequence: Synthetic oligonucleotide
gaggcaauacaggcaagaa

SEQ ID NO: 2601251 - RNA, 19 nt, Artificial Sequence
  Description of Artificial Sequence: Synthetic oligonucleotide
aggaagcgcaaagcuucac

SEQ ID NO: 2601252 - RNA, 19 nt, Artificial Sequence
  Description of Artificial Sequence: Synthetic oligonucleotide
acugccgguacggugugcu

SEQ ID NO: 2601253 - RNA, 19 nt, Artificial Sequence
  Description of Artificial Sequence: Synthetic oligonucleotide
acucguaccacugccggua

SEQ ID NO: 2601254 - RNA, 19 nt, Artificial Sequence
  Description of Artificial Sequence: Synthetic oligonucleotide
gcuaugaaugaguuuauuu

SEQ ID NO: 2601255 - RNA, 19 nt, Artificial Sequence
  Description of Artificial Sequence: Synthetic oligonucleotide
ugucccgagagaugcccau

SEQ ID NO: 2601256 - RNA, 19 nt, Artificial Sequence
  Description of Artificial Sequence: Synthetic oligonucleotide
ugccgguacggugugcugu

SEQ ID NO: 2601257 - RNA, 19 nt, Artificial Sequence
  Description of Artificial Sequence: Synthetic oligonucleotide
gguagggcuuucucuuacc

SEQ ID NO: 2601258 - RNA, 19 nt, Artificial Sequence
  Description of Artificial Sequence: Synthetic oligonucleotide
gucuugcggcgcuugugcc

SEQ ID NO: 2601259 - RNA, 19 nt, Artificial Sequence
  Description of Artificial Sequence: Synthetic oligonucleotide
uccucucaucauauuucuu

SEQ ID NO: 2601260 - RNA, 19 nt, Artificial Sequence
  Description of Artificial Sequence: Synthetic oligonucleotide
ccuucuagcacauagccau

SEQ ID NO: 2601261 - RNA, 19 nt, Artificial Sequence
  Description of Artificial Sequence: Synthetic oligonucleotide
gugggacucguaccacugc

SEQ ID NO: 2601262 - RNA, 19 nt, Artificial Sequence
  Description of Artificial Sequence: Synthetic oligonucleotide
uucuugcggcccaggggca

SEQ ID NO: 2601263 - RNA, 19 nt, Artificial Sequence
  Description of Artificial Sequence: Synthetic oligonucleotide
gagaugcccaucgcucggc

SEQ ID NO: 2601264 - RNA, 19 nt, Artificial Sequence
  Description of Artificial Sequence: Synthetic oligonucleotide
ccucagguagaacuccagc

SEQ ID NO: 2601265 - RNA, 19 nt, Artificial Sequence
  Description of Artificial Sequence: Synthetic oligonucleotide
cggaccaacucguuauugg

SEQ ID NO: 2601266 - RNA, 19 nt, Artificial Sequence
  Description of Artificial Sequence: Synthetic oligonucleotide
caugagcuaugaaugaguu

SEQ ID NO: 2601267 - RNA, 19 nt, Artificial Sequence
  Description of Artificial Sequence: Synthetic oligonucleotide
uucccacguccaaccuuag

SEQ ID NO: 2601268 - RNA, 19 nt, Artificial Sequence
  Description of Artificial Sequence: Synthetic oligonucleotide
uacaggcaagaagcuugcc

SEQ ID NO: 2601269 - RNA, 19 nt, Artificial Sequence
  Description of Artificial Sequence: Synthetic oligonucleotide
guacggugugcugucgaug

SEQ ID NO: 2601270 - RNA, 19 nt, Artificial Sequence
  Description of Artificial Sequence: Synthetic oligonucleotide
gaagcuugcccugcuggaa

SEQ ID NO: 2601271 - RNA, 19 nt, Artificial Sequence
  Description of Artificial Sequence: Synthetic oligonucleotide
cuuagggcacgguacuucu

SEQ ID NO: 2601272 - RNA, 19 nt, Artificial Sequence
  Description of Artificial Sequence: Synthetic oligonucleotide
uuagggcacgguacuucuu

SEQ ID NO: 2601273 - RNA, 19 nt, Artificial Sequence
  Description of Artificial Sequence: Synthetic oligonucleotide
acggugugcugucgaugag

SEQ ID NO: 2601274 - RNA, 19 nt, Artificial Sequence
  Description of Artificial Sequence: Synthetic oligonucleotide
acuuccgcuucuuguggua

SEQ ID NO: 2601275 - RNA, 19 nt, Artificial Sequence
  Description of Artificial Sequence: Synthetic oligonucleotide
ccaggggcagugcauagug

SEQ ID NO: 2601276 - RNA, 19 nt, Artificial Sequence
  Description of Artificial Sequence: Synthetic oligonucleotide
ggugugcugucgaugagca

SEQ ID NO: 2601277 - RNA, 19 nt, Artificial Sequence
  Description of Artificial Sequence: Synthetic oligonucleotide
cugcucugccgcacuggcc

SEQ ID NO: 2601278 - RNA, 19 nt, Artificial Sequence
  Description of Artificial Sequence: Synthetic oligonucleotide
uggaugcauuguagacaac

SEQ ID NO: 2601279 - RNA, 19 nt, Artificial Sequence
  Description of Artificial Sequence: Synthetic oligonucleotide
caucugcucugccgcacug

SEQ ID NO: 2601280 - RNA, 19 nt, Artificial Sequence
  Description of Artificial Sequence: Synthetic oligonucleotide
ugcggaccaacucguuauu

SEQ ID NO: 2601281 - RNA, 19 nt, Artificial Sequence
  Description of Artificial Sequence: Synthetic oligonucleotide
cgagagaugcccaucgcuc

SEQ ID NO: 2601282 - RNA, 19 nt, Artificial Sequence
  Description of Artificial Sequence: Synthetic oligonucleotide
gggacucguaccacugccg

SEQ ID NO: 2601283 - RNA, 19 nt, Artificial Sequence
  Description of Artificial Sequence: Synthetic oligonucleotide
aucuucguguuggcagcag

SEQ ID NO: 2601284 - RNA, 19 nt, Artificial Sequence
  Description of Artificial Sequence: Synthetic oligonucleotide
uggccuggucuugaggcaa

SEQ ID NO: 2601285 - RNA, 19 nt, Artificial Sequence
  Description of Artificial Sequence: Synthetic oligonucleotide
gcacauagccaucugcucu

SEQ ID NO: 2601286 - RNA, 19 nt, Artificial Sequence
  Description of Artificial Sequence: Synthetic oligonucleotide
uugccuuuccgggcuuuga

SEQ ID NO: 2601287 - RNA, 19 nt, Artificial Sequence
  Description of Artificial Sequence: Synthetic oligonucleotide
cagggucuuggugcggacc

SEQ ID NO: 2601288 - RNA, 19 nt, Artificial Sequence
  Description of Artificial Sequence: Synthetic oligonucleotide
gaggaagcgcaaagcuuca

SEQ ID NO: 2601289 - RNA, 19 nt, Artificial Sequence
  Description of Artificial Sequence: Synthetic oligonucleotide
ggcgcuggcuggaaagagg

SEQ ID NO: 2601290 - RNA, 19 nt, Artificial Sequence
  Description of Artificial Sequence: Synthetic oligonucleotide
cucucaucauauuucuuuu

SEQ ID NO: 2601291 - RNA, 19 nt, Artificial Sequence
  Description of Artificial Sequence: Synthetic oligonucleotide
uugugccaguugucccgag

SEQ ID NO: 2601292 - RNA, 19 nt, Artificial Sequence
  Description of Artificial Sequence: Synthetic oligonucleotide
accagggucuuggugcgga

SEQ ID NO: 2601293 - RNA, 19 nt, Artificial Sequence
  Description of Artificial Sequence: Synthetic oligonucleotide
cucguaccacugccgguac

SEQ ID NO: 2601294 - RNA, 19 nt, Artificial Sequence
  Description of Artificial Sequence: Synthetic oligonucleotide
acgguacuucuuauugccu

SEQ ID NO: 2601295 - RNA, 19 nt, Artificial Sequence
  Description of Artificial Sequence: Synthetic oligonucleotide
ccuccucgaacucggacug

SEQ ID NO: 2601296 - RNA, 19 nt, Artificial Sequence
  Description of Artificial Sequence: Synthetic oligonucleotide
ggcaagaagcuugcccugc

SEQ ID NO: 2601297 - RNA, 19 nt, Artificial Sequence
  Description of Artificial Sequence: Synthetic oligonucleotide
agagccccaggaaaaguuu

SEQ ID NO: 2601298 - RNA, 19 nt, Artificial Sequence
  Description of Artificial Sequence: Synthetic oligonucleotide
gugcggaccaacucguuau

SEQ ID NO: 2601299 - RNA, 19 nt, Artificial Sequence
  Description of Artificial Sequence: Synthetic oligonucleotide
gcauuguagacaacgucaa

SEQ ID NO: 2601300 - RNA, 19 nt, Artificial Sequence
  Description of Artificial Sequence: Synthetic oligonucleotide
agacaacgucaaugauccu

SEQ ID NO: 2601301 - RNA, 19 nt, Artificial Sequence
  Description of Artificial Sequence: Synthetic oligonucleotide
caacucguuauuggaugca

SEQ ID NO: 2601302 - RNA, 19 nt, Artificial Sequence
  Description of Artificial Sequence: Synthetic oligonucleotide
gcgcaaagcuucacggucc

SEQ ID NO: 2601303 - RNA, 19 nt, Artificial Sequence
  Description of Artificial Sequence: Synthetic oligonucleotide
uccaaccuuagggcacggu

SEQ ID NO: 2601304 - RNA, 19 nt, Artificial Sequence
  Description of Artificial Sequence: Synthetic oligonucleotide
cgguacuucuuauugccuc

SEQ ID NO: 2601305 - RNA, 19 nt, Artificial Sequence
  Description of Artificial Sequence: Synthetic oligonucleotide
gaccaacucguuauuggau

SEQ ID NO: 2601306 - RNA, 19 nt, Artificial Sequence
  Description of Artificial Sequence: Synthetic oligonucleotide
cgacgaggaccaaucuucg

SEQ ID NO: 2601307 - RNA, 19 nt, Artificial Sequence
  Description of Artificial Sequence: Synthetic oligonucleotide
ccaguugucccgagagaug

SEQ ID NO: 2601308 - RNA, 19 nt, Artificial Sequence
  Description of Artificial Sequence: Synthetic oligonucleotide
gacgaggaccaaucuucgu

SEQ ID NO: 2601309 - RNA, 19 nt, Artificial Sequence
  Description of Artificial Sequence: Synthetic oligonucleotide
acucguuauuggaugcauu

SEQ ID NO: 2601310 - RNA, 19 nt, Artificial Sequence
  Description of Artificial Sequence: Synthetic oligonucleotide
cuggccuggucuugaggca

SEQ ID NO: 2601311 - RNA, 19 nt, Artificial Sequence
  Description of Artificial Sequence: Synthetic oligonucleotide
uguuggcagcaggccgucc

SEQ ID NO: 2601312 - RNA, 19 nt, Artificial Sequence
  Description of Artificial Sequence: Synthetic oligonucleotide
cuugugccaguugucccga

SEQ ID NO: 2601313 - RNA, 19 nt, Artificial Sequence
  Description of Artificial Sequence: Synthetic oligonucleotide
ccuuuccgggcuuugaucu

SEQ ID NO: 2601314 - RNA, 19 nt, Artificial Sequence
  Description of Artificial Sequence: Synthetic oligonucleotide
gccuuuccgggcuuugauc

SEQ ID NO: 2601315 - RNA, 19 nt, Artificial Sequence
  Description of Artificial Sequence: Synthetic oligonucleotide
uccgggcuuugaucuuccu

SEQ ID NO: 2601316 - RNA, 19 nt, Artificial Sequence
  Description of Artificial Sequence: Synthetic oligonucleotide
gacucguaccacugccggu

SEQ ID NO: 2601317 - RNA, 19 nt, Artificial Sequence
  Description of Artificial Sequence: Synthetic oligonucleotide
uguauacgacgaggaccaa

SEQ ID NO: 2601318 - RNA, 19 nt, Artificial Sequence
  Description of Artificial Sequence: Synthetic oligonucleotide
ccucucaucauauuucuuu

SEQ ID NO: 2601319 - RNA, 19 nt, Artificial Sequence
  Description of Artificial Sequence: Synthetic oligonucleotide
gugguagggcuuucucuua

SEQ ID NO: 2601320 - RNA, 19 nt, Artificial Sequence
  Description of Artificial Sequence: Synthetic oligonucleotide
gugugcugucgaugagcac

SEQ ID NO: 2601321 - RNA, 19 nt, Artificial Sequence
  Description of Artificial Sequence: Synthetic oligonucleotide
gccccaggaaaaguuuccc

SEQ ID NO: 2601322 - RNA, 19 nt, Artificial Sequence
  Description of Artificial Sequence: Synthetic oligonucleotide
guauacgacgaggaccaau

SEQ ID NO: 2601323 - RNA, 19 nt, Artificial Sequence
  Description of Artificial Sequence: Synthetic oligonucleotide
guuucccacguccaaccuu

SEQ ID NO: 2601324 - RNA, 19 nt, Artificial Sequence
  Description of Artificial Sequence: Synthetic oligonucleotide
ugcccaucgcucggcgcug

SEQ ID NO: 2601325 - RNA, 19 nt, Artificial Sequence
  Description of Artificial Sequence: Synthetic oligonucleotide
cguuauuggaugcauugua

SEQ ID NO: 2601326 - RNA, 19 nt, Artificial Sequence
  Description of Artificial Sequence: Synthetic oligonucleotide
gcugauuuuggcauucuuu

SEQ ID NO: 2601327 - RNA, 19 nt, Artificial Sequence
  Description of Artificial Sequence: Synthetic oligonucleotide
ccaaccuuagggcacggua

SEQ ID NO: 2601328 - RNA, 19 nt, Artificial Sequence
  Description of Artificial Sequence: Synthetic oligonucleotide
uucuugugguagggcuuuc

SEQ ID NO: 2601329 - RNA, 19 nt, Artificial Sequence
  Description of Artificial Sequence: Synthetic oligonucleotide
cugccgguacggugugcug

SEQ ID NO: 2601330 - RNA, 19 nt, Artificial Sequence
  Description of Artificial Sequence: Synthetic oligonucleotide
ccuuagggcacgguacuuc

SEQ ID NO: 2601331 - RNA, 19 nt, Artificial Sequence
  Description of Artificial Sequence: Synthetic oligonucleotide
ucugccgcacuggccuggu

SEQ ID NO: 2601332 - RNA, 19 nt, Artificial Sequence
  Description of Artificial Sequence: Synthetic oligonucleotide
ggcagcaggccgucccagc

SEQ ID NO: 2601333 - RNA, 19 nt, Artificial Sequence
  Description of Artificial Sequence: Synthetic oligonucleotide
guacuucuuauugccuccu

SEQ ID NO: 2601334 - RNA, 19 nt, Artificial Sequence
  Description of Artificial Sequence: Synthetic oligonucleotide
guccaaccuuagggcacgg

SEQ ID NO: 2601335 - RNA, 19 nt, Artificial Sequence
  Description of Artificial Sequence: Synthetic oligonucleotide
gcggaccaacucguuauug

SEQ ID NO: 2601336 - RNA, 19 nt, Artificial Sequence
  Description of Artificial Sequence: Synthetic oligonucleotide
cauuguagacaacgucaau

SEQ ID NO: 2601337 - RNA, 19 nt, Artificial Sequence
  Description of Artificial Sequence: Synthetic oligonucleotide
cgcuugugccaguuguccc

SEQ ID NO: 2601338 - RNA, 19 nt, Artificial Sequence
  Description of Artificial Sequence: Synthetic oligonucleotide
gcgcuggcuggaaagagga

SEQ ID NO: 2601339 - RNA, 19 nt, Artificial Sequence
  Description of Artificial Sequence: Synthetic oligonucleotide
uugcggcccaggggcagug

SEQ ID NO: 2601340 - RNA, 19 nt, Artificial Sequence
  Description of Artificial Sequence: Synthetic oligonucleotide
gaggaccaaucuucguguu

SEQ ID NO: 2601341 - RNA, 19 nt, Artificial Sequence
  Description of Artificial Sequence: Synthetic oligonucleotide
ccgggcuuugaucuuccuc

SEQ ID NO: 2601342 - RNA, 19 nt, Artificial Sequence
  Description of Artificial Sequence: Synthetic oligonucleotide
gagcuaugaaugaguuuau

SEQ ID NO: 2601343 - RNA, 19 nt, Artificial Sequence
  Description of Artificial Sequence: Synthetic oligonucleotide
gcagugcauagugggacuc

SEQ ID NO: 2601344 - RNA, 19 nt, Artificial Sequence
  Description of Artificial Sequence: Synthetic oligonucleotide
gcaauacaggcaagaagcu

SEQ ID NO: 2601345 - RNA, 19 nt, Artificial Sequence
  Description of Artificial Sequence: Synthetic oligonucleotide
accuuagggcacgguacuu

SEQ ID NO: 2601346 - RNA, 19 nt, Artificial Sequence
  Description of Artificial Sequence: Synthetic oligonucleotide
cguccaaccuuagggcacg

SEQ ID NO: 2601347 - RNA, 19 nt, Artificial Sequence
  Description of Artificial Sequence: Synthetic oligonucleotide
gcacucagagccccaggaa

SEQ ID NO: 2601348 - RNA, 19 nt, Artificial Sequence
  Description of Artificial Sequence: Synthetic oligonucleotide
ccccaggaaaaguuuccca

SEQ ID NO: 2601349 - RNA, 19 nt, Artificial Sequence
  Description of Artificial Sequence: Synthetic oligonucleotide
gaacucggacuguguguau

SEQ ID NO: 2601350 - RNA, 19 nt, Artificial Sequence
  Description of Artificial Sequence: Synthetic oligonucleotide
ggcagugcauagugggacu

SEQ ID NO: 2601351 - RNA, 19 nt, Artificial Sequence
  Description of Artificial Sequence: Synthetic oligonucleotide
gccgguacggugugcuguc

SEQ ID NO: 2601352 - RNA, 19 nt, Artificial Sequence
  Description of Artificial Sequence: Synthetic oligonucleotide
gcccaggggcagugcauag

SEQ ID NO: 2601353 - RNA, 19 nt, Artificial Sequence
  Description of Artificial Sequence: Synthetic oligonucleotide
caccagggucuuggugcgg

SEQ ID NO: 2601354 - RNA, 19 nt, Artificial Sequence
  Description of Artificial Sequence: Synthetic oligonucleotide
cccgagagaugcccaucgc

SEQ ID NO: 2601355 - RNA, 19 nt, Artificial Sequence
  Description of Artificial Sequence: Synthetic oligonucleotide
gccaguugucccgagagau

SEQ ID NO: 2601356 - RNA, 19 nt, Artificial Sequence
  Description of Artificial Sequence: Synthetic oligonucleotide
cuucuugugguagggcuuu

SEQ ID NO: 2601357 - RNA, 19 nt, Artificial Sequence
  Description of Artificial Sequence: Synthetic oligonucleotide
ucgcucggcgcuggcugga

SEQ ID NO: 2601358 - RNA, 19 nt, Artificial Sequence
  Description of Artificial Sequence: Synthetic oligonucleotide
caacgucaaugauccuugu

SEQ ID NO: 2601359 - RNA, 19 nt, Artificial Sequence
  Description of Artificial Sequence: Synthetic oligonucleotide
guguuggcagcaggccguc

SEQ ID NO: 2601360 - RNA, 19 nt, Artificial Sequence
  Description of Artificial Sequence: Synthetic oligonucleotide
gguacggugugcugucgau

SEQ ID NO: 2601361 - RNA, 19 nt, Artificial Sequence
  Description of Artificial Sequence: Synthetic oligonucleotide
ggcgcuugugccaguuguc

SEQ ID NO: 2601362 - RNA, 19 nt, Artificial Sequence
  Description of Artificial Sequence: Synthetic oligonucleotide
gcuugcccugcuggaacug

SEQ ID NO: 2601363 - RNA, 19 nt, Artificial Sequence
  Description of Artificial Sequence: Synthetic oligonucleotide
cacugccgguacggugugc

SEQ ID NO: 2601364 - RNA, 19 nt, Artificial Sequence
  Description of Artificial Sequence: Synthetic oligonucleotide
cgaggaccaaucuucgugu

SEQ ID NO: 2601365 - RNA, 19 nt, Artificial Sequence
  Description of Artificial Sequence: Synthetic oligonucleotide
ugcugucgaugagcacaau

SEQ ID NO: 2601366 - RNA, 19 nt, Artificial Sequence
  Description of Artificial Sequence: Synthetic oligonucleotide
gugcauagugggacucgua

SEQ ID NO: 2601367 - RNA, 19 nt, Artificial Sequence
  Description of Artificial Sequence: Synthetic oligonucleotide
gcucugccgcacuggccug

SEQ ID NO: 2601368 - RNA, 19 nt, Artificial Sequence
  Description of Artificial Sequence: Synthetic oligonucleotide
ccgucccagcucauacuuc

SEQ ID NO: 2601369 - RNA, 19 nt, Artificial Sequence
  Description of Artificial Sequence: Synthetic oligonucleotide
cuuuccgggcuuugaucuu

SEQ ID NO: 2601370 - RNA, 19 nt, Artificial Sequence
  Description of Artificial Sequence: Synthetic oligonucleotide
ccgagagaugcccaucgcu

SEQ ID NO: 2601371 - RNA, 19 nt, Artificial Sequence
  Description of Artificial Sequence: Synthetic oligonucleotide
cccagcucauacuuccgcu

SEQ ID NO: 2601372 - RNA, 19 nt, Artificial Sequence
  Description of Artificial Sequence: Synthetic oligonucleotide
gccgucccagcucauacuu

SEQ ID NO: 2601373 - RNA, 19 nt, Artificial Sequence
  Description of Artificial Sequence: Synthetic oligonucleotide
uugcggcgcuugugccagu

SEQ ID NO: 2601374 - RNA, 19 nt, Artificial Sequence
  Description of Artificial Sequence: Synthetic oligonucleotide
cgaacucggacugugugua

SEQ ID NO: 2601375 - RNA, 19 nt, Artificial Sequence
  Description of Artificial Sequence: Synthetic oligonucleotide
gcggcgcuugugccaguug

SEQ ID NO: 2601376 - RNA, 19 nt, Artificial Sequence
  Description of Artificial Sequence: Synthetic oligonucleotide
guaccacugccgguacggu

SEQ ID NO: 2601377 - RNA, 19 nt, Artificial Sequence
  Description of Artificial Sequence: Synthetic oligonucleotide
cuccagaaggcugcugauu

SEQ ID NO: 2601378 - RNA, 19 nt, Artificial Sequence
  Description of Artificial Sequence: Synthetic oligonucleotide
cguguuggcagcaggccgu

SEQ ID NO: 2601379 - RNA, 19 nt, Artificial Sequence
  Description of Artificial Sequence: Synthetic oligonucleotide
ccacugccgguacggugug

SEQ ID NO: 2601380 - RNA, 19 nt, Artificial Sequence
  Description of Artificial Sequence: Synthetic oligonucleotide
gcuucuugugguagggcuu

SEQ ID NO: 2601381 - RNA, 19 nt, Artificial Sequence
  Description of Artificial Sequence: Synthetic oligonucleotide
ccgguacggugugcugucg

SEQ ID NO: 2601382 - RNA, 19 nt, Artificial Sequence
  Description of Artificial Sequence: Synthetic oligonucleotide
ggccgucccagcucauacu

SEQ ID NO: 2601383 - RNA, 19 nt, Artificial Sequence
  Description of Artificial Sequence: Synthetic oligonucleotide
gcccaucgcucggcgcugg

SEQ ID NO: 2601384 - RNA, 19 nt, Artificial Sequence
  Description of Artificial Sequence: Synthetic oligonucleotide
cugccgcacuggccugguc

SEQ ID NO: 2601385 - RNA, 19 nt, Artificial Sequence
  Description of Artificial Sequence: Synthetic oligonucleotide
ggcccaggggcagugcaua

SEQ ID NO: 2601386 - RNA, 19 nt, Artificial Sequence
  Description of Artificial Sequence: Synthetic oligonucleotide
ccagcucauacuuccgcuu

SEQ ID NO: 2601387 - RNA, 19 nt, Artificial Sequence
  Description of Artificial Sequence: Synthetic oligonucleotide
caggccgucccagcucaua

SEQ ID NO: 2601388 - RNA, 19 nt, Artificial Sequence
  Description of Artificial Sequence: Synthetic oligonucleotide
cccaucgcucggcgcuggc

SEQ ID NO: 2601389 - RNA, 19 nt, Artificial Sequence
  Description of Artificial Sequence: Synthetic oligonucleotide
cccggucuugcggcgcuug

SEQ ID NO: 2601390 - RNA, 19 nt, Artificial Sequence
  Description of Artificial Sequence: Synthetic oligonucleotide
cuugcggcccaggggcagu

SEQ ID NO: 2601391 - RNA, 19 nt, Artificial Sequence
  Description of Artificial Sequence: Synthetic oligonucleotide
cggcgcuggcuggaaagag

SEQ ID NO: 2601392 - RNA, 19 nt, Artificial Sequence
  Description of Artificial Sequence: Synthetic oligonucleotide
cggucuugcggcgcuugug

SEQ ID NO: 2601393 - RNA, 19 nt, Artificial Sequence
  Description of Artificial Sequence: Synthetic oligonucleotide
ccucgaacucggacugugu

SEQ ID NO: 2601394 - RNA, 19 nt, Artificial Sequence
  Description of Artificial Sequence: Synthetic oligonucleotide
gcucggcgcuggcuggaaa

SEQ ID NO: 2601395 - RNA, 19 nt, Artificial Sequence
  Description of Artificial Sequence: Synthetic oligonucleotide
cgguacggugugcugucga

SEQ ID NO: 2601396 - RNA, 19 nt, Artificial Sequence
  Description of Artificial Sequence: Synthetic oligonucleotide
ccuccagaaggcugcugau

SEQ ID NO: 2601397 - RNA, 19 nt, Artificial Sequence
  Description of Artificial Sequence: Synthetic oligonucleotide
cuccucgaacucggacugu

SEQ ID NO: 2601398 - RNA, 19 nt, Artificial Sequence
  Description of Artificial Sequence: Synthetic oligonucleotide
cgaugagcacaaugcaguu

SEQ ID NO: 2601399 - RNA, 19 nt, Artificial Sequence
  Description of Artificial Sequence: Synthetic oligonucleotide
cggcgcuugugccaguugu

SEQ ID NO: 2601400 - RNA, 19 nt, Artificial Sequence
  Description of Artificial Sequence: Synthetic oligonucleotide
cgcacuggccuggucuuga

SEQ ID NO: 2601401 - RNA, 19 nt, Artificial Sequence
  Description of Artificial Sequence: Synthetic oligonucleotide
gccuggucuugaggcaaua

SEQ ID NO: 2601402 - RNA, 19 nt, Artificial Sequence
  Description of Artificial Sequence: Synthetic oligonucleotide
cgcuggcuggaaagaggaa

SEQ ID NO: 2601403 - RNA, 19 nt, Artificial Sequence
  Description of Artificial Sequence: Synthetic oligonucleotide
ggccuggucuugaggcaau

SEQ ID NO: 2601404 - RNA, 19 nt, Artificial Sequence
  Description of Artificial Sequence: Synthetic oligonucleotide
cccaggggcagugcauagu

SEQ ID NO: 2601405 - RNA, 19 nt, Artificial Sequence
  Description of Artificial Sequence: Synthetic oligonucleotide
ccaucgcucggcgcuggcu

SEQ ID NO: 2601406 - RNA, 19 nt, Artificial Sequence
  Description of Artificial Sequence: Synthetic oligonucleotide
cggcccaggggcagugcau

SEQ ID NO: 2601407 - RNA, 19 nt, Artificial Sequence
  Description of Artificial Sequence: Synthetic oligonucleotide
gcaggccgucccagcucau

SEQ ID NO: 2601408 - RNA, 19 nt, Artificial Sequence
  Description of Artificial Sequence: Synthetic oligonucleotide
cgcucggcgcuggcuggaa

SEQ ID NO: 2601409 - RNA, 19 nt, Artificial Sequence
  Description of Artificial Sequence: Synthetic oligonucleotide
ccccggucuugcggcgcuu

SEQ ID NO: 2601410 - RNA, 19 nt, Artificial Sequence
  Description of Artificial Sequence: Synthetic oligonucleotide
aagucagcuacaugaaucc

SEQ ID NO: 2601411 - RNA, 19 nt, Artificial Sequence
  Description of Artificial Sequence: Synthetic oligonucleotide
agugcuacccaucagcucc

SEQ ID NO: 2601412 - RNA, 19 nt, Artificial Sequence
  Description of Artificial Sequence: Synthetic oligonucleotide
aaaaucuccuugucuaccc

SEQ ID NO: 2601413 - RNA, 19 nt, Artificial Sequence
  Description of Artificial Sequence: Synthetic oligonucleotide
aacuagagcugucugaaac

SEQ ID NO: 2601414 - RNA, 19 nt, Artificial Sequence
  Description of Artificial Sequence: Synthetic oligonucleotide
auaauguucacacaugcag

SEQ ID NO: 2601415 - RNA, 19 nt, Artificial Sequence
  Description of Artificial Sequence: Synthetic oligonucleotide
  modified_base (14)..(14): a, c, u, g, unknown or other
uaaggaagggucanacugg

SEQ ID NO: 2601416 - RNA, 19 nt, Artificial Sequence
  Description of Artificial Sequence: Synthetic oligonucleotide
aagagaauugccuugcugu

SEQ ID NO: 2601417 - RNA, 19 nt, Artificial Sequence
  Description of Artificial Sequence: Synthetic oligonucleotide
ugguaagucagcuacauga

SEQ ID NO: 2601418 - RNA, 19 nt, Artificial Sequence
  Description of Artificial Sequence: Synthetic oligonucleotide
aauaugauggaaccagucu

SEQ ID NO: 2601419 - RNA, 19 nt, Artificial Sequence
  Description of Artificial Sequence: Synthetic oligonucleotide
uuuggacagacauagaaac

SEQ ID NO: 2601420 - RNA, 19 nt, Artificial Sequence
  Description of Artificial Sequence: Synthetic oligonucleotide
gacauagaaacacaaacca

SEQ ID NO: 2601421 - RNA, 19 nt, Artificial Sequence
  Description of Artificial Sequence: Synthetic oligonucleotide
aaaagucucuugguaaagc

SEQ ID NO: 2601422 - RNA, 19 nt, Artificial Sequence
  Description of Artificial Sequence: Synthetic oligonucleotide
cugguuauaauguucacac

SEQ ID NO: 2601423 - RNA, 19 nt, Artificial Sequence
  Description of Artificial Sequence: Synthetic oligonucleotide
gauggaaccagucugagaa

SEQ ID NO: 2601424 - RNA, 19 nt, Artificial Sequence
  Description of Artificial Sequence: Synthetic oligonucleotide
aaagacauccagucacaac

SEQ ID NO: 2601425 - RNA, 19 nt, Artificial Sequence
  Description of Artificial Sequence: Synthetic oligonucleotide
agaguuaauggcugcagac

SEQ ID NO: 2601426 - RNA, 19 nt, Artificial Sequence
  Description of Artificial Sequence: Synthetic oligonucleotide
uccagucacaacuagagcu

SEQ ID NO: 2601427 - RNA, 19 nt, Artificial Sequence
  Description of Artificial Sequence: Synthetic oligonucleotide
  modified_base (15)..(15): a, c, u, g, unknown or other
guaaggaagggucanacug

SEQ ID NO: 2601428 - RNA, 19 nt, Artificial Sequence
  Description of Artificial Sequence: Synthetic oligonucleotide
aauguucacacaugcaggu

SEQ ID NO: 2601429 - RNA, 19 nt, Artificial Sequence
  Description of Artificial Sequence: Synthetic oligonucleotide
acaggcaaaagucucuugg

SEQ ID NO: 2601430 - RNA, 19 nt, Artificial Sequence
  Description of Artificial Sequence: Synthetic oligonucleotide
aacuaaccugguuauaaug

SEQ ID NO: 2601431 - RNA, 19 nt, Artificial Sequence
  Description of Artificial Sequence: Synthetic oligonucleotide
caaaauaugauggaaccag

SEQ ID NO: 2601432 - RNA, 19 nt, Artificial Sequence
  Description of Artificial Sequence: Synthetic oligonucleotide
auaugauggaaccagucug

SEQ ID NO: 2601433 - RNA, 19 nt, Artificial Sequence
  Description of Artificial Sequence: Synthetic oligonucleotide
agcuacaugaaucccaaag

SEQ ID NO: 2601434 - RNA, 19 nt, Artificial Sequence
  Description of Artificial Sequence: Synthetic oligonucleotide
guaagcaauaggcaggugc

SEQ ID NO: 2601435 - RNA, 19 nt, Artificial Sequence
  Description of Artificial Sequence: Synthetic oligonucleotide
uaagucagcuacaugaauc

SEQ ID NO: 2601436 - RNA, 19 nt, Artificial Sequence
  Description of Artificial Sequence: Synthetic oligonucleotide
ucgggaaugguccagcaag

SEQ ID NO: 2601437 - RNA, 19 nt, Artificial Sequence
  Description of Artificial Sequence: Synthetic oligonucleotide
aacacuggaaugaaaacug

SEQ ID NO: 2601438 - RNA, 19 nt, Artificial Sequence
  Description of Artificial Sequence: Synthetic oligonucleotide
aaugccuugcucugugggg

SEQ ID NO: 2601439 - RNA, 19 nt, Artificial Sequence
  Description of Artificial Sequence: Synthetic oligonucleotide
acacaaaccaacauucccc

SEQ ID NO: 2601440 - RNA, 19 nt, Artificial Sequence
  Description of Artificial Sequence: Synthetic oligonucleotide
aaauaugauggaaccaguc

SEQ ID NO: 2601441 - RNA, 19 nt, Artificial Sequence
  Description of Artificial Sequence: Synthetic oligonucleotide
aaaacuaaccugguuauaa

SEQ ID NO: 2601442 - RNA, 19 nt, Artificial Sequence
  Description of Artificial Sequence: Synthetic oligonucleotide
cuacaugaaucccaaaggc

SEQ ID NO: 2601443 - RNA, 19 nt, Artificial Sequence
  Description of Artificial Sequence: Synthetic oligonucleotide
auuggcacacauuaggaca

SEQ ID NO: 2601444 - RNA, 19 nt, Artificial Sequence
  Description of Artificial Sequence: Synthetic oligonucleotide
aacaaccacagugcuaccc

SEQ ID NO: 2601445 - RNA, 19 nt, Artificial Sequence
  Description of Artificial Sequence: Synthetic oligonucleotide
cacauuaggacagucagcc

SEQ ID NO: 2601446 - RNA, 19 nt, Artificial Sequence
  Description of Artificial Sequence: Synthetic oligonucleotide
gaggggacaaaauaugaug

SEQ ID NO: 2601447 - RNA, 19 nt, Artificial Sequence
  Description of Artificial Sequence: Synthetic oligonucleotide
  modified_base (3)..(3): a, c, u, g, unknown or other
canacuggcaggcaggaag

SEQ ID NO: 2601448 - RNA, 19 nt, Artificial Sequence
  Description of Artificial Sequence: Synthetic oligonucleotide
ucucagaggcccaacaggc

SEQ ID NO: 2601449 - RNA, 19 nt, Artificial Sequence
  Description of Artificial Sequence: Synthetic oligonucleotide
agaaaaucuccuugucuac

SEQ ID NO: 2601450 - RNA, 19 nt, Artificial Sequence
  Description of Artificial Sequence: Synthetic oligonucleotide
gaaaacugugguaagucag

SEQ ID NO: 2601451 - RNA, 19 nt, Artificial Sequence
  Description of Artificial Sequence: Synthetic oligonucleotide
uaagcaauaggcaggugcu

SEQ ID NO: 2601452 - RNA, 19 nt, Artificial Sequence
  Description of Artificial Sequence: Synthetic oligonucleotide
acuggaaugaaaacugugg

SEQ ID NO: 2601453 - RNA, 19 nt, Artificial Sequence
  Description of Artificial Sequence: Synthetic oligonucleotide
ucugcgaaugccuugcucu

SEQ ID NO: 2601454 - RNA, 19 nt, Artificial Sequence
  Description of Artificial Sequence: Synthetic oligonucleotide
cucuaaaggaucuggggcc

SEQ ID NO: 2601455 - RNA, 19 nt, Artificial Sequence
  Description of Artificial Sequence: Synthetic oligonucleotide
agucucuugguaaagcagc

SEQ ID NO: 2601456 - RNA, 19 nt, Artificial Sequence
  Description of Artificial Sequence: Synthetic oligonucleotide
uaugauggaaccagucuga

SEQ ID NO: 2601457 - RNA, 19 nt, Artificial Sequence
  Description of Artificial Sequence: Synthetic oligonucleotide
  modified_base (9)..(9): a, c, u, g, unknown or other
aagggucanacuggcaggc

SEQ ID NO: 2601458 - RNA, 19 nt, Artificial Sequence
  Description of Artificial Sequence: Synthetic oligonucleotide
acaugaaucccaaaggcag

SEQ ID NO: 2601459 - RNA, 19 nt, Artificial Sequence
  Description of Artificial Sequence: Synthetic oligonucleotide
cugaagugcucucuuaccg

SEQ ID NO: 2601460 - RNA, 19 nt, Artificial Sequence
  Description of Artificial Sequence: Synthetic oligonucleotide
ucugaaacagccauccuuu

SEQ ID NO: 2601461 - RNA, 19 nt, Artificial Sequence
  Description of Artificial Sequence: Synthetic oligonucleotide
uguucacacaugcagguaa

SEQ ID NO: 2601462 - RNA, 19 nt, Artificial Sequence
  Description of Artificial Sequence: Synthetic oligonucleotide
agugcucucuuaccgaggg

SEQ ID NO: 2601463 - RNA, 19 nt, Artificial Sequence
  Description of Artificial Sequence: Synthetic oligonucleotide
ugaaaacugugguaaguca

SEQ ID NO: 2601464 - RNA, 19 nt, Artificial Sequence
  Description of Artificial Sequence: Synthetic oligonucleotide
aaggcaguggaggucaagg

SEQ ID NO: 2601465 - RNA, 19 nt, Artificial Sequence
  Description of Artificial Sequence: Synthetic oligonucleotide
aaagaguuaauggcugcag

SEQ ID NO: 2601466 - RNA, 19 nt, Artificial Sequence
  Description of Artificial Sequence: Synthetic oligonucleotide
aggcccaacaaccacagug

SEQ ID NO: 2601467 - RNA, 19 nt, Artificial Sequence
  Description of Artificial Sequence: Synthetic oligonucleotide
augaaaacugugguaaguc

SEQ ID NO: 2601468 - RNA, 19 nt, Artificial Sequence
  Description of Artificial Sequence: Synthetic oligonucleotide
gagaaaaucuccuugucua

SEQ ID NO: 2601469 - RNA, 19 nt, Artificial Sequence
  Description of Artificial Sequence: Synthetic oligonucleotide
ucaggcaagccuaugguuc

SEQ ID NO: 2601470 - RNA, 19 nt, Artificial Sequence
  Description of Artificial Sequence: Synthetic oligonucleotide
accucuaaaggaucugggg

SEQ ID NO: 2601471 - RNA, 19 nt, Artificial Sequence
  Description of Artificial Sequence: Synthetic oligonucleotide
gaaugccuugcucuguggg

SEQ ID NO: 2601472 - RNA, 19 nt, Artificial Sequence
  Description of Artificial Sequence: Synthetic oligonucleotide
aagaguuaauggcugcaga

SEQ ID NO: 2601473 - RNA, 19 nt, Artificial Sequence
  Description of Artificial Sequence: Synthetic oligonucleotide
uuacccugggccuuguaag

SEQ ID NO: 2601474 - RNA, 19 nt, Artificial Sequence
  Description of Artificial Sequence: Synthetic oligonucleotide
  modified_base (11)..(11): a, c, u, g, unknown or other
ggaagggucanacuggcag

SEQ ID NO: 2601475 - RNA, 19 nt, Artificial Sequence
  Description of Artificial Sequence: Synthetic oligonucleotide
gcuacaugaaucccaaagg

SEQ ID NO: 2601476 - RNA, 19 nt, Artificial Sequence
  Description of Artificial Sequence: Synthetic oligonucleotide
ucugacacgagcucagacu

SEQ ID NO: 2601477 - RNA, 19 nt, Artificial Sequence
  Description of Artificial Sequence: Synthetic oligonucleotide
agagaauugccuugcuguc

SEQ ID NO: 2601478 - RNA, 19 nt, Artificial Sequence
  Description of Artificial Sequence: Synthetic oligonucleotide
gaaugaaaacugugguaag

SEQ ID NO: 2601479 - RNA, 19 nt, Artificial Sequence
  Description of Artificial Sequence: Synthetic oligonucleotide
agcaagagaauugccuugc

SEQ ID NO: 2601480 - RNA, 19 nt, Artificial Sequence
  Description of Artificial Sequence: Synthetic oligonucleotide
cuugguaaagcagcugucg

SEQ ID NO: 2601481 - RNA, 19 nt, Artificial Sequence
  Description of Artificial Sequence: Synthetic oligonucleotide
aguuaauggcugcagacaa

SEQ ID NO: 2601482 - RNA, 19 nt, Artificial Sequence
  Description of Artificial Sequence: Synthetic oligonucleotide
cuacccaucagcuccaauc

SEQ ID NO: 2601483 - RNA, 19 nt, Artificial Sequence
  Description of Artificial Sequence: Synthetic oligonucleotide
aaaagaguuaauggcugca

SEQ ID NO: 2601484 - RNA, 19 nt, Artificial Sequence
  Description of Artificial Sequence: Synthetic oligonucleotide
  modified_base (16)..(16): a, c, u, g, unknown or other
aguaaggaagggucanacu

SEQ ID NO: 2601485 - RNA, 19 nt, Artificial Sequence
  Description of Artificial Sequence: Synthetic oligonucleotide
aacagccauccuuuguuug

SEQ ID NO: 2601486 - RNA, 19 nt, Artificial Sequence
  Description of Artificial Sequence: Synthetic oligonucleotide
gacauucucugacacgagc

SEQ ID NO: 2601487 - RNA, 19 nt, Artificial Sequence
  Description of Artificial Sequence: Synthetic oligonucleotide
ucugaagugcucucuuacc

SEQ ID NO: 2601488 - RNA, 19 nt, Artificial Sequence
  Description of Artificial Sequence: Synthetic oligonucleotide
auccagucacaacuagagc

SEQ ID NO: 2601489 - RNA, 19 nt, Artificial Sequence
  Description of Artificial Sequence: Synthetic oligonucleotide
ggcauuggcacacauuagg

SEQ ID NO: 2601490 - RNA, 19 nt, Artificial Sequence
  Description of Artificial Sequence: Synthetic oligonucleotide
aaacuaaccugguuauaau

SEQ ID NO: 2601491 - RNA, 19 nt, Artificial Sequence
  Description of Artificial Sequence: Synthetic oligonucleotide
uccuugucuacccaggcau

SEQ ID NO: 2601492 - RNA, 19 nt, Artificial Sequence
  Description of Artificial Sequence: Synthetic oligonucleotide
uuaccgaggggacaaaaua

SEQ ID NO: 2601493 - RNA, 19 nt, Artificial Sequence
  Description of Artificial Sequence: Synthetic oligonucleotide
ugguccagcaagagaauug

SEQ ID NO: 2601494 - RNA, 19 nt, Artificial Sequence
  Description of Artificial Sequence: Synthetic oligonucleotide
uugguaaagcagcugucga

SEQ ID NO: 2601495 - RNA, 19 nt, Artificial Sequence
  Description of Artificial Sequence: Synthetic oligonucleotide
gaaaaucuccuugucuacc

SEQ ID NO: 2601496 - RNA, 19 nt, Artificial Sequence
  Description of Artificial Sequence: Synthetic oligonucleotide
uaugguucugaagugcucu

SEQ ID NO: 2601497 - RNA, 19 nt, Artificial Sequence
  Description of Artificial Sequence: Synthetic oligonucleotide
aaaauaugauggaaccagu

SEQ ID NO: 2601498 - RNA, 19 nt, Artificial Sequence
  Description of Artificial Sequence: Synthetic oligonucleotide
ugaaacagccauccuuugu

SEQ ID NO: 2601499 - RNA, 19 nt, Artificial Sequence
  Description of Artificial Sequence: Synthetic oligonucleotide
uacccaggcauuacccugg

SEQ ID NO: 2601500 - RNA, 19 nt, Artificial Sequence
  Description of Artificial Sequence: Synthetic oligonucleotide
auaccucuaaaggaucugg

SEQ ID NO: 2601501 - RNA, 19 nt, Artificial Sequence
  Description of Artificial Sequence: Synthetic oligonucleotide
aaccugguuauaauguuca

SEQ ID NO: 2601502 - RNA, 19 nt, Artificial Sequence
  Description of Artificial Sequence: Synthetic oligonucleotide
uaaccugguuauaauguuc

SEQ ID NO: 2601503 - RNA, 19 nt, Artificial Sequence
  Description of Artificial Sequence: Synthetic oligonucleotide
gagccuguggcauuggcac

SEQ ID NO: 2601504 - RNA, 19 nt, Artificial Sequence
  Description of Artificial Sequence: Synthetic oligonucleotide
aagucucuugguaaagcag

SEQ ID NO: 2601505 - RNA, 19 nt, Artificial Sequence
  Description of Artificial Sequence: Synthetic oligonucleotide
cucucagaggcccaacagg

SEQ ID NO: 2601506 - RNA, 19 nt, Artificial Sequence
  Description of Artificial Sequence: Synthetic oligonucleotide
uucucugacacgagcucag

SEQ ID NO: 2601507 - RNA, 19 nt, Artificial Sequence
  Description of Artificial Sequence: Synthetic oligonucleotide
aggaagauggugaagacau

SEQ ID NO: 2601508 - RNA, 19 nt, Artificial Sequence
  Description of Artificial Sequence: Synthetic oligonucleotide
uggggcucgggaauggucc

SEQ ID NO: 2601509 - RNA, 19 nt, Artificial Sequence
  Description of Artificial Sequence: Synthetic oligonucleotide
cugucugaaacagccaucc

SEQ ID NO: 2601510 - RNA, 19 nt, Artificial Sequence
  Description of Artificial Sequence: Synthetic oligonucleotide
agcuccaaucugcgaaugc

SEQ ID NO: 2601511 - RNA, 19 nt, Artificial Sequence
  Description of Artificial Sequence: Synthetic oligonucleotide
ccuuguaagcaauaggcag

SEQ ID NO: 2601512 - RNA, 19 nt, Artificial Sequence
  Description of Artificial Sequence: Synthetic oligonucleotide
agcaauaggcaggugcugg

SEQ ID NO: 2601513 - RNA, 19 nt, Artificial Sequence
  Description of Artificial Sequence: Synthetic oligonucleotide
ugucuacccaggcauuacc

SEQ ID NO: 2601514 - RNA, 19 nt, Artificial Sequence
  Description of Artificial Sequence: Synthetic oligonucleotide
ucacacaugcagguaaagc

SEQ ID NO: 2601515 - RNA, 19 nt, Artificial Sequence
  Description of Artificial Sequence: Synthetic oligonucleotide
ucacaacuagagcugucug

SEQ ID NO: 2601516 - RNA, 19 nt, Artificial Sequence
  Description of Artificial Sequence: Synthetic oligonucleotide
guggaggucaaggacaaag

SEQ ID NO: 2601517 - RNA, 19 nt, Artificial Sequence
  Description of Artificial Sequence: Synthetic oligonucleotide
aaccagucugagaaaaucu

SEQ ID NO: 2601518 - RNA, 19 nt, Artificial Sequence
  Description of Artificial Sequence: Synthetic oligonucleotide
aaaucuccuugucuaccca

SEQ ID NO: 2601519 - RNA, 19 nt, Artificial Sequence
  Description of Artificial Sequence: Synthetic oligonucleotide
ucuguggggcugcaguaag

SEQ ID NO: 2601520 - RNA, 19 nt, Artificial Sequence
  Description of Artificial Sequence: Synthetic oligonucleotide
cauuggcacacauuaggac

SEQ ID NO: 2601521 - RNA, 19 nt, Artificial Sequence
  Description of Artificial Sequence: Synthetic oligonucleotide
uaccgaggggacaaaauau

SEQ ID NO: 2601522 - RNA, 19 nt, Artificial Sequence
  Description of Artificial Sequence: Synthetic oligonucleotide
gagcucagacuccuguggg

SEQ ID NO: 2601523 - RNA, 19 nt, Artificial Sequence
  Description of Artificial Sequence: Synthetic oligonucleotide
aacaggcaaaagucucuug

SEQ ID NO: 2601524 - RNA, 19 nt, Artificial Sequence
  Description of Artificial Sequence: Synthetic oligonucleotide
gacauccagucacaacuag

SEQ ID NO: 2601525 - RNA, 19 nt, Artificial Sequence
  Description of Artificial Sequence: Synthetic oligonucleotide
aggcccaacaggcaaaagu

SEQ ID NO: 2601526 - RNA, 19 nt, Artificial Sequence
  Description of Artificial Sequence: Synthetic oligonucleotide
acaaaauaugauggaacca

SEQ ID NO: 2601527 - RNA, 19 nt, Artificial Sequence
  Description of Artificial Sequence: Synthetic oligonucleotide
cugacacgagcucagacuc

SEQ ID NO: 2601528 - RNA, 19 nt, Artificial Sequence
  Description of Artificial Sequence: Synthetic oligonucleotide
ugcucucuuaccgagggga

SEQ ID NO: 2601529 - RNA, 19 nt, Artificial Sequence
  Description of Artificial Sequence: Synthetic oligonucleotide
acaaccacagugcuaccca

SEQ ID NO: 2601530 - RNA, 19 nt, Artificial Sequence
  Description of Artificial Sequence: Synthetic oligonucleotide
augccuugcucuguggggc

SEQ ID NO: 2601531 - RNA, 19 nt, Artificial Sequence
  Description of Artificial Sequence: Synthetic oligonucleotide
aaucccaaaggcaguggag

SEQ ID NO: 2601532 - RNA, 19 nt, Artificial Sequence
  Description of Artificial Sequence: Synthetic oligonucleotide
aaacugugguaagucagcu

SEQ ID NO: 2601533 - RNA, 19 nt, Artificial Sequence
  Description of Artificial Sequence: Synthetic oligonucleotide
aaggaucuggggccaccac

SEQ ID NO: 2601534 - RNA, 19 nt, Artificial Sequence
  Description of Artificial Sequence: Synthetic oligonucleotide
gacaaagccaugauggaaa

SEQ ID NO: 2601535 - RNA, 19 nt, Artificial Sequence
  Description of Artificial Sequence: Synthetic oligonucleotide
ggccuuguaagcaauaggc

SEQ ID NO: 2601536 - RNA, 19 nt, Artificial Sequence
  Description of Artificial Sequence: Synthetic oligonucleotide
guggcauuggcacacauua

SEQ ID NO: 2601537 - RNA, 19 nt, Artificial Sequence
  Description of Artificial Sequence: Synthetic oligonucleotide
ucuccuugucuacccaggc

SEQ ID NO: 2601538 - RNA, 19 nt, Artificial Sequence
  Description of Artificial Sequence: Synthetic oligonucleotide
ggaaugaaaacugugguaa

SEQ ID NO: 2601539 - RNA, 19 nt, Artificial Sequence
  Description of Artificial Sequence: Synthetic oligonucleotide
uccuccccggcucucagag

SEQ ID NO: 2601540 - RNA, 19 nt, Artificial Sequence
  Description of Artificial Sequence: Synthetic oligonucleotide
acacauuaggacagucagc

SEQ ID NO: 2601541 - RNA, 19 nt, Artificial Sequence
  Description of Artificial Sequence: Synthetic oligonucleotide
aauaggcaggugcuggaua

SEQ ID NO: 2601542 - RNA, 19 nt, Artificial Sequence
  Description of Artificial Sequence: Synthetic oligonucleotide
gucugugggagccuguggc

SEQ ID NO: 2601543 - RNA, 19 nt, Artificial Sequence
  Description of Artificial Sequence: Synthetic oligonucleotide
caagagaauugccuugcug

SEQ ID NO: 2601544 - RNA, 19 nt, Artificial Sequence
  Description of Artificial Sequence: Synthetic oligonucleotide
gaaccagucugagaaaauc

SEQ ID NO: 2601545 - RNA, 19 nt, Artificial Sequence
  Description of Artificial Sequence: Synthetic oligonucleotide
auuacccugggccuuguaa

SEQ ID NO: 2601546 - RNA, 19 nt, Artificial Sequence
  Description of Artificial Sequence: Synthetic oligonucleotide
uuguaagcaauaggcaggu

SEQ ID NO: 2601547 - RNA, 19 nt, Artificial Sequence
  Description of Artificial Sequence: Synthetic oligonucleotide
ugcucuguggggcugcagu

SEQ ID NO: 2601548 - RNA, 19 nt, Artificial Sequence
  Description of Artificial Sequence: Synthetic oligonucleotide
agucagcuacaugaauccc

SEQ ID NO: 2601549 - RNA, 19 nt, Artificial Sequence
  Description of Artificial Sequence: Synthetic oligonucleotide
gaaucccaaaggcagugga

SEQ ID NO: 2601550 - RNA, 19 nt, Artificial Sequence
  Description of Artificial Sequence: Synthetic oligonucleotide
caaucugcgaaugccuugc

SEQ ID NO: 2601551 - RNA, 19 nt, Artificial Sequence
  Description of Artificial Sequence: Synthetic oligonucleotide
agcugucugaaacagccau

SEQ ID NO: 2601552 - RNA, 19 nt, Artificial Sequence
  Description of Artificial Sequence: Synthetic oligonucleotide
ugaaucccaaaggcagugg

SEQ ID NO: 2601553 - RNA, 19 nt, Artificial Sequence
  Description of Artificial Sequence: Synthetic oligonucleotide
ucuugguaaagcagcuguc

SEQ ID NO: 2601554 - RNA, 19 nt, Artificial Sequence
  Description of Artificial Sequence: Synthetic oligonucleotide
gaggucaaggacaaagcca

SEQ ID NO: 2601555 - RNA, 19 nt, Artificial Sequence
  Description of Artificial Sequence: Synthetic oligonucleotide
ucuaaaggaucuggggcca

SEQ ID NO: 2601556 - RNA, 19 nt, Artificial Sequence
  Description of Artificial Sequence: Synthetic oligonucleotide
  modified_base (2)..(2): a, c, u, g, unknown or other
anacuggcaggcaggaaga

SEQ ID NO: 2601557 - RNA, 19 nt, Artificial Sequence
  Description of Artificial Sequence: Synthetic oligonucleotide
ugguuauaauguucacaca

SEQ ID NO: 2601558 - RNA, 19 nt, Artificial Sequence
  Description of Artificial Sequence: Synthetic oligonucleotide
ccucuaaaggaucuggggc

SEQ ID NO: 2601559 - RNA, 19 nt, Artificial Sequence
  Description of Artificial Sequence: Synthetic oligonucleotide
uggauaccucuaaaggauc

SEQ ID NO: 2601560 - RNA, 19 nt, Artificial Sequence
  Description of Artificial Sequence: Synthetic oligonucleotide
acaacuagagcugucugaa

SEQ ID NO: 2601561 - RNA, 19 nt, Artificial Sequence
  Description of Artificial Sequence: Synthetic oligonucleotide
ugguaaagcagcugucgaa

SEQ ID NO: 2601562 - RNA, 19 nt, Artificial Sequence
  Description of Artificial Sequence: Synthetic oligonucleotide
gguuauaauguucacacau

SEQ ID NO: 2601563 - RNA, 19 nt, Artificial Sequence
  Description of Artificial Sequence: Synthetic oligonucleotide
aaacagccauccuuuguuu

SEQ ID NO: 2601564 - RNA, 19 nt, Artificial Sequence
  Description of Artificial Sequence: Synthetic oligonucleotide
auuccccaaguccuccccg

SEQ ID NO: 2601565 - RNA, 19 nt, Artificial Sequence
  Description of Artificial Sequence: Synthetic oligonucleotide
accugguuauaauguucac

SEQ ID NO: 2601566 - RNA, 19 nt, Artificial Sequence
  Description of Artificial Sequence: Synthetic oligonucleotide
aucugcgaaugccuugcuc

SEQ ID NO: 2601567 - RNA, 19 nt, Artificial Sequence
  Description of Artificial Sequence: Synthetic oligonucleotide
gauaccucuaaaggaucug

SEQ ID NO: 2601568 - RNA, 19 nt, Artificial Sequence
  Description of Artificial Sequence: Synthetic oligonucleotide
ccaacaaccacagugcuac

SEQ ID NO: 2601569 - RNA, 19 nt, Artificial Sequence
  Description of Artificial Sequence: Synthetic oligonucleotide
cuccccggcucucagaggc

SEQ ID NO: 2601570 - RNA, 19 nt, Artificial Sequence
  Description of Artificial Sequence: Synthetic oligonucleotide
cuacccaggcauuacccug

SEQ ID NO: 2601571 - RNA, 19 nt, Artificial Sequence
  Description of Artificial Sequence: Synthetic oligonucleotide
agaauugccuugcugucuu

SEQ ID NO: 2601572 - RNA, 19 nt, Artificial Sequence
  Description of Artificial Sequence: Synthetic oligonucleotide
uuccccaaguccuccccgg

SEQ ID NO: 2601573 - RNA, 19 nt, Artificial Sequence
  Description of Artificial Sequence: Synthetic oligonucleotide
aggucaaggacaaagccau

SEQ ID NO: 2601574 - RNA, 19 nt, Artificial Sequence
  Description of Artificial Sequence: Synthetic oligonucleotide
uggaaccagucugagaaaa

SEQ ID NO: 2601575 - RNA, 19 nt, Artificial Sequence
  Description of Artificial Sequence: Synthetic oligonucleotide
gcuggauaccucuaaagga

SEQ ID NO: 2601576 - RNA, 19 nt, Artificial Sequence
  Description of Artificial Sequence: Synthetic oligonucleotide
gaguuaauggcugcagaca

SEQ ID NO: 2601577 - RNA, 19 nt, Artificial Sequence
  Description of Artificial Sequence: Synthetic oligonucleotide
ucagacuccuguggguggg

SEQ ID NO: 2601578 - RNA, 19 nt, Artificial Sequence
  Description of Artificial Sequence: Synthetic oligonucleotide
caaaagucucuugguaaag

SEQ ID NO: 2601579 - RNA, 19 nt, Artificial Sequence
  Description of Artificial Sequence: Synthetic oligonucleotide
cacaaaccaacauucccca

SEQ ID NO: 2601580 - RNA, 19 nt, Artificial Sequence
  Description of Artificial Sequence: Synthetic oligonucleotide
  modified_base (7)..(7): a, c, u, g, unknown or other
gggucanacuggcaggcag

SEQ ID NO: 2601581 - RNA, 19 nt, Artificial Sequence
  Description of Artificial Sequence: Synthetic oligonucleotide
ucucuuaccgaggggacaa

SEQ ID NO: 2601582 - RNA, 19 nt, Artificial Sequence
  Description of Artificial Sequence: Synthetic oligonucleotide
aaaggaucuggggccacca

SEQ ID NO: 2601583 - RNA, 19 nt, Artificial Sequence
  Description of Artificial Sequence: Synthetic oligonucleotide
  modified_base (17)..(17): a, c, u, g, unknown or other
caguaaggaagggucanac

SEQ ID NO: 2601584 - RNA, 19 nt, Artificial Sequence
  Description of Artificial Sequence: Synthetic oligonucleotide
cucagacuccugugggugg

SEQ ID NO: 2601585 - RNA, 19 nt, Artificial Sequence
  Description of Artificial Sequence: Synthetic oligonucleotide
ucugugggagccuguggca

SEQ ID NO: 2601586 - RNA, 19 nt, Artificial Sequence
  Description of Artificial Sequence: Synthetic oligonucleotide
uacccugggccuuguaagc

SEQ ID NO: 2601587 - RNA, 19 nt, Artificial Sequence
  Description of Artificial Sequence: Synthetic oligonucleotide
cugagaaaaucuccuuguc

SEQ ID NO: 2601588 - RNA, 19 nt, Artificial Sequence
  Description of Artificial Sequence: Synthetic oligonucleotide
uccaaucugcgaaugccuu

SEQ ID NO: 2601589 - RNA, 19 nt, Artificial Sequence
  Description of Artificial Sequence: Synthetic oligonucleotide
ccagucugagaaaaucucc

SEQ ID NO: 2601590 - RNA, 19 nt, Artificial Sequence
  Description of Artificial Sequence: Synthetic oligonucleotide
cagcaagagaauugccuug

SEQ ID NO: 2601591 - RNA, 19 nt, Artificial Sequence
  Description of Artificial Sequence: Synthetic oligonucleotide
gauggugaagacauucucu

SEQ ID NO: 2601592 - RNA, 19 nt, Artificial Sequence
  Description of Artificial Sequence: Synthetic oligonucleotide
uucaggcaagccuaugguu

SEQ ID NO: 2601593 - RNA, 19 nt, Artificial Sequence
  Description of Artificial Sequence: Synthetic oligonucleotide
agcugucgaacacuggaau

SEQ ID NO: 2601594 - RNA, 19 nt, Artificial Sequence
  Description of Artificial Sequence: Synthetic oligonucleotide
ugacacgagcucagacucc

SEQ ID NO: 2601595 - RNA, 19 nt, Artificial Sequence
  Description of Artificial Sequence: Synthetic oligonucleotide
aaccacagugcuacccauc

SEQ ID NO: 2601596 - RNA, 19 nt, Artificial Sequence
  Description of Artificial Sequence: Synthetic oligonucleotide
aacugugguaagucagcua

SEQ ID NO: 2601597 - RNA, 19 nt, Artificial Sequence
  Description of Artificial Sequence: Synthetic oligonucleotide
acauagaaacacaaaccaa

SEQ ID NO: 2601598 - RNA, 19 nt, Artificial Sequence
  Description of Artificial Sequence: Synthetic oligonucleotide
aagugcucucuuaccgagg

SEQ ID NO: 2601599 - RNA, 19 nt, Artificial Sequence
  Description of Artificial Sequence: Synthetic oligonucleotide
ucagcuccaaucugcgaau

SEQ ID NO: 2601600 - RNA, 19 nt, Artificial Sequence
  Description of Artificial Sequence: Synthetic oligonucleotide
  modified_base (19)..(19): a, c, u, g, unknown or other
ugcaguaaggaagggucan

SEQ ID NO: 2601601 - RNA, 19 nt, Artificial Sequence
  Description of Artificial Sequence: Synthetic oligonucleotide
aggcaaaagucucuuggua

SEQ ID NO: 2601602 - RNA, 19 nt, Artificial Sequence
  Description of Artificial Sequence: Synthetic oligonucleotide
cacaacuagagcugucuga

SEQ ID NO: 2601603 - RNA, 19 nt, Artificial Sequence
  Description of Artificial Sequence: Synthetic oligonucleotide
agccauccuuuguuuggac

SEQ ID NO: 2601604 - RNA, 19 nt, Artificial Sequence
  Description of Artificial Sequence: Synthetic oligonucleotide
ggcaaaagucucuugguaa

SEQ ID NO: 2601605 - RNA, 19 nt, Artificial Sequence
  Description of Artificial Sequence: Synthetic oligonucleotide
aagcaauaggcaggugcug

SEQ ID NO: 2601606 - RNA, 19 nt, Artificial Sequence
  Description of Artificial Sequence: Synthetic oligonucleotide
aaucugcgaaugccuugcu

SEQ ID NO: 2601607 - RNA, 19 nt, Artificial Sequence
  Description of Artificial Sequence: Synthetic oligonucleotide
ucucuugguaaagcagcug

SEQ ID NO: 2601608 - RNA, 19 nt, Artificial Sequence
  Description of Artificial Sequence: Synthetic oligonucleotide
cuuucccaauggccaaggg

SEQ ID NO: 2601609 - RNA, 19 nt, Artificial Sequence
  Description of Artificial Sequence: Synthetic oligonucleotide
acgagcucagacuccugug

SEQ ID NO: 2601610 - RNA, 19 nt, Artificial Sequence
  Description of Artificial Sequence: Synthetic oligonucleotide
augauggaaccagucugag

SEQ ID NO: 2601611 - RNA, 19 nt, Artificial Sequence
  Description of Artificial Sequence: Synthetic oligonucleotide
ugucugaaacagccauccu

SEQ ID NO: 2601612 - RNA, 19 nt, Artificial Sequence
  Description of Artificial Sequence: Synthetic oligonucleotide
cugucgaacacuggaauga

SEQ ID NO: 2601613 - RNA, 19 nt, Artificial Sequence
  Description of Artificial Sequence: Synthetic oligonucleotide
cugucuucaggcaagccua

SEQ ID NO: 2601614 - RNA, 19 nt, Artificial Sequence
  Description of Artificial Sequence: Synthetic oligonucleotide
gucuacccaggcauuaccc

SEQ ID NO: 2601615 - RNA, 19 nt, Artificial Sequence
  Description of Artificial Sequence: Synthetic oligonucleotide
uuguuuggacagacauaga

SEQ ID NO: 2601616 - RNA, 19 nt, Artificial Sequence
  Description of Artificial Sequence: Synthetic oligonucleotide
cccaucagcuccaaucugc

SEQ ID NO: 2601617 - RNA, 19 nt, Artificial Sequence
  Description of Artificial Sequence: Synthetic oligonucleotide
accgaggggacaaaauaug

SEQ ID NO: 2601618 - RNA, 19 nt, Artificial Sequence
  Description of Artificial Sequence: Synthetic oligonucleotide
cucugacacgagcucagac

SEQ ID NO: 2601619 - RNA, 19 nt, Artificial Sequence
  Description of Artificial Sequence: Synthetic oligonucleotide
gcugcaguaaggaaggguc

SEQ ID NO: 2601620 - RNA, 19 nt, Artificial Sequence
  Description of Artificial Sequence: Synthetic oligonucleotide
cuggauaccucuaaaggau

SEQ ID NO: 2601621 - RNA, 19 nt, Artificial Sequence
  Description of Artificial Sequence: Synthetic oligonucleotide
agggcuugagucuguggga

SEQ ID NO: 2601622 - RNA, 19 nt, Artificial Sequence
  Description of Artificial Sequence: Synthetic oligonucleotide
  modified_base (6)..(6): a, c, u, g, unknown or other
ggucanacuggcaggcagg

SEQ ID NO: 2601623 - RNA, 19 nt, Artificial Sequence
  Description of Artificial Sequence: Synthetic oligonucleotide
cugaaacagccauccuuug

SEQ ID NO: 2601624 - RNA, 19 nt, Artificial Sequence
  Description of Artificial Sequence: Synthetic oligonucleotide
cuggaaugaaaacuguggu

SEQ ID NO: 2601625 - RNA, 19 nt, Artificial Sequence
  Description of Artificial Sequence: Synthetic oligonucleotide
acagugcuacccaucagcu

SEQ ID NO: 2601626 - RNA, 19 nt, Artificial Sequence
  Description of Artificial Sequence: Synthetic oligonucleotide
gcugucgaacacuggaaug

SEQ ID NO: 2601627 - RNA, 19 nt, Artificial Sequence
  Description of Artificial Sequence: Synthetic oligonucleotide
cuuuguuuggacagacaua

SEQ ID NO: 2601628 - RNA, 19 nt, Artificial Sequence
  Description of Artificial Sequence: Synthetic oligonucleotide
ccagucacaacuagagcug

SEQ ID NO: 2601629 - RNA, 19 nt, Artificial Sequence
  Description of Artificial Sequence: Synthetic oligonucleotide
gcagcugucgaacacugga

SEQ ID NO: 2601630 - RNA, 19 nt, Artificial Sequence
  Description of Artificial Sequence: Synthetic oligonucleotide
ugucgaacacuggaaugaa

SEQ ID NO: 2601631 - RNA, 19 nt, Artificial Sequence
  Description of Artificial Sequence: Synthetic oligonucleotide
acaggcccaacaaccacag

SEQ ID NO: 2601632 - RNA, 19 nt, Artificial Sequence
  Description of Artificial Sequence: Synthetic oligonucleotide
ucuuaccgaggggacaaaa

SEQ ID NO: 2601633 - RNA, 19 nt, Artificial Sequence
  Description of Artificial Sequence: Synthetic oligonucleotide
caacauuccccaaguccuc

SEQ ID NO: 2601634 - RNA, 19 nt, Artificial Sequence
  Description of Artificial Sequence: Synthetic oligonucleotide
cugcgaaugccuugcucug

SEQ ID NO: 2601635 - RNA, 19 nt, Artificial Sequence
  Description of Artificial Sequence: Synthetic oligonucleotide
ugucuucaggcaagccuau

SEQ ID NO: 2601636 - RNA, 19 nt, Artificial Sequence
  Description of Artificial Sequence: Synthetic oligonucleotide
uugucuacccaggcauuac

SEQ ID NO: 2601637 - RNA, 19 nt, Artificial Sequence
  Description of Artificial Sequence: Synthetic oligonucleotide
gcuccaaucugcgaaugcc

SEQ ID NO: 2601638 - RNA, 19 nt, Artificial Sequence
  Description of Artificial Sequence: Synthetic oligonucleotide
cacaugcagguaaagcaaa

SEQ ID NO: 2601639 - RNA, 19 nt, Artificial Sequence
  Description of Artificial Sequence: Synthetic oligonucleotide
gagucugugggagccugug

SEQ ID NO: 2601640 - RNA, 19 nt, Artificial Sequence
  Description of Artificial Sequence: Synthetic oligonucleotide
ggcccaacaaccacagugc

SEQ ID NO: 2601641 - RNA, 19 nt, Artificial Sequence
  Description of Artificial Sequence: Synthetic oligonucleotide
ggcccaacaggcaaaaguc

SEQ ID NO: 2601642 - RNA, 19 nt, Artificial Sequence
  Description of Artificial Sequence: Synthetic oligonucleotide
gcucucagaggcccaacag

SEQ ID NO: 2601643 - RNA, 19 nt, Artificial Sequence
  Description of Artificial Sequence: Synthetic oligonucleotide
agucacaacuagagcuguc

SEQ ID NO: 2601644 - RNA, 19 nt, Artificial Sequence
  Description of Artificial Sequence: Synthetic oligonucleotide
uguaagcaauaggcaggug

SEQ ID NO: 2601645 - RNA, 19 nt, Artificial Sequence
  Description of Artificial Sequence: Synthetic oligonucleotide
cugcaguaaggaaggguca

SEQ ID NO: 2601646 - RNA, 19 nt, Artificial Sequence
  Description of Artificial Sequence: Synthetic oligonucleotide
gcuugagucugugggagcc

SEQ ID NO: 2601647 - RNA, 19 nt, Artificial Sequence
  Description of Artificial Sequence: Synthetic oligonucleotide
cccaacaggcaaaagucuc

SEQ ID NO: 2601648 - RNA, 19 nt, Artificial Sequence
  Description of Artificial Sequence: Synthetic oligonucleotide
  modified_base (5)..(5): a, c, u, g, unknown or other
gucanacuggcaggcagga

SEQ ID NO: 2601649 - RNA, 19 nt, Artificial Sequence
  Description of Artificial Sequence: Synthetic oligonucleotide
acccaggcauuacccuggg

SEQ ID NO: 2601650 - RNA, 19 nt, Artificial Sequence
  Description of Artificial Sequence: Synthetic oligonucleotide
gggacaaaauaugauggaa

SEQ ID NO: 2601651 - RNA, 19 nt, Artificial Sequence
  Description of Artificial Sequence: Synthetic oligonucleotide
ccaacauuccccaaguccu

SEQ ID NO: 2601652 - RNA, 19 nt, Artificial Sequence
  Description of Artificial Sequence: Synthetic oligonucleotide
uugcugucuucaggcaagc

SEQ ID NO: 2601653 - RNA, 19 nt, Artificial Sequence
  Description of Artificial Sequence: Synthetic oligonucleotide
gcaguggaggucaaggaca

SEQ ID NO: 2601654 - RNA, 19 nt, Artificial Sequence
  Description of Artificial Sequence: Synthetic oligonucleotide
ugcgaaugccuugcucugu

SEQ ID NO: 2601655 - RNA, 19 nt, Artificial Sequence
  Description of Artificial Sequence: Synthetic oligonucleotide
gugcucucuuaccgagggg

SEQ ID NO: 2601656 - RNA, 19 nt, Artificial Sequence
  Description of Artificial Sequence: Synthetic oligonucleotide
  modified_base (4)..(4): a, c, u, g, unknown or other
ucanacuggcaggcaggaa

SEQ ID NO: 2601657 - RNA, 19 nt, Artificial Sequence
  Description of Artificial Sequence: Synthetic oligonucleotide
guaagucagcuacaugaau

SEQ ID NO: 2601658 - RNA, 19 nt, Artificial Sequence
  Description of Artificial Sequence: Synthetic oligonucleotide
gucacaacuagagcugucu

SEQ ID NO: 2601659 - RNA, 19 nt, Artificial Sequence
  Description of Artificial Sequence: Synthetic oligonucleotide
caugaaucccaaaggcagu

SEQ ID NO: 2601660 - RNA, 19 nt, Artificial Sequence
  Description of Artificial Sequence: Synthetic oligonucleotide
agacauucucugacacgag

SEQ ID NO: 2601661 - RNA, 19 nt, Artificial Sequence
  Description of Artificial Sequence: Synthetic oligonucleotide
cgaacacuggaaugaaaac

SEQ ID NO: 2601662 - RNA, 19 nt, Artificial Sequence
  Description of Artificial Sequence: Synthetic oligonucleotide
caacaaccacagugcuacc

SEQ ID NO: 2601663 - RNA, 19 nt, Artificial Sequence
  Description of Artificial Sequence: Synthetic oligonucleotide
gagaauugccuugcugucu

SEQ ID NO: 2601664 - RNA, 19 nt, Artificial Sequence
  Description of Artificial Sequence: Synthetic oligonucleotide
cagugcuacccaucagcuc

SEQ ID NO: 2601665 - RNA, 19 nt, Artificial Sequence
  Description of Artificial Sequence: Synthetic oligonucleotide
ucucugacacgagcucaga

SEQ ID NO: 2601666 - RNA, 19 nt, Artificial Sequence
  Description of Artificial Sequence: Synthetic oligonucleotide
cuaaccugguuauaauguu

SEQ ID NO: 2601667 - RNA, 19 nt, Artificial Sequence
  Description of Artificial Sequence: Synthetic oligonucleotide
cuucaggcaagccuauggu

SEQ ID NO: 2601668 - RNA, 19 nt, Artificial Sequence
  Description of Artificial Sequence: Synthetic oligonucleotide
gggcuugagucugugggag

SEQ ID NO: 2601669 - RNA, 19 nt, Artificial Sequence
  Description of Artificial Sequence: Synthetic oligonucleotide
acaugcagguaaagcaaaa

SEQ ID NO: 2601670 - RNA, 19 nt, Artificial Sequence
  Description of Artificial Sequence: Synthetic oligonucleotide
gccuaugguucugaagugc

SEQ ID NO: 2601671 - RNA, 19 nt, Artificial Sequence
  Description of Artificial Sequence: Synthetic oligonucleotide
cucagaggcccaacaggca

SEQ ID NO: 2601672 - RNA, 19 nt, Artificial Sequence
  Description of Artificial Sequence: Synthetic oligonucleotide
caguggaggucaaggacaa

SEQ ID NO: 2601673 - RNA, 19 nt, Artificial Sequence
  Description of Artificial Sequence: Synthetic oligonucleotide
ugugggagccuguggcauu

SEQ ID NO: 2601674 - RNA, 19 nt, Artificial Sequence
  Description of Artificial Sequence: Synthetic oligonucleotide
ccaaucugcgaaugccuug

SEQ ID NO: 2601675 - RNA, 19 nt, Artificial Sequence
  Description of Artificial Sequence: Synthetic oligonucleotide
cuccuugucuacccaggca

SEQ ID NO: 2601676 - RNA, 19 nt, Artificial Sequence
  Description of Artificial Sequence: Synthetic oligonucleotide
augguccagcaagagaauu

SEQ ID NO: 2601677 - RNA, 19 nt, Artificial Sequence
  Description of Artificial Sequence: Synthetic oligonucleotide
guuaauggcugcagacaaa

SEQ ID NO: 2601678 - RNA, 19 nt, Artificial Sequence
  Description of Artificial Sequence: Synthetic oligonucleotide
gcgaaugccuugcucugug

SEQ ID NO: 2601679 - RNA, 19 nt, Artificial Sequence
  Description of Artificial Sequence: Synthetic oligonucleotide
gguaagucagcuacaugaa

SEQ ID NO: 2601680 - RNA, 19 nt, Artificial Sequence
  Description of Artificial Sequence: Synthetic oligonucleotide
gggaaugguccagcaagag

SEQ ID NO: 2601681 - RNA, 19 nt, Artificial Sequence
  Description of Artificial Sequence: Synthetic oligonucleotide
aaguccuccccggcucuca

SEQ ID NO: 2601682 - RNA, 19 nt, Artificial Sequence
  Description of Artificial Sequence: Synthetic oligonucleotide
gcauuggcacacauuagga

SEQ ID NO: 2601683 - RNA, 19 nt, Artificial Sequence
  Description of Artificial Sequence: Synthetic oligonucleotide
gcucagacuccugugggug

SEQ ID NO: 2601684 - RNA, 19 nt, Artificial Sequence
  Description of Artificial Sequence: Synthetic oligonucleotide
cuccaaucugcgaaugccu

SEQ ID NO: 2601685 - RNA, 19 nt, Artificial Sequence
  Description of Artificial Sequence: Synthetic oligonucleotide
agcagcugucgaacacugg

SEQ ID NO: 2601686 - RNA, 19 nt, Artificial Sequence
  Description of Artificial Sequence: Synthetic oligonucleotide
cuuaccgaggggacaaaau

SEQ ID NO: 2601687 - RNA, 19 nt, Artificial Sequence
  Description of Artificial Sequence: Synthetic oligonucleotide
cuaaaggaucuggggccac

SEQ ID NO: 2601688 - RNA, 19 nt, Artificial Sequence
  Description of Artificial Sequence: Synthetic oligonucleotide
gccauccuuuguuuggaca

SEQ ID NO: 2601689 - RNA, 19 nt, Artificial Sequence
  Description of Artificial Sequence: Synthetic oligonucleotide
guucacacaugcagguaaa

SEQ ID NO: 2601690 - RNA, 19 nt, Artificial Sequence
  Description of Artificial Sequence: Synthetic oligonucleotide
agacauccagucacaacua

SEQ ID NO: 2601691 - RNA, 19 nt, Artificial Sequence
  Description of Artificial Sequence: Synthetic oligonucleotide
ccugguuauaauguucaca

SEQ ID NO: 2601692 - RNA, 19 nt, Artificial Sequence
  Description of Artificial Sequence: Synthetic oligonucleotide
cagcugucgaacacuggaa

SEQ ID NO: 2601693 - RNA, 19 nt, Artificial Sequence
  Description of Artificial Sequence: Synthetic oligonucleotide
caggcauuacccugggccu

SEQ ID NO: 2601694 - RNA, 19 nt, Artificial Sequence
  Description of Artificial Sequence: Synthetic oligonucleotide
gcaauaggcaggugcugga

SEQ ID NO: 2601695 - RNA, 19 nt, Artificial Sequence
  Description of Artificial Sequence: Synthetic oligonucleotide
agaggcccaacaggcaaaa

SEQ ID NO: 2601696 - RNA, 19 nt, Artificial Sequence
  Description of Artificial Sequence: Synthetic oligonucleotide
gccuuguaagcaauaggca

SEQ ID NO: 2601697 - RNA, 19 nt, Artificial Sequence
  Description of Artificial Sequence: Synthetic oligonucleotide
cuugucuacccaggcauua

SEQ ID NO: 2601698 - RNA, 19 nt, Artificial Sequence
  Description of Artificial Sequence: Synthetic oligonucleotide
cauccuuuguuuggacaga

SEQ ID NO: 2601699 - RNA, 19 nt, Artificial Sequence
  Description of Artificial Sequence: Synthetic oligonucleotide
gcacacauuaggacaguca

SEQ ID NO: 2601700 - RNA, 19 nt, Artificial Sequence
  Description of Artificial Sequence: Synthetic oligonucleotide
gggagucacaggcccaaca

SEQ ID NO: 2601701 - RNA, 19 nt, Artificial Sequence
  Description of Artificial Sequence: Synthetic oligonucleotide
ccgaggggacaaaauauga

SEQ ID NO: 2601702 - RNA, 19 nt, Artificial Sequence
  Description of Artificial Sequence: Synthetic oligonucleotide
ggcuugagucugugggagc

SEQ ID NO: 2601703 - RNA, 19 nt, Artificial Sequence
  Description of Artificial Sequence: Synthetic oligonucleotide
auguucacacaugcaggua

SEQ ID NO: 2601704 - RNA, 19 nt, Artificial Sequence
  Description of Artificial Sequence: Synthetic oligonucleotide
  modified_base (8)..(8): a, c, u, g, unknown or other
agggucanacuggcaggca

SEQ ID NO: 2601705 - RNA, 19 nt, Artificial Sequence
  Description of Artificial Sequence: Synthetic oligonucleotide
cucucuuaccgaggggaca

SEQ ID NO: 2601706 - RNA, 19 nt, Artificial Sequence
  Description of Artificial Sequence: Synthetic oligonucleotide
caggcaagccuaugguucu

SEQ ID NO: 2601707 - RNA, 19 nt, Artificial Sequence
  Description of Artificial Sequence: Synthetic oligonucleotide
  modified_base (12)..(12): a, c, u, g, unknown or other
aggaagggucanacuggca

SEQ ID NO: 2601708 - RNA, 19 nt, Artificial Sequence
  Description of Artificial Sequence: Synthetic oligonucleotide
caacuagagcugucugaaa

SEQ ID NO: 2601709 - RNA, 19 nt, Artificial Sequence
  Description of Artificial Sequence: Synthetic oligonucleotide
ccuuucccaauggccaagg

SEQ ID NO: 2601710 - RNA, 19 nt, Artificial Sequence
  Description of Artificial Sequence: Synthetic oligonucleotide
caccuuucccaauggccaa

SEQ ID NO: 2601711 - RNA, 19 nt, Artificial Sequence
  Description of Artificial Sequence: Synthetic oligonucleotide
cagcuccaaucugcgaaug

SEQ ID NO: 2601712 - RNA, 19 nt, Artificial Sequence
  Description of Artificial Sequence: Synthetic oligonucleotide
gucucuugguaaagcagcu

SEQ ID NO: 2601713 - RNA, 19 nt, Artificial Sequence
  Description of Artificial Sequence: Synthetic oligonucleotide
caauggccaagggcuugag

SEQ ID NO: 2601714 - RNA, 19 nt, Artificial Sequence
  Description of Artificial Sequence: Synthetic oligonucleotide
cacgagcucagacuccugu

SEQ ID NO: 2601715 - RNA, 19 nt, Artificial Sequence
  Description of Artificial Sequence: Synthetic oligonucleotide
cagaggcccaacaggcaaa

SEQ ID NO: 2601716 - RNA, 19 nt, Artificial Sequence
  Description of Artificial Sequence: Synthetic oligonucleotide
ggccaagggcuugagucug

SEQ ID NO: 2601717 - RNA, 19 nt, Artificial Sequence
  Description of Artificial Sequence: Synthetic oligonucleotide
ggauaccucuaaaggaucu

SEQ ID NO: 2601718 - RNA, 19 nt, Artificial Sequence
  Description of Artificial Sequence: Synthetic oligonucleotide
gacuccuguggguggggcu

SEQ ID NO: 2601719 - RNA, 19 nt, Artificial Sequence
  Description of Artificial Sequence: Synthetic oligonucleotide
aggcaagccuaugguucug

SEQ ID NO: 2601720 - RNA, 19 nt, Artificial Sequence
  Description of Artificial Sequence: Synthetic oligonucleotide
ccuaugguucugaagugcu

SEQ ID NO: 2601721 - RNA, 19 nt, Artificial Sequence
  Description of Artificial Sequence: Synthetic oligonucleotide
gcugucugaaacagccauc

SEQ ID NO: 2601722 - RNA, 19 nt, Artificial Sequence
  Description of Artificial Sequence: Synthetic oligonucleotide
cgaaugccuugcucugugg

SEQ ID NO: 2601723 - RNA, 19 nt, Artificial Sequence
  Description of Artificial Sequence: Synthetic oligonucleotide
ugggagucacaggcccaac

SEQ ID NO: 2601724 - RNA, 19 nt, Artificial Sequence
  Description of Artificial Sequence: Synthetic oligonucleotide
ggcucgggaaugguccagc

SEQ ID NO: 2601725 - RNA, 19 nt, Artificial Sequence
  Description of Artificial Sequence: Synthetic oligonucleotide
ccaacaggcaaaagucucu

SEQ ID NO: 2601726 - RNA, 19 nt, Artificial Sequence
  Description of Artificial Sequence: Synthetic oligonucleotide
ggucaaggacaaagccaug

SEQ ID NO: 2601727 - RNA, 19 nt, Artificial Sequence
  Description of Artificial Sequence: Synthetic oligonucleotide
gguucugaagugcucucuu

SEQ ID NO: 2601728 - RNA, 19 nt, Artificial Sequence
  Description of Artificial Sequence: Synthetic oligonucleotide
cugggagucacaggcccaa

SEQ ID NO: 2601729 - RNA, 19 nt, Artificial Sequence
  Description of Artificial Sequence: Synthetic oligonucleotide
gcucucuuaccgaggggac

SEQ ID NO: 2601730 - RNA, 19 nt, Artificial Sequence
  Description of Artificial Sequence: Synthetic oligonucleotide
ccuugcugucuucaggcaa

SEQ ID NO: 2601731 - RNA, 19 nt, Artificial Sequence
  Description of Artificial Sequence: Synthetic oligonucleotide
gcaagccuaugguucugaa

SEQ ID NO: 2601732 - RNA, 19 nt, Artificial Sequence
  Description of Artificial Sequence: Synthetic oligonucleotide
ccacagugcuacccaucag

SEQ ID NO: 2601733 - RNA, 19 nt, Artificial Sequence
  Description of Artificial Sequence: Synthetic oligonucleotide
guggguggggcucgggaau

SEQ ID NO: 2601734 - RNA, 19 nt, Artificial Sequence
  Description of Artificial Sequence: Synthetic oligonucleotide
ggcaagccuaugguucuga

SEQ ID NO: 2601735 - RNA, 19 nt, Artificial Sequence
  Description of Artificial Sequence: Synthetic oligonucleotide
ugcuacccaucagcuccaa

SEQ ID NO: 2601736 - RNA, 19 nt, Artificial Sequence
  Description of Artificial Sequence: Synthetic oligonucleotide
aguggaggucaaggacaaa

SEQ ID NO: 2601737 - RNA, 19 nt, Artificial Sequence
  Description of Artificial Sequence: Synthetic oligonucleotide
cagucacaacuagagcugu

SEQ ID NO: 2601738 - RNA, 19 nt, Artificial Sequence
  Description of Artificial Sequence: Synthetic oligonucleotide
acacgagcucagacuccug

SEQ ID NO: 2601739 - RNA, 19 nt, Artificial Sequence
  Description of Artificial Sequence: Synthetic oligonucleotide
gcucuguggggcugcagua

SEQ ID NO: 2601740 - RNA, 19 nt, Artificial Sequence
  Description of Artificial Sequence: Synthetic oligonucleotide
caaagggcucugggaguca

SEQ ID NO: 2601741 - RNA, 19 nt, Artificial Sequence
  Description of Artificial Sequence: Synthetic oligonucleotide
caacaggcaaaagucucuu

SEQ ID NO: 2601742 - RNA, 19 nt, Artificial Sequence
  Description of Artificial Sequence: Synthetic oligonucleotide
ggggcucgggaauggucca

SEQ ID NO: 2601743 - RNA, 19 nt, Artificial Sequence
  Description of Artificial Sequence: Synthetic oligonucleotide
guccuccccggcucucaga

SEQ ID NO: 2601744 - RNA, 19 nt, Artificial Sequence
  Description of Artificial Sequence: Synthetic oligonucleotide
gcaagagaauugccuugcu

SEQ ID NO: 2601745 - RNA, 19 nt, Artificial Sequence
  Description of Artificial Sequence: Synthetic oligonucleotide
ggcugcaguaaggaagggu

SEQ ID NO: 2601746 - RNA, 19 nt, Artificial Sequence
  Description of Artificial Sequence: Synthetic oligonucleotide
caauaggcaggugcuggau

SEQ ID NO: 2601747 - RNA, 19 nt, Artificial Sequence
  Description of Artificial Sequence: Synthetic oligonucleotide
gggcucgggaaugguccag

SEQ ID NO: 2601748 - RNA, 19 nt, Artificial Sequence
  Description of Artificial Sequence: Synthetic oligonucleotide
ccuccccggcucucagagg

SEQ ID NO: 2601749 - RNA, 19 nt, Artificial Sequence
  Description of Artificial Sequence: Synthetic oligonucleotide
cgggaaugguccagcaaga

SEQ ID NO: 2601750 - RNA, 19 nt, Artificial Sequence
  Description of Artificial Sequence: Synthetic oligonucleotide
gcccaacaggcaaaagucu

SEQ ID NO: 2601751 - RNA, 19 nt, Artificial Sequence
  Description of Artificial Sequence: Synthetic oligonucleotide
ggaaccagucugagaaaau

SEQ ID NO: 2601752 - RNA, 19 nt, Artificial Sequence
  Description of Artificial Sequence: Synthetic oligonucleotide
cauuacccugggccuugua

SEQ ID NO: 2601753 - RNA, 19 nt, Artificial Sequence
  Description of Artificial Sequence: Synthetic oligonucleotide
ccaauggccaagggcuuga

SEQ ID NO: 2601754 - RNA, 19 nt, Artificial Sequence
  Description of Artificial Sequence: Synthetic oligonucleotide
cugugggagccuguggcau

SEQ ID NO: 2601755 - RNA, 19 nt, Artificial Sequence
  Description of Artificial Sequence: Synthetic oligonucleotide
cccaggcauuacccugggc

SEQ ID NO: 2601756 - RNA, 19 nt, Artificial Sequence
  Description of Artificial Sequence: Synthetic oligonucleotide
cgaggggacaaaauaugau

SEQ ID NO: 2601757 - RNA, 19 nt, Artificial Sequence
  Description of Artificial Sequence: Synthetic oligonucleotide
cuguggcauuggcacacau

SEQ ID NO: 2601758 - RNA, 19 nt, Artificial Sequence
  Description of Artificial Sequence: Synthetic oligonucleotide
cucuuaccgaggggacaaa

SEQ ID NO: 2601759 - RNA, 19 nt, Artificial Sequence
  Description of Artificial Sequence: Synthetic oligonucleotide
gcuacccaucagcuccaau

SEQ ID NO: 2601760 - RNA, 19 nt, Artificial Sequence
  Description of Artificial Sequence: Synthetic oligonucleotide
ccuguggcauuggcacaca

SEQ ID NO: 2601761 - RNA, 19 nt, Artificial Sequence
  Description of Artificial Sequence: Synthetic oligonucleotide
gcauuacccugggccuugu

SEQ ID NO: 2601762 - RNA, 19 nt, Artificial Sequence
  Description of Artificial Sequence: Synthetic oligonucleotide
ccggcucucagaggcccaa

SEQ ID NO: 2601763 - RNA, 19 nt, Artificial Sequence
  Description of Artificial Sequence: Synthetic oligonucleotide
auccauuccaaucaaaugc

SEQ ID NO: 2601764 - RNA, 19 nt, Artificial Sequence
  Description of Artificial Sequence: Synthetic oligonucleotide
aaagucauagaccacaggu

SEQ ID NO: 2601765 - RNA, 19 nt, Artificial Sequence
  Description of Artificial Sequence: Synthetic oligonucleotide
agaagagaagcacagcagc

SEQ ID NO: 2601766 - RNA, 19 nt, Artificial Sequence
  Description of Artificial Sequence: Synthetic oligonucleotide
aaauccugcagugaauucc

SEQ ID NO: 2601767 - RNA, 19 nt, Artificial Sequence
  Description of Artificial Sequence: Synthetic oligonucleotide
uucaguauuacauccagug

SEQ ID NO: 2601768 - RNA, 19 nt, Artificial Sequence
  Description of Artificial Sequence: Synthetic oligonucleotide
uauugaacacucuaaacug

SEQ ID NO: 2601769 - RNA, 19 nt, Artificial Sequence
  Description of Artificial Sequence: Synthetic oligonucleotide
aagguguuguaguuggccc

SEQ ID NO: 2601770 - RNA, 19 nt, Artificial Sequence
  Description of Artificial Sequence: Synthetic oligonucleotide
cagauuauggcccaggugc

SEQ ID NO: 2601771 - RNA, 19 nt, Artificial Sequence
  Description of Artificial Sequence: Synthetic oligonucleotide
cauccagugaccuucaugc

SEQ ID NO: 2601772 - RNA, 19 nt, Artificial Sequence
  Description of Artificial Sequence: Synthetic oligonucleotide
aaagguguuguaguuggcc

SEQ ID NO: 2601773 - RNA, 19 nt, Artificial Sequence
  Description of Artificial Sequence: Synthetic oligonucleotide
ucuaaacugaacaaauccu

SEQ ID NO: 2601774 - RNA, 19 nt, Artificial Sequence
  Description of Artificial Sequence: Synthetic oligonucleotide
auuacauccagugaccuuc

SEQ ID NO: 2601775 - RNA, 19 nt, Artificial Sequence
  Description of Artificial Sequence: Synthetic oligonucleotide
aacgguagaagagaagcac

SEQ ID NO: 2601776 - RNA, 19 nt, Artificial Sequence
  Description of Artificial Sequence: Synthetic oligonucleotide
ucaacgguagaagagaagc

SEQ ID NO: 2601777 - RNA, 19 nt, Artificial Sequence
  Description of Artificial Sequence: Synthetic oligonucleotide
uugggcacaugccagaucc

SEQ ID NO: 2601778 - RNA, 19 nt, Artificial Sequence
  Description of Artificial Sequence: Synthetic oligonucleotide
ucaaaugccgagaagucac

SEQ ID NO: 2601779 - RNA, 19 nt, Artificial Sequence
  Description of Artificial Sequence: Synthetic oligonucleotide
gaugcagugaauuucagua

SEQ ID NO: 2601780 - RNA, 19 nt, Artificial Sequence
  Description of Artificial Sequence: Synthetic oligonucleotide
auuggaggagucugggucc

SEQ ID NO: 2601781 - RNA, 19 nt, Artificial Sequence
  Description of Artificial Sequence: Synthetic oligonucleotide
uauuguugggcacaugcca

SEQ ID NO: 2601782 - RNA, 19 nt, Artificial Sequence
  Description of Artificial Sequence: Synthetic oligonucleotide
aaugccgagaagucaccac

SEQ ID NO: 2601783 - RNA, 19 nt, Artificial Sequence
  Description of Artificial Sequence: Synthetic oligonucleotide
uccauuccaaucaaaugcc

SEQ ID NO: 2601784 - RNA, 19 nt, Artificial Sequence
  Description of Artificial Sequence: Synthetic oligonucleotide
uccguauccauuccaauca

SEQ ID NO: 2601785 - RNA, 19 nt, Artificial Sequence
  Description of Artificial Sequence: Synthetic oligonucleotide
guagucaucacuuguggcc

SEQ ID NO: 2601786 - RNA, 19 nt, Artificial Sequence
  Description of Artificial Sequence: Synthetic oligonucleotide
auuccaaucaaaugccgag

SEQ ID NO: 2601787 - RNA, 19 nt, Artificial Sequence
  Description of Artificial Sequence: Synthetic oligonucleotide
ucccacaccacaaaguucu

SEQ ID NO: 2601788 - RNA, 19 nt, Artificial Sequence
  Description of Artificial Sequence: Synthetic oligonucleotide
caguauuacauccagugac

SEQ ID NO: 2601789 - RNA, 19 nt, Artificial Sequence
  Description of Artificial Sequence: Synthetic oligonucleotide
aguauuacauccagugacc

SEQ ID NO: 2601790 - RNA, 19 nt, Artificial Sequence
  Description of Artificial Sequence: Synthetic oligonucleotide
ucauuauugaacacucuaa

SEQ ID NO: 2601791 - RNA, 19 nt, Artificial Sequence
  Description of Artificial Sequence: Synthetic oligonucleotide
aacacucuaaacugaacaa

SEQ ID NO: 2601792 - RNA, 19 nt, Artificial Sequence
  Description of Artificial Sequence: Synthetic oligonucleotide
aguaauaagaggcugucuu

SEQ ID NO: 2601793 - RNA, 19 nt, Artificial Sequence
  Description of Artificial Sequence: Synthetic oligonucleotide
uauccauuccaaucaaaug

SEQ ID NO: 2601794 - RNA, 19 nt, Artificial Sequence
  Description of Artificial Sequence: Synthetic oligonucleotide
ucaguuaucucccggcuac

SEQ ID NO: 2601795 - RNA, 19 nt, Artificial Sequence
  Description of Artificial Sequence: Synthetic oligonucleotide
ucaguauuacauccaguga

SEQ ID NO: 2601796 - RNA, 19 nt, Artificial Sequence
  Description of Artificial Sequence: Synthetic oligonucleotide
aauaagaggcugucuucug

SEQ ID NO: 2601797 - RNA, 19 nt, Artificial Sequence
  Description of Artificial Sequence: Synthetic oligonucleotide
ugcucucucauuauugaac

SEQ ID NO: 2601798 - RNA, 19 nt, Artificial Sequence
  Description of Artificial Sequence: Synthetic oligonucleotide
agucauagaccacagguaa

SEQ ID NO: 2601799 - RNA, 19 nt, Artificial Sequence
  Description of Artificial Sequence: Synthetic oligonucleotide
ucauagaccacagguaaug

SEQ ID NO: 2601800 - RNA, 19 nt, Artificial Sequence
  Description of Artificial Sequence: Synthetic oligonucleotide
agugaauuucaguauuaca

SEQ ID NO: 2601801 - RNA, 19 nt, Artificial Sequence
  Description of Artificial Sequence: Synthetic oligonucleotide
caggccaaacagauuaugg

SEQ ID NO: 2601802 - RNA, 19 nt, Artificial Sequence
  Description of Artificial Sequence: Synthetic oligonucleotide
aacagauuauggcccaggu

SEQ ID NO: 2601803 - RNA, 19 nt, Artificial Sequence
  Description of Artificial Sequence: Synthetic oligonucleotide
uccaacacuucccuccucc

SEQ ID NO: 2601804 - RNA, 19 nt, Artificial Sequence
  Description of Artificial Sequence: Synthetic oligonucleotide
ugaccuucaugccagcaca

SEQ ID NO: 2601805 - RNA, 19 nt, Artificial Sequence
  Description of Artificial Sequence: Synthetic oligonucleotide
gaugucguaguagccaggg

SEQ ID NO: 2601806 - RNA, 19 nt, Artificial Sequence
  Description of Artificial Sequence: Synthetic oligonucleotide
aaacagauuauggcccagg

SEQ ID NO: 2601807 - RNA, 19 nt, Artificial Sequence
  Description of Artificial Sequence: Synthetic oligonucleotide
ugucguaguagccaggguu

SEQ ID NO: 2601808 - RNA, 19 nt, Artificial Sequence
  Description of Artificial Sequence: Synthetic oligonucleotide
  modified_base (16)..(16): a, c, u, g, unknown or other
cuugcugacuggaccngcg

SEQ ID NO: 2601809 - RNA, 19 nt, Artificial Sequence
  Description of Artificial Sequence: Synthetic oligonucleotide
ucucucauuauugaacacu

SEQ ID NO: 2601810 - RNA, 19 nt, Artificial Sequence
  Description of Artificial Sequence: Synthetic oligonucleotide
uccagugaccuucaugcca

SEQ ID NO: 2601811 - RNA, 19 nt, Artificial Sequence
  Description of Artificial Sequence: Synthetic oligonucleotide
cucucauuauugaacacuc

SEQ ID NO: 2601812 - RNA, 19 nt, Artificial Sequence
  Description of Artificial Sequence: Synthetic oligonucleotide
gagaagucaccacacugcc

SEQ ID NO: 2601813 - RNA, 19 nt, Artificial Sequence
  Description of Artificial Sequence: Synthetic oligonucleotide
aguucucaacgguagaaga

SEQ ID NO: 2601814 - RNA, 19 nt, Artificial Sequence
  Description of Artificial Sequence: Synthetic oligonucleotide
aaguucucaacgguagaag

SEQ ID NO: 2601815 - RNA, 19 nt, Artificial Sequence
  Description of Artificial Sequence: Synthetic oligonucleotide
uaauaagaggcugucuucu

SEQ ID NO: 2601816 - RNA, 19 nt, Artificial Sequence
  Description of Artificial Sequence: Synthetic oligonucleotide
gcuauuguugggcacaugc

SEQ ID NO: 2601817 - RNA, 19 nt, Artificial Sequence
  Description of Artificial Sequence: Synthetic oligonucleotide
uccaauuuugcagggagcu

SEQ ID NO: 2601818 - RNA, 19 nt, Artificial Sequence
  Description of Artificial Sequence: Synthetic oligonucleotide
uccaaucaaaugccgagaa

SEQ ID NO: 2601819 - RNA, 19 nt, Artificial Sequence
  Description of Artificial Sequence: Synthetic oligonucleotide
caguccaacacuucccucc

SEQ ID NO: 2601820 - RNA, 19 nt, Artificial Sequence
  Description of Artificial Sequence: Synthetic oligonucleotide
uggaugucguaguagccag

SEQ ID NO: 2601821 - RNA, 19 nt, Artificial Sequence
  Description of Artificial Sequence: Synthetic oligonucleotide
uacagauuggaggagucug

SEQ ID NO: 2601822 - RNA, 19 nt, Artificial Sequence
  Description of Artificial Sequence: Synthetic oligonucleotide
cuauuguugggcacaugcc

SEQ ID NO: 2601823 - RNA, 19 nt, Artificial Sequence
  Description of Artificial Sequence: Synthetic oligonucleotide
uuaucucccggcuacugcu

SEQ ID NO: 2601824 - RNA, 19 nt, Artificial Sequence
  Description of Artificial Sequence: Synthetic oligonucleotide
gagccuacagauuggagga

SEQ ID NO: 2601825 - RNA, 19 nt, Artificial Sequence
  Description of Artificial Sequence: Synthetic oligonucleotide
guacaggccaaacagauua

SEQ ID NO: 2601826 - RNA, 19 nt, Artificial Sequence
  Description of Artificial Sequence: Synthetic oligonucleotide
uucucaacgguagaagaga

SEQ ID NO: 2601827 - RNA, 19 nt, Artificial Sequence
  Description of Artificial Sequence: Synthetic oligonucleotide
aaaguucucaacgguagaa

SEQ ID NO: 2601828 - RNA, 19 nt, Artificial Sequence
  Description of Artificial Sequence: Synthetic oligonucleotide
uguaguuggcccaguugcc

SEQ ID NO: 2601829 - RNA, 19 nt, Artificial Sequence
  Description of Artificial Sequence: Synthetic oligonucleotide
augccagauccccagguuc

SEQ ID NO: 2601830 - RNA, 19 nt, Artificial Sequence
  Description of Artificial Sequence: Synthetic oligonucleotide
uuccguauccauuccaauc

SEQ ID NO: 2601831 - RNA, 19 nt, Artificial Sequence
  Description of Artificial Sequence: Synthetic oligonucleotide
accaaagucauagaccaca

SEQ ID NO: 2601832 - RNA, 19 nt, Artificial Sequence
  Description of Artificial Sequence: Synthetic oligonucleotide
ugcagugaauuucaguauu

SEQ ID NO: 2601833 - RNA, 19 nt, Artificial Sequence
  Description of Artificial Sequence: Synthetic oligonucleotide
ggccaaacagauuauggcc

SEQ ID NO: 2601834 - RNA, 19 nt, Artificial Sequence
  Description of Artificial Sequence: Synthetic oligonucleotide
guaucucugguacaggcca

SEQ ID NO: 2601835 - RNA, 19 nt, Artificial Sequence
  Description of Artificial Sequence: Synthetic oligonucleotide
auagaccacagguaaugcu

SEQ ID NO: 2601836 - RNA, 19 nt, Artificial Sequence
  Description of Artificial Sequence: Synthetic oligonucleotide
agaggcugucuucugagca

SEQ ID NO: 2601837 - RNA, 19 nt, Artificial Sequence
  Description of Artificial Sequence: Synthetic oligonucleotide
aacacuucccuccuccaua

SEQ ID NO: 2601838 - RNA, 19 nt, Artificial Sequence
  Description of Artificial Sequence: Synthetic oligonucleotide
  modified_base (10)..(10): a, c, u, g, unknown or other
gacuggaccngcgaucgcc

SEQ ID NO: 2601839 - RNA, 19 nt, Artificial Sequence
  Description of Artificial Sequence: Synthetic oligonucleotide
gugaguuccguauccauuc

SEQ ID NO: 2601840 - RNA, 19 nt, Artificial Sequence
  Description of Artificial Sequence: Synthetic oligonucleotide
ugaacaaauccugcaguga

SEQ ID NO: 2601841 - RNA, 19 nt, Artificial Sequence
  Description of Artificial Sequence: Synthetic oligonucleotide
uagucaucacuuguggccc

SEQ ID NO: 2601842 - RNA, 19 nt, Artificial Sequence
  Description of Artificial Sequence: Synthetic oligonucleotide
guaauaagaggcugucuuc

SEQ ID NO: 2601843 - RNA, 19 nt, Artificial Sequence
  Description of Artificial Sequence: Synthetic oligonucleotide
acagauuauggcccaggug

SEQ ID NO: 2601844 - RNA, 19 nt, Artificial Sequence
  Description of Artificial Sequence: Synthetic oligonucleotide
ggugcgguaccucagcagg

SEQ ID NO: 2601845 - RNA, 19 nt, Artificial Sequence
  Description of Artificial Sequence: Synthetic oligonucleotide
cuucuggccauaaggggag

SEQ ID NO: 2601846 - RNA, 19 nt, Artificial Sequence
  Description of Artificial Sequence: Synthetic oligonucleotide
ucccuucuggaaagaaucc

SEQ ID NO: 2601847 - RNA, 19 nt, Artificial Sequence
  Description of Artificial Sequence: Synthetic oligonucleotide
  modified_base (12)..(12): a, c, u, g, unknown or other
cugacuggaccngcgaucg

SEQ ID NO: 2601848 - RNA, 19 nt, Artificial Sequence
  Description of Artificial Sequence: Synthetic oligonucleotide
gugaauuucaguauuacau

SEQ ID NO: 2601849 - RNA, 19 nt, Artificial Sequence
  Description of Artificial Sequence: Synthetic oligonucleotide
cauuauugaacacucuaaa

SEQ ID NO: 2601850 - RNA, 19 nt, Artificial Sequence
  Description of Artificial Sequence: Synthetic oligonucleotide
uacugcuguacgcaacgug

SEQ ID NO: 2601851 - RNA, 19 nt, Artificial Sequence
  Description of Artificial Sequence: Synthetic oligonucleotide
ucucaacgguagaagagaa

SEQ ID NO: 2601852 - RNA, 19 nt, Artificial Sequence
  Description of Artificial Sequence: Synthetic oligonucleotide
auccagugaccuucaugcc

SEQ ID NO: 2601853 - RNA, 19 nt, Artificial Sequence
  Description of Artificial Sequence: Synthetic oligonucleotide
agcuucaguuaucucccgg

SEQ ID NO: 2601854 - RNA, 19 nt, Artificial Sequence
  Description of Artificial Sequence: Synthetic oligonucleotide
ucucauuauugaacacucu

SEQ ID NO: 2601855 - RNA, 19 nt, Artificial Sequence
  Description of Artificial Sequence: Synthetic oligonucleotide
acauccagugaccuucaug

SEQ ID NO: 2601856 - RNA, 19 nt, Artificial Sequence
  Description of Artificial Sequence: Synthetic oligonucleotide
guucucaacgguagaagag

SEQ ID NO: 2601857 - RNA, 19 nt, Artificial Sequence
  Description of Artificial Sequence: Synthetic oligonucleotide
uucugagcaucaccaaagu

SEQ ID NO: 2601858 - RNA, 19 nt, Artificial Sequence
  Description of Artificial Sequence: Synthetic oligonucleotide
gagucugggucccacacca

SEQ ID NO: 2601859 - RNA, 19 nt, Artificial Sequence
  Description of Artificial Sequence: Synthetic oligonucleotide
uucuuguagucaucacuug

SEQ ID NO: 2601860 - RNA, 19 nt, Artificial Sequence
  Description of Artificial Sequence: Synthetic oligonucleotide
agucaucacuuguggcccc

SEQ ID NO: 2601861 - RNA, 19 nt, Artificial Sequence
  Description of Artificial Sequence: Synthetic oligonucleotide
  modified_base (19)..(19): a, c, u, g, unknown or other
ugccuugcugacuggaccn

SEQ ID NO: 2601862 - RNA, 19 nt, Artificial Sequence
  Description of Artificial Sequence: Synthetic oligonucleotide
auuguugggcacaugccag

SEQ ID NO: 2601863 - RNA, 19 nt, Artificial Sequence
  Description of Artificial Sequence: Synthetic oligonucleotide
ugaguuccguauccauucc

SEQ ID NO: 2601864 - RNA, 19 nt, Artificial Sequence
  Description of Artificial Sequence: Synthetic oligonucleotide
  modified_base (3)..(3): a, c, u, g, unknown or other
ccngcgaucgcccaugugc

SEQ ID NO: 2601865 - RNA, 19 nt, Artificial Sequence
  Description of Artificial Sequence: Synthetic oligonucleotide
aucgcccaugugcacuucc

SEQ ID NO: 2601866 - RNA, 19 nt, Artificial Sequence
  Description of Artificial Sequence: Synthetic oligonucleotide
cacuggguaucucugguac

SEQ ID NO: 2601867 - RNA, 19 nt, Artificial Sequence
  Description of Artificial Sequence: Synthetic oligonucleotide
aaggcauuggcugcucucu

SEQ ID NO: 2601868 - RNA, 19 nt, Artificial Sequence
  Description of Artificial Sequence: Synthetic oligonucleotide
augccgagaagucaccaca

SEQ ID NO: 2601869 - RNA, 19 nt, Artificial Sequence
  Description of Artificial Sequence: Synthetic oligonucleotide
gcuacugcuguacgcaacg

SEQ ID NO: 2601870 - RNA, 19 nt, Artificial Sequence
  Description of Artificial Sequence: Synthetic oligonucleotide
caacgugaguuccguaucc

SEQ ID NO: 2601871 - RNA, 19 nt, Artificial Sequence
  Description of Artificial Sequence: Synthetic oligonucleotide
cucauuauugaacacucua

SEQ ID NO: 2601872 - RNA, 19 nt, Artificial Sequence
  Description of Artificial Sequence: Synthetic oligonucleotide
aucaaaugccgagaaguca

SEQ ID NO: 2601873 - RNA, 19 nt, Artificial Sequence
  Description of Artificial Sequence: Synthetic oligonucleotide
acugcuguacgcaacguga

SEQ ID NO: 2601874 - RNA, 19 nt, Artificial Sequence
  Description of Artificial Sequence: Synthetic oligonucleotide
auugaacacucuaaacuga

SEQ ID NO: 2601875 - RNA, 19 nt, Artificial Sequence
  Description of Artificial Sequence: Synthetic oligonucleotide
  modified_base (14)..(14): a, c, u, g, unknown or other
ugcugacuggaccngcgau

SEQ ID NO: 2601876 - RNA, 19 nt, Artificial Sequence
  Description of Artificial Sequence: Synthetic oligonucleotide
cauuccaaucaaaugccga

SEQ ID NO: 2601877 - RNA, 19 nt, Artificial Sequence
  Description of Artificial Sequence: Synthetic oligonucleotide
ugccagauccccagguucu

SEQ ID NO: 2601878 - RNA, 19 nt, Artificial Sequence
  Description of Artificial Sequence: Synthetic oligonucleotide
cuccaauuuugcagggagc

SEQ ID NO: 2601879 - RNA, 19 nt, Artificial Sequence
  Description of Artificial Sequence: Synthetic oligonucleotide
aaggugcgguaccucagca

SEQ ID NO: 2601880 - RNA, 19 nt, Artificial Sequence
  Description of Artificial Sequence: Synthetic oligonucleotide
acagauuggaggagucugg

SEQ ID NO: 2601881 - RNA, 19 nt, Artificial Sequence
  Description of Artificial Sequence: Synthetic oligonucleotide
acuucccuccuccauauuu

SEQ ID NO: 2601882 - RNA, 19 nt, Artificial Sequence
  Description of Artificial Sequence: Synthetic oligonucleotide
uucaguuaucucccggcua

SEQ ID NO: 2601883 - RNA, 19 nt, Artificial Sequence
  Description of Artificial Sequence: Synthetic oligonucleotide
gaagccacugaaggugcgg

SEQ ID NO: 2601884 - RNA, 19 nt, Artificial Sequence
  Description of Artificial Sequence: Synthetic oligonucleotide
cucaacgguagaagagaag

SEQ ID NO: 2601885 - RNA, 19 nt, Artificial Sequence
  Description of Artificial Sequence: Synthetic oligonucleotide
ucaugccagcacacaaggc

SEQ ID NO: 2601886 - RNA, 19 nt, Artificial Sequence
  Description of Artificial Sequence: Synthetic oligonucleotide
aagucauagaccacaggua

SEQ ID NO: 2601887 - RNA, 19 nt, Artificial Sequence
  Description of Artificial Sequence: Synthetic oligonucleotide
uuacauccagugaccuuca

SEQ ID NO: 2601888 - RNA, 19 nt, Artificial Sequence
  Description of Artificial Sequence: Synthetic oligonucleotide
guaaugcugggccauuguc

SEQ ID NO: 2601889 - RNA, 19 nt, Artificial Sequence
  Description of Artificial Sequence: Synthetic oligonucleotide
  modified_base (9)..(9): a, c, u, g, unknown or other
acuggaccngcgaucgccc

SEQ ID NO: 2601890 - RNA, 19 nt, Artificial Sequence
  Description of Artificial Sequence: Synthetic oligonucleotide
agguguuguaguuggccca

SEQ ID NO: 2601891 - RNA, 19 nt, Artificial Sequence
  Description of Artificial Sequence: Synthetic oligonucleotide
augcagugaauuucaguau

SEQ ID NO: 2601892 - RNA, 19 nt, Artificial Sequence
  Description of Artificial Sequence: Synthetic oligonucleotide
cagauuggaggagucuggg

SEQ ID NO: 2601893 - RNA, 19 nt, Artificial Sequence
  Description of Artificial Sequence: Synthetic oligonucleotide
gugaccuucaugccagcac

SEQ ID NO: 2601894 - RNA, 19 nt, Artificial Sequence
  Description of Artificial Sequence: Synthetic oligonucleotide
acacucuaaacugaacaaa

SEQ ID NO: 2601895 - RNA, 19 nt, Artificial Sequence
  Description of Artificial Sequence: Synthetic oligonucleotide
gcuucaguuaucucccggc

SEQ ID NO: 2601896 - RNA, 19 nt, Artificial Sequence
  Description of Artificial Sequence: Synthetic oligonucleotide
cagugaauuucaguauuac

SEQ ID NO: 2601897 - RNA, 19 nt, Artificial Sequence
  Description of Artificial Sequence: Synthetic oligonucleotide
auugucaguccaacacuuc

SEQ ID NO: 2601898 - RNA, 19 nt, Artificial Sequence
  Description of Artificial Sequence: Synthetic oligonucleotide
cugcuguacgcaacgugag

SEQ ID NO: 2601899 - RNA, 19 nt, Artificial Sequence
  Description of Artificial Sequence: Synthetic oligonucleotide
gccaaacagauuauggccc

SEQ ID NO: 2601900 - RNA, 19 nt, Artificial Sequence
  Description of Artificial Sequence: Synthetic oligonucleotide
ugcuguacgcaacgugagu

SEQ ID NO: 2601901 - RNA, 19 nt, Artificial Sequence
  Description of Artificial Sequence: Synthetic oligonucleotide
uguuguaguuggcccaguu

SEQ ID NO: 2601902 - RNA, 19 nt, Artificial Sequence
  Description of Artificial Sequence: Synthetic oligonucleotide
aacgugaguuccguaucca

SEQ ID NO: 2601903 - RNA, 19 nt, Artificial Sequence
  Description of Artificial Sequence: Synthetic oligonucleotide
uaucucccggcuacugcug

SEQ ID NO: 2601904 - RNA, 19 nt, Artificial Sequence
  Description of Artificial Sequence: Synthetic oligonucleotide
agauuggaggagucugggu

SEQ ID NO: 2601905 - RNA, 19 nt, Artificial Sequence
  Description of Artificial Sequence: Synthetic oligonucleotide
aggguucuuguagucauca

SEQ ID NO: 2601906 - RNA, 19 nt, Artificial Sequence
  Description of Artificial Sequence: Synthetic oligonucleotide
caaagguguuguaguuggc

SEQ ID NO: 2601907 - RNA, 19 nt, Artificial Sequence
  Description of Artificial Sequence: Synthetic oligonucleotide
uccaccgaugcagugaauu

SEQ ID NO: 2601908 - RNA, 19 nt, Artificial Sequence
  Description of Artificial Sequence: Synthetic oligonucleotide
cucucucauuauugaacac

SEQ ID NO: 2601909 - RNA, 19 nt, Artificial Sequence
  Description of Artificial Sequence: Synthetic oligonucleotide
cacaaaguucucaacggua

SEQ ID NO: 2601910 - RNA, 19 nt, Artificial Sequence
  Description of Artificial Sequence: Synthetic oligonucleotide
uguugccuugcugacugga

SEQ ID NO: 2601911 - RNA, 19 nt, Artificial Sequence
  Description of Artificial Sequence: Synthetic oligonucleotide
cagauccccagguucucag

SEQ ID NO: 2601912 - RNA, 19 nt, Artificial Sequence
  Description of Artificial Sequence: Synthetic oligonucleotide
agggagcuauuguugggca

SEQ ID NO: 2601913 - RNA, 19 nt, Artificial Sequence
  Description of Artificial Sequence: Synthetic oligonucleotide
cuguacgcaacgugaguuc

SEQ ID NO: 2601914 - RNA, 19 nt, Artificial Sequence
  Description of Artificial Sequence: Synthetic oligonucleotide
ccagugaccuucaugccag

SEQ ID NO: 2601915 - RNA, 19 nt, Artificial Sequence
  Description of Artificial Sequence: Synthetic oligonucleotide
accgaugcagugaauuuca

SEQ ID NO: 2601916 - RNA, 19 nt, Artificial Sequence
  Description of Artificial Sequence: Synthetic oligonucleotide
  modified_base (15)..(15): a, c, u, g, unknown or other
uugcugacuggaccngcga

SEQ ID NO: 2601917 - RNA, 19 nt, Artificial Sequence
  Description of Artificial Sequence: Synthetic oligonucleotide
ucgcccaugugcacuuccc

SEQ ID NO: 2601918 - RNA, 19 nt, Artificial Sequence
  Description of Artificial Sequence: Synthetic oligonucleotide
aggugcgguaccucagcag

SEQ ID NO: 2601919 - RNA, 19 nt, Artificial Sequence
  Description of Artificial Sequence: Synthetic oligonucleotide
cuccauauuucacugggua

SEQ ID NO: 2601920 - RNA, 19 nt, Artificial Sequence
  Description of Artificial Sequence: Synthetic oligonucleotide
gauuauggcccaggugcug

SEQ ID NO: 2601921 - RNA, 19 nt, Artificial Sequence
  Description of Artificial Sequence: Synthetic oligonucleotide
uaucucugguacaggccaa

SEQ ID NO: 2601922 - RNA, 19 nt, Artificial Sequence
  Description of Artificial Sequence: Synthetic oligonucleotide
agucaccacacugccgagg

SEQ ID NO: 2601923 - RNA, 19 nt, Artificial Sequence
  Description of Artificial Sequence: Synthetic oligonucleotide
ccauaaggggaguaauaag

SEQ ID NO: 2601924 - RNA, 19 nt, Artificial Sequence
  Description of Artificial Sequence: Synthetic oligonucleotide
acugaaggugcgguaccuc

SEQ ID NO: 2601925 - RNA, 19 nt, Artificial Sequence
  Description of Artificial Sequence: Synthetic oligonucleotide
caaggcauuggcugcucuc

SEQ ID NO: 2601926 - RNA, 19 nt, Artificial Sequence
  Description of Artificial Sequence: Synthetic oligonucleotide
ucccggcuacugcuguacg

SEQ ID NO: 2601927 - RNA, 19 nt, Artificial Sequence
  Description of Artificial Sequence: Synthetic oligonucleotide
caacgguagaagagaagca

SEQ ID NO: 2601928 - RNA, 19 nt, Artificial Sequence
  Description of Artificial Sequence: Synthetic oligonucleotide
acgguagaagagaagcaca

SEQ ID NO: 2601929 - RNA, 19 nt, Artificial Sequence
  Description of Artificial Sequence: Synthetic oligonucleotide
aggcauuggcugcucucuc

SEQ ID NO: 2601930 - RNA, 19 nt, Artificial Sequence
  Description of Artificial Sequence: Synthetic oligonucleotide
acacuucccuccuccauau

SEQ ID NO: 2601931 - RNA, 19 nt, Artificial Sequence
  Description of Artificial Sequence: Synthetic oligonucleotide
ccauuccaaucaaaugccg

SEQ ID NO: 2601932 - RNA, 19 nt, Artificial Sequence
  Description of Artificial Sequence: Synthetic oligonucleotide
uacgcaacgugaguuccgu

SEQ ID NO: 2601933 - RNA, 19 nt, Artificial Sequence
  Description of Artificial Sequence: Synthetic oligonucleotide
gaagagaagcacagcagcu

SEQ ID NO: 2601934 - RNA, 19 nt, Artificial Sequence
  Description of Artificial Sequence: Synthetic oligonucleotide
ugcagacccaaagguguug

SEQ ID NO: 2601935 - RNA, 19 nt, Artificial Sequence
  Description of Artificial Sequence: Synthetic oligonucleotide
cuggaugucguaguagcca

SEQ ID NO: 2601936 - RNA, 19 nt, Artificial Sequence
  Description of Artificial Sequence: Synthetic oligonucleotide
  modified_base (7)..(7): a, c, u, g, unknown or other
uggaccngcgaucgcccau

SEQ ID NO: 2601937 - RNA, 19 nt, Artificial Sequence
  Description of Artificial Sequence: Synthetic oligonucleotide
uuauggcccaggugcugca

SEQ ID NO: 2601938 - RNA, 19 nt, Artificial Sequence
  Description of Artificial Sequence: Synthetic oligonucleotide
ccauauuucacuggguauc

SEQ ID NO: 2601939 - RNA, 19 nt, Artificial Sequence
  Description of Artificial Sequence: Synthetic oligonucleotide
caaaguucucaacgguaga

SEQ ID NO: 2601940 - RNA, 19 nt, Artificial Sequence
  Description of Artificial Sequence: Synthetic oligonucleotide
  modified_base (3)..(3): a, c, u, g, unknown or other
cunugggcugucugcucug

SEQ ID NO: 2601941 - RNA, 19 nt, Artificial Sequence
  Description of Artificial Sequence: Synthetic oligonucleotide
caccgaugcagugaauuuc

SEQ ID NO: 2601942 - RNA, 19 nt, Artificial Sequence
  Description of Artificial Sequence: Synthetic oligonucleotide
ucacuggguaucucuggua

SEQ ID NO: 2601943 - RNA, 19 nt, Artificial Sequence
  Description of Artificial Sequence: Synthetic oligonucleotide
guacgcaacgugaguuccg

SEQ ID NO: 2601944 - RNA, 19 nt, Artificial Sequence
  Description of Artificial Sequence: Synthetic oligonucleotide
aggggaguaauaagaggcu

SEQ ID NO: 2601945 - RNA, 19 nt, Artificial Sequence
  Description of Artificial Sequence: Synthetic oligonucleotide
acaaggcauuggcugcucu

SEQ ID NO: 2601946 - RNA, 19 nt, Artificial Sequence
  Description of Artificial Sequence: Synthetic oligonucleotide
gguagaagagaagcacagc

SEQ ID NO: 2601947 - RNA, 19 nt, Artificial Sequence
  Description of Artificial Sequence: Synthetic oligonucleotide
cucugguacaggccaaaca

SEQ ID NO: 2601948 - RNA, 19 nt, Artificial Sequence
  Description of Artificial Sequence: Synthetic oligonucleotide
caaacagauuauggcccag

SEQ ID NO: 2601949 - RNA, 19 nt, Artificial Sequence
  Description of Artificial Sequence: Synthetic oligonucleotide
ucccuccuccauauuucac

SEQ ID NO: 2601950 - RNA, 19 nt, Artificial Sequence
  Description of Artificial Sequence: Synthetic oligonucleotide
ugcgguaccucagcaggga

SEQ ID NO: 2601951 - RNA, 19 nt, Artificial Sequence
  Description of Artificial Sequence: Synthetic oligonucleotide
acccaaagguguuguaguu

SEQ ID NO: 2601952 - RNA, 19 nt, Artificial Sequence
  Description of Artificial Sequence: Synthetic oligonucleotide
agauuauggcccaggugcu

SEQ ID NO: 2601953 - RNA, 19 nt, Artificial Sequence
  Description of Artificial Sequence: Synthetic oligonucleotide
agcacacaaggcauuggcu

SEQ ID NO: 2601954 - RNA, 19 nt, Artificial Sequence
  Description of Artificial Sequence: Synthetic oligonucleotide
ugggcacaugccagauccc

SEQ ID NO: 2601955 - RNA, 19 nt, Artificial Sequence
  Description of Artificial Sequence: Synthetic oligonucleotide
acgugaguuccguauccau

SEQ ID NO: 2601956 - RNA, 19 nt, Artificial Sequence
  Description of Artificial Sequence: Synthetic oligonucleotide
acagguaaugcugggccau

SEQ ID NO: 2601957 - RNA, 19 nt, Artificial Sequence
  Description of Artificial Sequence: Synthetic oligonucleotide
ggaguaauaagaggcuguc

SEQ ID NO: 2601958 - RNA, 19 nt, Artificial Sequence
  Description of Artificial Sequence: Synthetic oligonucleotide
uccuccaauuuugcaggga

SEQ ID NO: 2601959 - RNA, 19 nt, Artificial Sequence
  Description of Artificial Sequence: Synthetic oligonucleotide
ccgagaagucaccacacug

SEQ ID NO: 2601960 - RNA, 19 nt, Artificial Sequence
  Description of Artificial Sequence: Synthetic oligonucleotide
guaguuggcccaguugcca

SEQ ID NO: 2601961 - RNA, 19 nt, Artificial Sequence
  Description of Artificial Sequence: Synthetic oligonucleotide
cagcuucaguuaucucccg

SEQ ID NO: 2601962 - RNA, 19 nt, Artificial Sequence
  Description of Artificial Sequence: Synthetic oligonucleotide
ucucugguacaggccaaac

SEQ ID NO: 2601963 - RNA, 19 nt, Artificial Sequence
  Description of Artificial Sequence: Synthetic oligonucleotide
  modified_base (11)..(11): a, c, u, g, unknown or other
ugacuggaccngcgaucgc

SEQ ID NO: 2601964 - RNA, 19 nt, Artificial Sequence
  Description of Artificial Sequence: Synthetic oligonucleotide
  modified_base (2)..(2): a, c, u, g, unknown or other
cngcgaucgcccaugugca

SEQ ID NO: 2601965 - RNA, 19 nt, Artificial Sequence
  Description of Artificial Sequence: Synthetic oligonucleotide
uguugggcacaugccagau

SEQ ID NO: 2601966 - RNA, 19 nt, Artificial Sequence
  Description of Artificial Sequence: Synthetic oligonucleotide
agguaaugcugggccauug

SEQ ID NO: 2601967 - RNA, 19 nt, Artificial Sequence
  Description of Artificial Sequence: Synthetic oligonucleotide
cacagguaaugcugggcca

SEQ ID NO: 2601968 - RNA, 19 nt, Artificial Sequence
  Description of Artificial Sequence: Synthetic oligonucleotide
ccaaucaaaugccgagaag

SEQ ID NO: 2601969 - RNA, 19 nt, Artificial Sequence
  Description of Artificial Sequence: Synthetic oligonucleotide
caccaaagucauagaccac

SEQ ID NO: 2601970 - RNA, 19 nt, Artificial Sequence
  Description of Artificial Sequence: Synthetic oligonucleotide
ucguaguagccaggguucu

SEQ ID NO: 2601971 - RNA, 19 nt, Artificial Sequence
  Description of Artificial Sequence: Synthetic oligonucleotide
agugaccuucaugccagca

SEQ ID NO: 2601972 - RNA, 19 nt, Artificial Sequence
  Description of Artificial Sequence: Synthetic oligonucleotide
gucaguccaacacuucccu

SEQ ID NO: 2601973 - RNA, 19 nt, Artificial Sequence
  Description of Artificial Sequence: Synthetic oligonucleotide
ggagcuauuguugggcaca

SEQ ID NO: 2601974 - RNA, 19 nt, Artificial Sequence
  Description of Artificial Sequence: Synthetic oligonucleotide
augucguaguagccagggu

SEQ ID NO: 2601975 - RNA, 19 nt, Artificial Sequence
  Description of Artificial Sequence: Synthetic oligonucleotide
caauuuugcagggagcuau

SEQ ID NO: 2601976 - RNA, 19 nt, Artificial Sequence
  Description of Artificial Sequence: Synthetic oligonucleotide
  modified_base (2)..(2): a, c, u, g, unknown or other
unugggcugucugcucugu

SEQ ID NO: 2601977 - RNA, 19 nt, Artificial Sequence
  Description of Artificial Sequence: Synthetic oligonucleotide
aguagccaggguucuugua

SEQ ID NO: 2601978 - RNA, 19 nt, Artificial Sequence
  Description of Artificial Sequence: Synthetic oligonucleotide
guauuacauccagugaccu

SEQ ID NO: 2601979 - RNA, 19 nt, Artificial Sequence
  Description of Artificial Sequence: Synthetic oligonucleotide
gugcgguaccucagcaggg

SEQ ID NO: 2601980 - RNA, 19 nt, Artificial Sequence
  Description of Artificial Sequence: Synthetic oligonucleotide
cauugucaguccaacacuu

SEQ ID NO: 2601981 - RNA, 19 nt, Artificial Sequence
  Description of Artificial Sequence: Synthetic oligonucleotide
gccauaaggggaguaauaa

SEQ ID NO: 2601982 - RNA, 19 nt, Artificial Sequence
  Description of Artificial Sequence: Synthetic oligonucleotide
gaccuucaugccagcacac

SEQ ID NO: 2601983 - RNA, 19 nt, Artificial Sequence
  Description of Artificial Sequence: Synthetic oligonucleotide
ggagucugggucccacacc

SEQ ID NO: 2601984 - RNA, 19 nt, Artificial Sequence
  Description of Artificial Sequence: Synthetic oligonucleotide
gcaacgugaguuccguauc

SEQ ID NO: 2601985 - RNA, 19 nt, Artificial Sequence
  Description of Artificial Sequence: Synthetic oligonucleotide
ccuacagauuggaggaguc

SEQ ID NO: 2601986 - RNA, 19 nt, Artificial Sequence
  Description of Artificial Sequence: Synthetic oligonucleotide
gugaauuccuucuggccau

SEQ ID NO: 2601987 - RNA, 19 nt, Artificial Sequence
  Description of Artificial Sequence: Synthetic oligonucleotide
cauauuucacuggguaucu

SEQ ID NO: 2601988 - RNA, 19 nt, Artificial Sequence
  Description of Artificial Sequence: Synthetic oligonucleotide
cuguugccuugcugacugg

SEQ ID NO: 2601989 - RNA, 19 nt, Artificial Sequence
  Description of Artificial Sequence: Synthetic oligonucleotide
agccuacagauuggaggag

SEQ ID NO: 2601990 - RNA, 19 nt, Artificial Sequence
  Description of Artificial Sequence: Synthetic oligonucleotide
  modified_base (4)..(4): a, c, u, g, unknown or other
accngcgaucgcccaugug

SEQ ID NO: 2601991 - RNA, 19 nt, Artificial Sequence
  Description of Artificial Sequence: Synthetic oligonucleotide
guugggcacaugccagauc

SEQ ID NO: 2601992 - RNA, 19 nt, Artificial Sequence
  Description of Artificial Sequence: Synthetic oligonucleotide
cacacugccgaggguuccc

SEQ ID NO: 2601993 - RNA, 19 nt, Artificial Sequence
  Description of Artificial Sequence: Synthetic oligonucleotide
uacauccagugaccuucau

SEQ ID NO: 2601994 - RNA, 19 nt, Artificial Sequence
  Description of Artificial Sequence: Synthetic oligonucleotide
cuucaguuaucucccggcu

SEQ ID NO: 2601995 - RNA, 19 nt, Artificial Sequence
  Description of Artificial Sequence: Synthetic oligonucleotide
gucuucugagcaucaccaa

SEQ ID NO: 2601996 - RNA, 19 nt, Artificial Sequence
  Description of Artificial Sequence: Synthetic oligonucleotide
ugccgaggguucccuucug

SEQ ID NO: 2601997 - RNA, 19 nt, Artificial Sequence
  Description of Artificial Sequence: Synthetic oligonucleotide
agggagcuguuccuccaau

SEQ ID NO: 2601998 - RNA, 19 nt, Artificial Sequence
  Description of Artificial Sequence: Synthetic oligonucleotide
gagcuguuccuccaauuuu

SEQ ID NO: 2601999 - RNA, 19 nt, Artificial Sequence
  Description of Artificial Sequence: Synthetic oligonucleotide
gggcacaugccagaucccc

SEQ ID NO: 2602000 - RNA, 19 nt, Artificial Sequence
  Description of Artificial Sequence: Synthetic oligonucleotide
gaggcugucuucugagcau

SEQ ID NO: 2602001 - RNA, 19 nt, Artificial Sequence
  Description of Artificial Sequence: Synthetic oligonucleotide
gggagcuauuguugggcac

SEQ ID NO: 2602002 - RNA, 19 nt, Artificial Sequence
  Description of Artificial Sequence: Synthetic oligonucleotide
ggaugucguaguagccagg

SEQ ID NO: 2602003 - RNA, 19 nt, Artificial Sequence
  Description of Artificial Sequence: Synthetic oligonucleotide
ggcauuggcugcucucuca

SEQ ID NO: 2602004 - RNA, 19 nt, Artificial Sequence
  Description of Artificial Sequence: Synthetic oligonucleotide
gccacugaaggugcgguac

SEQ ID NO: 2602005 - RNA, 19 nt, Artificial Sequence
  Description of Artificial Sequence: Synthetic oligonucleotide
ggaagccacugaaggugcg

SEQ ID NO: 2602006 - RNA, 19 nt, Artificial Sequence
  Description of Artificial Sequence: Synthetic oligonucleotide
cagugaccuucaugccagc

SEQ ID NO: 2602007 - RNA, 19 nt, Artificial Sequence
  Description of Artificial Sequence: Synthetic oligonucleotide
gaauuccuucuggccauaa

SEQ ID NO: 2602008 - RNA, 19 nt, Artificial Sequence
  Description of Artificial Sequence: Synthetic oligonucleotide
ugaauuccuucuggccaua

SEQ ID NO: 2602009 - RNA, 19 nt, Artificial Sequence
  Description of Artificial Sequence: Synthetic oligonucleotide
aucucugguacaggccaaa

SEQ ID NO: 2602010 - RNA, 19 nt, Artificial Sequence
  Description of Artificial Sequence: Synthetic oligonucleotide
ggguucuuguagucaucac

SEQ ID NO: 2602011 - RNA, 19 nt, Artificial Sequence
  Description of Artificial Sequence: Synthetic oligonucleotide
ccacugaaggugcgguacc

SEQ ID NO: 2602012 - RNA, 19 nt, Artificial Sequence
  Description of Artificial Sequence: Synthetic oligonucleotide
  modified_base (13)..(13): a, c, u, g, unknown or other
gcugacuggaccngcgauc

SEQ ID NO: 2602013 - RNA, 19 nt, Artificial Sequence
  Description of Artificial Sequence: Synthetic oligonucleotide
guuccguauccauuccaau

SEQ ID NO: 2602014 - RNA, 19 nt, Artificial Sequence
  Description of Artificial Sequence: Synthetic oligonucleotide
agcuauuguugggcacaug

SEQ ID NO: 2602015 - RNA, 19 nt, Artificial Sequence
  Description of Artificial Sequence: Synthetic oligonucleotide
  modified_base (6)..(6): a, c, u, g, unknown or other
ggaccngcgaucgcccaug

SEQ ID NO: 2602016 - RNA, 19 nt, Artificial Sequence
  Description of Artificial Sequence: Synthetic oligonucleotide
cccggcuacugcuguacgc

SEQ ID NO: 2602017 - RNA, 19 nt, Artificial Sequence
  Description of Artificial Sequence: Synthetic oligonucleotide
gcgguaccucagcagggag

SEQ ID NO: 2602018 - RNA, 19 nt, Artificial Sequence
  Description of Artificial Sequence: Synthetic oligonucleotide
gguaaugcugggccauugu

SEQ ID NO: 2602019 - RNA, 19 nt, Artificial Sequence
  Description of Artificial Sequence: Synthetic oligonucleotide
uucuggccauaaggggagu

SEQ ID NO: 2602020 - RNA, 19 nt, Artificial Sequence
  Description of Artificial Sequence: Synthetic oligonucleotide
cuacagauuggaggagucu

SEQ ID NO: 2602021 - RNA, 19 nt, Artificial Sequence
  Description of Artificial Sequence: Synthetic oligonucleotide
cgguaccucagcagggagc

SEQ ID NO: 2602022 - RNA, 19 nt, Artificial Sequence
  Description of Artificial Sequence: Synthetic oligonucleotide
ccagcacacaaggcauugg

SEQ ID NO: 2602023 - RNA, 19 nt, Artificial Sequence
  Description of Artificial Sequence: Synthetic oligonucleotide
gcagugaauuucaguauua

SEQ ID NO: 2602024 - RNA, 19 nt, Artificial Sequence
  Description of Artificial Sequence: Synthetic oligonucleotide
ccgaugcagugaauuucag

SEQ ID NO: 2602025 - RNA, 19 nt, Artificial Sequence
  Description of Artificial Sequence: Synthetic oligonucleotide
  modified_base (8)..(8): a, c, u, g, unknown or other
cuggaccngcgaucgccca

SEQ ID NO: 2602026 - RNA, 19 nt, Artificial Sequence
  Description of Artificial Sequence: Synthetic oligonucleotide
cacaaggcauuggcugcuc

SEQ ID NO: 2602027 - RNA, 19 nt, Artificial Sequence
  Description of Artificial Sequence: Synthetic oligonucleotide
acacugccgaggguucccu

SEQ ID NO: 2602028 - RNA, 19 nt, Artificial Sequence
  Description of Artificial Sequence: Synthetic oligonucleotide
ggcuacugcuguacgcaac

SEQ ID NO: 2602029 - RNA, 19 nt, Artificial Sequence
  Description of Artificial Sequence: Synthetic oligonucleotide
guccaacacuucccuccuc

SEQ ID NO: 2602030 - RNA, 19 nt, Artificial Sequence
  Description of Artificial Sequence: Synthetic oligonucleotide
ggcacaugccagaucccca

SEQ ID NO: 2602031 - RNA, 19 nt, Artificial Sequence
  Description of Artificial Sequence: Synthetic oligonucleotide
gguucccuucuggaaagaa

SEQ ID NO: 2602032 - RNA, 19 nt, Artificial Sequence
  Description of Artificial Sequence: Synthetic oligonucleotide
gcuguacgcaacgugaguu

SEQ ID NO: 2602033 - RNA, 19 nt, Artificial Sequence
  Description of Artificial Sequence: Synthetic oligonucleotide
acgcaacgugaguuccgua

SEQ ID NO: 2602034 - RNA, 19 nt, Artificial Sequence
  Description of Artificial Sequence: Synthetic oligonucleotide
  modified_base (4)..(4): a, c, u, g, unknown or other
ccunugggcugucugcucu

SEQ ID NO: 2602035 - RNA, 19 nt, Artificial Sequence
  Description of Artificial Sequence: Synthetic oligonucleotide
gaucgcccaugugcacuuc

SEQ ID NO: 2602036 - RNA, 19 nt, Artificial Sequence
  Description of Artificial Sequence: Synthetic oligonucleotide
cagggagcuguuccuccaa

SEQ ID NO: 2602037 - RNA, 19 nt, Artificial Sequence
  Description of Artificial Sequence: Synthetic oligonucleotide
caugccagauccccagguu

SEQ ID NO: 2602038 - RNA, 19 nt, Artificial Sequence
  Description of Artificial Sequence: Synthetic oligonucleotide
gagcuauuguugggcacau

SEQ ID NO: 2602039 - RNA, 19 nt, Artificial Sequence
  Description of Artificial Sequence: Synthetic oligonucleotide
  modified_base (5)..(5): a, c, u, g, unknown or other
gaccngcgaucgcccaugu

SEQ ID NO: 2602040 - RNA, 19 nt, Artificial Sequence
  Description of Artificial Sequence: Synthetic oligonucleotide
ccgaggguucccuucugga

SEQ ID NO: 2602041 - RNA, 19 nt, Artificial Sequence
  Description of Artificial Sequence: Synthetic oligonucleotide
ccggcuacugcuguacgca

SEQ ID NO: 2602042 - RNA, 19 nt, Artificial Sequence
  Description of Artificial Sequence: Synthetic oligonucleotide
ccuccaccgaugcagugaa

SEQ ID NO: 2602043 - RNA, 19 nt, Artificial Sequence
  Description of Artificial Sequence: Synthetic oligonucleotide
ccaggguucuuguagucau

SEQ ID NO: 2602044 - RNA, 19 nt, Artificial Sequence
  Description of Artificial Sequence: Synthetic oligonucleotide
  modified_base (5)..(5): a, c, u, g, unknown or other
cccunugggcugucugcuc

SEQ ID NO: 2602045 - RNA, 19 nt, Artificial Sequence
  Description of Artificial Sequence: Synthetic oligonucleotide
cacugaaggugcgguaccu

SEQ ID NO: 2602046 - RNA, 19 nt, Artificial Sequence
  Description of Artificial Sequence: Synthetic oligonucleotide
gcagacccaaagguguugu

SEQ ID NO: 2602047 - RNA, 19 nt, Artificial Sequence
  Description of Artificial Sequence: Synthetic oligonucleotide
ggcugucuucugagcauca

SEQ ID NO: 2602048 - RNA, 19 nt, Artificial Sequence
  Description of Artificial Sequence: Synthetic oligonucleotide
cucuguugccuugcugacu

SEQ ID NO: 2602049 - RNA, 19 nt, Artificial Sequence
  Description of Artificial Sequence: Synthetic oligonucleotide
gggucccacaccacaaagu

SEQ ID NO: 2602050 - RNA, 19 nt, Artificial Sequence
  Description of Artificial Sequence: Synthetic oligonucleotide
gccgagaagucaccacacu

SEQ ID NO: 2602051 - RNA, 19 nt, Artificial Sequence
  Description of Artificial Sequence: Synthetic oligonucleotide
ccguauccauuccaaucaa

SEQ ID NO: 2602052 - RNA, 19 nt, Artificial Sequence
  Description of Artificial Sequence: Synthetic oligonucleotide
cgaggguucccuucuggaa

SEQ ID NO: 2602053 - RNA, 19 nt, Artificial Sequence
  Description of Artificial Sequence: Synthetic oligonucleotide
cgcaacgugaguuccguau

SEQ ID NO: 2602054 - RNA, 19 nt, Artificial Sequence
  Description of Artificial Sequence: Synthetic oligonucleotide
cgaugcagugaauuucagu

SEQ ID NO: 2602055 - RNA, 19 nt, Artificial Sequence
  Description of Artificial Sequence: Synthetic oligonucleotide
ccuccauauuucacugggu

SEQ ID NO: 2602056 - RNA, 19 nt, Artificial Sequence
  Description of Artificial Sequence: Synthetic oligonucleotide
gcgaucgcccaugugcacu

SEQ ID NO: 2602057 - RNA, 19 nt, Artificial Sequence
  Description of Artificial Sequence: Synthetic oligonucleotide
ccaauuuugcagggagcua

SEQ ID NO: 2602058 - RNA, 19 nt, Artificial Sequence
  Description of Artificial Sequence: Synthetic oligonucleotide
ccagauccccagguucuca

SEQ ID NO: 2602059 - RNA, 19 nt, Artificial Sequence
  Description of Artificial Sequence: Synthetic oligonucleotide
caguuaucucccggcuacu

SEQ ID NO: 2602060 - RNA, 19 nt, Artificial Sequence
  Description of Artificial Sequence: Synthetic oligonucleotide
ggguucccuucuggaaaga

SEQ ID NO: 2602061 - RNA, 19 nt, Artificial Sequence
  Description of Artificial Sequence: Synthetic oligonucleotide
cgugaguuccguauccauu

SEQ ID NO: 2602062 - RNA, 19 nt, Artificial Sequence
  Description of Artificial Sequence: Synthetic oligonucleotide
ccaccgaugcagugaauuu

SEQ ID NO: 2602063 - RNA, 19 nt, Artificial Sequence
  Description of Artificial Sequence: Synthetic oligonucleotide
cagguaaugcugggccauu

SEQ ID NO: 2602064 - RNA, 19 nt, Artificial Sequence
  Description of Artificial Sequence: Synthetic oligonucleotide
  modified_base (6)..(6): a, c, u, g, unknown or other
ccccunugggcugucugcu

SEQ ID NO: 2602065 - RNA, 19 nt, Artificial Sequence
  Description of Artificial Sequence: Synthetic oligonucleotide
cuccaccgaugcagugaau

SEQ ID NO: 2602066 - RNA, 19 nt, Artificial Sequence
  Description of Artificial Sequence: Synthetic oligonucleotide
cacugccgaggguucccuu

SEQ ID NO: 2602067 - RNA, 19 nt, Artificial Sequence
  Description of Artificial Sequence: Synthetic oligonucleotide
cggcuacugcuguacgcaa

SEQ ID NO: 2602068 - RNA, 19 nt, Artificial Sequence
  Description of Artificial Sequence: Synthetic oligonucleotide
cacuucccuccuccauauu

SEQ ID NO: 2602069 - RNA, 19 nt, Artificial Sequence
  Description of Artificial Sequence: Synthetic oligonucleotide
cgaucgcccaugugcacuu

SEQ ID NO: 2602070 - RNA, 19 nt, Artificial Sequence
  Description of Artificial Sequence: Synthetic oligonucleotide
  modified_base (1)..(1): a, c, u, g, unknown or other
ngcgaucgcccaugugcac

SEQ ID NO: 2602071 - RNA, 19 nt, Artificial Sequence
  Description of Artificial Sequence: Synthetic oligonucleotide
aauacacacacacacacac

SEQ ID NO: 2602072 - RNA, 19 nt, Artificial Sequence
  Description of Artificial Sequence: Synthetic oligonucleotide
uauacuaggaaauacacac

SEQ ID NO: 2602073 - RNA, 19 nt, Artificial Sequence
  Description of Artificial Sequence: Synthetic oligonucleotide
aggaaauacacacacacac

SEQ ID NO: 2602074 - RNA, 19 nt, Artificial Sequence
  Description of Artificial Sequence: Synthetic oligonucleotide
aacauguuguuucagcugg

SEQ ID NO: 2602075 - RNA, 19 nt, Artificial Sequence
  Description of Artificial Sequence: Synthetic oligonucleotide
aaggagaacauguuguuuc

SEQ ID NO: 2602076 - RNA, 19 nt, Artificial Sequence
  Description of Artificial Sequence: Synthetic oligonucleotide
aauguauacuaggaaauac

SEQ ID NO: 2602077 - RNA, 19 nt, Artificial Sequence
  Description of Artificial Sequence: Synthetic oligonucleotide
cauuugaagagacacaggg

SEQ ID NO: 2602078 - RNA, 19 nt, Artificial Sequence
  Description of Artificial Sequence: Synthetic oligonucleotide
acagccugugcacagaugc

SEQ ID NO: 2602079 - RNA, 19 nt, Artificial Sequence
  Description of Artificial Sequence: Synthetic oligonucleotide
uuuucuuuccagaaggcug

SEQ ID NO: 2602080 - RNA, 19 nt, Artificial Sequence
  Description of Artificial Sequence: Synthetic oligonucleotide
uuagaugcaaauauaaguu

SEQ ID NO: 2602081 - RNA, 19 nt, Artificial Sequence
  Description of Artificial Sequence: Synthetic oligonucleotide
aaaugcauuguaguguugg

SEQ ID NO: 2602082 - RNA, 19 nt, Artificial Sequence
  Description of Artificial Sequence: Synthetic oligonucleotide
cuuuauagggugaagaguc

SEQ ID NO: 2602083 - RNA, 19 nt, Artificial Sequence
  Description of Artificial Sequence: Synthetic oligonucleotide
gaaauacacacacacacac

SEQ ID NO: 2602084 - RNA, 19 nt, Artificial Sequence
  Description of Artificial Sequence: Synthetic oligonucleotide
uguauacuaggaaauacac

SEQ ID NO: 2602085 - RNA, 19 nt, Artificial Sequence
  Description of Artificial Sequence: Synthetic oligonucleotide
uuaacauucacuguggaaa

SEQ ID NO: 2602086 - RNA, 19 nt, Artificial Sequence
  Description of Artificial Sequence: Synthetic oligonucleotide
uagaccaaggcacacaaca

SEQ ID NO: 2602087 - RNA, 19 nt, Artificial Sequence
  Description of Artificial Sequence: Synthetic oligonucleotide
cuaguugaggccaugagac

SEQ ID NO: 2602088 - RNA, 19 nt, Artificial Sequence
  Description of Artificial Sequence: Synthetic oligonucleotide
ucuuagaugcaaauauaag

SEQ ID NO: 2602089 - RNA, 19 nt, Artificial Sequence
  Description of Artificial Sequence: Synthetic oligonucleotide
gacacuacagagcaggcag

SEQ ID NO: 2602090 - RNA, 19 nt, Artificial Sequence
  Description of Artificial Sequence: Synthetic oligonucleotide
ugaucuagugagcagggag

SEQ ID NO: 2602091 - RNA, 19 nt, Artificial Sequence
  Description of Artificial Sequence: Synthetic oligonucleotide
agucaggugacaaagggcc

SEQ ID NO: 2602092 - RNA, 19 nt, Artificial Sequence
  Description of Artificial Sequence: Synthetic oligonucleotide
agcacacacacacacacac

SEQ ID NO: 2602093 - RNA, 19 nt, Artificial Sequence
  Description of Artificial Sequence: Synthetic oligonucleotide
uaaggauucucucacccag

SEQ ID NO: 2602094 - RNA, 19 nt, Artificial Sequence
  Description of Artificial Sequence: Synthetic oligonucleotide
ucuaaggauucucucaccc

SEQ ID NO: 2602095 - RNA, 19 nt, Artificial Sequence
  Description of Artificial Sequence: Synthetic oligonucleotide
uaguguuggguacagcugg

SEQ ID NO: 2602096 - RNA, 19 nt, Artificial Sequence
  Description of Artificial Sequence: Synthetic oligonucleotide
uacuaggaaauacacacac

SEQ ID NO: 2602097 - RNA, 19 nt, Artificial Sequence
  Description of Artificial Sequence: Synthetic oligonucleotide
cacacguuaacauucacug

SEQ ID NO: 2602098 - RNA, 19 nt, Artificial Sequence
  Description of Artificial Sequence: Synthetic oligonucleotide
agagacacagccuaguuga

SEQ ID NO: 2602099 - RNA, 19 nt, Artificial Sequence
  Description of Artificial Sequence: Synthetic oligonucleotide
uaggauacugaacuccccg

SEQ ID NO: 2602100 - RNA, 19 nt, Artificial Sequence
  Description of Artificial Sequence: Synthetic oligonucleotide
aaugcauuguaguguuggg

SEQ ID NO: 2602101 - RNA, 19 nt, Artificial Sequence
  Description of Artificial Sequence: Synthetic oligonucleotide
agagucaggugacaaaggg

SEQ ID NO: 2602102 - RNA, 19 nt, Artificial Sequence
  Description of Artificial Sequence: Synthetic oligonucleotide
uacacacacacacacacac

SEQ ID NO: 2602103 - RNA, 19 nt, Artificial Sequence
  Description of Artificial Sequence: Synthetic oligonucleotide
ucugguuuaugugacagcc

SEQ ID NO: 2602104 - RNA, 19 nt, Artificial Sequence
  Description of Artificial Sequence: Synthetic oligonucleotide
uuucuaaggauucucucac

SEQ ID NO: 2602105 - RNA, 19 nt, Artificial Sequence
  Description of Artificial Sequence: Synthetic oligonucleotide
ugcagaauguauacuagga

SEQ ID NO: 2602106 - RNA, 19 nt, Artificial Sequence
  Description of Artificial Sequence: Synthetic oligonucleotide
uguagcugcccucaaagga

SEQ ID NO: 2602107 - RNA, 19 nt, Artificial Sequence
  Description of Artificial Sequence: Synthetic oligonucleotide
uugaagagacacagggugg

SEQ ID NO: 2602108 - RNA, 19 nt, Artificial Sequence
  Description of Artificial Sequence: Synthetic oligonucleotide
uguuggguacagcuggugg

SEQ ID NO: 2602109 - RNA, 19 nt, Artificial Sequence
  Description of Artificial Sequence: Synthetic oligonucleotide
gacacagccuaguugaggc

SEQ ID NO: 2602110 - RNA, 19 nt, Artificial Sequence
  Description of Artificial Sequence: Synthetic oligonucleotide
uauagggugaagagucagg

SEQ ID NO: 2602111 - RNA, 19 nt, Artificial Sequence
  Description of Artificial Sequence: Synthetic oligonucleotide
uuucuuuccagaaggcuga

SEQ ID NO: 2602112 - RNA, 19 nt, Artificial Sequence
  Description of Artificial Sequence: Synthetic oligonucleotide
ucugaucuagugagcaggg

SEQ ID NO: 2602113 - RNA, 19 nt, Artificial Sequence
  Description of Artificial Sequence: Synthetic oligonucleotide
cacguuaacauucacugug

SEQ ID NO: 2602114 - RNA, 19 nt, Artificial Sequence
  Description of Artificial Sequence: Synthetic oligonucleotide
ugguuuaugugacagccac

SEQ ID NO: 2602115 - RNA, 19 nt, Artificial Sequence
  Description of Artificial Sequence: Synthetic oligonucleotide
agggugaagagucagguga

SEQ ID NO: 2602116 - RNA, 19 nt, Artificial Sequence
  Description of Artificial Sequence: Synthetic oligonucleotide
agaacauguuguuucagcu

SEQ ID NO: 2602117 - RNA, 19 nt, Artificial Sequence
  Description of Artificial Sequence: Synthetic oligonucleotide
uguucuugcccacauuuga

SEQ ID NO: 2602118 - RNA, 19 nt, Artificial Sequence
  Description of Artificial Sequence: Synthetic oligonucleotide
gaaaguucccuuuucuuuc

SEQ ID NO: 2602119 - RNA, 19 nt, Artificial Sequence
  Description of Artificial Sequence: Synthetic oligonucleotide
cacacacacacacacaggc

SEQ ID NO: 2602120 - RNA, 19 nt, Artificial Sequence
  Description of Artificial Sequence: Synthetic oligonucleotide
agaccuuuuaaccugcaga

SEQ ID NO: 2602121 - RNA, 19 nt, Artificial Sequence
  Description of Artificial Sequence: Synthetic oligonucleotide
cacauuugaagagacacag

SEQ ID NO: 2602122 - RNA, 19 nt, Artificial Sequence
  Description of Artificial Sequence: Synthetic oligonucleotide
guuuaugugacagccaccc

SEQ ID NO: 2602123 - RNA, 19 nt, Artificial Sequence
  Description of Artificial Sequence: Synthetic oligonucleotide
cuuuccagaaggcugaguc

SEQ ID NO: 2602124 - RNA, 19 nt, Artificial Sequence
  Description of Artificial Sequence: Synthetic oligonucleotide
gagaacauguuguuucagc

SEQ ID NO: 2602125 - RNA, 19 nt, Artificial Sequence
  Description of Artificial Sequence: Synthetic oligonucleotide
cuuagaugcaaauauaagu

SEQ ID NO: 2602126 - RNA, 19 nt, Artificial Sequence
  Description of Artificial Sequence: Synthetic oligonucleotide
uuuauugucuuagaugcaa

SEQ ID NO: 2602127 - RNA, 19 nt, Artificial Sequence
  Description of Artificial Sequence: Synthetic oligonucleotide
gaucuagugagcagggagg

SEQ ID NO: 2602128 - RNA, 19 nt, Artificial Sequence
  Description of Artificial Sequence: Synthetic oligonucleotide
aggcccauuccucagaaag

SEQ ID NO: 2602129 - RNA, 19 nt, Artificial Sequence
  Description of Artificial Sequence: Synthetic oligonucleotide
cacacacacacacacacag

SEQ ID NO: 2602130 - RNA, 19 nt, Artificial Sequence
  Description of Artificial Sequence: Synthetic oligonucleotide
aagaggaccgggcucaggu

SEQ ID NO: 2602131 - RNA, 19 nt, Artificial Sequence
  Description of Artificial Sequence: Synthetic oligonucleotide
uucacuguggaaaguuccc

SEQ ID NO: 2602132 - RNA, 19 nt, Artificial Sequence
  Description of Artificial Sequence: Synthetic oligonucleotide
guuggguacagcugguggg

SEQ ID NO: 2602133 - RNA, 19 nt, Artificial Sequence
  Description of Artificial Sequence: Synthetic oligonucleotide
ugcgcgugcacacacacgu

SEQ ID NO: 2602134 - RNA, 19 nt, Artificial Sequence
  Description of Artificial Sequence: Synthetic oligonucleotide
uucuugcccacauuugaag

SEQ ID NO: 2602135 - RNA, 19 nt, Artificial Sequence
  Description of Artificial Sequence: Synthetic oligonucleotide
cacacacacacacacacac

SEQ ID NO: 2602136 - RNA, 19 nt, Artificial Sequence
  Description of Artificial Sequence: Synthetic oligonucleotide
auguuguuucagcugggac

SEQ ID NO: 2602137 - RNA, 19 nt, Artificial Sequence
  Description of Artificial Sequence: Synthetic oligonucleotide
uaaccugcagaauguauac

SEQ ID NO: 2602138 - RNA, 19 nt, Artificial Sequence
  Description of Artificial Sequence: Synthetic oligonucleotide
agcuugaagaaggagaaca

SEQ ID NO: 2602139 - RNA, 19 nt, Artificial Sequence
  Description of Artificial Sequence: Synthetic oligonucleotide
cacacacacguuaacauuc

SEQ ID NO: 2602140 - RNA, 19 nt, Artificial Sequence
  Description of Artificial Sequence: Synthetic oligonucleotide
ccugcuucccuuuauaggg

SEQ ID NO: 2602141 - RNA, 19 nt, Artificial Sequence
  Description of Artificial Sequence: Synthetic oligonucleotide
ugcauuguaguguugggua

SEQ ID NO: 2602142 - RNA, 19 nt, Artificial Sequence
  Description of Artificial Sequence: Synthetic oligonucleotide
uuuauagggugaagaguca

SEQ ID NO: 2602143 - RNA, 19 nt, Artificial Sequence
  Description of Artificial Sequence: Synthetic oligonucleotide
acaggcucgagcaagugcg

SEQ ID NO: 2602144 - RNA, 19 nt, Artificial Sequence
  Description of Artificial Sequence: Synthetic oligonucleotide
cugcagaauguauacuagg

SEQ ID NO: 2602145 - RNA, 19 nt, Artificial Sequence
  Description of Artificial Sequence: Synthetic oligonucleotide
cucaaaggagcccuagacc

SEQ ID NO: 2602146 - RNA, 19 nt, Artificial Sequence
  Description of Artificial Sequence: Synthetic oligonucleotide
acccagcacacacacacac

SEQ ID NO: 2602147 - RNA, 19 nt, Artificial Sequence
  Description of Artificial Sequence: Synthetic oligonucleotide
ugaaacuuggagagcuuga

SEQ ID NO: 2602148 - RNA, 19 nt, Artificial Sequence
  Description of Artificial Sequence: Synthetic oligonucleotide
ucucugguuuaugugacag

SEQ ID NO: 2602149 - RNA, 19 nt, Artificial Sequence
  Description of Artificial Sequence: Synthetic oligonucleotide
uuuaaccugcagaauguau

SEQ ID NO: 2602150 - RNA, 19 nt, Artificial Sequence
  Description of Artificial Sequence: Synthetic oligonucleotide
uuauagggugaagagucag

SEQ ID NO: 2602151 - RNA, 19 nt, Artificial Sequence
  Description of Artificial Sequence: Synthetic oligonucleotide
uacugaacuccccgaagag

SEQ ID NO: 2602152 - RNA, 19 nt, Artificial Sequence
  Description of Artificial Sequence: Synthetic oligonucleotide
ugugacagccacccuaacu

SEQ ID NO: 2602153 - RNA, 19 nt, Artificial Sequence
  Description of Artificial Sequence: Synthetic oligonucleotide
ucuugcccacauuugaaga

SEQ ID NO: 2602154 - RNA, 19 nt, Artificial Sequence
  Description of Artificial Sequence: Synthetic oligonucleotide
auacugaacuccccgaaga

SEQ ID NO: 2602155 - RNA, 19 nt, Artificial Sequence
  Description of Artificial Sequence: Synthetic oligonucleotide
gugacagccacccuaacuc

SEQ ID NO: 2602156 - RNA, 19 nt, Artificial Sequence
  Description of Artificial Sequence: Synthetic oligonucleotide
cuugcccacauuugaagag

SEQ ID NO: 2602157 - RNA, 19 nt, Artificial Sequence
  Description of Artificial Sequence: Synthetic oligonucleotide
gaccuuuuaaccugcagaa

SEQ ID NO: 2602158 - RNA, 19 nt, Artificial Sequence
  Description of Artificial Sequence: Synthetic oligonucleotide
caagcucugacaagcagac

SEQ ID NO: 2602159 - RNA, 19 nt, Artificial Sequence
  Description of Artificial Sequence: Synthetic oligonucleotide
cagaauguauacuaggaaa

SEQ ID NO: 2602160 - RNA, 19 nt, Artificial Sequence
  Description of Artificial Sequence: Synthetic oligonucleotide
cagggcaccaagaggaccg

SEQ ID NO: 2602161 - RNA, 19 nt, Artificial Sequence
  Description of Artificial Sequence: Synthetic oligonucleotide
gucugaucuagugagcagg

SEQ ID NO: 2602162 - RNA, 19 nt, Artificial Sequence
  Description of Artificial Sequence: Synthetic oligonucleotide
accaaggcacacaacagac

SEQ ID NO: 2602163 - RNA, 19 nt, Artificial Sequence
  Description of Artificial Sequence: Synthetic oligonucleotide
aucuagugagcagggaggc

SEQ ID NO: 2602164 - RNA, 19 nt, Artificial Sequence
  Description of Artificial Sequence: Synthetic oligonucleotide
uccccgaagagagacacag

SEQ ID NO: 2602165 - RNA, 19 nt, Artificial Sequence
  Description of Artificial Sequence: Synthetic oligonucleotide
agugcgcgugcacacacac

SEQ ID NO: 2602166 - RNA, 19 nt, Artificial Sequence
  Description of Artificial Sequence: Synthetic oligonucleotide
uccucagaaagcugguagc

SEQ ID NO: 2602167 - RNA, 19 nt, Artificial Sequence
  Description of Artificial Sequence: Synthetic oligonucleotide
agaaggcugagucucacaa

SEQ ID NO: 2602168 - RNA, 19 nt, Artificial Sequence
  Description of Artificial Sequence: Synthetic oligonucleotide
agcaagugcgcgugcacac

SEQ ID NO: 2602169 - RNA, 19 nt, Artificial Sequence
  Description of Artificial Sequence: Synthetic oligonucleotide
aaaggagcccuagaccaag

SEQ ID NO: 2602170 - RNA, 19 nt, Artificial Sequence
  Description of Artificial Sequence: Synthetic oligonucleotide
aaggauucucucacccagc

SEQ ID NO: 2602171 - RNA, 19 nt, Artificial Sequence
  Description of Artificial Sequence: Synthetic oligonucleotide
uagaugcaaauauaaguuu

SEQ ID NO: 2602172 - RNA, 19 nt, Artificial Sequence
  Description of Artificial Sequence: Synthetic oligonucleotide
agaauguauacuaggaaau

SEQ ID NO: 2602173 - RNA, 19 nt, Artificial Sequence
  Description of Artificial Sequence: Synthetic oligonucleotide
ugcacacacacguuaacau

SEQ ID NO: 2602174 - RNA, 19 nt, Artificial Sequence
  Description of Artificial Sequence: Synthetic oligonucleotide
agucucacaagcucugaca

SEQ ID NO: 2602175 - RNA, 19 nt, Artificial Sequence
  Description of Artificial Sequence: Synthetic oligonucleotide
ucugacaagcagacagucu

SEQ ID NO: 2602176 - RNA, 19 nt, Artificial Sequence
  Description of Artificial Sequence: Synthetic oligonucleotide
ccuuuuaaccugcagaaug

SEQ ID NO: 2602177 - RNA, 19 nt, Artificial Sequence
  Description of Artificial Sequence: Synthetic oligonucleotide
caugccugucaacagcagg

SEQ ID NO: 2602178 - RNA, 19 nt, Artificial Sequence
  Description of Artificial Sequence: Synthetic oligonucleotide
guuguuucagcugggacac

SEQ ID NO: 2602179 - RNA, 19 nt, Artificial Sequence
  Description of Artificial Sequence: Synthetic oligonucleotide
cacacacacacacaggcuc

SEQ ID NO: 2602180 - RNA, 19 nt, Artificial Sequence
  Description of Artificial Sequence: Synthetic oligonucleotide
ucccuuuauagggugaaga

SEQ ID NO: 2602181 - RNA, 19 nt, Artificial Sequence
  Description of Artificial Sequence: Synthetic oligonucleotide
aaggcacacaacagacagc

SEQ ID NO: 2602182 - RNA, 19 nt, Artificial Sequence
  Description of Artificial Sequence: Synthetic oligonucleotide
augccugucaacagcaggg

SEQ ID NO: 2602183 - RNA, 19 nt, Artificial Sequence
  Description of Artificial Sequence: Synthetic oligonucleotide
guagcugaccuguucuugc

SEQ ID NO: 2602184 - RNA, 19 nt, Artificial Sequence
  Description of Artificial Sequence: Synthetic oligonucleotide
aacaugccugucaacagca

SEQ ID NO: 2602185 - RNA, 19 nt, Artificial Sequence
  Description of Artificial Sequence: Synthetic oligonucleotide
uguggaaaguucccuuuuc

SEQ ID NO: 2602186 - RNA, 19 nt, Artificial Sequence
  Description of Artificial Sequence: Synthetic oligonucleotide
auguauacuaggaaauaca

SEQ ID NO: 2602187 - RNA, 19 nt, Artificial Sequence
  Description of Artificial Sequence: Synthetic oligonucleotide
aacucagguguagcugccc

SEQ ID NO: 2602188 - RNA, 19 nt, Artificial Sequence
  Description of Artificial Sequence: Synthetic oligonucleotide
agacagucugaucuaguga

SEQ ID NO: 2602189 - RNA, 19 nt, Artificial Sequence
  Description of Artificial Sequence: Synthetic oligonucleotide
aguugaggccaugagaccu

SEQ ID NO: 2602190 - RNA, 19 nt, Artificial Sequence
  Description of Artificial Sequence: Synthetic oligonucleotide
agaaagcugguagcugacc

SEQ ID NO: 2602191 - RNA, 19 nt, Artificial Sequence
  Description of Artificial Sequence: Synthetic oligonucleotide
guagcugcccucaaaggag

SEQ ID NO: 2602192 - RNA, 19 nt, Artificial Sequence
  Description of Artificial Sequence: Synthetic oligonucleotide
aggagcccuagaccaaggc

SEQ ID NO: 2602193 - RNA, 19 nt, Artificial Sequence
  Description of Artificial Sequence: Synthetic oligonucleotide
aaauacacacacacacaca

SEQ ID NO: 2602194 - RNA, 19 nt, Artificial Sequence
  Description of Artificial Sequence: Synthetic oligonucleotide
uuuccagaaggcugagucu

SEQ ID NO: 2602195 - RNA, 19 nt, Artificial Sequence
  Description of Artificial Sequence: Synthetic oligonucleotide
accugcagaauguauacua

SEQ ID NO: 2602196 - RNA, 19 nt, Artificial Sequence
  Description of Artificial Sequence: Synthetic oligonucleotide
acuccccgaagagagacac

SEQ ID NO: 2602197 - RNA, 19 nt, Artificial Sequence
  Description of Artificial Sequence: Synthetic oligonucleotide
ugaagagucaggugacaaa

SEQ ID NO: 2602198 - RNA, 19 nt, Artificial Sequence
  Description of Artificial Sequence: Synthetic oligonucleotide
gagcccuagaccaaggcac

SEQ ID NO: 2602199 - RNA, 19 nt, Artificial Sequence
  Description of Artificial Sequence: Synthetic oligonucleotide
gagaccuuuuaaccugcag

SEQ ID NO: 2602200 - RNA, 19 nt, Artificial Sequence
  Description of Artificial Sequence: Synthetic oligonucleotide
uucuaaggauucucucacc

SEQ ID NO: 2602201 - RNA, 19 nt, Artificial Sequence
  Description of Artificial Sequence: Synthetic oligonucleotide
auagggugaagagucaggu

SEQ ID NO: 2602202 - RNA, 19 nt, Artificial Sequence
  Description of Artificial Sequence: Synthetic oligonucleotide
acacagccuaguugaggcc

SEQ ID NO: 2602203 - RNA, 19 nt, Artificial Sequence
  Description of Artificial Sequence: Synthetic oligonucleotide
agggaucucugguuuaugu

SEQ ID NO: 2602204 - RNA, 19 nt, Artificial Sequence
  Description of Artificial Sequence: Synthetic oligonucleotide
augagaccuuuuaaccugc

SEQ ID NO: 2602205 - RNA, 19 nt, Artificial Sequence
  Description of Artificial Sequence: Synthetic oligonucleotide
acagacagccugugcacag

SEQ ID NO: 2602206 - RNA, 19 nt, Artificial Sequence
  Description of Artificial Sequence: Synthetic oligonucleotide
agucugaucuagugagcag

SEQ ID NO: 2602207 - RNA, 19 nt, Artificial Sequence
  Description of Artificial Sequence: Synthetic oligonucleotide
cuuggagagcuugaagaag

SEQ ID NO: 2602208 - RNA, 19 nt, Artificial Sequence
  Description of Artificial Sequence: Synthetic oligonucleotide
agagaaagccugcuucccu

SEQ ID NO: 2602209 - RNA, 19 nt, Artificial Sequence
  Description of Artificial Sequence: Synthetic oligonucleotide
gcacacaacagacagccug

SEQ ID NO: 2602210 - RNA, 19 nt, Artificial Sequence
  Description of Artificial Sequence: Synthetic oligonucleotide
uuguuuucuaaggauucuc

SEQ ID NO: 2602211 - RNA, 19 nt, Artificial Sequence
  Description of Artificial Sequence: Synthetic oligonucleotide
gagucaggugacaaagggc

SEQ ID NO: 2602212 - RNA, 19 nt, Artificial Sequence
  Description of Artificial Sequence: Synthetic oligonucleotide
acguuaacauucacugugg

SEQ ID NO: 2602213 - RNA, 19 nt, Artificial Sequence
  Description of Artificial Sequence: Synthetic oligonucleotide
guuaacauucacuguggaa

SEQ ID NO: 2602214 - RNA, 19 nt, Artificial Sequence
  Description of Artificial Sequence: Synthetic oligonucleotide
ggaucucugguuuauguga

SEQ ID NO: 2602215 - RNA, 19 nt, Artificial Sequence
  Description of Artificial Sequence: Synthetic oligonucleotide
uuccagaaggcugagucuc

SEQ ID NO: 2602216 - RNA, 19 nt, Artificial Sequence
  Description of Artificial Sequence: Synthetic oligonucleotide
cccgaagagagacacagcc

SEQ ID NO: 2602217 - RNA, 19 nt, Artificial Sequence
  Description of Artificial Sequence: Synthetic oligonucleotide
agccugcuucccuuuauag

SEQ ID NO: 2602218 - RNA, 19 nt, Artificial Sequence
  Description of Artificial Sequence: Synthetic oligonucleotide
gucuuagaugcaaauauaa

SEQ ID NO: 2602219 - RNA, 19 nt, Artificial Sequence
  Description of Artificial Sequence: Synthetic oligonucleotide
auuguaguguuggguacag

SEQ ID NO: 2602220 - RNA, 19 nt, Artificial Sequence
  Description of Artificial Sequence: Synthetic oligonucleotide
aaagccugcuucccuuuau

SEQ ID NO: 2602221 - RNA, 19 nt, Artificial Sequence
  Description of Artificial Sequence: Synthetic oligonucleotide
uaacucagguguagcugcc

SEQ ID NO: 2602222 - RNA, 19 nt, Artificial Sequence
  Description of Artificial Sequence: Synthetic oligonucleotide
gaagagagacacagccuag

SEQ ID NO: 2602223 - RNA, 19 nt, Artificial Sequence
  Description of Artificial Sequence: Synthetic oligonucleotide
acaagcucugacaagcaga

SEQ ID NO: 2602224 - RNA, 19 nt, Artificial Sequence
  Description of Artificial Sequence: Synthetic oligonucleotide
uggaaaguucccuuuucuu

SEQ ID NO: 2602225 - RNA, 19 nt, Artificial Sequence
  Description of Artificial Sequence: Synthetic oligonucleotide
ugcuucccuuuauagggug

SEQ ID NO: 2602226 - RNA, 19 nt, Artificial Sequence
  Description of Artificial Sequence: Synthetic oligonucleotide
gaucucugguuuaugugac

SEQ ID NO: 2602227 - RNA, 19 nt, Artificial Sequence
  Description of Artificial Sequence: Synthetic oligonucleotide
gaacuccccgaagagagac

SEQ ID NO: 2602228 - RNA, 19 nt, Artificial Sequence
  Description of Artificial Sequence: Synthetic oligonucleotide
gaaagcugguagcugaccu

SEQ ID NO: 2602229 - RNA, 19 nt, Artificial Sequence
  Description of Artificial Sequence: Synthetic oligonucleotide
guauacuaggaaauacaca

SEQ ID NO: 2602230 - RNA, 19 nt, Artificial Sequence
  Description of Artificial Sequence: Synthetic oligonucleotide
uaguugaggccaugagacc

SEQ ID NO: 2602231 - RNA, 19 nt, Artificial Sequence
  Description of Artificial Sequence: Synthetic oligonucleotide
agacacagccuaguugagg

SEQ ID NO: 2602232 - RNA, 19 nt, Artificial Sequence
  Description of Artificial Sequence: Synthetic oligonucleotide
aggauacugaacuccccga

SEQ ID NO: 2602233 - RNA, 19 nt, Artificial Sequence
  Description of Artificial Sequence: Synthetic oligonucleotide
acagucugaucuagugagc

SEQ ID NO: 2602234 - RNA, 19 nt, Artificial Sequence
  Description of Artificial Sequence: Synthetic oligonucleotide
acauuugaagagacacagg

SEQ ID NO: 2602235 - RNA, 19 nt, Artificial Sequence
  Description of Artificial Sequence: Synthetic oligonucleotide
cugaaacuuggagagcuug

SEQ ID NO: 2602236 - RNA, 19 nt, Artificial Sequence
  Description of Artificial Sequence: Synthetic oligonucleotide
uagggugaagagucaggug

SEQ ID NO: 2602237 - RNA, 19 nt, Artificial Sequence
  Description of Artificial Sequence: Synthetic oligonucleotide
ugacagccacccuaacuca

SEQ ID NO: 2602238 - RNA, 19 nt, Artificial Sequence
  Description of Artificial Sequence: Synthetic oligonucleotide
gagucucacaagcucugac

SEQ ID NO: 2602239 - RNA, 19 nt, Artificial Sequence
  Description of Artificial Sequence: Synthetic oligonucleotide
cacaagcucugacaagcag

SEQ ID NO: 2602240 - RNA, 19 nt, Artificial Sequence
  Description of Artificial Sequence: Synthetic oligonucleotide
acacguuaacauucacugu

SEQ ID NO: 2602241 - RNA, 19 nt, Artificial Sequence
  Description of Artificial Sequence: Synthetic oligonucleotide
aacauucacuguggaaagu

SEQ ID NO: 2602242 - RNA, 19 nt, Artificial Sequence
  Description of Artificial Sequence: Synthetic oligonucleotide
cuuuuaaccugcagaaugu

SEQ ID NO: 2602243 - RNA, 19 nt, Artificial Sequence
  Description of Artificial Sequence: Synthetic oligonucleotide
cucugguuuaugugacagc

SEQ ID NO: 2602244 - RNA, 19 nt, Artificial Sequence
  Description of Artificial Sequence: Synthetic oligonucleotide
gcugggacacuacagagca

SEQ ID NO: 2602245 - RNA, 19 nt, Artificial Sequence
  Description of Artificial Sequence: Synthetic oligonucleotide
gucucacaagcucugacaa

SEQ ID NO: 2602246 - RNA, 19 nt, Artificial Sequence
  Description of Artificial Sequence: Synthetic oligonucleotide
gaauguauacuaggaaaua

SEQ ID NO: 2602247 - RNA, 19 nt, Artificial Sequence
  Description of Artificial Sequence: Synthetic oligonucleotide
acuguggaaaguucccuuu

SEQ ID NO: 2602248 - RNA, 19 nt, Artificial Sequence
  Description of Artificial Sequence: Synthetic oligonucleotide
cacaggcucgagcaagugc

SEQ ID NO: 2602249 - RNA, 19 nt, Artificial Sequence
  Description of Artificial Sequence: Synthetic oligonucleotide
acacacacacacaggcucg

SEQ ID NO: 2602250 - RNA, 19 nt, Artificial Sequence
  Description of Artificial Sequence: Synthetic oligonucleotide
gguaggauacugaacuccc

SEQ ID NO: 2602251 - RNA, 19 nt, Artificial Sequence
  Description of Artificial Sequence: Synthetic oligonucleotide
ggugacaaagggccugggg

SEQ ID NO: 2602252 - RNA, 19 nt, Artificial Sequence
  Description of Artificial Sequence: Synthetic oligonucleotide
guaguguuggguacagcug

SEQ ID NO: 2602253 - RNA, 19 nt, Artificial Sequence
  Description of Artificial Sequence: Synthetic oligonucleotide
acacacaggcucgagcaag

SEQ ID NO: 2602254 - RNA, 19 nt, Artificial Sequence
  Description of Artificial Sequence: Synthetic oligonucleotide
aaaaugcauuguaguguug

SEQ ID NO: 2602255 - RNA, 19 nt, Artificial Sequence
  Description of Artificial Sequence: Synthetic oligonucleotide
acccuaacucagguguagc

SEQ ID NO: 2602256 - RNA, 19 nt, Artificial Sequence
  Description of Artificial Sequence: Synthetic oligonucleotide
ggcagagaaagccugcuuc

SEQ ID NO: 2602257 - RNA, 19 nt, Artificial Sequence
  Description of Artificial Sequence: Synthetic oligonucleotide
acacacguuaacauucacu

SEQ ID NO: 2602258 - RNA, 19 nt, Artificial Sequence
  Description of Artificial Sequence: Synthetic oligonucleotide
ugaacuccccgaagagaga

SEQ ID NO: 2602259 - RNA, 19 nt, Artificial Sequence
  Description of Artificial Sequence: Synthetic oligonucleotide
ggccaugagaccuuuuaac

SEQ ID NO: 2602260 - RNA, 19 nt, Artificial Sequence
  Description of Artificial Sequence: Synthetic oligonucleotide
cuaaggauucucucaccca

SEQ ID NO: 2602261 - RNA, 19 nt, Artificial Sequence
  Description of Artificial Sequence: Synthetic oligonucleotide
acucagguguagcugcccu

SEQ ID NO: 2602262 - RNA, 19 nt, Artificial Sequence
  Description of Artificial Sequence: Synthetic oligonucleotide
uuggguacagcugguggga

SEQ ID NO: 2602263 - RNA, 19 nt, Artificial Sequence
  Description of Artificial Sequence: Synthetic oligonucleotide
uuuuaaccugcagaaugua

SEQ ID NO: 2602264 - RNA, 19 nt, Artificial Sequence
  Description of Artificial Sequence: Synthetic oligonucleotide
cccuuuauagggugaagag

SEQ ID NO: 2602265 - RNA, 19 nt, Artificial Sequence
  Description of Artificial Sequence: Synthetic oligonucleotide
uccagaaggcugagucuca

SEQ ID NO: 2602266 - RNA, 19 nt, Artificial Sequence
  Description of Artificial Sequence: Synthetic oligonucleotide
cugucaacagcagggcacc

SEQ ID NO: 2602267 - RNA, 19 nt, Artificial Sequence
  Description of Artificial Sequence: Synthetic oligonucleotide
acauucacuguggaaaguu

SEQ ID NO: 2602268 - RNA, 19 nt, Artificial Sequence
  Description of Artificial Sequence: Synthetic oligonucleotide
ugagaccuuuuaaccugca

SEQ ID NO: 2602269 - RNA, 19 nt, Artificial Sequence
  Description of Artificial Sequence: Synthetic oligonucleotide
aagcagacagucugaucua

SEQ ID NO: 2602270 - RNA, 19 nt, Artificial Sequence
  Description of Artificial Sequence: Synthetic oligonucleotide
augcauuguaguguugggu

SEQ ID NO: 2602271 - RNA, 19 nt, Artificial Sequence
  Description of Artificial Sequence: Synthetic oligonucleotide
ccagcacacacacacacac

SEQ ID NO: 2602272 - RNA, 19 nt, Artificial Sequence
  Description of Artificial Sequence: Synthetic oligonucleotide
gccugcuucccuuuauagg

SEQ ID NO: 2602273 - RNA, 19 nt, Artificial Sequence
  Description of Artificial Sequence: Synthetic oligonucleotide
acugaacuccccgaagaga

SEQ ID NO: 2602274 - RNA, 19 nt, Artificial Sequence
  Description of Artificial Sequence: Synthetic oligonucleotide
agcagacagucugaucuag

SEQ ID NO: 2602275 - RNA, 19 nt, Artificial Sequence
  Description of Artificial Sequence: Synthetic oligonucleotide
aaccugcagaauguauacu

SEQ ID NO: 2602276 - RNA, 19 nt, Artificial Sequence
  Description of Artificial Sequence: Synthetic oligonucleotide
auacuaggaaauacacaca

SEQ ID NO: 2602277 - RNA, 19 nt, Artificial Sequence
  Description of Artificial Sequence: Synthetic oligonucleotide
gaggccaugagaccuuuua

SEQ ID NO: 2602278 - RNA, 19 nt, Artificial Sequence
  Description of Artificial Sequence: Synthetic oligonucleotide
cagaaagcugguagcugac

SEQ ID NO: 2602279 - RNA, 19 nt, Artificial Sequence
  Description of Artificial Sequence: Synthetic oligonucleotide
caagugcgcgugcacacac

SEQ ID NO: 2602280 - RNA, 19 nt, Artificial Sequence
  Description of Artificial Sequence: Synthetic oligonucleotide
acuaggaaauacacacaca

SEQ ID NO: 2602281 - RNA, 19 nt, Artificial Sequence
  Description of Artificial Sequence: Synthetic oligonucleotide
gggaucucugguuuaugug

SEQ ID NO: 2602282 - RNA, 19 nt, Artificial Sequence
  Description of Artificial Sequence: Synthetic oligonucleotide
aaggagcccuagaccaagg

SEQ ID NO: 2602283 - RNA, 19 nt, Artificial Sequence
  Description of Artificial Sequence: Synthetic oligonucleotide
aagccugcuucccuuuaua

SEQ ID NO: 2602284 - RNA, 19 nt, Artificial Sequence
  Description of Artificial Sequence: Synthetic oligonucleotide
acacacacacacacacagg

SEQ ID NO: 2602285 - RNA, 19 nt, Artificial Sequence
  Description of Artificial Sequence: Synthetic oligonucleotide
ggguaggauacugaacucc

SEQ ID NO: 2602286 - RNA, 19 nt, Artificial Sequence
  Description of Artificial Sequence: Synthetic oligonucleotide
acagccacccuaacucagg

SEQ ID NO: 2602287 - RNA, 19 nt, Artificial Sequence
  Description of Artificial Sequence: Synthetic oligonucleotide
ccucaaaggagcccuagac

SEQ ID NO: 2602288 - RNA, 19 nt, Artificial Sequence
  Description of Artificial Sequence: Synthetic oligonucleotide
augcaaauauaaguuucaa

SEQ ID NO: 2602289 - RNA, 19 nt, Artificial Sequence
  Description of Artificial Sequence: Synthetic oligonucleotide
cagagaaagccugcuuccc

SEQ ID NO: 2602290 - RNA, 19 nt, Artificial Sequence
  Description of Artificial Sequence: Synthetic oligonucleotide
uagugagcagggaggccca

SEQ ID NO: 2602291 - RNA, 19 nt, Artificial Sequence
  Description of Artificial Sequence: Synthetic oligonucleotide
agccugugcacagaugcug

SEQ ID NO: 2602292 - RNA, 19 nt, Artificial Sequence
  Description of Artificial Sequence: Synthetic oligonucleotide
guaggauacugaacucccc

SEQ ID NO: 2602293 - RNA, 19 nt, Artificial Sequence
  Description of Artificial Sequence: Synthetic oligonucleotide
uucccuuuauagggugaag

SEQ ID NO: 2602294 - RNA, 19 nt, Artificial Sequence
  Description of Artificial Sequence: Synthetic oligonucleotide
cuagaccaaggcacacaac

SEQ ID NO: 2602295 - RNA, 19 nt, Artificial Sequence
  Description of Artificial Sequence: Synthetic oligonucleotide
aggccaugagaccuuuuaa

SEQ ID NO: 2602296 - RNA, 19 nt, Artificial Sequence
  Description of Artificial Sequence: Synthetic oligonucleotide
ucccagggaucucugguuu

SEQ ID NO: 2602297 - RNA, 19 nt, Artificial Sequence
  Description of Artificial Sequence: Synthetic oligonucleotide
ugccugucaacagcagggc

SEQ ID NO: 2602298 - RNA, 19 nt, Artificial Sequence
  Description of Artificial Sequence: Synthetic oligonucleotide
ggaaauacacacacacaca

SEQ ID NO: 2602299 - RNA, 19 nt, Artificial Sequence
  Description of Artificial Sequence: Synthetic oligonucleotide
acauguuguuucagcuggg

SEQ ID NO: 2602300 - RNA, 19 nt, Artificial Sequence
  Description of Artificial Sequence: Synthetic oligonucleotide
agaggaccgggcucaggug

SEQ ID NO: 2602301 - RNA, 19 nt, Artificial Sequence
  Description of Artificial Sequence: Synthetic oligonucleotide
gcagaauguauacuaggaa

SEQ ID NO: 2602302 - RNA, 19 nt, Artificial Sequence
  Description of Artificial Sequence: Synthetic oligonucleotide
agggaggcccauuccucag

SEQ ID NO: 2602303 - RNA, 19 nt, Artificial Sequence
  Description of Artificial Sequence: Synthetic oligonucleotide
gugggaacaugccugucaa

SEQ ID NO: 2602304 - RNA, 19 nt, Artificial Sequence
  Description of Artificial Sequence: Synthetic oligonucleotide
caggugacaaagggccugg

SEQ ID NO: 2602305 - RNA, 19 nt, Artificial Sequence
  Description of Artificial Sequence: Synthetic oligonucleotide
cagucugaucuagugagca

SEQ ID NO: 2602306 - RNA, 19 nt, Artificial Sequence
  Description of Artificial Sequence: Synthetic oligonucleotide
gcauuguaguguuggguac

SEQ ID NO: 2602307 - RNA, 19 nt, Artificial Sequence
  Description of Artificial Sequence: Synthetic oligonucleotide
uucuuuccagaaggcugag

SEQ ID NO: 2602308 - RNA, 19 nt, Artificial Sequence
  Description of Artificial Sequence: Synthetic oligonucleotide
ucgagcaagugcgcgugca

SEQ ID NO: 2602309 - RNA, 19 nt, Artificial Sequence
  Description of Artificial Sequence: Synthetic oligonucleotide
cagcuggugggaacaugcc

SEQ ID NO: 2602310 - RNA, 19 nt, Artificial Sequence
  Description of Artificial Sequence: Synthetic oligonucleotide
cacacacguuaacauucac

SEQ ID NO: 2602311 - RNA, 19 nt, Artificial Sequence
  Description of Artificial Sequence: Synthetic oligonucleotide
agaaagccugcuucccuuu

SEQ ID NO: 2602312 - RNA, 19 nt, Artificial Sequence
  Description of Artificial Sequence: Synthetic oligonucleotide
gagacacagccuaguugag

SEQ ID NO: 2602313 - RNA, 19 nt, Artificial Sequence
  Description of Artificial Sequence: Synthetic oligonucleotide
auacacacacacacacaca

SEQ ID NO: 2602314 - RNA, 19 nt, Artificial Sequence
  Description of Artificial Sequence: Synthetic oligonucleotide
ggagagcuugaagaaggag

SEQ ID NO: 2602315 - RNA, 19 nt, Artificial Sequence
  Description of Artificial Sequence: Synthetic oligonucleotide
cauuguaguguuggguaca

SEQ ID NO: 2602316 - RNA, 19 nt, Artificial Sequence
  Description of Artificial Sequence: Synthetic oligonucleotide
cacccuaacucagguguag

SEQ ID NO: 2602317 - RNA, 19 nt, Artificial Sequence
  Description of Artificial Sequence: Synthetic oligonucleotide
cugguuuaugugacagcca

SEQ ID NO: 2602318 - RNA, 19 nt, Artificial Sequence
  Description of Artificial Sequence: Synthetic oligonucleotide
cagucccagggaucucugg

SEQ ID NO: 2602319 - RNA, 19 nt, Artificial Sequence
  Description of Artificial Sequence: Synthetic oligonucleotide
cucaggugggcagucccag

SEQ ID NO: 2602320 - RNA, 19 nt, Artificial Sequence
  Description of Artificial Sequence: Synthetic oligonucleotide
ggcugagucucacaagcuc

SEQ ID NO: 2602321 - RNA, 19 nt, Artificial Sequence
  Description of Artificial Sequence: Synthetic oligonucleotide
aggcucgagcaagugcgcg

SEQ ID NO: 2602322 - RNA, 19 nt, Artificial Sequence
  Description of Artificial Sequence: Synthetic oligonucleotide
ugaccuguucuugcccaca

SEQ ID NO: 2602323 - RNA, 19 nt, Artificial Sequence
  Description of Artificial Sequence: Synthetic oligonucleotide
ugggaacaugccugucaac

SEQ ID NO: 2602324 - RNA, 19 nt, Artificial Sequence
  Description of Artificial Sequence: Synthetic oligonucleotide
agccacccuaacucaggug

SEQ ID NO: 2602325 - RNA, 19 nt, Artificial Sequence
  Description of Artificial Sequence: Synthetic oligonucleotide
ggagcccuagaccaaggca

SEQ ID NO: 2602326 - RNA, 19 nt, Artificial Sequence
  Description of Artificial Sequence: Synthetic oligonucleotide
ccuaguugaggccaugaga

SEQ ID NO: 2602327 - RNA, 19 nt, Artificial Sequence
  Description of Artificial Sequence: Synthetic oligonucleotide
cucagguguagcugcccuc

SEQ ID NO: 2602328 - RNA, 19 nt, Artificial Sequence
  Description of Artificial Sequence: Synthetic oligonucleotide
gagcaagugcgcgugcaca

SEQ ID NO: 2602329 - RNA, 19 nt, Artificial Sequence
  Description of Artificial Sequence: Synthetic oligonucleotide
gugaagagucaggugacaa

SEQ ID NO: 2602330 - RNA, 19 nt, Artificial Sequence
  Description of Artificial Sequence: Synthetic oligonucleotide
acacacacguuaacauuca

SEQ ID NO: 2602331 - RNA, 19 nt, Artificial Sequence
  Description of Artificial Sequence: Synthetic oligonucleotide
ucuuuccagaaggcugagu

SEQ ID NO: 2602332 - RNA, 19 nt, Artificial Sequence
  Description of Artificial Sequence: Synthetic oligonucleotide
uuguaguguuggguacagc

SEQ ID NO: 2602333 - RNA, 19 nt, Artificial Sequence
  Description of Artificial Sequence: Synthetic oligonucleotide
cugaccuguucuugcccac

SEQ ID NO: 2602334 - RNA, 19 nt, Artificial Sequence
  Description of Artificial Sequence: Synthetic oligonucleotide
gguacagcuggugggaaca

SEQ ID NO: 2602335 - RNA, 19 nt, Artificial Sequence
  Description of Artificial Sequence: Synthetic oligonucleotide
cacagccuaguugaggcca

SEQ ID NO: 2602336 - RNA, 19 nt, Artificial Sequence
  Description of Artificial Sequence: Synthetic oligonucleotide
ggagaacauguuguuucag

SEQ ID NO: 2602337 - RNA, 19 nt, Artificial Sequence
  Description of Artificial Sequence: Synthetic oligonucleotide
ccuaacucagguguagcug

SEQ ID NO: 2602338 - RNA, 19 nt, Artificial Sequence
  Description of Artificial Sequence: Synthetic oligonucleotide
acacacacacacacaggcu

SEQ ID NO: 2602339 - RNA, 19 nt, Artificial Sequence
  Description of Artificial Sequence: Synthetic oligonucleotide
guucuugcccacauuugaa

SEQ ID NO: 2602340 - RNA, 19 nt, Artificial Sequence
  Description of Artificial Sequence: Synthetic oligonucleotide
caggcucgagcaagugcgc

SEQ ID NO: 2602341 - RNA, 19 nt, Artificial Sequence
  Description of Artificial Sequence: Synthetic oligonucleotide
gccuaguugaggccaugag

SEQ ID NO: 2602342 - RNA, 19 nt, Artificial Sequence
  Description of Artificial Sequence: Synthetic oligonucleotide
caccaagaggaccgggcuc

SEQ ID NO: 2602343 - RNA, 19 nt, Artificial Sequence
  Description of Artificial Sequence: Synthetic oligonucleotide
gguuuaugugacagccacc

SEQ ID NO: 2602344 - RNA, 19 nt, Artificial Sequence
  Description of Artificial Sequence: Synthetic oligonucleotide
cauguuguuucagcuggga

SEQ ID NO: 2602345 - RNA, 19 nt, Artificial Sequence
  Description of Artificial Sequence: Synthetic oligonucleotide
ggauacugaacuccccgaa

SEQ ID NO: 2602346 - RNA, 19 nt, Artificial Sequence
  Description of Artificial Sequence: Synthetic oligonucleotide
cugggacacuacagagcag

SEQ ID NO: 2602347 - RNA, 19 nt, Artificial Sequence
  Description of Artificial Sequence: Synthetic oligonucleotide
cugguagcugaccuguucu

SEQ ID NO: 2602348 - RNA, 19 nt, Artificial Sequence
  Description of Artificial Sequence: Synthetic oligonucleotide
accuuuuaaccugcagaau

SEQ ID NO: 2602349 - RNA, 19 nt, Artificial Sequence
  Description of Artificial Sequence: Synthetic oligonucleotide
gaaagccugcuucccuuua

SEQ ID NO: 2602350 - RNA, 19 nt, Artificial Sequence
  Description of Artificial Sequence: Synthetic oligonucleotide
ggcucaggugggcaguccc

SEQ ID NO: 2602351 - RNA, 19 nt, Artificial Sequence
  Description of Artificial Sequence: Synthetic oligonucleotide
aacuccccgaagagagaca

SEQ ID NO: 2602352 - RNA, 19 nt, Artificial Sequence
  Description of Artificial Sequence: Synthetic oligonucleotide
gcugaccuguucuugccca

SEQ ID NO: 2602353 - RNA, 19 nt, Artificial Sequence
  Description of Artificial Sequence: Synthetic oligonucleotide
acacacacacacacacaca

SEQ ID NO: 2602354 - RNA, 19 nt, Artificial Sequence
  Description of Artificial Sequence: Synthetic oligonucleotide
ggcaccaagaggaccgggc

SEQ ID NO: 2602355 - RNA, 19 nt, Artificial Sequence
  Description of Artificial Sequence: Synthetic oligonucleotide
agccuaguugaggccauga

SEQ ID NO: 2602356 - RNA, 19 nt, Artificial Sequence
  Description of Artificial Sequence: Synthetic oligonucleotide
gacagccugugcacagaug

SEQ ID NO: 2602357 - RNA, 19 nt, Artificial Sequence
  Description of Artificial Sequence: Synthetic oligonucleotide
caaaggagcccuagaccaa

SEQ ID NO: 2602358 - RNA, 19 nt, Artificial Sequence
  Description of Artificial Sequence: Synthetic oligonucleotide
aagcucugacaagcagaca

SEQ ID NO: 2602359 - RNA, 19 nt, Artificial Sequence
  Description of Artificial Sequence: Synthetic oligonucleotide
aguguuggguacagcuggu

SEQ ID NO: 2602360 - RNA, 19 nt, Artificial Sequence
  Description of Artificial Sequence: Synthetic oligonucleotide
acaugccugucaacagcag

SEQ ID NO: 2602361 - RNA, 19 nt, Artificial Sequence
  Description of Artificial Sequence: Synthetic oligonucleotide
cucgagcaagugcgcgugc

SEQ ID NO: 2602362 - RNA, 19 nt, Artificial Sequence
  Description of Artificial Sequence: Synthetic oligonucleotide
ugucaacagcagggcacca

SEQ ID NO: 2602363 - RNA, 19 nt, Artificial Sequence
  Description of Artificial Sequence: Synthetic oligonucleotide
guguuggguacagcuggug

SEQ ID NO: 2602364 - RNA, 19 nt, Artificial Sequence
  Description of Artificial Sequence: Synthetic oligonucleotide
gcugguagcugaccuguuc

SEQ ID NO: 2602365 - RNA, 19 nt, Artificial Sequence
  Description of Artificial Sequence: Synthetic oligonucleotide
aggugacaaagggccuggg

SEQ ID NO: 2602366 - RNA, 19 nt, Artificial Sequence
  Description of Artificial Sequence: Synthetic oligonucleotide
aagugcgcgugcacacaca

SEQ ID NO: 2602367 - RNA, 19 nt, Artificial Sequence
  Description of Artificial Sequence: Synthetic oligonucleotide
agggcaccaagaggaccgg

SEQ ID NO: 2602368 - RNA, 19 nt, Artificial Sequence
  Description of Artificial Sequence: Synthetic oligonucleotide
cagaaggcugagucucaca

SEQ ID NO: 2602369 - RNA, 19 nt, Artificial Sequence
  Description of Artificial Sequence: Synthetic oligonucleotide
cagcacacacacacacaca

SEQ ID NO: 2602370 - RNA, 19 nt, Artificial Sequence
  Description of Artificial Sequence: Synthetic oligonucleotide
gggguaggauacugaacuc

SEQ ID NO: 2602371 - RNA, 19 nt, Artificial Sequence
  Description of Artificial Sequence: Synthetic oligonucleotide
agcccuagaccaaggcaca

SEQ ID NO: 2602372 - RNA, 19 nt, Artificial Sequence
  Description of Artificial Sequence: Synthetic oligonucleotide
ccuagaccaaggcacacaa

SEQ ID NO: 2602373 - RNA, 19 nt, Artificial Sequence
  Description of Artificial Sequence: Synthetic oligonucleotide
gugcacagaugcugaaacu

SEQ ID NO: 2602374 - RNA, 19 nt, Artificial Sequence
  Description of Artificial Sequence: Synthetic oligonucleotide
gggguuguuuucuaaggau

SEQ ID NO: 2602375 - RNA, 19 nt, Artificial Sequence
  Description of Artificial Sequence: Synthetic oligonucleotide
ccaugagaccuuuuaaccu

SEQ ID NO: 2602376 - RNA, 19 nt, Artificial Sequence
  Description of Artificial Sequence: Synthetic oligonucleotide
uggguacagcuggugggaa

SEQ ID NO: 2602377 - RNA, 19 nt, Artificial Sequence
  Description of Artificial Sequence: Synthetic oligonucleotide
gugcgcgugcacacacacg

SEQ ID NO: 2602378 - RNA, 19 nt, Artificial Sequence
  Description of Artificial Sequence: Synthetic oligonucleotide
cgaagagagacacagccua

SEQ ID NO: 2602379 - RNA, 19 nt, Artificial Sequence
  Description of Artificial Sequence: Synthetic oligonucleotide
gggugaagagucaggugac

SEQ ID NO: 2602380 - RNA, 19 nt, Artificial Sequence
  Description of Artificial Sequence: Synthetic oligonucleotide
ugaggccaugagaccuuuu

SEQ ID NO: 2602381 - RNA, 19 nt, Artificial Sequence
  Description of Artificial Sequence: Synthetic oligonucleotide
accuguucuugcccacauu

SEQ ID NO: 2602382 - RNA, 19 nt, Artificial Sequence
  Description of Artificial Sequence: Synthetic oligonucleotide
uugaggccaugagaccuuu

SEQ ID NO: 2602383 - RNA, 19 nt, Artificial Sequence
  Description of Artificial Sequence: Synthetic oligonucleotide
gcucgagcaagugcgcgug

SEQ ID NO: 2602384 - RNA, 19 nt, Artificial Sequence
  Description of Artificial Sequence: Synthetic oligonucleotide
cugaucuagugagcaggga

SEQ ID NO: 2602385 - RNA, 19 nt, Artificial Sequence
  Description of Artificial Sequence: Synthetic oligonucleotide
ggugaagagucaggugaca

SEQ ID NO: 2602386 - RNA, 19 nt, Artificial Sequence
  Description of Artificial Sequence: Synthetic oligonucleotide
ggaggcccauuccucagaa

SEQ ID NO: 2602387 - RNA, 19 nt, Artificial Sequence
  Description of Artificial Sequence: Synthetic oligonucleotide
ccaaggcacacaacagaca

SEQ ID NO: 2602388 - RNA, 19 nt, Artificial Sequence
  Description of Artificial Sequence: Synthetic oligonucleotide
cucacccagcacacacaca

SEQ ID NO: 2602389 - RNA, 19 nt, Artificial Sequence
  Description of Artificial Sequence: Synthetic oligonucleotide
gaggcccauuccucagaaa

SEQ ID NO: 2602390 - RNA, 19 nt, Artificial Sequence
  Description of Artificial Sequence: Synthetic oligonucleotide
cacccagcacacacacaca

SEQ ID NO: 2602391 - RNA, 19 nt, Artificial Sequence
  Description of Artificial Sequence: Synthetic oligonucleotide
cacacacaggcucgagcaa

SEQ ID NO: 2602392 - RNA, 19 nt, Artificial Sequence
  Description of Artificial Sequence: Synthetic oligonucleotide
gcugcccucaaaggagccc

SEQ ID NO: 2602393 - RNA, 19 nt, Artificial Sequence
  Description of Artificial Sequence: Synthetic oligonucleotide
cacacaggcucgagcaagu

SEQ ID NO: 2602394 - RNA, 19 nt, Artificial Sequence
  Description of Artificial Sequence: Synthetic oligonucleotide
cugcuucccuuuauagggu

SEQ ID NO: 2602395 - RNA, 19 nt, Artificial Sequence
  Description of Artificial Sequence: Synthetic oligonucleotide
uuguuucagcugggacacu

SEQ ID NO: 2602396 - RNA, 19 nt, Artificial Sequence
  Description of Artificial Sequence: Synthetic oligonucleotide
acagccuaguugaggccau

SEQ ID NO: 2602397 - RNA, 19 nt, Artificial Sequence
  Description of Artificial Sequence: Synthetic oligonucleotide
cacacacacacaggcucga

SEQ ID NO: 2602398 - RNA, 19 nt, Artificial Sequence
  Description of Artificial Sequence: Synthetic oligonucleotide
uggugggaacaugccuguc

SEQ ID NO: 2602399 - RNA, 19 nt, Artificial Sequence
  Description of Artificial Sequence: Synthetic oligonucleotide
gcccauuccucagaaagcu

SEQ ID NO: 2602400 - RNA, 19 nt, Artificial Sequence
  Description of Artificial Sequence: Synthetic oligonucleotide
ccuuuauagggugaagagu

SEQ ID NO: 2602401 - RNA, 19 nt, Artificial Sequence
  Description of Artificial Sequence: Synthetic oligonucleotide
ccuguucuugcccacauuu

SEQ ID NO: 2602402 - RNA, 19 nt, Artificial Sequence
  Description of Artificial Sequence: Synthetic oligonucleotide
cuccccgaagagagacaca

SEQ ID NO: 2602403 - RNA, 19 nt, Artificial Sequence
  Description of Artificial Sequence: Synthetic oligonucleotide
gcaccaagaggaccgggcu

SEQ ID NO: 2602404 - RNA, 19 nt, Artificial Sequence
  Description of Artificial Sequence: Synthetic oligonucleotide
gcacacacacguuaacauu

SEQ ID NO: 2602405 - RNA, 19 nt, Artificial Sequence
  Description of Artificial Sequence: Synthetic oligonucleotide
gcuugaagaaggagaacau

SEQ ID NO: 2602406 - RNA, 19 nt, Artificial Sequence
  Description of Artificial Sequence: Synthetic oligonucleotide
cgugcacacacacguuaac

SEQ ID NO: 2602407 - RNA, 19 nt, Artificial Sequence
  Description of Artificial Sequence: Synthetic oligonucleotide
gccugugcacagaugcuga

SEQ ID NO: 2602408 - RNA, 19 nt, Artificial Sequence
  Description of Artificial Sequence: Synthetic oligonucleotide
cguuaacauucacugugga

SEQ ID NO: 2602409 - RNA, 19 nt, Artificial Sequence
  Description of Artificial Sequence: Synthetic oligonucleotide
gcacacacacacacacaca

SEQ ID NO: 2602410 - RNA, 19 nt, Artificial Sequence
  Description of Artificial Sequence: Synthetic oligonucleotide
gggcaccaagaggaccggg

SEQ ID NO: 2602411 - RNA, 19 nt, Artificial Sequence
  Description of Artificial Sequence: Synthetic oligonucleotide
cagccuaguugaggccaug

SEQ ID NO: 2602412 - RNA, 19 nt, Artificial Sequence
  Description of Artificial Sequence: Synthetic oligonucleotide
cagccacccuaacucaggu

SEQ ID NO: 2602413 - RNA, 19 nt, Artificial Sequence
  Description of Artificial Sequence: Synthetic oligonucleotide
cccagcacacacacacaca

SEQ ID NO: 2602414 - RNA, 19 nt, Artificial Sequence
  Description of Artificial Sequence: Synthetic oligonucleotide
cagccugugcacagaugcu

SEQ ID NO: 2602415 - RNA, 19 nt, Artificial Sequence
  Description of Artificial Sequence: Synthetic oligonucleotide
agugagcagggaggcccau

SEQ ID NO: 2602416 - RNA, 19 nt, Artificial Sequence
  Description of Artificial Sequence: Synthetic oligonucleotide
ggcucgagcaagugcgcgu

SEQ ID NO: 2602417 - RNA, 19 nt, Artificial Sequence
  Description of Artificial Sequence: Synthetic oligonucleotide
gcaagugcgcgugcacaca

SEQ ID NO: 2602418 - RNA, 19 nt, Artificial Sequence
  Description of Artificial Sequence: Synthetic oligonucleotide
cgagcaagugcgcgugcac

SEQ ID NO: 2602419 - RNA, 19 nt, Artificial Sequence
  Description of Artificial Sequence: Synthetic oligonucleotide
ccgaagagagacacagccu

SEQ ID NO: 2602420 - RNA, 19 nt, Artificial Sequence
  Description of Artificial Sequence: Synthetic oligonucleotide
cccuaacucagguguagcu

SEQ ID NO: 2602421 - RNA, 19 nt, Artificial Sequence
  Description of Artificial Sequence: Synthetic oligonucleotide
cccucaaaggagcccuaga

SEQ ID NO: 2602422 - RNA, 19 nt, Artificial Sequence
  Description of Artificial Sequence: Synthetic oligonucleotide
gcucugacaagcagacagu

SEQ ID NO: 2602423 - RNA, 19 nt, Artificial Sequence
  Description of Artificial Sequence: Synthetic oligonucleotide
ccucagaaagcugguagcu

SEQ ID NO: 2602424 - RNA, 19 nt, Artificial Sequence
  Description of Artificial Sequence: Synthetic oligonucleotide
gcgugcacacacacguuaa

SEQ ID NO: 2602425 - RNA, 19 nt, Artificial Sequence
  Description of Artificial Sequence: Synthetic oligonucleotide
cagguguagcugcccucaa

SEQ ID NO: 2602426 - RNA, 19 nt, Artificial Sequence
  Description of Artificial Sequence: Synthetic oligonucleotide
gcccacauuugaagagaca

SEQ ID NO: 2602427 - RNA, 19 nt, Artificial Sequence
  Description of Artificial Sequence: Synthetic oligonucleotide
gcucaggugggcaguccca

SEQ ID NO: 2602428 - RNA, 19 nt, Artificial Sequence
  Description of Artificial Sequence: Synthetic oligonucleotide
gcccuagaccaaggcacac

SEQ ID NO: 2602429 - RNA, 19 nt, Artificial Sequence
  Description of Artificial Sequence: Synthetic oligonucleotide
gcagacagucugaucuagu

SEQ ID NO: 2602430 - RNA, 19 nt, Artificial Sequence
  Description of Artificial Sequence: Synthetic oligonucleotide
guacagcuggugggaacau

SEQ ID NO: 2602431 - RNA, 19 nt, Artificial Sequence
  Description of Artificial Sequence: Synthetic oligonucleotide
cgcgugcacacacacguua

SEQ ID NO: 2602432 - RNA, 19 nt, Artificial Sequence
  Description of Artificial Sequence: Synthetic oligonucleotide
ccacccuaacucaggugua

SEQ ID NO: 2602433 - RNA, 19 nt, Artificial Sequence
  Description of Artificial Sequence: Synthetic oligonucleotide
cccagggaucucugguuua

SEQ ID NO: 2602434 - RNA, 19 nt, Artificial Sequence
  Description of Artificial Sequence: Synthetic oligonucleotide
gcugaaacuuggagagcuu

SEQ ID NO: 2602435 - RNA, 19 nt, Artificial Sequence
  Description of Artificial Sequence: Synthetic oligonucleotide
ggcacacaacagacagccu

SEQ ID NO: 2602436 - RNA, 19 nt, Artificial Sequence
  Description of Artificial Sequence: Synthetic oligonucleotide
gugagcagggaggcccauu

SEQ ID NO: 2602437 - RNA, 19 nt, Artificial Sequence
  Description of Artificial Sequence: Synthetic oligonucleotide
ccagggaucucugguuuau

SEQ ID NO: 2602438 - RNA, 19 nt, Artificial Sequence
  Description of Artificial Sequence: Synthetic oligonucleotide
ccgggcucaggugggcagu

SEQ ID NO: 2602439 - RNA, 19 nt, Artificial Sequence
  Description of Artificial Sequence: Synthetic oligonucleotide
gcgcgugcacacacacguu

SEQ ID NO: 2602440 - RNA, 19 nt, Artificial Sequence
  Description of Artificial Sequence: Synthetic oligonucleotide
aaaugcaaaaccuuguccc

SEQ ID NO: 2602441 - RNA, 19 nt, Artificial Sequence
  Description of Artificial Sequence: Synthetic oligonucleotide
aaaaugcaaaaccuugucc

SEQ ID NO: 2602442 - RNA, 19 nt, Artificial Sequence
  Description of Artificial Sequence: Synthetic oligonucleotide
auucaaauuucuuagcagc

SEQ ID NO: 2602443 - RNA, 19 nt, Artificial Sequence
  Description of Artificial Sequence: Synthetic oligonucleotide
ucaaauucaaauuucuuag

SEQ ID NO: 2602444 - RNA, 19 nt, Artificial Sequence
  Description of Artificial Sequence: Synthetic oligonucleotide
uuucuuguaaucuugcuag

SEQ ID NO: 2602445 - RNA, 19 nt, Artificial Sequence
  Description of Artificial Sequence: Synthetic oligonucleotide
aauucaaauuucuuagcag

SEQ ID NO: 2602446 - RNA, 19 nt, Artificial Sequence
  Description of Artificial Sequence: Synthetic oligonucleotide
auuugguguacacagcugc

SEQ ID NO: 2602447 - RNA, 19 nt, Artificial Sequence
  Description of Artificial Sequence: Synthetic oligonucleotide
ucuucagcuaaauagaggu

SEQ ID NO: 2602448 - RNA, 19 nt, Artificial Sequence
  Description of Artificial Sequence: Synthetic oligonucleotide
ucucauuucaaauucaaau

SEQ ID NO: 2602449 - RNA, 19 nt, Artificial Sequence
  Description of Artificial Sequence: Synthetic oligonucleotide
gagaagauauucuaucugc

SEQ ID NO: 2602450 - RNA, 19 nt, Artificial Sequence
  Description of Artificial Sequence: Synthetic oligonucleotide
uagaucuucaguuuccucc

SEQ ID NO: 2602451 - RNA, 19 nt, Artificial Sequence
  Description of Artificial Sequence: Synthetic oligonucleotide
aagauauucuaucugcaga

SEQ ID NO: 2602452 - RNA, 19 nt, Artificial Sequence
  Description of Artificial Sequence: Synthetic oligonucleotide
uccuccaaaaugcaaaacc

SEQ ID NO: 2602453 - RNA, 19 nt, Artificial Sequence
  Description of Artificial Sequence: Synthetic oligonucleotide
uccaaaaugcaaaaccuug

SEQ ID NO: 2602454 - RNA, 19 nt, Artificial Sequence
  Description of Artificial Sequence: Synthetic oligonucleotide
auauucuaucugcagauuc

SEQ ID NO: 2602455 - RNA, 19 nt, Artificial Sequence
  Description of Artificial Sequence: Synthetic oligonucleotide
aaauuucuuagcagcacgc

SEQ ID NO: 2602456 - RNA, 19 nt, Artificial Sequence
  Description of Artificial Sequence: Synthetic oligonucleotide
ucuaucugcagauucaggu

SEQ ID NO: 2602457 - RNA, 19 nt, Artificial Sequence
  Description of Artificial Sequence: Synthetic oligonucleotide
uucaaauucaaauuucuua

SEQ ID NO: 2602458 - RNA, 19 nt, Artificial Sequence
  Description of Artificial Sequence: Synthetic oligonucleotide
aaauagagguguuucagau

SEQ ID NO: 2602459 - RNA, 19 nt, Artificial Sequence
  Description of Artificial Sequence: Synthetic oligonucleotide
uagacuguuucucagacaa

SEQ ID NO: 2602460 - RNA, 19 nt, Artificial Sequence
  Description of Artificial Sequence: Synthetic oligonucleotide
uaaugaucggugaacuggg

SEQ ID NO: 2602461 - RNA, 19 nt, Artificial Sequence
  Description of Artificial Sequence: Synthetic oligonucleotide
uuugguaccagugacagaa

SEQ ID NO: 2602462 - RNA, 19 nt, Artificial Sequence
  Description of Artificial Sequence: Synthetic oligonucleotide
cuuguagagccucugagcc

SEQ ID NO: 2602463 - RNA, 19 nt, Artificial Sequence
  Description of Artificial Sequence: Synthetic oligonucleotide
acuagacuguuucucagac

SEQ ID NO: 2602464 - RNA, 19 nt, Artificial Sequence
  Description of Artificial Sequence: Synthetic oligonucleotide
aaccuugucccucucgaac

SEQ ID NO: 2602465 - RNA, 19 nt, Artificial Sequence
  Description of Artificial Sequence: Synthetic oligonucleotide
guaaugaucggugaacugg

SEQ ID NO: 2602466 - RNA, 19 nt, Artificial Sequence
  Description of Artificial Sequence: Synthetic oligonucleotide
gaagauauucuaucugcag

SEQ ID NO: 2602467 - RNA, 19 nt, Artificial Sequence
  Description of Artificial Sequence: Synthetic oligonucleotide
uguuacacucuucuucagg

SEQ ID NO: 2602468 - RNA, 19 nt, Artificial Sequence
  Description of Artificial Sequence: Synthetic oligonucleotide
uucaguguuacacucuucu

SEQ ID NO: 2602469 - RNA, 19 nt, Artificial Sequence
  Description of Artificial Sequence: Synthetic oligonucleotide
ucuuguaucuucuggagaa

SEQ ID NO: 2602470 - RNA, 19 nt, Artificial Sequence
  Description of Artificial Sequence: Synthetic oligonucleotide
aaaaccuugucccucucga

SEQ ID NO: 2602471 - RNA, 19 nt, Artificial Sequence
  Description of Artificial Sequence: Synthetic oligonucleotide
cuuggaugcgaccugaggc

SEQ ID NO: 2602472 - RNA, 19 nt, Artificial Sequence
  Description of Artificial Sequence: Synthetic oligonucleotide
uucuucagcuaaauagagg

SEQ ID NO: 2602473 - RNA, 19 nt, Artificial Sequence
  Description of Artificial Sequence: Synthetic oligonucleotide
caaauuucuuagcagcacg

SEQ ID NO: 2602474 - RNA, 19 nt, Artificial Sequence
  Description of Artificial Sequence: Synthetic oligonucleotide
cuuguauccguucauacuc

SEQ ID NO: 2602475 - RNA, 19 nt, Artificial Sequence
  Description of Artificial Sequence: Synthetic oligonucleotide
acuggugaucacuagacug

SEQ ID NO: 2602476 - RNA, 19 nt, Artificial Sequence
  Description of Artificial Sequence: Synthetic oligonucleotide
uucaaauuucuuagcagca

SEQ ID NO: 2602477 - RNA, 19 nt, Artificial Sequence
  Description of Artificial Sequence: Synthetic oligonucleotide
uauucuaucugcagauuca

SEQ ID NO: 2602478 - RNA, 19 nt, Artificial Sequence
  Description of Artificial Sequence: Synthetic oligonucleotide
aaucuugcuagaucuucag

SEQ ID NO: 2602479 - RNA, 19 nt, Artificial Sequence
  Description of Artificial Sequence: Synthetic oligonucleotide
uauccguucauacucuucu

SEQ ID NO: 2602480 - RNA, 19 nt, Artificial Sequence
  Description of Artificial Sequence: Synthetic oligonucleotide
aauagagguguuucagaug

SEQ ID NO: 2602481 - RNA, 19 nt, Artificial Sequence
  Description of Artificial Sequence: Synthetic oligonucleotide
guuacacucuucuucaggc

SEQ ID NO: 2602482 - RNA, 19 nt, Artificial Sequence
  Description of Artificial Sequence: Synthetic oligonucleotide
uaucuucuggagaagauau

SEQ ID NO: 2602483 - RNA, 19 nt, Artificial Sequence
  Description of Artificial Sequence: Synthetic oligonucleotide
ucaacuuguucuucugagg

SEQ ID NO: 2602484 - RNA, 19 nt, Artificial Sequence
  Description of Artificial Sequence: Synthetic oligonucleotide
aaauccuccggcccgccac

SEQ ID NO: 2602485 - RNA, 19 nt, Artificial Sequence
  Description of Artificial Sequence: Synthetic oligonucleotide
uuucuuguaucuucuggag

SEQ ID NO: 2602486 - RNA, 19 nt, Artificial Sequence
  Description of Artificial Sequence: Synthetic oligonucleotide
aaugcaaaaccuugucccu

SEQ ID NO: 2602487 - RNA, 19 nt, Artificial Sequence
  Description of Artificial Sequence: Synthetic oligonucleotide
uuggaugcgaccugaggcg

SEQ ID NO: 2602488 - RNA, 19 nt, Artificial Sequence
  Description of Artificial Sequence: Synthetic oligonucleotide
uucuuguagagccucugag

SEQ ID NO: 2602489 - RNA, 19 nt, Artificial Sequence
  Description of Artificial Sequence: Synthetic oligonucleotide
aaagucuguucaguguuac

SEQ ID NO: 2602490 - RNA, 19 nt, Artificial Sequence
  Description of Artificial Sequence: Synthetic oligonucleotide
uucugagggaggcagacca

SEQ ID NO: 2602491 - RNA, 19 nt, Artificial Sequence
  Description of Artificial Sequence: Synthetic oligonucleotide
uucauacucuucuugugcc

SEQ ID NO: 2602492 - RNA, 19 nt, Artificial Sequence
  Description of Artificial Sequence: Synthetic oligonucleotide
uuucuuugguaccagugac

SEQ ID NO: 2602493 - RNA, 19 nt, Artificial Sequence
  Description of Artificial Sequence: Synthetic oligonucleotide
gacuguuucucagacaaag

SEQ ID NO: 2602494 - RNA, 19 nt, Artificial Sequence
  Description of Artificial Sequence: Synthetic oligonucleotide
uucagcuaaauagaggugu

SEQ ID NO: 2602495 - RNA, 19 nt, Artificial Sequence
  Description of Artificial Sequence: Synthetic oligonucleotide
uuuaacugguuucuuguau

SEQ ID NO: 2602496 - RNA, 19 nt, Artificial Sequence
  Description of Artificial Sequence: Synthetic oligonucleotide
ugcagauucagguuuggcu

SEQ ID NO: 2602497 - RNA, 19 nt, Artificial Sequence
  Description of Artificial Sequence: Synthetic oligonucleotide
agauauucuaucugcagau

SEQ ID NO: 2602498 - RNA, 19 nt, Artificial Sequence
  Description of Artificial Sequence: Synthetic oligonucleotide
ugaacugggauuccuggga

SEQ ID NO: 2602499 - RNA, 19 nt, Artificial Sequence
  Description of Artificial Sequence: Synthetic oligonucleotide
auucagguuuggcuggccc

SEQ ID NO: 2602500 - RNA, 19 nt, Artificial Sequence
  Description of Artificial Sequence: Synthetic oligonucleotide
aaccuuucuccgcuguuuc

SEQ ID NO: 2602501 - RNA, 19 nt, Artificial Sequence
  Description of Artificial Sequence: Synthetic oligonucleotide
agcuaaauagagguguuuc

SEQ ID NO: 2602502 - RNA, 19 nt, Artificial Sequence
  Description of Artificial Sequence: Synthetic oligonucleotide
uuucagauggucuggguaa

SEQ ID NO: 2602503 - RNA, 19 nt, Artificial Sequence
  Description of Artificial Sequence: Synthetic oligonucleotide
uaaucuugcuagaucuuca

SEQ ID NO: 2602504 - RNA, 19 nt, Artificial Sequence
  Description of Artificial Sequence: Synthetic oligonucleotide
uuaacugguuucuuguauc

SEQ ID NO: 2602505 - RNA, 19 nt, Artificial Sequence
  Description of Artificial Sequence: Synthetic oligonucleotide
ucuuggaugcgaccugagg

SEQ ID NO: 2602506 - RNA, 19 nt, Artificial Sequence
  Description of Artificial Sequence: Synthetic oligonucleotide
ugagucuuucuucuucagc

SEQ ID NO: 2602507 - RNA, 19 nt, Artificial Sequence
  Description of Artificial Sequence: Synthetic oligonucleotide
gucaacuuguucuucugag

SEQ ID NO: 2602508 - RNA, 19 nt, Artificial Sequence
  Description of Artificial Sequence: Synthetic oligonucleotide
gacuuugaaagcuuccauc

SEQ ID NO: 2602509 - RNA, 19 nt, Artificial Sequence
  Description of Artificial Sequence: Synthetic oligonucleotide
uuuaccuuccauagcaauu

SEQ ID NO: 2602510 - RNA, 19 nt, Artificial Sequence
  Description of Artificial Sequence: Synthetic oligonucleotide
uucuaucugcagauucagg

SEQ ID NO: 2602511 - RNA, 19 nt, Artificial Sequence
  Description of Artificial Sequence: Synthetic oligonucleotide
accuugucccucucgaacg

SEQ ID NO: 2602512 - RNA, 19 nt, Artificial Sequence
  Description of Artificial Sequence: Synthetic oligonucleotide
uuuggcuggcccuuucuag

SEQ ID NO: 2602513 - RNA, 19 nt, Artificial Sequence
  Description of Artificial Sequence: Synthetic oligonucleotide
auuucaaauucaaauuucu

SEQ ID NO: 2602514 - RNA, 19 nt, Artificial Sequence
  Description of Artificial Sequence: Synthetic oligonucleotide
guuucuuguaucuucugga

SEQ ID NO: 2602515 - RNA, 19 nt, Artificial Sequence
  Description of Artificial Sequence: Synthetic oligonucleotide
ugcuagaucuucaguuucc

SEQ ID NO: 2602516 - RNA, 19 nt, Artificial Sequence
  Description of Artificial Sequence: Synthetic oligonucleotide
cacuaugguucuuggaugc

SEQ ID NO: 2602517 - RNA, 19 nt, Artificial Sequence
  Description of Artificial Sequence: Synthetic oligonucleotide
gguuucuuguaucuucugg

SEQ ID NO: 2602518 - RNA, 19 nt, Artificial Sequence
  Description of Artificial Sequence: Synthetic oligonucleotide
acuuguucuucugagggag

SEQ ID NO: 2602519 - RNA, 19 nt, Artificial Sequence
  Description of Artificial Sequence: Synthetic oligonucleotide
uugguuugaaguuuucuuu

SEQ ID NO: 2602520 - RNA, 19 nt, Artificial Sequence
  Description of Artificial Sequence: Synthetic oligonucleotide
aggcagaccaaccuuucuc

SEQ ID NO: 2602521 - RNA, 19 nt, Artificial Sequence
  Description of Artificial Sequence: Synthetic oligonucleotide
uccggggaaggcuugcugg

SEQ ID NO: 2602522 - RNA, 19 nt, Artificial Sequence
  Description of Artificial Sequence: Synthetic oligonucleotide
agacuggugaucacuagac

SEQ ID NO: 2602523 - RNA, 19 nt, Artificial Sequence
  Description of Artificial Sequence: Synthetic oligonucleotide
uaucugcagauucagguuu

SEQ ID NO: 2602524 - RNA, 19 nt, Artificial Sequence
  Description of Artificial Sequence: Synthetic oligonucleotide
cauugguuccuucuuuacc

SEQ ID NO: 2602525 - RNA, 19 nt, Artificial Sequence
  Description of Artificial Sequence: Synthetic oligonucleotide
aucacuagacuguuucuca

SEQ ID NO: 2602526 - RNA, 19 nt, Artificial Sequence
  Description of Artificial Sequence: Synthetic oligonucleotide
aggcuggucaacuuguucu

SEQ ID NO: 2602527 - RNA, 19 nt, Artificial Sequence
  Description of Artificial Sequence: Synthetic oligonucleotide
agguguuucagauggucug

SEQ ID NO: 2602528 - RNA, 19 nt, Artificial Sequence
  Description of Artificial Sequence: Synthetic oligonucleotide
uaugguucuuggaugcgac

SEQ ID NO: 2602529 - RNA, 19 nt, Artificial Sequence
  Description of Artificial Sequence: Synthetic oligonucleotide
uaccagugacagaauuugg

SEQ ID NO: 2602530 - RNA, 19 nt, Artificial Sequence
  Description of Artificial Sequence: Synthetic oligonucleotide
aauuucuuagcagcacgcu

SEQ ID NO: 2602531 - RNA, 19 nt, Artificial Sequence
  Description of Artificial Sequence: Synthetic oligonucleotide
cucucgaacgcuuccgggg

SEQ ID NO: 2602532 - RNA, 19 nt, Artificial Sequence
  Description of Artificial Sequence: Synthetic oligonucleotide
gaauuugguguacacagcu

SEQ ID NO: 2602533 - RNA, 19 nt, Artificial Sequence
  Description of Artificial Sequence: Synthetic oligonucleotide
uucaggcacaggcugguca

SEQ ID NO: 2602534 - RNA, 19 nt, Artificial Sequence
  Description of Artificial Sequence: Synthetic oligonucleotide
guaccagugacagaauuug

SEQ ID NO: 2602535 - RNA, 19 nt, Artificial Sequence
  Description of Artificial Sequence: Synthetic oligonucleotide
gacagaauuugguguacac

SEQ ID NO: 2602536 - RNA, 19 nt, Artificial Sequence
  Description of Artificial Sequence: Synthetic oligonucleotide
gcagauucagguuuggcug

SEQ ID NO: 2602537 - RNA, 19 nt, Artificial Sequence
  Description of Artificial Sequence: Synthetic oligonucleotide
uguaucuucuggagaagau

SEQ ID NO: 2602538 - RNA, 19 nt, Artificial Sequence
  Description of Artificial Sequence: Synthetic oligonucleotide
uucucauuucaaauucaaa

SEQ ID NO: 2602539 - RNA, 19 nt, Artificial Sequence
  Description of Artificial Sequence: Synthetic oligonucleotide
ucucagacaaagucuguuc

SEQ ID NO: 2602540 - RNA, 19 nt, Artificial Sequence
  Description of Artificial Sequence: Synthetic oligonucleotide
uucuggagaagauauucua

SEQ ID NO: 2602541 - RNA, 19 nt, Artificial Sequence
  Description of Artificial Sequence: Synthetic oligonucleotide
agugacagaauuuggugua

SEQ ID NO: 2602542 - RNA, 19 nt, Artificial Sequence
  Description of Artificial Sequence: Synthetic oligonucleotide
augguucuuggaugcgacc

SEQ ID NO: 2602543 - RNA, 19 nt, Artificial Sequence
  Description of Artificial Sequence: Synthetic oligonucleotide
ugcuuguauccguucauac

SEQ ID NO: 2602544 - RNA, 19 nt, Artificial Sequence
  Description of Artificial Sequence: Synthetic oligonucleotide
aauuugguguacacagcug

SEQ ID NO: 2602545 - RNA, 19 nt, Artificial Sequence
  Description of Artificial Sequence: Synthetic oligonucleotide
ugggauuccugggacauug

SEQ ID NO: 2602546 - RNA, 19 nt, Artificial Sequence
  Description of Artificial Sequence: Synthetic oligonucleotide
ggagaagauauucuaucug

SEQ ID NO: 2602547 - RNA, 19 nt, Artificial Sequence
  Description of Artificial Sequence: Synthetic oligonucleotide
uuugcuuguauccguucau

SEQ ID NO: 2602548 - RNA, 19 nt, Artificial Sequence
  Description of Artificial Sequence: Synthetic oligonucleotide
uugcuagaucuucaguuuc

SEQ ID NO: 2602549 - RNA, 19 nt, Artificial Sequence
  Description of Artificial Sequence: Synthetic oligonucleotide
ucucgaacgcuuccgggga

SEQ ID NO: 2602550 - RNA, 19 nt, Artificial Sequence
  Description of Artificial Sequence: Synthetic oligonucleotide
ugguuugaaguuuucuuuu

SEQ ID NO: 2602551 - RNA, 19 nt, Artificial Sequence
  Description of Artificial Sequence: Synthetic oligonucleotide
uuucccacuaugguucuug

SEQ ID NO: 2602552 - RNA, 19 nt, Artificial Sequence
  Description of Artificial Sequence: Synthetic oligonucleotide
uucucgcuuucucauuuca

SEQ ID NO: 2602553 - RNA, 19 nt, Artificial Sequence
  Description of Artificial Sequence: Synthetic oligonucleotide
uuguauccguucauacucu

SEQ ID NO: 2602554 - RNA, 19 nt, Artificial Sequence
  Description of Artificial Sequence: Synthetic oligonucleotide
ugaucggugaacugggauu

SEQ ID NO: 2602555 - RNA, 19 nt, Artificial Sequence
  Description of Artificial Sequence: Synthetic oligonucleotide
uuguaucuucuggagaaga

SEQ ID NO: 2602556 - RNA, 19 nt, Artificial Sequence
  Description of Artificial Sequence: Synthetic oligonucleotide
uuaccuuccauagcaauuu

SEQ ID NO: 2602557 - RNA, 19 nt, Artificial Sequence
  Description of Artificial Sequence: Synthetic oligonucleotide
agaccaaccuuucuccgcu

SEQ ID NO: 2602558 - RNA, 19 nt, Artificial Sequence
  Description of Artificial Sequence: Synthetic oligonucleotide
ugagacuggugaucacuag

SEQ ID NO: 2602559 - RNA, 19 nt, Artificial Sequence
  Description of Artificial Sequence: Synthetic oligonucleotide
ugggacauugguuccuucu

SEQ ID NO: 2602560 - RNA, 19 nt, Artificial Sequence
  Description of Artificial Sequence: Synthetic oligonucleotide
ugaucacuagacuguuucu

SEQ ID NO: 2602561 - RNA, 19 nt, Artificial Sequence
  Description of Artificial Sequence: Synthetic oligonucleotide
gagacuggugaucacuaga

SEQ ID NO: 2602562 - RNA, 19 nt, Artificial Sequence
  Description of Artificial Sequence: Synthetic oligonucleotide
auuucuuagcagcacgcuu

SEQ ID NO: 2602563 - RNA, 19 nt, Artificial Sequence
  Description of Artificial Sequence: Synthetic oligonucleotide
uucuugugccuuuugguuu

SEQ ID NO: 2602564 - RNA, 19 nt, Artificial Sequence
  Description of Artificial Sequence: Synthetic oligonucleotide
uggcuaggccgccaggucc

SEQ ID NO: 2602565 - RNA, 19 nt, Artificial Sequence
  Description of Artificial Sequence: Synthetic oligonucleotide
agcacgcuuugcuuguauc

SEQ ID NO: 2602566 - RNA, 19 nt, Artificial Sequence
  Description of Artificial Sequence: Synthetic oligonucleotide
uagcagcacgcuuugcuug

SEQ ID NO: 2602567 - RNA, 19 nt, Artificial Sequence
  Description of Artificial Sequence: Synthetic oligonucleotide
ugguucuuggaugcgaccu

SEQ ID NO: 2602568 - RNA, 19 nt, Artificial Sequence
  Description of Artificial Sequence: Synthetic oligonucleotide
aacgcuuccggggaaggcu

SEQ ID NO: 2602569 - RNA, 19 nt, Artificial Sequence
  Description of Artificial Sequence: Synthetic oligonucleotide
ugcguuucccacuaugguu

SEQ ID NO: 2602570 - RNA, 19 nt, Artificial Sequence
  Description of Artificial Sequence: Synthetic oligonucleotide
acagaauuugguguacaca

SEQ ID NO: 2602571 - RNA, 19 nt, Artificial Sequence
  Description of Artificial Sequence: Synthetic oligonucleotide
uggguaaugaucggugaac

SEQ ID NO: 2602572 - RNA, 19 nt, Artificial Sequence
  Description of Artificial Sequence: Synthetic oligonucleotide
gcuuucucauuucaaauuc

SEQ ID NO: 2602573 - RNA, 19 nt, Artificial Sequence
  Description of Artificial Sequence: Synthetic oligonucleotide
uucccacuaugguucuugg

SEQ ID NO: 2602574 - RNA, 19 nt, Artificial Sequence
  Description of Artificial Sequence: Synthetic oligonucleotide
ucgcuuucucauuucaaau

SEQ ID NO: 2602575 - RNA, 19 nt, Artificial Sequence
  Description of Artificial Sequence: Synthetic oligonucleotide
cuucagcuaaauagaggug

SEQ ID NO: 2602576 - RNA, 19 nt, Artificial Sequence
  Description of Artificial Sequence: Synthetic oligonucleotide
agaagauauucuaucugca

SEQ ID NO: 2602577 - RNA, 19 nt, Artificial Sequence
  Description of Artificial Sequence: Synthetic oligonucleotide
ugccuuuugguuugaaguu

SEQ ID NO: 2602578 - RNA, 19 nt, Artificial Sequence
  Description of Artificial Sequence: Synthetic oligonucleotide
ucauacucuucuugugccu

SEQ ID NO: 2602579 - RNA, 19 nt, Artificial Sequence
  Description of Artificial Sequence: Synthetic oligonucleotide
cuugagucuuucuucuuca

SEQ ID NO: 2602580 - RNA, 19 nt, Artificial Sequence
  Description of Artificial Sequence: Synthetic oligonucleotide
cacgcuuugcuuguauccg

SEQ ID NO: 2602581 - RNA, 19 nt, Artificial Sequence
  Description of Artificial Sequence: Synthetic oligonucleotide
ucuuguaaucuugcuagau

SEQ ID NO: 2602582 - RNA, 19 nt, Artificial Sequence
  Description of Artificial Sequence: Synthetic oligonucleotide
guaaucuugcuagaucuuc

SEQ ID NO: 2602583 - RNA, 19 nt, Artificial Sequence
  Description of Artificial Sequence: Synthetic oligonucleotide
uccugcguuucccacuaug

SEQ ID NO: 2602584 - RNA, 19 nt, Artificial Sequence
  Description of Artificial Sequence: Synthetic oligonucleotide
uguaaucuugcuagaucuu

SEQ ID NO: 2602585 - RNA, 19 nt, Artificial Sequence
  Description of Artificial Sequence: Synthetic oligonucleotide
cucagacaaagucuguuca

SEQ ID NO: 2602586 - RNA, 19 nt, Artificial Sequence
  Description of Artificial Sequence: Synthetic oligonucleotide
uucagguuuggcuggcccu

SEQ ID NO: 2602587 - RNA, 19 nt, Artificial Sequence
  Description of Artificial Sequence: Synthetic oligonucleotide
gaacugggauuccugggac

SEQ ID NO: 2602588 - RNA, 19 nt, Artificial Sequence
  Description of Artificial Sequence: Synthetic oligonucleotide
gaucggugaacugggauuc

SEQ ID NO: 2602589 - RNA, 19 nt, Artificial Sequence
  Description of Artificial Sequence: Synthetic oligonucleotide
caggacuuugaaagcuucc

SEQ ID NO: 2602590 - RNA, 19 nt, Artificial Sequence
  Description of Artificial Sequence: Synthetic oligonucleotide
guuuccuccaaaaugcaaa

SEQ ID NO: 2602591 - RNA, 19 nt, Artificial Sequence
  Description of Artificial Sequence: Synthetic oligonucleotide
ucagcuaaauagagguguu

SEQ ID NO: 2602592 - RNA, 19 nt, Artificial Sequence
  Description of Artificial Sequence: Synthetic oligonucleotide
uucuuguaaucuugcuaga

SEQ ID NO: 2602593 - RNA, 19 nt, Artificial Sequence
  Description of Artificial Sequence: Synthetic oligonucleotide
uucuccgcuguuucuugag

SEQ ID NO: 2602594 - RNA, 19 nt, Artificial Sequence
  Description of Artificial Sequence: Synthetic oligonucleotide
uuucucagacaaagucugu

SEQ ID NO: 2602595 - RNA, 19 nt, Artificial Sequence
  Description of Artificial Sequence: Synthetic oligonucleotide
cagaccaaccuuucuccgc

SEQ ID NO: 2602596 - RNA, 19 nt, Artificial Sequence
  Description of Artificial Sequence: Synthetic oligonucleotide
aagucuguucaguguuaca

SEQ ID NO: 2602597 - RNA, 19 nt, Artificial Sequence
  Description of Artificial Sequence: Synthetic oligonucleotide
uuagcagcacgcuuugcuu

SEQ ID NO: 2602598 - RNA, 19 nt, Artificial Sequence
  Description of Artificial Sequence: Synthetic oligonucleotide
gugccuuuugguuugaagu

SEQ ID NO: 2602599 - RNA, 19 nt, Artificial Sequence
  Description of Artificial Sequence: Synthetic oligonucleotide
uccgcuguuucuugagucu

SEQ ID NO: 2602600 - RNA, 19 nt, Artificial Sequence
  Description of Artificial Sequence: Synthetic oligonucleotide
uuggcuggcccuuucuagu

SEQ ID NO: 2602601 - RNA, 19 nt, Artificial Sequence
  Description of Artificial Sequence: Synthetic oligonucleotide
agauucagguuuggcuggc

SEQ ID NO: 2602602 - RNA, 19 nt, Artificial Sequence
  Description of Artificial Sequence: Synthetic oligonucleotide
aggacuuugaaagcuucca

SEQ ID NO: 2602603 - RNA, 19 nt, Artificial Sequence
  Description of Artificial Sequence: Synthetic oligonucleotide
uggucaacuuguucuucug

SEQ ID NO: 2602604 - RNA, 19 nt, Artificial Sequence
  Description of Artificial Sequence: Synthetic oligonucleotide
gacaaagucuguucagugu

SEQ ID NO: 2602605 - RNA, 19 nt, Artificial Sequence
  Description of Artificial Sequence: Synthetic oligonucleotide
ucugcagauucagguuugg

SEQ ID NO: 2602606 - RNA, 19 nt, Artificial Sequence
  Description of Artificial Sequence: Synthetic oligonucleotide
augcaaaaccuugucccuc

SEQ ID NO: 2602607 - RNA, 19 nt, Artificial Sequence
  Description of Artificial Sequence: Synthetic oligonucleotide
aaaccuugucccucucgaa

SEQ ID NO: 2602608 - RNA, 19 nt, Artificial Sequence
  Description of Artificial Sequence: Synthetic oligonucleotide
uaggccgccagguccugcg

SEQ ID NO: 2602609 - RNA, 19 nt, Artificial Sequence
  Description of Artificial Sequence: Synthetic oligonucleotide
guguacacagcugcucugg

SEQ ID NO: 2602610 - RNA, 19 nt, Artificial Sequence
  Description of Artificial Sequence: Synthetic oligonucleotide
guuucagauggucugggua

SEQ ID NO: 2602611 - RNA, 19 nt, Artificial Sequence
  Description of Artificial Sequence: Synthetic oligonucleotide
augaucggugaacugggau

SEQ ID NO: 2602612 - RNA, 19 nt, Artificial Sequence
  Description of Artificial Sequence: Synthetic oligonucleotide
cuuugcuuguauccguuca

SEQ ID NO: 2602613 - RNA, 19 nt, Artificial Sequence
  Description of Artificial Sequence: Synthetic oligonucleotide
accagugacagaauuuggu

SEQ ID NO: 2602614 - RNA, 19 nt, Artificial Sequence
  Description of Artificial Sequence: Synthetic oligonucleotide
cuuucuccgcuguuucuug

SEQ ID NO: 2602615 - RNA, 19 nt, Artificial Sequence
  Description of Artificial Sequence: Synthetic oligonucleotide
ugacagaauuugguguaca

SEQ ID NO: 2602616 - RNA, 19 nt, Artificial Sequence
  Description of Artificial Sequence: Synthetic oligonucleotide
acuaugguucuuggaugcg

SEQ ID NO: 2602617 - RNA, 19 nt, Artificial Sequence
  Description of Artificial Sequence: Synthetic oligonucleotide
ccugcguuucccacuaugg

SEQ ID NO: 2602618 - RNA, 19 nt, Artificial Sequence
  Description of Artificial Sequence: Synthetic oligonucleotide
uuguagagccucugagccu

SEQ ID NO: 2602619 - RNA, 19 nt, Artificial Sequence
  Description of Artificial Sequence: Synthetic oligonucleotide
gguaaugaucggugaacug

SEQ ID NO: 2602620 - RNA, 19 nt, Artificial Sequence
  Description of Artificial Sequence: Synthetic oligonucleotide
ccagugacagaauuuggug

SEQ ID NO: 2602621 - RNA, 19 nt, Artificial Sequence
  Description of Artificial Sequence: Synthetic oligonucleotide
ucuccgcuguuucuugagu

SEQ ID NO: 2602622 - RNA, 19 nt, Artificial Sequence
  Description of Artificial Sequence: Synthetic oligonucleotide
cucgcuuucucauuucaaa

SEQ ID NO: 2602623 - RNA, 19 nt, Artificial Sequence
  Description of Artificial Sequence: Synthetic oligonucleotide
cuagaucuucaguuuccuc

SEQ ID NO: 2602624 - RNA, 19 nt, Artificial Sequence
  Description of Artificial Sequence: Synthetic oligonucleotide
gaggcgucccuuccucgcg

SEQ ID NO: 2602625 - RNA, 19 nt, Artificial Sequence
  Description of Artificial Sequence: Synthetic oligonucleotide
gcuaaauagagguguuuca

SEQ ID NO: 2602626 - RNA, 19 nt, Artificial Sequence
  Description of Artificial Sequence: Synthetic oligonucleotide
gguguuucagauggucugg

SEQ ID NO: 2602627 - RNA, 19 nt, Artificial Sequence
  Description of Artificial Sequence: Synthetic oligonucleotide
gaugcgaccugaggcgucc

SEQ ID NO: 2602628 - RNA, 19 nt, Artificial Sequence
  Description of Artificial Sequence: Synthetic oligonucleotide
uucuucugagggaggcaga

SEQ ID NO: 2602629 - RNA, 19 nt, Artificial Sequence
  Description of Artificial Sequence: Synthetic oligonucleotide
ucaguguuacacucuucuu

SEQ ID NO: 2602630 - RNA, 19 nt, Artificial Sequence
  Description of Artificial Sequence: Synthetic oligonucleotide
aauccuccggcccgccacu

SEQ ID NO: 2602631 - RNA, 19 nt, Artificial Sequence
  Description of Artificial Sequence: Synthetic oligonucleotide
gcacgcuuugcuuguaucc

SEQ ID NO: 2602632 - RNA, 19 nt, Artificial Sequence
  Description of Artificial Sequence: Synthetic oligonucleotide
cccgccacuucgaagacgg

SEQ ID NO: 2602633 - RNA, 19 nt, Artificial Sequence
  Description of Artificial Sequence: Synthetic oligonucleotide
uuccggggaaggcuugcug

SEQ ID NO: 2602634 - RNA, 19 nt, Artificial Sequence
  Description of Artificial Sequence: Synthetic oligonucleotide
gccucugagccucuucucg

SEQ ID NO: 2602635 - RNA, 19 nt, Artificial Sequence
  Description of Artificial Sequence: Synthetic oligonucleotide
ucccucucgaacgcuuccg

SEQ ID NO: 2602636 - RNA, 19 nt, Artificial Sequence
  Description of Artificial Sequence: Synthetic oligonucleotide
aggcgucccuuccucgcgc

SEQ ID NO: 2602637 - RNA, 19 nt, Artificial Sequence
  Description of Artificial Sequence: Synthetic oligonucleotide
agcagcacgcuuugcuugu

SEQ ID NO: 2602638 - RNA, 19 nt, Artificial Sequence
  Description of Artificial Sequence: Synthetic oligonucleotide
ggggaaggcuugcuggugg

SEQ ID NO: 2602639 - RNA, 19 nt, Artificial Sequence
  Description of Artificial Sequence: Synthetic oligonucleotide
uguucuucugagggaggca

SEQ ID NO: 2602640 - RNA, 19 nt, Artificial Sequence
  Description of Artificial Sequence: Synthetic oligonucleotide
aaugaucggugaacuggga

SEQ ID NO: 2602641 - RNA, 19 nt, Artificial Sequence
  Description of Artificial Sequence: Synthetic oligonucleotide
guguuacacucuucuucag

SEQ ID NO: 2602642 - RNA, 19 nt, Artificial Sequence
  Description of Artificial Sequence: Synthetic oligonucleotide
ucuucaggcacaggcuggu

SEQ ID NO: 2602643 - RNA, 19 nt, Artificial Sequence
  Description of Artificial Sequence: Synthetic oligonucleotide
uguauccguucauacucuu

SEQ ID NO: 2602644 - RNA, 19 nt, Artificial Sequence
  Description of Artificial Sequence: Synthetic oligonucleotide
uuccuccaaaaugcaaaac

SEQ ID NO: 2602645 - RNA, 19 nt, Artificial Sequence
  Description of Artificial Sequence: Synthetic oligonucleotide
ucccacuaugguucuugga

SEQ ID NO: 2602646 - RNA, 19 nt, Artificial Sequence
  Description of Artificial Sequence: Synthetic oligonucleotide
aucggugaacugggauucc

SEQ ID NO: 2602647 - RNA, 19 nt, Artificial Sequence
  Description of Artificial Sequence: Synthetic oligonucleotide
gcagaccaaccuuucuccg

SEQ ID NO: 2602648 - RNA, 19 nt, Artificial Sequence
  Description of Artificial Sequence: Synthetic oligonucleotide
cucuggcugagacugguga

SEQ ID NO: 2602649 - RNA, 19 nt, Artificial Sequence
  Description of Artificial Sequence: Synthetic oligonucleotide
acugggauuccugggacau

SEQ ID NO: 2602650 - RNA, 19 nt, Artificial Sequence
  Description of Artificial Sequence: Synthetic oligonucleotide
acgcuuugcuuguauccgu

SEQ ID NO: 2602651 - RNA, 19 nt, Artificial Sequence
  Description of Artificial Sequence: Synthetic oligonucleotide
cagugacagaauuuggugu

SEQ ID NO: 2602652 - RNA, 19 nt, Artificial Sequence
  Description of Artificial Sequence: Synthetic oligonucleotide
ucugagggaggcagaccaa

SEQ ID NO: 2602653 - RNA, 19 nt, Artificial Sequence
  Description of Artificial Sequence: Synthetic oligonucleotide
ugucccucucgaacgcuuc

SEQ ID NO: 2602654 - RNA, 19 nt, Artificial Sequence
  Description of Artificial Sequence: Synthetic oligonucleotide
cuagacuguuucucagaca

SEQ ID NO: 2602655 - RNA, 19 nt, Artificial Sequence
  Description of Artificial Sequence: Synthetic oligonucleotide
cacuagacuguuucucaga

SEQ ID NO: 2602656 - RNA, 19 nt, Artificial Sequence
  Description of Artificial Sequence: Synthetic oligonucleotide
guaucuucuggagaagaua

SEQ ID NO: 2602657 - RNA, 19 nt, Artificial Sequence
  Description of Artificial Sequence: Synthetic oligonucleotide
ucgaacgcuuccggggaag

SEQ ID NO: 2602658 - RNA, 19 nt, Artificial Sequence
  Description of Artificial Sequence: Synthetic oligonucleotide
agguuuggcuggcccuuuc

SEQ ID NO: 2602659 - RNA, 19 nt, Artificial Sequence
  Description of Artificial Sequence: Synthetic oligonucleotide
gaccugaggcgucccuucc

SEQ ID NO: 2602660 - RNA, 19 nt, Artificial Sequence
  Description of Artificial Sequence: Synthetic oligonucleotide
uagagguguuucagauggu

SEQ ID NO: 2602661 - RNA, 19 nt, Artificial Sequence
  Description of Artificial Sequence: Synthetic oligonucleotide
ccacuaugguucuuggaug

SEQ ID NO: 2602662 - RNA, 19 nt, Artificial Sequence
  Description of Artificial Sequence: Synthetic oligonucleotide
aacugguuucuuguaucuu

SEQ ID NO: 2602663 - RNA, 19 nt, Artificial Sequence
  Description of Artificial Sequence: Synthetic oligonucleotide
agguccugcguuucccacu

SEQ ID NO: 2602664 - RNA, 19 nt, Artificial Sequence
  Description of Artificial Sequence: Synthetic oligonucleotide
cugagggaggcagaccaac

SEQ ID NO: 2602665 - RNA, 19 nt, Artificial Sequence
  Description of Artificial Sequence: Synthetic oligonucleotide
gauucagguuuggcuggcc

SEQ ID NO: 2602666 - RNA, 19 nt, Artificial Sequence
  Description of Artificial Sequence: Synthetic oligonucleotide
uugcuuguauccguucaua

SEQ ID NO: 2602667 - RNA, 19 nt, Artificial Sequence
  Description of Artificial Sequence: Synthetic oligonucleotide
ugguggcuaggccgccagg

SEQ ID NO: 2602668 - RNA, 19 nt, Artificial Sequence
  Description of Artificial Sequence: Synthetic oligonucleotide
ucggugaacugggauuccu

SEQ ID NO: 2602669 - RNA, 19 nt, Artificial Sequence
  Description of Artificial Sequence: Synthetic oligonucleotide
gguguacacagcugcucug

SEQ ID NO: 2602670 - RNA, 19 nt, Artificial Sequence
  Description of Artificial Sequence: Synthetic oligonucleotide
caggcuggucaacuuguuc

SEQ ID NO: 2602671 - RNA, 19 nt, Artificial Sequence
  Description of Artificial Sequence: Synthetic oligonucleotide
cuaugguucuuggaugcga

SEQ ID NO: 2602672 - RNA, 19 nt, Artificial Sequence
  Description of Artificial Sequence: Synthetic oligonucleotide
uggcuggcccuuucuaguc

SEQ ID NO: 2602673 - RNA, 19 nt, Artificial Sequence
  Description of Artificial Sequence: Synthetic oligonucleotide
uucagauggucuggguaau

SEQ ID NO: 2602674 - RNA, 19 nt, Artificial Sequence
  Description of Artificial Sequence: Synthetic oligonucleotide
gucuguucaguguuacacu

SEQ ID NO: 2602675 - RNA, 19 nt, Artificial Sequence
  Description of Artificial Sequence: Synthetic oligonucleotide
ucgcgcgccgcaaauccuc

SEQ ID NO: 2602676 - RNA, 19 nt, Artificial Sequence
  Description of Artificial Sequence: Synthetic oligonucleotide
cugagacuggugaucacua

SEQ ID NO: 2602677 - RNA, 19 nt, Artificial Sequence
  Description of Artificial Sequence: Synthetic oligonucleotide
uggaugcgaccugaggcgu

SEQ ID NO: 2602678 - RNA, 19 nt, Artificial Sequence
  Description of Artificial Sequence: Synthetic oligonucleotide
cuugcuagaucuucaguuu

SEQ ID NO: 2602679 - RNA, 19 nt, Artificial Sequence
  Description of Artificial Sequence: Synthetic oligonucleotide
cuggcugagacuggugauc

SEQ ID NO: 2602680 - RNA, 19 nt, Artificial Sequence
  Description of Artificial Sequence: Synthetic oligonucleotide
gugacagaauuugguguac

SEQ ID NO: 2602681 - RNA, 19 nt, Artificial Sequence
  Description of Artificial Sequence: Synthetic oligonucleotide
ggucaacuuguucuucuga

SEQ ID NO: 2602682 - RNA, 19 nt, Artificial Sequence
  Description of Artificial Sequence: Synthetic oligonucleotide
gaacgcuuccggggaaggc

SEQ ID NO: 2602683 - RNA, 19 nt, Artificial Sequence
  Description of Artificial Sequence: Synthetic oligonucleotide
uugguaccagugacagaau

SEQ ID NO: 2602684 - RNA, 19 nt, Artificial Sequence
  Description of Artificial Sequence: Synthetic oligonucleotide
cuucuugugccuuuugguu

SEQ ID NO: 2602685 - RNA, 19 nt, Artificial Sequence
  Description of Artificial Sequence: Synthetic oligonucleotide
cuggguaaugaucggugaa

SEQ ID NO: 2602686 - RNA, 19 nt, Artificial Sequence
  Description of Artificial Sequence: Synthetic oligonucleotide
caguuuccuccaaaaugca

SEQ ID NO: 2602687 - RNA, 19 nt, Artificial Sequence
  Description of Artificial Sequence: Synthetic oligonucleotide
gcguuucccacuaugguuc

SEQ ID NO: 2602688 - RNA, 19 nt, Artificial Sequence
  Description of Artificial Sequence: Synthetic oligonucleotide
gacuggugaucacuagacu

SEQ ID NO: 2602689 - RNA, 19 nt, Artificial Sequence
  Description of Artificial Sequence: Synthetic oligonucleotide
guucucgcuuucucauuuc

SEQ ID NO: 2602690 - RNA, 19 nt, Artificial Sequence
  Description of Artificial Sequence: Synthetic oligonucleotide
gaccaaccuuucuccgcug

SEQ ID NO: 2602691 - RNA, 19 nt, Artificial Sequence
  Description of Artificial Sequence: Synthetic oligonucleotide
cugguggcuaggccgccag

SEQ ID NO: 2602692 - RNA, 19 nt, Artificial Sequence
  Description of Artificial Sequence: Synthetic oligonucleotide
gccgcaaauccuccggccc

SEQ ID NO: 2602693 - RNA, 19 nt, Artificial Sequence
  Description of Artificial Sequence: Synthetic oligonucleotide
cagguccugcguuucccac

SEQ ID NO: 2602694 - RNA, 19 nt, Artificial Sequence
  Description of Artificial Sequence: Synthetic oligonucleotide
uggugaucacuagacuguu

SEQ ID NO: 2602695 - RNA, 19 nt, Artificial Sequence
  Description of Artificial Sequence: Synthetic oligonucleotide
auccguucauacucuucuu

SEQ ID NO: 2602696 - RNA, 19 nt, Artificial Sequence
  Description of Artificial Sequence: Synthetic oligonucleotide
ugcgaccugaggcgucccu

SEQ ID NO: 2602697 - RNA, 19 nt, Artificial Sequence
  Description of Artificial Sequence: Synthetic oligonucleotide
ccuccaaaaugcaaaaccu

SEQ ID NO: 2602698 - RNA, 19 nt, Artificial Sequence
  Description of Artificial Sequence: Synthetic oligonucleotide
cuaucugcagauucagguu

SEQ ID NO: 2602699 - RNA, 19 nt, Artificial Sequence
  Description of Artificial Sequence: Synthetic oligonucleotide
ucguucucgcuuucucauu

SEQ ID NO: 2602700 - RNA, 19 nt, Artificial Sequence
  Description of Artificial Sequence: Synthetic oligonucleotide
guuuggcuggcccuuucua

SEQ ID NO: 2602701 - RNA, 19 nt, Artificial Sequence
  Description of Artificial Sequence: Synthetic oligonucleotide
ccucucgaacgcuuccggg

SEQ ID NO: 2602702 - RNA, 19 nt, Artificial Sequence
  Description of Artificial Sequence: Synthetic oligonucleotide
cuuugguaccagugacaga

SEQ ID NO: 2602703 - RNA, 19 nt, Artificial Sequence
  Description of Artificial Sequence: Synthetic oligonucleotide
uuccucgcgcgccgcaaau

SEQ ID NO: 2602704 - RNA, 19 nt, Artificial Sequence
  Description of Artificial Sequence: Synthetic oligonucleotide
gcuuguauccguucauacu

SEQ ID NO: 2602705 - RNA, 19 nt, Artificial Sequence
  Description of Artificial Sequence: Synthetic oligonucleotide
ccucgcgcgccgcaaaucc

SEQ ID NO: 2602706 - RNA, 19 nt, Artificial Sequence
  Description of Artificial Sequence: Synthetic oligonucleotide
cacaggcuggucaacuugu

SEQ ID NO: 2602707 - RNA, 19 nt, Artificial Sequence
  Description of Artificial Sequence: Synthetic oligonucleotide
guacacagcugcucuggcu

SEQ ID NO: 2602708 - RNA, 19 nt, Artificial Sequence
  Description of Artificial Sequence: Synthetic oligonucleotide
ccgcaaauccuccggcccg

SEQ ID NO: 2602709 - RNA, 19 nt, Artificial Sequence
  Description of Artificial Sequence: Synthetic oligonucleotide
gaggcagaccaaccuuucu

SEQ ID NO: 2602710 - RNA, 19 nt, Artificial Sequence
  Description of Artificial Sequence: Synthetic oligonucleotide
cucguucucgcuuucucau

SEQ ID NO: 2602711 - RNA, 19 nt, Artificial Sequence
  Description of Artificial Sequence: Synthetic oligonucleotide
cuguucaguguuacacucu

SEQ ID NO: 2602712 - RNA, 19 nt, Artificial Sequence
  Description of Artificial Sequence: Synthetic oligonucleotide
guucaguguuacacucuuc

SEQ ID NO: 2602713 - RNA, 19 nt, Artificial Sequence
  Description of Artificial Sequence: Synthetic oligonucleotide
guggcuaggccgccagguc

SEQ ID NO: 2602714 - RNA, 19 nt, Artificial Sequence
  Description of Artificial Sequence: Synthetic oligonucleotide
augcgaccugaggcguccc

SEQ ID NO: 2602715 - RNA, 19 nt, Artificial Sequence
  Description of Artificial Sequence: Synthetic oligonucleotide
cccucucgaacgcuuccgg

SEQ ID NO: 2602716 - RNA, 19 nt, Artificial Sequence
  Description of Artificial Sequence: Synthetic oligonucleotide
uccggcccgccacuucgaa

SEQ ID NO: 2602717 - RNA, 19 nt, Artificial Sequence
  Description of Artificial Sequence: Synthetic oligonucleotide
aucuucuggagaagauauu

SEQ ID NO: 2602718 - RNA, 19 nt, Artificial Sequence
  Description of Artificial Sequence: Synthetic oligonucleotide
cugcguuucccacuauggu

SEQ ID NO: 2602719 - RNA, 19 nt, Artificial Sequence
  Description of Artificial Sequence: Synthetic oligonucleotide
ggcgucccuuccucgcgcg

SEQ ID NO: 2602720 - RNA, 19 nt, Artificial Sequence
  Description of Artificial Sequence: Synthetic oligonucleotide
cccacuaugguucuuggau

SEQ ID NO: 2602721 - RNA, 19 nt, Artificial Sequence
  Description of Artificial Sequence: Synthetic oligonucleotide
gggauuccugggacauugg

SEQ ID NO: 2602722 - RNA, 19 nt, Artificial Sequence
  Description of Artificial Sequence: Synthetic oligonucleotide
ggacuuugaaagcuuccau

SEQ ID NO: 2602723 - RNA, 19 nt, Artificial Sequence
  Description of Artificial Sequence: Synthetic oligonucleotide
uggcccuuucuagucuuuu

SEQ ID NO: 2602724 - RNA, 19 nt, Artificial Sequence
  Description of Artificial Sequence: Synthetic oligonucleotide
ggguaaugaucggugaacu

SEQ ID NO: 2602725 - RNA, 19 nt, Artificial Sequence
  Description of Artificial Sequence: Synthetic oligonucleotide
ggauuccugggacauuggu

SEQ ID NO: 2602726 - RNA, 19 nt, Artificial Sequence
  Description of Artificial Sequence: Synthetic oligonucleotide
gguccugcguuucccacua

SEQ ID NO: 2602727 - RNA, 19 nt, Artificial Sequence
  Description of Artificial Sequence: Synthetic oligonucleotide
caaauccuccggcccgcca

SEQ ID NO: 2602728 - RNA, 19 nt, Artificial Sequence
  Description of Artificial Sequence: Synthetic oligonucleotide
agacuguuucucagacaaa

SEQ ID NO: 2602729 - RNA, 19 nt, Artificial Sequence
  Description of Artificial Sequence: Synthetic oligonucleotide
gcucaggacuuugaaagcu

SEQ ID NO: 2602730 - RNA, 19 nt, Artificial Sequence
  Description of Artificial Sequence: Synthetic oligonucleotide
uccucgcgcgccgcaaauc

SEQ ID NO: 2602731 - RNA, 19 nt, Artificial Sequence
  Description of Artificial Sequence: Synthetic oligonucleotide
gcugagacuggugaucacu

SEQ ID NO: 2602732 - RNA, 19 nt, Artificial Sequence
  Description of Artificial Sequence: Synthetic oligonucleotide
cgccacuucgaagacggcc

SEQ ID NO: 2602733 - RNA, 19 nt, Artificial Sequence
  Description of Artificial Sequence: Synthetic oligonucleotide
gguaccagugacagaauuu

SEQ ID NO: 2602734 - RNA, 19 nt, Artificial Sequence
  Description of Artificial Sequence: Synthetic oligonucleotide
cuucaggcacaggcugguc

SEQ ID NO: 2602735 - RNA, 19 nt, Artificial Sequence
  Description of Artificial Sequence: Synthetic oligonucleotide
ggaggcagaccaaccuuuc

SEQ ID NO: 2602736 - RNA, 19 nt, Artificial Sequence
  Description of Artificial Sequence: Synthetic oligonucleotide
gcgccgcaaauccuccggc

SEQ ID NO: 2602737 - RNA, 19 nt, Artificial Sequence
  Description of Artificial Sequence: Synthetic oligonucleotide
ccguucauacucuucuugu

SEQ ID NO: 2602738 - RNA, 19 nt, Artificial Sequence
  Description of Artificial Sequence: Synthetic oligonucleotide
ggacauugguuccuucuuu

SEQ ID NO: 2602739 - RNA, 19 nt, Artificial Sequence
  Description of Artificial Sequence: Synthetic oligonucleotide
cgcgccgcaaauccuccgg

SEQ ID NO: 2602740 - RNA, 19 nt, Artificial Sequence
  Description of Artificial Sequence: Synthetic oligonucleotide
gggacauugguuccuucuu

SEQ ID NO: 2602741 - RNA, 19 nt, Artificial Sequence
  Description of Artificial Sequence: Synthetic oligonucleotide
cucgaacgcuuccggggaa

SEQ ID NO: 2602742 - RNA, 19 nt, Artificial Sequence
  Description of Artificial Sequence: Synthetic oligonucleotide
aggccgccagguccugcgu

SEQ ID NO: 2602743 - RNA, 19 nt, Artificial Sequence
  Description of Artificial Sequence: Synthetic oligonucleotide
ggcugagacuggugaucac

SEQ ID NO: 2602744 - RNA, 19 nt, Artificial Sequence
  Description of Artificial Sequence: Synthetic oligonucleotide
ucccuuccucgcgcgccgc

SEQ ID NO: 2602745 - RNA, 19 nt, Artificial Sequence
  Description of Artificial Sequence: Synthetic oligonucleotide
cuuccucgcgcgccgcaaa

SEQ ID NO: 2602746 - RNA, 19 nt, Artificial Sequence
  Description of Artificial Sequence: Synthetic oligonucleotide
acgcuuccggggaaggcuu

SEQ ID NO: 2602747 - RNA, 19 nt, Artificial Sequence
  Description of Artificial Sequence: Synthetic oligonucleotide
gcuuccggggaaggcuugc

SEQ ID NO: 2602748 - RNA, 19 nt, Artificial Sequence
  Description of Artificial Sequence: Synthetic oligonucleotide
cgccgcaaauccuccggcc

SEQ ID NO: 2602749 - RNA, 19 nt, Artificial Sequence
  Description of Artificial Sequence: Synthetic oligonucleotide
cuugugccuuuugguuuga

SEQ ID NO: 2602750 - RNA, 19 nt, Artificial Sequence
  Description of Artificial Sequence: Synthetic oligonucleotide
caaccuuucuccgcuguuu

SEQ ID NO: 2602751 - RNA, 19 nt, Artificial Sequence
  Description of Artificial Sequence: Synthetic oligonucleotide
cggcccgccacuucgaaga

SEQ ID NO: 2602752 - RNA, 19 nt, Artificial Sequence
  Description of Artificial Sequence: Synthetic oligonucleotide
gguggcuaggccgccaggu

SEQ ID NO: 2602753 - RNA, 19 nt, Artificial Sequence
  Description of Artificial Sequence: Synthetic oligonucleotide
gcccgccacuucgaagacg

SEQ ID NO: 2602754 - RNA, 19 nt, Artificial Sequence
  Description of Artificial Sequence: Synthetic oligonucleotide
cucugagccucuucucguu

SEQ ID NO: 2602755 - RNA, 19 nt, Artificial Sequence
  Description of Artificial Sequence: Synthetic oligonucleotide
cgaacgcuuccggggaagg

SEQ ID NO: 2602756 - RNA, 19 nt, Artificial Sequence
  Description of Artificial Sequence: Synthetic oligonucleotide
ccagguccugcguuuccca

SEQ ID NO: 2602757 - RNA, 19 nt, Artificial Sequence
  Description of Artificial Sequence: Synthetic oligonucleotide
ggcuggucaacuuguucuu

SEQ ID NO: 2602758 - RNA, 19 nt, Artificial Sequence
  Description of Artificial Sequence: Synthetic oligonucleotide
gcaaauccuccggcccgcc

SEQ ID NO: 2602759 - RNA, 19 nt, Artificial Sequence
  Description of Artificial Sequence: Synthetic oligonucleotide
cuugucccucucgaacgcu

SEQ ID NO: 2602760 - RNA, 19 nt, Artificial Sequence
  Description of Artificial Sequence: Synthetic oligonucleotide
cgaccugaggcgucccuuc

SEQ ID NO: 2602761 - RNA, 19 nt, Artificial Sequence
  Description of Artificial Sequence: Synthetic oligonucleotide
ccggcccgccacuucgaag

SEQ ID NO: 2602762 - RNA, 19 nt, Artificial Sequence
  Description of Artificial Sequence: Synthetic oligonucleotide
cagcuaaauagagguguuu

SEQ ID NO: 2602763 - RNA, 19 nt, Artificial Sequence
  Description of Artificial Sequence: Synthetic oligonucleotide
gccuuuugguuugaaguuu

SEQ ID NO: 2602764 - RNA, 19 nt, Artificial Sequence
  Description of Artificial Sequence: Synthetic oligonucleotide
ggaugcgaccugaggcguc

SEQ ID NO: 2602765 - RNA, 19 nt, Artificial Sequence
  Description of Artificial Sequence: Synthetic oligonucleotide
ggcccgccacuucgaagac

SEQ ID NO: 2602766 - RNA, 19 nt, Artificial Sequence
  Description of Artificial Sequence: Synthetic oligonucleotide
cuccggcccgccacuucga

SEQ ID NO: 2602767 - RNA, 19 nt, Artificial Sequence
  Description of Artificial Sequence: Synthetic oligonucleotide
cucgcgcgccgcaaauccu

SEQ ID NO: 2602768 - RNA, 19 nt, Artificial Sequence
  Description of Artificial Sequence: Synthetic oligonucleotide
cgucccuuccucgcgcgcc

SEQ ID NO: 2602769 - RNA, 19 nt, Artificial Sequence
  Description of Artificial Sequence: Synthetic oligonucleotide
ccucugagccucuucucgu

SEQ ID NO: 2602770 - RNA, 19 nt, Artificial Sequence
  Description of Artificial Sequence: Synthetic oligonucleotide
cgcgcgccgcaaauccucc

SEQ ID NO: 2602771 - RNA, 19 nt, Artificial Sequence
  Description of Artificial Sequence: Synthetic oligonucleotide
gggaggcagaccaaccuuu

SEQ ID NO: 2602772 - RNA, 19 nt, Artificial Sequence
  Description of Artificial Sequence: Synthetic oligonucleotide
gcgucccuuccucgcgcgc

SEQ ID NO: 2602773 - RNA, 19 nt, Artificial Sequence
  Description of Artificial Sequence: Synthetic oligonucleotide
cuuccggggaaggcuugcu

SEQ ID NO: 2602774 - RNA, 19 nt, Artificial Sequence
  Description of Artificial Sequence: Synthetic oligonucleotide
cagcacgcuuugcuuguau

SEQ ID NO: 2602775 - RNA, 19 nt, Artificial Sequence
  Description of Artificial Sequence: Synthetic oligonucleotide
ggcuaggccgccagguccu

SEQ ID NO: 2602776 - RNA, 19 nt, Artificial Sequence
  Description of Artificial Sequence: Synthetic oligonucleotide
ggugaucacuagacuguuu

SEQ ID NO: 2602777 - RNA, 19 nt, Artificial Sequence
  Description of Artificial Sequence: Synthetic oligonucleotide
gcugguggcuaggccgcca

SEQ ID NO: 2602778 - RNA, 19 nt, Artificial Sequence
  Description of Artificial Sequence: Synthetic oligonucleotide
auccuccggcccgccacuu

SEQ ID NO: 2602779 - RNA, 19 nt, Artificial Sequence
  Description of Artificial Sequence: Synthetic oligonucleotide
ccgccacuucgaagacggc

SEQ ID NO: 2602780 - RNA, 19 nt, Artificial Sequence
  Description of Artificial Sequence: Synthetic oligonucleotide
cgccagguccugcguuucc

SEQ ID NO: 2602781 - RNA, 19 nt, Artificial Sequence
  Description of Artificial Sequence: Synthetic oligonucleotide
cguucucgcuuucucauuu

SEQ ID NO: 2602782 - RNA, 19 nt, Artificial Sequence
  Description of Artificial Sequence: Synthetic oligonucleotide
gcuaggccgccagguccug

SEQ ID NO: 2602783 - RNA, 19 nt, Artificial Sequence
  Description of Artificial Sequence: Synthetic oligonucleotide
cgcuuccggggaaggcuug

SEQ ID NO: 2602784 - RNA, 19 nt, Artificial Sequence
  Description of Artificial Sequence: Synthetic oligonucleotide
ccuuucuccgcuguuucuu

SEQ ID NO: 2602785 - RNA, 19 nt, Artificial Sequence
  Description of Artificial Sequence: Synthetic oligonucleotide
cggggaaggcuugcuggug

SEQ ID NO: 2602786 - RNA, 19 nt, Artificial Sequence
  Description of Artificial Sequence: Synthetic oligonucleotide
guuucccacuaugguucuu

SEQ ID NO: 2602787 - RNA, 19 nt, Artificial Sequence
  Description of Artificial Sequence: Synthetic oligonucleotide
gccgccagguccugcguuu

SEQ ID NO: 2602788 - RNA, 19 nt, Artificial Sequence
  Description of Artificial Sequence: Synthetic oligonucleotide
cugggauuccugggacauu

SEQ ID NO: 2602789 - RNA, 19 nt, Artificial Sequence
  Description of Artificial Sequence: Synthetic oligonucleotide
guccugcguuucccacuau

SEQ ID NO: 2602790 - RNA, 19 nt, Artificial Sequence
  Description of Artificial Sequence: Synthetic oligonucleotide
ggccgccagguccugcguu

SEQ ID NO: 2602791 - RNA, 19 nt, Artificial Sequence
  Description of Artificial Sequence: Synthetic oligonucleotide
cgcuuugcuuguauccguu

SEQ ID NO: 2602792 - RNA, 19 nt, Artificial Sequence
  Description of Artificial Sequence: Synthetic oligonucleotide
gcgaccugaggcgucccuu

SEQ ID NO: 2602793 - RNA, 19 nt, Artificial Sequence
  Description of Artificial Sequence: Synthetic oligonucleotide
aaagaaauaaacaacaacc

SEQ ID NO: 2602794 - RNA, 19 nt, Artificial Sequence
  Description of Artificial Sequence: Synthetic oligonucleotide
ugaaugguggauaagagag

SEQ ID NO: 2602795 - RNA, 19 nt, Artificial Sequence
  Description of Artificial Sequence: Synthetic oligonucleotide
gaaacaaauauuuaacuac

SEQ ID NO: 2602796 - RNA, 19 nt, Artificial Sequence
  Description of Artificial Sequence: Synthetic oligonucleotide
aaaauagucaugaugaaug

SEQ ID NO: 2602797 - RNA, 19 nt, Artificial Sequence
  Description of Artificial Sequence: Synthetic oligonucleotide
aagacaaucuucucacucc

SEQ ID NO: 2602798 - RNA, 19 nt, Artificial Sequence
  Description of Artificial Sequence: Synthetic oligonucleotide
uuuaauuacacaaugccaa

SEQ ID NO: 2602799 - RNA, 19 nt, Artificial Sequence
  Description of Artificial Sequence: Synthetic oligonucleotide
acuacauccaauuaauguc

SEQ ID NO: 2602800 - RNA, 19 nt, Artificial Sequence
  Description of Artificial Sequence: Synthetic oligonucleotide
aaagacaaucuucucacuc

SEQ ID NO: 2602801 - RNA, 19 nt, Artificial Sequence
  Description of Artificial Sequence: Synthetic oligonucleotide
aggaacagaguacaaaagc

SEQ ID NO: 2602802 - RNA, 19 nt, Artificial Sequence
  Description of Artificial Sequence: Synthetic oligonucleotide
ugauauaaacaagacaagg

SEQ ID NO: 2602803 - RNA, 19 nt, Artificial Sequence
  Description of Artificial Sequence: Synthetic oligonucleotide
aacuacauccaauuaaugu

SEQ ID NO: 2602804 - RNA, 19 nt, Artificial Sequence
  Description of Artificial Sequence: Synthetic oligonucleotide
uuuaacuacauccaauuaa

SEQ ID NO: 2602805 - RNA, 19 nt, Artificial Sequence
  Description of Artificial Sequence: Synthetic oligonucleotide
acagcauuugcacagcacc

SEQ ID NO: 2602806 - RNA, 19 nt, Artificial Sequence
  Description of Artificial Sequence: Synthetic oligonucleotide
auaaacaagacaaggaaac

SEQ ID NO: 2602807 - RNA, 19 nt, Artificial Sequence
  Description of Artificial Sequence: Synthetic oligonucleotide
  modified_base (17)..(17): a, c, u, g, unknown or other
acaacaaccaaccaaanaa

SEQ ID NO: 2602808 - RNA, 19 nt, Artificial Sequence
  Description of Artificial Sequence: Synthetic oligonucleotide
caaaagcugaagaagaacc

SEQ ID NO: 2602809 - RNA, 19 nt, Artificial Sequence
  Description of Artificial Sequence: Synthetic oligonucleotide
aaugguggauaagagagcg

SEQ ID NO: 2602810 - RNA, 19 nt, Artificial Sequence
  Description of Artificial Sequence: Synthetic oligonucleotide
caauuaaugucguugacag

SEQ ID NO: 2602811 - RNA, 19 nt, Artificial Sequence
  Description of Artificial Sequence: Synthetic oligonucleotide
aauuuauuuucugaguuug

SEQ ID NO: 2602812 - RNA, 19 nt, Artificial Sequence
  Description of Artificial Sequence: Synthetic oligonucleotide
acaaauauuuaacuacauc

SEQ ID NO: 2602813 - RNA, 19 nt, Artificial Sequence
  Description of Artificial Sequence: Synthetic oligonucleotide
uuugguaaagacaaucuuc

SEQ ID NO: 2602814 - RNA, 19 nt, Artificial Sequence
  Description of Artificial Sequence: Synthetic oligonucleotide
uguugauauaaacaagaca

SEQ ID NO: 2602815 - RNA, 19 nt, Artificial Sequence
  Description of Artificial Sequence: Synthetic oligonucleotide
aaugacaguagucucugug

SEQ ID NO: 2602816 - RNA, 19 nt, Artificial Sequence
  Description of Artificial Sequence: Synthetic oligonucleotide
uauauggugaguuccagga

SEQ ID NO: 2602817 - RNA, 19 nt, Artificial Sequence
  Description of Artificial Sequence: Synthetic oligonucleotide
auuaaugucguugacagca

SEQ ID NO: 2602818 - RNA, 19 nt, Artificial Sequence
  Description of Artificial Sequence: Synthetic oligonucleotide
ucaccuuugguaaagacaa

SEQ ID NO: 2602819 - RNA, 19 nt, Artificial Sequence
  Description of Artificial Sequence: Synthetic oligonucleotide
aauauuuaacuacauccaa

SEQ ID NO: 2602820 - RNA, 19 nt, Artificial Sequence
  Description of Artificial Sequence: Synthetic oligonucleotide
cuacauccaauuaaugucg

SEQ ID NO: 2602821 - RNA, 19 nt, Artificial Sequence
  Description of Artificial Sequence: Synthetic oligonucleotide
aauuaaugucguugacagc

SEQ ID NO: 2602822 - RNA, 19 nt, Artificial Sequence
  Description of Artificial Sequence: Synthetic oligonucleotide
uugguaaagacaaucuucu

SEQ ID NO: 2602823 - RNA, 19 nt, Artificial Sequence
  Description of Artificial Sequence: Synthetic oligonucleotide
ugcacagcaccuaacaugc

SEQ ID NO: 2602824 - RNA, 19 nt, Artificial Sequence
  Description of Artificial Sequence: Synthetic oligonucleotide
aagacgagacucuugucuc

SEQ ID NO: 2602825 - RNA, 19 nt, Artificial Sequence
  Description of Artificial Sequence: Synthetic oligonucleotide
cauagcuacaguaagacga

SEQ ID NO: 2602826 - RNA, 19 nt, Artificial Sequence
  Description of Artificial Sequence: Synthetic oligonucleotide
ucagggacagaccacauga

SEQ ID NO: 2602827 - RNA, 19 nt, Artificial Sequence
  Description of Artificial Sequence: Synthetic oligonucleotide
uaagacgagacucuugucu

SEQ ID NO: 2602828 - RNA, 19 nt, Artificial Sequence
  Description of Artificial Sequence: Synthetic oligonucleotide
aguacaaaagcugaagaag

SEQ ID NO: 2602829 - RNA, 19 nt, Artificial Sequence
  Description of Artificial Sequence: Synthetic oligonucleotide
aagaaauaaacaacaacca

SEQ ID NO: 2602830 - RNA, 19 nt, Artificial Sequence
  Description of Artificial Sequence: Synthetic oligonucleotide
aggagugaaucucagggac

SEQ ID NO: 2602831 - RNA, 19 nt, Artificial Sequence
  Description of Artificial Sequence: Synthetic oligonucleotide
uugauauaaacaagacaag

SEQ ID NO: 2602832 - RNA, 19 nt, Artificial Sequence
  Description of Artificial Sequence: Synthetic oligonucleotide
uagucaugaugaauggugg

SEQ ID NO: 2602833 - RNA, 19 nt, Artificial Sequence
  Description of Artificial Sequence: Synthetic oligonucleotide
uuuauuuucugaguuugag

SEQ ID NO: 2602834 - RNA, 19 nt, Artificial Sequence
  Description of Artificial Sequence: Synthetic oligonucleotide
auuuucugaguuugaggcc

SEQ ID NO: 2602835 - RNA, 19 nt, Artificial Sequence
  Description of Artificial Sequence: Synthetic oligonucleotide
guugacagcauuugcacag

SEQ ID NO: 2602836 - RNA, 19 nt, Artificial Sequence
  Description of Artificial Sequence: Synthetic oligonucleotide
aguaagacgagacucuugu

SEQ ID NO: 2602837 - RNA, 19 nt, Artificial Sequence
  Description of Artificial Sequence: Synthetic oligonucleotide
ugccaauuuauuuucugag

SEQ ID NO: 2602838 - RNA, 19 nt, Artificial Sequence
  Description of Artificial Sequence: Synthetic oligonucleotide
uauuuaacuacauccaauu

SEQ ID NO: 2602839 - RNA, 19 nt, Artificial Sequence
  Description of Artificial Sequence: Synthetic oligonucleotide
ugaagaagaaccacagcgu

SEQ ID NO: 2602840 - RNA, 19 nt, Artificial Sequence
  Description of Artificial Sequence: Synthetic oligonucleotide
gaagaagaaccacagcgug

SEQ ID NO: 2602841 - RNA, 19 nt, Artificial Sequence
  Description of Artificial Sequence: Synthetic oligonucleotide
ugaugaaugguggauaaga

SEQ ID NO: 2602842 - RNA, 19 nt, Artificial Sequence
  Description of Artificial Sequence: Synthetic oligonucleotide
agaaauaaacaacaaccaa

SEQ ID NO: 2602843 - RNA, 19 nt, Artificial Sequence
  Description of Artificial Sequence: Synthetic oligonucleotide
agaugagagcccuugaacu

SEQ ID NO: 2602844 - RNA, 19 nt, Artificial Sequence
  Description of Artificial Sequence: Synthetic oligonucleotide
acuguugaggaacagagua

SEQ ID NO: 2602845 - RNA, 19 nt, Artificial Sequence
  Description of Artificial Sequence: Synthetic oligonucleotide
  modified_base (18)..(18): a, c, u, g, unknown or other
aacaacaaccaaccaaana

SEQ ID NO: 2602846 - RNA, 19 nt, Artificial Sequence
  Description of Artificial Sequence: Synthetic oligonucleotide
uuacacaaugccaauuuau

SEQ ID NO: 2602847 - RNA, 19 nt, Artificial Sequence
  Description of Artificial Sequence: Synthetic oligonucleotide
auagucaugaugaauggug

SEQ ID NO: 2602848 - RNA, 19 nt, Artificial Sequence
  Description of Artificial Sequence: Synthetic oligonucleotide
agaguacaaaagcugaaga

SEQ ID NO: 2602849 - RNA, 19 nt, Artificial Sequence
  Description of Artificial Sequence: Synthetic oligonucleotide
agacaaucuucucacuccg

SEQ ID NO: 2602850 - RNA, 19 nt, Artificial Sequence
  Description of Artificial Sequence: Synthetic oligonucleotide
uacaguaagacgagacucu

SEQ ID NO: 2602851 - RNA, 19 nt, Artificial Sequence
  Description of Artificial Sequence: Synthetic oligonucleotide
gaugaaugguggauaagag

SEQ ID NO: 2602852 - RNA, 19 nt, Artificial Sequence
  Description of Artificial Sequence: Synthetic oligonucleotide
uagaugagagcccuugaac

SEQ ID NO: 2602853 - RNA, 19 nt, Artificial Sequence
  Description of Artificial Sequence: Synthetic oligonucleotide
aaguccgacucaaugacag

SEQ ID NO: 2602854 - RNA, 19 nt, Artificial Sequence
  Description of Artificial Sequence: Synthetic oligonucleotide
guacuguugaggaacagag

SEQ ID NO: 2602855 - RNA, 19 nt, Artificial Sequence
  Description of Artificial Sequence: Synthetic oligonucleotide
auuugcacagcaccuaaca

SEQ ID NO: 2602856 - RNA, 19 nt, Artificial Sequence
  Description of Artificial Sequence: Synthetic oligonucleotide
uguugaggaacagaguaca

SEQ ID NO: 2602857 - RNA, 19 nt, Artificial Sequence
  Description of Artificial Sequence: Synthetic oligonucleotide
gaacagaguacaaaagcug

SEQ ID NO: 2602858 - RNA, 19 nt, Artificial Sequence
  Description of Artificial Sequence: Synthetic oligonucleotide
agaagaaccacagcgugag

SEQ ID NO: 2602859 - RNA, 19 nt, Artificial Sequence
  Description of Artificial Sequence: Synthetic oligonucleotide
cauccaauuaaugucguug

SEQ ID NO: 2602860 - RNA, 19 nt, Artificial Sequence
  Description of Artificial Sequence: Synthetic oligonucleotide
cuauauggugaguuccagg

SEQ ID NO: 2602861 - RNA, 19 nt, Artificial Sequence
  Description of Artificial Sequence: Synthetic oligonucleotide
aaaagcugaagaagaacca

SEQ ID NO: 2602862 - RNA, 19 nt, Artificial Sequence
  Description of Artificial Sequence: Synthetic oligonucleotide
cacagcgugagguagauga

SEQ ID NO: 2602863 - RNA, 19 nt, Artificial Sequence
  Description of Artificial Sequence: Synthetic oligonucleotide
gguaaagacaaucuucuca

SEQ ID NO: 2602864 - RNA, 19 nt, Artificial Sequence
  Description of Artificial Sequence: Synthetic oligonucleotide
uacaaaagcugaagaagaa

SEQ ID NO: 2602865 - RNA, 19 nt, Artificial Sequence
  Description of Artificial Sequence: Synthetic oligonucleotide
accuuugguaaagacaauc

SEQ ID NO: 2602866 - RNA, 19 nt, Artificial Sequence
  Description of Artificial Sequence: Synthetic oligonucleotide
uacacaaugccaauuuauu

SEQ ID NO: 2602867 - RNA, 19 nt, Artificial Sequence
  Description of Artificial Sequence: Synthetic oligonucleotide
augaaugguggauaagaga

SEQ ID NO: 2602868 - RNA, 19 nt, Artificial Sequence
  Description of Artificial Sequence: Synthetic oligonucleotide
auccaauuaaugucguuga

SEQ ID NO: 2602869 - RNA, 19 nt, Artificial Sequence
  Description of Artificial Sequence: Synthetic oligonucleotide
auauggugaguuccaggac

SEQ ID NO: 2602870 - RNA, 19 nt, Artificial Sequence
  Description of Artificial Sequence: Synthetic oligonucleotide
ugugaggagugaaucucag

SEQ ID NO: 2602871 - RNA, 19 nt, Artificial Sequence
  Description of Artificial Sequence: Synthetic oligonucleotide
uaagagagcgguuuguguu

SEQ ID NO: 2602872 - RNA, 19 nt, Artificial Sequence
  Description of Artificial Sequence: Synthetic oligonucleotide
aacaagacaaggaaacaaa

SEQ ID NO: 2602873 - RNA, 19 nt, Artificial Sequence
  Description of Artificial Sequence: Synthetic oligonucleotide
uccgacucaaugacaguag

SEQ ID NO: 2602874 - RNA, 19 nt, Artificial Sequence
  Description of Artificial Sequence: Synthetic oligonucleotide
uuaauuacacaaugccaau

SEQ ID NO: 2602875 - RNA, 19 nt, Artificial Sequence
  Description of Artificial Sequence: Synthetic oligonucleotide
augacaguagucucuguga

SEQ ID NO: 2602876 - RNA, 19 nt, Artificial Sequence
  Description of Artificial Sequence: Synthetic oligonucleotide
gaguacaaaagcugaagaa

SEQ ID NO: 2602877 - RNA, 19 nt, Artificial Sequence
  Description of Artificial Sequence: Synthetic oligonucleotide
acaaucuucucacuccggu

SEQ ID NO: 2602878 - RNA, 19 nt, Artificial Sequence
  Description of Artificial Sequence: Synthetic oligonucleotide
ucguugacagcauuugcac

SEQ ID NO: 2602879 - RNA, 19 nt, Artificial Sequence
  Description of Artificial Sequence: Synthetic oligonucleotide
uggauaagagagcgguuug

SEQ ID NO: 2602880 - RNA, 19 nt, Artificial Sequence
  Description of Artificial Sequence: Synthetic oligonucleotide
gacaggauguacuguugag

SEQ ID NO: 2602881 - RNA, 19 nt, Artificial Sequence
  Description of Artificial Sequence: Synthetic oligonucleotide
agcuacaguaagacgagac

SEQ ID NO: 2602882 - RNA, 19 nt, Artificial Sequence
  Description of Artificial Sequence: Synthetic oligonucleotide
gagugaaucucagggacag

SEQ ID NO: 2602883 - RNA, 19 nt, Artificial Sequence
  Description of Artificial Sequence: Synthetic oligonucleotide
gauaagagagcgguuugug

SEQ ID NO: 2602884 - RNA, 19 nt, Artificial Sequence
  Description of Artificial Sequence: Synthetic oligonucleotide
gaugagagcccuugaacuc

SEQ ID NO: 2602885 - RNA, 19 nt, Artificial Sequence
  Description of Artificial Sequence: Synthetic oligonucleotide
uguacuguugaggaacaga

SEQ ID NO: 2602886 - RNA, 19 nt, Artificial Sequence
  Description of Artificial Sequence: Synthetic oligonucleotide
auaagagagcgguuugugu

SEQ ID NO: 2602887 - RNA, 19 nt, Artificial Sequence
  Description of Artificial Sequence: Synthetic oligonucleotide
ugucguugacagcauuugc

SEQ ID NO: 2602888 - RNA, 19 nt, Artificial Sequence
  Description of Artificial Sequence: Synthetic oligonucleotide
acuugugaggagugaaucu

SEQ ID NO: 2602889 - RNA, 19 nt, Artificial Sequence
  Description of Artificial Sequence: Synthetic oligonucleotide
ugguggauaagagagcggu

SEQ ID NO: 2602890 - RNA, 19 nt, Artificial Sequence
  Description of Artificial Sequence: Synthetic oligonucleotide
gagcccuugaacuccacac

SEQ ID NO: 2602891 - RNA, 19 nt, Artificial Sequence
  Description of Artificial Sequence: Synthetic oligonucleotide
uugugaggagugaaucuca

SEQ ID NO: 2602892 - RNA, 19 nt, Artificial Sequence
  Description of Artificial Sequence: Synthetic oligonucleotide
ucuauauggugaguuccag

SEQ ID NO: 2602893 - RNA, 19 nt, Artificial Sequence
  Description of Artificial Sequence: Synthetic oligonucleotide
acacacccaaguccgacuc

SEQ ID NO: 2602894 - RNA, 19 nt, Artificial Sequence
  Description of Artificial Sequence: Synthetic oligonucleotide
ucucccucuaacagggaca

SEQ ID NO: 2602895 - RNA, 19 nt, Artificial Sequence
  Description of Artificial Sequence: Synthetic oligonucleotide
uaacaugcuggguucuccc

SEQ ID NO: 2602896 - RNA, 19 nt, Artificial Sequence
  Description of Artificial Sequence: Synthetic oligonucleotide
acagcaccuaacaugcugg

SEQ ID NO: 2602897 - RNA, 19 nt, Artificial Sequence
  Description of Artificial Sequence: Synthetic oligonucleotide
aacaaauauuuaacuacau

SEQ ID NO: 2602898 - RNA, 19 nt, Artificial Sequence
  Description of Artificial Sequence: Synthetic oligonucleotide
uucucccucuaacagggac

SEQ ID NO: 2602899 - RNA, 19 nt, Artificial Sequence
  Description of Artificial Sequence: Synthetic oligonucleotide
uccaauuaaugucguugac

SEQ ID NO: 2602900 - RNA, 19 nt, Artificial Sequence
  Description of Artificial Sequence: Synthetic oligonucleotide
aacagggacaggauguacu

SEQ ID NO: 2602901 - RNA, 19 nt, Artificial Sequence
  Description of Artificial Sequence: Synthetic oligonucleotide
ugacaguagucucugugau

SEQ ID NO: 2602902 - RNA, 19 nt, Artificial Sequence
  Description of Artificial Sequence: Synthetic oligonucleotide
acacaaugccaauuuauuu

SEQ ID NO: 2602903 - RNA, 19 nt, Artificial Sequence
  Description of Artificial Sequence: Synthetic oligonucleotide
auuuaacuacauccaauua

SEQ ID NO: 2602904 - RNA, 19 nt, Artificial Sequence
  Description of Artificial Sequence: Synthetic oligonucleotide
aaucucagggacagaccac

SEQ ID NO: 2602905 - RNA, 19 nt, Artificial Sequence
  Description of Artificial Sequence: Synthetic oligonucleotide
caggauguacuguugagga

SEQ ID NO: 2602906 - RNA, 19 nt, Artificial Sequence
  Description of Artificial Sequence: Synthetic oligonucleotide
uucaguucuuccucgcagu

SEQ ID NO: 2602907 - RNA, 19 nt, Artificial Sequence
  Description of Artificial Sequence: Synthetic oligonucleotide
aagcugaagaagaaccaca

SEQ ID NO: 2602908 - RNA, 19 nt, Artificial Sequence
  Description of Artificial Sequence: Synthetic oligonucleotide
gacucaaugacaguagucu

SEQ ID NO: 2602909 - RNA, 19 nt, Artificial Sequence
  Description of Artificial Sequence: Synthetic oligonucleotide
acaugcuggguucucccuc

SEQ ID NO: 2602910 - RNA, 19 nt, Artificial Sequence
  Description of Artificial Sequence: Synthetic oligonucleotide
ugggacuuugcugaugaca

SEQ ID NO: 2602911 - RNA, 19 nt, Artificial Sequence
  Description of Artificial Sequence: Synthetic oligonucleotide
gugaaucucagggacagac

SEQ ID NO: 2602912 - RNA, 19 nt, Artificial Sequence
  Description of Artificial Sequence: Synthetic oligonucleotide
auauuuaacuacauccaau

SEQ ID NO: 2602913 - RNA, 19 nt, Artificial Sequence
  Description of Artificial Sequence: Synthetic oligonucleotide
uacauccaauuaaugucgu

SEQ ID NO: 2602914 - RNA, 19 nt, Artificial Sequence
  Description of Artificial Sequence: Synthetic oligonucleotide
cuguugaggaacagaguac

SEQ ID NO: 2602915 - RNA, 19 nt, Artificial Sequence
  Description of Artificial Sequence: Synthetic oligonucleotide
gguucucccucuaacaggg

SEQ ID NO: 2602916 - RNA, 19 nt, Artificial Sequence
  Description of Artificial Sequence: Synthetic oligonucleotide
auagcuacaguaagacgag

SEQ ID NO: 2602917 - RNA, 19 nt, Artificial Sequence
  Description of Artificial Sequence: Synthetic oligonucleotide
aucaccuuugguaaagaca

SEQ ID NO: 2602918 - RNA, 19 nt, Artificial Sequence
  Description of Artificial Sequence: Synthetic oligonucleotide
guccuugggacuuugcuga

SEQ ID NO: 2602919 - RNA, 19 nt, Artificial Sequence
  Description of Artificial Sequence: Synthetic oligonucleotide
ugaugacaugcugagggca

SEQ ID NO: 2602920 - RNA, 19 nt, Artificial Sequence
  Description of Artificial Sequence: Synthetic oligonucleotide
agcugaagaagaaccacag

SEQ ID NO: 2602921 - RNA, 19 nt, Artificial Sequence
  Description of Artificial Sequence: Synthetic oligonucleotide
cuugugaggagugaaucuc

SEQ ID NO: 2602922 - RNA, 19 nt, Artificial Sequence
  Description of Artificial Sequence: Synthetic oligonucleotide
gacaguagucucugugaug

SEQ ID NO: 2602923 - RNA, 19 nt, Artificial Sequence
  Description of Artificial Sequence: Synthetic oligonucleotide
aacaugcuggguucucccu

SEQ ID NO: 2602924 - RNA, 19 nt, Artificial Sequence
  Description of Artificial Sequence: Synthetic oligonucleotide
acccaaguccgacucaaug

SEQ ID NO: 2602925 - RNA, 19 nt, Artificial Sequence
  Description of Artificial Sequence: Synthetic oligonucleotide
agucaugaugaauggugga

SEQ ID NO: 2602926 - RNA, 19 nt, Artificial Sequence
  Description of Artificial Sequence: Synthetic oligonucleotide
auuacacaaugccaauuua

SEQ ID NO: 2602927 - RNA, 19 nt, Artificial Sequence
  Description of Artificial Sequence: Synthetic oligonucleotide
cuugggacuuugcugauga

SEQ ID NO: 2602928 - RNA, 19 nt, Artificial Sequence
  Description of Artificial Sequence: Synthetic oligonucleotide
cugaugacaugcugagggc

SEQ ID NO: 2602929 - RNA, 19 nt, Artificial Sequence
  Description of Artificial Sequence: Synthetic oligonucleotide
aaugucguugacagcauuu

SEQ ID NO: 2602930 - RNA, 19 nt, Artificial Sequence
  Description of Artificial Sequence: Synthetic oligonucleotide
gguuuguguugauauaaac

SEQ ID NO: 2602931 - RNA, 19 nt, Artificial Sequence
  Description of Artificial Sequence: Synthetic oligonucleotide
gaaugguggauaagagagc

SEQ ID NO: 2602932 - RNA, 19 nt, Artificial Sequence
  Description of Artificial Sequence: Synthetic oligonucleotide
cuuccucgcagucuggcac

SEQ ID NO: 2602933 - RNA, 19 nt, Artificial Sequence
  Description of Artificial Sequence: Synthetic oligonucleotide
uacuguugaggaacagagu

SEQ ID NO: 2602934 - RNA, 19 nt, Artificial Sequence
  Description of Artificial Sequence: Synthetic oligonucleotide
auggugacggugagcaggc

SEQ ID NO: 2602935 - RNA, 19 nt, Artificial Sequence
  Description of Artificial Sequence: Synthetic oligonucleotide
gugaggagugaaucucagg

SEQ ID NO: 2602936 - RNA, 19 nt, Artificial Sequence
  Description of Artificial Sequence: Synthetic oligonucleotide
uuaaugucguugacagcau

SEQ ID NO: 2602937 - RNA, 19 nt, Artificial Sequence
  Description of Artificial Sequence: Synthetic oligonucleotide
ggauguacuguugaggaac

SEQ ID NO: 2602938 - RNA, 19 nt, Artificial Sequence
  Description of Artificial Sequence: Synthetic oligonucleotide
gaaccacagcgugagguag

SEQ ID NO: 2602939 - RNA, 19 nt, Artificial Sequence
  Description of Artificial Sequence: Synthetic oligonucleotide
ugacagcauuugcacagca

SEQ ID NO: 2602940 - RNA, 19 nt, Artificial Sequence
  Description of Artificial Sequence: Synthetic oligonucleotide
caucaccuuugguaaagac

SEQ ID NO: 2602941 - RNA, 19 nt, Artificial Sequence
  Description of Artificial Sequence: Synthetic oligonucleotide
gacagccauagcuacagua

SEQ ID NO: 2602942 - RNA, 19 nt, Artificial Sequence
  Description of Artificial Sequence: Synthetic oligonucleotide
gaugacaugcugagggcac

SEQ ID NO: 2602943 - RNA, 19 nt, Artificial Sequence
  Description of Artificial Sequence: Synthetic oligonucleotide
agcgugagguagaugagag

SEQ ID NO: 2602944 - RNA, 19 nt, Artificial Sequence
  Description of Artificial Sequence: Synthetic oligonucleotide
guguugauauaaacaagac

SEQ ID NO: 2602945 - RNA, 19 nt, Artificial Sequence
  Description of Artificial Sequence: Synthetic oligonucleotide
ucuccuccgguccuuggga

SEQ ID NO: 2602946 - RNA, 19 nt, Artificial Sequence
  Description of Artificial Sequence: Synthetic oligonucleotide
caugcugagggcacuugug

SEQ ID NO: 2602947 - RNA, 19 nt, Artificial Sequence
  Description of Artificial Sequence: Synthetic oligonucleotide
caugaugaaugguggauaa

SEQ ID NO: 2602948 - RNA, 19 nt, Artificial Sequence
  Description of Artificial Sequence: Synthetic oligonucleotide
caagacaaggaaacaaaua

SEQ ID NO: 2602949 - RNA, 19 nt, Artificial Sequence
  Description of Artificial Sequence: Synthetic oligonucleotide
ggucuauauggugaguucc

SEQ ID NO: 2602950 - RNA, 19 nt, Artificial Sequence
  Description of Artificial Sequence: Synthetic oligonucleotide
augcugagggcacuuguga

SEQ ID NO: 2602951 - RNA, 19 nt, Artificial Sequence
  Description of Artificial Sequence: Synthetic oligonucleotide
gacaaucuucucacuccgg

SEQ ID NO: 2602952 - RNA, 19 nt, Artificial Sequence
  Description of Artificial Sequence: Synthetic oligonucleotide
acaagacaaggaaacaaau

SEQ ID NO: 2602953 - RNA, 19 nt, Artificial Sequence
  Description of Artificial Sequence: Synthetic oligonucleotide
gaagaaccacagcgugagg

SEQ ID NO: 2602954 - RNA, 19 nt, Artificial Sequence
  Description of Artificial Sequence: Synthetic oligonucleotide
cgugagguagaugagagcc

SEQ ID NO: 2602955 - RNA, 19 nt, Artificial Sequence
  Description of Artificial Sequence: Synthetic oligonucleotide
ugagagcccuugaacucca

SEQ ID NO: 2602956 - RNA, 19 nt, Artificial Sequence
  Description of Artificial Sequence: Synthetic oligonucleotide
gucguugacagcauuugca

SEQ ID NO: 2602957 - RNA, 19 nt, Artificial Sequence
  Description of Artificial Sequence: Synthetic oligonucleotide
augucguugacagcauuug

SEQ ID NO: 2602958 - RNA, 19 nt, Artificial Sequence
  Description of Artificial Sequence: Synthetic oligonucleotide
guagaugagagcccuugaa

SEQ ID NO: 2602959 - RNA, 19 nt, Artificial Sequence
  Description of Artificial Sequence: Synthetic oligonucleotide
agguagaugagagcccuug

SEQ ID NO: 2602960 - RNA, 19 nt, Artificial Sequence
  Description of Artificial Sequence: Synthetic oligonucleotide
cauuugcacagcaccuaac

SEQ ID NO: 2602961 - RNA, 19 nt, Artificial Sequence
  Description of Artificial Sequence: Synthetic oligonucleotide
ucuuccucgcagucuggca

SEQ ID NO: 2602962 - RNA, 19 nt, Artificial Sequence
  Description of Artificial Sequence: Synthetic oligonucleotide
gauguacuguugaggaaca

SEQ ID NO: 2602963 - RNA, 19 nt, Artificial Sequence
  Description of Artificial Sequence: Synthetic oligonucleotide
acagccauagcuacaguaa

SEQ ID NO: 2602964 - RNA, 19 nt, Artificial Sequence
  Description of Artificial Sequence: Synthetic oligonucleotide
guagucucugugaugguga

SEQ ID NO: 2602965 - RNA, 19 nt, Artificial Sequence
  Description of Artificial Sequence: Synthetic oligonucleotide
gucuccuccgguccuuggg

SEQ ID NO: 2602966 - RNA, 19 nt, Artificial Sequence
  Description of Artificial Sequence: Synthetic oligonucleotide
  modified_base (19)..(19): a, c, u, g, unknown or other
aaacaacaaccaaccaaan

SEQ ID NO: 2602967 - RNA, 19 nt, Artificial Sequence
  Description of Artificial Sequence: Synthetic oligonucleotide
cacuugugaggagugaauc

SEQ ID NO: 2602968 - RNA, 19 nt, Artificial Sequence
  Description of Artificial Sequence: Synthetic oligonucleotide
caccuaacaugcuggguuc

SEQ ID NO: 2602969 - RNA, 19 nt, Artificial Sequence
  Description of Artificial Sequence: Synthetic oligonucleotide
ugcugaugacaugcugagg

SEQ ID NO: 2602970 - RNA, 19 nt, Artificial Sequence
  Description of Artificial Sequence: Synthetic oligonucleotide
caguaagacgagacucuug

SEQ ID NO: 2602971 - RNA, 19 nt, Artificial Sequence
  Description of Artificial Sequence: Synthetic oligonucleotide
caggcucuccucuggacug

SEQ ID NO: 2602972 - RNA, 19 nt, Artificial Sequence
  Description of Artificial Sequence: Synthetic oligonucleotide
uaaugucguugacagcauu

SEQ ID NO: 2602973 - RNA, 19 nt, Artificial Sequence
  Description of Artificial Sequence: Synthetic oligonucleotide
agacaaggaaacaaauauu

SEQ ID NO: 2602974 - RNA, 19 nt, Artificial Sequence
  Description of Artificial Sequence: Synthetic oligonucleotide
augaugaaugguggauaag

SEQ ID NO: 2602975 - RNA, 19 nt, Artificial Sequence
  Description of Artificial Sequence: Synthetic oligonucleotide
cagcaccuaacaugcuggg

SEQ ID NO: 2602976 - RNA, 19 nt, Artificial Sequence
  Description of Artificial Sequence: Synthetic oligonucleotide
ucucacuccggugaccaaa

SEQ ID NO: 2602977 - RNA, 19 nt, Artificial Sequence
  Description of Artificial Sequence: Synthetic oligonucleotide
cucaaugacaguagucucu

SEQ ID NO: 2602978 - RNA, 19 nt, Artificial Sequence
  Description of Artificial Sequence: Synthetic oligonucleotide
agagcccuugaacuccaca

SEQ ID NO: 2602979 - RNA, 19 nt, Artificial Sequence
  Description of Artificial Sequence: Synthetic oligonucleotide
uagucucugugauggugac

SEQ ID NO: 2602980 - RNA, 19 nt, Artificial Sequence
  Description of Artificial Sequence: Synthetic oligonucleotide
acaaggaaacaaauauuua

SEQ ID NO: 2602981 - RNA, 19 nt, Artificial Sequence
  Description of Artificial Sequence: Synthetic oligonucleotide
acggugagcaggcucuccu

SEQ ID NO: 2602982 - RNA, 19 nt, Artificial Sequence
  Description of Artificial Sequence: Synthetic oligonucleotide
ccaaguccgacucaaugac

SEQ ID NO: 2602983 - RNA, 19 nt, Artificial Sequence
  Description of Artificial Sequence: Synthetic oligonucleotide
cagggacagaccacaugag

SEQ ID NO: 2602984 - RNA, 19 nt, Artificial Sequence
  Description of Artificial Sequence: Synthetic oligonucleotide
cagaccacaugaggaagag

SEQ ID NO: 2602985 - RNA, 19 nt, Artificial Sequence
  Description of Artificial Sequence: Synthetic oligonucleotide
gagcgguuuguguugauau

SEQ ID NO: 2602986 - RNA, 19 nt, Artificial Sequence
  Description of Artificial Sequence: Synthetic oligonucleotide
agaccacaugaggaagagg

SEQ ID NO: 2602987 - RNA, 19 nt, Artificial Sequence
  Description of Artificial Sequence: Synthetic oligonucleotide
ggaacagaguacaaaagcu

SEQ ID NO: 2602988 - RNA, 19 nt, Artificial Sequence
  Description of Artificial Sequence: Synthetic oligonucleotide
aggauguacuguugaggaa

SEQ ID NO: 2602989 - RNA, 19 nt, Artificial Sequence
  Description of Artificial Sequence: Synthetic oligonucleotide
ucgcagucuggcacugucu

SEQ ID NO: 2602990 - RNA, 19 nt, Artificial Sequence
  Description of Artificial Sequence: Synthetic oligonucleotide
ucuucucacuccggugacc

SEQ ID NO: 2602991 - RNA, 19 nt, Artificial Sequence
  Description of Artificial Sequence: Synthetic oligonucleotide
agucucugugauggugacg

SEQ ID NO: 2602992 - RNA, 19 nt, Artificial Sequence
  Description of Artificial Sequence: Synthetic oligonucleotide
gucuauauggugaguucca

SEQ ID NO: 2602993 - RNA, 19 nt, Artificial Sequence
  Description of Artificial Sequence: Synthetic oligonucleotide
guaagacgagacucuuguc

SEQ ID NO: 2602994 - RNA, 19 nt, Artificial Sequence
  Description of Artificial Sequence: Synthetic oligonucleotide
cucgcagucuggcacuguc

SEQ ID NO: 2602995 - RNA, 19 nt, Artificial Sequence
  Description of Artificial Sequence: Synthetic oligonucleotide
agucuggcacugucuccuc

SEQ ID NO: 2602996 - RNA, 19 nt, Artificial Sequence
  Description of Artificial Sequence: Synthetic oligonucleotide
augguggauaagagagcgg

SEQ ID NO: 2602997 - RNA, 19 nt, Artificial Sequence
  Description of Artificial Sequence: Synthetic oligonucleotide
acagaguacaaaagcugaa

SEQ ID NO: 2602998 - RNA, 19 nt, Artificial Sequence
  Description of Artificial Sequence: Synthetic oligonucleotide
cuugaacuccacacaccca

SEQ ID NO: 2602999 - RNA, 19 nt, Artificial Sequence
  Description of Artificial Sequence: Synthetic oligonucleotide
agccauagcuacaguaaga

SEQ ID NO: 2603000 - RNA, 19 nt, Artificial Sequence
  Description of Artificial Sequence: Synthetic oligonucleotide
cuucucacuccggugacca

SEQ ID NO: 2603001 - RNA, 19 nt, Artificial Sequence
  Description of Artificial Sequence: Synthetic oligonucleotide
acauccaauuaaugucguu

SEQ ID NO: 2603002 - RNA, 19 nt, Artificial Sequence
  Description of Artificial Sequence: Synthetic oligonucleotide
ucuccucuggacugccauc

SEQ ID NO: 2603003 - RNA, 19 nt, Artificial Sequence
  Description of Artificial Sequence: Synthetic oligonucleotide
aguccgacucaaugacagu

SEQ ID NO: 2603004 - RNA, 19 nt, Artificial Sequence
  Description of Artificial Sequence: Synthetic oligonucleotide
gacgagacucuugucucca

SEQ ID NO: 2603005 - RNA, 19 nt, Artificial Sequence
  Description of Artificial Sequence: Synthetic oligonucleotide
cugagggcacuugugagga

SEQ ID NO: 2603006 - RNA, 19 nt, Artificial Sequence
  Description of Artificial Sequence: Synthetic oligonucleotide
cuggcacugucuccuccgg

SEQ ID NO: 2603007 - RNA, 19 nt, Artificial Sequence
  Description of Artificial Sequence: Synthetic oligonucleotide
uccacacacccaaguccga

SEQ ID NO: 2603008 - RNA, 19 nt, Artificial Sequence
  Description of Artificial Sequence: Synthetic oligonucleotide
cugugauggugacggugag

SEQ ID NO: 2603009 - RNA, 19 nt, Artificial Sequence
  Description of Artificial Sequence: Synthetic oligonucleotide
caaguccgacucaaugaca

SEQ ID NO: 2603010 - RNA, 19 nt, Artificial Sequence
  Description of Artificial Sequence: Synthetic oligonucleotide
aaccacagcgugagguaga

SEQ ID NO: 2603011 - RNA, 19 nt, Artificial Sequence
  Description of Artificial Sequence: Synthetic oligonucleotide
ggacaggauguacuguuga

SEQ ID NO: 2603012 - RNA, 19 nt, Artificial Sequence
  Description of Artificial Sequence: Synthetic oligonucleotide
agcgguuuguguugauaua

SEQ ID NO: 2603013 - RNA, 19 nt, Artificial Sequence
  Description of Artificial Sequence: Synthetic oligonucleotide
acaguaagacgagacucuu

SEQ ID NO: 2603014 - RNA, 19 nt, Artificial Sequence
  Description of Artificial Sequence: Synthetic oligonucleotide
ccaauuaaugucguugaca

SEQ ID NO: 2603015 - RNA, 19 nt, Artificial Sequence
  Description of Artificial Sequence: Synthetic oligonucleotide
auguacuguugaggaacag

SEQ ID NO: 2603016 - RNA, 19 nt, Artificial Sequence
  Description of Artificial Sequence: Synthetic oligonucleotide
gcccuugaacuccacacac

SEQ ID NO: 2603017 - RNA, 19 nt, Artificial Sequence
  Description of Artificial Sequence: Synthetic oligonucleotide
gacaugcugagggcacuug

SEQ ID NO: 2603018 - RNA, 19 nt, Artificial Sequence
  Description of Artificial Sequence: Synthetic oligonucleotide
uagcuacaguaagacgaga

SEQ ID NO: 2603019 - RNA, 19 nt, Artificial Sequence
  Description of Artificial Sequence: Synthetic oligonucleotide
ggacagaccacaugaggaa

SEQ ID NO: 2603020 - RNA, 19 nt, Artificial Sequence
  Description of Artificial Sequence: Synthetic oligonucleotide
agagagcgguuuguguuga

SEQ ID NO: 2603021 - RNA, 19 nt, Artificial Sequence
  Description of Artificial Sequence: Synthetic oligonucleotide
uccuccgguccuugggacu

SEQ ID NO: 2603022 - RNA, 19 nt, Artificial Sequence
  Description of Artificial Sequence: Synthetic oligonucleotide
aggcucuccucuggacugc

SEQ ID NO: 2603023 - RNA, 19 nt, Artificial Sequence
  Description of Artificial Sequence: Synthetic oligonucleotide
gucuggcacugucuccucc

SEQ ID NO: 2603024 - RNA, 19 nt, Artificial Sequence
  Description of Artificial Sequence: Synthetic oligonucleotide
ggcacugucuccuccgguc

SEQ ID NO: 2603025 - RNA, 19 nt, Artificial Sequence
  Description of Artificial Sequence: Synthetic oligonucleotide
agcauuugcacagcaccua

SEQ ID NO: 2603026 - RNA, 19 nt, Artificial Sequence
  Description of Artificial Sequence: Synthetic oligonucleotide
ggugacggugagcaggcuc

SEQ ID NO: 2603027 - RNA, 19 nt, Artificial Sequence
  Description of Artificial Sequence: Synthetic oligonucleotide
guccgacucaaugacagua

SEQ ID NO: 2603028 - RNA, 19 nt, Artificial Sequence
  Description of Artificial Sequence: Synthetic oligonucleotide
ugcuggguucucccucuaa

SEQ ID NO: 2603029 - RNA, 19 nt, Artificial Sequence
  Description of Artificial Sequence: Synthetic oligonucleotide
gccaucaccuuugguaaag

SEQ ID NO: 2603030 - RNA, 19 nt, Artificial Sequence
  Description of Artificial Sequence: Synthetic oligonucleotide
acacccaaguccgacucaa

SEQ ID NO: 2603031 - RNA, 19 nt, Artificial Sequence
  Description of Artificial Sequence: Synthetic oligonucleotide
accacaugaggaagaggca

SEQ ID NO: 2603032 - RNA, 19 nt, Artificial Sequence
  Description of Artificial Sequence: Synthetic oligonucleotide
uccucuggacugccaucac

SEQ ID NO: 2603033 - RNA, 19 nt, Artificial Sequence
  Description of Artificial Sequence: Synthetic oligonucleotide
cccaaguccgacucaauga

SEQ ID NO: 2603034 - RNA, 19 nt, Artificial Sequence
  Description of Artificial Sequence: Synthetic oligonucleotide
uugggacuuugcugaugac

SEQ ID NO: 2603035 - RNA, 19 nt, Artificial Sequence
  Description of Artificial Sequence: Synthetic oligonucleotide
gccaauuuauuuucugagu

SEQ ID NO: 2603036 - RNA, 19 nt, Artificial Sequence
  Description of Artificial Sequence: Synthetic oligonucleotide
gguagaugagagcccuuga

SEQ ID NO: 2603037 - RNA, 19 nt, Artificial Sequence
  Description of Artificial Sequence: Synthetic oligonucleotide
agcaccuaacaugcugggu

SEQ ID NO: 2603038 - RNA, 19 nt, Artificial Sequence
  Description of Artificial Sequence: Synthetic oligonucleotide
cuccucuggacugccauca

SEQ ID NO: 2603039 - RNA, 19 nt, Artificial Sequence
  Description of Artificial Sequence: Synthetic oligonucleotide
augacaugcugagggcacu

SEQ ID NO: 2603040 - RNA, 19 nt, Artificial Sequence
  Description of Artificial Sequence: Synthetic oligonucleotide
ucuggacugccaucaccuu

SEQ ID NO: 2603041 - RNA, 19 nt, Artificial Sequence
  Description of Artificial Sequence: Synthetic oligonucleotide
gucaugaugaaugguggau

SEQ ID NO: 2603042 - RNA, 19 nt, Artificial Sequence
  Description of Artificial Sequence: Synthetic oligonucleotide
guggauaagagagcgguuu

SEQ ID NO: 2603043 - RNA, 19 nt, Artificial Sequence
  Description of Artificial Sequence: Synthetic oligonucleotide
ucucugugauggugacggu

SEQ ID NO: 2603044 - RNA, 19 nt, Artificial Sequence
  Description of Artificial Sequence: Synthetic oligonucleotide
cucacuccggugaccaaaa

SEQ ID NO: 2603045 - RNA, 19 nt, Artificial Sequence
  Description of Artificial Sequence: Synthetic oligonucleotide
ggacuuugcugaugacaug

SEQ ID NO: 2603046 - RNA, 19 nt, Artificial Sequence
  Description of Artificial Sequence: Synthetic oligonucleotide
cccuugaacuccacacacc

SEQ ID NO: 2603047 - RNA, 19 nt, Artificial Sequence
  Description of Artificial Sequence: Synthetic oligonucleotide
gcacugucuccuccggucc

SEQ ID NO: 2603048 - RNA, 19 nt, Artificial Sequence
  Description of Artificial Sequence: Synthetic oligonucleotide
gacggugagcaggcucucc

SEQ ID NO: 2603049 - RNA, 19 nt, Artificial Sequence
  Description of Artificial Sequence: Synthetic oligonucleotide
agagcgguuuguguugaua

SEQ ID NO: 2603050 - RNA, 19 nt, Artificial Sequence
  Description of Artificial Sequence: Synthetic oligonucleotide
accuaacaugcuggguucu

SEQ ID NO: 2603051 - RNA, 19 nt, Artificial Sequence
  Description of Artificial Sequence: Synthetic oligonucleotide
gagggcacuugugaggagu

SEQ ID NO: 2603052 - RNA, 19 nt, Artificial Sequence
  Description of Artificial Sequence: Synthetic oligonucleotide
gcgguuuguguugauauaa

SEQ ID NO: 2603053 - RNA, 19 nt, Artificial Sequence
  Description of Artificial Sequence: Synthetic oligonucleotide
gcauuugcacagcaccuaa

SEQ ID NO: 2603054 - RNA, 19 nt, Artificial Sequence
  Description of Artificial Sequence: Synthetic oligonucleotide
gcagucuggcacugucucc

SEQ ID NO: 2603055 - RNA, 19 nt, Artificial Sequence
  Description of Artificial Sequence: Synthetic oligonucleotide
gugacggugagcaggcucu

SEQ ID NO: 2603056 - RNA, 19 nt, Artificial Sequence
  Description of Artificial Sequence: Synthetic oligonucleotide
uccuugggacuuugcugau

SEQ ID NO: 2603057 - RNA, 19 nt, Artificial Sequence
  Description of Artificial Sequence: Synthetic oligonucleotide
agugaaucucagggacaga

SEQ ID NO: 2603058 - RNA, 19 nt, Artificial Sequence
  Description of Artificial Sequence: Synthetic oligonucleotide
gggacuuugcugaugacau

SEQ ID NO: 2603059 - RNA, 19 nt, Artificial Sequence
  Description of Artificial Sequence: Synthetic oligonucleotide
ggagugaaucucagggaca

SEQ ID NO: 2603060 - RNA, 19 nt, Artificial Sequence
  Description of Artificial Sequence: Synthetic oligonucleotide
cuaacagggacaggaugua

SEQ ID NO: 2603061 - RNA, 19 nt, Artificial Sequence
  Description of Artificial Sequence: Synthetic oligonucleotide
uucucacuccggugaccaa

SEQ ID NO: 2603062 - RNA, 19 nt, Artificial Sequence
  Description of Artificial Sequence: Synthetic oligonucleotide
cagcgugagguagaugaga

SEQ ID NO: 2603063 - RNA, 19 nt, Artificial Sequence
  Description of Artificial Sequence: Synthetic oligonucleotide
caugcuggguucucccucu

SEQ ID NO: 2603064 - RNA, 19 nt, Artificial Sequence
  Description of Artificial Sequence: Synthetic oligonucleotide
uccgguccuugggacuuug

SEQ ID NO: 2603065 - RNA, 19 nt, Artificial Sequence
  Description of Artificial Sequence: Synthetic oligonucleotide
acgagacucuugucuccaa

SEQ ID NO: 2603066 - RNA, 19 nt, Artificial Sequence
  Description of Artificial Sequence: Synthetic oligonucleotide
cgacucaaugacaguaguc

SEQ ID NO: 2603067 - RNA, 19 nt, Artificial Sequence
  Description of Artificial Sequence: Synthetic oligonucleotide
ggcacuugugaggagugaa

SEQ ID NO: 2603068 - RNA, 19 nt, Artificial Sequence
  Description of Artificial Sequence: Synthetic oligonucleotide
cagucuggcacugucuccu

SEQ ID NO: 2603069 - RNA, 19 nt, Artificial Sequence
  Description of Artificial Sequence: Synthetic oligonucleotide
cacacacccaaguccgacu

SEQ ID NO: 2603070 - RNA, 19 nt, Artificial Sequence
  Description of Artificial Sequence: Synthetic oligonucleotide
ggauaagagagcgguuugu

SEQ ID NO: 2603071 - RNA, 19 nt, Artificial Sequence
  Description of Artificial Sequence: Synthetic oligonucleotide
ugacggugagcaggcucuc

SEQ ID NO: 2603072 - RNA, 19 nt, Artificial Sequence
  Description of Artificial Sequence: Synthetic oligonucleotide
cgcagucuggcacugucuc

SEQ ID NO: 2603073 - RNA, 19 nt, Artificial Sequence
  Description of Artificial Sequence: Synthetic oligonucleotide
gacugccaucaccuuuggu

SEQ ID NO: 2603074 - RNA, 19 nt, Artificial Sequence
  Description of Artificial Sequence: Synthetic oligonucleotide
cguugacagcauuugcaca

SEQ ID NO: 2603075 - RNA, 19 nt, Artificial Sequence
  Description of Artificial Sequence: Synthetic oligonucleotide
cuggacugccaucaccuuu

SEQ ID NO: 2603076 - RNA, 19 nt, Artificial Sequence
  Description of Artificial Sequence: Synthetic oligonucleotide
ccacacacccaaguccgac

SEQ ID NO: 2603077 - RNA, 19 nt, Artificial Sequence
  Description of Artificial Sequence: Synthetic oligonucleotide
uggugacggugagcaggcu

SEQ ID NO: 2603078 - RNA, 19 nt, Artificial Sequence
  Description of Artificial Sequence: Synthetic oligonucleotide
augcuggguucucccucua

SEQ ID NO: 2603079 - RNA, 19 nt, Artificial Sequence
  Description of Artificial Sequence: Synthetic oligonucleotide
ccuugggacuuugcugaug

SEQ ID NO: 2603080 - RNA, 19 nt, Artificial Sequence
  Description of Artificial Sequence: Synthetic oligonucleotide
ggggccccaggugagaagu

SEQ ID NO: 2603081 - RNA, 19 nt, Artificial Sequence
  Description of Artificial Sequence: Synthetic oligonucleotide
ccgguccuugggacuuugc

SEQ ID NO: 2603082 - RNA, 19 nt, Artificial Sequence
  Description of Artificial Sequence: Synthetic oligonucleotide
gagagcgguuuguguugau

SEQ ID NO: 2603083 - RNA, 19 nt, Artificial Sequence
  Description of Artificial Sequence: Synthetic oligonucleotide
cgguuuguguugauauaaa

SEQ ID NO: 2603084 - RNA, 19 nt, Artificial Sequence
  Description of Artificial Sequence: Synthetic oligonucleotide
caguagucucugugauggu

SEQ ID NO: 2603085 - RNA, 19 nt, Artificial Sequence
  Description of Artificial Sequence: Synthetic oligonucleotide
caccuuugguaaagacaau

SEQ ID NO: 2603086 - RNA, 19 nt, Artificial Sequence
  Description of Artificial Sequence: Synthetic oligonucleotide
ccgacucaaugacaguagu

SEQ ID NO: 2603087 - RNA, 19 nt, Artificial Sequence
  Description of Artificial Sequence: Synthetic oligonucleotide
gggcacuugugaggaguga

SEQ ID NO: 2603088 - RNA, 19 nt, Artificial Sequence
  Description of Artificial Sequence: Synthetic oligonucleotide
ccaucaccuuugguaaaga

SEQ ID NO: 2603089 - RNA, 19 nt, Artificial Sequence
  Description of Artificial Sequence: Synthetic oligonucleotide
gguggauaagagagcgguu

SEQ ID NO: 2603090 - RNA, 19 nt, Artificial Sequence
  Description of Artificial Sequence: Synthetic oligonucleotide
ccucuaacagggacaggau

SEQ ID NO: 2603091 - RNA, 19 nt, Artificial Sequence
  Description of Artificial Sequence: Synthetic oligonucleotide
gggccccaggugagaagug

SEQ ID NO: 2603092 - RNA, 19 nt, Artificial Sequence
  Description of Artificial Sequence: Synthetic oligonucleotide
ggacagccauagcuacagu

SEQ ID NO: 2603093 - RNA, 19 nt, Artificial Sequence
  Description of Artificial Sequence: Synthetic oligonucleotide
cacccaaguccgacucaau

SEQ ID NO: 2603094 - RNA, 19 nt, Artificial Sequence
  Description of Artificial Sequence: Synthetic oligonucleotide
ccacagcgugagguagaug

SEQ ID NO: 2603095 - RNA, 19 nt, Artificial Sequence
  Description of Artificial Sequence: Synthetic oligonucleotide
ccccaggugagaaguguuu

SEQ ID NO: 2603096 - RNA, 19 nt, Artificial Sequence
  Description of Artificial Sequence: Synthetic oligonucleotide
gccccaggugagaaguguu

SEQ ID NO: 2603097 - RNA, 19 nt, Artificial Sequence
  Description of Artificial Sequence: Synthetic oligonucleotide
gcacagcaccuaacaugcu

SEQ ID NO: 2603098 - RNA, 19 nt, Artificial Sequence
  Description of Artificial Sequence: Synthetic oligonucleotide
ccuccgguccuugggacuu

SEQ ID NO: 2603099 - RNA, 19 nt, Artificial Sequence
  Description of Artificial Sequence: Synthetic oligonucleotide
cuccgguccuugggacuuu

SEQ ID NO: 2603100 - RNA, 19 nt, Artificial Sequence
  Description of Artificial Sequence: Synthetic oligonucleotide
ccucgcagucuggcacugu

SEQ ID NO: 2603101 - RNA, 19 nt, Artificial Sequence
  Description of Artificial Sequence: Synthetic oligonucleotide
aacaguuuuauucagggag

SEQ ID NO: 2603102 - RNA, 19 nt, Artificial Sequence
  Description of Artificial Sequence: Synthetic oligonucleotide
aagaaccagauccaggacc

SEQ ID NO: 2603103 - RNA, 19 nt, Artificial Sequence
  Description of Artificial Sequence: Synthetic oligonucleotide
aauuaaacguguuugugug

SEQ ID NO: 2603104 - RNA, 19 nt, Artificial Sequence
  Description of Artificial Sequence: Synthetic oligonucleotide
ugaacuuacaaagauaugc

SEQ ID NO: 2603105 - RNA, 19 nt, Artificial Sequence
  Description of Artificial Sequence: Synthetic oligonucleotide
acaaggauagcugaaaacc

SEQ ID NO: 2603106 - RNA, 19 nt, Artificial Sequence
  Description of Artificial Sequence: Synthetic oligonucleotide
uuugaacuuacaaagauau

SEQ ID NO: 2603107 - RNA, 19 nt, Artificial Sequence
  Description of Artificial Sequence: Synthetic oligonucleotide
aacaccaggagaauggugc

SEQ ID NO: 2603108 - RNA, 19 nt, Artificial Sequence
  Description of Artificial Sequence: Synthetic oligonucleotide
aacacuuugugacacacca

SEQ ID NO: 2603109 - RNA, 19 nt, Artificial Sequence
  Description of Artificial Sequence: Synthetic oligonucleotide
aaggagaccacugacugcc

SEQ ID NO: 2603110 - RNA, 19 nt, Artificial Sequence
  Description of Artificial Sequence: Synthetic oligonucleotide
uacuauguagaccaguuug

SEQ ID NO: 2603111 - RNA, 19 nt, Artificial Sequence
  Description of Artificial Sequence: Synthetic oligonucleotide
gaugaagucagcaaugacc

SEQ ID NO: 2603112 - RNA, 19 nt, Artificial Sequence
  Description of Artificial Sequence: Synthetic oligonucleotide
ucagcaaugaccaccaccu

SEQ ID NO: 2603113 - RNA, 19 nt, Artificial Sequence
  Description of Artificial Sequence: Synthetic oligonucleotide
accaguuuggcuuugaacu

SEQ ID NO: 2603114 - RNA, 19 nt, Artificial Sequence
  Description of Artificial Sequence: Synthetic oligonucleotide
caagaagugaacagaaagg

SEQ ID NO: 2603115 - RNA, 19 nt, Artificial Sequence
  Description of Artificial Sequence: Synthetic oligonucleotide
ugugugagaaaacacuuug

SEQ ID NO: 2603116 - RNA, 19 nt, Artificial Sequence
  Description of Artificial Sequence: Synthetic oligonucleotide
caucagaagcaaaagaacc

SEQ ID NO: 2603117 - RNA, 19 nt, Artificial Sequence
  Description of Artificial Sequence: Synthetic oligonucleotide
cagaacaagaaccagggcc

SEQ ID NO: 2603118 - RNA, 19 nt, Artificial Sequence
  Description of Artificial Sequence: Synthetic oligonucleotide
caauuuacuauguagacca

SEQ ID NO: 2603119 - RNA, 19 nt, Artificial Sequence
  Description of Artificial Sequence: Synthetic oligonucleotide
cuuacaaagauaugcuugc

SEQ ID NO: 2603120 - RNA, 19 nt, Artificial Sequence
  Description of Artificial Sequence: Synthetic oligonucleotide
auacaugugcuuuuguuuc

SEQ ID NO: 2603121 - RNA, 19 nt, Artificial Sequence
  Description of Artificial Sequence: Synthetic oligonucleotide
ugcaacaccaggagaaugg

SEQ ID NO: 2603122 - RNA, 19 nt, Artificial Sequence
  Description of Artificial Sequence: Synthetic oligonucleotide
uuauucagggaguacagca

SEQ ID NO: 2603123 - RNA, 19 nt, Artificial Sequence
  Description of Artificial Sequence: Synthetic oligonucleotide
uuuuauucagggaguacag

SEQ ID NO: 2603124 - RNA, 19 nt, Artificial Sequence
  Description of Artificial Sequence: Synthetic oligonucleotide
agcaaugaccaccaccugc

SEQ ID NO: 2603125 - RNA, 19 nt, Artificial Sequence
  Description of Artificial Sequence: Synthetic oligonucleotide
aaaggagaccacugacugc

SEQ ID NO: 2603126 - RNA, 19 nt, Artificial Sequence
  Description of Artificial Sequence: Synthetic oligonucleotide
gaaaggagaccacugacug

SEQ ID NO: 2603127 - RNA, 19 nt, Artificial Sequence
  Description of Artificial Sequence: Synthetic oligonucleotide
aagugaacagaaaggagac

SEQ ID NO: 2603128 - RNA, 19 nt, Artificial Sequence
  Description of Artificial Sequence: Synthetic oligonucleotide
uggucugucuaccugauga

SEQ ID NO: 2603129 - RNA, 19 nt, Artificial Sequence
  Description of Artificial Sequence: Synthetic oligonucleotide
cagacaguuacaaggauag

SEQ ID NO: 2603130 - RNA, 19 nt, Artificial Sequence
  Description of Artificial Sequence: Synthetic oligonucleotide
gagaauccccaucagaagc

SEQ ID NO: 2603131 - RNA, 19 nt, Artificial Sequence
  Description of Artificial Sequence: Synthetic oligonucleotide
aagucaguaauuccugugu

SEQ ID NO: 2603132 - RNA, 19 nt, Artificial Sequence
  Description of Artificial Sequence: Synthetic oligonucleotide
auuaaacguguuugugugc

SEQ ID NO: 2603133 - RNA, 19 nt, Artificial Sequence
  Description of Artificial Sequence: Synthetic oligonucleotide
auuucuggggcugagacag

SEQ ID NO: 2603134 - RNA, 19 nt, Artificial Sequence
  Description of Artificial Sequence: Synthetic oligonucleotide
ugaccugcaauuuacuaug

SEQ ID NO: 2603135 - RNA, 19 nt, Artificial Sequence
  Description of Artificial Sequence: Synthetic oligonucleotide
aaggcuuugccuucuagga

SEQ ID NO: 2603136 - RNA, 19 nt, Artificial Sequence
  Description of Artificial Sequence: Synthetic oligonucleotide
agaaaacacuuugugacac

SEQ ID NO: 2603137 - RNA, 19 nt, Artificial Sequence
  Description of Artificial Sequence: Synthetic oligonucleotide
ggaccagacaguuacaagg

SEQ ID NO: 2603138 - RNA, 19 nt, Artificial Sequence
  Description of Artificial Sequence: Synthetic oligonucleotide
gaagugaacagaaaggaga

SEQ ID NO: 2603139 - RNA, 19 nt, Artificial Sequence
  Description of Artificial Sequence: Synthetic oligonucleotide
uuugugacacaccaacaca

SEQ ID NO: 2603140 - RNA, 19 nt, Artificial Sequence
  Description of Artificial Sequence: Synthetic oligonucleotide
ucgagaauccccaucagaa

SEQ ID NO: 2603141 - RNA, 19 nt, Artificial Sequence
  Description of Artificial Sequence: Synthetic oligonucleotide
uuugugccuagguauagcc

SEQ ID NO: 2603142 - RNA, 19 nt, Artificial Sequence
  Description of Artificial Sequence: Synthetic oligonucleotide
uauucagggaguacagcag

SEQ ID NO: 2603143 - RNA, 19 nt, Artificial Sequence
  Description of Artificial Sequence: Synthetic oligonucleotide
uuaaacguguuugugugcc

SEQ ID NO: 2603144 - RNA, 19 nt, Artificial Sequence
  Description of Artificial Sequence: Synthetic oligonucleotide
aaacguguuugugugccgc

SEQ ID NO: 2603145 - RNA, 19 nt, Artificial Sequence
  Description of Artificial Sequence: Synthetic oligonucleotide
cuagguauagccgagcuac

SEQ ID NO: 2603146 - RNA, 19 nt, Artificial Sequence
  Description of Artificial Sequence: Synthetic oligonucleotide
ucaguaauuccugugugag

SEQ ID NO: 2603147 - RNA, 19 nt, Artificial Sequence
  Description of Artificial Sequence: Synthetic oligonucleotide
guauagccgagcuacuucg

SEQ ID NO: 2603148 - RNA, 19 nt, Artificial Sequence
  Description of Artificial Sequence: Synthetic oligonucleotide
ugcaauuuacuauguagac

SEQ ID NO: 2603149 - RNA, 19 nt, Artificial Sequence
  Description of Artificial Sequence: Synthetic oligonucleotide
aaagauaugcuugccuuug

SEQ ID NO: 2603150 - RNA, 19 nt, Artificial Sequence
  Description of Artificial Sequence: Synthetic oligonucleotide
ucagaagcaaaagaaccag

SEQ ID NO: 2603151 - RNA, 19 nt, Artificial Sequence
  Description of Artificial Sequence: Synthetic oligonucleotide
uccuuuuggaaaccaaaca

SEQ ID NO: 2603152 - RNA, 19 nt, Artificial Sequence
  Description of Artificial Sequence: Synthetic oligonucleotide
ucugucuaccugaugaagu

SEQ ID NO: 2603153 - RNA, 19 nt, Artificial Sequence
  Description of Artificial Sequence: Synthetic oligonucleotide
ugugccuagguauagccga

SEQ ID NO: 2603154 - RNA, 19 nt, Artificial Sequence
  Description of Artificial Sequence: Synthetic oligonucleotide
ugcuguguagguuaugcug

SEQ ID NO: 2603155 - RNA, 19 nt, Artificial Sequence
  Description of Artificial Sequence: Synthetic oligonucleotide
auucagggaguacagcagg

SEQ ID NO: 2603156 - RNA, 19 nt, Artificial Sequence
  Description of Artificial Sequence: Synthetic oligonucleotide
uuugugugccgccauaccu

SEQ ID NO: 2603157 - RNA, 19 nt, Artificial Sequence
  Description of Artificial Sequence: Synthetic oligonucleotide
gaagucagcaaugaccacc

SEQ ID NO: 2603158 - RNA, 19 nt, Artificial Sequence
  Description of Artificial Sequence: Synthetic oligonucleotide
agguucucagaacaagaac

SEQ ID NO: 2603159 - RNA, 19 nt, Artificial Sequence
  Description of Artificial Sequence: Synthetic oligonucleotide
aacguguuugugugccgcc

SEQ ID NO: 2603160 - RNA, 19 nt, Artificial Sequence
  Description of Artificial Sequence: Synthetic oligonucleotide
acuucgagaauccccauca

SEQ ID NO: 2603161 - RNA, 19 nt, Artificial Sequence
  Description of Artificial Sequence: Synthetic oligonucleotide
cuuugugacacaccaacac

SEQ ID NO: 2603162 - RNA, 19 nt, Artificial Sequence
  Description of Artificial Sequence: Synthetic oligonucleotide
accaaggucugccagagca

SEQ ID NO: 2603163 - RNA, 19 nt, Artificial Sequence
  Description of Artificial Sequence: Synthetic oligonucleotide
acugccgugaaugccaggc

SEQ ID NO: 2603164 - RNA, 19 nt, Artificial Sequence
  Description of Artificial Sequence: Synthetic oligonucleotide
cacuauguaacccuagcug

SEQ ID NO: 2603165 - RNA, 19 nt, Artificial Sequence
  Description of Artificial Sequence: Synthetic oligonucleotide
uuccuuuuggaaaccaaac

SEQ ID NO: 2603166 - RNA, 19 nt, Artificial Sequence
  Description of Artificial Sequence: Synthetic oligonucleotide
aguaauuccugugugagaa

SEQ ID NO: 2603167 - RNA, 19 nt, Artificial Sequence
  Description of Artificial Sequence: Synthetic oligonucleotide
gaagucaguaauuccugug

SEQ ID NO: 2603168 - RNA, 19 nt, Artificial Sequence
  Description of Artificial Sequence: Synthetic oligonucleotide
gguucucagaacaagaacc

SEQ ID NO: 2603169 - RNA, 19 nt, Artificial Sequence
  Description of Artificial Sequence: Synthetic oligonucleotide
ugugggaaggcacggaagu

SEQ ID NO: 2603170 - RNA, 19 nt, Artificial Sequence
  Description of Artificial Sequence: Synthetic oligonucleotide
ugacacaccaacacagcca

SEQ ID NO: 2603171 - RNA, 19 nt, Artificial Sequence
  Description of Artificial Sequence: Synthetic oligonucleotide
cacuuugugacacaccaac

SEQ ID NO: 2603172 - RNA, 19 nt, Artificial Sequence
  Description of Artificial Sequence: Synthetic oligonucleotide
acaaagauaugcuugccuu

SEQ ID NO: 2603173 - RNA, 19 nt, Artificial Sequence
  Description of Artificial Sequence: Synthetic oligonucleotide
uggaauuaaacguguuugu

SEQ ID NO: 2603174 - RNA, 19 nt, Artificial Sequence
  Description of Artificial Sequence: Synthetic oligonucleotide
uacaaggauagcugaaaac

SEQ ID NO: 2603175 - RNA, 19 nt, Artificial Sequence
  Description of Artificial Sequence: Synthetic oligonucleotide
uuacaaggauagcugaaaa

SEQ ID NO: 2603176 - RNA, 19 nt, Artificial Sequence
  Description of Artificial Sequence: Synthetic oligonucleotide
ugaggacugaguccaacca

SEQ ID NO: 2603177 - RNA, 19 nt, Artificial Sequence
  Description of Artificial Sequence: Synthetic oligonucleotide
uugacuuccugaaaggcuu

SEQ ID NO: 2603178 - RNA, 19 nt, Artificial Sequence
  Description of Artificial Sequence: Synthetic oligonucleotide
gaauuaaacguguuugugu

SEQ ID NO: 2603179 - RNA, 19 nt, Artificial Sequence
  Description of Artificial Sequence: Synthetic oligonucleotide
uugugccuagguauagccg

SEQ ID NO: 2603180 - RNA, 19 nt, Artificial Sequence
  Description of Artificial Sequence: Synthetic oligonucleotide
aaacacuuugugacacacc

SEQ ID NO: 2603181 - RNA, 19 nt, Artificial Sequence
  Description of Artificial Sequence: Synthetic oligonucleotide
ugcaauccagccuccagcc

SEQ ID NO: 2603182 - RNA, 19 nt, Artificial Sequence
  Description of Artificial Sequence: Synthetic oligonucleotide
gucagguugccuuuugugc

SEQ ID NO: 2603183 - RNA, 19 nt, Artificial Sequence
  Description of Artificial Sequence: Synthetic oligonucleotide
acagccacguccuccugcc

SEQ ID NO: 2603184 - RNA, 19 nt, Artificial Sequence
  Description of Artificial Sequence: Synthetic oligonucleotide
aauuccugugugagaaaac

SEQ ID NO: 2603185 - RNA, 19 nt, Artificial Sequence
  Description of Artificial Sequence: Synthetic oligonucleotide
gugaaugccaggcuggcug

SEQ ID NO: 2603186 - RNA, 19 nt, Artificial Sequence
  Description of Artificial Sequence: Synthetic oligonucleotide
ugucagguugccuuuugug

SEQ ID NO: 2603187 - RNA, 19 nt, Artificial Sequence
  Description of Artificial Sequence: Synthetic oligonucleotide
uucgagaauccccaucaga

SEQ ID NO: 2603188 - RNA, 19 nt, Artificial Sequence
  Description of Artificial Sequence: Synthetic oligonucleotide
agcuacuucgagaaucccc

SEQ ID NO: 2603189 - RNA, 19 nt, Artificial Sequence
  Description of Artificial Sequence: Synthetic oligonucleotide
uguagguuaugcuggucug

SEQ ID NO: 2603190 - RNA, 19 nt, Artificial Sequence
  Description of Artificial Sequence: Synthetic oligonucleotide
aaggauagcugaaaaccug

SEQ ID NO: 2603191 - RNA, 19 nt, Artificial Sequence
  Description of Artificial Sequence: Synthetic oligonucleotide
accaaacaguuuuauucag

SEQ ID NO: 2603192 - RNA, 19 nt, Artificial Sequence
  Description of Artificial Sequence: Synthetic oligonucleotide
aauggugcugaggacugag

SEQ ID NO: 2603193 - RNA, 19 nt, Artificial Sequence
  Description of Artificial Sequence: Synthetic oligonucleotide
uugaacuuacaaagauaug

SEQ ID NO: 2603194 - RNA, 19 nt, Artificial Sequence
  Description of Artificial Sequence: Synthetic oligonucleotide
agucaguaauuccugugug

SEQ ID NO: 2603195 - RNA, 19 nt, Artificial Sequence
  Description of Artificial Sequence: Synthetic oligonucleotide
cugcaauuuacuauguaga

SEQ ID NO: 2603196 - RNA, 19 nt, Artificial Sequence
  Description of Artificial Sequence: Synthetic oligonucleotide
gugaacagaaaggagacca

SEQ ID NO: 2603197 - RNA, 19 nt, Artificial Sequence
  Description of Artificial Sequence: Synthetic oligonucleotide
ccugcaauuuacuauguag

SEQ ID NO: 2603198 - RNA, 19 nt, Artificial Sequence
  Description of Artificial Sequence: Synthetic oligonucleotide
ugugugccgccauaccugg

SEQ ID NO: 2603199 - RNA, 19 nt, Artificial Sequence
  Description of Artificial Sequence: Synthetic oligonucleotide
agaacaagaaccagggcca

SEQ ID NO: 2603200 - RNA, 19 nt, Artificial Sequence
  Description of Artificial Sequence: Synthetic oligonucleotide
acagaaaggagaccacuga

SEQ ID NO: 2603201 - RNA, 19 nt, Artificial Sequence
  Description of Artificial Sequence: Synthetic oligonucleotide
ugaguccaaccacagcacc

SEQ ID NO: 2603202 - RNA, 19 nt, Artificial Sequence
  Description of Artificial Sequence: Synthetic oligonucleotide
uuuauucagggaguacagc

SEQ ID NO: 2603203 - RNA, 19 nt, Artificial Sequence
  Description of Artificial Sequence: Synthetic oligonucleotide
agagcaagaagugaacaga

SEQ ID NO: 2603204 - RNA, 19 nt, Artificial Sequence
  Description of Artificial Sequence: Synthetic oligonucleotide
gucagcaaugaccaccacc

SEQ ID NO: 2603205 - RNA, 19 nt, Artificial Sequence
  Description of Artificial Sequence: Synthetic oligonucleotide
agugaacagaaaggagacc

SEQ ID NO: 2603206 - RNA, 19 nt, Artificial Sequence
  Description of Artificial Sequence: Synthetic oligonucleotide
acugacugccgugaaugcc

SEQ ID NO: 2603207 - RNA, 19 nt, Artificial Sequence
  Description of Artificial Sequence: Synthetic oligonucleotide
aguuuuauucagggaguac

SEQ ID NO: 2603208 - RNA, 19 nt, Artificial Sequence
  Description of Artificial Sequence: Synthetic oligonucleotide
uaaacguguuugugugccg

SEQ ID NO: 2603209 - RNA, 19 nt, Artificial Sequence
  Description of Artificial Sequence: Synthetic oligonucleotide
auuccugugugagaaaaca

SEQ ID NO: 2603210 - RNA, 19 nt, Artificial Sequence
  Description of Artificial Sequence: Synthetic oligonucleotide
acuucagucucugucaggu

SEQ ID NO: 2603211 - RNA, 19 nt, Artificial Sequence
  Description of Artificial Sequence: Synthetic oligonucleotide
ucuaggagcacugcugugu

SEQ ID NO: 2603212 - RNA, 19 nt, Artificial Sequence
  Description of Artificial Sequence: Synthetic oligonucleotide
uaauuccugugugagaaaa

SEQ ID NO: 2603213 - RNA, 19 nt, Artificial Sequence
  Description of Artificial Sequence: Synthetic oligonucleotide
gugacacaccaacacagcc

SEQ ID NO: 2603214 - RNA, 19 nt, Artificial Sequence
  Description of Artificial Sequence: Synthetic oligonucleotide
ucagaacaagaaccagggc

SEQ ID NO: 2603215 - RNA, 19 nt, Artificial Sequence
  Description of Artificial Sequence: Synthetic oligonucleotide
cuauguaacccuagcugac

SEQ ID NO: 2603216 - RNA, 19 nt, Artificial Sequence
  Description of Artificial Sequence: Synthetic oligonucleotide
ugugcuuuuguuuccuuuu

SEQ ID NO: 2603217 - RNA, 19 nt, Artificial Sequence
  Description of Artificial Sequence: Synthetic oligonucleotide
uuugccuucuaggagcacu

SEQ ID NO: 2603218 - RNA, 19 nt, Artificial Sequence
  Description of Artificial Sequence: Synthetic oligonucleotide
uacaugugcuuuuguuucc

SEQ ID NO: 2603219 - RNA, 19 nt, Artificial Sequence
  Description of Artificial Sequence: Synthetic oligonucleotide
gacaguuacaaggauagcu

SEQ ID NO: 2603220 - RNA, 19 nt, Artificial Sequence
  Description of Artificial Sequence: Synthetic oligonucleotide
uagcugaccugcaauuuac

SEQ ID NO: 2603221 - RNA, 19 nt, Artificial Sequence
  Description of Artificial Sequence: Synthetic oligonucleotide
aggaugcugcauuucuggg

SEQ ID NO: 2603222 - RNA, 19 nt, Artificial Sequence
  Description of Artificial Sequence: Synthetic oligonucleotide
accugaugaagucagcaau

SEQ ID NO: 2603223 - RNA, 19 nt, Artificial Sequence
  Description of Artificial Sequence: Synthetic oligonucleotide
uggggcugagacagggugg

SEQ ID NO: 2603224 - RNA, 19 nt, Artificial Sequence
  Description of Artificial Sequence: Synthetic oligonucleotide
cugaggacugaguccaacc

SEQ ID NO: 2603225 - RNA, 19 nt, Artificial Sequence
  Description of Artificial Sequence: Synthetic oligonucleotide
acaagaaccagggccagug

SEQ ID NO: 2603226 - RNA, 19 nt, Artificial Sequence
  Description of Artificial Sequence: Synthetic oligonucleotide
uuccugugugagaaaacac

SEQ ID NO: 2603227 - RNA, 19 nt, Artificial Sequence
  Description of Artificial Sequence: Synthetic oligonucleotide
agaagcaaaagaaccagau

SEQ ID NO: 2603228 - RNA, 19 nt, Artificial Sequence
  Description of Artificial Sequence: Synthetic oligonucleotide
cagaaaggagaccacugac

SEQ ID NO: 2603229 - RNA, 19 nt, Artificial Sequence
  Description of Artificial Sequence: Synthetic oligonucleotide
ugccgugaaugccaggcug

SEQ ID NO: 2603230 - RNA, 19 nt, Artificial Sequence
  Description of Artificial Sequence: Synthetic oligonucleotide
auagccgagcuacuucgag

SEQ ID NO: 2603231 - RNA, 19 nt, Artificial Sequence
  Description of Artificial Sequence: Synthetic oligonucleotide
acuuccugaaaggcuuugc

SEQ ID NO: 2603232 - RNA, 19 nt, Artificial Sequence
  Description of Artificial Sequence: Synthetic oligonucleotide
agaaccagggccagugugg

SEQ ID NO: 2603233 - RNA, 19 nt, Artificial Sequence
  Description of Artificial Sequence: Synthetic oligonucleotide
cugcaauccagccuccagc

SEQ ID NO: 2603234 - RNA, 19 nt, Artificial Sequence
  Description of Artificial Sequence: Synthetic oligonucleotide
agcacugcuguguagguua

SEQ ID NO: 2603235 - RNA, 19 nt, Artificial Sequence
  Description of Artificial Sequence: Synthetic oligonucleotide
uugccuucuaggagcacug

SEQ ID NO: 2603236 - RNA, 19 nt, Artificial Sequence
  Description of Artificial Sequence: Synthetic oligonucleotide
cacggaagucaguaauucc

SEQ ID NO: 2603237 - RNA, 19 nt, Artificial Sequence
  Description of Artificial Sequence: Synthetic oligonucleotide
uuacaaagauaugcuugcc

SEQ ID NO: 2603238 - RNA, 19 nt, Artificial Sequence
  Description of Artificial Sequence: Synthetic oligonucleotide
caccaacacagccacgucc

SEQ ID NO: 2603239 - RNA, 19 nt, Artificial Sequence
  Description of Artificial Sequence: Synthetic oligonucleotide
acggaagucaguaauuccu

SEQ ID NO: 2603240 - RNA, 19 nt, Artificial Sequence
  Description of Artificial Sequence: Synthetic oligonucleotide
uucucagaacaagaaccag

SEQ ID NO: 2603241 - RNA, 19 nt, Artificial Sequence
  Description of Artificial Sequence: Synthetic oligonucleotide
uugccuuuugugccuaggu

SEQ ID NO: 2603242 - RNA, 19 nt, Artificial Sequence
  Description of Artificial Sequence: Synthetic oligonucleotide
auuuacuauguagaccagu

SEQ ID NO: 2603243 - RNA, 19 nt, Artificial Sequence
  Description of Artificial Sequence: Synthetic oligonucleotide
ucuaccugaugaagucagc

SEQ ID NO: 2603244 - RNA, 19 nt, Artificial Sequence
  Description of Artificial Sequence: Synthetic oligonucleotide
gcuguguagguuaugcugg

SEQ ID NO: 2603245 - RNA, 19 nt, Artificial Sequence
  Description of Artificial Sequence: Synthetic oligonucleotide
uccagcccaugcaacacca

SEQ ID NO: 2603246 - RNA, 19 nt, Artificial Sequence
  Description of Artificial Sequence: Synthetic oligonucleotide
aggaccagacaguuacaag

SEQ ID NO: 2603247 - RNA, 19 nt, Artificial Sequence
  Description of Artificial Sequence: Synthetic oligonucleotide
cugucuaccugaugaaguc

SEQ ID NO: 2603248 - RNA, 19 nt, Artificial Sequence
  Description of Artificial Sequence: Synthetic oligonucleotide
ugaaugccaggcuggcugc

SEQ ID NO: 2603249 - RNA, 19 nt, Artificial Sequence
  Description of Artificial Sequence: Synthetic oligonucleotide
guaacccuagcugaccugc

SEQ ID NO: 2603250 - RNA, 19 nt, Artificial Sequence
  Description of Artificial Sequence: Synthetic oligonucleotide
gaggacugaguccaaccac

SEQ ID NO: 2603251 - RNA, 19 nt, Artificial Sequence
  Description of Artificial Sequence: Synthetic oligonucleotide
ugggaaggcacggaaguca

SEQ ID NO: 2603252 - RNA, 19 nt, Artificial Sequence
  Description of Artificial Sequence: Synthetic oligonucleotide
agaaaggagaccacugacu

SEQ ID NO: 2603253 - RNA, 19 nt, Artificial Sequence
  Description of Artificial Sequence: Synthetic oligonucleotide
uuuugugccuagguauagc

SEQ ID NO: 2603254 - RNA, 19 nt, Artificial Sequence
  Description of Artificial Sequence: Synthetic oligonucleotide
uaugcuggucugucuaccu

SEQ ID NO: 2603255 - RNA, 19 nt, Artificial Sequence
  Description of Artificial Sequence: Synthetic oligonucleotide
uuacuauguagaccaguuu

SEQ ID NO: 2603256 - RNA, 19 nt, Artificial Sequence
  Description of Artificial Sequence: Synthetic oligonucleotide
cuuugaacuuacaaagaua

SEQ ID NO: 2603257 - RNA, 19 nt, Artificial Sequence
  Description of Artificial Sequence: Synthetic oligonucleotide
agaaccagauccaggacca

SEQ ID NO: 2603258 - RNA, 19 nt, Artificial Sequence
  Description of Artificial Sequence: Synthetic oligonucleotide
aguuuggcuuugaacuuac

SEQ ID NO: 2603259 - RNA, 19 nt, Artificial Sequence
  Description of Artificial Sequence: Synthetic oligonucleotide
gucuaccugaugaagucag

SEQ ID NO: 2603260 - RNA, 19 nt, Artificial Sequence
  Description of Artificial Sequence: Synthetic oligonucleotide
ccaaacaguuuuauucagg

SEQ ID NO: 2603261 - RNA, 19 nt, Artificial Sequence
  Description of Artificial Sequence: Synthetic oligonucleotide
uuaugcuggucugucuacc

SEQ ID NO: 2603262 - RNA, 19 nt, Artificial Sequence
  Description of Artificial Sequence: Synthetic oligonucleotide
ucugucagguugccuuuug

SEQ ID NO: 2603263 - RNA, 19 nt, Artificial Sequence
  Description of Artificial Sequence: Synthetic oligonucleotide
uaccugaugaagucagcaa

SEQ ID NO: 2603264 - RNA, 19 nt, Artificial Sequence
  Description of Artificial Sequence: Synthetic oligonucleotide
ggaauuaaacguguuugug

SEQ ID NO: 2603265 - RNA, 19 nt, Artificial Sequence
  Description of Artificial Sequence: Synthetic oligonucleotide
acguccuccugccaggaug

SEQ ID NO: 2603266 - RNA, 19 nt, Artificial Sequence
  Description of Artificial Sequence: Synthetic oligonucleotide
gcaauuuacuauguagacc

SEQ ID NO: 2603267 - RNA, 19 nt, Artificial Sequence
  Description of Artificial Sequence: Synthetic oligonucleotide
agcagguucucagaacaag

SEQ ID NO: 2603268 - RNA, 19 nt, Artificial Sequence
  Description of Artificial Sequence: Synthetic oligonucleotide
gagaccacugacugccgug

SEQ ID NO: 2603269 - RNA, 19 nt, Artificial Sequence
  Description of Artificial Sequence: Synthetic oligonucleotide
agccgagcuacuucgagaa

SEQ ID NO: 2603270 - RNA, 19 nt, Artificial Sequence
  Description of Artificial Sequence: Synthetic oligonucleotide
acaguuuuauucagggagu

SEQ ID NO: 2603271 - RNA, 19 nt, Artificial Sequence
  Description of Artificial Sequence: Synthetic oligonucleotide
cagcccaugcaacaccagg

SEQ ID NO: 2603272 - RNA, 19 nt, Artificial Sequence
  Description of Artificial Sequence: Synthetic oligonucleotide
uguuugugugccgccauac

SEQ ID NO: 2603273 - RNA, 19 nt, Artificial Sequence
  Description of Artificial Sequence: Synthetic oligonucleotide
gucaguaauuccuguguga

SEQ ID NO: 2603274 - RNA, 19 nt, Artificial Sequence
  Description of Artificial Sequence: Synthetic oligonucleotide
uauagccgagcuacuucga

SEQ ID NO: 2603275 - RNA, 19 nt, Artificial Sequence
  Description of Artificial Sequence: Synthetic oligonucleotide
ugucuaccugaugaaguca

SEQ ID NO: 2603276 - RNA, 19 nt, Artificial Sequence
  Description of Artificial Sequence: Synthetic oligonucleotide
ccaucagaagcaaaagaac

SEQ ID NO: 2603277 - RNA, 19 nt, Artificial Sequence
  Description of Artificial Sequence: Synthetic oligonucleotide
cacagcaccaaggucugcc

SEQ ID NO: 2603278 - RNA, 19 nt, Artificial Sequence
  Description of Artificial Sequence: Synthetic oligonucleotide
ugccuuuugugccuaggua

SEQ ID NO: 2603279 - RNA, 19 nt, Artificial Sequence
  Description of Artificial Sequence: Synthetic oligonucleotide
cauaccuggcauacaugug

SEQ ID NO: 2603280 - RNA, 19 nt, Artificial Sequence
  Description of Artificial Sequence: Synthetic oligonucleotide
guucucagaacaagaacca

SEQ ID NO: 2603281 - RNA, 19 nt, Artificial Sequence
  Description of Artificial Sequence: Synthetic oligonucleotide
cugacugccgugaaugcca

SEQ ID NO: 2603282 - RNA, 19 nt, Artificial Sequence
  Description of Artificial Sequence: Synthetic oligonucleotide
guuaugcuggucugucuac

SEQ ID NO: 2603283 - RNA, 19 nt, Artificial Sequence
  Description of Artificial Sequence: Synthetic oligonucleotide
uggaaaccaaacaguuuua

SEQ ID NO: 2603284 - RNA, 19 nt, Artificial Sequence
  Description of Artificial Sequence: Synthetic oligonucleotide
uagccgagcuacuucgaga

SEQ ID NO: 2603285 - RNA, 19 nt, Artificial Sequence
  Description of Artificial Sequence: Synthetic oligonucleotide
uccccaucagaagcaaaag

SEQ ID NO: 2603286 - RNA, 19 nt, Artificial Sequence
  Description of Artificial Sequence: Synthetic oligonucleotide
agccacguccuccugccag

SEQ ID NO: 2603287 - RNA, 19 nt, Artificial Sequence
  Description of Artificial Sequence: Synthetic oligonucleotide
ugacugccgugaaugccag

SEQ ID NO: 2603288 - RNA, 19 nt, Artificial Sequence
  Description of Artificial Sequence: Synthetic oligonucleotide
cuuuugugccuagguauag

SEQ ID NO: 2603289 - RNA, 19 nt, Artificial Sequence
  Description of Artificial Sequence: Synthetic oligonucleotide
guuugugugccgccauacc

SEQ ID NO: 2603290 - RNA, 19 nt, Artificial Sequence
  Description of Artificial Sequence: Synthetic oligonucleotide
gacugaguccaaccacagc

SEQ ID NO: 2603291 - RNA, 19 nt, Artificial Sequence
  Description of Artificial Sequence: Synthetic oligonucleotide
aaccagauccaggaccaga

SEQ ID NO: 2603292 - RNA, 19 nt, Artificial Sequence
  Description of Artificial Sequence: Synthetic oligonucleotide
gaccagacaguuacaagga

SEQ ID NO: 2603293 - RNA, 19 nt, Artificial Sequence
  Description of Artificial Sequence: Synthetic oligonucleotide
guuacaaggauagcugaaa

SEQ ID NO: 2603294 - RNA, 19 nt, Artificial Sequence
  Description of Artificial Sequence: Synthetic oligonucleotide
cagggaguacagcagguuc

SEQ ID NO: 2603295 - RNA, 19 nt, Artificial Sequence
  Description of Artificial Sequence: Synthetic oligonucleotide
caguuacaaggauagcuga

SEQ ID NO: 2603296 - RNA, 19 nt, Artificial Sequence
  Description of Artificial Sequence: Synthetic oligonucleotide
agcaccaaggucugccaga

SEQ ID NO: 2603297 - RNA, 19 nt, Artificial Sequence
  Description of Artificial Sequence: Synthetic oligonucleotide
aggauagcugaaaaccuga

SEQ ID NO: 2603298 - RNA, 19 nt, Artificial Sequence
  Description of Artificial Sequence: Synthetic oligonucleotide
aggcacggaagucaguaau

SEQ ID NO: 2603299 - RNA, 19 nt, Artificial Sequence
  Description of Artificial Sequence: Synthetic oligonucleotide
agaauccccaucagaagca

SEQ ID NO: 2603300 - RNA, 19 nt, Artificial Sequence
  Description of Artificial Sequence: Synthetic oligonucleotide
gaaggcacggaagucagua

SEQ ID NO: 2603301 - RNA, 19 nt, Artificial Sequence
  Description of Artificial Sequence: Synthetic oligonucleotide
gagaauggugcugaggacu

SEQ ID NO: 2603302 - RNA, 19 nt, Artificial Sequence
  Description of Artificial Sequence: Synthetic oligonucleotide
caauccagccuccagccca

SEQ ID NO: 2603303 - RNA, 19 nt, Artificial Sequence
  Description of Artificial Sequence: Synthetic oligonucleotide
acaccaacacagccacguc

SEQ ID NO: 2603304 - RNA, 19 nt, Artificial Sequence
  Description of Artificial Sequence: Synthetic oligonucleotide
aaggcacggaagucaguaa

SEQ ID NO: 2603305 - RNA, 19 nt, Artificial Sequence
  Description of Artificial Sequence: Synthetic oligonucleotide
ccugaugaagucagcaaug

SEQ ID NO: 2603306 - RNA, 19 nt, Artificial Sequence
  Description of Artificial Sequence: Synthetic oligonucleotide
uucuaggagcacugcugug

SEQ ID NO: 2603307 - RNA, 19 nt, Artificial Sequence
  Description of Artificial Sequence: Synthetic oligonucleotide
gucugucuaccugaugaag

SEQ ID NO: 2603308 - RNA, 19 nt, Artificial Sequence
  Description of Artificial Sequence: Synthetic oligonucleotide
aacccuagcugaccugcaa

SEQ ID NO: 2603309 - RNA, 19 nt, Artificial Sequence
  Description of Artificial Sequence: Synthetic oligonucleotide
aggacugaguccaaccaca

SEQ ID NO: 2603310 - RNA, 19 nt, Artificial Sequence
  Description of Artificial Sequence: Synthetic oligonucleotide
uagguuaugcuggucuguc

SEQ ID NO: 2603311 - RNA, 19 nt, Artificial Sequence
  Description of Artificial Sequence: Synthetic oligonucleotide
gaacaagaaccagggccag

SEQ ID NO: 2603312 - RNA, 19 nt, Artificial Sequence
  Description of Artificial Sequence: Synthetic oligonucleotide
caaggauagcugaaaaccu

SEQ ID NO: 2603313 - RNA, 19 nt, Artificial Sequence
  Description of Artificial Sequence: Synthetic oligonucleotide
guguagguuaugcuggucu

SEQ ID NO: 2603314 - RNA, 19 nt, Artificial Sequence
  Description of Artificial Sequence: Synthetic oligonucleotide
gguauagccgagcuacuuc

SEQ ID NO: 2603315 - RNA, 19 nt, Artificial Sequence
  Description of Artificial Sequence: Synthetic oligonucleotide
gcaaaagaaccagauccag

SEQ ID NO: 2603316 - RNA, 19 nt, Artificial Sequence
  Description of Artificial Sequence: Synthetic oligonucleotide
ugaagucagcaaugaccac

SEQ ID NO: 2603317 - RNA, 19 nt, Artificial Sequence
  Description of Artificial Sequence: Synthetic oligonucleotide
guugccuuuugugccuagg

SEQ ID NO: 2603318 - RNA, 19 nt, Artificial Sequence
  Description of Artificial Sequence: Synthetic oligonucleotide
cauacaugugcuuuuguuu

SEQ ID NO: 2603319 - RNA, 19 nt, Artificial Sequence
  Description of Artificial Sequence: Synthetic oligonucleotide
ggcacuucagucucuguca

SEQ ID NO: 2603320 - RNA, 19 nt, Artificial Sequence
  Description of Artificial Sequence: Synthetic oligonucleotide
ccuucuaggagcacugcug

SEQ ID NO: 2603321 - RNA, 19 nt, Artificial Sequence
  Description of Artificial Sequence: Synthetic oligonucleotide
augugcuuuuguuuccuuu

SEQ ID NO: 2603322 - RNA, 19 nt, Artificial Sequence
  Description of Artificial Sequence: Synthetic oligonucleotide
cuaccugaugaagucagca

SEQ ID NO: 2603323 - RNA, 19 nt, Artificial Sequence
  Description of Artificial Sequence: Synthetic oligonucleotide
cacugacugccgugaaugc

SEQ ID NO: 2603324 - RNA, 19 nt, Artificial Sequence
  Description of Artificial Sequence: Synthetic oligonucleotide
cccaucagaagcaaaagaa

SEQ ID NO: 2603325 - RNA, 19 nt, Artificial Sequence
  Description of Artificial Sequence: Synthetic oligonucleotide
cagaagcaaaagaaccaga

SEQ ID NO: 2603326 - RNA, 19 nt, Artificial Sequence
  Description of Artificial Sequence: Synthetic oligonucleotide
cuucgagaauccccaucag

SEQ ID NO: 2603327 - RNA, 19 nt, Artificial Sequence
  Description of Artificial Sequence: Synthetic oligonucleotide
uagguauagccgagcuacu

SEQ ID NO: 2603328 - RNA, 19 nt, Artificial Sequence
  Description of Artificial Sequence: Synthetic oligonucleotide
uaggagcacugcuguguag

SEQ ID NO: 2603329 - RNA, 19 nt, Artificial Sequence
  Description of Artificial Sequence: Synthetic oligonucleotide
gcuacuucgagaaucccca

SEQ ID NO: 2603330 - RNA, 19 nt, Artificial Sequence
  Description of Artificial Sequence: Synthetic oligonucleotide
cagguucucagaacaagaa

SEQ ID NO: 2603331 - RNA, 19 nt, Artificial Sequence
  Description of Artificial Sequence: Synthetic oligonucleotide
caggagaauggugcugagg

SEQ ID NO: 2603332 - RNA, 19 nt, Artificial Sequence
  Description of Artificial Sequence: Synthetic oligonucleotide
uaacccuagcugaccugca

SEQ ID NO: 2603333 - RNA, 19 nt, Artificial Sequence
  Description of Artificial Sequence: Synthetic oligonucleotide
ugcugcauuucuggggcug

SEQ ID NO: 2603334 - RNA, 19 nt, Artificial Sequence
  Description of Artificial Sequence: Synthetic oligonucleotide
gugcugaggacugagucca

SEQ ID NO: 2603335 - RNA, 19 nt, Artificial Sequence
  Description of Artificial Sequence: Synthetic oligonucleotide
aguuacaaggauagcugaa

SEQ ID NO: 2603336 - RNA, 19 nt, Artificial Sequence
  Description of Artificial Sequence: Synthetic oligonucleotide
agggaguacagcagguucu

SEQ ID NO: 2603337 - RNA, 19 nt, Artificial Sequence
  Description of Artificial Sequence: Synthetic oligonucleotide
cugaugaagucagcaauga

SEQ ID NO: 2603338 - RNA, 19 nt, Artificial Sequence
  Description of Artificial Sequence: Synthetic oligonucleotide
aacaagaaccagggccagu

SEQ ID NO: 2603339 - RNA, 19 nt, Artificial Sequence
  Description of Artificial Sequence: Synthetic oligonucleotide
agguuaugcuggucugucu

SEQ ID NO: 2603340 - RNA, 19 nt, Artificial Sequence
  Description of Artificial Sequence: Synthetic oligonucleotide
accagacaguuacaaggau

SEQ ID NO: 2603341 - RNA, 19 nt, Artificial Sequence
  Description of Artificial Sequence: Synthetic oligonucleotide
aguggcacuucagucucug

SEQ ID NO: 2603342 - RNA, 19 nt, Artificial Sequence
  Description of Artificial Sequence: Synthetic oligonucleotide
guacagcagguucucagaa

SEQ ID NO: 2603343 - RNA, 19 nt, Artificial Sequence
  Description of Artificial Sequence: Synthetic oligonucleotide
agauccaggaccagacagu

SEQ ID NO: 2603344 - RNA, 19 nt, Artificial Sequence
  Description of Artificial Sequence: Synthetic oligonucleotide
cuccagcccaugcaacacc

SEQ ID NO: 2603345 - RNA, 19 nt, Artificial Sequence
  Description of Artificial Sequence: Synthetic oligonucleotide
gaguccaaccacagcacca

SEQ ID NO: 2603346 - RNA, 19 nt, Artificial Sequence
  Description of Artificial Sequence: Synthetic oligonucleotide
agggccagugugggaaggc

SEQ ID NO: 2603347 - RNA, 19 nt, Artificial Sequence
  Description of Artificial Sequence: Synthetic oligonucleotide
ugcuggaauuaaacguguu

SEQ ID NO: 2603348 - RNA, 19 nt, Artificial Sequence
  Description of Artificial Sequence: Synthetic oligonucleotide
aaugccaggcuggcugcca

SEQ ID NO: 2603349 - RNA, 19 nt, Artificial Sequence
  Description of Artificial Sequence: Synthetic oligonucleotide
cugaccugcaauuuacuau

SEQ ID NO: 2603350 - RNA, 19 nt, Artificial Sequence
  Description of Artificial Sequence: Synthetic oligonucleotide
agcccaugcaacaccagga

SEQ ID NO: 2603351 - RNA, 19 nt, Artificial Sequence
  Description of Artificial Sequence: Synthetic oligonucleotide
cauuucuggggcugagaca

SEQ ID NO: 2603352 - RNA, 19 nt, Artificial Sequence
  Description of Artificial Sequence: Synthetic oligonucleotide
accagggccagugugggaa

SEQ ID NO: 2603353 - RNA, 19 nt, Artificial Sequence
  Description of Artificial Sequence: Synthetic oligonucleotide
acccuagcugaccugcaau

SEQ ID NO: 2603354 - RNA, 19 nt, Artificial Sequence
  Description of Artificial Sequence: Synthetic oligonucleotide
ucucugucagguugccuuu

SEQ ID NO: 2603355 - RNA, 19 nt, Artificial Sequence
  Description of Artificial Sequence: Synthetic oligonucleotide
gguuaugcuggucugucua

SEQ ID NO: 2603356 - RNA, 19 nt, Artificial Sequence
  Description of Artificial Sequence: Synthetic oligonucleotide
agaccacugacugccguga

SEQ ID NO: 2603357 - RNA, 19 nt, Artificial Sequence
  Description of Artificial Sequence: Synthetic oligonucleotide
cuagcugaccugcaauuua

SEQ ID NO: 2603358 - RNA, 19 nt, Artificial Sequence
  Description of Artificial Sequence: Synthetic oligonucleotide
agaccaguuuggcuuugaa

SEQ ID NO: 2603359 - RNA, 19 nt, Artificial Sequence
  Description of Artificial Sequence: Synthetic oligonucleotide
gcacuucagucucugucag

SEQ ID NO: 2603360 - RNA, 19 nt, Artificial Sequence
  Description of Artificial Sequence: Synthetic oligonucleotide
ugaaaggcuuugccuucua

SEQ ID NO: 2603361 - RNA, 19 nt, Artificial Sequence
  Description of Artificial Sequence: Synthetic oligonucleotide
cgagcuacuucgagaaucc

SEQ ID NO: 2603362 - RNA, 19 nt, Artificial Sequence
  Description of Artificial Sequence: Synthetic oligonucleotide
ugacuuccugaaaggcuuu

SEQ ID NO: 2603363 - RNA, 19 nt, Artificial Sequence
  Description of Artificial Sequence: Synthetic oligonucleotide
gugugggaaggcacggaag

SEQ ID NO: 2603364 - RNA, 19 nt, Artificial Sequence
  Description of Artificial Sequence: Synthetic oligonucleotide
agcuguugacuuccugaaa

SEQ ID NO: 2603365 - RNA, 19 nt, Artificial Sequence
  Description of Artificial Sequence: Synthetic oligonucleotide
caguaauuccugugugaga

SEQ ID NO: 2603366 - RNA, 19 nt, Artificial Sequence
  Description of Artificial Sequence: Synthetic oligonucleotide
accugcaauuuacuaugua

SEQ ID NO: 2603367 - RNA, 19 nt, Artificial Sequence
  Description of Artificial Sequence: Synthetic oligonucleotide
gcaaugaccaccaccugca

SEQ ID NO: 2603368 - RNA, 19 nt, Artificial Sequence
  Description of Artificial Sequence: Synthetic oligonucleotide
gcccaugcaacaccaggag

SEQ ID NO: 2603369 - RNA, 19 nt, Artificial Sequence
  Description of Artificial Sequence: Synthetic oligonucleotide
accacugacugccgugaau

SEQ ID NO: 2603370 - RNA, 19 nt, Artificial Sequence
  Description of Artificial Sequence: Synthetic oligonucleotide
uguguagguuaugcugguc

SEQ ID NO: 2603371 - RNA, 19 nt, Artificial Sequence
  Description of Artificial Sequence: Synthetic oligonucleotide
ugccuagguauagccgagc

SEQ ID NO: 2603372 - RNA, 19 nt, Artificial Sequence
  Description of Artificial Sequence: Synthetic oligonucleotide
ggagaauggugcugaggac

SEQ ID NO: 2603373 - RNA, 19 nt, Artificial Sequence
  Description of Artificial Sequence: Synthetic oligonucleotide
ucagggaguacagcagguu

SEQ ID NO: 2603374 - RNA, 19 nt, Artificial Sequence
  Description of Artificial Sequence: Synthetic oligonucleotide
gacugccgugaaugccagg

SEQ ID NO: 2603375 - RNA, 19 nt, Artificial Sequence
  Description of Artificial Sequence: Synthetic oligonucleotide
uccuccugccaggaugcug

SEQ ID NO: 2603376 - RNA, 19 nt, Artificial Sequence
  Description of Artificial Sequence: Synthetic oligonucleotide
guaauuccugugugagaaa

SEQ ID NO: 2603377 - RNA, 19 nt, Artificial Sequence
  Description of Artificial Sequence: Synthetic oligonucleotide
gagcuacuucgagaauccc

SEQ ID NO: 2603378 - RNA, 19 nt, Artificial Sequence
  Description of Artificial Sequence: Synthetic oligonucleotide
uagaccaguuuggcuuuga

SEQ ID NO: 2603379 - RNA, 19 nt, Artificial Sequence
  Description of Artificial Sequence: Synthetic oligonucleotide
gaaccagauccaggaccag

SEQ ID NO: 2603380 - RNA, 19 nt, Artificial Sequence
  Description of Artificial Sequence: Synthetic oligonucleotide
aauccagccuccagcccau

SEQ ID NO: 2603381 - RNA, 19 nt, Artificial Sequence
  Description of Artificial Sequence: Synthetic oligonucleotide
gccgugaaugccaggcugg

SEQ ID NO: 2603382 - RNA, 19 nt, Artificial Sequence
  Description of Artificial Sequence: Synthetic oligonucleotide
ugccuucuaggagcacugc

SEQ ID NO: 2603383 - RNA, 19 nt, Artificial Sequence
  Description of Artificial Sequence: Synthetic oligonucleotide
gaauccccaucagaagcaa

SEQ ID NO: 2603384 - RNA, 19 nt, Artificial Sequence
  Description of Artificial Sequence: Synthetic oligonucleotide
gugccuagguauagccgag

SEQ ID NO: 2603385 - RNA, 19 nt, Artificial Sequence
  Description of Artificial Sequence: Synthetic oligonucleotide
agguauagccgagcuacuu

SEQ ID NO: 2603386 - RNA, 19 nt, Artificial Sequence
  Description of Artificial Sequence: Synthetic oligonucleotide
gcagguucucagaacaaga

SEQ ID NO: 2603387 - RNA, 19 nt, Artificial Sequence
  Description of Artificial Sequence: Synthetic oligonucleotide
acguguuugugugccgcca

SEQ ID NO: 2603388 - RNA, 19 nt, Artificial Sequence
  Description of Artificial Sequence: Synthetic oligonucleotide
ggauagcugaaaaccugac

SEQ ID NO: 2603389 - RNA, 19 nt, Artificial Sequence
  Description of Artificial Sequence: Synthetic oligonucleotide
ggacugaguccaaccacag

SEQ ID NO: 2603390 - RNA, 19 nt, Artificial Sequence
  Description of Artificial Sequence: Synthetic oligonucleotide
ccgagcuacuucgagaauc

SEQ ID NO: 2603391 - RNA, 19 nt, Artificial Sequence
  Description of Artificial Sequence: Synthetic oligonucleotide
gcaccaaggucugccagag

SEQ ID NO: 2603392 - RNA, 19 nt, Artificial Sequence
  Description of Artificial Sequence: Synthetic oligonucleotide
caaagauaugcuugccuuu

SEQ ID NO: 2603393 - RNA, 19 nt, Artificial Sequence
  Description of Artificial Sequence: Synthetic oligonucleotide
ccauaccuggcauacaugu

SEQ ID NO: 2603394 - RNA, 19 nt, Artificial Sequence
  Description of Artificial Sequence: Synthetic oligonucleotide
cuaggagcacugcugugua

SEQ ID NO: 2603395 - RNA, 19 nt, Artificial Sequence
  Description of Artificial Sequence: Synthetic oligonucleotide
ccaguggcacuucagucuc

SEQ ID NO: 2603396 - RNA, 19 nt, Artificial Sequence
  Description of Artificial Sequence: Synthetic oligonucleotide
gcacggaagucaguaauuc

SEQ ID NO: 2603397 - RNA, 19 nt, Artificial Sequence
  Description of Artificial Sequence: Synthetic oligonucleotide
cggaagucaguaauuccug

SEQ ID NO: 2603398 - RNA, 19 nt, Artificial Sequence
  Description of Artificial Sequence: Synthetic oligonucleotide
gugugagaaaacacuuugu

SEQ ID NO: 2603399 - RNA, 19 nt, Artificial Sequence
  Description of Artificial Sequence: Synthetic oligonucleotide
cagcaaugaccaccaccug

SEQ ID NO: 2603400 - RNA, 19 nt, Artificial Sequence
  Description of Artificial Sequence: Synthetic oligonucleotide
gcugaccugcaauuuacua

SEQ ID NO: 2603401 - RNA, 19 nt, Artificial Sequence
  Description of Artificial Sequence: Synthetic oligonucleotide
gauccaggaccagacaguu

SEQ ID NO: 2603402 - RNA, 19 nt, Artificial Sequence
  Description of Artificial Sequence: Synthetic oligonucleotide
agcugaccugcaauuuacu

SEQ ID NO: 2603403 - RNA, 19 nt, Artificial Sequence
  Description of Artificial Sequence: Synthetic oligonucleotide
caccugcaauccagccucc

SEQ ID NO: 2603404 - RNA, 19 nt, Artificial Sequence
  Description of Artificial Sequence: Synthetic oligonucleotide
caguuuuauucagggagua

SEQ ID NO: 2603405 - RNA, 19 nt, Artificial Sequence
  Description of Artificial Sequence: Synthetic oligonucleotide
gccaguggcacuucagucu

SEQ ID NO: 2603406 - RNA, 19 nt, Artificial Sequence
  Description of Artificial Sequence: Synthetic oligonucleotide
aggagaccacugacugccg

SEQ ID NO: 2603407 - RNA, 19 nt, Artificial Sequence
  Description of Artificial Sequence: Synthetic oligonucleotide
ggucugucuaccugaugaa

SEQ ID NO: 2603408 - RNA, 19 nt, Artificial Sequence
  Description of Artificial Sequence: Synthetic oligonucleotide
gugggaaggcacggaaguc

SEQ ID NO: 2603409 - RNA, 19 nt, Artificial Sequence
  Description of Artificial Sequence: Synthetic oligonucleotide
acacaccaacacagccacg

SEQ ID NO: 2603410 - RNA, 19 nt, Artificial Sequence
  Description of Artificial Sequence: Synthetic oligonucleotide
gcuggaauuaaacguguuu

SEQ ID NO: 2603411 - RNA, 19 nt, Artificial Sequence
  Description of Artificial Sequence: Synthetic oligonucleotide
ugcugaggacugaguccaa

SEQ ID NO: 2603412 - RNA, 19 nt, Artificial Sequence
  Description of Artificial Sequence: Synthetic oligonucleotide
cugugugagaaaacacuuu

SEQ ID NO: 2603413 - RNA, 19 nt, Artificial Sequence
  Description of Artificial Sequence: Synthetic oligonucleotide
guagguuaugcuggucugu

SEQ ID NO: 2603414 - RNA, 19 nt, Artificial Sequence
  Description of Artificial Sequence: Synthetic oligonucleotide
ugccaggcuggcugccagu

SEQ ID NO: 2603415 - RNA, 19 nt, Artificial Sequence
  Description of Artificial Sequence: Synthetic oligonucleotide
ugccaggaugcugcauuuc

SEQ ID NO: 2603416 - RNA, 19 nt, Artificial Sequence
  Description of Artificial Sequence: Synthetic oligonucleotide
caccaaggucugccagagc

SEQ ID NO: 2603417 - RNA, 19 nt, Artificial Sequence
  Description of Artificial Sequence: Synthetic oligonucleotide
ccagugugggaaggcacgg

SEQ ID NO: 2603418 - RNA, 19 nt, Artificial Sequence
  Description of Artificial Sequence: Synthetic oligonucleotide
gccgccauaccuggcauac

SEQ ID NO: 2603419 - RNA, 19 nt, Artificial Sequence
  Description of Artificial Sequence: Synthetic oligonucleotide
gccagagcaagaagugaac

SEQ ID NO: 2603420 - RNA, 19 nt, Artificial Sequence
  Description of Artificial Sequence: Synthetic oligonucleotide
gguugccuuuugugccuag

SEQ ID NO: 2603421 - RNA, 19 nt, Artificial Sequence
  Description of Artificial Sequence: Synthetic oligonucleotide
accuggcauacaugugcuu

SEQ ID NO: 2603422 - RNA, 19 nt, Artificial Sequence
  Description of Artificial Sequence: Synthetic oligonucleotide
ccagagcaagaagugaaca

SEQ ID NO: 2603423 - RNA, 19 nt, Artificial Sequence
  Description of Artificial Sequence: Synthetic oligonucleotide
gcugccaguggcacuucag

SEQ ID NO: 2603424 - RNA, 19 nt, Artificial Sequence
  Description of Artificial Sequence: Synthetic oligonucleotide
ugccgccauaccuggcaua

SEQ ID NO: 2603425 - RNA, 19 nt, Artificial Sequence
  Description of Artificial Sequence: Synthetic oligonucleotide
cugagacaggguggagcug

SEQ ID NO: 2603426 - RNA, 19 nt, Artificial Sequence
  Description of Artificial Sequence: Synthetic oligonucleotide
cugccaguggcacuucagu

SEQ ID NO: 2603427 - RNA, 19 nt, Artificial Sequence
  Description of Artificial Sequence: Synthetic oligonucleotide
guguuugugugccgccaua

SEQ ID NO: 2603428 - RNA, 19 nt, Artificial Sequence
  Description of Artificial Sequence: Synthetic oligonucleotide
gaccacugacugccgugaa

SEQ ID NO: 2603429 - RNA, 19 nt, Artificial Sequence
  Description of Artificial Sequence: Synthetic oligonucleotide
ggaaaccaaacaguuuuau

SEQ ID NO: 2603430 - RNA, 19 nt, Artificial Sequence
  Description of Artificial Sequence: Synthetic oligonucleotide
gccaggaugcugcauuucu

SEQ ID NO: 2603431 - RNA, 19 nt, Artificial Sequence
  Description of Artificial Sequence: Synthetic oligonucleotide
ccaaccacagcaccaaggu

SEQ ID NO: 2603432 - RNA, 19 nt, Artificial Sequence
  Description of Artificial Sequence: Synthetic oligonucleotide
cagguugccuuuugugccu

SEQ ID NO: 2603433 - RNA, 19 nt, Artificial Sequence
  Description of Artificial Sequence: Synthetic oligonucleotide
ccuuuugugccuagguaua

SEQ ID NO: 2603434 - RNA, 19 nt, Artificial Sequence
  Description of Artificial Sequence: Synthetic oligonucleotide
gggaguacagcagguucuc

SEQ ID NO: 2603435 - RNA, 19 nt, Artificial Sequence
  Description of Artificial Sequence: Synthetic oligonucleotide
cuuugccuucuaggagcac

SEQ ID NO: 2603436 - RNA, 19 nt, Artificial Sequence
  Description of Artificial Sequence: Synthetic oligonucleotide
cugcuguguagguuaugcu

SEQ ID NO: 2603437 - RNA, 19 nt, Artificial Sequence
  Description of Artificial Sequence: Synthetic oligonucleotide
cuggcauacaugugcuuuu

SEQ ID NO: 2603438 - RNA, 19 nt, Artificial Sequence
  Description of Artificial Sequence: Synthetic oligonucleotide
gaccugcaauuuacuaugu

SEQ ID NO: 2603439 - RNA, 19 nt, Artificial Sequence
  Description of Artificial Sequence: Synthetic oligonucleotide
accugcaauccagccucca

SEQ ID NO: 2603440 - RNA, 19 nt, Artificial Sequence
  Description of Artificial Sequence: Synthetic oligonucleotide
gccauaccuggcauacaug

SEQ ID NO: 2603441 - RNA, 19 nt, Artificial Sequence
  Description of Artificial Sequence: Synthetic oligonucleotide
gcugaggacugaguccaac

SEQ ID NO: 2603442 - RNA, 19 nt, Artificial Sequence
  Description of Artificial Sequence: Synthetic oligonucleotide
ggggcugagacagggugga

SEQ ID NO: 2603443 - RNA, 19 nt, Artificial Sequence
  Description of Artificial Sequence: Synthetic oligonucleotide
ccaggagaauggugcugag

SEQ ID NO: 2603444 - RNA, 19 nt, Artificial Sequence
  Description of Artificial Sequence: Synthetic oligonucleotide
caaugaccaccaccugcaa

SEQ ID NO: 2603445 - RNA, 19 nt, Artificial Sequence
  Description of Artificial Sequence: Synthetic oligonucleotide
gcuuugccuucuaggagca

SEQ ID NO: 2603446 - RNA, 19 nt, Artificial Sequence
  Description of Artificial Sequence: Synthetic oligonucleotide
cugucagguugccuuuugu

SEQ ID NO: 2603447 - RNA, 19 nt, Artificial Sequence
  Description of Artificial Sequence: Synthetic oligonucleotide
cacugcuguguagguuaug

SEQ ID NO: 2603448 - RNA, 19 nt, Artificial Sequence
  Description of Artificial Sequence: Synthetic oligonucleotide
gccuagguauagccgagcu

SEQ ID NO: 2603449 - RNA, 19 nt, Artificial Sequence
  Description of Artificial Sequence: Synthetic oligonucleotide
cccaugcaacaccaggaga

SEQ ID NO: 2603450 - RNA, 19 nt, Artificial Sequence
  Description of Artificial Sequence: Synthetic oligonucleotide
caagaaccagggccagugu

SEQ ID NO: 2603451 - RNA, 19 nt, Artificial Sequence
  Description of Artificial Sequence: Synthetic oligonucleotide
ggcauacaugugcuuuugu

SEQ ID NO: 2603452 - RNA, 19 nt, Artificial Sequence
  Description of Artificial Sequence: Synthetic oligonucleotide
gccaggcuggcugccagug

SEQ ID NO: 2603453 - RNA, 19 nt, Artificial Sequence
  Description of Artificial Sequence: Synthetic oligonucleotide
gccuucuaggagcacugcu

SEQ ID NO: 2603454 - RNA, 19 nt, Artificial Sequence
  Description of Artificial Sequence: Synthetic oligonucleotide
ggaguacagcagguucuca

SEQ ID NO: 2603455 - RNA, 19 nt, Artificial Sequence
  Description of Artificial Sequence: Synthetic oligonucleotide
ccagggccagugugggaag

SEQ ID NO: 2603456 - RNA, 19 nt, Artificial Sequence
  Description of Artificial Sequence: Synthetic oligonucleotide
cagugugggaaggcacgga

SEQ ID NO: 2603457 - RNA, 19 nt, Artificial Sequence
  Description of Artificial Sequence: Synthetic oligonucleotide
ggagaccacugacugccgu

SEQ ID NO: 2603458 - RNA, 19 nt, Artificial Sequence
  Description of Artificial Sequence: Synthetic oligonucleotide
gcugcauuucuggggcuga

SEQ ID NO: 2603459 - RNA, 19 nt, Artificial Sequence
  Description of Artificial Sequence: Synthetic oligonucleotide
ccgugaaugccaggcuggc

SEQ ID NO: 2603460 - RNA, 19 nt, Artificial Sequence
  Description of Artificial Sequence: Synthetic oligonucleotide
agguugccuuuugugccua

SEQ ID NO: 2603461 - RNA, 19 nt, Artificial Sequence
  Description of Artificial Sequence: Synthetic oligonucleotide
ccagauccaggaccagaca

SEQ ID NO: 2603462 - RNA, 19 nt, Artificial Sequence
  Description of Artificial Sequence: Synthetic oligonucleotide
ccuagguauagccgagcua

SEQ ID NO: 2603463 - RNA, 19 nt, Artificial Sequence
  Description of Artificial Sequence: Synthetic oligonucleotide
cuacuucgagaauccccau

SEQ ID NO: 2603464 - RNA, 19 nt, Artificial Sequence
  Description of Artificial Sequence: Synthetic oligonucleotide
gugugccgccauaccuggc

SEQ ID NO: 2603465 - RNA, 19 nt, Artificial Sequence
  Description of Artificial Sequence: Synthetic oligonucleotide
caugugcuuuuguuuccuu

SEQ ID NO: 2603466 - RNA, 19 nt, Artificial Sequence
  Description of Artificial Sequence: Synthetic oligonucleotide
cuggcugccaguggcacuu

SEQ ID NO: 2603467 - RNA, 19 nt, Artificial Sequence
  Description of Artificial Sequence: Synthetic oligonucleotide
gggccagugugggaaggca

SEQ ID NO: 2603468 - RNA, 19 nt, Artificial Sequence
  Description of Artificial Sequence: Synthetic oligonucleotide
guggcacuucagucucugu

SEQ ID NO: 2603469 - RNA, 19 nt, Artificial Sequence
  Description of Artificial Sequence: Synthetic oligonucleotide
cugccgugaaugccaggcu

SEQ ID NO: 2603470 - RNA, 19 nt, Artificial Sequence
  Description of Artificial Sequence: Synthetic oligonucleotide
cuucagucucugucagguu

SEQ ID NO: 2603471 - RNA, 19 nt, Artificial Sequence
  Description of Artificial Sequence: Synthetic oligonucleotide
cugccaggaugcugcauuu

SEQ ID NO: 2603472 - RNA, 19 nt, Artificial Sequence
  Description of Artificial Sequence: Synthetic oligonucleotide
ccaggaccagacaguuaca

SEQ ID NO: 2603473 - RNA, 19 nt, Artificial Sequence
  Description of Artificial Sequence: Synthetic oligonucleotide
ggcacggaagucaguaauu

SEQ ID NO: 2603474 - RNA, 19 nt, Artificial Sequence
  Description of Artificial Sequence: Synthetic oligonucleotide
auccagccuccagcccaug

SEQ ID NO: 2603475 - RNA, 19 nt, Artificial Sequence
  Description of Artificial Sequence: Synthetic oligonucleotide
gugccgccauaccuggcau

SEQ ID NO: 2603476 - RNA, 19 nt, Artificial Sequence
  Description of Artificial Sequence: Synthetic oligonucleotide
ccuggcauacaugugcuuu

SEQ ID NO: 2603477 - RNA, 19 nt, Artificial Sequence
  Description of Artificial Sequence: Synthetic oligonucleotide
uggcugccaguggcacuuc

SEQ ID NO: 2603478 - RNA, 19 nt, Artificial Sequence
  Description of Artificial Sequence: Synthetic oligonucleotide
cagccacguccuccugcca

SEQ ID NO: 2603479 - RNA, 19 nt, Artificial Sequence
  Description of Artificial Sequence: Synthetic oligonucleotide
cccuagcugaccugcaauu

SEQ ID NO: 2603480 - RNA, 19 nt, Artificial Sequence
  Description of Artificial Sequence: Synthetic oligonucleotide
ccuagcugaccugcaauuu

SEQ ID NO: 2603481 - RNA, 19 nt, Artificial Sequence
  Description of Artificial Sequence: Synthetic oligonucleotide
cacguccuccugccaggau

SEQ ID NO: 2603482 - RNA, 19 nt, Artificial Sequence
  Description of Artificial Sequence: Synthetic oligonucleotide
ccacguccuccugccagga

SEQ ID NO: 2603483 - RNA, 19 nt, Artificial Sequence
  Description of Artificial Sequence: Synthetic oligonucleotide
gccgagcuacuucgagaau

SEQ ID NO: 2603484 - RNA, 19 nt, Artificial Sequence
  Description of Artificial Sequence: Synthetic oligonucleotide
gcacugcuguguagguuau

SEQ ID NO: 2603485 - RNA, 19 nt, Artificial Sequence
  Description of Artificial Sequence: Synthetic oligonucleotide
cguguuugugugccgccau

SEQ ID NO: 2603486 - RNA, 19 nt, Artificial Sequence
  Description of Artificial Sequence: Synthetic oligonucleotide
agagguaagagucucaucc

SEQ ID NO: 2603487 - RNA, 19 nt, Artificial Sequence
  Description of Artificial Sequence: Synthetic oligonucleotide
aaugagucgaauaaggagc

SEQ ID NO: 2603488 - RNA, 19 nt, Artificial Sequence
  Description of Artificial Sequence: Synthetic oligonucleotide
acagaaagcaucuucaacg

SEQ ID NO: 2603489 - RNA, 19 nt, Artificial Sequence
  Description of Artificial Sequence: Synthetic oligonucleotide
aguuaaaugaauuggcuuc

SEQ ID NO: 2603490 - RNA, 19 nt, Artificial Sequence
  Description of Artificial Sequence: Synthetic oligonucleotide
aaaugagucgaauaaggag

SEQ ID NO: 2603491 - RNA, 19 nt, Artificial Sequence
  Description of Artificial Sequence: Synthetic oligonucleotide
ucagugaggaguuagauga

SEQ ID NO: 2603492 - RNA, 19 nt, Artificial Sequence
  Description of Artificial Sequence: Synthetic oligonucleotide
uacaguuccccuaagaugc

SEQ ID NO: 2603493 - RNA, 19 nt, Artificial Sequence
  Description of Artificial Sequence: Synthetic oligonucleotide
ucgaauaaggagcauagag

SEQ ID NO: 2603494 - RNA, 19 nt, Artificial Sequence
  Description of Artificial Sequence: Synthetic oligonucleotide
uuuacagaaagcaucuuca

SEQ ID NO: 2603495 - RNA, 19 nt, Artificial Sequence
  Description of Artificial Sequence: Synthetic oligonucleotide
uuagaugagcagauguucg

SEQ ID NO: 2603496 - RNA, 19 nt, Artificial Sequence
  Description of Artificial Sequence: Synthetic oligonucleotide
aagaccuugggugauuucc

SEQ ID NO: 2603497 - RNA, 19 nt, Artificial Sequence
  Description of Artificial Sequence: Synthetic oligonucleotide
aaaggaaaacacuggaaca

SEQ ID NO: 2603498 - RNA, 19 nt, Artificial Sequence
  Description of Artificial Sequence: Synthetic oligonucleotide
augaauuggcuuccgaagc

SEQ ID NO: 2603499 - RNA, 19 nt, Artificial Sequence
  Description of Artificial Sequence: Synthetic oligonucleotide
aaaccaccgaguuaaauga

SEQ ID NO: 2603500 - RNA, 19 nt, Artificial Sequence
  Description of Artificial Sequence: Synthetic oligonucleotide
gaagcagucuguuaggagc

SEQ ID NO: 2603501 - RNA, 19 nt, Artificial Sequence
  Description of Artificial Sequence: Synthetic oligonucleotide
uggagaaauccuuuggagg

SEQ ID NO: 2603502 - RNA, 19 nt, Artificial Sequence
  Description of Artificial Sequence: Synthetic oligonucleotide
ugucucaagaccuugggug

SEQ ID NO: 2603503 - RNA, 19 nt, Artificial Sequence
  Description of Artificial Sequence: Synthetic oligonucleotide
gaaagcaucuucaacgggg

SEQ ID NO: 2603504 - RNA, 19 nt, Artificial Sequence
  Description of Artificial Sequence: Synthetic oligonucleotide
ucuguuaggagcagcagcc

SEQ ID NO: 2603505 - RNA, 19 nt, Artificial Sequence
  Description of Artificial Sequence: Synthetic oligonucleotide
uagaaugccaggaaagccc

SEQ ID NO: 2603506 - RNA, 19 nt, Artificial Sequence
  Description of Artificial Sequence: Synthetic oligonucleotide
ucauuguauggacuggccg

SEQ ID NO: 2603507 - RNA, 19 nt, Artificial Sequence
  Description of Artificial Sequence: Synthetic oligonucleotide
aaugggacaaaggaaaaca

SEQ ID NO: 2603508 - RNA, 19 nt, Artificial Sequence
  Description of Artificial Sequence: Synthetic oligonucleotide
aauccuuuggaggacuucg

SEQ ID NO: 2603509 - RNA, 19 nt, Artificial Sequence
  Description of Artificial Sequence: Synthetic oligonucleotide
aagaaguauccuaagaaug

SEQ ID NO: 2603510 - RNA, 19 nt, Artificial Sequence
  Description of Artificial Sequence: Synthetic oligonucleotide
aaaugaauuggcuuccgaa

SEQ ID NO: 2603511 - RNA, 19 nt, Artificial Sequence
  Description of Artificial Sequence: Synthetic oligonucleotide
cauuguauggacuggccgg

SEQ ID NO: 2603512 - RNA, 19 nt, Artificial Sequence
  Description of Artificial Sequence: Synthetic oligonucleotide
agaaguauccuaagaaugg

SEQ ID NO: 2603513 - RNA, 19 nt, Artificial Sequence
  Description of Artificial Sequence: Synthetic oligonucleotide
aacgggguaaucugugggg

SEQ ID NO: 2603514 - RNA, 19 nt, Artificial Sequence
  Description of Artificial Sequence: Synthetic oligonucleotide
aguauccuaagaaugggac

SEQ ID NO: 2603515 - RNA, 19 nt, Artificial Sequence
  Description of Artificial Sequence: Synthetic oligonucleotide
caugggagagguaagaguc

SEQ ID NO: 2603516 - RNA, 19 nt, Artificial Sequence
  Description of Artificial Sequence: Synthetic oligonucleotide
aagacucccaccuccaaga

SEQ ID NO: 2603517 - RNA, 19 nt, Artificial Sequence
  Description of Artificial Sequence: Synthetic oligonucleotide
acugcgaagaagcagucug

SEQ ID NO: 2603518 - RNA, 19 nt, Artificial Sequence
  Description of Artificial Sequence: Synthetic oligonucleotide
aaucuguggggcuucguug

SEQ ID NO: 2603519 - RNA, 19 nt, Artificial Sequence
  Description of Artificial Sequence: Synthetic oligonucleotide
aggagcauagagugugucc

SEQ ID NO: 2603520 - RNA, 19 nt, Artificial Sequence
  Description of Artificial Sequence: Synthetic oligonucleotide
accgaguuaaaugaauugg

SEQ ID NO: 2603521 - RNA, 19 nt, Artificial Sequence
  Description of Artificial Sequence: Synthetic oligonucleotide
ggugauuuccucuugggag

SEQ ID NO: 2603522 - RNA, 19 nt, Artificial Sequence
  Description of Artificial Sequence: Synthetic oligonucleotide
ucuucaacgggguaaucug

SEQ ID NO: 2603523 - RNA, 19 nt, Artificial Sequence
  Description of Artificial Sequence: Synthetic oligonucleotide
gaagaagcagucuguuagg

SEQ ID NO: 2603524 - RNA, 19 nt, Artificial Sequence
  Description of Artificial Sequence: Synthetic oligonucleotide
auaaggagcauagagugug

SEQ ID NO: 2603525 - RNA, 19 nt, Artificial Sequence
  Description of Artificial Sequence: Synthetic oligonucleotide
auggagaaauccuuuggag

SEQ ID NO: 2603526 - RNA, 19 nt, Artificial Sequence
  Description of Artificial Sequence: Synthetic oligonucleotide
gaaguauccuaagaauggg

SEQ ID NO: 2603527 - RNA, 19 nt, Artificial Sequence
  Description of Artificial Sequence: Synthetic oligonucleotide
cagaaagcaucuucaacgg

SEQ ID NO: 2603528 - RNA, 19 nt, Artificial Sequence
  Description of Artificial Sequence: Synthetic oligonucleotide
uucacaucugcagagcucc

SEQ ID NO: 2603529 - RNA, 19 nt, Artificial Sequence
  Description of Artificial Sequence: Synthetic oligonucleotide
uccaagaaguauccuaaga

SEQ ID NO: 2603530 - RNA, 19 nt, Artificial Sequence
  Description of Artificial Sequence: Synthetic oligonucleotide
gaagacguagaaugccagg

SEQ ID NO: 2603531 - RNA, 19 nt, Artificial Sequence
  Description of Artificial Sequence: Synthetic oligonucleotide
aacacugcgaagaagcagu

SEQ ID NO: 2603532 - RNA, 19 nt, Artificial Sequence
  Description of Artificial Sequence: Synthetic oligonucleotide
uauccuaagaaugggacaa

SEQ ID NO: 2603533 - RNA, 19 nt, Artificial Sequence
  Description of Artificial Sequence: Synthetic oligonucleotide
uacaccguagcucugcuuc

SEQ ID NO: 2603534 - RNA, 19 nt, Artificial Sequence
  Description of Artificial Sequence: Synthetic oligonucleotide
uacagaaagcaucuucaac

SEQ ID NO: 2603535 - RNA, 19 nt, Artificial Sequence
  Description of Artificial Sequence: Synthetic oligonucleotide
uucgcucccauucauggga

SEQ ID NO: 2603536 - RNA, 19 nt, Artificial Sequence
  Description of Artificial Sequence: Synthetic oligonucleotide
uugggugauuuccucuugg

SEQ ID NO: 2603537 - RNA, 19 nt, Artificial Sequence
  Description of Artificial Sequence: Synthetic oligonucleotide
agucauuguauggacuggc

SEQ ID NO: 2603538 - RNA, 19 nt, Artificial Sequence
  Description of Artificial Sequence: Synthetic oligonucleotide
ugaggaguuagaugagcag

SEQ ID NO: 2603539 - RNA, 19 nt, Artificial Sequence
  Description of Artificial Sequence: Synthetic oligonucleotide
agugaggaguuagaugagc

SEQ ID NO: 2603540 - RNA, 19 nt, Artificial Sequence
  Description of Artificial Sequence: Synthetic oligonucleotide
uguuaggagcagcagcccc

SEQ ID NO: 2603541 - RNA, 19 nt, Artificial Sequence
  Description of Artificial Sequence: Synthetic oligonucleotide
aagacguagaaugccagga

SEQ ID NO: 2603542 - RNA, 19 nt, Artificial Sequence
  Description of Artificial Sequence: Synthetic oligonucleotide
guacaguuccccuaagaug

SEQ ID NO: 2603543 - RNA, 19 nt, Artificial Sequence
  Description of Artificial Sequence: Synthetic oligonucleotide
uggaaaugagucgaauaag

SEQ ID NO: 2603544 - RNA, 19 nt, Artificial Sequence
  Description of Artificial Sequence: Synthetic oligonucleotide
uaaaugaauuggcuuccga

SEQ ID NO: 2603545 - RNA, 19 nt, Artificial Sequence
  Description of Artificial Sequence: Synthetic oligonucleotide
uuaaaugaauuggcuuccg

SEQ ID NO: 2603546 - RNA, 19 nt, Artificial Sequence
  Description of Artificial Sequence: Synthetic oligonucleotide
guuaaaugaauuggcuucc

SEQ ID NO: 2603547 - RNA, 19 nt, Artificial Sequence
  Description of Artificial Sequence: Synthetic oligonucleotide
ucaacgggguaaucugugg

SEQ ID NO: 2603548 - RNA, 19 nt, Artificial Sequence
  Description of Artificial Sequence: Synthetic oligonucleotide
uucaacgggguaaucugug

SEQ ID NO: 2603549 - RNA, 19 nt, Artificial Sequence
  Description of Artificial Sequence: Synthetic oligonucleotide
uccgaagcccaacaaguca

SEQ ID NO: 2603550 - RNA, 19 nt, Artificial Sequence
  Description of Artificial Sequence: Synthetic oligonucleotide
ugucccguucuucucaaca

SEQ ID NO: 2603551 - RNA, 19 nt, Artificial Sequence
  Description of Artificial Sequence: Synthetic oligonucleotide
agagaaucgugucauccca

SEQ ID NO: 2603552 - RNA, 19 nt, Artificial Sequence
  Description of Artificial Sequence: Synthetic oligonucleotide
agaaacucggggaagacgu

SEQ ID NO: 2603553 - RNA, 19 nt, Artificial Sequence
  Description of Artificial Sequence: Synthetic oligonucleotide
guaagagucucauccugag

SEQ ID NO: 2603554 - RNA, 19 nt, Artificial Sequence
  Description of Artificial Sequence: Synthetic oligonucleotide
aaggcugugcagagaaucg

SEQ ID NO: 2603555 - RNA, 19 nt, Artificial Sequence
  Description of Artificial Sequence: Synthetic oligonucleotide
uccugaguugcccaagacu

SEQ ID NO: 2603556 - RNA, 19 nt, Artificial Sequence
  Description of Artificial Sequence: Synthetic oligonucleotide
uccccuaagaugcucggga

SEQ ID NO: 2603557 - RNA, 19 nt, Artificial Sequence
  Description of Artificial Sequence: Synthetic oligonucleotide
uagaugagcagauguucgc

SEQ ID NO: 2603558 - RNA, 19 nt, Artificial Sequence
  Description of Artificial Sequence: Synthetic oligonucleotide
agucgaauaaggagcauag

SEQ ID NO: 2603559 - RNA, 19 nt, Artificial Sequence
  Description of Artificial Sequence: Synthetic oligonucleotide
gaaaacacuggaacacugc

SEQ ID NO: 2603560 - RNA, 19 nt, Artificial Sequence
  Description of Artificial Sequence: Synthetic oligonucleotide
acaguuagcuguccccuuc

SEQ ID NO: 2603561 - RNA, 19 nt, Artificial Sequence
  Description of Artificial Sequence: Synthetic oligonucleotide
uucgggagcagcagaaacu

SEQ ID NO: 2603562 - RNA, 19 nt, Artificial Sequence
  Description of Artificial Sequence: Synthetic oligonucleotide
aaacucggggaagacguag

SEQ ID NO: 2603563 - RNA, 19 nt, Artificial Sequence
  Description of Artificial Sequence: Synthetic oligonucleotide
ugggugauuuccucuuggg

SEQ ID NO: 2603564 - RNA, 19 nt, Artificial Sequence
  Description of Artificial Sequence: Synthetic oligonucleotide
caugagcugggguuuacag

SEQ ID NO: 2603565 - RNA, 19 nt, Artificial Sequence
  Description of Artificial Sequence: Synthetic oligonucleotide
gaaaugagucgaauaagga

SEQ ID NO: 2603566 - RNA, 19 nt, Artificial Sequence
  Description of Artificial Sequence: Synthetic oligonucleotide
ggagaaauccuuuggagga

SEQ ID NO: 2603567 - RNA, 19 nt, Artificial Sequence
  Description of Artificial Sequence: Synthetic oligonucleotide
cuucucaacaguuagcugu

SEQ ID NO: 2603568 - RNA, 19 nt, Artificial Sequence
  Description of Artificial Sequence: Synthetic oligonucleotide
aaauccuuuggaggacuuc

SEQ ID NO: 2603569 - RNA, 19 nt, Artificial Sequence
  Description of Artificial Sequence: Synthetic oligonucleotide
cagagaaucgugucauccc

SEQ ID NO: 2603570 - RNA, 19 nt, Artificial Sequence
  Description of Artificial Sequence: Synthetic oligonucleotide
uccugacuggaccugcugc

SEQ ID NO: 2603571 - RNA, 19 nt, Artificial Sequence
  Description of Artificial Sequence: Synthetic oligonucleotide
uguucucuacaccguagcu

SEQ ID NO: 2603572 - RNA, 19 nt, Artificial Sequence
  Description of Artificial Sequence: Synthetic oligonucleotide
cagaaggacagcagugugc

SEQ ID NO: 2603573 - RNA, 19 nt, Artificial Sequence
  Description of Artificial Sequence: Synthetic oligonucleotide
auuguauggacuggccggg

SEQ ID NO: 2603574 - RNA, 19 nt, Artificial Sequence
  Description of Artificial Sequence: Synthetic oligonucleotide
guagaaugccaggaaagcc

SEQ ID NO: 2603575 - RNA, 19 nt, Artificial Sequence
  Description of Artificial Sequence: Synthetic oligonucleotide
augcucgggauucaguuca

SEQ ID NO: 2603576 - RNA, 19 nt, Artificial Sequence
  Description of Artificial Sequence: Synthetic oligonucleotide
agguaagagucucauccug

SEQ ID NO: 2603577 - RNA, 19 nt, Artificial Sequence
  Description of Artificial Sequence: Synthetic oligonucleotide
ggauggagaaauccuuugg

SEQ ID NO: 2603578 - RNA, 19 nt, Artificial Sequence
  Description of Artificial Sequence: Synthetic oligonucleotide
aagcccagccguuggcaac

SEQ ID NO: 2603579 - RNA, 19 nt, Artificial Sequence
  Description of Artificial Sequence: Synthetic oligonucleotide
guuagcuguccccuucccg

SEQ ID NO: 2603580 - RNA, 19 nt, Artificial Sequence
  Description of Artificial Sequence: Synthetic oligonucleotide
aaggagcauagaguguguc

SEQ ID NO: 2603581 - RNA, 19 nt, Artificial Sequence
  Description of Artificial Sequence: Synthetic oligonucleotide
guuagaugagcagauguuc

SEQ ID NO: 2603582 - RNA, 19 nt, Artificial Sequence
  Description of Artificial Sequence: Synthetic oligonucleotide
uguauggacuggccggggc

SEQ ID NO: 2603583 - RNA, 19 nt, Artificial Sequence
  Description of Artificial Sequence: Synthetic oligonucleotide
auagagugugucccuuguc

SEQ ID NO: 2603584 - RNA, 19 nt, Artificial Sequence
  Description of Artificial Sequence: Synthetic oligonucleotide
caacgggguaaucuguggg

SEQ ID NO: 2603585 - RNA, 19 nt, Artificial Sequence
  Description of Artificial Sequence: Synthetic oligonucleotide
acucccaccuccaagaagu

SEQ ID NO: 2603586 - RNA, 19 nt, Artificial Sequence
  Description of Artificial Sequence: Synthetic oligonucleotide
uugucucaagaccuugggu

SEQ ID NO: 2603587 - RNA, 19 nt, Artificial Sequence
  Description of Artificial Sequence: Synthetic oligonucleotide
gaacacugcgaagaagcag

SEQ ID NO: 2603588 - RNA, 19 nt, Artificial Sequence
  Description of Artificial Sequence: Synthetic oligonucleotide
aaagcaucuucaacggggu

SEQ ID NO: 2603589 - RNA, 19 nt, Artificial Sequence
  Description of Artificial Sequence: Synthetic oligonucleotide
caccgaguuaaaugaauug

SEQ ID NO: 2603590 - RNA, 19 nt, Artificial Sequence
  Description of Artificial Sequence: Synthetic oligonucleotide
uuuggaggacuucgguucu

SEQ ID NO: 2603591 - RNA, 19 nt, Artificial Sequence
  Description of Artificial Sequence: Synthetic oligonucleotide
aaguauccuaagaauggga

SEQ ID NO: 2603592 - RNA, 19 nt, Artificial Sequence
  Description of Artificial Sequence: Synthetic oligonucleotide
uagucauuguauggacugg

SEQ ID NO: 2603593 - RNA, 19 nt, Artificial Sequence
  Description of Artificial Sequence: Synthetic oligonucleotide
gaggaguuagaugagcaga

SEQ ID NO: 2603594 - RNA, 19 nt, Artificial Sequence
  Description of Artificial Sequence: Synthetic oligonucleotide
ugaguugcccaagacuccc

SEQ ID NO: 2603595 - RNA, 19 nt, Artificial Sequence
  Description of Artificial Sequence: Synthetic oligonucleotide
gaugagcagauguucgcuc

SEQ ID NO: 2603596 - RNA, 19 nt, Artificial Sequence
  Description of Artificial Sequence: Synthetic oligonucleotide
ggcccuguucucuacaccg

SEQ ID NO: 2603597 - RNA, 19 nt, Artificial Sequence
  Description of Artificial Sequence: Synthetic oligonucleotide
agagucucauccugaguug

SEQ ID NO: 2603598 - RNA, 19 nt, Artificial Sequence
  Description of Artificial Sequence: Synthetic oligonucleotide
ggagcaagcucucauguac

SEQ ID NO: 2603599 - RNA, 19 nt, Artificial Sequence
  Description of Artificial Sequence: Synthetic oligonucleotide
ucguagucauuguauggac

SEQ ID NO: 2603600 - RNA, 19 nt, Artificial Sequence
  Description of Artificial Sequence: Synthetic oligonucleotide
ugagcagauguucgcuccc

SEQ ID NO: 2603601 - RNA, 19 nt, Artificial Sequence
  Description of Artificial Sequence: Synthetic oligonucleotide
agaugcucgggauucaguu

SEQ ID NO: 2603602 - RNA, 19 nt, Artificial Sequence
  Description of Artificial Sequence: Synthetic oligonucleotide
uaaucuguggggcuucguu

SEQ ID NO: 2603603 - RNA, 19 nt, Artificial Sequence
  Description of Artificial Sequence: Synthetic oligonucleotide
cagccguuggcaaccaagg

SEQ ID NO: 2603604 - RNA, 19 nt, Artificial Sequence
  Description of Artificial Sequence: Synthetic oligonucleotide
acgggguaaucuguggggc

SEQ ID NO: 2603605 - RNA, 19 nt, Artificial Sequence
  Description of Artificial Sequence: Synthetic oligonucleotide
cauucaugggagagguaag

SEQ ID NO: 2603606 - RNA, 19 nt, Artificial Sequence
  Description of Artificial Sequence: Synthetic oligonucleotide
ugggguuuacagaaagcau

SEQ ID NO: 2603607 - RNA, 19 nt, Artificial Sequence
  Description of Artificial Sequence: Synthetic oligonucleotide
guauccuaagaaugggaca

SEQ ID NO: 2603608 - RNA, 19 nt, Artificial Sequence
  Description of Artificial Sequence: Synthetic oligonucleotide
caagucagugaggaguuag

SEQ ID NO: 2603609 - RNA, 19 nt, Artificial Sequence
  Description of Artificial Sequence: Synthetic oligonucleotide
gaaugggacaaaggaaaac

SEQ ID NO: 2603610 - RNA, 19 nt, Artificial Sequence
  Description of Artificial Sequence: Synthetic oligonucleotide
ccuaagaaugggacaaagg

SEQ ID NO: 2603611 - RNA, 19 nt, Artificial Sequence
  Description of Artificial Sequence: Synthetic oligonucleotide
ucgggauucaguucacauc

SEQ ID NO: 2603612 - RNA, 19 nt, Artificial Sequence
  Description of Artificial Sequence: Synthetic oligonucleotide
acguagaaugccaggaaag

SEQ ID NO: 2603613 - RNA, 19 nt, Artificial Sequence
  Description of Artificial Sequence: Synthetic oligonucleotide
gacguagaaugccaggaaa

SEQ ID NO: 2603614 - RNA, 19 nt, Artificial Sequence
  Description of Artificial Sequence: Synthetic oligonucleotide
ucaugaaaccaccgaguua

SEQ ID NO: 2603615 - RNA, 19 nt, Artificial Sequence
  Description of Artificial Sequence: Synthetic oligonucleotide
aaacacuggaacacugcga

SEQ ID NO: 2603616 - RNA, 19 nt, Artificial Sequence
  Description of Artificial Sequence: Synthetic oligonucleotide
auccugaguugcccaagac

SEQ ID NO: 2603617 - RNA, 19 nt, Artificial Sequence
  Description of Artificial Sequence: Synthetic oligonucleotide
ccgaguuaaaugaauuggc

SEQ ID NO: 2603618 - RNA, 19 nt, Artificial Sequence
  Description of Artificial Sequence: Synthetic oligonucleotide
ggagcauagaguguguccc

SEQ ID NO: 2603619 - RNA, 19 nt, Artificial Sequence
  Description of Artificial Sequence: Synthetic oligonucleotide
uaagaugcucgggauucag

SEQ ID NO: 2603620 - RNA, 19 nt, Artificial Sequence
  Description of Artificial Sequence: Synthetic oligonucleotide
caagacucccaccuccaag

SEQ ID NO: 2603621 - RNA, 19 nt, Artificial Sequence
  Description of Artificial Sequence: Synthetic oligonucleotide
cuucgggagcagcagaaac

SEQ ID NO: 2603622 - RNA, 19 nt, Artificial Sequence
  Description of Artificial Sequence: Synthetic oligonucleotide
ggacaaaggaaaacacugg

SEQ ID NO: 2603623 - RNA, 19 nt, Artificial Sequence
  Description of Artificial Sequence: Synthetic oligonucleotide
ucccucguagucauuguau

SEQ ID NO: 2603624 - RNA, 19 nt, Artificial Sequence
  Description of Artificial Sequence: Synthetic oligonucleotide
ucccauucaugggagaggu

SEQ ID NO: 2603625 - RNA, 19 nt, Artificial Sequence
  Description of Artificial Sequence: Synthetic oligonucleotide
auccucaugaaaccaccga

SEQ ID NO: 2603626 - RNA, 19 nt, Artificial Sequence
  Description of Artificial Sequence: Synthetic oligonucleotide
aaagcccagccguuggcaa

SEQ ID NO: 2603627 - RNA, 19 nt, Artificial Sequence
  Description of Artificial Sequence: Synthetic oligonucleotide
ggauucaguucacaucugc

SEQ ID NO: 2603628 - RNA, 19 nt, Artificial Sequence
  Description of Artificial Sequence: Synthetic oligonucleotide
gacagcagugugcugggca

SEQ ID NO: 2603629 - RNA, 19 nt, Artificial Sequence
  Description of Artificial Sequence: Synthetic oligonucleotide
aacaagucagugaggaguu

SEQ ID NO: 2603630 - RNA, 19 nt, Artificial Sequence
  Description of Artificial Sequence: Synthetic oligonucleotide
gaguuaaaugaauuggcuu

SEQ ID NO: 2603631 - RNA, 19 nt, Artificial Sequence
  Description of Artificial Sequence: Synthetic oligonucleotide
agauguucgcucccauuca

SEQ ID NO: 2603632 - RNA, 19 nt, Artificial Sequence
  Description of Artificial Sequence: Synthetic oligonucleotide
gaugcucgggauucaguuc

SEQ ID NO: 2603633 - RNA, 19 nt, Artificial Sequence
  Description of Artificial Sequence: Synthetic oligonucleotide
cagaaacucggggaagacg

SEQ ID NO: 2603634 - RNA, 19 nt, Artificial Sequence
  Description of Artificial Sequence: Synthetic oligonucleotide
cugaguugcccaagacucc

SEQ ID NO: 2603635 - RNA, 19 nt, Artificial Sequence
  Description of Artificial Sequence: Synthetic oligonucleotide
aggcccuguucucuacacc

SEQ ID NO: 2603636 - RNA, 19 nt, Artificial Sequence
  Description of Artificial Sequence: Synthetic oligonucleotide
uaaggagcauagagugugu

SEQ ID NO: 2603637 - RNA, 19 nt, Artificial Sequence
  Description of Artificial Sequence: Synthetic oligonucleotide
ucuacaccguagcucugcu

SEQ ID NO: 2603638 - RNA, 19 nt, Artificial Sequence
  Description of Artificial Sequence: Synthetic oligonucleotide
uuccgaagcccaacaaguc

SEQ ID NO: 2603639 - RNA, 19 nt, Artificial Sequence
  Description of Artificial Sequence: Synthetic oligonucleotide
guauggacuggccggggcc

SEQ ID NO: 2603640 - RNA, 19 nt, Artificial Sequence
  Description of Artificial Sequence: Synthetic oligonucleotide
ucgggauggagaaauccuu

SEQ ID NO: 2603641 - RNA, 19 nt, Artificial Sequence
  Description of Artificial Sequence: Synthetic oligonucleotide
guucgcucccauucauggg

SEQ ID NO: 2603642 - RNA, 19 nt, Artificial Sequence
  Description of Artificial Sequence: Synthetic oligonucleotide
gagucucauccugaguugc

SEQ ID NO: 2603643 - RNA, 19 nt, Artificial Sequence
  Description of Artificial Sequence: Synthetic oligonucleotide
aagcucucauguacaguuc

SEQ ID NO: 2603644 - RNA, 19 nt, Artificial Sequence
  Description of Artificial Sequence: Synthetic oligonucleotide
guuccccuaagaugcucgg

SEQ ID NO: 2603645 - RNA, 19 nt, Artificial Sequence
  Description of Artificial Sequence: Synthetic oligonucleotide
ugcuucgggagcagcagaa

SEQ ID NO: 2603646 - RNA, 19 nt, Artificial Sequence
  Description of Artificial Sequence: Synthetic oligonucleotide
aggaaaacacuggaacacu

SEQ ID NO: 2603647 - RNA, 19 nt, Artificial Sequence
  Description of Artificial Sequence: Synthetic oligonucleotide
agaaauccuuuggaggacu

SEQ ID NO: 2603648 - RNA, 19 nt, Artificial Sequence
  Description of Artificial Sequence: Synthetic oligonucleotide
caagaaguauccuaagaau

SEQ ID NO: 2603649 - RNA, 19 nt, Artificial Sequence
  Description of Artificial Sequence: Synthetic oligonucleotide
gagugugucccuugucuca

SEQ ID NO: 2603650 - RNA, 19 nt, Artificial Sequence
  Description of Artificial Sequence: Synthetic oligonucleotide
ucgggagcagcagaaacuc

SEQ ID NO: 2603651 - RNA, 19 nt, Artificial Sequence
  Description of Artificial Sequence: Synthetic oligonucleotide
agaugagcagauguucgcu

SEQ ID NO: 2603652 - RNA, 19 nt, Artificial Sequence
  Description of Artificial Sequence: Synthetic oligonucleotide
ucgcucccauucaugggag

SEQ ID NO: 2603653 - RNA, 19 nt, Artificial Sequence
  Description of Artificial Sequence: Synthetic oligonucleotide
agacguagaaugccaggaa

SEQ ID NO: 2603654 - RNA, 19 nt, Artificial Sequence
  Description of Artificial Sequence: Synthetic oligonucleotide
accuugggugauuuccucu

SEQ ID NO: 2603655 - RNA, 19 nt, Artificial Sequence
  Description of Artificial Sequence: Synthetic oligonucleotide
uguggggcuucguugcuuc

SEQ ID NO: 2603656 - RNA, 19 nt, Artificial Sequence
  Description of Artificial Sequence: Synthetic oligonucleotide
gggguuuacagaaagcauc

SEQ ID NO: 2603657 - RNA, 19 nt, Artificial Sequence
  Description of Artificial Sequence: Synthetic oligonucleotide
cucguagucauuguaugga

SEQ ID NO: 2603658 - RNA, 19 nt, Artificial Sequence
  Description of Artificial Sequence: Synthetic oligonucleotide
aagucagugaggaguuaga

SEQ ID NO: 2603659 - RNA, 19 nt, Artificial Sequence
  Description of Artificial Sequence: Synthetic oligonucleotide
gagaaauccuuuggaggac

SEQ ID NO: 2603660 - RNA, 19 nt, Artificial Sequence
  Description of Artificial Sequence: Synthetic oligonucleotide
agaaugccaggaaagccca

SEQ ID NO: 2603661 - RNA, 19 nt, Artificial Sequence
  Description of Artificial Sequence: Synthetic oligonucleotide
guugcuucgggagcagcag

SEQ ID NO: 2603662 - RNA, 19 nt, Artificial Sequence
  Description of Artificial Sequence: Synthetic oligonucleotide
uugcuucgggagcagcaga

SEQ ID NO: 2603663 - RNA, 19 nt, Artificial Sequence
  Description of Artificial Sequence: Synthetic oligonucleotide
ucauccugaguugcccaag

SEQ ID NO: 2603664 - RNA, 19 nt, Artificial Sequence
  Description of Artificial Sequence: Synthetic oligonucleotide
gcagagaaucgugucaucc

SEQ ID NO: 2603665 - RNA, 19 nt, Artificial Sequence
  Description of Artificial Sequence: Synthetic oligonucleotide
gucauuguauggacuggcc

SEQ ID NO: 2603666 - RNA, 19 nt, Artificial Sequence
  Description of Artificial Sequence: Synthetic oligonucleotide
aguuagaugagcagauguu

SEQ ID NO: 2603667 - RNA, 19 nt, Artificial Sequence
  Description of Artificial Sequence: Synthetic oligonucleotide
ccucguagucauuguaugg

SEQ ID NO: 2603668 - RNA, 19 nt, Artificial Sequence
  Description of Artificial Sequence: Synthetic oligonucleotide
ggaaaacacuggaacacug

SEQ ID NO: 2603669 - RNA, 19 nt, Artificial Sequence
  Description of Artificial Sequence: Synthetic oligonucleotide
caacaagucagugaggagu

SEQ ID NO: 2603670 - RNA, 19 nt, Artificial Sequence
  Description of Artificial Sequence: Synthetic oligonucleotide
cagucuguuaggagcagca

SEQ ID NO: 2603671 - RNA, 19 nt, Artificial Sequence
  Description of Artificial Sequence: Synthetic oligonucleotide
cucuacaccguagcucugc

SEQ ID NO: 2603672 - RNA, 19 nt, Artificial Sequence
  Description of Artificial Sequence: Synthetic oligonucleotide
caguuagcuguccccuucc

SEQ ID NO: 2603673 - RNA, 19 nt, Artificial Sequence
  Description of Artificial Sequence: Synthetic oligonucleotide
acacuggaacacugcgaag

SEQ ID NO: 2603674 - RNA, 19 nt, Artificial Sequence
  Description of Artificial Sequence: Synthetic oligonucleotide
ccaagaaguauccuaagaa

SEQ ID NO: 2603675 - RNA, 19 nt, Artificial Sequence
  Description of Artificial Sequence: Synthetic oligonucleotide
cagggagcaagcucucaug

SEQ ID NO: 2603676 - RNA, 19 nt, Artificial Sequence
  Description of Artificial Sequence: Synthetic oligonucleotide
gagagguaagagucucauc

SEQ ID NO: 2603677 - RNA, 19 nt, Artificial Sequence
  Description of Artificial Sequence: Synthetic oligonucleotide
agucagugaggaguuagau

SEQ ID NO: 2603678 - RNA, 19 nt, Artificial Sequence
  Description of Artificial Sequence: Synthetic oligonucleotide
ugcugggcagggagcaagc

SEQ ID NO: 2603679 - RNA, 19 nt, Artificial Sequence
  Description of Artificial Sequence: Synthetic oligonucleotide
aggaguuagaugagcagau

SEQ ID NO: 2603680 - RNA, 19 nt, Artificial Sequence
  Description of Artificial Sequence: Synthetic oligonucleotide
uuguauggacuggccgggg

SEQ ID NO: 2603681 - RNA, 19 nt, Artificial Sequence
  Description of Artificial Sequence: Synthetic oligonucleotide
aagaugcucgggauucagu

SEQ ID NO: 2603682 - RNA, 19 nt, Artificial Sequence
  Description of Artificial Sequence: Synthetic oligonucleotide
gucucauccugaguugccc

SEQ ID NO: 2603683 - RNA, 19 nt, Artificial Sequence
  Description of Artificial Sequence: Synthetic oligonucleotide
cuucccgucccucguaguc

SEQ ID NO: 2603684 - RNA, 19 nt, Artificial Sequence
  Description of Artificial Sequence: Synthetic oligonucleotide
gagucgaauaaggagcaua

SEQ ID NO: 2603685 - RNA, 19 nt, Artificial Sequence
  Description of Artificial Sequence: Synthetic oligonucleotide
uggaggacuucgguucugc

SEQ ID NO: 2603686 - RNA, 19 nt, Artificial Sequence
  Description of Artificial Sequence: Synthetic oligonucleotide
ccuugucucaagaccuugg

SEQ ID NO: 2603687 - RNA, 19 nt, Artificial Sequence
  Description of Artificial Sequence: Synthetic oligonucleotide
ggaagacguagaaugccag

SEQ ID NO: 2603688 - RNA, 19 nt, Artificial Sequence
  Description of Artificial Sequence: Synthetic oligonucleotide
aacucggggaagacguaga

SEQ ID NO: 2603689 - RNA, 19 nt, Artificial Sequence
  Description of Artificial Sequence: Synthetic oligonucleotide
gagguaagagucucauccu

SEQ ID NO: 2603690 - RNA, 19 nt, Artificial Sequence
  Description of Artificial Sequence: Synthetic oligonucleotide
ucaugagcugggguuuaca

SEQ ID NO: 2603691 - RNA, 19 nt, Artificial Sequence
  Description of Artificial Sequence: Synthetic oligonucleotide
gugucccuugucucaagac

SEQ ID NO: 2603692 - RNA, 19 nt, Artificial Sequence
  Description of Artificial Sequence: Synthetic oligonucleotide
agaaugggacaaaggaaaa

SEQ ID NO: 2603693 - RNA, 19 nt, Artificial Sequence
  Description of Artificial Sequence: Synthetic oligonucleotide
gaaagcccagccguuggca

SEQ ID NO: 2603694 - RNA, 19 nt, Artificial Sequence
  Description of Artificial Sequence: Synthetic oligonucleotide
ccuaagaugcucgggauuc

SEQ ID NO: 2603695 - RNA, 19 nt, Artificial Sequence
  Description of Artificial Sequence: Synthetic oligonucleotide
guuaggagcagcagcccca

SEQ ID NO: 2603696 - RNA, 19 nt, Artificial Sequence
  Description of Artificial Sequence: Synthetic oligonucleotide
ucaagaccuugggugauuu

SEQ ID NO: 2603697 - RNA, 19 nt, Artificial Sequence
  Description of Artificial Sequence: Synthetic oligonucleotide
uucccgucccucguaguca

SEQ ID NO: 2603698 - RNA, 19 nt, Artificial Sequence
  Description of Artificial Sequence: Synthetic oligonucleotide
cucauguacaguuccccua

SEQ ID NO: 2603699 - RNA, 19 nt, Artificial Sequence
  Description of Artificial Sequence: Synthetic oligonucleotide
ggagcagcagaaacucggg

SEQ ID NO: 2603700 - RNA, 19 nt, Artificial Sequence
  Description of Artificial Sequence: Synthetic oligonucleotide
acucggggaagacguagaa

SEQ ID NO: 2603701 - RNA, 19 nt, Artificial Sequence
  Description of Artificial Sequence: Synthetic oligonucleotide
ugcgaagaagcagucuguu

SEQ ID NO: 2603702 - RNA, 19 nt, Artificial Sequence
  Description of Artificial Sequence: Synthetic oligonucleotide
aagcaucuucaacggggua

SEQ ID NO: 2603703 - RNA, 19 nt, Artificial Sequence
  Description of Artificial Sequence: Synthetic oligonucleotide
ggggaagacguagaaugcc

SEQ ID NO: 2603704 - RNA, 19 nt, Artificial Sequence
  Description of Artificial Sequence: Synthetic oligonucleotide
acaccguagcucugcuuca

SEQ ID NO: 2603705 - RNA, 19 nt, Artificial Sequence
  Description of Artificial Sequence: Synthetic oligonucleotide
ugcagagaaucgugucauc

SEQ ID NO: 2603706 - RNA, 19 nt, Artificial Sequence
  Description of Artificial Sequence: Synthetic oligonucleotide
cuguuaggagcagcagccc

SEQ ID NO: 2603707 - RNA, 19 nt, Artificial Sequence
  Description of Artificial Sequence: Synthetic oligonucleotide
gguaagagucucauccuga

SEQ ID NO: 2603708 - RNA, 19 nt, Artificial Sequence
  Description of Artificial Sequence: Synthetic oligonucleotide
ccuguucucuacaccguag

SEQ ID NO: 2603709 - RNA, 19 nt, Artificial Sequence
  Description of Artificial Sequence: Synthetic oligonucleotide
acacugcgaagaagcaguc

SEQ ID NO: 2603710 - RNA, 19 nt, Artificial Sequence
  Description of Artificial Sequence: Synthetic oligonucleotide
aaccaccgaguuaaaugaa

SEQ ID NO: 2603711 - RNA, 19 nt, Artificial Sequence
  Description of Artificial Sequence: Synthetic oligonucleotide
accaccgaguuaaaugaau

SEQ ID NO: 2603712 - RNA, 19 nt, Artificial Sequence
  Description of Artificial Sequence: Synthetic oligonucleotide
gauguucgcucccauucau

SEQ ID NO: 2603713 - RNA, 19 nt, Artificial Sequence
  Description of Artificial Sequence: Synthetic oligonucleotide
cucgggauggagaaauccu

SEQ ID NO: 2603714 - RNA, 19 nt, Artificial Sequence
  Description of Artificial Sequence: Synthetic oligonucleotide
ucucaagaccuugggugau

SEQ ID NO: 2603715 - RNA, 19 nt, Artificial Sequence
  Description of Artificial Sequence: Synthetic oligonucleotide
gggugauuuccucuuggga

SEQ ID NO: 2603716 - RNA, 19 nt, Artificial Sequence
  Description of Artificial Sequence: Synthetic oligonucleotide
cguagaaugccaggaaagc

SEQ ID NO: 2603717 - RNA, 19 nt, Artificial Sequence
  Description of Artificial Sequence: Synthetic oligonucleotide
uucguugcuucgggagcag

SEQ ID NO: 2603718 - RNA, 19 nt, Artificial Sequence
  Description of Artificial Sequence: Synthetic oligonucleotide
agcagauguucgcucccau

SEQ ID NO: 2603719 - RNA, 19 nt, Artificial Sequence
  Description of Artificial Sequence: Synthetic oligonucleotide
cuucguugcuucgggagca

SEQ ID NO: 2603720 - RNA, 19 nt, Artificial Sequence
  Description of Artificial Sequence: Synthetic oligonucleotide
cacaucugcagagcuccug

SEQ ID NO: 2603721 - RNA, 19 nt, Artificial Sequence
  Description of Artificial Sequence: Synthetic oligonucleotide
uucaugagcugggguuuac

SEQ ID NO: 2603722 - RNA, 19 nt, Artificial Sequence
  Description of Artificial Sequence: Synthetic oligonucleotide
cauccugaguugcccaaga

SEQ ID NO: 2603723 - RNA, 19 nt, Artificial Sequence
  Description of Artificial Sequence: Synthetic oligonucleotide
cccucguagucauuguaug

SEQ ID NO: 2603724 - RNA, 19 nt, Artificial Sequence
  Description of Artificial Sequence: Synthetic oligonucleotide
ugcucgggauucaguucac

SEQ ID NO: 2603725 - RNA, 19 nt, Artificial Sequence
  Description of Artificial Sequence: Synthetic oligonucleotide
gguaaucuguggggcuucg

SEQ ID NO: 2603726 - RNA, 19 nt, Artificial Sequence
  Description of Artificial Sequence: Synthetic oligonucleotide
ggaguuagaugagcagaug

SEQ ID NO: 2603727 - RNA, 19 nt, Artificial Sequence
  Description of Artificial Sequence: Synthetic oligonucleotide
cugguugucccguucuucu

SEQ ID NO: 2603728 - RNA, 19 nt, Artificial Sequence
  Description of Artificial Sequence: Synthetic oligonucleotide
cucaugaaaccaccgaguu

SEQ ID NO: 2603729 - RNA, 19 nt, Artificial Sequence
  Description of Artificial Sequence: Synthetic oligonucleotide
ccaacaagucagugaggag

SEQ ID NO: 2603730 - RNA, 19 nt, Artificial Sequence
  Description of Artificial Sequence: Synthetic oligonucleotide
gggaagacguagaaugcca

SEQ ID NO: 2603731 - RNA, 19 nt, Artificial Sequence
  Description of Artificial Sequence: Synthetic oligonucleotide
gccccagacagaaggacag

SEQ ID NO: 2603732 - RNA, 19 nt, Artificial Sequence
  Description of Artificial Sequence: Synthetic oligonucleotide
cauagagugugucccuugu

SEQ ID NO: 2603733 - RNA, 19 nt, Artificial Sequence
  Description of Artificial Sequence: Synthetic oligonucleotide
guugucccguucuucucaa

SEQ ID NO: 2603734 - RNA, 19 nt, Artificial Sequence
  Description of Artificial Sequence: Synthetic oligonucleotide
cccaacaagucagugagga

SEQ ID NO: 2603735 - RNA, 19 nt, Artificial Sequence
  Description of Artificial Sequence: Synthetic oligonucleotide
ucccgucccucguagucau

SEQ ID NO: 2603736 - RNA, 19 nt, Artificial Sequence
  Description of Artificial Sequence: Synthetic oligonucleotide
gucgaauaaggagcauaga

SEQ ID NO: 2603737 - RNA, 19 nt, Artificial Sequence
  Description of Artificial Sequence: Synthetic oligonucleotide
ccucgggauggagaaaucc

SEQ ID NO: 2603738 - RNA, 19 nt, Artificial Sequence
  Description of Artificial Sequence: Synthetic oligonucleotide
ugagucgaauaaggagcau

SEQ ID NO: 2603739 - RNA, 19 nt, Artificial Sequence
  Description of Artificial Sequence: Synthetic oligonucleotide
ucguugcuucgggagcagc

SEQ ID NO: 2603740 - RNA, 19 nt, Artificial Sequence
  Description of Artificial Sequence: Synthetic oligonucleotide
cucauccugaguugcccaa

SEQ ID NO: 2603741 - RNA, 19 nt, Artificial Sequence
  Description of Artificial Sequence: Synthetic oligonucleotide
cguagcucugcuucaugag

SEQ ID NO: 2603742 - RNA, 19 nt, Artificial Sequence
  Description of Artificial Sequence: Synthetic oligonucleotide
cgaauaaggagcauagagu

SEQ ID NO: 2603743 - RNA, 19 nt, Artificial Sequence
  Description of Artificial Sequence: Synthetic oligonucleotide
gagcauagagugugucccu

SEQ ID NO: 2603744 - RNA, 19 nt, Artificial Sequence
  Description of Artificial Sequence: Synthetic oligonucleotide
agcauagagugugucccuu

SEQ ID NO: 2603745 - RNA, 19 nt, Artificial Sequence
  Description of Artificial Sequence: Synthetic oligonucleotide
cuucgguucugcagcugga

SEQ ID NO: 2603746 - RNA, 19 nt, Artificial Sequence
  Description of Artificial Sequence: Synthetic oligonucleotide
uugucccguucuucucaac

SEQ ID NO: 2603747 - RNA, 19 nt, Artificial Sequence
  Description of Artificial Sequence: Synthetic oligonucleotide
cucgggauucaguucacau

SEQ ID NO: 2603748 - RNA, 19 nt, Artificial Sequence
  Description of Artificial Sequence: Synthetic oligonucleotide
gacuucgguucugcagcug

SEQ ID NO: 2603749 - RNA, 19 nt, Artificial Sequence
  Description of Artificial Sequence: Synthetic oligonucleotide
cuaagaugcucgggauuca

SEQ ID NO: 2603750 - RNA, 19 nt, Artificial Sequence
  Description of Artificial Sequence: Synthetic oligonucleotide
caacaguuagcuguccccu

SEQ ID NO: 2603751 - RNA, 19 nt, Artificial Sequence
  Description of Artificial Sequence: Synthetic oligonucleotide
gagcuccugacuggaccug

SEQ ID NO: 2603752 - RNA, 19 nt, Artificial Sequence
  Description of Artificial Sequence: Synthetic oligonucleotide
cggggaagacguagaaugc

SEQ ID NO: 2603753 - RNA, 19 nt, Artificial Sequence
  Description of Artificial Sequence: Synthetic oligonucleotide
auuggcuuccgaagcccaa

SEQ ID NO: 2603754 - RNA, 19 nt, Artificial Sequence
  Description of Artificial Sequence: Synthetic oligonucleotide
gucccucguagucauugua

SEQ ID NO: 2603755 - RNA, 19 nt, Artificial Sequence
  Description of Artificial Sequence: Synthetic oligonucleotide
cugcgaagaagcagucugu

SEQ ID NO: 2603756 - RNA, 19 nt, Artificial Sequence
  Description of Artificial Sequence: Synthetic oligonucleotide
gaaacucggggaagacgua

SEQ ID NO: 2603757 - RNA, 19 nt, Artificial Sequence
  Description of Artificial Sequence: Synthetic oligonucleotide
ugugcugggcagggagcaa

SEQ ID NO: 2603758 - RNA, 19 nt, Artificial Sequence
  Description of Artificial Sequence: Synthetic oligonucleotide
cgaguuaaaugaauuggcu

SEQ ID NO: 2603759 - RNA, 19 nt, Artificial Sequence
  Description of Artificial Sequence: Synthetic oligonucleotide
ccguagcucugcuucauga

SEQ ID NO: 2603760 - RNA, 19 nt, Artificial Sequence
  Description of Artificial Sequence: Synthetic oligonucleotide
acaagucagugaggaguua

SEQ ID NO: 2603761 - RNA, 19 nt, Artificial Sequence
  Description of Artificial Sequence: Synthetic oligonucleotide
gggauucaguucacaucug

SEQ ID NO: 2603762 - RNA, 19 nt, Artificial Sequence
  Description of Artificial Sequence: Synthetic oligonucleotide
ggagagguaagagucucau

SEQ ID NO: 2603763 - RNA, 19 nt, Artificial Sequence
  Description of Artificial Sequence: Synthetic oligonucleotide
cucuugggaguaggcccug

SEQ ID NO: 2603764 - RNA, 19 nt, Artificial Sequence
  Description of Artificial Sequence: Synthetic oligonucleotide
ccgucccucguagucauug

SEQ ID NO: 2603765 - RNA, 19 nt, Artificial Sequence
  Description of Artificial Sequence: Synthetic oligonucleotide
gcgaagaagcagucuguua

SEQ ID NO: 2603766 - RNA, 19 nt, Artificial Sequence
  Description of Artificial Sequence: Synthetic oligonucleotide
cagcuggaaaugagucgaa

SEQ ID NO: 2603767 - RNA, 19 nt, Artificial Sequence
  Description of Artificial Sequence: Synthetic oligonucleotide
cuucaugagcugggguuua

SEQ ID NO: 2603768 - RNA, 19 nt, Artificial Sequence
  Description of Artificial Sequence: Synthetic oligonucleotide
cgggagcagcagaaacucg

SEQ ID NO: 2603769 - RNA, 19 nt, Artificial Sequence
  Description of Artificial Sequence: Synthetic oligonucleotide
cguugcuucgggagcagca

SEQ ID NO: 2603770 - RNA, 19 nt, Artificial Sequence
  Description of Artificial Sequence: Synthetic oligonucleotide
ggaguaggcccuguucucu

SEQ ID NO: 2603771 - RNA, 19 nt, Artificial Sequence
  Description of Artificial Sequence: Synthetic oligonucleotide
cugcuucaugagcuggggu

SEQ ID NO: 2603772 - RNA, 19 nt, Artificial Sequence
  Description of Artificial Sequence: Synthetic oligonucleotide
cccuugucucaagaccuug

SEQ ID NO: 2603773 - RNA, 19 nt, Artificial Sequence
  Description of Artificial Sequence: Synthetic oligonucleotide
cguagucauuguauggacu

SEQ ID NO: 2603774 - RNA, 19 nt, Artificial Sequence
  Description of Artificial Sequence: Synthetic oligonucleotide
guaaucuguggggcuucgu

SEQ ID NO: 2603775 - RNA, 19 nt, Artificial Sequence
  Description of Artificial Sequence: Synthetic oligonucleotide
ccguucuucucaacaguua

SEQ ID NO: 2603776 - RNA, 19 nt, Artificial Sequence
  Description of Artificial Sequence: Synthetic oligonucleotide
ccaccgaguuaaaugaauu

SEQ ID NO: 2603777 - RNA, 19 nt, Artificial Sequence
  Description of Artificial Sequence: Synthetic oligonucleotide
gggcuucguugcuucggga

SEQ ID NO: 2603778 - RNA, 19 nt, Artificial Sequence
  Description of Artificial Sequence: Synthetic oligonucleotide
cuugggaguaggcccuguu

SEQ ID NO: 2603779 - RNA, 19 nt, Artificial Sequence
  Description of Artificial Sequence: Synthetic oligonucleotide
ccucuugggaguaggcccu

SEQ ID NO: 2603780 - RNA, 19 nt, Artificial Sequence
  Description of Artificial Sequence: Synthetic oligonucleotide
cacugcgaagaagcagucu

SEQ ID NO: 2603781 - RNA, 19 nt, Artificial Sequence
  Description of Artificial Sequence: Synthetic oligonucleotide
ggacagcagugugcugggc

SEQ ID NO: 2603782 - RNA, 19 nt, Artificial Sequence
  Description of Artificial Sequence: Synthetic oligonucleotide
gcaagcucucauguacagu

SEQ ID NO: 2603783 - RNA, 19 nt, Artificial Sequence
  Description of Artificial Sequence: Synthetic oligonucleotide
cccucgggauggagaaauc

SEQ ID NO: 2603784 - RNA, 19 nt, Artificial Sequence
  Description of Artificial Sequence: Synthetic oligonucleotide
cccuguucucuacaccgua

SEQ ID NO: 2603785 - RNA, 19 nt, Artificial Sequence
  Description of Artificial Sequence: Synthetic oligonucleotide
gcuucgggagcagcagaaa

SEQ ID NO: 2603786 - RNA, 19 nt, Artificial Sequence
  Description of Artificial Sequence: Synthetic oligonucleotide
gcccucgggauggagaaau

SEQ ID NO: 2603787 - RNA, 19 nt, Artificial Sequence
  Description of Artificial Sequence: Synthetic oligonucleotide
gggguaaucuguggggcuu

SEQ ID NO: 2603788 - RNA, 19 nt, Artificial Sequence
  Description of Artificial Sequence: Synthetic oligonucleotide
ccaagacucccaccuccaa

SEQ ID NO: 2603789 - RNA, 19 nt, Artificial Sequence
  Description of Artificial Sequence: Synthetic oligonucleotide
cucaagaccuugggugauu

SEQ ID NO: 2603790 - RNA, 19 nt, Artificial Sequence
  Description of Artificial Sequence: Synthetic oligonucleotide
caccguagcucugcuucau

SEQ ID NO: 2603791 - RNA, 19 nt, Artificial Sequence
  Description of Artificial Sequence: Synthetic oligonucleotide
ccccuaagaugcucgggau

SEQ ID NO: 2603792 - RNA, 19 nt, Artificial Sequence
  Description of Artificial Sequence: Synthetic oligonucleotide
cgggauggagaaauccuuu

SEQ ID NO: 2603793 - RNA, 19 nt, Artificial Sequence
  Description of Artificial Sequence: Synthetic oligonucleotide
gcccuguucucuacaccgu

SEQ ID NO: 2603794 - RNA, 19 nt, Artificial Sequence
  Description of Artificial Sequence: Synthetic oligonucleotide
cuguggggcuucguugcuu

SEQ ID NO: 2603795 - RNA, 19 nt, Artificial Sequence
  Description of Artificial Sequence: Synthetic oligonucleotide
cuguccccuucccgucccu

SEQ ID NO: 2603796 - RNA, 19 nt, Artificial Sequence
  Description of Artificial Sequence: Synthetic oligonucleotide
ccaaggcugugcagagaau

SEQ ID NO: 2603797 - RNA, 19 nt, Artificial Sequence
  Description of Artificial Sequence: Synthetic oligonucleotide
ccuucccgucccucguagu

SEQ ID NO: 2603798 - RNA, 19 nt, Artificial Sequence
  Description of Artificial Sequence: Synthetic oligonucleotide
ggcccucgggauggagaaa

SEQ ID NO: 2603799 - RNA, 19 nt, Artificial Sequence
  Description of Artificial Sequence: Synthetic oligonucleotide
cguuggcaaccaaggcugu

SEQ ID NO: 2603800 - RNA, 19 nt, Artificial Sequence
  Description of Artificial Sequence: Synthetic oligonucleotide
ccccuucccgucccucgua

SEQ ID NO: 2603801 - RNA, 19 nt, Artificial Sequence
  Description of Artificial Sequence: Synthetic oligonucleotide
cccgucccucguagucauu

SEQ ID NO: 2603802 - RNA, 19 nt, Artificial Sequence
  Description of Artificial Sequence: Synthetic oligonucleotide
aauacagugaguuaagccc

SEQ ID NO: 2603803 - RNA, 19 nt, Artificial Sequence
  Description of Artificial Sequence: Synthetic oligonucleotide
aaauacagugaguuaagcc

SEQ ID NO: 2603804 - RNA, 19 nt, Artificial Sequence
  Description of Artificial Sequence: Synthetic oligonucleotide
acuauaacaggauagggcg

SEQ ID NO: 2603805 - RNA, 19 nt, Artificial Sequence
  Description of Artificial Sequence: Synthetic oligonucleotide
aacaguuugcucuaagggg

SEQ ID NO: 2603806 - RNA, 19 nt, Artificial Sequence
  Description of Artificial Sequence: Synthetic oligonucleotide
agacugaccaaauauauag

SEQ ID NO: 2603807 - RNA, 19 nt, Artificial Sequence
  Description of Artificial Sequence: Synthetic oligonucleotide
uauucaucuagacugacca

SEQ ID NO: 2603808 - RNA, 19 nt, Artificial Sequence
  Description of Artificial Sequence: Synthetic oligonucleotide
aacuauaacaggauagggc

SEQ ID NO: 2603809 - RNA, 19 nt, Artificial Sequence
  Description of Artificial Sequence: Synthetic oligonucleotide
uauaggugugcaaauacag

SEQ ID NO: 2603810 - RNA, 19 nt, Artificial Sequence
  Description of Artificial Sequence: Synthetic oligonucleotide
uuugccacagcuuccagcg

SEQ ID NO: 2603811 - RNA, 19 nt, Artificial Sequence
  Description of Artificial Sequence: Synthetic oligonucleotide
ucauauagggauuggagcc

SEQ ID NO: 2603812 - RNA, 19 nt, Artificial Sequence
  Description of Artificial Sequence: Synthetic oligonucleotide
agacuaugaaaacacgggc

SEQ ID NO: 2603813 - RNA, 19 nt, Artificial Sequence
  Description of Artificial Sequence: Synthetic oligonucleotide
acuaugaaaacacgggcac

SEQ ID NO: 2603814 - RNA, 19 nt, Artificial Sequence
  Description of Artificial Sequence: Synthetic oligonucleotide
cugauacugagcaugaagg

SEQ ID NO: 2603815 - RNA, 19 nt, Artificial Sequence
  Description of Artificial Sequence: Synthetic oligonucleotide
ugaccaaauauauaggugu

SEQ ID NO: 2603816 - RNA, 19 nt, Artificial Sequence
  Description of Artificial Sequence: Synthetic oligonucleotide
ugagcaugaaggcucaagg

SEQ ID NO: 2603817 - RNA, 19 nt, Artificial Sequence
  Description of Artificial Sequence: Synthetic oligonucleotide
aagaggggcccauaggagc

SEQ ID NO: 2603818 - RNA, 19 nt, Artificial Sequence
  Description of Artificial Sequence: Synthetic oligonucleotide
agccagacuguccagagcc

SEQ ID NO: 2603819 - RNA, 19 nt, Artificial Sequence
  Description of Artificial Sequence: Synthetic oligonucleotide
uccuaugugauucuacugc

SEQ ID NO: 2603820 - RNA, 19 nt, Artificial Sequence
  Description of Artificial Sequence: Synthetic oligonucleotide
uauauaggugugcaaauac

SEQ ID NO: 2603821 - RNA, 19 nt, Artificial Sequence
  Description of Artificial Sequence: Synthetic oligonucleotide
uuuuauuccuaugugauuc

SEQ ID NO: 2603822 - RNA, 19 nt, Artificial Sequence
  Description of Artificial Sequence: Synthetic oligonucleotide
uaugugauucuacugcuca

SEQ ID NO: 2603823 - RNA, 19 nt, Artificial Sequence
  Description of Artificial Sequence: Synthetic oligonucleotide
cagacuaugaaaacacggg

SEQ ID NO: 2603824 - RNA, 19 nt, Artificial Sequence
  Description of Artificial Sequence: Synthetic oligonucleotide
cucauauagggauuggagc

SEQ ID NO: 2603825 - RNA, 19 nt, Artificial Sequence
  Description of Artificial Sequence: Synthetic oligonucleotide
gacaacuauaacaggauag

SEQ ID NO: 2603826 - RNA, 19 nt, Artificial Sequence
  Description of Artificial Sequence: Synthetic oligonucleotide
ugguacauggcccaacugc

SEQ ID NO: 2603827 - RNA, 19 nt, Artificial Sequence
  Description of Artificial Sequence: Synthetic oligonucleotide
ugaguuaagcccaccaaca

SEQ ID NO: 2603828 - RNA, 19 nt, Artificial Sequence
  Description of Artificial Sequence: Synthetic oligonucleotide
aagugaccgaggcagacag

SEQ ID NO: 2603829 - RNA, 19 nt, Artificial Sequence
  Description of Artificial Sequence: Synthetic oligonucleotide
caacaguuugcucuaaggg

SEQ ID NO: 2603830 - RNA, 19 nt, Artificial Sequence
  Description of Artificial Sequence: Synthetic oligonucleotide
acaacuauaacaggauagg

SEQ ID NO: 2603831 - RNA, 19 nt, Artificial Sequence
  Description of Artificial Sequence: Synthetic oligonucleotide
cuacugcucacucauauag

SEQ ID NO: 2603832 - RNA, 19 nt, Artificial Sequence
  Description of Artificial Sequence: Synthetic oligonucleotide
agcacuaacugugaggaac

SEQ ID NO: 2603833 - RNA, 19 nt, Artificial Sequence
  Description of Artificial Sequence: Synthetic oligonucleotide
acugaccaaauauauaggu

SEQ ID NO: 2603834 - RNA, 19 nt, Artificial Sequence
  Description of Artificial Sequence: Synthetic oligonucleotide
uuuuauucaucuagacuga

SEQ ID NO: 2603835 - RNA, 19 nt, Artificial Sequence
  Description of Artificial Sequence: Synthetic oligonucleotide
ugaaaacacgggcacagca

SEQ ID NO: 2603836 - RNA, 19 nt, Artificial Sequence
  Description of Artificial Sequence: Synthetic oligonucleotide
ugagcacuaacugugagga

SEQ ID NO: 2603837 - RNA, 19 nt, Artificial Sequence
  Description of Artificial Sequence: Synthetic oligonucleotide
uuugccucuuccuccaagg

SEQ ID NO: 2603838 - RNA, 19 nt, Artificial Sequence
  Description of Artificial Sequence: Synthetic oligonucleotide
ucagcgcugacccagaguc

SEQ ID NO: 2603839 - RNA, 19 nt, Artificial Sequence
  Description of Artificial Sequence: Synthetic oligonucleotide
ugcaaauacagugaguuaa

SEQ ID NO: 2603840 - RNA, 19 nt, Artificial Sequence
  Description of Artificial Sequence: Synthetic oligonucleotide
uugagcacuaacugugagg

SEQ ID NO: 2603841 - RNA, 19 nt, Artificial Sequence
  Description of Artificial Sequence: Synthetic oligonucleotide
gaggauagccaacggaggg

SEQ ID NO: 2603842 - RNA, 19 nt, Artificial Sequence
  Description of Artificial Sequence: Synthetic oligonucleotide
ugaggauagccaacggagg

SEQ ID NO: 2603843 - RNA, 19 nt, Artificial Sequence
  Description of Artificial Sequence: Synthetic oligonucleotide
uuauucaucuagacugacc

SEQ ID NO: 2603844 - RNA, 19 nt, Artificial Sequence
  Description of Artificial Sequence: Synthetic oligonucleotide
aaaagugaccgaggcagac

SEQ ID NO: 2603845 - RNA, 19 nt, Artificial Sequence
  Description of Artificial Sequence: Synthetic oligonucleotide
uucccaucagcgcugaccc

SEQ ID NO: 2603846 - RNA, 19 nt, Artificial Sequence
  Description of Artificial Sequence: Synthetic oligonucleotide
uauaacaggauagggcgag

SEQ ID NO: 2603847 - RNA, 19 nt, Artificial Sequence
  Description of Artificial Sequence: Synthetic oligonucleotide
ucuagacugaccaaauaua

SEQ ID NO: 2603848 - RNA, 19 nt, Artificial Sequence
  Description of Artificial Sequence: Synthetic oligonucleotide
aucuagacugaccaaauau

SEQ ID NO: 2603849 - RNA, 19 nt, Artificial Sequence
  Description of Artificial Sequence: Synthetic oligonucleotide
gagcaugaaggcucaaggg

SEQ ID NO: 2603850 - RNA, 19 nt, Artificial Sequence
  Description of Artificial Sequence: Synthetic oligonucleotide
gaucccugcagcugcaccg

SEQ ID NO: 2603851 - RNA, 19 nt, Artificial Sequence
  Description of Artificial Sequence: Synthetic oligonucleotide
auuccuaugugauucuacu

SEQ ID NO: 2603852 - RNA, 19 nt, Artificial Sequence
  Description of Artificial Sequence: Synthetic oligonucleotide
acccaaggggaccuuaccc

SEQ ID NO: 2603853 - RNA, 19 nt, Artificial Sequence
  Description of Artificial Sequence: Synthetic oligonucleotide
uuuagccuuugccacagcu

SEQ ID NO: 2603854 - RNA, 19 nt, Artificial Sequence
  Description of Artificial Sequence: Synthetic oligonucleotide
aaaacacgggcacagcaaa

SEQ ID NO: 2603855 - RNA, 19 nt, Artificial Sequence
  Description of Artificial Sequence: Synthetic oligonucleotide
ugcaggccaacccaagggg

SEQ ID NO: 2603856 - RNA, 19 nt, Artificial Sequence
  Description of Artificial Sequence: Synthetic oligonucleotide
accaaauauauaggugugc

SEQ ID NO: 2603857 - RNA, 19 nt, Artificial Sequence
  Description of Artificial Sequence: Synthetic oligonucleotide
auacugagcaugaaggcuc

SEQ ID NO: 2603858 - RNA, 19 nt, Artificial Sequence
  Description of Artificial Sequence: Synthetic oligonucleotide
ugcucacucauauagggau

SEQ ID NO: 2603859 - RNA, 19 nt, Artificial Sequence
  Description of Artificial Sequence: Synthetic oligonucleotide
gcaaaagugaccgaggcag

SEQ ID NO: 2603860 - RNA, 19 nt, Artificial Sequence
  Description of Artificial Sequence: Synthetic oligonucleotide
uacugcucacucauauagg

SEQ ID NO: 2603861 - RNA, 19 nt, Artificial Sequence
  Description of Artificial Sequence: Synthetic oligonucleotide
uauuccuaugugauucuac

SEQ ID NO: 2603862 - RNA, 19 nt, Artificial Sequence
  Description of Artificial Sequence: Synthetic oligonucleotide
aagcccaccaacaguuugc

SEQ ID NO: 2603863 - RNA, 19 nt, Artificial Sequence
  Description of Artificial Sequence: Synthetic oligonucleotide
agaaugguggcucuuccca

SEQ ID NO: 2603864 - RNA, 19 nt, Artificial Sequence
  Description of Artificial Sequence: Synthetic oligonucleotide
caacggagggcucugauac

SEQ ID NO: 2603865 - RNA, 19 nt, Artificial Sequence
  Description of Artificial Sequence: Synthetic oligonucleotide
gugaggauagccaacggag

SEQ ID NO: 2603866 - RNA, 19 nt, Artificial Sequence
  Description of Artificial Sequence: Synthetic oligonucleotide
ggcacagcaaaagugaccg

SEQ ID NO: 2603867 - RNA, 19 nt, Artificial Sequence
  Description of Artificial Sequence: Synthetic oligonucleotide
ugggccuuuagccuuugcc

SEQ ID NO: 2603868 - RNA, 19 nt, Artificial Sequence
  Description of Artificial Sequence: Synthetic oligonucleotide
aacacgggcacagcaaaag

SEQ ID NO: 2603869 - RNA, 19 nt, Artificial Sequence
  Description of Artificial Sequence: Synthetic oligonucleotide
gaguuaagcccaccaacag

SEQ ID NO: 2603870 - RNA, 19 nt, Artificial Sequence
  Description of Artificial Sequence: Synthetic oligonucleotide
aaaugguacauggcccaac

SEQ ID NO: 2603871 - RNA, 19 nt, Artificial Sequence
  Description of Artificial Sequence: Synthetic oligonucleotide
acugugaggaacuugcaua

SEQ ID NO: 2603872 - RNA, 19 nt, Artificial Sequence
  Description of Artificial Sequence: Synthetic oligonucleotide
uucuacugcucacucauau

SEQ ID NO: 2603873 - RNA, 19 nt, Artificial Sequence
  Description of Artificial Sequence: Synthetic oligonucleotide
acucauauagggauuggag

SEQ ID NO: 2603874 - RNA, 19 nt, Artificial Sequence
  Description of Artificial Sequence: Synthetic oligonucleotide
aacugugaggaacuugcau

SEQ ID NO: 2603875 - RNA, 19 nt, Artificial Sequence
  Description of Artificial Sequence: Synthetic oligonucleotide
cuugccagaucccugcagc

SEQ ID NO: 2603876 - RNA, 19 nt, Artificial Sequence
  Description of Artificial Sequence: Synthetic oligonucleotide
cucagcugccagcugaugg

SEQ ID NO: 2603877 - RNA, 19 nt, Artificial Sequence
  Description of Artificial Sequence: Synthetic oligonucleotide
ugacccagaguccugcaca

SEQ ID NO: 2603878 - RNA, 19 nt, Artificial Sequence
  Description of Artificial Sequence: Synthetic oligonucleotide
uucaucuagacugaccaaa

SEQ ID NO: 2603879 - RNA, 19 nt, Artificial Sequence
  Description of Artificial Sequence: Synthetic oligonucleotide
caacuauaacaggauaggg

SEQ ID NO: 2603880 - RNA, 19 nt, Artificial Sequence
  Description of Artificial Sequence: Synthetic oligonucleotide
uauugagcacuaacuguga

SEQ ID NO: 2603881 - RNA, 19 nt, Artificial Sequence
  Description of Artificial Sequence: Synthetic oligonucleotide
uuaccccugacaacuauaa

SEQ ID NO: 2603882 - RNA, 19 nt, Artificial Sequence
  Description of Artificial Sequence: Synthetic oligonucleotide
uuuauuccuaugugauucu

SEQ ID NO: 2603883 - RNA, 19 nt, Artificial Sequence
  Description of Artificial Sequence: Synthetic oligonucleotide
ccagacuaugaaaacacgg

SEQ ID NO: 2603884 - RNA, 19 nt, Artificial Sequence
  Description of Artificial Sequence: Synthetic oligonucleotide
aguuaagcccaccaacagu

SEQ ID NO: 2603885 - RNA, 19 nt, Artificial Sequence
  Description of Artificial Sequence: Synthetic oligonucleotide
uaacaggauagggcgaggg

SEQ ID NO: 2603886 - RNA, 19 nt, Artificial Sequence
  Description of Artificial Sequence: Synthetic oligonucleotide
augugauucuacugcucac

SEQ ID NO: 2603887 - RNA, 19 nt, Artificial Sequence
  Description of Artificial Sequence: Synthetic oligonucleotide
gugaguuaagcccaccaac

SEQ ID NO: 2603888 - RNA, 19 nt, Artificial Sequence
  Description of Artificial Sequence: Synthetic oligonucleotide
gacuaugaaaacacgggca

SEQ ID NO: 2603889 - RNA, 19 nt, Artificial Sequence
  Description of Artificial Sequence: Synthetic oligonucleotide
uuccuaugugauucuacug

SEQ ID NO: 2603890 - RNA, 19 nt, Artificial Sequence
  Description of Artificial Sequence: Synthetic oligonucleotide
agggauuggagccguggcg

SEQ ID NO: 2603891 - RNA, 19 nt, Artificial Sequence
  Description of Artificial Sequence: Synthetic oligonucleotide
ccaacugcuagccagacug

SEQ ID NO: 2603892 - RNA, 19 nt, Artificial Sequence
  Description of Artificial Sequence: Synthetic oligonucleotide
cauauagggauuggagccg

SEQ ID NO: 2603893 - RNA, 19 nt, Artificial Sequence
  Description of Artificial Sequence: Synthetic oligonucleotide
gugaccgaggcagacaggg

SEQ ID NO: 2603894 - RNA, 19 nt, Artificial Sequence
  Description of Artificial Sequence: Synthetic oligonucleotide
ugacaacuauaacaggaua

SEQ ID NO: 2603895 - RNA, 19 nt, Artificial Sequence
  Description of Artificial Sequence: Synthetic oligonucleotide
uggcccaacugcuagccag

SEQ ID NO: 2603896 - RNA, 19 nt, Artificial Sequence
  Description of Artificial Sequence: Synthetic oligonucleotide
ugugauucuacugcucacu

SEQ ID NO: 2603897 - RNA, 19 nt, Artificial Sequence
  Description of Artificial Sequence: Synthetic oligonucleotide
cuuugccacagcuuccagc

SEQ ID NO: 2603898 - RNA, 19 nt, Artificial Sequence
  Description of Artificial Sequence: Synthetic oligonucleotide
aggauagccaacggagggc

SEQ ID NO: 2603899 - RNA, 19 nt, Artificial Sequence
  Description of Artificial Sequence: Synthetic oligonucleotide
ucaucuagacugaccaaau

SEQ ID NO: 2603900 - RNA, 19 nt, Artificial Sequence
  Description of Artificial Sequence: Synthetic oligonucleotide
aacugcuagccagacuguc

SEQ ID NO: 2603901 - RNA, 19 nt, Artificial Sequence
  Description of Artificial Sequence: Synthetic oligonucleotide
uugccucuuccuccaaggg

SEQ ID NO: 2603902 - RNA, 19 nt, Artificial Sequence
  Description of Artificial Sequence: Synthetic oligonucleotide
ccaauucagacucuggccc

SEQ ID NO: 2603903 - RNA, 19 nt, Artificial Sequence
  Description of Artificial Sequence: Synthetic oligonucleotide
cagcaaaagugaccgaggc

SEQ ID NO: 2603904 - RNA, 19 nt, Artificial Sequence
  Description of Artificial Sequence: Synthetic oligonucleotide
ugauucuacugcucacuca

SEQ ID NO: 2603905 - RNA, 19 nt, Artificial Sequence
  Description of Artificial Sequence: Synthetic oligonucleotide
acugcuagccagacugucc

SEQ ID NO: 2603906 - RNA, 19 nt, Artificial Sequence
  Description of Artificial Sequence: Synthetic oligonucleotide
ugcacacccucacagugga

SEQ ID NO: 2603907 - RNA, 19 nt, Artificial Sequence
  Description of Artificial Sequence: Synthetic oligonucleotide
caaauacagugaguuaagc

SEQ ID NO: 2603908 - RNA, 19 nt, Artificial Sequence
  Description of Artificial Sequence: Synthetic oligonucleotide
uagggauuggagccguggc

SEQ ID NO: 2603909 - RNA, 19 nt, Artificial Sequence
  Description of Artificial Sequence: Synthetic oligonucleotide
gaccaaauauauaggugug

SEQ ID NO: 2603910 - RNA, 19 nt, Artificial Sequence
  Description of Artificial Sequence: Synthetic oligonucleotide
gauucuacugcucacucau

SEQ ID NO: 2603911 - RNA, 19 nt, Artificial Sequence
  Description of Artificial Sequence: Synthetic oligonucleotide
acauggcccaacugcuagc

SEQ ID NO: 2603912 - RNA, 19 nt, Artificial Sequence
  Description of Artificial Sequence: Synthetic oligonucleotide
uagacugaccaaauauaua

SEQ ID NO: 2603913 - RNA, 19 nt, Artificial Sequence
  Description of Artificial Sequence: Synthetic oligonucleotide
uagggcgagggacugcugc

SEQ ID NO: 2603914 - RNA, 19 nt, Artificial Sequence
  Description of Artificial Sequence: Synthetic oligonucleotide
gcagacugggccuuuagcc

SEQ ID NO: 2603915 - RNA, 19 nt, Artificial Sequence
  Description of Artificial Sequence: Synthetic oligonucleotide
agugaguuaagcccaccaa

SEQ ID NO: 2603916 - RNA, 19 nt, Artificial Sequence
  Description of Artificial Sequence: Synthetic oligonucleotide
cuagccagacuguccagag

SEQ ID NO: 2603917 - RNA, 19 nt, Artificial Sequence
  Description of Artificial Sequence: Synthetic oligonucleotide
auagggauuggagccgugg

SEQ ID NO: 2603918 - RNA, 19 nt, Artificial Sequence
  Description of Artificial Sequence: Synthetic oligonucleotide
uuuauucaucuagacugac

SEQ ID NO: 2603919 - RNA, 19 nt, Artificial Sequence
  Description of Artificial Sequence: Synthetic oligonucleotide
uggcgcacggugaggauag

SEQ ID NO: 2603920 - RNA, 19 nt, Artificial Sequence
  Description of Artificial Sequence: Synthetic oligonucleotide
ugggcucaccaccagccag

SEQ ID NO: 2603921 - RNA, 19 nt, Artificial Sequence
  Description of Artificial Sequence: Synthetic oligonucleotide
cacgggcacagcaaaagug

SEQ ID NO: 2603922 - RNA, 19 nt, Artificial Sequence
  Description of Artificial Sequence: Synthetic oligonucleotide
acggugaggauagccaacg

SEQ ID NO: 2603923 - RNA, 19 nt, Artificial Sequence
  Description of Artificial Sequence: Synthetic oligonucleotide
agggcgagggacugcugcc

SEQ ID NO: 2603924 - RNA, 19 nt, Artificial Sequence
  Description of Artificial Sequence: Synthetic oligonucleotide
augaaaacacgggcacagc

SEQ ID NO: 2603925 - RNA, 19 nt, Artificial Sequence
  Description of Artificial Sequence: Synthetic oligonucleotide
ccaacaguuugcucuaagg

SEQ ID NO: 2603926 - RNA, 19 nt, Artificial Sequence
  Description of Artificial Sequence: Synthetic oligonucleotide
aaagugaccgaggcagaca

SEQ ID NO: 2603927 - RNA, 19 nt, Artificial Sequence
  Description of Artificial Sequence: Synthetic oligonucleotide
ccccugacaacuauaacag

SEQ ID NO: 2603928 - RNA, 19 nt, Artificial Sequence
  Description of Artificial Sequence: Synthetic oligonucleotide
uuccuccaagggaugcccg

SEQ ID NO: 2603929 - RNA, 19 nt, Artificial Sequence
  Description of Artificial Sequence: Synthetic oligonucleotide
cacacccucacaguggaag

SEQ ID NO: 2603930 - RNA, 19 nt, Artificial Sequence
  Description of Artificial Sequence: Synthetic oligonucleotide
guggcucuucccaucagcg

SEQ ID NO: 2603931 - RNA, 19 nt, Artificial Sequence
  Description of Artificial Sequence: Synthetic oligonucleotide
cucacucauauagggauug

SEQ ID NO: 2603932 - RNA, 19 nt, Artificial Sequence
  Description of Artificial Sequence: Synthetic oligonucleotide
ggaagaggggcccauagga

SEQ ID NO: 2603933 - RNA, 19 nt, Artificial Sequence
  Description of Artificial Sequence: Synthetic oligonucleotide
uaacugugaggaacuugca

SEQ ID NO: 2603934 - RNA, 19 nt, Artificial Sequence
  Description of Artificial Sequence: Synthetic oligonucleotide
acuaacugugaggaacuug

SEQ ID NO: 2603935 - RNA, 19 nt, Artificial Sequence
  Description of Artificial Sequence: Synthetic oligonucleotide
uacugagcaugaaggcuca

SEQ ID NO: 2603936 - RNA, 19 nt, Artificial Sequence
  Description of Artificial Sequence: Synthetic oligonucleotide
cugcacacccucacagugg

SEQ ID NO: 2603937 - RNA, 19 nt, Artificial Sequence
  Description of Artificial Sequence: Synthetic oligonucleotide
cagaaugguggcucuuccc

SEQ ID NO: 2603938 - RNA, 19 nt, Artificial Sequence
  Description of Artificial Sequence: Synthetic oligonucleotide
ucacucauauagggauugg

SEQ ID NO: 2603939 - RNA, 19 nt, Artificial Sequence
  Description of Artificial Sequence: Synthetic oligonucleotide
uaggagcagccccaggccu

SEQ ID NO: 2603940 - RNA, 19 nt, Artificial Sequence
  Description of Artificial Sequence: Synthetic oligonucleotide
agggacugcugcccuugcc

SEQ ID NO: 2603941 - RNA, 19 nt, Artificial Sequence
  Description of Artificial Sequence: Synthetic oligonucleotide
auauauaggugugcaaaua

SEQ ID NO: 2603942 - RNA, 19 nt, Artificial Sequence
  Description of Artificial Sequence: Synthetic oligonucleotide
ggagcgggagcucagcugc

SEQ ID NO: 2603943 - RNA, 19 nt, Artificial Sequence
  Description of Artificial Sequence: Synthetic oligonucleotide
uacagugaguuaagcccac

SEQ ID NO: 2603944 - RNA, 19 nt, Artificial Sequence
  Description of Artificial Sequence: Synthetic oligonucleotide
gacuguccagagcccaugc

SEQ ID NO: 2603945 - RNA, 19 nt, Artificial Sequence
  Description of Artificial Sequence: Synthetic oligonucleotide
auaggugugcaaauacagu

SEQ ID NO: 2603946 - RNA, 19 nt, Artificial Sequence
  Description of Artificial Sequence: Synthetic oligonucleotide
gaaaacacgggcacagcaa

SEQ ID NO: 2603947 - RNA, 19 nt, Artificial Sequence
  Description of Artificial Sequence: Synthetic oligonucleotide
cuagacugaccaaauauau

SEQ ID NO: 2603948 - RNA, 19 nt, Artificial Sequence
  Description of Artificial Sequence: Synthetic oligonucleotide
caaauauauaggugugcaa

SEQ ID NO: 2603949 - RNA, 19 nt, Artificial Sequence
  Description of Artificial Sequence: Synthetic oligonucleotide
gugauucuacugcucacuc

SEQ ID NO: 2603950 - RNA, 19 nt, Artificial Sequence
  Description of Artificial Sequence: Synthetic oligonucleotide
cccaauucagacucuggcc

SEQ ID NO: 2603951 - RNA, 19 nt, Artificial Sequence
  Description of Artificial Sequence: Synthetic oligonucleotide
cauggcccaacugcuagcc

SEQ ID NO: 2603952 - RNA, 19 nt, Artificial Sequence
  Description of Artificial Sequence: Synthetic oligonucleotide
acagugaguuaagcccacc

SEQ ID NO: 2603953 - RNA, 19 nt, Artificial Sequence
  Description of Artificial Sequence: Synthetic oligonucleotide
gagcucagcugccagcuga

SEQ ID NO: 2603954 - RNA, 19 nt, Artificial Sequence
  Description of Artificial Sequence: Synthetic oligonucleotide
cuauaacaggauagggcga

SEQ ID NO: 2603955 - RNA, 19 nt, Artificial Sequence
  Description of Artificial Sequence: Synthetic oligonucleotide
  modified_base (3)..(3): a, c, u, g, unknown or other
ganccaggccaguggcugc

SEQ ID NO: 2603956 - RNA, 19 nt, Artificial Sequence
  Description of Artificial Sequence: Synthetic oligonucleotide
ggcucugauacugagcaug

SEQ ID NO: 2603957 - RNA, 19 nt, Artificial Sequence
  Description of Artificial Sequence: Synthetic oligonucleotide
auucaucuagacugaccaa

SEQ ID NO: 2603958 - RNA, 19 nt, Artificial Sequence
  Description of Artificial Sequence: Synthetic oligonucleotide
gacccagaguccugcacac

SEQ ID NO: 2603959 - RNA, 19 nt, Artificial Sequence
  Description of Artificial Sequence: Synthetic oligonucleotide
gaccuuaccccugacaacu

SEQ ID NO: 2603960 - RNA, 19 nt, Artificial Sequence
  Description of Artificial Sequence: Synthetic oligonucleotide
acgggcacagcaaaaguga

SEQ ID NO: 2603961 - RNA, 19 nt, Artificial Sequence
  Description of Artificial Sequence: Synthetic oligonucleotide
auaacaggauagggcgagg

SEQ ID NO: 2603962 - RNA, 19 nt, Artificial Sequence
  Description of Artificial Sequence: Synthetic oligonucleotide
aacggagggcucugauacu

SEQ ID NO: 2603963 - RNA, 19 nt, Artificial Sequence
  Description of Artificial Sequence: Synthetic oligonucleotide
uauagggauuggagccgug

SEQ ID NO: 2603964 - RNA, 19 nt, Artificial Sequence
  Description of Artificial Sequence: Synthetic oligonucleotide
aggccaacccaaggggacc

SEQ ID NO: 2603965 - RNA, 19 nt, Artificial Sequence
  Description of Artificial Sequence: Synthetic oligonucleotide
acacgggcacagcaaaagu

SEQ ID NO: 2603966 - RNA, 19 nt, Artificial Sequence
  Description of Artificial Sequence: Synthetic oligonucleotide
uggcucuucccaucagcgc

SEQ ID NO: 2603967 - RNA, 19 nt, Artificial Sequence
  Description of Artificial Sequence: Synthetic oligonucleotide
augguacauggcccaacug

SEQ ID NO: 2603968 - RNA, 19 nt, Artificial Sequence
  Description of Artificial Sequence: Synthetic oligonucleotide
aggugugcaaauacaguga

SEQ ID NO: 2603969 - RNA, 19 nt, Artificial Sequence
  Description of Artificial Sequence: Synthetic oligonucleotide
gcaaauacagugaguuaag

SEQ ID NO: 2603970 - RNA, 19 nt, Artificial Sequence
  Description of Artificial Sequence: Synthetic oligonucleotide
uugccagaucccugcagcu

SEQ ID NO: 2603971 - RNA, 19 nt, Artificial Sequence
  Description of Artificial Sequence: Synthetic oligonucleotide
ggugaggauagccaacgga

SEQ ID NO: 2603972 - RNA, 19 nt, Artificial Sequence
  Description of Artificial Sequence: Synthetic oligonucleotide
gccucacuguucucuaugg

SEQ ID NO: 2603973 - RNA, 19 nt, Artificial Sequence
  Description of Artificial Sequence: Synthetic oligonucleotide
caggccaacccaaggggac

SEQ ID NO: 2603974 - RNA, 19 nt, Artificial Sequence
  Description of Artificial Sequence: Synthetic oligonucleotide
gggaccuuaccccugacaa

SEQ ID NO: 2603975 - RNA, 19 nt, Artificial Sequence
  Description of Artificial Sequence: Synthetic oligonucleotide
uaccccugacaacuauaac

SEQ ID NO: 2603976 - RNA, 19 nt, Artificial Sequence
  Description of Artificial Sequence: Synthetic oligonucleotide
ccccagacuaugaaaacac

SEQ ID NO: 2603977 - RNA, 19 nt, Artificial Sequence
  Description of Artificial Sequence: Synthetic oligonucleotide
guuaagcccaccaacaguu

SEQ ID NO: 2603978 - RNA, 19 nt, Artificial Sequence
  Description of Artificial Sequence: Synthetic oligonucleotide
acggagggcucugauacug

SEQ ID NO: 2603979 - RNA, 19 nt, Artificial Sequence
  Description of Artificial Sequence: Synthetic oligonucleotide
auauagggauuggagccgu

SEQ ID NO: 2603980 - RNA, 19 nt, Artificial Sequence
  Description of Artificial Sequence: Synthetic oligonucleotide
cugcuagccagacugucca

SEQ ID NO: 2603981 - RNA, 19 nt, Artificial Sequence
  Description of Artificial Sequence: Synthetic oligonucleotide
ccagagcccaugcagaaug

SEQ ID NO: 2603982 - RNA, 19 nt, Artificial Sequence
  Description of Artificial Sequence: Synthetic oligonucleotide
caacccaaggggaccuuac

SEQ ID NO: 2603983 - RNA, 19 nt, Artificial Sequence
  Description of Artificial Sequence: Synthetic oligonucleotide
gggccuuuagccuuugcca

SEQ ID NO: 2603984 - RNA, 19 nt, Artificial Sequence
  Description of Artificial Sequence: Synthetic oligonucleotide
agcgcugacccagaguccu

SEQ ID NO: 2603985 - RNA, 19 nt, Artificial Sequence
  Description of Artificial Sequence: Synthetic oligonucleotide
acuguccagagcccaugca

SEQ ID NO: 2603986 - RNA, 19 nt, Artificial Sequence
  Description of Artificial Sequence: Synthetic oligonucleotide
uuaagcccaccaacaguuu

SEQ ID NO: 2603987 - RNA, 19 nt, Artificial Sequence
  Description of Artificial Sequence: Synthetic oligonucleotide
  modified_base (4)..(4): a, c, u, g, unknown or other
gganccaggccaguggcug

SEQ ID NO: 2603988 - RNA, 19 nt, Artificial Sequence
  Description of Artificial Sequence: Synthetic oligonucleotide
uccugcacacccucacagu

SEQ ID NO: 2603989 - RNA, 19 nt, Artificial Sequence
  Description of Artificial Sequence: Synthetic oligonucleotide
ugggagcgggagcucagcu

SEQ ID NO: 2603990 - RNA, 19 nt, Artificial Sequence
  Description of Artificial Sequence: Synthetic oligonucleotide
cacggugaggauagccaac

SEQ ID NO: 2603991 - RNA, 19 nt, Artificial Sequence
  Description of Artificial Sequence: Synthetic oligonucleotide
ugcuagccagacuguccag

SEQ ID NO: 2603992 - RNA, 19 nt, Artificial Sequence
  Description of Artificial Sequence: Synthetic oligonucleotide
uuggagccguggcgcacgg

SEQ ID NO: 2603993 - RNA, 19 nt, Artificial Sequence
  Description of Artificial Sequence: Synthetic oligonucleotide
ggagccguggcgcacggug

SEQ ID NO: 2603994 - RNA, 19 nt, Artificial Sequence
  Description of Artificial Sequence: Synthetic oligonucleotide
gagggcucugauacugagc

SEQ ID NO: 2603995 - RNA, 19 nt, Artificial Sequence
  Description of Artificial Sequence: Synthetic oligonucleotide
cagugaguuaagcccacca

SEQ ID NO: 2603996 - RNA, 19 nt, Artificial Sequence
  Description of Artificial Sequence: Synthetic oligonucleotide
gccagaucccugcagcugc

SEQ ID NO: 2603997 - RNA, 19 nt, Artificial Sequence
  Description of Artificial Sequence: Synthetic oligonucleotide
aucagcgcugacccagagu

SEQ ID NO: 2603998 - RNA, 19 nt, Artificial Sequence
  Description of Artificial Sequence: Synthetic oligonucleotide
cccagacuaugaaaacacg

SEQ ID NO: 2603999 - RNA, 19 nt, Artificial Sequence
  Description of Artificial Sequence: Synthetic oligonucleotide
cuccaagggaugcccggcc

SEQ ID NO: 2604000 - RNA, 19 nt, Artificial Sequence
  Description of Artificial Sequence: Synthetic oligonucleotide
  modified_base (6)..(6): a, c, u, g, unknown or other
gggganccaggccaguggc

SEQ ID NO: 2604001 - RNA, 19 nt, Artificial Sequence
  Description of Artificial Sequence: Synthetic oligonucleotide
ccaaauauauaggugugca

SEQ ID NO: 2604002 - RNA, 19 nt, Artificial Sequence
  Description of Artificial Sequence: Synthetic oligonucleotide
gggauuggagccguggcgc

SEQ ID NO: 2604003 - RNA, 19 nt, Artificial Sequence
  Description of Artificial Sequence: Synthetic oligonucleotide
ugccagaucccugcagcug

SEQ ID NO: 2604004 - RNA, 19 nt, Artificial Sequence
  Description of Artificial Sequence: Synthetic oligonucleotide
  modified_base (2)..(2): a, c, u, g, unknown or other
anccaggccaguggcugca

SEQ ID NO: 2604005 - RNA, 19 nt, Artificial Sequence
  Description of Artificial Sequence: Synthetic oligonucleotide
cugacaacuauaacaggau

SEQ ID NO: 2604006 - RNA, 19 nt, Artificial Sequence
  Description of Artificial Sequence: Synthetic oligonucleotide
gugaggaacuugcauauuu

SEQ ID NO: 2604007 - RNA, 19 nt, Artificial Sequence
  Description of Artificial Sequence: Synthetic oligonucleotide
ggcccauaggagcagcccc

SEQ ID NO: 2604008 - RNA, 19 nt, Artificial Sequence
  Description of Artificial Sequence: Synthetic oligonucleotide
cugacccagaguccugcac

SEQ ID NO: 2604009 - RNA, 19 nt, Artificial Sequence
  Description of Artificial Sequence: Synthetic oligonucleotide
gcagaaugguggcucuucc

SEQ ID NO: 2604010 - RNA, 19 nt, Artificial Sequence
  Description of Artificial Sequence: Synthetic oligonucleotide
aggcagacugggccuuuag

SEQ ID NO: 2604011 - RNA, 19 nt, Artificial Sequence
  Description of Artificial Sequence: Synthetic oligonucleotide
cuaugaaaacacgggcaca

SEQ ID NO: 2604012 - RNA, 19 nt, Artificial Sequence
  Description of Artificial Sequence: Synthetic oligonucleotide
cagacaggggaaaguaaaa

SEQ ID NO: 2604013 - RNA, 19 nt, Artificial Sequence
  Description of Artificial Sequence: Synthetic oligonucleotide
agccguggcgcacggugag

SEQ ID NO: 2604014 - RNA, 19 nt, Artificial Sequence
  Description of Artificial Sequence: Synthetic oligonucleotide
ugguggcucuucccaucag

SEQ ID NO: 2604015 - RNA, 19 nt, Artificial Sequence
  Description of Artificial Sequence: Synthetic oligonucleotide
ccugcacacccucacagug

SEQ ID NO: 2604016 - RNA, 19 nt, Artificial Sequence
  Description of Artificial Sequence: Synthetic oligonucleotide
gauagggcgagggacugcu

SEQ ID NO: 2604017 - RNA, 19 nt, Artificial Sequence
  Description of Artificial Sequence: Synthetic oligonucleotide
cuuaccccugacaacuaua

SEQ ID NO: 2604018 - RNA, 19 nt, Artificial Sequence
  Description of Artificial Sequence: Synthetic oligonucleotide
ggcagacugggccuuuagc

SEQ ID NO: 2604019 - RNA, 19 nt, Artificial Sequence
  Description of Artificial Sequence: Synthetic oligonucleotide
ggacugcugcccuugccag

SEQ ID NO: 2604020 - RNA, 19 nt, Artificial Sequence
  Description of Artificial Sequence: Synthetic oligonucleotide
cacucauauagggauugga

SEQ ID NO: 2604021 - RNA, 19 nt, Artificial Sequence
  Description of Artificial Sequence: Synthetic oligonucleotide
agacuguccagagcccaug

SEQ ID NO: 2604022 - RNA, 19 nt, Artificial Sequence
  Description of Artificial Sequence: Synthetic oligonucleotide
cugugaggaacuugcauau

SEQ ID NO: 2604023 - RNA, 19 nt, Artificial Sequence
  Description of Artificial Sequence: Synthetic oligonucleotide
cccaccaacaguuugcucu

SEQ ID NO: 2604024 - RNA, 19 nt, Artificial Sequence
  Description of Artificial Sequence: Synthetic oligonucleotide
uggcugcaggccaacccaa

SEQ ID NO: 2604025 - RNA, 19 nt, Artificial Sequence
  Description of Artificial Sequence: Synthetic oligonucleotide
caucagcgcugacccagag

SEQ ID NO: 2604026 - RNA, 19 nt, Artificial Sequence
  Description of Artificial Sequence: Synthetic oligonucleotide
aggcagacaggggaaagua

SEQ ID NO: 2604027 - RNA, 19 nt, Artificial Sequence
  Description of Artificial Sequence: Synthetic oligonucleotide
gauuggagccguggcgcac

SEQ ID NO: 2604028 - RNA, 19 nt, Artificial Sequence
  Description of Artificial Sequence: Synthetic oligonucleotide
agagcccaugcagaauggu

SEQ ID NO: 2604029 - RNA, 19 nt, Artificial Sequence
  Description of Artificial Sequence: Synthetic oligonucleotide
aggggaccuuaccccugac

SEQ ID NO: 2604030 - RNA, 19 nt, Artificial Sequence
  Description of Artificial Sequence: Synthetic oligonucleotide
cagacugggccuuuagccu

SEQ ID NO: 2604031 - RNA, 19 nt, Artificial Sequence
  Description of Artificial Sequence: Synthetic oligonucleotide
cccugacaacuauaacagg

SEQ ID NO: 2604032 - RNA, 19 nt, Artificial Sequence
  Description of Artificial Sequence: Synthetic oligonucleotide
agggaugcccggccgugga

SEQ ID NO: 2604033 - RNA, 19 nt, Artificial Sequence
  Description of Artificial Sequence: Synthetic oligonucleotide
gaaugguggcucuucccau

SEQ ID NO: 2604034 - RNA, 19 nt, Artificial Sequence
  Description of Artificial Sequence: Synthetic oligonucleotide
cagcgcugacccagagucc

SEQ ID NO: 2604035 - RNA, 19 nt, Artificial Sequence
  Description of Artificial Sequence: Synthetic oligonucleotide
gcagacaggggaaaguaaa

SEQ ID NO: 2604036 - RNA, 19 nt, Artificial Sequence
  Description of Artificial Sequence: Synthetic oligonucleotide
caucuagacugaccaaaua

SEQ ID NO: 2604037 - RNA, 19 nt, Artificial Sequence
  Description of Artificial Sequence: Synthetic oligonucleotide
ggaccuuaccccugacaac

SEQ ID NO: 2604038 - RNA, 19 nt, Artificial Sequence
  Description of Artificial Sequence: Synthetic oligonucleotide
agugaccgaggcagacagg

SEQ ID NO: 2604039 - RNA, 19 nt, Artificial Sequence
  Description of Artificial Sequence: Synthetic oligonucleotide
guccagagcccaugcagaa

SEQ ID NO: 2604040 - RNA, 19 nt, Artificial Sequence
  Description of Artificial Sequence: Synthetic oligonucleotide
agcccaccaacaguuugcu

SEQ ID NO: 2604041 - RNA, 19 nt, Artificial Sequence
  Description of Artificial Sequence: Synthetic oligonucleotide
ugugaggaacuugcauauu

SEQ ID NO: 2604042 - RNA, 19 nt, Artificial Sequence
  Description of Artificial Sequence: Synthetic oligonucleotide
ccucacaguggaagagggg

SEQ ID NO: 2604043 - RNA, 19 nt, Artificial Sequence
  Description of Artificial Sequence: Synthetic oligonucleotide
agcugcaccgugggcucac

SEQ ID NO: 2604044 - RNA, 19 nt, Artificial Sequence
  Description of Artificial Sequence: Synthetic oligonucleotide
auggcccaacugcuagcca

SEQ ID NO: 2604045 - RNA, 19 nt, Artificial Sequence
  Description of Artificial Sequence: Synthetic oligonucleotide
caagggaugcccggccgug

SEQ ID NO: 2604046 - RNA, 19 nt, Artificial Sequence
  Description of Artificial Sequence: Synthetic oligonucleotide
uccagagcccaugcagaau

SEQ ID NO: 2604047 - RNA, 19 nt, Artificial Sequence
  Description of Artificial Sequence: Synthetic oligonucleotide
gggcacagcaaaagugacc

SEQ ID NO: 2604048 - RNA, 19 nt, Artificial Sequence
  Description of Artificial Sequence: Synthetic oligonucleotide
ccucacuguucucuauggc

SEQ ID NO: 2604049 - RNA, 19 nt, Artificial Sequence
  Description of Artificial Sequence: Synthetic oligonucleotide
gggagcgggagcucagcug

SEQ ID NO: 2604050 - RNA, 19 nt, Artificial Sequence
  Description of Artificial Sequence: Synthetic oligonucleotide
cccaucagcgcugacccag

SEQ ID NO: 2604051 - RNA, 19 nt, Artificial Sequence
  Description of Artificial Sequence: Synthetic oligonucleotide
uagccaacggagggcucug

SEQ ID NO: 2604052 - RNA, 19 nt, Artificial Sequence
  Description of Artificial Sequence: Synthetic oligonucleotide
gguacauggcccaacugcu

SEQ ID NO: 2604053 - RNA, 19 nt, Artificial Sequence
  Description of Artificial Sequence: Synthetic oligonucleotide
ggcccaauucagacucugg

SEQ ID NO: 2604054 - RNA, 19 nt, Artificial Sequence
  Description of Artificial Sequence: Synthetic oligonucleotide
ccaugcagaaugguggcuc

SEQ ID NO: 2604055 - RNA, 19 nt, Artificial Sequence
  Description of Artificial Sequence: Synthetic oligonucleotide
acaguggaagaggggccca

SEQ ID NO: 2604056 - RNA, 19 nt, Artificial Sequence
  Description of Artificial Sequence: Synthetic oligonucleotide
ucccaucagcgcugaccca

SEQ ID NO: 2604057 - RNA, 19 nt, Artificial Sequence
  Description of Artificial Sequence: Synthetic oligonucleotide
gaggggcccauaggagcag

SEQ ID NO: 2604058 - RNA, 19 nt, Artificial Sequence
  Description of Artificial Sequence: Synthetic oligonucleotide
gagcacuaacugugaggaa

SEQ ID NO: 2604059 - RNA, 19 nt, Artificial Sequence
  Description of Artificial Sequence: Synthetic oligonucleotide
gauagccaacggagggcuc

SEQ ID NO: 2604060 - RNA, 19 nt, Artificial Sequence
  Description of Artificial Sequence: Synthetic oligonucleotide
aucccugcagcugcaccgu

SEQ ID NO: 2604061 - RNA, 19 nt, Artificial Sequence
  Description of Artificial Sequence: Synthetic oligonucleotide
cugggagcgggagcucagc

SEQ ID NO: 2604062 - RNA, 19 nt, Artificial Sequence
  Description of Artificial Sequence: Synthetic oligonucleotide
ccuaugugauucuacugcu

SEQ ID NO: 2604063 - RNA, 19 nt, Artificial Sequence
  Description of Artificial Sequence: Synthetic oligonucleotide
aggccucacuguucucuau

SEQ ID NO: 2604064 - RNA, 19 nt, Artificial Sequence
  Description of Artificial Sequence: Synthetic oligonucleotide
gugggcucaccaccagcca

SEQ ID NO: 2604065 - RNA, 19 nt, Artificial Sequence
  Description of Artificial Sequence: Synthetic oligonucleotide
gcucugauacugagcauga

SEQ ID NO: 2604066 - RNA, 19 nt, Artificial Sequence
  Description of Artificial Sequence: Synthetic oligonucleotide
gcacggugaggauagccaa

SEQ ID NO: 2604067 - RNA, 19 nt, Artificial Sequence
  Description of Artificial Sequence: Synthetic oligonucleotide
accgaggcagacaggggaa

SEQ ID NO: 2604068 - RNA, 19 nt, Artificial Sequence
  Description of Artificial Sequence: Synthetic oligonucleotide
ggaugcccggccguggaug

SEQ ID NO: 2604069 - RNA, 19 nt, Artificial Sequence
  Description of Artificial Sequence: Synthetic oligonucleotide
ccuugccagaucccugcag

SEQ ID NO: 2604070 - RNA, 19 nt, Artificial Sequence
  Description of Artificial Sequence: Synthetic oligonucleotide
cugggccuuuagccuuugc

SEQ ID NO: 2604071 - RNA, 19 nt, Artificial Sequence
  Description of Artificial Sequence: Synthetic oligonucleotide
ggauuggagccguggcgca

SEQ ID NO: 2604072 - RNA, 19 nt, Artificial Sequence
  Description of Artificial Sequence: Synthetic oligonucleotide
gucugggagcgggagcuca

SEQ ID NO: 2604073 - RNA, 19 nt, Artificial Sequence
  Description of Artificial Sequence: Synthetic oligonucleotide
gcuagccagacuguccaga

SEQ ID NO: 2604074 - RNA, 19 nt, Artificial Sequence
  Description of Artificial Sequence: Synthetic oligonucleotide
ggggaccuuaccccugaca

SEQ ID NO: 2604075 - RNA, 19 nt, Artificial Sequence
  Description of Artificial Sequence: Synthetic oligonucleotide
ggauagccaacggagggcu

SEQ ID NO: 2604076 - RNA, 19 nt, Artificial Sequence
  Description of Artificial Sequence: Synthetic oligonucleotide
agcgggagcucagcugcca

SEQ ID NO: 2604077 - RNA, 19 nt, Artificial Sequence
  Description of Artificial Sequence: Synthetic oligonucleotide
gagccguggcgcacgguga

SEQ ID NO: 2604078 - RNA, 19 nt, Artificial Sequence
  Description of Artificial Sequence: Synthetic oligonucleotide
caguggcugcaggccaacc

SEQ ID NO: 2604079 - RNA, 19 nt, Artificial Sequence
  Description of Artificial Sequence: Synthetic oligonucleotide
gggcccaauucagacucug

SEQ ID NO: 2604080 - RNA, 19 nt, Artificial Sequence
  Description of Artificial Sequence: Synthetic oligonucleotide
gagcgggagcucagcugcc

SEQ ID NO: 2604081 - RNA, 19 nt, Artificial Sequence
  Description of Artificial Sequence: Synthetic oligonucleotide
cagaucccugcagcugcac

SEQ ID NO: 2604082 - RNA, 19 nt, Artificial Sequence
  Description of Artificial Sequence: Synthetic oligonucleotide
cgcacggugaggauagcca

SEQ ID NO: 2604083 - RNA, 19 nt, Artificial Sequence
  Description of Artificial Sequence: Synthetic oligonucleotide
gcaggccaacccaagggga

SEQ ID NO: 2604084 - RNA, 19 nt, Artificial Sequence
  Description of Artificial Sequence: Synthetic oligonucleotide
gcacuaacugugaggaacu

SEQ ID NO: 2604085 - RNA, 19 nt, Artificial Sequence
  Description of Artificial Sequence: Synthetic oligonucleotide
guggcgcacggugaggaua

SEQ ID NO: 2604086 - RNA, 19 nt, Artificial Sequence
  Description of Artificial Sequence: Synthetic oligonucleotide
gcgcacggugaggauagcc

SEQ ID NO: 2604087 - RNA, 19 nt, Artificial Sequence
  Description of Artificial Sequence: Synthetic oligonucleotide
auagggcgagggacugcug

SEQ ID NO: 2604088 - RNA, 19 nt, Artificial Sequence
  Description of Artificial Sequence: Synthetic oligonucleotide
ggauagggcgagggacugc

SEQ ID NO: 2604089 - RNA, 19 nt, Artificial Sequence
  Description of Artificial Sequence: Synthetic oligonucleotide
cgggcacagcaaaagugac

SEQ ID NO: 2604090 - RNA, 19 nt, Artificial Sequence
  Description of Artificial Sequence: Synthetic oligonucleotide
acugggccuuuagccuuug

SEQ ID NO: 2604091 - RNA, 19 nt, Artificial Sequence
  Description of Artificial Sequence: Synthetic oligonucleotide
ggcagacaggggaaaguaa

SEQ ID NO: 2604092 - RNA, 19 nt, Artificial Sequence
  Description of Artificial Sequence: Synthetic oligonucleotide
caacugcuagccagacugu

SEQ ID NO: 2604093 - RNA, 19 nt, Artificial Sequence
  Description of Artificial Sequence: Synthetic oligonucleotide
cucugauacugagcaugaa

SEQ ID NO: 2604094 - RNA, 19 nt, Artificial Sequence
  Description of Artificial Sequence: Synthetic oligonucleotide
caccagccaggaggcagac

SEQ ID NO: 2604095 - RNA, 19 nt, Artificial Sequence
  Description of Artificial Sequence: Synthetic oligonucleotide
cugcaccgugggcucacca

SEQ ID NO: 2604096 - RNA, 19 nt, Artificial Sequence
  Description of Artificial Sequence: Synthetic oligonucleotide
gcugcccuugccagauccc

SEQ ID NO: 2604097 - RNA, 19 nt, Artificial Sequence
  Description of Artificial Sequence: Synthetic oligonucleotide
gcugacccagaguccugca

SEQ ID NO: 2604098 - RNA, 19 nt, Artificial Sequence
  Description of Artificial Sequence: Synthetic oligonucleotide
gcccauaggagcagcccca

SEQ ID NO: 2604099 - RNA, 19 nt, Artificial Sequence
  Description of Artificial Sequence: Synthetic oligonucleotide
cggugaggauagccaacgg

SEQ ID NO: 2604100 - RNA, 19 nt, Artificial Sequence
  Description of Artificial Sequence: Synthetic oligonucleotide
ggggcccauaggagcagcc

SEQ ID NO: 2604101 - RNA, 19 nt, Artificial Sequence
  Description of Artificial Sequence: Synthetic oligonucleotide
cccauaggagcagccccag

SEQ ID NO: 2604102 - RNA, 19 nt, Artificial Sequence
  Description of Artificial Sequence: Synthetic oligonucleotide
agccaacggagggcucuga

SEQ ID NO: 2604103 - RNA, 19 nt, Artificial Sequence
  Description of Artificial Sequence: Synthetic oligonucleotide
ccaccaacaguuugcucua

SEQ ID NO: 2604104 - RNA, 19 nt, Artificial Sequence
  Description of Artificial Sequence: Synthetic oligonucleotide
ccaacggagggcucugaua

SEQ ID NO: 2604105 - RNA, 19 nt, Artificial Sequence
  Description of Artificial Sequence: Synthetic oligonucleotide
accuuaccccugacaacua

SEQ ID NO: 2604106 - RNA, 19 nt, Artificial Sequence
  Description of Artificial Sequence: Synthetic oligonucleotide
ccaaggggaccuuaccccu

SEQ ID NO: 2604107 - RNA, 19 nt, Artificial Sequence
  Description of Artificial Sequence: Synthetic oligonucleotide
ggcccaacugcuagccaga

SEQ ID NO: 2604108 - RNA, 19 nt, Artificial Sequence
  Description of Artificial Sequence: Synthetic oligonucleotide
gcugcaggucugggagcgg

SEQ ID NO: 2604109 - RNA, 19 nt, Artificial Sequence
  Description of Artificial Sequence: Synthetic oligonucleotide
ggagcagccccaggccuca

SEQ ID NO: 2604110 - RNA, 19 nt, Artificial Sequence
  Description of Artificial Sequence: Synthetic oligonucleotide
uggagccguggcgcacggu

SEQ ID NO: 2604111 - RNA, 19 nt, Artificial Sequence
  Description of Artificial Sequence: Synthetic oligonucleotide
cugcugcccuugccagauc

SEQ ID NO: 2604112 - RNA, 19 nt, Artificial Sequence
  Description of Artificial Sequence: Synthetic oligonucleotide
gccguggcgcacggugagg

SEQ ID NO: 2604113 - RNA, 19 nt, Artificial Sequence
  Description of Artificial Sequence: Synthetic oligonucleotide
gcccaacugcuagccagac

SEQ ID NO: 2604114 - RNA, 19 nt, Artificial Sequence
  Description of Artificial Sequence: Synthetic oligonucleotide
gcccaccaacaguuugcuc

SEQ ID NO: 2604115 - RNA, 19 nt, Artificial Sequence
  Description of Artificial Sequence: Synthetic oligonucleotide
ccaucagcgcugacccaga

SEQ ID NO: 2604116 - RNA, 19 nt, Artificial Sequence
  Description of Artificial Sequence: Synthetic oligonucleotide
caccaacaguuugcucuaa

SEQ ID NO: 2604117 - RNA, 19 nt, Artificial Sequence
  Description of Artificial Sequence: Synthetic oligonucleotide
gacugggccuuuagccuuu

SEQ ID NO: 2604118 - RNA, 19 nt, Artificial Sequence
  Description of Artificial Sequence: Synthetic oligonucleotide
ccaguggcugcaggccaac

SEQ ID NO: 2604119 - RNA, 19 nt, Artificial Sequence
  Description of Artificial Sequence: Synthetic oligonucleotide
  modified_base (5)..(5): a, c, u, g, unknown or other
ggganccaggccaguggcu

SEQ ID NO: 2604120 - RNA, 19 nt, Artificial Sequence
  Description of Artificial Sequence: Synthetic oligonucleotide
ggccaacccaaggggaccu

SEQ ID NO: 2604121 - RNA, 19 nt, Artificial Sequence
  Description of Artificial Sequence: Synthetic oligonucleotide
gagcagccccaggccucac

SEQ ID NO: 2604122 - RNA, 19 nt, Artificial Sequence
  Description of Artificial Sequence: Synthetic oligonucleotide
gccaacggagggcucugau

SEQ ID NO: 2604123 - RNA, 19 nt, Artificial Sequence
  Description of Artificial Sequence: Synthetic oligonucleotide
ccguggcgcacggugagga

SEQ ID NO: 2604124 - RNA, 19 nt, Artificial Sequence
  Description of Artificial Sequence: Synthetic oligonucleotide
cacuaacugugaggaacuu

SEQ ID NO: 2604125 - RNA, 19 nt, Artificial Sequence
  Description of Artificial Sequence: Synthetic oligonucleotide
gcucacucauauagggauu

SEQ ID NO: 2604126 - RNA, 19 nt, Artificial Sequence
  Description of Artificial Sequence: Synthetic oligonucleotide
gcugcaccgugggcucacc

SEQ ID NO: 2604127 - RNA, 19 nt, Artificial Sequence
  Description of Artificial Sequence: Synthetic oligonucleotide
gccccaggccucacuguuc

SEQ ID NO: 2604128 - RNA, 19 nt, Artificial Sequence
  Description of Artificial Sequence: Synthetic oligonucleotide
ccuuaccccugacaacuau

SEQ ID NO: 2604129 - RNA, 19 nt, Artificial Sequence
  Description of Artificial Sequence: Synthetic oligonucleotide
cagcugcaccgugggcuca

SEQ ID NO: 2604130 - RNA, 19 nt, Artificial Sequence
  Description of Artificial Sequence: Synthetic oligonucleotide
ccaagggaugcccggccgu

SEQ ID NO: 2604131 - RNA, 19 nt, Artificial Sequence
  Description of Artificial Sequence: Synthetic oligonucleotide
cccuugccagaucccugca

SEQ ID NO: 2604132 - RNA, 19 nt, Artificial Sequence
  Description of Artificial Sequence: Synthetic oligonucleotide
caccaccagccaggaggca

SEQ ID NO: 2604133 - RNA, 19 nt, Artificial Sequence
  Description of Artificial Sequence: Synthetic oligonucleotide
ggcgcacggugaggauagc

SEQ ID NO: 2604134 - RNA, 19 nt, Artificial Sequence
  Description of Artificial Sequence: Synthetic oligonucleotide
ccaacccaaggggaccuua

SEQ ID NO: 2604135 - RNA, 19 nt, Artificial Sequence
  Description of Artificial Sequence: Synthetic oligonucleotide
gggcucugauacugagcau

SEQ ID NO: 2604136 - RNA, 19 nt, Artificial Sequence
  Description of Artificial Sequence: Synthetic oligonucleotide
cccaggccucacuguucuc

SEQ ID NO: 2604137 - RNA, 19 nt, Artificial Sequence
  Description of Artificial Sequence: Synthetic oligonucleotide
cccaacugcuagccagacu

SEQ ID NO: 2604138 - RNA, 19 nt, Artificial Sequence
  Description of Artificial Sequence: Synthetic oligonucleotide
ccgaggcagacaggggaaa

SEQ ID NO: 2604139 - RNA, 19 nt, Artificial Sequence
  Description of Artificial Sequence: Synthetic oligonucleotide
gggaugcccggccguggau

SEQ ID NO: 2604140 - RNA, 19 nt, Artificial Sequence
  Description of Artificial Sequence: Synthetic oligonucleotide
cccaugcagaaugguggcu

SEQ ID NO: 2604141 - RNA, 19 nt, Artificial Sequence
  Description of Artificial Sequence: Synthetic oligonucleotide
gcacacccucacaguggaa

SEQ ID NO: 2604142 - RNA, 19 nt, Artificial Sequence
  Description of Artificial Sequence: Synthetic oligonucleotide
ggggcccaauucagacucu

SEQ ID NO: 2604143 - RNA, 19 nt, Artificial Sequence
  Description of Artificial Sequence: Synthetic oligonucleotide
gcgagggacugcugcccuu

SEQ ID NO: 2604144 - RNA, 19 nt, Artificial Sequence
  Description of Artificial Sequence: Synthetic oligonucleotide
gccaacccaaggggaccuu

SEQ ID NO: 2604145 - RNA, 19 nt, Artificial Sequence
  Description of Artificial Sequence: Synthetic oligonucleotide
aauaaguaaauuuacuuau

SEQ ID NO: 2604146 - RNA, 19 nt, Artificial Sequence
  Description of Artificial Sequence: Synthetic oligonucleotide
uaaaauuuuaacuagguuu

SEQ ID NO: 2604147 - RNA, 19 nt, Artificial Sequence
  Description of Artificial Sequence: Synthetic oligonucleotide
aaaaggccgaaccagauag

SEQ ID NO: 2604148 - RNA, 19 nt, Artificial Sequence
  Description of Artificial Sequence: Synthetic oligonucleotide
aaugcuacaaaacaccuau

SEQ ID NO: 2604149 - RNA, 19 nt, Artificial Sequence
  Description of Artificial Sequence: Synthetic oligonucleotide
cuacaaaacaccuauuuag

SEQ ID NO: 2604150 - RNA, 19 nt, Artificial Sequence
  Description of Artificial Sequence: Synthetic oligonucleotide
uccaaguaaaauuuuaacu

SEQ ID NO: 2604151 - RNA, 19 nt, Artificial Sequence
  Description of Artificial Sequence: Synthetic oligonucleotide
uguacuugcauguagggac

SEQ ID NO: 2604152 - RNA, 19 nt, Artificial Sequence
  Description of Artificial Sequence: Synthetic oligonucleotide
cuagguuuauuuauaauug

SEQ ID NO: 2604153 - RNA, 19 nt, Artificial Sequence
  Description of Artificial Sequence: Synthetic oligonucleotide
guagggacaacucaguuag

SEQ ID NO: 2604154 - RNA, 19 nt, Artificial Sequence
  Description of Artificial Sequence: Synthetic oligonucleotide
uuuaacuagguuuauuuau

SEQ ID NO: 2604155 - RNA, 19 nt, Artificial Sequence
  Description of Artificial Sequence: Synthetic oligonucleotide
ucaauaaguaaauuuacuu

SEQ ID NO: 2604156 - RNA, 19 nt, Artificial Sequence
  Description of Artificial Sequence: Synthetic oligonucleotide
acuagguuuauuuauaauu

SEQ ID NO: 2604157 - RNA, 19 nt, Artificial Sequence
  Description of Artificial Sequence: Synthetic oligonucleotide
aaguaaaauuuuaacuagg

SEQ ID NO: 2604158 - RNA, 19 nt, Artificial Sequence
  Description of Artificial Sequence: Synthetic oligonucleotide
aaaauuuuaacuagguuua

SEQ ID NO: 2604159 - RNA, 19 nt, Artificial Sequence
  Description of Artificial Sequence: Synthetic oligonucleotide
auuuuaacuagguuuauuu

SEQ ID NO: 2604160 - RNA, 19 nt, Artificial Sequence
  Description of Artificial Sequence: Synthetic oligonucleotide
caaaacaccuauuuaguug

SEQ ID NO: 2604161 - RNA, 19 nt, Artificial Sequence
  Description of Artificial Sequence: Synthetic oligonucleotide
uacaaaacaccuauuuagu

SEQ ID NO: 2604162 - RNA, 19 nt, Artificial Sequence
  Description of Artificial Sequence: Synthetic oligonucleotide
uaaguaaauuuacuuauuu

SEQ ID NO: 2604163 - RNA, 19 nt, Artificial Sequence
  Description of Artificial Sequence: Synthetic oligonucleotide
aaguaaauuuacuuauuuu

SEQ ID NO: 2604164 - RNA, 19 nt, Artificial Sequence
  Description of Artificial Sequence: Synthetic oligonucleotide
aaggccgaaccagauaggc

SEQ ID NO: 2604165 - RNA, 19 nt, Artificial Sequence
  Description of Artificial Sequence: Synthetic oligonucleotide
uuaacuagguuuauuuaua

SEQ ID NO: 2604166 - RNA, 19 nt, Artificial Sequence
  Description of Artificial Sequence: Synthetic oligonucleotide
caaaugcuggcuauugucc

SEQ ID NO: 2604167 - RNA, 19 nt, Artificial Sequence
  Description of Artificial Sequence: Synthetic oligonucleotide
aaaaugcuacaaaacaccu

SEQ ID NO: 2604168 - RNA, 19 nt, Artificial Sequence
  Description of Artificial Sequence: Synthetic oligonucleotide
uguccaaguaaaauuuuaa

SEQ ID NO: 2604169 - RNA, 19 nt, Artificial Sequence
  Description of Artificial Sequence: Synthetic oligonucleotide
aaaugcuggcuauugucca

SEQ ID NO: 2604170 - RNA, 19 nt, Artificial Sequence
  Description of Artificial Sequence: Synthetic oligonucleotide
ugcuacaaaacaccuauuu

SEQ ID NO: 2604171 - RNA, 19 nt, Artificial Sequence
  Description of Artificial Sequence: Synthetic oligonucleotide
ugcauguagggacaacuca

SEQ ID NO: 2604172 - RNA, 19 nt, Artificial Sequence
  Description of Artificial Sequence: Synthetic oligonucleotide
uuuuaacuagguuuauuua

SEQ ID NO: 2604173 - RNA, 19 nt, Artificial Sequence
  Description of Artificial Sequence: Synthetic oligonucleotide
aaauccaaaugcuggcuau

SEQ ID NO: 2604174 - RNA, 19 nt, Artificial Sequence
  Description of Artificial Sequence: Synthetic oligonucleotide
aguaaaauuuuaacuaggu

SEQ ID NO: 2604175 - RNA, 19 nt, Artificial Sequence
  Description of Artificial Sequence: Synthetic oligonucleotide
aacaccuauuuaguugccg

SEQ ID NO: 2604176 - RNA, 19 nt, Artificial Sequence
  Description of Artificial Sequence: Synthetic oligonucleotide
caauaaguaaauuuacuua

SEQ ID NO: 2604177 - RNA, 19 nt, Artificial Sequence
  Description of Artificial Sequence: Synthetic oligonucleotide
aacuagguuuauuuauaau

SEQ ID NO: 2604178 - RNA, 19 nt, Artificial Sequence
  Description of Artificial Sequence: Synthetic oligonucleotide
guccaaguaaaauuuuaac

SEQ ID NO: 2604179 - RNA, 19 nt, Artificial Sequence
  Description of Artificial Sequence: Synthetic oligonucleotide
uaacuagguuuauuuauaa

SEQ ID NO: 2604180 - RNA, 19 nt, Artificial Sequence
  Description of Artificial Sequence: Synthetic oligonucleotide
uggcuauuguccaaguaaa

SEQ ID NO: 2604181 - RNA, 19 nt, Artificial Sequence
  Description of Artificial Sequence: Synthetic oligonucleotide
aagcgcacgaucuguuuug

SEQ ID NO: 2604182 - RNA, 19 nt, Artificial Sequence
  Description of Artificial Sequence: Synthetic oligonucleotide
uuguccaaguaaaauuuua

SEQ ID NO: 2604183 - RNA, 19 nt, Artificial Sequence
  Description of Artificial Sequence: Synthetic oligonucleotide
uguagggacaacucaguua

SEQ ID NO: 2604184 - RNA, 19 nt, Artificial Sequence
  Description of Artificial Sequence: Synthetic oligonucleotide
acaccuauuuaguugccgu

SEQ ID NO: 2604185 - RNA, 19 nt, Artificial Sequence
  Description of Artificial Sequence: Synthetic oligonucleotide
aauuuuaacuagguuuauu

SEQ ID NO: 2604186 - RNA, 19 nt, Artificial Sequence
  Description of Artificial Sequence: Synthetic oligonucleotide
acaaaacaccuauuuaguu

SEQ ID NO: 2604187 - RNA, 19 nt, Artificial Sequence
  Description of Artificial Sequence: Synthetic oligonucleotide
cacagguugguuaucuuuc

SEQ ID NO: 2604188 - RNA, 19 nt, Artificial Sequence
  Description of Artificial Sequence: Synthetic oligonucleotide
aaacaccuauuuaguugcc

SEQ ID NO: 2604189 - RNA, 19 nt, Artificial Sequence
  Description of Artificial Sequence: Synthetic oligonucleotide
ccaaguaaaauuuuaacua

SEQ ID NO: 2604190 - RNA, 19 nt, Artificial Sequence
  Description of Artificial Sequence: Synthetic oligonucleotide
aaugcuggcuauuguccaa

SEQ ID NO: 2604191 - RNA, 19 nt, Artificial Sequence
  Description of Artificial Sequence: Synthetic oligonucleotide
uuuugaaguuccugagcaa

SEQ ID NO: 2604192 - RNA, 19 nt, Artificial Sequence
  Description of Artificial Sequence: Synthetic oligonucleotide
cuggcuauuguccaaguaa

SEQ ID NO: 2604193 - RNA, 19 nt, Artificial Sequence
  Description of Artificial Sequence: Synthetic oligonucleotide
uugcauguagggacaacuc

SEQ ID NO: 2604194 - RNA, 19 nt, Artificial Sequence
  Description of Artificial Sequence: Synthetic oligonucleotide
aaauuuuaacuagguuuau

SEQ ID NO: 2604195 - RNA, 19 nt, Artificial Sequence
  Description of Artificial Sequence: Synthetic oligonucleotide
agguugguuaucuuucaaa

SEQ ID NO: 2604196 - RNA, 19 nt, Artificial Sequence
  Description of Artificial Sequence: Synthetic oligonucleotide
uugccgucaauaaguaaau

SEQ ID NO: 2604197 - RNA, 19 nt, Artificial Sequence
  Description of Artificial Sequence: Synthetic oligonucleotide
gguugguuaucuuucaaaa

SEQ ID NO: 2604198 - RNA, 19 nt, Artificial Sequence
  Description of Artificial Sequence: Synthetic oligonucleotide
acgaucuguuuugaaguuc

SEQ ID NO: 2604199 - RNA, 19 nt, Artificial Sequence
  Description of Artificial Sequence: Synthetic oligonucleotide
aaaggccgaaccagauagg

SEQ ID NO: 2604200 - RNA, 19 nt, Artificial Sequence
  Description of Artificial Sequence: Synthetic oligonucleotide
accuauuuaguugccguca

SEQ ID NO: 2604201 - RNA, 19 nt, Artificial Sequence
  Description of Artificial Sequence: Synthetic oligonucleotide
acagguugguuaucuuuca

SEQ ID NO: 2604202 - RNA, 19 nt, Artificial Sequence
  Description of Artificial Sequence: Synthetic oligonucleotide
aucuguuuugaaguuccug

SEQ ID NO: 2604203 - RNA, 19 nt, Artificial Sequence
  Description of Artificial Sequence: Synthetic oligonucleotide
acacagguugguuaucuuu

SEQ ID NO: 2604204 - RNA, 19 nt, Artificial Sequence
  Description of Artificial Sequence: Synthetic oligonucleotide
cuauuguccaaguaaaauu

SEQ ID NO: 2604205 - RNA, 19 nt, Artificial Sequence
  Description of Artificial Sequence: Synthetic oligonucleotide
aaaugcuacaaaacaccua

SEQ ID NO: 2604206 - RNA, 19 nt, Artificial Sequence
  Description of Artificial Sequence: Synthetic oligonucleotide
agcugcacccuggaagcgc

SEQ ID NO: 2604207 - RNA, 19 nt, Artificial Sequence
  Description of Artificial Sequence: Synthetic oligonucleotide
uagcacacagguugguuau

SEQ ID NO: 2604208 - RNA, 19 nt, Artificial Sequence
  Description of Artificial Sequence: Synthetic oligonucleotide
auccaaaugcuggcuauug

SEQ ID NO: 2604209 - RNA, 19 nt, Artificial Sequence
  Description of Artificial Sequence: Synthetic oligonucleotide
auaaguaaauuuacuuauu

SEQ ID NO: 2604210 - RNA, 19 nt, Artificial Sequence
  Description of Artificial Sequence: Synthetic oligonucleotide
guaaaauuuuaacuagguu

SEQ ID NO: 2604211 - RNA, 19 nt, Artificial Sequence
  Description of Artificial Sequence: Synthetic oligonucleotide
acccuggaagcgcacgauc

SEQ ID NO: 2604212 - RNA, 19 nt, Artificial Sequence
  Description of Artificial Sequence: Synthetic oligonucleotide
gcauguagggacaacucag

SEQ ID NO: 2604213 - RNA, 19 nt, Artificial Sequence
  Description of Artificial Sequence: Synthetic oligonucleotide
ccaaaugcuggcuauuguc

SEQ ID NO: 2604214 - RNA, 19 nt, Artificial Sequence
  Description of Artificial Sequence: Synthetic oligonucleotide
cgaucuguuuugaaguucc

SEQ ID NO: 2604215 - RNA, 19 nt, Artificial Sequence
  Description of Artificial Sequence: Synthetic oligonucleotide
gucaauaaguaaauuuacu

SEQ ID NO: 2604216 - RNA, 19 nt, Artificial Sequence
  Description of Artificial Sequence: Synthetic oligonucleotide
caccuauuuaguugccguc

SEQ ID NO: 2604217 - RNA, 19 nt, Artificial Sequence
  Description of Artificial Sequence: Synthetic oligonucleotide
aggccgaaccagauaggcc

SEQ ID NO: 2604218 - RNA, 19 nt, Artificial Sequence
  Description of Artificial Sequence: Synthetic oligonucleotide
cgucaauaaguaaauuuac

SEQ ID NO: 2604219 - RNA, 19 nt, Artificial Sequence
  Description of Artificial Sequence: Synthetic oligonucleotide
ugcacccuggaagcgcacg

SEQ ID NO: 2604220 - RNA, 19 nt, Artificial Sequence
  Description of Artificial Sequence: Synthetic oligonucleotide
auguagggacaacucaguu

SEQ ID NO: 2604221 - RNA, 19 nt, Artificial Sequence
  Description of Artificial Sequence: Synthetic oligonucleotide
aauccaaaugcuggcuauu

SEQ ID NO: 2604222 - RNA, 19 nt, Artificial Sequence
  Description of Artificial Sequence: Synthetic oligonucleotide
acuugcauguagggacaac

SEQ ID NO: 2604223 - RNA, 19 nt, Artificial Sequence
  Description of Artificial Sequence: Synthetic oligonucleotide
gcuacaaaacaccuauuua

SEQ ID NO: 2604224 - RNA, 19 nt, Artificial Sequence
  Description of Artificial Sequence: Synthetic oligonucleotide
ccgucaauaaguaaauuua

SEQ ID NO: 2604225 - RNA, 19 nt, Artificial Sequence
  Description of Artificial Sequence: Synthetic oligonucleotide
augcuggcuauuguccaag

SEQ ID NO: 2604226 - RNA, 19 nt, Artificial Sequence
  Description of Artificial Sequence: Synthetic oligonucleotide
cgcacgaucuguuuugaag

SEQ ID NO: 2604227 - RNA, 19 nt, Artificial Sequence
  Description of Artificial Sequence: Synthetic oligonucleotide
auuguccaaguaaaauuuu

SEQ ID NO: 2604228 - RNA, 19 nt, Artificial Sequence
  Description of Artificial Sequence: Synthetic oligonucleotide
uggaagcgcacgaucuguu

SEQ ID NO: 2604229 - RNA, 19 nt, Artificial Sequence
  Description of Artificial Sequence: Synthetic oligonucleotide
ggccgaaccagauaggccu

SEQ ID NO: 2604230 - RNA, 19 nt, Artificial Sequence
  Description of Artificial Sequence: Synthetic oligonucleotide
gcacgaucuguuuugaagu

SEQ ID NO: 2604231 - RNA, 19 nt, Artificial Sequence
  Description of Artificial Sequence: Synthetic oligonucleotide
ugcuggcuauuguccaagu

SEQ ID NO: 2604232 - RNA, 19 nt, Artificial Sequence
  Description of Artificial Sequence: Synthetic oligonucleotide
guacuugcauguagggaca

SEQ ID NO: 2604233 - RNA, 19 nt, Artificial Sequence
  Description of Artificial Sequence: Synthetic oligonucleotide
cauguagggacaacucagu

SEQ ID NO: 2604234 - RNA, 19 nt, Artificial Sequence
  Description of Artificial Sequence: Synthetic oligonucleotide
agcacacagguugguuauc

SEQ ID NO: 2604235 - RNA, 19 nt, Artificial Sequence
  Description of Artificial Sequence: Synthetic oligonucleotide
gaagcgcacgaucuguuuu

SEQ ID NO: 2604236 - RNA, 19 nt, Artificial Sequence
  Description of Artificial Sequence: Synthetic oligonucleotide
gccgucaauaaguaaauuu

SEQ ID NO: 2604237 - RNA, 19 nt, Artificial Sequence
  Description of Artificial Sequence: Synthetic oligonucleotide
uacuugcauguagggacaa

SEQ ID NO: 2604238 - RNA, 19 nt, Artificial Sequence
  Description of Artificial Sequence: Synthetic oligonucleotide
gcuauuguccaaguaaaau

SEQ ID NO: 2604239 - RNA, 19 nt, Artificial Sequence
  Description of Artificial Sequence: Synthetic oligonucleotide
cagguugguuaucuuucaa

SEQ ID NO: 2604240 - RNA, 19 nt, Artificial Sequence
  Description of Artificial Sequence: Synthetic oligonucleotide
agcgcacgaucuguuuuga

SEQ ID NO: 2604241 - RNA, 19 nt, Artificial Sequence
  Description of Artificial Sequence: Synthetic oligonucleotide
ccuggaagcgcacgaucug

SEQ ID NO: 2604242 - RNA, 19 nt, Artificial Sequence
  Description of Artificial Sequence: Synthetic oligonucleotide
gaucuguuuugaaguuccu

SEQ ID NO: 2604243 - RNA, 19 nt, Artificial Sequence
  Description of Artificial Sequence: Synthetic oligonucleotide
ccuauuuaguugccgucaa

SEQ ID NO: 2604244 - RNA, 19 nt, Artificial Sequence
  Description of Artificial Sequence: Synthetic oligonucleotide
cacgaucuguuuugaaguu

SEQ ID NO: 2604245 - RNA, 19 nt, Artificial Sequence
  Description of Artificial Sequence: Synthetic oligonucleotide
cuauuuaguugccgucaau

SEQ ID NO: 2604246 - RNA, 19 nt, Artificial Sequence
  Description of Artificial Sequence: Synthetic oligonucleotide
augcuacaaaacaccuauu

SEQ ID NO: 2604247 - RNA, 19 nt, Artificial Sequence
  Description of Artificial Sequence: Synthetic oligonucleotide
ggcuauuguccaaguaaaa

SEQ ID NO: 2604248 - RNA, 19 nt, Artificial Sequence
  Description of Artificial Sequence: Synthetic oligonucleotide
cuggaagcgcacgaucugu

SEQ ID NO: 2604249 - RNA, 19 nt, Artificial Sequence
  Description of Artificial Sequence: Synthetic oligonucleotide
gcuggcuauuguccaagua

SEQ ID NO: 2604250 - RNA, 19 nt, Artificial Sequence
  Description of Artificial Sequence: Synthetic oligonucleotide
gcacccuggaagcgcacga

SEQ ID NO: 2604251 - RNA, 19 nt, Artificial Sequence
  Description of Artificial Sequence: Synthetic oligonucleotide
cugcacccuggaagcgcac

SEQ ID NO: 2604252 - RNA, 19 nt, Artificial Sequence
  Description of Artificial Sequence: Synthetic oligonucleotide
gcugcacccuggaagcgca

SEQ ID NO: 2604253 - RNA, 19 nt, Artificial Sequence
  Description of Artificial Sequence: Synthetic oligonucleotide
gcacacagguugguuaucu

SEQ ID NO: 2604254 - RNA, 19 nt, Artificial Sequence
  Description of Artificial Sequence: Synthetic oligonucleotide
cccuggaagcgcacgaucu

SEQ ID NO: 2604255 - RNA, 19 nt, Artificial Sequence
  Description of Artificial Sequence: Synthetic oligonucleotide
ggaagcgcacgaucuguuu

SEQ ID NO: 2604256 - RNA, 19 nt, Artificial Sequence
  Description of Artificial Sequence: Synthetic oligonucleotide
cacacagguugguuaucuu

SEQ ID NO: 2604257 - RNA, 19 nt, Artificial Sequence
  Description of Artificial Sequence: Synthetic oligonucleotide
gccgaaccagauaggccuc

SEQ ID NO: 2604258 - RNA, 19 nt, Artificial Sequence
  Description of Artificial Sequence: Synthetic oligonucleotide
gcgcacgaucuguuuugaa

SEQ ID NO: 2604259 - RNA, 19 nt, Artificial Sequence
  Description of Artificial Sequence: Synthetic oligonucleotide
cgaaccagauaggccucac

SEQ ID NO: 2604260 - RNA, 19 nt, Artificial Sequence
  Description of Artificial Sequence: Synthetic oligonucleotide
ccgaaccagauaggccuca

SEQ ID NO: 2604261 - RNA, 19 nt, Artificial Sequence
  Description of Artificial Sequence: Synthetic oligonucleotide
cacccuggaagcgcacgau

SEQ ID NO: 2604262 - RNA, 19 nt, Artificial Sequence
  Description of Artificial Sequence: Synthetic oligonucleotide
aggcacagcacucucaggg

SEQ ID NO: 2604263 - RNA, 19 nt, Artificial Sequence
  Description of Artificial Sequence: Synthetic oligonucleotide
aaacccgccaggcacagca

SEQ ID NO: 2604264 - RNA, 19 nt, Artificial Sequence
  Description of Artificial Sequence: Synthetic oligonucleotide
gucaaaaggucccagcgug

SEQ ID NO: 2604265 - RNA, 19 nt, Artificial Sequence
  Description of Artificial Sequence: Synthetic oligonucleotide
aaggaguccgucaaaaggu

SEQ ID NO: 2604266 - RNA, 19 nt, Artificial Sequence
  Description of Artificial Sequence: Synthetic oligonucleotide
ucuucucacggaagccccg

SEQ ID NO: 2604267 - RNA, 19 nt, Artificial Sequence
  Description of Artificial Sequence: Synthetic oligonucleotide
cucacggaagccccgcucg

SEQ ID NO: 2604268 - RNA, 19 nt, Artificial Sequence
  Description of Artificial Sequence: Synthetic oligonucleotide
uccagucuucucacggaag

SEQ ID NO: 2604269 - RNA, 19 nt, Artificial Sequence
  Description of Artificial Sequence: Synthetic oligonucleotide
ucaaaaggucccagcgugu

SEQ ID NO: 2604270 - RNA, 19 nt, Artificial Sequence
  Description of Artificial Sequence: Synthetic oligonucleotide
uccgucaaaaggucccagc

SEQ ID NO: 2604271 - RNA, 19 nt, Artificial Sequence
  Description of Artificial Sequence: Synthetic oligonucleotide
gaguccgucaaaagguccc

SEQ ID NO: 2604272 - RNA, 19 nt, Artificial Sequence
  Description of Artificial Sequence: Synthetic oligonucleotide
uuccucagcgcuccagucu

SEQ ID NO: 2604273 - RNA, 19 nt, Artificial Sequence
  Description of Artificial Sequence: Synthetic oligonucleotide
ucugggaccgggugcggcc

SEQ ID NO: 2604274 - RNA, 19 nt, Artificial Sequence
  Description of Artificial Sequence: Synthetic oligonucleotide
acgagcucggcgcggcccc

SEQ ID NO: 2604275 - RNA, 19 nt, Artificial Sequence
  Description of Artificial Sequence: Synthetic oligonucleotide
agcacucucagggguugcc

SEQ ID NO: 2604276 - RNA, 19 nt, Artificial Sequence
  Description of Artificial Sequence: Synthetic oligonucleotide
ucgcucugccggaaacccg

SEQ ID NO: 2604277 - RNA, 19 nt, Artificial Sequence
  Description of Artificial Sequence: Synthetic oligonucleotide
aagccccgcucgcucugcc

SEQ ID NO: 2604278 - RNA, 19 nt, Artificial Sequence
  Description of Artificial Sequence: Synthetic oligonucleotide
ccgucaaaaggucccagcg

SEQ ID NO: 2604279 - RNA, 19 nt, Artificial Sequence
  Description of Artificial Sequence: Synthetic oligonucleotide
uccucagcgcuccagucuu

SEQ ID NO: 2604280 - RNA, 19 nt, Artificial Sequence
  Description of Artificial Sequence: Synthetic oligonucleotide
aggaguccgucaaaagguc

SEQ ID NO: 2604281 - RNA, 19 nt, Artificial Sequence
  Description of Artificial Sequence: Synthetic oligonucleotide
ugccucugggaccgggugc

SEQ ID NO: 2604282 - RNA, 19 nt, Artificial Sequence
  Description of Artificial Sequence: Synthetic oligonucleotide
cucgcucugccggaaaccc

SEQ ID NO: 2604283 - RNA, 19 nt, Artificial Sequence
  Description of Artificial Sequence: Synthetic oligonucleotide
ccagucuucucacggaagc

SEQ ID NO: 2604284 - RNA, 19 nt, Artificial Sequence
  Description of Artificial Sequence: Synthetic oligonucleotide
gcugaggcacacgagcucg

SEQ ID NO: 2604285 - RNA, 19 nt, Artificial Sequence
  Description of Artificial Sequence: Synthetic oligonucleotide
ucucacggaagccccgcuc

SEQ ID NO: 2604286 - RNA, 19 nt, Artificial Sequence
  Description of Artificial Sequence: Synthetic oligonucleotide
acucucagggguugccgug

SEQ ID NO: 2604287 - RNA, 19 nt, Artificial Sequence
  Description of Artificial Sequence: Synthetic oligonucleotide
ggcacagcacucucagggg

SEQ ID NO: 2604288 - RNA, 19 nt, Artificial Sequence
  Description of Artificial Sequence: Synthetic oligonucleotide
ucucagggguugccgugcc

SEQ ID NO: 2604289 - RNA, 19 nt, Artificial Sequence
  Description of Artificial Sequence: Synthetic oligonucleotide
gucuucucacggaagcccc

SEQ ID NO: 2604290 - RNA, 19 nt, Artificial Sequence
  Description of Artificial Sequence: Synthetic oligonucleotide
ucacggaagccccgcucgc

SEQ ID NO: 2604291 - RNA, 19 nt, Artificial Sequence
  Description of Artificial Sequence: Synthetic oligonucleotide
cuuccucagcgcuccaguc

SEQ ID NO: 2604292 - RNA, 19 nt, Artificial Sequence
  Description of Artificial Sequence: Synthetic oligonucleotide
cugaggcacacgagcucgg

SEQ ID NO: 2604293 - RNA, 19 nt, Artificial Sequence
  Description of Artificial Sequence: Synthetic oligonucleotide
cuucucacggaagccccgc

SEQ ID NO: 2604294 - RNA, 19 nt, Artificial Sequence
  Description of Artificial Sequence: Synthetic oligonucleotide
uucucacggaagccccgcu

SEQ ID NO: 2604295 - RNA, 19 nt, Artificial Sequence
  Description of Artificial Sequence: Synthetic oligonucleotide
ugaggcacacgagcucggc

SEQ ID NO: 2604296 - RNA, 19 nt, Artificial Sequence
  Description of Artificial Sequence: Synthetic oligonucleotide
ugccggaaacccgccaggc

SEQ ID NO: 2604297 - RNA, 19 nt, Artificial Sequence
  Description of Artificial Sequence: Synthetic oligonucleotide
ucuggcccggcgcccucgg

SEQ ID NO: 2604298 - RNA, 19 nt, Artificial Sequence
  Description of Artificial Sequence: Synthetic oligonucleotide
cucucagggguugccgugc

SEQ ID NO: 2604299 - RNA, 19 nt, Artificial Sequence
  Description of Artificial Sequence: Synthetic oligonucleotide
acacgagcucggcgcggcc

SEQ ID NO: 2604300 - RNA, 19 nt, Artificial Sequence
  Description of Artificial Sequence: Synthetic oligonucleotide
caggcacagcacucucagg

SEQ ID NO: 2604301 - RNA, 19 nt, Artificial Sequence
  Description of Artificial Sequence: Synthetic oligonucleotide
uggcccggcgcccucggga

SEQ ID NO: 2604302 - RNA, 19 nt, Artificial Sequence
  Description of Artificial Sequence: Synthetic oligonucleotide
ccggaaacccgccaggcac

SEQ ID NO: 2604303 - RNA, 19 nt, Artificial Sequence
  Description of Artificial Sequence: Synthetic oligonucleotide
cccgcugaggcacacgagc

SEQ ID NO: 2604304 - RNA, 19 nt, Artificial Sequence
  Description of Artificial Sequence: Synthetic oligonucleotide
aacccgccaggcacagcac

SEQ ID NO: 2604305 - RNA, 19 nt, Artificial Sequence
  Description of Artificial Sequence: Synthetic oligonucleotide
aguccgucaaaagguccca

SEQ ID NO: 2604306 - RNA, 19 nt, Artificial Sequence
  Description of Artificial Sequence: Synthetic oligonucleotide
ggcacacgagcucggcgcg

SEQ ID NO: 2604307 - RNA, 19 nt, Artificial Sequence
  Description of Artificial Sequence: Synthetic oligonucleotide
ggaguccgucaaaaggucc

SEQ ID NO: 2604308 - RNA, 19 nt, Artificial Sequence
  Description of Artificial Sequence: Synthetic oligonucleotide
ugggaccgggugcggcccg

SEQ ID NO: 2604309 - RNA, 19 nt, Artificial Sequence
  Description of Artificial Sequence: Synthetic oligonucleotide
acccgccaggcacagcacu

SEQ ID NO: 2604310 - RNA, 19 nt, Artificial Sequence
  Description of Artificial Sequence: Synthetic oligonucleotide
agcgccuuccucagcgcuc

SEQ ID NO: 2604311 - RNA, 19 nt, Artificial Sequence
  Description of Artificial Sequence: Synthetic oligonucleotide
cugccucugggaccgggug

SEQ ID NO: 2604312 - RNA, 19 nt, Artificial Sequence
  Description of Artificial Sequence: Synthetic oligonucleotide
agccccgcucgcucugccg

SEQ ID NO: 2604313 - RNA, 19 nt, Artificial Sequence
  Description of Artificial Sequence: Synthetic oligonucleotide
accgggugcggcccgcuga

SEQ ID NO: 2604314 - RNA, 19 nt, Artificial Sequence
  Description of Artificial Sequence: Synthetic oligonucleotide
cacacgagcucggcgcggc

SEQ ID NO: 2604315 - RNA, 19 nt, Artificial Sequence
  Description of Artificial Sequence: Synthetic oligonucleotide
ucagcgcuccagucuucuc

SEQ ID NO: 2604316 - RNA, 19 nt, Artificial Sequence
  Description of Artificial Sequence: Synthetic oligonucleotide
accgggcccggagucuggc

SEQ ID NO: 2604317 - RNA, 19 nt, Artificial Sequence
  Description of Artificial Sequence: Synthetic oligonucleotide
gggugcggcccgcugaggc

SEQ ID NO: 2604318 - RNA, 19 nt, Artificial Sequence
  Description of Artificial Sequence: Synthetic oligonucleotide
gccucugggaccgggugcg

SEQ ID NO: 2604319 - RNA, 19 nt, Artificial Sequence
  Description of Artificial Sequence: Synthetic oligonucleotide
cacgagcucggcgcggccc

SEQ ID NO: 2604320 - RNA, 19 nt, Artificial Sequence
  Description of Artificial Sequence: Synthetic oligonucleotide
ucgggagcugcugccucug

SEQ ID NO: 2604321 - RNA, 19 nt, Artificial Sequence
  Description of Artificial Sequence: Synthetic oligonucleotide
gcacucucagggguugccg

SEQ ID NO: 2604322 - RNA, 19 nt, Artificial Sequence
  Description of Artificial Sequence: Synthetic oligonucleotide
cucugggaccgggugcggc

SEQ ID NO: 2604323 - RNA, 19 nt, Artificial Sequence
  Description of Artificial Sequence: Synthetic oligonucleotide
cgcucugccggaaacccgc

SEQ ID NO: 2604324 - RNA, 19 nt, Artificial Sequence
  Description of Artificial Sequence: Synthetic oligonucleotide
agucuggcccggcgcccuc

SEQ ID NO: 2604325 - RNA, 19 nt, Artificial Sequence
  Description of Artificial Sequence: Synthetic oligonucleotide
gaagccccgcucgcucugc

SEQ ID NO: 2604326 - RNA, 19 nt, Artificial Sequence
  Description of Artificial Sequence: Synthetic oligonucleotide
ggaaacccgccaggcacag

SEQ ID NO: 2604327 - RNA, 19 nt, Artificial Sequence
  Description of Artificial Sequence: Synthetic oligonucleotide
cugggaccgggugcggccc

SEQ ID NO: 2604328 - RNA, 19 nt, Artificial Sequence
  Description of Artificial Sequence: Synthetic oligonucleotide
gaaacccgccaggcacagc

SEQ ID NO: 2604329 - RNA, 19 nt, Artificial Sequence
  Description of Artificial Sequence: Synthetic oligonucleotide
gggcccggagucuggcccg

SEQ ID NO: 2604330 - RNA, 19 nt, Artificial Sequence
  Description of Artificial Sequence: Synthetic oligonucleotide
ggcccgcugaggcacacga

SEQ ID NO: 2604331 - RNA, 19 nt, Artificial Sequence
  Description of Artificial Sequence: Synthetic oligonucleotide
ggaagccccgcucgcucug

SEQ ID NO: 2604332 - RNA, 19 nt, Artificial Sequence
  Description of Artificial Sequence: Synthetic oligonucleotide
gugcggcccgcugaggcac

SEQ ID NO: 2604333 - RNA, 19 nt, Artificial Sequence
  Description of Artificial Sequence: Synthetic oligonucleotide
gaccgggugcggcccgcug

SEQ ID NO: 2604334 - RNA, 19 nt, Artificial Sequence
  Description of Artificial Sequence: Synthetic oligonucleotide
cacucucagggguugccgu

SEQ ID NO: 2604335 - RNA, 19 nt, Artificial Sequence
  Description of Artificial Sequence: Synthetic oligonucleotide
gcucgcucugccggaaacc

SEQ ID NO: 2604336 - RNA, 19 nt, Artificial Sequence
  Description of Artificial Sequence: Synthetic oligonucleotide
ugcggcccgcugaggcaca

SEQ ID NO: 2604337 - RNA, 19 nt, Artificial Sequence
  Description of Artificial Sequence: Synthetic oligonucleotide
caccgggcccggagucugg

SEQ ID NO: 2604338 - RNA, 19 nt, Artificial Sequence
  Description of Artificial Sequence: Synthetic oligonucleotide
agcaccgggcccggagucu

SEQ ID NO: 2604339 - RNA, 19 nt, Artificial Sequence
  Description of Artificial Sequence: Synthetic oligonucleotide
ggcccggcgcccucgggag

SEQ ID NO: 2604340 - RNA, 19 nt, Artificial Sequence
  Description of Artificial Sequence: Synthetic oligonucleotide
cagcacucucagggguugc

SEQ ID NO: 2604341 - RNA, 19 nt, Artificial Sequence
  Description of Artificial Sequence: Synthetic oligonucleotide
gucuggcccggcgcccucg

SEQ ID NO: 2604342 - RNA, 19 nt, Artificial Sequence
  Description of Artificial Sequence: Synthetic oligonucleotide
ggugcggcccgcugaggca

SEQ ID NO: 2604343 - RNA, 19 nt, Artificial Sequence
  Description of Artificial Sequence: Synthetic oligonucleotide
ccggagucuggcccggcgc

SEQ ID NO: 2604344 - RNA, 19 nt, Artificial Sequence
  Description of Artificial Sequence: Synthetic oligonucleotide
cccgcagcgccuuccucag

SEQ ID NO: 2604345 - RNA, 19 nt, Artificial Sequence
  Description of Artificial Sequence: Synthetic oligonucleotide
gcgcuccagucuucucacg

SEQ ID NO: 2604346 - RNA, 19 nt, Artificial Sequence
  Description of Artificial Sequence: Synthetic oligonucleotide
gcacagcacucucaggggu

SEQ ID NO: 2604347 - RNA, 19 nt, Artificial Sequence
  Description of Artificial Sequence: Synthetic oligonucleotide
gcgccuuccucagcgcucc

SEQ ID NO: 2604348 - RNA, 19 nt, Artificial Sequence
  Description of Artificial Sequence: Synthetic oligonucleotide
gcccucgggagcugcugcc

SEQ ID NO: 2604349 - RNA, 19 nt, Artificial Sequence
  Description of Artificial Sequence: Synthetic oligonucleotide
agcucggcgcggccccgca

SEQ ID NO: 2604350 - RNA, 19 nt, Artificial Sequence
  Description of Artificial Sequence: Synthetic oligonucleotide
gccggaaacccgccaggca

SEQ ID NO: 2604351 - RNA, 19 nt, Artificial Sequence
  Description of Artificial Sequence: Synthetic oligonucleotide
cccggagucuggcccggcg

SEQ ID NO: 2604352 - RNA, 19 nt, Artificial Sequence
  Description of Artificial Sequence: Synthetic oligonucleotide
cacagcacucucagggguu

SEQ ID NO: 2604353 - RNA, 19 nt, Artificial Sequence
  Description of Artificial Sequence: Synthetic oligonucleotide
ggagucuggcccggcgccc

SEQ ID NO: 2604354 - RNA, 19 nt, Artificial Sequence
  Description of Artificial Sequence: Synthetic oligonucleotide
cccgccaggcacagcacuc

SEQ ID NO: 2604355 - RNA, 19 nt, Artificial Sequence
  Description of Artificial Sequence: Synthetic oligonucleotide
cuggcccggcgcccucggg

SEQ ID NO: 2604356 - RNA, 19 nt, Artificial Sequence
  Description of Artificial Sequence: Synthetic oligonucleotide
cggagucuggcccggcgcc

SEQ ID NO: 2604357 - RNA, 19 nt, Artificial Sequence
  Description of Artificial Sequence: Synthetic oligonucleotide
gccuuccucagcgcuccag

SEQ ID NO: 2604358 - RNA, 19 nt, Artificial Sequence
  Description of Artificial Sequence: Synthetic oligonucleotide
cucgggagcugcugccucu

SEQ ID NO: 2604359 - RNA, 19 nt, Artificial Sequence
  Description of Artificial Sequence: Synthetic oligonucleotide
gcacacgagcucggcgcgg

SEQ ID NO: 2604360 - RNA, 19 nt, Artificial Sequence
  Description of Artificial Sequence: Synthetic oligonucleotide
cgggcccggagucuggccc

SEQ ID NO: 2604361 - RNA, 19 nt, Artificial Sequence
  Description of Artificial Sequence: Synthetic oligonucleotide
gagcucggcgcggccccgc

SEQ ID NO: 2604362 - RNA, 19 nt, Artificial Sequence
  Description of Artificial Sequence: Synthetic oligonucleotide
cucagcgcuccagucuucu

SEQ ID NO: 2604363 - RNA, 19 nt, Artificial Sequence
  Description of Artificial Sequence: Synthetic oligonucleotide
ccgggugcggcccgcugag

SEQ ID NO: 2604364 - RNA, 19 nt, Artificial Sequence
  Description of Artificial Sequence: Synthetic oligonucleotide
gccaggcacagcacucuca

SEQ ID NO: 2604365 - RNA, 19 nt, Artificial Sequence
  Description of Artificial Sequence: Synthetic oligonucleotide
gcaccgggcccggagucug

SEQ ID NO: 2604366 - RNA, 19 nt, Artificial Sequence
  Description of Artificial Sequence: Synthetic oligonucleotide
cagcgccuuccucagcgcu

SEQ ID NO: 2604367 - RNA, 19 nt, Artificial Sequence
  Description of Artificial Sequence: Synthetic oligonucleotide
ccucgggagcugcugccuc

SEQ ID NO: 2604368 - RNA, 19 nt, Artificial Sequence
  Description of Artificial Sequence: Synthetic oligonucleotide
gcucugccggaaacccgcc

SEQ ID NO: 2604369 - RNA, 19 nt, Artificial Sequence
  Description of Artificial Sequence: Synthetic oligonucleotide
cggagcaccgggcccggag

SEQ ID NO: 2604370 - RNA, 19 nt, Artificial Sequence
  Description of Artificial Sequence: Synthetic oligonucleotide
cgcucgcucugccggaaac

SEQ ID NO: 2604371 - RNA, 19 nt, Artificial Sequence
  Description of Artificial Sequence: Synthetic oligonucleotide
cgcugaggcacacgagcuc

SEQ ID NO: 2604372 - RNA, 19 nt, Artificial Sequence
  Description of Artificial Sequence: Synthetic oligonucleotide
ccuuccucagcgcuccagu

SEQ ID NO: 2604373 - RNA, 19 nt, Artificial Sequence
  Description of Artificial Sequence: Synthetic oligonucleotide
cggaaacccgccaggcaca

SEQ ID NO: 2604374 - RNA, 19 nt, Artificial Sequence
  Description of Artificial Sequence: Synthetic oligonucleotide
cgucaaaaggucccagcgu

SEQ ID NO: 2604375 - RNA, 19 nt, Artificial Sequence
  Description of Artificial Sequence: Synthetic oligonucleotide
ggcccggagucuggcccgg

SEQ ID NO: 2604376 - RNA, 19 nt, Artificial Sequence
  Description of Artificial Sequence: Synthetic oligonucleotide
gcccgcugaggcacacgag

SEQ ID NO: 2604377 - RNA, 19 nt, Artificial Sequence
  Description of Artificial Sequence: Synthetic oligonucleotide
cgcccucgggagcugcugc

SEQ ID NO: 2604378 - RNA, 19 nt, Artificial Sequence
  Description of Artificial Sequence: Synthetic oligonucleotide
gcucggcgcggccccgcag

SEQ ID NO: 2604379 - RNA, 19 nt, Artificial Sequence
  Description of Artificial Sequence: Synthetic oligonucleotide
ccucagcgcuccagucuuc

SEQ ID NO: 2604380 - RNA, 19 nt, Artificial Sequence
  Description of Artificial Sequence: Synthetic oligonucleotide
cacggaagccccgcucgcu

SEQ ID NO: 2604381 - RNA, 19 nt, Artificial Sequence
  Description of Artificial Sequence: Synthetic oligonucleotide
ccgcugaggcacacgagcu

SEQ ID NO: 2604382 - RNA, 19 nt, Artificial Sequence
  Description of Artificial Sequence: Synthetic oligonucleotide
ccgggcccggagucuggcc

SEQ ID NO: 2604383 - RNA, 19 nt, Artificial Sequence
  Description of Artificial Sequence: Synthetic oligonucleotide
cugcugccucugggaccgg

SEQ ID NO: 2604384 - RNA, 19 nt, Artificial Sequence
  Description of Artificial Sequence: Synthetic oligonucleotide
ccucugggaccgggugcgg

SEQ ID NO: 2604385 - RNA, 19 nt, Artificial Sequence
  Description of Artificial Sequence: Synthetic oligonucleotide
gcgcccucgggagcugcug

SEQ ID NO: 2604386 - RNA, 19 nt, Artificial Sequence
  Description of Artificial Sequence: Synthetic oligonucleotide
gggaccgggugcggcccgc

SEQ ID NO: 2604387 - RNA, 19 nt, Artificial Sequence
  Description of Artificial Sequence: Synthetic oligonucleotide
cgccaggcacagcacucuc

SEQ ID NO: 2604388 - RNA, 19 nt, Artificial Sequence
  Description of Artificial Sequence: Synthetic oligonucleotide
gcugccucugggaccgggu

SEQ ID NO: 2604389 - RNA, 19 nt, Artificial Sequence
  Description of Artificial Sequence: Synthetic oligonucleotide
ccgcagcgccuuccucagc

SEQ ID NO: 2604390 - RNA, 19 nt, Artificial Sequence
  Description of Artificial Sequence: Synthetic oligonucleotide
gccccgcagcgccuuccuc

SEQ ID NO: 2604391 - RNA, 19 nt, Artificial Sequence
  Description of Artificial Sequence: Synthetic oligonucleotide
ggccccgcagcgccuuccu

SEQ ID NO: 2604392 - RNA, 19 nt, Artificial Sequence
  Description of Artificial Sequence: Synthetic oligonucleotide
cgagcucggcgcggccccg

SEQ ID NO: 2604393 - RNA, 19 nt, Artificial Sequence
  Description of Artificial Sequence: Synthetic oligonucleotide
ccccgcucgcucugccgga

SEQ ID NO: 2604394 - RNA, 19 nt, Artificial Sequence
  Description of Artificial Sequence: Synthetic oligonucleotide
gcggcccgcugaggcacac

SEQ ID NO: 2604395 - RNA, 19 nt, Artificial Sequence
  Description of Artificial Sequence: Synthetic oligonucleotide
gcccggagucuggcccggc

SEQ ID NO: 2604396 - RNA, 19 nt, Artificial Sequence
  Description of Artificial Sequence: Synthetic oligonucleotide
cggaagccccgcucgcucu

SEQ ID NO: 2604397 - RNA, 19 nt, Artificial Sequence
  Description of Artificial Sequence: Synthetic oligonucleotide
ccgccaggcacagcacucu

SEQ ID NO: 2604398 - RNA, 19 nt, Artificial Sequence
  Description of Artificial Sequence: Synthetic oligonucleotide
cggcccgcugaggcacacg

SEQ ID NO: 2604399 - RNA, 19 nt, Artificial Sequence
  Description of Artificial Sequence: Synthetic oligonucleotide
cgggugcggcccgcugagg

SEQ ID NO: 2604400 - RNA, 19 nt, Artificial Sequence
  Description of Artificial Sequence: Synthetic oligonucleotide
cggccccgcagcgccuucc

SEQ ID NO: 2604401 - RNA, 19 nt, Artificial Sequence
  Description of Artificial Sequence: Synthetic oligonucleotide
gcggccccgcagcgccuuc

SEQ ID NO: 2604402 - RNA, 19 nt, Artificial Sequence
  Description of Artificial Sequence: Synthetic oligonucleotide
ccgcucgcucugccggaaa

SEQ ID NO: 2604403 - RNA, 19 nt, Artificial Sequence
  Description of Artificial Sequence: Synthetic oligonucleotide
ggcgcccucgggagcugcu

SEQ ID NO: 2604404 - RNA, 19 nt, Artificial Sequence
  Description of Artificial Sequence: Synthetic oligonucleotide
cccucgggagcugcugccu

SEQ ID NO: 2604405 - RNA, 19 nt, Artificial Sequence
  Description of Artificial Sequence: Synthetic oligonucleotide
cccggcgcccucgggagcu

SEQ ID NO: 2604406 - RNA, 19 nt, Artificial Sequence
  Description of Artificial Sequence: Synthetic oligonucleotide
cggcgcccucgggagcugc

SEQ ID NO: 2604407 - RNA, 19 nt, Artificial Sequence
  Description of Artificial Sequence: Synthetic oligonucleotide
ggaccgggugcggcccgcu

SEQ ID NO: 2604408 - RNA, 19 nt, Artificial Sequence
  Description of Artificial Sequence: Synthetic oligonucleotide
ccggcgcccucgggagcug

SEQ ID NO: 2604409 - RNA, 19 nt, Artificial Sequence
  Description of Artificial Sequence: Synthetic oligonucleotide
cgccuuccucagcgcucca

SEQ ID NO: 2604410 - RNA, 19 nt, Artificial Sequence
  Description of Artificial Sequence: Synthetic oligonucleotide
ccggagcaccgggcccgga

SEQ ID NO: 2604411 - RNA, 19 nt, Artificial Sequence
  Description of Artificial Sequence: Synthetic oligonucleotide
gcgcggccccgcagcgccu

SEQ ID NO: 2604412 - RNA, 19 nt, Artificial Sequence
  Description of Artificial Sequence: Synthetic oligonucleotide
auaucaaacagacagaugc

SEQ ID NO: 2604413 - RNA, 19 nt, Artificial Sequence
  Description of Artificial Sequence: Synthetic oligonucleotide
uuguauacaaccuuguugg

SEQ ID NO: 2604414 - RNA, 19 nt, Artificial Sequence
  Description of Artificial Sequence: Synthetic oligonucleotide
ggugauaucaaacagacag

SEQ ID NO: 2604415 - RNA, 19 nt, Artificial Sequence
  Description of Artificial Sequence: Synthetic oligonucleotide
acugauugaucccacaagc

SEQ ID NO: 2604416 - RNA, 19 nt, Artificial Sequence
  Description of Artificial Sequence: Synthetic oligonucleotide
aagauagaaggcccaagcc

SEQ ID NO: 2604417 - RNA, 19 nt, Artificial Sequence
  Description of Artificial Sequence: Synthetic oligonucleotide
aaacuuggcaggcuguugc

SEQ ID NO: 2604418 - RNA, 19 nt, Artificial Sequence
  Description of Artificial Sequence: Synthetic oligonucleotide
uuaaauucaggacuaguug

SEQ ID NO: 2604419 - RNA, 19 nt, Artificial Sequence
  Description of Artificial Sequence: Synthetic oligonucleotide
aacagacagaugcagaguc

SEQ ID NO: 2604420 - RNA, 19 nt, Artificial Sequence
  Description of Artificial Sequence: Synthetic oligonucleotide
uacaauaccugccaaaaca

SEQ ID NO: 2604421 - RNA, 19 nt, Artificial Sequence
  Description of Artificial Sequence: Synthetic oligonucleotide
ugaaacaccacauaucgga

SEQ ID NO: 2604422 - RNA, 19 nt, Artificial Sequence
  Description of Artificial Sequence: Synthetic oligonucleotide
uaaauucaggacuaguugc

SEQ ID NO: 2604423 - RNA, 19 nt, Artificial Sequence
  Description of Artificial Sequence: Synthetic oligonucleotide
ugagcuuccguucaaacug

SEQ ID NO: 2604424 - RNA, 19 nt, Artificial Sequence
  Description of Artificial Sequence: Synthetic oligonucleotide
aauggagucguugagcuuc

SEQ ID NO: 2604425 - RNA, 19 nt, Artificial Sequence
  Description of Artificial Sequence: Synthetic oligonucleotide
uccaccaggacgaacaucc

SEQ ID NO: 2604426 - RNA, 19 nt, Artificial Sequence
  Description of Artificial Sequence: Synthetic oligonucleotide
ucaucgaagaacccuaaag

SEQ ID NO: 2604427 - RNA, 19 nt, Artificial Sequence
  Description of Artificial Sequence: Synthetic oligonucleotide
agaaugucaucgaagaacc

SEQ ID NO: 2604428 - RNA, 19 nt, Artificial Sequence
  Description of Artificial Sequence: Synthetic oligonucleotide
ggugaaacaccacauaucg

SEQ ID NO: 2604429 - RNA, 19 nt, Artificial Sequence
  Description of Artificial Sequence: Synthetic oligonucleotide
uuggugauaucaaacagac

SEQ ID NO: 2604430 - RNA, 19 nt, Artificial Sequence
  Description of Artificial Sequence: Synthetic oligonucleotide
aauacauaggcaucuucca

SEQ ID NO: 2604431 - RNA, 19 nt, Artificial Sequence
  Description of Artificial Sequence: Synthetic oligonucleotide
guuguauacaaccuuguug

SEQ ID NO: 2604432 - RNA, 19 nt, Artificial Sequence
  Description of Artificial Sequence: Synthetic oligonucleotide
agcucaguaguacaauacc

SEQ ID NO: 2604433 - RNA, 19 nt, Artificial Sequence
  Description of Artificial Sequence: Synthetic oligonucleotide
aucgaagaacccuaaagag

SEQ ID NO: 2604434 - RNA, 19 nt, Artificial Sequence
  Description of Artificial Sequence: Synthetic oligonucleotide
aaccuuguuggccaauuuc

SEQ ID NO: 2604435 - RNA, 19 nt, Artificial Sequence
  Description of Artificial Sequence: Synthetic oligonucleotide
gaauacauaggcaucuucc

SEQ ID NO: 2604436 - RNA, 19 nt, Artificial Sequence
  Description of Artificial Sequence: Synthetic oligonucleotide
ucggaaauggacuuuggug

SEQ ID NO: 2604437 - RNA, 19 nt, Artificial Sequence
  Description of Artificial Sequence: Synthetic oligonucleotide
auaggcaucuuccagcuug

SEQ ID NO: 2604438 - RNA, 19 nt, Artificial Sequence
  Description of Artificial Sequence: Synthetic oligonucleotide
acccuaaagagacaugcac

SEQ ID NO: 2604439 - RNA, 19 nt, Artificial Sequence
  Description of Artificial Sequence: Synthetic oligonucleotide
aauaccugccaaaacauga

SEQ ID NO: 2604440 - RNA, 19 nt, Artificial Sequence
  Description of Artificial Sequence: Synthetic oligonucleotide
augagaaugucaucgaaga

SEQ ID NO: 2604441 - RNA, 19 nt, Artificial Sequence
  Description of Artificial Sequence: Synthetic oligonucleotide
caauuucuuguucaguucc

SEQ ID NO: 2604442 - RNA, 19 nt, Artificial Sequence
  Description of Artificial Sequence: Synthetic oligonucleotide
aaugucaucgaagaacccu

SEQ ID NO: 2604443 - RNA, 19 nt, Artificial Sequence
  Description of Artificial Sequence: Synthetic oligonucleotide
aguaguacaauaccugcca

SEQ ID NO: 2604444 - RNA, 19 nt, Artificial Sequence
  Description of Artificial Sequence: Synthetic oligonucleotide
ucgaagaacccuaaagaga

SEQ ID NO: 2604445 - RNA, 19 nt, Artificial Sequence
  Description of Artificial Sequence: Synthetic oligonucleotide
uacauaggcaucuuccagc

SEQ ID NO: 2604446 - RNA, 19 nt, Artificial Sequence
  Description of Artificial Sequence: Synthetic oligonucleotide
ugauugaucccacaagcgu

SEQ ID NO: 2604447 - RNA, 19 nt, Artificial Sequence
  Description of Artificial Sequence: Synthetic oligonucleotide
gagaaugucaucgaagaac

SEQ ID NO: 2604448 - RNA, 19 nt, Artificial Sequence
  Description of Artificial Sequence: Synthetic oligonucleotide
guucaaacugccauggagg

SEQ ID NO: 2604449 - RNA, 19 nt, Artificial Sequence
  Description of Artificial Sequence: Synthetic oligonucleotide
uugaucuucccgaugagaa

SEQ ID NO: 2604450 - RNA, 19 nt, Artificial Sequence
  Description of Artificial Sequence: Synthetic oligonucleotide
gaacccuaaagagacaugc

SEQ ID NO: 2604451 - RNA, 19 nt, Artificial Sequence
  Description of Artificial Sequence: Synthetic oligonucleotide
aagccuggcucacugauug

SEQ ID NO: 2604452 - RNA, 19 nt, Artificial Sequence
  Description of Artificial Sequence: Synthetic oligonucleotide
agauagaaggcccaagccu

SEQ ID NO: 2604453 - RNA, 19 nt, Artificial Sequence
  Description of Artificial Sequence: Synthetic oligonucleotide
gaugagaaugucaucgaag

SEQ ID NO: 2604454 - RNA, 19 nt, Artificial Sequence
  Description of Artificial Sequence: Synthetic oligonucleotide
caagauagaaggcccaagc

SEQ ID NO: 2604455 - RNA, 19 nt, Artificial Sequence
  Description of Artificial Sequence: Synthetic oligonucleotide
gaugcagagucccacguug

SEQ ID NO: 2604456 - RNA, 19 nt, Artificial Sequence
  Description of Artificial Sequence: Synthetic oligonucleotide
ugguccaccaagauagaag

SEQ ID NO: 2604457 - RNA, 19 nt, Artificial Sequence
  Description of Artificial Sequence: Synthetic oligonucleotide
aacaccacauaucggaaau

SEQ ID NO: 2604458 - RNA, 19 nt, Artificial Sequence
  Description of Artificial Sequence: Synthetic oligonucleotide
uccaccaagauagaaggcc

SEQ ID NO: 2604459 - RNA, 19 nt, Artificial Sequence
  Description of Artificial Sequence: Synthetic oligonucleotide
ucaaacagacagaugcaga

SEQ ID NO: 2604460 - RNA, 19 nt, Artificial Sequence
  Description of Artificial Sequence: Synthetic oligonucleotide
auucaggacuaguugcugg

SEQ ID NO: 2604461 - RNA, 19 nt, Artificial Sequence
  Description of Artificial Sequence: Synthetic oligonucleotide
cuggguuccauucuccugg

SEQ ID NO: 2604462 - RNA, 19 nt, Artificial Sequence
  Description of Artificial Sequence: Synthetic oligonucleotide
ucccacguuguauacaacc

SEQ ID NO: 2604463 - RNA, 19 nt, Artificial Sequence
  Description of Artificial Sequence: Synthetic oligonucleotide
gaugagaaucucauccagg

SEQ ID NO: 2604464 - RNA, 19 nt, Artificial Sequence
  Description of Artificial Sequence: Synthetic oligonucleotide
cucaguaguacaauaccug

SEQ ID NO: 2604465 - RNA, 19 nt, Artificial Sequence
  Description of Artificial Sequence: Synthetic oligonucleotide
uaucaaacagacagaugca

SEQ ID NO: 2604466 - RNA, 19 nt, Artificial Sequence
  Description of Artificial Sequence: Synthetic oligonucleotide
uuccgucucaucaaacuug

SEQ ID NO: 2604467 - RNA, 19 nt, Artificial Sequence
  Description of Artificial Sequence: Synthetic oligonucleotide
cugauugaucccacaagcg

SEQ ID NO: 2604468 - RNA, 19 nt, Artificial Sequence
  Description of Artificial Sequence: Synthetic oligonucleotide
aagagacaugcacacccuc

SEQ ID NO: 2604469 - RNA, 19 nt, Artificial Sequence
  Description of Artificial Sequence: Synthetic oligonucleotide
accaggacgaacauccugc

SEQ ID NO: 2604470 - RNA, 19 nt, Artificial Sequence
  Description of Artificial Sequence: Synthetic oligonucleotide
auacauaggcaucuuccag

SEQ ID NO: 2604471 - RNA, 19 nt, Artificial Sequence
  Description of Artificial Sequence: Synthetic oligonucleotide
ugauaucaaacagacagau

SEQ ID NO: 2604472 - RNA, 19 nt, Artificial Sequence
  Description of Artificial Sequence: Synthetic oligonucleotide
ucacuguuaaauucaggac

SEQ ID NO: 2604473 - RNA, 19 nt, Artificial Sequence
  Description of Artificial Sequence: Synthetic oligonucleotide
gacaugcacacccucuggg

SEQ ID NO: 2604474 - RNA, 19 nt, Artificial Sequence
  Description of Artificial Sequence: Synthetic oligonucleotide
gauugaucccacaagcgug

SEQ ID NO: 2604475 - RNA, 19 nt, Artificial Sequence
  Description of Artificial Sequence: Synthetic oligonucleotide
uuguuggccaauuucuugu

SEQ ID NO: 2604476 - RNA, 19 nt, Artificial Sequence
  Description of Artificial Sequence: Synthetic oligonucleotide
ucuuguucaguuccucggc

SEQ ID NO: 2604477 - RNA, 19 nt, Artificial Sequence
  Description of Artificial Sequence: Synthetic oligonucleotide
uguugcagugacucagggg

SEQ ID NO: 2604478 - RNA, 19 nt, Artificial Sequence
  Description of Artificial Sequence: Synthetic oligonucleotide
ugggugaaacaccacauau

SEQ ID NO: 2604479 - RNA, 19 nt, Artificial Sequence
  Description of Artificial Sequence: Synthetic oligonucleotide
acaugaaagaggcccuggg

SEQ ID NO: 2604480 - RNA, 19 nt, Artificial Sequence
  Description of Artificial Sequence: Synthetic oligonucleotide
uguacaggucaugagcucc

SEQ ID NO: 2604481 - RNA, 19 nt, Artificial Sequence
  Description of Artificial Sequence: Synthetic oligonucleotide
uguuccgucucaucaaacu

SEQ ID NO: 2604482 - RNA, 19 nt, Artificial Sequence
  Description of Artificial Sequence: Synthetic oligonucleotide
gacuuguuccgucucauca

SEQ ID NO: 2604483 - RNA, 19 nt, Artificial Sequence
  Description of Artificial Sequence: Synthetic oligonucleotide
agucguugagcuuccguuc

SEQ ID NO: 2604484 - RNA, 19 nt, Artificial Sequence
  Description of Artificial Sequence: Synthetic oligonucleotide
aagaacccuaaagagacau

SEQ ID NO: 2604485 - RNA, 19 nt, Artificial Sequence
  Description of Artificial Sequence: Synthetic oligonucleotide
cacguuguauacaaccuug

SEQ ID NO: 2604486 - RNA, 19 nt, Artificial Sequence
  Description of Artificial Sequence: Synthetic oligonucleotide
uucaaacugccauggaggu

SEQ ID NO: 2604487 - RNA, 19 nt, Artificial Sequence
  Description of Artificial Sequence: Synthetic oligonucleotide
caucgaagaacccuaaaga

SEQ ID NO: 2604488 - RNA, 19 nt, Artificial Sequence
  Description of Artificial Sequence: Synthetic oligonucleotide
cuuggugauaucaaacaga

SEQ ID NO: 2604489 - RNA, 19 nt, Artificial Sequence
  Description of Artificial Sequence: Synthetic oligonucleotide
cauacucccacacccagac

SEQ ID NO: 2604490 - RNA, 19 nt, Artificial Sequence
  Description of Artificial Sequence: Synthetic oligonucleotide
uugagcuuccguucaaacu

SEQ ID NO: 2604491 - RNA, 19 nt, Artificial Sequence
  Description of Artificial Sequence: Synthetic oligonucleotide
gaucccacaagcguguaug

SEQ ID NO: 2604492 - RNA, 19 nt, Artificial Sequence
  Description of Artificial Sequence: Synthetic oligonucleotide
caggucaugagcucccucc

SEQ ID NO: 2604493 - RNA, 19 nt, Artificial Sequence
  Description of Artificial Sequence: Synthetic oligonucleotide
caguaguacaauaccugcc

SEQ ID NO: 2604494 - RNA, 19 nt, Artificial Sequence
  Description of Artificial Sequence: Synthetic oligonucleotide
cuuuggugugugaugcucc

SEQ ID NO: 2604495 - RNA, 19 nt, Artificial Sequence
  Description of Artificial Sequence: Synthetic oligonucleotide
uaucggaaauggacuuugg

SEQ ID NO: 2604496 - RNA, 19 nt, Artificial Sequence
  Description of Artificial Sequence: Synthetic oligonucleotide
caccacauaucggaaaugg

SEQ ID NO: 2604497 - RNA, 19 nt, Artificial Sequence
  Description of Artificial Sequence: Synthetic oligonucleotide
uacucccacacccagacuu

SEQ ID NO: 2604498 - RNA, 19 nt, Artificial Sequence
  Description of Artificial Sequence: Synthetic oligonucleotide
gccaaaacaugaaagaggc

SEQ ID NO: 2604499 - RNA, 19 nt, Artificial Sequence
  Description of Artificial Sequence: Synthetic oligonucleotide
uccauguacaggucaugag

SEQ ID NO: 2604500 - RNA, 19 nt, Artificial Sequence
  Description of Artificial Sequence: Synthetic oligonucleotide
uguuaaauucaggacuagu

SEQ ID NO: 2604501 - RNA, 19 nt, Artificial Sequence
  Description of Artificial Sequence: Synthetic oligonucleotide
aagcguguauggcgcuucc

SEQ ID NO: 2604502 - RNA, 19 nt, Artificial Sequence
  Description of Artificial Sequence: Synthetic oligonucleotide
ucggcaauggagucguuga

SEQ ID NO: 2604503 - RNA, 19 nt, Artificial Sequence
  Description of Artificial Sequence: Synthetic oligonucleotide
cucaccaguguccauguac

SEQ ID NO: 2604504 - RNA, 19 nt, Artificial Sequence
  Description of Artificial Sequence: Synthetic oligonucleotide
uccccugggaauacauagg

SEQ ID NO: 2604505 - RNA, 19 nt, Artificial Sequence
  Description of Artificial Sequence: Synthetic oligonucleotide
aguacaauaccugccaaaa

SEQ ID NO: 2604506 - RNA, 19 nt, Artificial Sequence
  Description of Artificial Sequence: Synthetic oligonucleotide
gagaaucucauccaggaau

SEQ ID NO: 2604507 - RNA, 19 nt, Artificial Sequence
  Description of Artificial Sequence: Synthetic oligonucleotide
uucuuuggcagcuccucgc

SEQ ID NO: 2604508 - RNA, 19 nt, Artificial Sequence
  Description of Artificial Sequence: Synthetic oligonucleotide
gaucuucccgaugagaauc

SEQ ID NO: 2604509 - RNA, 19 nt, Artificial Sequence
  Description of Artificial Sequence: Synthetic oligonucleotide
uaguugcugguccaccaag

SEQ ID NO: 2604510 - RNA, 19 nt, Artificial Sequence
  Description of Artificial Sequence: Synthetic oligonucleotide
uucccgaugagaaucucau

SEQ ID NO: 2604511 - RNA, 19 nt, Artificial Sequence
  Description of Artificial Sequence: Synthetic oligonucleotide
uauggcgcuuccuucuuug

SEQ ID NO: 2604512 - RNA, 19 nt, Artificial Sequence
  Description of Artificial Sequence: Synthetic oligonucleotide
acugccauggagguaugcg

SEQ ID NO: 2604513 - RNA, 19 nt, Artificial Sequence
  Description of Artificial Sequence: Synthetic oligonucleotide
ugccauggagguaugcgca

SEQ ID NO: 2604514 - RNA, 19 nt, Artificial Sequence
  Description of Artificial Sequence: Synthetic oligonucleotide
gagacaugcacacccucug

SEQ ID NO: 2604515 - RNA, 19 nt, Artificial Sequence
  Description of Artificial Sequence: Synthetic oligonucleotide
aaugggugaaacaccacau

SEQ ID NO: 2604516 - RNA, 19 nt, Artificial Sequence
  Description of Artificial Sequence: Synthetic oligonucleotide
uguauacaaccuuguuggc

SEQ ID NO: 2604517 - RNA, 19 nt, Artificial Sequence
  Description of Artificial Sequence: Synthetic oligonucleotide
uuugaucuucccgaugaga

SEQ ID NO: 2604518 - RNA, 19 nt, Artificial Sequence
  Description of Artificial Sequence: Synthetic oligonucleotide
agagucccacguuguauac

SEQ ID NO: 2604519 - RNA, 19 nt, Artificial Sequence
  Description of Artificial Sequence: Synthetic oligonucleotide
aaauggacuuuggugugug

SEQ ID NO: 2604520 - RNA, 19 nt, Artificial Sequence
  Description of Artificial Sequence: Synthetic oligonucleotide
gauaucaaacagacagaug

SEQ ID NO: 2604521 - RNA, 19 nt, Artificial Sequence
  Description of Artificial Sequence: Synthetic oligonucleotide
caggaaugggugaaacacc

SEQ ID NO: 2604522 - RNA, 19 nt, Artificial Sequence
  Description of Artificial Sequence: Synthetic oligonucleotide
agaaucucauccaggaaug

SEQ ID NO: 2604523 - RNA, 19 nt, Artificial Sequence
  Description of Artificial Sequence: Synthetic oligonucleotide
cacaaagcucucauccacc

SEQ ID NO: 2604524 - RNA, 19 nt, Artificial Sequence
  Description of Artificial Sequence: Synthetic oligonucleotide
auaucggaaauggacuuug

SEQ ID NO: 2604525 - RNA, 19 nt, Artificial Sequence
  Description of Artificial Sequence: Synthetic oligonucleotide
acaaagcucucauccacca

SEQ ID NO: 2604526 - RNA, 19 nt, Artificial Sequence
  Description of Artificial Sequence: Synthetic oligonucleotide
caucaaacuuggcaggcug

SEQ ID NO: 2604527 - RNA, 19 nt, Artificial Sequence
  Description of Artificial Sequence: Synthetic oligonucleotide
cgaagaacccuaaagagac

SEQ ID NO: 2604528 - RNA, 19 nt, Artificial Sequence
  Description of Artificial Sequence: Synthetic oligonucleotide
ucucauacucccacaccca

SEQ ID NO: 2604529 - RNA, 19 nt, Artificial Sequence
  Description of Artificial Sequence: Synthetic oligonucleotide
cacgguguccaccaucucc

SEQ ID NO: 2604530 - RNA, 19 nt, Artificial Sequence
  Description of Artificial Sequence: Synthetic oligonucleotide
acuuuggugugugaugcuc

SEQ ID NO: 2604531 - RNA, 19 nt, Artificial Sequence
  Description of Artificial Sequence: Synthetic oligonucleotide
gucaugagcucccuccucc

SEQ ID NO: 2604532 - RNA, 19 nt, Artificial Sequence
  Description of Artificial Sequence: Synthetic oligonucleotide
agacaugcacacccucugg

SEQ ID NO: 2604533 - RNA, 19 nt, Artificial Sequence
  Description of Artificial Sequence: Synthetic oligonucleotide
ccuaaagagacaugcacac

SEQ ID NO: 2604534 - RNA, 19 nt, Artificial Sequence
  Description of Artificial Sequence: Synthetic oligonucleotide
uggagguaugcgcacggug

SEQ ID NO: 2604535 - RNA, 19 nt, Artificial Sequence
  Description of Artificial Sequence: Synthetic oligonucleotide
uucaggacuaguugcuggu

SEQ ID NO: 2604536 - RNA, 19 nt, Artificial Sequence
  Description of Artificial Sequence: Synthetic oligonucleotide
ccacauaucggaaauggac

SEQ ID NO: 2604537 - RNA, 19 nt, Artificial Sequence
  Description of Artificial Sequence: Synthetic oligonucleotide
aaacaugaaagaggcccug

SEQ ID NO: 2604538 - RNA, 19 nt, Artificial Sequence
  Description of Artificial Sequence: Synthetic oligonucleotide
acacccucugggcugcagc

SEQ ID NO: 2604539 - RNA, 19 nt, Artificial Sequence
  Description of Artificial Sequence: Synthetic oligonucleotide
uuuggugugugaugcucca

SEQ ID NO: 2604540 - RNA, 19 nt, Artificial Sequence
  Description of Artificial Sequence: Synthetic oligonucleotide
cuucuuuggcagcuccucg

SEQ ID NO: 2604541 - RNA, 19 nt, Artificial Sequence
  Description of Artificial Sequence: Synthetic oligonucleotide
acuaguugcugguccacca

SEQ ID NO: 2604542 - RNA, 19 nt, Artificial Sequence
  Description of Artificial Sequence: Synthetic oligonucleotide
ucaugagcucccuccuccg

SEQ ID NO: 2604543 - RNA, 19 nt, Artificial Sequence
  Description of Artificial Sequence: Synthetic oligonucleotide
uaguacaauaccugccaaa

SEQ ID NO: 2604544 - RNA, 19 nt, Artificial Sequence
  Description of Artificial Sequence: Synthetic oligonucleotide
cugccauggagguaugcgc

SEQ ID NO: 2604545 - RNA, 19 nt, Artificial Sequence
  Description of Artificial Sequence: Synthetic oligonucleotide
aucggaaauggacuuuggu

SEQ ID NO: 2604546 - RNA, 19 nt, Artificial Sequence
  Description of Artificial Sequence: Synthetic oligonucleotide
acauaucggaaauggacuu

SEQ ID NO: 2604547 - RNA, 19 nt, Artificial Sequence
  Description of Artificial Sequence: Synthetic oligonucleotide
auguacaggucaugagcuc

SEQ ID NO: 2604548 - RNA, 19 nt, Artificial Sequence
  Description of Artificial Sequence: Synthetic oligonucleotide
cagcuuggugauaucaaac

SEQ ID NO: 2604549 - RNA, 19 nt, Artificial Sequence
  Description of Artificial Sequence: Synthetic oligonucleotide
gaaucucauccaggaaugg

SEQ ID NO: 2604550 - RNA, 19 nt, Artificial Sequence
  Description of Artificial Sequence: Synthetic oligonucleotide
caggacuaguugcuggucc

SEQ ID NO: 2604551 - RNA, 19 nt, Artificial Sequence
  Description of Artificial Sequence: Synthetic oligonucleotide
cacuguuaaauucaggacu

SEQ ID NO: 2604552 - RNA, 19 nt, Artificial Sequence
  Description of Artificial Sequence: Synthetic oligonucleotide
ccauguacaggucaugagc

SEQ ID NO: 2604553 - RNA, 19 nt, Artificial Sequence
  Description of Artificial Sequence: Synthetic oligonucleotide
caauaccugccaaaacaug

SEQ ID NO: 2604554 - RNA, 19 nt, Artificial Sequence
  Description of Artificial Sequence: Synthetic oligonucleotide
augagcucccuccuccguc

SEQ ID NO: 2604555 - RNA, 19 nt, Artificial Sequence
  Description of Artificial Sequence: Synthetic oligonucleotide
gaagcggaucuccucacca

SEQ ID NO: 2604556 - RNA, 19 nt, Artificial Sequence
  Description of Artificial Sequence: Synthetic oligonucleotide
ugggcugcagccuuugauc

SEQ ID NO: 2604557 - RNA, 19 nt, Artificial Sequence
  Description of Artificial Sequence: Synthetic oligonucleotide
uccaggaaugggugaaaca

SEQ ID NO: 2604558 - RNA, 19 nt, Artificial Sequence
  Description of Artificial Sequence: Synthetic oligonucleotide
gcuuggugauaucaaacag

SEQ ID NO: 2604559 - RNA, 19 nt, Artificial Sequence
  Description of Artificial Sequence: Synthetic oligonucleotide
cauggagguaugcgcacgg

SEQ ID NO: 2604560 - RNA, 19 nt, Artificial Sequence
  Description of Artificial Sequence: Synthetic oligonucleotide
uccagcuuggugauaucaa

SEQ ID NO: 2604561 - RNA, 19 nt, Artificial Sequence
  Description of Artificial Sequence: Synthetic oligonucleotide
aacugccauggagguaugc

SEQ ID NO: 2604562 - RNA, 19 nt, Artificial Sequence
  Description of Artificial Sequence: Synthetic oligonucleotide
ucauacucccacacccaga

SEQ ID NO: 2604563 - RNA, 19 nt, Artificial Sequence
  Description of Artificial Sequence: Synthetic oligonucleotide
cucauacucccacacccag

SEQ ID NO: 2604564 - RNA, 19 nt, Artificial Sequence
  Description of Artificial Sequence: Synthetic oligonucleotide
aaagagacaugcacacccu

SEQ ID NO: 2604565 - RNA, 19 nt, Artificial Sequence
  Description of Artificial Sequence: Synthetic oligonucleotide
aacuuggcaggcuguugca

SEQ ID NO: 2604566 - RNA, 19 nt, Artificial Sequence
  Description of Artificial Sequence: Synthetic oligonucleotide
cucaucaaacuuggcaggc

SEQ ID NO: 2604567 - RNA, 19 nt, Artificial Sequence
  Description of Artificial Sequence: Synthetic oligonucleotide
aucccacaagcguguaugg

SEQ ID NO: 2604568 - RNA, 19 nt, Artificial Sequence
  Description of Artificial Sequence: Synthetic oligonucleotide
aggaaugggugaaacacca

SEQ ID NO: 2604569 - RNA, 19 nt, Artificial Sequence
  Description of Artificial Sequence: Synthetic oligonucleotide
caguuccucggcaauggag

SEQ ID NO: 2604570 - RNA, 19 nt, Artificial Sequence
  Description of Artificial Sequence: Synthetic oligonucleotide
cuaaagagacaugcacacc

SEQ ID NO: 2604571 - RNA, 19 nt, Artificial Sequence
  Description of Artificial Sequence: Synthetic oligonucleotide
guugagcuuccguucaaac

SEQ ID NO: 2604572 - RNA, 19 nt, Artificial Sequence
  Description of Artificial Sequence: Synthetic oligonucleotide
cccacaagcguguauggcg

SEQ ID NO: 2604573 - RNA, 19 nt, Artificial Sequence
  Description of Artificial Sequence: Synthetic oligonucleotide
cacacccagacuuguuccg

SEQ ID NO: 2604574 - RNA, 19 nt, Artificial Sequence
  Description of Artificial Sequence: Synthetic oligonucleotide
acuguuaaauucaggacua

SEQ ID NO: 2604575 - RNA, 19 nt, Artificial Sequence
  Description of Artificial Sequence: Synthetic oligonucleotide
accacccugaagcggaucu

SEQ ID NO: 2604576 - RNA, 19 nt, Artificial Sequence
  Description of Artificial Sequence: Synthetic oligonucleotide
gacguguccacaaagcucu

SEQ ID NO: 2604577 - RNA, 19 nt, Artificial Sequence
  Description of Artificial Sequence: Synthetic oligonucleotide
aauggacuuugguguguga

SEQ ID NO: 2604578 - RNA, 19 nt, Artificial Sequence
  Description of Artificial Sequence: Synthetic oligonucleotide
accuuguuggccaauuucu

SEQ ID NO: 2604579 - RNA, 19 nt, Artificial Sequence
  Description of Artificial Sequence: Synthetic oligonucleotide
aucuccaccaggacgaaca

SEQ ID NO: 2604580 - RNA, 19 nt, Artificial Sequence
  Description of Artificial Sequence: Synthetic oligonucleotide
cauccaccacccugaagcg

SEQ ID NO: 2604581 - RNA, 19 nt, Artificial Sequence
  Description of Artificial Sequence: Synthetic oligonucleotide
cugggaauacauaggcauc

SEQ ID NO: 2604582 - RNA, 19 nt, Artificial Sequence
  Description of Artificial Sequence: Synthetic oligonucleotide
agacuuguuccgucucauc

SEQ ID NO: 2604583 - RNA, 19 nt, Artificial Sequence
  Description of Artificial Sequence: Synthetic oligonucleotide
gaaagaggcccuggguucc

SEQ ID NO: 2604584 - RNA, 19 nt, Artificial Sequence
  Description of Artificial Sequence: Synthetic oligonucleotide
acaauaccugccaaaacau

SEQ ID NO: 2604585 - RNA, 19 nt, Artificial Sequence
  Description of Artificial Sequence: Synthetic oligonucleotide
cauguacaggucaugagcu

SEQ ID NO: 2604586 - RNA, 19 nt, Artificial Sequence
  Description of Artificial Sequence: Synthetic oligonucleotide
guacaauaccugccaaaac

SEQ ID NO: 2604587 - RNA, 19 nt, Artificial Sequence
  Description of Artificial Sequence: Synthetic oligonucleotide
uggcgcuuccuucuuuggc

SEQ ID NO: 2604588 - RNA, 19 nt, Artificial Sequence
  Description of Artificial Sequence: Synthetic oligonucleotide
cacauaucggaaauggacu

SEQ ID NO: 2604589 - RNA, 19 nt, Artificial Sequence
  Description of Artificial Sequence: Synthetic oligonucleotide
gugaaacaccacauaucgg

SEQ ID NO: 2604590 - RNA, 19 nt, Artificial Sequence
  Description of Artificial Sequence: Synthetic oligonucleotide
uggugauaucaaacagaca

SEQ ID NO: 2604591 - RNA, 19 nt, Artificial Sequence
  Description of Artificial Sequence: Synthetic oligonucleotide
cuguugcagugacucaggg

SEQ ID NO: 2604592 - RNA, 19 nt, Artificial Sequence
  Description of Artificial Sequence: Synthetic oligonucleotide
ggacuuuggugugugaugc

SEQ ID NO: 2604593 - RNA, 19 nt, Artificial Sequence
  Description of Artificial Sequence: Synthetic oligonucleotide
ucauccaggaaugggugaa

SEQ ID NO: 2604594 - RNA, 19 nt, Artificial Sequence
  Description of Artificial Sequence: Synthetic oligonucleotide
aggacuaguugcuggucca

SEQ ID NO: 2604595 - RNA, 19 nt, Artificial Sequence
  Description of Artificial Sequence: Synthetic oligonucleotide
gguuccauucuccugggca

SEQ ID NO: 2604596 - RNA, 19 nt, Artificial Sequence
  Description of Artificial Sequence: Synthetic oligonucleotide
ugucaucgaagaacccuaa

SEQ ID NO: 2604597 - RNA, 19 nt, Artificial Sequence
  Description of Artificial Sequence: Synthetic oligonucleotide
cuuugaucuucccgaugag

SEQ ID NO: 2604598 - RNA, 19 nt, Artificial Sequence
  Description of Artificial Sequence: Synthetic oligonucleotide
ugaucuucccgaugagaau

SEQ ID NO: 2604599 - RNA, 19 nt, Artificial Sequence
  Description of Artificial Sequence: Synthetic oligonucleotide
agguaugcgcacggugucc

SEQ ID NO: 2604600 - RNA, 19 nt, Artificial Sequence
  Description of Artificial Sequence: Synthetic oligonucleotide
ccaggaaugggugaaacac

SEQ ID NO: 2604601 - RNA, 19 nt, Artificial Sequence
  Description of Artificial Sequence: Synthetic oligonucleotide
auugaucccacaagcgugu

SEQ ID NO: 2604602 - RNA, 19 nt, Artificial Sequence
  Description of Artificial Sequence: Synthetic oligonucleotide
uggguuccauucuccuggg

SEQ ID NO: 2604603 - RNA, 19 nt, Artificial Sequence
  Description of Artificial Sequence: Synthetic oligonucleotide
uuguuccgucucaucaaac

SEQ ID NO: 2604604 - RNA, 19 nt, Artificial Sequence
  Description of Artificial Sequence: Synthetic oligonucleotide
agucacuguuaaauucagg

SEQ ID NO: 2604605 - RNA, 19 nt, Artificial Sequence
  Description of Artificial Sequence: Synthetic oligonucleotide
ucccuccuccgucucauac

SEQ ID NO: 2604606 - RNA, 19 nt, Artificial Sequence
  Description of Artificial Sequence: Synthetic oligonucleotide
ucaucaaacuuggcaggcu

SEQ ID NO: 2604607 - RNA, 19 nt, Artificial Sequence
  Description of Artificial Sequence: Synthetic oligonucleotide
ucaguuccucggcaaugga

SEQ ID NO: 2604608 - RNA, 19 nt, Artificial Sequence
  Description of Artificial Sequence: Synthetic oligonucleotide
augcacacccucugggcug

SEQ ID NO: 2604609 - RNA, 19 nt, Artificial Sequence
  Description of Artificial Sequence: Synthetic oligonucleotide
auggcgcuuccuucuuugg

SEQ ID NO: 2604610 - RNA, 19 nt, Artificial Sequence
  Description of Artificial Sequence: Synthetic oligonucleotide
agcggaucuccucaccagu

SEQ ID NO: 2604611 - RNA, 19 nt, Artificial Sequence
  Description of Artificial Sequence: Synthetic oligonucleotide
ccaccaagauagaaggccc

SEQ ID NO: 2604612 - RNA, 19 nt, Artificial Sequence
  Description of Artificial Sequence: Synthetic oligonucleotide
agagacaugcacacccucu

SEQ ID NO: 2604613 - RNA, 19 nt, Artificial Sequence
  Description of Artificial Sequence: Synthetic oligonucleotide
gacuaguugcugguccacc

SEQ ID NO: 2604614 - RNA, 19 nt, Artificial Sequence
  Description of Artificial Sequence: Synthetic oligonucleotide
uccucggcaauggagucgu

SEQ ID NO: 2604615 - RNA, 19 nt, Artificial Sequence
  Description of Artificial Sequence: Synthetic oligonucleotide
gugauaucaaacagacaga

SEQ ID NO: 2604616 - RNA, 19 nt, Artificial Sequence
  Description of Artificial Sequence: Synthetic oligonucleotide
gaaacaccacauaucggaa

SEQ ID NO: 2604617 - RNA, 19 nt, Artificial Sequence
  Description of Artificial Sequence: Synthetic oligonucleotide
uaugcgcacgguguccacc

SEQ ID NO: 2604618 - RNA, 19 nt, Artificial Sequence
  Description of Artificial Sequence: Synthetic oligonucleotide
gugaugcuccauccccugg

SEQ ID NO: 2604619 - RNA, 19 nt, Artificial Sequence
  Description of Artificial Sequence: Synthetic oligonucleotide
gagguaugcgcacgguguc

SEQ ID NO: 2604620 - RNA, 19 nt, Artificial Sequence
  Description of Artificial Sequence: Synthetic oligonucleotide
aagaggcagccucggcuga

SEQ ID NO: 2604621 - RNA, 19 nt, Artificial Sequence
  Description of Artificial Sequence: Synthetic oligonucleotide
ggaauacauaggcaucuuc

SEQ ID NO: 2604622 - RNA, 19 nt, Artificial Sequence
  Description of Artificial Sequence: Synthetic oligonucleotide
uccgucucauacucccaca

SEQ ID NO: 2604623 - RNA, 19 nt, Artificial Sequence
  Description of Artificial Sequence: Synthetic oligonucleotide
cacccucugggcugcagcc

SEQ ID NO: 2604624 - RNA, 19 nt, Artificial Sequence
  Description of Artificial Sequence: Synthetic oligonucleotide
auggacuuuggugugugau

SEQ ID NO: 2604625 - RNA, 19 nt, Artificial Sequence
  Description of Artificial Sequence: Synthetic oligonucleotide
uguccauguacaggucaug

SEQ ID NO: 2604626 - RNA, 19 nt, Artificial Sequence
  Description of Artificial Sequence: Synthetic oligonucleotide
guuggccaauuucuuguuc

SEQ ID NO: 2604627 - RNA, 19 nt, Artificial Sequence
  Description of Artificial Sequence: Synthetic oligonucleotide
gagcuuccguucaaacugc

SEQ ID NO: 2604628 - RNA, 19 nt, Artificial Sequence
  Description of Artificial Sequence: Synthetic oligonucleotide
aggucaugagcucccuccu

SEQ ID NO: 2604629 - RNA, 19 nt, Artificial Sequence
  Description of Artificial Sequence: Synthetic oligonucleotide
cuucccgaugagaaucuca

SEQ ID NO: 2604630 - RNA, 19 nt, Artificial Sequence
  Description of Artificial Sequence: Synthetic oligonucleotide
uccauucuccugggcagag

SEQ ID NO: 2604631 - RNA, 19 nt, Artificial Sequence
  Description of Artificial Sequence: Synthetic oligonucleotide
uguauggcgcuuccuucuu

SEQ ID NO: 2604632 - RNA, 19 nt, Artificial Sequence
  Description of Artificial Sequence: Synthetic oligonucleotide
guaguacaauaccugccaa

SEQ ID NO: 2604633 - RNA, 19 nt, Artificial Sequence
  Description of Artificial Sequence: Synthetic oligonucleotide
ccuuugaucuucccgauga

SEQ ID NO: 2604634 - RNA, 19 nt, Artificial Sequence
  Description of Artificial Sequence: Synthetic oligonucleotide
caccaggacgaacauccug

SEQ ID NO: 2604635 - RNA, 19 nt, Artificial Sequence
  Description of Artificial Sequence: Synthetic oligonucleotide
ucccacaagcguguauggc

SEQ ID NO: 2604636 - RNA, 19 nt, Artificial Sequence
  Description of Artificial Sequence: Synthetic oligonucleotide
auggagucguugagcuucc

SEQ ID NO: 2604637 - RNA, 19 nt, Artificial Sequence
  Description of Artificial Sequence: Synthetic oligonucleotide
cuguuaaauucaggacuag

SEQ ID NO: 2604638 - RNA, 19 nt, Artificial Sequence
  Description of Artificial Sequence: Synthetic oligonucleotide
ugaucccacaagcguguau

SEQ ID NO: 2604639 - RNA, 19 nt, Artificial Sequence
  Description of Artificial Sequence: Synthetic oligonucleotide
cacccugaagcggaucucc

SEQ ID NO: 2604640 - RNA, 19 nt, Artificial Sequence
  Description of Artificial Sequence: Synthetic oligonucleotide
augcgcacgguguccacca

SEQ ID NO: 2604641 - RNA, 19 nt, Artificial Sequence
  Description of Artificial Sequence: Synthetic oligonucleotide
ucaaacuuggcaggcuguu

SEQ ID NO: 2604642 - RNA, 19 nt, Artificial Sequence
  Description of Artificial Sequence: Synthetic oligonucleotide
agaaggcccaagccuggcu

SEQ ID NO: 2604643 - RNA, 19 nt, Artificial Sequence
  Description of Artificial Sequence: Synthetic oligonucleotide
gcucucauccaccacccug

SEQ ID NO: 2604644 - RNA, 19 nt, Artificial Sequence
  Description of Artificial Sequence: Synthetic oligonucleotide
ccacaagcguguauggcgc

SEQ ID NO: 2604645 - RNA, 19 nt, Artificial Sequence
  Description of Artificial Sequence: Synthetic oligonucleotide
agcuccucgcuggaagagg

SEQ ID NO: 2604646 - RNA, 19 nt, Artificial Sequence
  Description of Artificial Sequence: Synthetic oligonucleotide
cugaagcggaucuccucac

SEQ ID NO: 2604647 - RNA, 19 nt, Artificial Sequence
  Description of Artificial Sequence: Synthetic oligonucleotide
acuuggcaggcuguugcag

SEQ ID NO: 2604648 - RNA, 19 nt, Artificial Sequence
  Description of Artificial Sequence: Synthetic oligonucleotide
caaagcucucauccaccac

SEQ ID NO: 2604649 - RNA, 19 nt, Artificial Sequence
  Description of Artificial Sequence: Synthetic oligonucleotide
agcuuccguucaaacugcc

SEQ ID NO: 2604650 - RNA, 19 nt, Artificial Sequence
  Description of Artificial Sequence: Synthetic oligonucleotide
ggcaauggagucguugagc

SEQ ID NO: 2604651 - RNA, 19 nt, Artificial Sequence
  Description of Artificial Sequence: Synthetic oligonucleotide
guacaggucaugagcuccc

SEQ ID NO: 2604652 - RNA, 19 nt, Artificial Sequence
  Description of Artificial Sequence: Synthetic oligonucleotide
gagucguugagcuuccguu

SEQ ID NO: 2604653 - RNA, 19 nt, Artificial Sequence
  Description of Artificial Sequence: Synthetic oligonucleotide
ugcagagucccacguugua

SEQ ID NO: 2604654 - RNA, 19 nt, Artificial Sequence
  Description of Artificial Sequence: Synthetic oligonucleotide
guccauguacaggucauga

SEQ ID NO: 2604655 - RNA, 19 nt, Artificial Sequence
  Description of Artificial Sequence: Synthetic oligonucleotide
cuuguuccgucucaucaaa

SEQ ID NO: 2604656 - RNA, 19 nt, Artificial Sequence
  Description of Artificial Sequence: Synthetic oligonucleotide
caaacuuggcaggcuguug

SEQ ID NO: 2604657 - RNA, 19 nt, Artificial Sequence
  Description of Artificial Sequence: Synthetic oligonucleotide
augucaucgaagaacccua

SEQ ID NO: 2604658 - RNA, 19 nt, Artificial Sequence
  Description of Artificial Sequence: Synthetic oligonucleotide
caggacgaacauccugcgc

SEQ ID NO: 2604659 - RNA, 19 nt, Artificial Sequence
  Description of Artificial Sequence: Synthetic oligonucleotide
cuggaagaggcagccucgg

SEQ ID NO: 2604660 - RNA, 19 nt, Artificial Sequence
  Description of Artificial Sequence: Synthetic oligonucleotide
ggcgcuuccuucuuuggca

SEQ ID NO: 2604661 - RNA, 19 nt, Artificial Sequence
  Description of Artificial Sequence: Synthetic oligonucleotide
ccccugggaauacauaggc

SEQ ID NO: 2604662 - RNA, 19 nt, Artificial Sequence
  Description of Artificial Sequence: Synthetic oligonucleotide
aucaaacuuggcaggcugu

SEQ ID NO: 2604663 - RNA, 19 nt, Artificial Sequence
  Description of Artificial Sequence: Synthetic oligonucleotide
aguugcugguccaccaaga

SEQ ID NO: 2604664 - RNA, 19 nt, Artificial Sequence
  Description of Artificial Sequence: Synthetic oligonucleotide
agaacccuaaagagacaug

SEQ ID NO: 2604665 - RNA, 19 nt, Artificial Sequence
  Description of Artificial Sequence: Synthetic oligonucleotide
ccacaaagcucucauccac

SEQ ID NO: 2604666 - RNA, 19 nt, Artificial Sequence
  Description of Artificial Sequence: Synthetic oligonucleotide
agaugcagagucccacguu

SEQ ID NO: 2604667 - RNA, 19 nt, Artificial Sequence
  Description of Artificial Sequence: Synthetic oligonucleotide
cccuaaagagacaugcaca

SEQ ID NO: 2604668 - RNA, 19 nt, Artificial Sequence
  Description of Artificial Sequence: Synthetic oligonucleotide
acaccacauaucggaaaug

SEQ ID NO: 2604669 - RNA, 19 nt, Artificial Sequence
  Description of Artificial Sequence: Synthetic oligonucleotide
guuccucggcaauggaguc

SEQ ID NO: 2604670 - RNA, 19 nt, Artificial Sequence
  Description of Artificial Sequence: Synthetic oligonucleotide
ccaaaacaugaaagaggcc

SEQ ID NO: 2604671 - RNA, 19 nt, Artificial Sequence
  Description of Artificial Sequence: Synthetic oligonucleotide
gcaauggagucguugagcu

SEQ ID NO: 2604672 - RNA, 19 nt, Artificial Sequence
  Description of Artificial Sequence: Synthetic oligonucleotide
acguuguauacaaccuugu

SEQ ID NO: 2604673 - RNA, 19 nt, Artificial Sequence
  Description of Artificial Sequence: Synthetic oligonucleotide
ccacacccagacuuguucc

SEQ ID NO: 2604674 - RNA, 19 nt, Artificial Sequence
  Description of Artificial Sequence: Synthetic oligonucleotide
accacauaucggaaaugga

SEQ ID NO: 2604675 - RNA, 19 nt, Artificial Sequence
  Description of Artificial Sequence: Synthetic oligonucleotide
ucaggacuaguugcugguc

SEQ ID NO: 2604676 - RNA, 19 nt, Artificial Sequence
  Description of Artificial Sequence: Synthetic oligonucleotide
cagagucccacguuguaua

SEQ ID NO: 2604677 - RNA, 19 nt, Artificial Sequence
  Description of Artificial Sequence: Synthetic oligonucleotide
gaagaacccuaaagagaca

SEQ ID NO: 2604678 - RNA, 19 nt, Artificial Sequence
  Description of Artificial Sequence: Synthetic oligonucleotide
ucguugagcuuccguucaa

SEQ ID NO: 2604679 - RNA, 19 nt, Artificial Sequence
  Description of Artificial Sequence: Synthetic oligonucleotide
cucauccaccacccugaag

SEQ ID NO: 2604680 - RNA, 19 nt, Artificial Sequence
  Description of Artificial Sequence: Synthetic oligonucleotide
ugcacacccucugggcugc

SEQ ID NO: 2604681 - RNA, 19 nt, Artificial Sequence
  Description of Artificial Sequence: Synthetic oligonucleotide
caccaagauagaaggccca

SEQ ID NO: 2604682 - RNA, 19 nt, Artificial Sequence
  Description of Artificial Sequence: Synthetic oligonucleotide
ucaaacugccauggaggua

SEQ ID NO: 2604683 - RNA, 19 nt, Artificial Sequence
  Description of Artificial Sequence: Synthetic oligonucleotide
ucccgaugagaaucucauc

SEQ ID NO: 2604684 - RNA, 19 nt, Artificial Sequence
  Description of Artificial Sequence: Synthetic oligonucleotide
accaagauagaaggcccaa

SEQ ID NO: 2604685 - RNA, 19 nt, Artificial Sequence
  Description of Artificial Sequence: Synthetic oligonucleotide
guguauggcgcuuccuucu

SEQ ID NO: 2604686 - RNA, 19 nt, Artificial Sequence
  Description of Artificial Sequence: Synthetic oligonucleotide
caugaaagaggcccugggu

SEQ ID NO: 2604687 - RNA, 19 nt, Artificial Sequence
  Description of Artificial Sequence: Synthetic oligonucleotide
aucuucccgaugagaaucu

SEQ ID NO: 2604688 - RNA, 19 nt, Artificial Sequence
  Description of Artificial Sequence: Synthetic oligonucleotide
ggcagagucacuguuaaau

SEQ ID NO: 2604689 - RNA, 19 nt, Artificial Sequence
  Description of Artificial Sequence: Synthetic oligonucleotide
gcuguugcagugacucagg

SEQ ID NO: 2604690 - RNA, 19 nt, Artificial Sequence
  Description of Artificial Sequence: Synthetic oligonucleotide
guccaccaagauagaaggc

SEQ ID NO: 2604691 - RNA, 19 nt, Artificial Sequence
  Description of Artificial Sequence: Synthetic oligonucleotide
auacaaccuuguuggccaa

SEQ ID NO: 2604692 - RNA, 19 nt, Artificial Sequence
  Description of Artificial Sequence: Synthetic oligonucleotide
gucaucgaagaacccuaaa

SEQ ID NO: 2604693 - RNA, 19 nt, Artificial Sequence
  Description of Artificial Sequence: Synthetic oligonucleotide
gaaauggacuuuggugugu

SEQ ID NO: 2604694 - RNA, 19 nt, Artificial Sequence
  Description of Artificial Sequence: Synthetic oligonucleotide
ccaggacgaacauccugcg

SEQ ID NO: 2604695 - RNA, 19 nt, Artificial Sequence
  Description of Artificial Sequence: Synthetic oligonucleotide
gggugaaacaccacauauc

SEQ ID NO: 2604696 - RNA, 19 nt, Artificial Sequence
  Description of Artificial Sequence: Synthetic oligonucleotide
cacccagacuuguuccguc

SEQ ID NO: 2604697 - RNA, 19 nt, Artificial Sequence
  Description of Artificial Sequence: Synthetic oligonucleotide
caagcguguauggcgcuuc

SEQ ID NO: 2604698 - RNA, 19 nt, Artificial Sequence
  Description of Artificial Sequence: Synthetic oligonucleotide
ggggacguguccacaaagc

SEQ ID NO: 2604699 - RNA, 19 nt, Artificial Sequence
  Description of Artificial Sequence: Synthetic oligonucleotide
ggacguguccacaaagcuc

SEQ ID NO: 2604700 - RNA, 19 nt, Artificial Sequence
  Description of Artificial Sequence: Synthetic oligonucleotide
ccaguguccauguacaggu

SEQ ID NO: 2604701 - RNA, 19 nt, Artificial Sequence
  Description of Artificial Sequence: Synthetic oligonucleotide
auacucccacacccagacu

SEQ ID NO: 2604702 - RNA, 19 nt, Artificial Sequence
  Description of Artificial Sequence: Synthetic oligonucleotide
guuccgucucaucaaacuu

SEQ ID NO: 2604703 - RNA, 19 nt, Artificial Sequence
  Description of Artificial Sequence: Synthetic oligonucleotide
acacccagacuuguuccgu

SEQ ID NO: 2604704 - RNA, 19 nt, Artificial Sequence
  Description of Artificial Sequence: Synthetic oligonucleotide
acucccacacccagacuug

SEQ ID NO: 2604705 - RNA, 19 nt, Artificial Sequence
  Description of Artificial Sequence: Synthetic oligonucleotide
uacaggucaugagcucccu

SEQ ID NO: 2604706 - RNA, 19 nt, Artificial Sequence
  Description of Artificial Sequence: Synthetic oligonucleotide
ccugaagcggaucuccuca

SEQ ID NO: 2604707 - RNA, 19 nt, Artificial Sequence
  Description of Artificial Sequence: Synthetic oligonucleotide
cuaguugcugguccaccaa

SEQ ID NO: 2604708 - RNA, 19 nt, Artificial Sequence
  Description of Artificial Sequence: Synthetic oligonucleotide
ccugggaauacauaggcau

SEQ ID NO: 2604709 - RNA, 19 nt, Artificial Sequence
  Description of Artificial Sequence: Synthetic oligonucleotide
cuuggcaggcuguugcagu

SEQ ID NO: 2604710 - RNA, 19 nt, Artificial Sequence
  Description of Artificial Sequence: Synthetic oligonucleotide
cggaaauggacuuuggugu

SEQ ID NO: 2604711 - RNA, 19 nt, Artificial Sequence
  Description of Artificial Sequence: Synthetic oligonucleotide
gagucccacguuguauaca

SEQ ID NO: 2604712 - RNA, 19 nt, Artificial Sequence
  Description of Artificial Sequence: Synthetic oligonucleotide
gcgcuuccuucuuuggcag

SEQ ID NO: 2604713 - RNA, 19 nt, Artificial Sequence
  Description of Artificial Sequence: Synthetic oligonucleotide
uccauccccugggaauaca

SEQ ID NO: 2604714 - RNA, 19 nt, Artificial Sequence
  Description of Artificial Sequence: Synthetic oligonucleotide
uggagucguugagcuuccg

SEQ ID NO: 2604715 - RNA, 19 nt, Artificial Sequence
  Description of Artificial Sequence: Synthetic oligonucleotide
caguguccauguacagguc

SEQ ID NO: 2604716 - RNA, 19 nt, Artificial Sequence
  Description of Artificial Sequence: Synthetic oligonucleotide
ggcucacugauugauccca

SEQ ID NO: 2604717 - RNA, 19 nt, Artificial Sequence
  Description of Artificial Sequence: Synthetic oligonucleotide
ucuucccgaugagaaucuc

SEQ ID NO: 2604718 - RNA, 19 nt, Artificial Sequence
  Description of Artificial Sequence: Synthetic oligonucleotide
ccucggcugagcugggucc

SEQ ID NO: 2604719 - RNA, 19 nt, Artificial Sequence
  Description of Artificial Sequence: Synthetic oligonucleotide
aaacugccauggagguaug

SEQ ID NO: 2604720 - RNA, 19 nt, Artificial Sequence
  Description of Artificial Sequence: Synthetic oligonucleotide
ccaagauagaaggcccaag

SEQ ID NO: 2604721 - RNA, 19 nt, Artificial Sequence
  Description of Artificial Sequence: Synthetic oligonucleotide
agacagaugcagaguccca

SEQ ID NO: 2604722 - RNA, 19 nt, Artificial Sequence
  Description of Artificial Sequence: Synthetic oligonucleotide
aggcagccucggcugagcu

SEQ ID NO: 2604723 - RNA, 19 nt, Artificial Sequence
  Description of Artificial Sequence: Synthetic oligonucleotide
gaggcagccucggcugagc

SEQ ID NO: 2604724 - RNA, 19 nt, Artificial Sequence
  Description of Artificial Sequence: Synthetic oligonucleotide
augcagagucccacguugu

SEQ ID NO: 2604725 - RNA, 19 nt, Artificial Sequence
  Description of Artificial Sequence: Synthetic oligonucleotide
cccacacccagacuuguuc

SEQ ID NO: 2604726 - RNA, 19 nt, Artificial Sequence
  Description of Artificial Sequence: Synthetic oligonucleotide
uggcaggcuguugcaguga

SEQ ID NO: 2604727 - RNA, 19 nt, Artificial Sequence
  Description of Artificial Sequence: Synthetic oligonucleotide
guugcugguccaccaagau

SEQ ID NO: 2604728 - RNA, 19 nt, Artificial Sequence
  Description of Artificial Sequence: Synthetic oligonucleotide
cugggcagagucacuguua

SEQ ID NO: 2604729 - RNA, 19 nt, Artificial Sequence
  Description of Artificial Sequence: Synthetic oligonucleotide
gcucaguaguacaauaccu

SEQ ID NO: 2604730 - RNA, 19 nt, Artificial Sequence
  Description of Artificial Sequence: Synthetic oligonucleotide
cagcuccucgcuggaagag

SEQ ID NO: 2604731 - RNA, 19 nt, Artificial Sequence
  Description of Artificial Sequence: Synthetic oligonucleotide
ggcaggcuguugcagugac

SEQ ID NO: 2604732 - RNA, 19 nt, Artificial Sequence
  Description of Artificial Sequence: Synthetic oligonucleotide
uacaaccuuguuggccaau

SEQ ID NO: 2604733 - RNA, 19 nt, Artificial Sequence
  Description of Artificial Sequence: Synthetic oligonucleotide
gacuuuggugugugaugcu

SEQ ID NO: 2604734 - RNA, 19 nt, Artificial Sequence
  Description of Artificial Sequence: Synthetic oligonucleotide
ccgucucauacucccacac

SEQ ID NO: 2604735 - RNA, 19 nt, Artificial Sequence
  Description of Artificial Sequence: Synthetic oligonucleotide
gggacguguccacaaagcu

SEQ ID NO: 2604736 - RNA, 19 nt, Artificial Sequence
  Description of Artificial Sequence: Synthetic oligonucleotide
ggagguaugcgcacggugu

SEQ ID NO: 2604737 - RNA, 19 nt, Artificial Sequence
  Description of Artificial Sequence: Synthetic oligonucleotide
ggccuagcucaguaguaca

SEQ ID NO: 2604738 - RNA, 19 nt, Artificial Sequence
  Description of Artificial Sequence: Synthetic oligonucleotide
auggagguaugcgcacggu

SEQ ID NO: 2604739 - RNA, 19 nt, Artificial Sequence
  Description of Artificial Sequence: Synthetic oligonucleotide
gccuuugaucuucccgaug

SEQ ID NO: 2604740 - RNA, 19 nt, Artificial Sequence
  Description of Artificial Sequence: Synthetic oligonucleotide
guaugcgcacgguguccac

SEQ ID NO: 2604741 - RNA, 19 nt, Artificial Sequence
  Description of Artificial Sequence: Synthetic oligonucleotide
gguaugcgcacggugucca

SEQ ID NO: 2604742 - RNA, 19 nt, Artificial Sequence
  Description of Artificial Sequence: Synthetic oligonucleotide
uuggugugugaugcuccau

SEQ ID NO: 2604743 - RNA, 19 nt, Artificial Sequence
  Description of Artificial Sequence: Synthetic oligonucleotide
ccauggagguaugcgcacg

SEQ ID NO: 2604744 - RNA, 19 nt, Artificial Sequence
  Description of Artificial Sequence: Synthetic oligonucleotide
gccauggagguaugcgcac

SEQ ID NO: 2604745 - RNA, 19 nt, Artificial Sequence
  Description of Artificial Sequence: Synthetic oligonucleotide
cguguauggcgcuuccuuc

SEQ ID NO: 2604746 - RNA, 19 nt, Artificial Sequence
  Description of Artificial Sequence: Synthetic oligonucleotide
ccagcuuggugauaucaaa

SEQ ID NO: 2604747 - RNA, 19 nt, Artificial Sequence
  Description of Artificial Sequence: Synthetic oligonucleotide
ggucaugagcucccuccuc

SEQ ID NO: 2604748 - RNA, 19 nt, Artificial Sequence
  Description of Artificial Sequence: Synthetic oligonucleotide
ccucgcuggaagaggcagc

SEQ ID NO: 2604749 - RNA, 19 nt, Artificial Sequence
  Description of Artificial Sequence: Synthetic oligonucleotide
cauccccugggaauacaua

SEQ ID NO: 2604750 - RNA, 19 nt, Artificial Sequence
  Description of Artificial Sequence: Synthetic oligonucleotide
agcguguauggcgcuuccu

SEQ ID NO: 2604751 - RNA, 19 nt, Artificial Sequence
  Description of Artificial Sequence: Synthetic oligonucleotide
uugaucccacaagcgugua

SEQ ID NO: 2604752 - RNA, 19 nt, Artificial Sequence
  Description of Artificial Sequence: Synthetic oligonucleotide
ggcagccucggcugagcug

SEQ ID NO: 2604753 - RNA, 19 nt, Artificial Sequence
  Description of Artificial Sequence: Synthetic oligonucleotide
agaggcccuggguuccauu

SEQ ID NO: 2604754 - RNA, 19 nt, Artificial Sequence
  Description of Artificial Sequence: Synthetic oligonucleotide
acccugaagcggaucuccu

SEQ ID NO: 2604755 - RNA, 19 nt, Artificial Sequence
  Description of Artificial Sequence: Synthetic oligonucleotide
cgcuggaagaggcagccuc

SEQ ID NO: 2604756 - RNA, 19 nt, Artificial Sequence
  Description of Artificial Sequence: Synthetic oligonucleotide
cuccauccccugggaauac

SEQ ID NO: 2604757 - RNA, 19 nt, Artificial Sequence
  Description of Artificial Sequence: Synthetic oligonucleotide
ucggcugagcuggguccug

SEQ ID NO: 2604758 - RNA, 19 nt, Artificial Sequence
  Description of Artificial Sequence: Synthetic oligonucleotide
ggacuaguugcugguccac

SEQ ID NO: 2604759 - RNA, 19 nt, Artificial Sequence
  Description of Artificial Sequence: Synthetic oligonucleotide
ugcgcacgguguccaccau

SEQ ID NO: 2604760 - RNA, 19 nt, Artificial Sequence
  Description of Artificial Sequence: Synthetic oligonucleotide
ggagucguugagcuuccgu

SEQ ID NO: 2604761 - RNA, 19 nt, Artificial Sequence
  Description of Artificial Sequence: Synthetic oligonucleotide
ggguuccauucuccugggc

SEQ ID NO: 2604762 - RNA, 19 nt, Artificial Sequence
  Description of Artificial Sequence: Synthetic oligonucleotide
cccacguuguauacaaccu

SEQ ID NO: 2604763 - RNA, 19 nt, Artificial Sequence
  Description of Artificial Sequence: Synthetic oligonucleotide
cccugaagcggaucuccuc

SEQ ID NO: 2604764 - RNA, 19 nt, Artificial Sequence
  Description of Artificial Sequence: Synthetic oligonucleotide
cauaucggaaauggacuuu

SEQ ID NO: 2604765 - RNA, 19 nt, Artificial Sequence
  Description of Artificial Sequence: Synthetic oligonucleotide
gagcucccuccuccgucuc

SEQ ID NO: 2604766 - RNA, 19 nt, Artificial Sequence
  Description of Artificial Sequence: Synthetic oligonucleotide
cacacccucugggcugcag

SEQ ID NO: 2604767 - RNA, 19 nt, Artificial Sequence
  Description of Artificial Sequence: Synthetic oligonucleotide
gccucggcugagcuggguc

SEQ ID NO: 2604768 - RNA, 19 nt, Artificial Sequence
  Description of Artificial Sequence: Synthetic oligonucleotide
cauccaggaaugggugaaa

SEQ ID NO: 2604769 - RNA, 19 nt, Artificial Sequence
  Description of Artificial Sequence: Synthetic oligonucleotide
ccaccaucuccaccaggac

SEQ ID NO: 2604770 - RNA, 19 nt, Artificial Sequence
  Description of Artificial Sequence: Synthetic oligonucleotide
gccuagcucaguaguacaa

SEQ ID NO: 2604771 - RNA, 19 nt, Artificial Sequence
  Description of Artificial Sequence: Synthetic oligonucleotide
cccagacuuguuccgucuc

SEQ ID NO: 2604772 - RNA, 19 nt, Artificial Sequence
  Description of Artificial Sequence: Synthetic oligonucleotide
caugagcucccuccuccgu

SEQ ID NO: 2604773 - RNA, 19 nt, Artificial Sequence
  Description of Artificial Sequence: Synthetic oligonucleotide
cggcaauggagucguugag

SEQ ID NO: 2604774 - RNA, 19 nt, Artificial Sequence
  Description of Artificial Sequence: Synthetic oligonucleotide
cacaagcguguauggcgcu

SEQ ID NO: 2604775 - RNA, 19 nt, Artificial Sequence
  Description of Artificial Sequence: Synthetic oligonucleotide
gcuccauccccugggaaua

SEQ ID NO: 2604776 - RNA, 19 nt, Artificial Sequence
  Description of Artificial Sequence: Synthetic oligonucleotide
caaccuuguuggccaauuu

SEQ ID NO: 2604777 - RNA, 19 nt, Artificial Sequence
  Description of Artificial Sequence: Synthetic oligonucleotide
guauggcgcuuccuucuuu

SEQ ID NO: 2604778 - RNA, 19 nt, Artificial Sequence
  Description of Artificial Sequence: Synthetic oligonucleotide
caccacccugaagcggauc

SEQ ID NO: 2604779 - RNA, 19 nt, Artificial Sequence
  Description of Artificial Sequence: Synthetic oligonucleotide
caagccuggcucacugauu

SEQ ID NO: 2604780 - RNA, 19 nt, Artificial Sequence
  Description of Artificial Sequence: Synthetic oligonucleotide
gcguguauggcgcuuccuu

SEQ ID NO: 2604781 - RNA, 19 nt, Artificial Sequence
  Description of Artificial Sequence: Synthetic oligonucleotide
caauggagucguugagcuu

SEQ ID NO: 2604782 - RNA, 19 nt, Artificial Sequence
  Description of Artificial Sequence: Synthetic oligonucleotide
gcgcacgguguccaccauc

SEQ ID NO: 2604783 - RNA, 19 nt, Artificial Sequence
  Description of Artificial Sequence: Synthetic oligonucleotide
ggccaauuucuuguucagu

SEQ ID NO: 2604784 - RNA, 19 nt, Artificial Sequence
  Description of Artificial Sequence: Synthetic oligonucleotide
gcagagucccacguuguau

SEQ ID NO: 2604785 - RNA, 19 nt, Artificial Sequence
  Description of Artificial Sequence: Synthetic oligonucleotide
agccucggcugagcugggu

SEQ ID NO: 2604786 - RNA, 19 nt, Artificial Sequence
  Description of Artificial Sequence: Synthetic oligonucleotide
gggcagagucacuguuaaa

SEQ ID NO: 2604787 - RNA, 19 nt, Artificial Sequence
  Description of Artificial Sequence: Synthetic oligonucleotide
ccaagccuggcucacugau

SEQ ID NO: 2604788 - RNA, 19 nt, Artificial Sequence
  Description of Artificial Sequence: Synthetic oligonucleotide
ccuccgucucauacuccca

SEQ ID NO: 2604789 - RNA, 19 nt, Artificial Sequence
  Description of Artificial Sequence: Synthetic oligonucleotide
cgcacgguguccaccaucu

SEQ ID NO: 2604790 - RNA, 19 nt, Artificial Sequence
  Description of Artificial Sequence: Synthetic oligonucleotide
cucccacacccagacuugu

SEQ ID NO: 2604791 - RNA, 19 nt, Artificial Sequence
  Description of Artificial Sequence: Synthetic oligonucleotide
cucggcugagcuggguccu

SEQ ID NO: 2604792 - RNA, 19 nt, Artificial Sequence
  Description of Artificial Sequence: Synthetic oligonucleotide
ccacguuguauacaaccuu

SEQ ID NO: 2604793 - RNA, 19 nt, Artificial Sequence
  Description of Artificial Sequence: Synthetic oligonucleotide
gcugguccaccaagauaga

SEQ ID NO: 2604794 - RNA, 19 nt, Artificial Sequence
  Description of Artificial Sequence: Synthetic oligonucleotide
ccguucaaacugccaugga

SEQ ID NO: 2604795 - RNA, 19 nt, Artificial Sequence
  Description of Artificial Sequence: Synthetic oligonucleotide
ccuagcucaguaguacaau

SEQ ID NO: 2604796 - RNA, 19 nt, Artificial Sequence
  Description of Artificial Sequence: Synthetic oligonucleotide
ccacccugaagcggaucuc

SEQ ID NO: 2604797 - RNA, 19 nt, Artificial Sequence
  Description of Artificial Sequence: Synthetic oligonucleotide
cguuguauacaaccuuguu

SEQ ID NO: 2604798 - RNA, 19 nt, Artificial Sequence
  Description of Artificial Sequence: Synthetic oligonucleotide
cucccuccuccgucucaua

SEQ ID NO: 2604799 - RNA, 19 nt, Artificial Sequence
  Description of Artificial Sequence: Synthetic oligonucleotide
cguugagcuuccguucaaa

SEQ ID NO: 2604800 - RNA, 19 nt, Artificial Sequence
  Description of Artificial Sequence: Synthetic oligonucleotide
ccaccaggacgaacauccu

SEQ ID NO: 2604801 - RNA, 19 nt, Artificial Sequence
  Description of Artificial Sequence: Synthetic oligonucleotide
ccucaccaguguccaugua

SEQ ID NO: 2604802 - RNA, 19 nt, Artificial Sequence
  Description of Artificial Sequence: Synthetic oligonucleotide
ccaucuccaccaggacgaa

SEQ ID NO: 2604803 - RNA, 19 nt, Artificial Sequence
  Description of Artificial Sequence: Synthetic oligonucleotide
ccaccacccugaagcggau

SEQ ID NO: 2604804 - RNA, 19 nt, Artificial Sequence
  Description of Artificial Sequence: Synthetic oligonucleotide
cggcugagcuggguccugu

SEQ ID NO: 2604805 - RNA, 19 nt, Artificial Sequence
  Description of Artificial Sequence: Synthetic oligonucleotide
aguacuuuaacauaagggc

SEQ ID NO: 2604806 - RNA, 19 nt, Artificial Sequence
  Description of Artificial Sequence: Synthetic oligonucleotide
uauaauaaaaccuggcugc

SEQ ID NO: 2604807 - RNA, 19 nt, Artificial Sequence
  Description of Artificial Sequence: Synthetic oligonucleotide
aguugaaggacuuuugacc

SEQ ID NO: 2604808 - RNA, 19 nt, Artificial Sequence
  Description of Artificial Sequence: Synthetic oligonucleotide
uuauaauaaaaccuggcug

SEQ ID NO: 2604809 - RNA, 19 nt, Artificial Sequence
  Description of Artificial Sequence: Synthetic oligonucleotide
uucaucucaaguuucaggg

SEQ ID NO: 2604810 - RNA, 19 nt, Artificial Sequence
  Description of Artificial Sequence: Synthetic oligonucleotide
acuuuugaccuauagaaac

SEQ ID NO: 2604811 - RNA, 19 nt, Artificial Sequence
  Description of Artificial Sequence: Synthetic oligonucleotide
uuaacauaagggcuguugg

SEQ ID NO: 2604812 - RNA, 19 nt, Artificial Sequence
  Description of Artificial Sequence: Synthetic oligonucleotide
uugggagacauucuaaugg

SEQ ID NO: 2604813 - RNA, 19 nt, Artificial Sequence
  Description of Artificial Sequence: Synthetic oligonucleotide
uuucuggaaguaauaaucg

SEQ ID NO: 2604814 - RNA, 19 nt, Artificial Sequence
  Description of Artificial Sequence: Synthetic oligonucleotide
uuuaucaugugucuuauaa

SEQ ID NO: 2604815 - RNA, 19 nt, Artificial Sequence
  Description of Artificial Sequence: Synthetic oligonucleotide
acugaaaauugccauaccg

SEQ ID NO: 2604816 - RNA, 19 nt, Artificial Sequence
  Description of Artificial Sequence: Synthetic oligonucleotide
ugugucuuauaauaaaacc

SEQ ID NO: 2604817 - RNA, 19 nt, Artificial Sequence
  Description of Artificial Sequence: Synthetic oligonucleotide
auugccauaccguaggugg

SEQ ID NO: 2604818 - RNA, 19 nt, Artificial Sequence
  Description of Artificial Sequence: Synthetic oligonucleotide
auaaaguugagcaagguag

SEQ ID NO: 2604819 - RNA, 19 nt, Artificial Sequence
  Description of Artificial Sequence: Synthetic oligonucleotide
aaguugaaggacuuuugac

SEQ ID NO: 2604820 - RNA, 19 nt, Artificial Sequence
  Description of Artificial Sequence: Synthetic oligonucleotide
uuucacacccucaagauac

SEQ ID NO: 2604821 - RNA, 19 nt, Artificial Sequence
  Description of Artificial Sequence: Synthetic oligonucleotide
uugaccuauagaaacaccc

SEQ ID NO: 2604822 - RNA, 19 nt, Artificial Sequence
  Description of Artificial Sequence: Synthetic oligonucleotide
aggccuuggagucaaaucc

SEQ ID NO: 2604823 - RNA, 19 nt, Artificial Sequence
  Description of Artificial Sequence: Synthetic oligonucleotide
ugcacuucgaaguacaucu

SEQ ID NO: 2604824 - RNA, 19 nt, Artificial Sequence
  Description of Artificial Sequence: Synthetic oligonucleotide
gaguacuuuaacauaaggg

SEQ ID NO: 2604825 - RNA, 19 nt, Artificial Sequence
  Description of Artificial Sequence: Synthetic oligonucleotide
ucuggaaguaauaaucggc

SEQ ID NO: 2604826 - RNA, 19 nt, Artificial Sequence
  Description of Artificial Sequence: Synthetic oligonucleotide
uauagcucugucuuuauca

SEQ ID NO: 2604827 - RNA, 19 nt, Artificial Sequence
  Description of Artificial Sequence: Synthetic oligonucleotide
auagaaacacccaauauag

SEQ ID NO: 2604828 - RNA, 19 nt, Artificial Sequence
  Description of Artificial Sequence: Synthetic oligonucleotide
cuuucuuuauucaacuccc

SEQ ID NO: 2604829 - RNA, 19 nt, Artificial Sequence
  Description of Artificial Sequence: Synthetic oligonucleotide
cuuucuggaaguaauaauc

SEQ ID NO: 2604830 - RNA, 19 nt, Artificial Sequence
  Description of Artificial Sequence: Synthetic oligonucleotide
aaguacaucugucucaccu

SEQ ID NO: 2604831 - RNA, 19 nt, Artificial Sequence
  Description of Artificial Sequence: Synthetic oligonucleotide
uuaaguuuuguuuugucau

SEQ ID NO: 2604832 - RNA, 19 nt, Artificial Sequence
  Description of Artificial Sequence: Synthetic oligonucleotide
ucaagauacugguggaugg

SEQ ID NO: 2604833 - RNA, 19 nt, Artificial Sequence
  Description of Artificial Sequence: Synthetic oligonucleotide
auaaucggcuucuuuguac

SEQ ID NO: 2604834 - RNA, 19 nt, Artificial Sequence
  Description of Artificial Sequence: Synthetic oligonucleotide
ucaaucuuaaguuuuguuu

SEQ ID NO: 2604835 - RNA, 19 nt, Artificial Sequence
  Description of Artificial Sequence: Synthetic oligonucleotide
uucuuuaaguugaaggacu

SEQ ID NO: 2604836 - RNA, 19 nt, Artificial Sequence
  Description of Artificial Sequence: Synthetic oligonucleotide
auggcuugcuuucagagag

SEQ ID NO: 2604837 - RNA, 19 nt, Artificial Sequence
  Description of Artificial Sequence: Synthetic oligonucleotide
auucuaauggcuugcuuuc

SEQ ID NO: 2604838 - RNA, 19 nt, Artificial Sequence
  Description of Artificial Sequence: Synthetic oligonucleotide
aacuguauagcucugucuu

SEQ ID NO: 2604839 - RNA, 19 nt, Artificial Sequence
  Description of Artificial Sequence: Synthetic oligonucleotide
ucugucuuuaucauguguc

SEQ ID NO: 2604840 - RNA, 19 nt, Artificial Sequence
  Description of Artificial Sequence: Synthetic oligonucleotide
agaguacuuuaacauaagg

SEQ ID NO: 2604841 - RNA, 19 nt, Artificial Sequence
  Description of Artificial Sequence: Synthetic oligonucleotide
aacugaaaauugccauacc

SEQ ID NO: 2604842 - RNA, 19 nt, Artificial Sequence
  Description of Artificial Sequence: Synthetic oligonucleotide
cuuuauucaacucccgaag

SEQ ID NO: 2604843 - RNA, 19 nt, Artificial Sequence
  Description of Artificial Sequence: Synthetic oligonucleotide
auucaucucaaguuucagg

SEQ ID NO: 2604844 - RNA, 19 nt, Artificial Sequence
  Description of Artificial Sequence: Synthetic oligonucleotide
aacuguuuaaggccaggag

SEQ ID NO: 2604845 - RNA, 19 nt, Artificial Sequence
  Description of Artificial Sequence: Synthetic oligonucleotide
acccucaagauacuggugg

SEQ ID NO: 2604846 - RNA, 19 nt, Artificial Sequence
  Description of Artificial Sequence: Synthetic oligonucleotide
uuuauucaacucccgaaga

SEQ ID NO: 2604847 - RNA, 19 nt, Artificial Sequence
  Description of Artificial Sequence: Synthetic oligonucleotide
uucuggaaguaauaaucgg

SEQ ID NO: 2604848 - RNA, 19 nt, Artificial Sequence
  Description of Artificial Sequence: Synthetic oligonucleotide
uaaguugaaggacuuuuga

SEQ ID NO: 2604849 - RNA, 19 nt, Artificial Sequence
  Description of Artificial Sequence: Synthetic oligonucleotide
uaacauaagggcuguuggg

SEQ ID NO: 2604850 - RNA, 19 nt, Artificial Sequence
  Description of Artificial Sequence: Synthetic oligonucleotide
aaggccuuggagucaaauc

SEQ ID NO: 2604851 - RNA, 19 nt, Artificial Sequence
  Description of Artificial Sequence: Synthetic oligonucleotide
uuuaacauaagggcuguug

SEQ ID NO: 2604852 - RNA, 19 nt, Artificial Sequence
  Description of Artificial Sequence: Synthetic oligonucleotide
uuaaguugaaggacuuuug

SEQ ID NO: 2604853 - RNA, 19 nt, Artificial Sequence
  Description of Artificial Sequence: Synthetic oligonucleotide
uggagcaacuguuuaaggc

SEQ ID NO: 2604854 - RNA, 19 nt, Artificial Sequence
  Description of Artificial Sequence: Synthetic oligonucleotide
cuuucuuuaaguugaagga

SEQ ID NO: 2604855 - RNA, 19 nt, Artificial Sequence
  Description of Artificial Sequence: Synthetic oligonucleotide
uaauggcuugcuuucagag

SEQ ID NO: 2604856 - RNA, 19 nt, Artificial Sequence
  Description of Artificial Sequence: Synthetic oligonucleotide
aaggacuuuugaccuauag

SEQ ID NO: 2604857 - RNA, 19 nt, Artificial Sequence
  Description of Artificial Sequence: Synthetic oligonucleotide
uucaacucccgaagaaacg

SEQ ID NO: 2604858 - RNA, 19 nt, Artificial Sequence
  Description of Artificial Sequence: Synthetic oligonucleotide
cuuuguacugcucugccag

SEQ ID NO: 2604859 - RNA, 19 nt, Artificial Sequence
  Description of Artificial Sequence: Synthetic oligonucleotide
acacccaauauaguaauac

SEQ ID NO: 2604860 - RNA, 19 nt, Artificial Sequence
  Description of Artificial Sequence: Synthetic oligonucleotide
cuucuugaauccuuucugg

SEQ ID NO: 2604861 - RNA, 19 nt, Artificial Sequence
  Description of Artificial Sequence: Synthetic oligonucleotide
caggacauaaaguugagca

SEQ ID NO: 2604862 - RNA, 19 nt, Artificial Sequence
  Description of Artificial Sequence: Synthetic oligonucleotide
uguuuugucaucuuuucuu

SEQ ID NO: 2604863 - RNA, 19 nt, Artificial Sequence
  Description of Artificial Sequence: Synthetic oligonucleotide
ugaaaauugccauaccgua

SEQ ID NO: 2604864 - RNA, 19 nt, Artificial Sequence
  Description of Artificial Sequence: Synthetic oligonucleotide
uggcuaagcaacuguauag

SEQ ID NO: 2604865 - RNA, 19 nt, Artificial Sequence
  Description of Artificial Sequence: Synthetic oligonucleotide
uuggguuucgucuucugcc

SEQ ID NO: 2604866 - RNA, 19 nt, Artificial Sequence
  Description of Artificial Sequence: Synthetic oligonucleotide
uaaagccuggcuaagcaac

SEQ ID NO: 2604867 - RNA, 19 nt, Artificial Sequence
  Description of Artificial Sequence: Synthetic oligonucleotide
uuucuuuauucaacucccg

SEQ ID NO: 2604868 - RNA, 19 nt, Artificial Sequence
  Description of Artificial Sequence: Synthetic oligonucleotide
acccaauauaguaauacac

SEQ ID NO: 2604869 - RNA, 19 nt, Artificial Sequence
  Description of Artificial Sequence: Synthetic oligonucleotide
aagaaacgccaagaugugc

SEQ ID NO: 2604870 - RNA, 19 nt, Artificial Sequence
  Description of Artificial Sequence: Synthetic oligonucleotide
uaauaaucggcuucuuugu

SEQ ID NO: 2604871 - RNA, 19 nt, Artificial Sequence
  Description of Artificial Sequence: Synthetic oligonucleotide
caucucaaguuucagggcc

SEQ ID NO: 2604872 - RNA, 19 nt, Artificial Sequence
  Description of Artificial Sequence: Synthetic oligonucleotide
uuauuuucacacccucaag

SEQ ID NO: 2604873 - RNA, 19 nt, Artificial Sequence
  Description of Artificial Sequence: Synthetic oligonucleotide
uggguaggaguucuaaagc

SEQ ID NO: 2604874 - RNA, 19 nt, Artificial Sequence
  Description of Artificial Sequence: Synthetic oligonucleotide
ucuaauggcuugcuuucag

SEQ ID NO: 2604875 - RNA, 19 nt, Artificial Sequence
  Description of Artificial Sequence: Synthetic oligonucleotide
ugccaggacauaaaguuga

SEQ ID NO: 2604876 - RNA, 19 nt, Artificial Sequence
  Description of Artificial Sequence: Synthetic oligonucleotide
aaccaguuccuuucccugg

SEQ ID NO: 2604877 - RNA, 19 nt, Artificial Sequence
  Description of Artificial Sequence: Synthetic oligonucleotide
agaacgucuccuuucagca

SEQ ID NO: 2604878 - RNA, 19 nt, Artificial Sequence
  Description of Artificial Sequence: Synthetic oligonucleotide
uuucuuuaaguugaaggac

SEQ ID NO: 2604879 - RNA, 19 nt, Artificial Sequence
  Description of Artificial Sequence: Synthetic oligonucleotide
ugagcaagguagcuacagg

SEQ ID NO: 2604880 - RNA, 19 nt, Artificial Sequence
  Description of Artificial Sequence: Synthetic oligonucleotide
aacauaagggcuguuggga

SEQ ID NO: 2604881 - RNA, 19 nt, Artificial Sequence
  Description of Artificial Sequence: Synthetic oligonucleotide
uucacacuucauuugaaaa

SEQ ID NO: 2604882 - RNA, 19 nt, Artificial Sequence
  Description of Artificial Sequence: Synthetic oligonucleotide
uuuggguuucgucuucugc

SEQ ID NO: 2604883 - RNA, 19 nt, Artificial Sequence
  Description of Artificial Sequence: Synthetic oligonucleotide
ugucaucuuuucuuuuggg

SEQ ID NO: 2604884 - RNA, 19 nt, Artificial Sequence
  Description of Artificial Sequence: Synthetic oligonucleotide
auucaacucccgaagaaac

SEQ ID NO: 2604885 - RNA, 19 nt, Artificial Sequence
  Description of Artificial Sequence: Synthetic oligonucleotide
gagacauucuaauggcuug

SEQ ID NO: 2604886 - RNA, 19 nt, Artificial Sequence
  Description of Artificial Sequence: Synthetic oligonucleotide
ugauucaucucaaguuuca

SEQ ID NO: 2604887 - RNA, 19 nt, Artificial Sequence
  Description of Artificial Sequence: Synthetic oligonucleotide
uuauucaacucccgaagaa

SEQ ID NO: 2604888 - RNA, 19 nt, Artificial Sequence
  Description of Artificial Sequence: Synthetic oligonucleotide
aauggcuugcuuucagaga

SEQ ID NO: 2604889 - RNA, 19 nt, Artificial Sequence
  Description of Artificial Sequence: Synthetic oligonucleotide
augugucuuauaauaaaac

SEQ ID NO: 2604890 - RNA, 19 nt, Artificial Sequence
  Description of Artificial Sequence: Synthetic oligonucleotide
ugaccuauagaaacaccca

SEQ ID NO: 2604891 - RNA, 19 nt, Artificial Sequence
  Description of Artificial Sequence: Synthetic oligonucleotide
gagaacgucuccuuucagc

SEQ ID NO: 2604892 - RNA, 19 nt, Artificial Sequence
  Description of Artificial Sequence: Synthetic oligonucleotide
gugaguuccuucuugaauc

SEQ ID NO: 2604893 - RNA, 19 nt, Artificial Sequence
  Description of Artificial Sequence: Synthetic oligonucleotide
uuuaaguugaaggacuuuu

SEQ ID NO: 2604894 - RNA, 19 nt, Artificial Sequence
  Description of Artificial Sequence: Synthetic oligonucleotide
aguucuaaagccuggcuaa

SEQ ID NO: 2604895 - RNA, 19 nt, Artificial Sequence
  Description of Artificial Sequence: Synthetic oligonucleotide
uuugaccuauagaaacacc

SEQ ID NO: 2604896 - RNA, 19 nt, Artificial Sequence
  Description of Artificial Sequence: Synthetic oligonucleotide
gacauaaaguugagcaagg

SEQ ID NO: 2604897 - RNA, 19 nt, Artificial Sequence
  Description of Artificial Sequence: Synthetic oligonucleotide
ucaacucccgaagaaacgc

SEQ ID NO: 2604898 - RNA, 19 nt, Artificial Sequence
  Description of Artificial Sequence: Synthetic oligonucleotide
ggacuuuugaccuauagaa

SEQ ID NO: 2604899 - RNA, 19 nt, Artificial Sequence
  Description of Artificial Sequence: Synthetic oligonucleotide
uuugagaacgucuccuuuc

SEQ ID NO: 2604900 - RNA, 19 nt, Artificial Sequence
  Description of Artificial Sequence: Synthetic oligonucleotide
ugggagacauucuaauggc

SEQ ID NO: 2604901 - RNA, 19 nt, Artificial Sequence
  Description of Artificial Sequence: Synthetic oligonucleotide
ggagcaacuguuuaaggcc

SEQ ID NO: 2604902 - RNA, 19 nt, Artificial Sequence
  Description of Artificial Sequence: Synthetic oligonucleotide
guacaucugucucaccugg

SEQ ID NO: 2604903 - RNA, 19 nt, Artificial Sequence
  Description of Artificial Sequence: Synthetic oligonucleotide
cuacaggaaucuuugauca

SEQ ID NO: 2604904 - RNA, 19 nt, Artificial Sequence
  Description of Artificial Sequence: Synthetic oligonucleotide
uucgaaguacaucugucuc

SEQ ID NO: 2604905 - RNA, 19 nt, Artificial Sequence
  Description of Artificial Sequence: Synthetic oligonucleotide
acaucugucucaccugggg

SEQ ID NO: 2604906 - RNA, 19 nt, Artificial Sequence
  Description of Artificial Sequence: Synthetic oligonucleotide
uucugccuuauuuucacac

SEQ ID NO: 2604907 - RNA, 19 nt, Artificial Sequence
  Description of Artificial Sequence: Synthetic oligonucleotide
uucuuuguacugcucugcc

SEQ ID NO: 2604908 - RNA, 19 nt, Artificial Sequence
  Description of Artificial Sequence: Synthetic oligonucleotide
uuuugaccuauagaaacac

SEQ ID NO: 2604909 - RNA, 19 nt, Artificial Sequence
  Description of Artificial Sequence: Synthetic oligonucleotide
aauacacauaggcauuguu

SEQ ID NO: 2604910 - RNA, 19 nt, Artificial Sequence
  Description of Artificial Sequence: Synthetic oligonucleotide
uccuucuugaauccuuucu

SEQ ID NO: 2604911 - RNA, 19 nt, Artificial Sequence
  Description of Artificial Sequence: Synthetic oligonucleotide
cuaagcaacuguauagcuc

SEQ ID NO: 2604912 - RNA, 19 nt, Artificial Sequence
  Description of Artificial Sequence: Synthetic oligonucleotide
ucuugaauccuuucuggaa

SEQ ID NO: 2604913 - RNA, 19 nt, Artificial Sequence
  Description of Artificial Sequence: Synthetic oligonucleotide
uaggaguucuaaagccugg

SEQ ID NO: 2604914 - RNA, 19 nt, Artificial Sequence
  Description of Artificial Sequence: Synthetic oligonucleotide
augugcaaggccuuggagu

SEQ ID NO: 2604915 - RNA, 19 nt, Artificial Sequence
  Description of Artificial Sequence: Synthetic oligonucleotide
uugucuucacacuucauuu

SEQ ID NO: 2604916 - RNA, 19 nt, Artificial Sequence
  Description of Artificial Sequence: Synthetic oligonucleotide
aacgucuccuuucagcaau

SEQ ID NO: 2604917 - RNA, 19 nt, Artificial Sequence
  Description of Artificial Sequence: Synthetic oligonucleotide
uugagaacgucuccuuuca

SEQ ID NO: 2604918 - RNA, 19 nt, Artificial Sequence
  Description of Artificial Sequence: Synthetic oligonucleotide
ucgaaguacaucugucuca

SEQ ID NO: 2604919 - RNA, 19 nt, Artificial Sequence
  Description of Artificial Sequence: Synthetic oligonucleotide
auuuucacacccucaagau

SEQ ID NO: 2604920 - RNA, 19 nt, Artificial Sequence
  Description of Artificial Sequence: Synthetic oligonucleotide
uucccuuaaggcuucuuca

SEQ ID NO: 2604921 - RNA, 19 nt, Artificial Sequence
  Description of Artificial Sequence: Synthetic oligonucleotide
agacauucuaauggcuugc

SEQ ID NO: 2604922 - RNA, 19 nt, Artificial Sequence
  Description of Artificial Sequence: Synthetic oligonucleotide
aaguuucagggccaagagu

SEQ ID NO: 2604923 - RNA, 19 nt, Artificial Sequence
  Description of Artificial Sequence: Synthetic oligonucleotide
ucugccuuauuuucacacc

SEQ ID NO: 2604924 - RNA, 19 nt, Artificial Sequence
  Description of Artificial Sequence: Synthetic oligonucleotide
caaucaaucuuaaguuuug

SEQ ID NO: 2604925 - RNA, 19 nt, Artificial Sequence
  Description of Artificial Sequence: Synthetic oligonucleotide
acauaagggcuguugggag

SEQ ID NO: 2604926 - RNA, 19 nt, Artificial Sequence
  Description of Artificial Sequence: Synthetic oligonucleotide
auacacauaggcauuguug

SEQ ID NO: 2604927 - RNA, 19 nt, Artificial Sequence
  Description of Artificial Sequence: Synthetic oligonucleotide
cugccuuauuuucacaccc

SEQ ID NO: 2604928 - RNA, 19 nt, Artificial Sequence
  Description of Artificial Sequence: Synthetic oligonucleotide
aggacuuuugaccuauaga

SEQ ID NO: 2604929 - RNA, 19 nt, Artificial Sequence
  Description of Artificial Sequence: Synthetic oligonucleotide
uccugauucaucucaaguu

SEQ ID NO: 2604930 - RNA, 19 nt, Artificial Sequence
  Description of Artificial Sequence: Synthetic oligonucleotide
agagucuuuagcagcuugc

SEQ ID NO: 2604931 - RNA, 19 nt, Artificial Sequence
  Description of Artificial Sequence: Synthetic oligonucleotide
guagcuacaggaaucuuug

SEQ ID NO: 2604932 - RNA, 19 nt, Artificial Sequence
  Description of Artificial Sequence: Synthetic oligonucleotide
ugaguuccuucuugaaucc

SEQ ID NO: 2604933 - RNA, 19 nt, Artificial Sequence
  Description of Artificial Sequence: Synthetic oligonucleotide
uucuugaauccuuucugga

SEQ ID NO: 2604934 - RNA, 19 nt, Artificial Sequence
  Description of Artificial Sequence: Synthetic oligonucleotide
cuuauaauaaaaccuggcu

SEQ ID NO: 2604935 - RNA, 19 nt, Artificial Sequence
  Description of Artificial Sequence: Synthetic oligonucleotide
uuaucaugugucuuauaau

SEQ ID NO: 2604936 - RNA, 19 nt, Artificial Sequence
  Description of Artificial Sequence: Synthetic oligonucleotide
gagcaagguagcuacagga

SEQ ID NO: 2604937 - RNA, 19 nt, Artificial Sequence
  Description of Artificial Sequence: Synthetic oligonucleotide
uucgucuucugccuuauuu

SEQ ID NO: 2604938 - RNA, 19 nt, Artificial Sequence
  Description of Artificial Sequence: Synthetic oligonucleotide
uaaguuuuguuuugucauc

SEQ ID NO: 2604939 - RNA, 19 nt, Artificial Sequence
  Description of Artificial Sequence: Synthetic oligonucleotide
cuggcuuucuuuauucaac

SEQ ID NO: 2604940 - RNA, 19 nt, Artificial Sequence
  Description of Artificial Sequence: Synthetic oligonucleotide
aguacaucugucucaccug

SEQ ID NO: 2604941 - RNA, 19 nt, Artificial Sequence
  Description of Artificial Sequence: Synthetic oligonucleotide
auaagggcuguugggagac

SEQ ID NO: 2604942 - RNA, 19 nt, Artificial Sequence
  Description of Artificial Sequence: Synthetic oligonucleotide
acacauaggcauuguuggg

SEQ ID NO: 2604943 - RNA, 19 nt, Artificial Sequence
  Description of Artificial Sequence: Synthetic oligonucleotide
ucaaccaguuccuuucccu

SEQ ID NO: 2604944 - RNA, 19 nt, Artificial Sequence
  Description of Artificial Sequence: Synthetic oligonucleotide
caagguagcuacaggaauc

SEQ ID NO: 2604945 - RNA, 19 nt, Artificial Sequence
  Description of Artificial Sequence: Synthetic oligonucleotide
aauaaucggcuucuuugua

SEQ ID NO: 2604946 - RNA, 19 nt, Artificial Sequence
  Description of Artificial Sequence: Synthetic oligonucleotide
ucaucucaaguuucagggc

SEQ ID NO: 2604947 - RNA, 19 nt, Artificial Sequence
  Description of Artificial Sequence: Synthetic oligonucleotide
uguugggagacauucuaau

SEQ ID NO: 2604948 - RNA, 19 nt, Artificial Sequence
  Description of Artificial Sequence: Synthetic oligonucleotide
aagaugugcaaggccuugg

SEQ ID NO: 2604949 - RNA, 19 nt, Artificial Sequence
  Description of Artificial Sequence: Synthetic oligonucleotide
ucuuaaguuuuguuuuguc

SEQ ID NO: 2604950 - RNA, 19 nt, Artificial Sequence
  Description of Artificial Sequence: Synthetic oligonucleotide
aaucaaucuuaaguuuugu

SEQ ID NO: 2604951 - RNA, 19 nt, Artificial Sequence
  Description of Artificial Sequence: Synthetic oligonucleotide
guugggagacauucuaaug

SEQ ID NO: 2604952 - RNA, 19 nt, Artificial Sequence
  Description of Artificial Sequence: Synthetic oligonucleotide
aucggcuucuuuguacugc

SEQ ID NO: 2604953 - RNA, 19 nt, Artificial Sequence
  Description of Artificial Sequence: Synthetic oligonucleotide
cuuucagcaaucaaucuua

SEQ ID NO: 2604954 - RNA, 19 nt, Artificial Sequence
  Description of Artificial Sequence: Synthetic oligonucleotide
agugaguuccuucuugaau

SEQ ID NO: 2604955 - RNA, 19 nt, Artificial Sequence
  Description of Artificial Sequence: Synthetic oligonucleotide
gaaacacccaauauaguaa

SEQ ID NO: 2604956 - RNA, 19 nt, Artificial Sequence
  Description of Artificial Sequence: Synthetic oligonucleotide
uauucaacucccgaagaaa

SEQ ID NO: 2604957 - RNA, 19 nt, Artificial Sequence
  Description of Artificial Sequence: Synthetic oligonucleotide
aagguagcuacaggaaucu

SEQ ID NO: 2604958 - RNA, 19 nt, Artificial Sequence
  Description of Artificial Sequence: Synthetic oligonucleotide
acacccucaagauacuggu

SEQ ID NO: 2604959 - RNA, 19 nt, Artificial Sequence
  Description of Artificial Sequence: Synthetic oligonucleotide
ucuuuaaguugaaggacuu

SEQ ID NO: 2604960 - RNA, 19 nt, Artificial Sequence
  Description of Artificial Sequence: Synthetic oligonucleotide
uuuucacacccucaagaua

SEQ ID NO: 2604961 - RNA, 19 nt, Artificial Sequence
  Description of Artificial Sequence: Synthetic oligonucleotide
aauugccauaccguaggug

SEQ ID NO: 2604962 - RNA, 19 nt, Artificial Sequence
  Description of Artificial Sequence: Synthetic oligonucleotide
uuuccugauucaucucaag

SEQ ID NO: 2604963 - RNA, 19 nt, Artificial Sequence
  Description of Artificial Sequence: Synthetic oligonucleotide
uuuagcagcuugcuggcuu

SEQ ID NO: 2604964 - RNA, 19 nt, Artificial Sequence
  Description of Artificial Sequence: Synthetic oligonucleotide
auaggcauuguuggguagg

SEQ ID NO: 2604965 - RNA, 19 nt, Artificial Sequence
  Description of Artificial Sequence: Synthetic oligonucleotide
cuuuugaccuauagaaaca

SEQ ID NO: 2604966 - RNA, 19 nt, Artificial Sequence
  Description of Artificial Sequence: Synthetic oligonucleotide
aguaauaaucggcuucuuu

SEQ ID NO: 2604967 - RNA, 19 nt, Artificial Sequence
  Description of Artificial Sequence: Synthetic oligonucleotide
agaaacgccaagaugugca

SEQ ID NO: 2604968 - RNA, 19 nt, Artificial Sequence
  Description of Artificial Sequence: Synthetic oligonucleotide
aggaguucuaaagccuggc

SEQ ID NO: 2604969 - RNA, 19 nt, Artificial Sequence
  Description of Artificial Sequence: Synthetic oligonucleotide
agcaaucaaucuuaaguuu

SEQ ID NO: 2604970 - RNA, 19 nt, Artificial Sequence
  Description of Artificial Sequence: Synthetic oligonucleotide
aaauugccauaccguaggu

SEQ ID NO: 2604971 - RNA, 19 nt, Artificial Sequence
  Description of Artificial Sequence: Synthetic oligonucleotide
agcuacaggaaucuuugau

SEQ ID NO: 2604972 - RNA, 19 nt, Artificial Sequence
  Description of Artificial Sequence: Synthetic oligonucleotide
guaauacacauaggcauug

SEQ ID NO: 2604973 - RNA, 19 nt, Artificial Sequence
  Description of Artificial Sequence: Synthetic oligonucleotide
aucugucucaccuggggcu

SEQ ID NO: 2604974 - RNA, 19 nt, Artificial Sequence
  Description of Artificial Sequence: Synthetic oligonucleotide
uagaaacacccaauauagu

SEQ ID NO: 2604975 - RNA, 19 nt, Artificial Sequence
  Description of Artificial Sequence: Synthetic oligonucleotide
ucuuuguacugcucugcca

SEQ ID NO: 2604976 - RNA, 19 nt, Artificial Sequence
  Description of Artificial Sequence: Synthetic oligonucleotide
acuucgaaguacaucuguc

SEQ ID NO: 2604977 - RNA, 19 nt, Artificial Sequence
  Description of Artificial Sequence: Synthetic oligonucleotide
caugugucuuauaauaaaa

SEQ ID NO: 2604978 - RNA, 19 nt, Artificial Sequence
  Description of Artificial Sequence: Synthetic oligonucleotide
uuuugagaacgucuccuuu

SEQ ID NO: 2604979 - RNA, 19 nt, Artificial Sequence
  Description of Artificial Sequence: Synthetic oligonucleotide
auaccguagguggagcaac

SEQ ID NO: 2604980 - RNA, 19 nt, Artificial Sequence
  Description of Artificial Sequence: Synthetic oligonucleotide
cugauucaucucaaguuuc

SEQ ID NO: 2604981 - RNA, 19 nt, Artificial Sequence
  Description of Artificial Sequence: Synthetic oligonucleotide
aaucggcuucuuuguacug

SEQ ID NO: 2604982 - RNA, 19 nt, Artificial Sequence
  Description of Artificial Sequence: Synthetic oligonucleotide
aucaaucuuaaguuuuguu

SEQ ID NO: 2604983 - RNA, 19 nt, Artificial Sequence
  Description of Artificial Sequence: Synthetic oligonucleotide
ccuuaaggcuucuucaacc

SEQ ID NO: 2604984 - RNA, 19 nt, Artificial Sequence
  Description of Artificial Sequence: Synthetic oligonucleotide
auagcucugucuuuaucau

SEQ ID NO: 2604985 - RNA, 19 nt, Artificial Sequence
  Description of Artificial Sequence: Synthetic oligonucleotide
ggguaggaguucuaaagcc

SEQ ID NO: 2604986 - RNA, 19 nt, Artificial Sequence
  Description of Artificial Sequence: Synthetic oligonucleotide
gaagaaacgccaagaugug

SEQ ID NO: 2604987 - RNA, 19 nt, Artificial Sequence
  Description of Artificial Sequence: Synthetic oligonucleotide
cucaagauacugguggaug

SEQ ID NO: 2604988 - RNA, 19 nt, Artificial Sequence
  Description of Artificial Sequence: Synthetic oligonucleotide
cuucccuuaaggcuucuuc

SEQ ID NO: 2604989 - RNA, 19 nt, Artificial Sequence
  Description of Artificial Sequence: Synthetic oligonucleotide
guaggaguucuaaagccug

SEQ ID NO: 2604990 - RNA, 19 nt, Artificial Sequence
  Description of Artificial Sequence: Synthetic oligonucleotide
aaacgccaagaugugcaag

SEQ ID NO: 2604991 - RNA, 19 nt, Artificial Sequence
  Description of Artificial Sequence: Synthetic oligonucleotide
ugagaacgucuccuuucag

SEQ ID NO: 2604992 - RNA, 19 nt, Artificial Sequence
  Description of Artificial Sequence: Synthetic oligonucleotide
uccuuucuggaaguaauaa

SEQ ID NO: 2604993 - RNA, 19 nt, Artificial Sequence
  Description of Artificial Sequence: Synthetic oligonucleotide
guggagcaacuguuuaagg

SEQ ID NO: 2604994 - RNA, 19 nt, Artificial Sequence
  Description of Artificial Sequence: Synthetic oligonucleotide
gcuacaggaaucuuugauc

SEQ ID NO: 2604995 - RNA, 19 nt, Artificial Sequence
  Description of Artificial Sequence: Synthetic oligonucleotide
caucugucucaccuggggc

SEQ ID NO: 2604996 - RNA, 19 nt, Artificial Sequence
  Description of Artificial Sequence: Synthetic oligonucleotide
uccuuucagcaaucaaucu

SEQ ID NO: 2604997 - RNA, 19 nt, Artificial Sequence
  Description of Artificial Sequence: Synthetic oligonucleotide
auuguuggguaggaguucu

SEQ ID NO: 2604998 - RNA, 19 nt, Artificial Sequence
  Description of Artificial Sequence: Synthetic oligonucleotide
uuucagcaaucaaucuuaa

SEQ ID NO: 2604999 - RNA, 19 nt, Artificial Sequence
  Description of Artificial Sequence: Synthetic oligonucleotide
ugccuuauuuucacacccu

SEQ ID NO: 2605000 - RNA, 19 nt, Artificial Sequence
  Description of Artificial Sequence: Synthetic oligonucleotide
ugaaggacuuuugaccuau

SEQ ID NO: 2605001 - RNA, 19 nt, Artificial Sequence
  Description of Artificial Sequence: Synthetic oligonucleotide
uggguuucgucuucugccu

SEQ ID NO: 2605002 - RNA, 19 nt, Artificial Sequence
  Description of Artificial Sequence: Synthetic oligonucleotide
cauaaaguugagcaaggua

SEQ ID NO: 2605003 - RNA, 19 nt, Artificial Sequence
  Description of Artificial Sequence: Synthetic oligonucleotide
caauauaguaauacacaua

SEQ ID NO: 2605004 - RNA, 19 nt, Artificial Sequence
  Description of Artificial Sequence: Synthetic oligonucleotide
caaccaguuccuuucccug

SEQ ID NO: 2605005 - RNA, 19 nt, Artificial Sequence
  Description of Artificial Sequence: Synthetic oligonucleotide
cugaaaauugccauaccgu

SEQ ID NO: 2605006 - RNA, 19 nt, Artificial Sequence
  Description of Artificial Sequence: Synthetic oligonucleotide
caacucccgaagaaacgcc

SEQ ID NO: 2605007 - RNA, 19 nt, Artificial Sequence
  Description of Artificial Sequence: Synthetic oligonucleotide
ucccuuaaggcuucuucaa

SEQ ID NO: 2605008 - RNA, 19 nt, Artificial Sequence
  Description of Artificial Sequence: Synthetic oligonucleotide
uacugcucugccaggacau

SEQ ID NO: 2605009 - RNA, 19 nt, Artificial Sequence
  Description of Artificial Sequence: Synthetic oligonucleotide
cuggaaguaauaaucggcu

SEQ ID NO: 2605010 - RNA, 19 nt, Artificial Sequence
  Description of Artificial Sequence: Synthetic oligonucleotide
uguacugcucugccaggac

SEQ ID NO: 2605011 - RNA, 19 nt, Artificial Sequence
  Description of Artificial Sequence: Synthetic oligonucleotide
uuuuggguuucgucuucug

SEQ ID NO: 2605012 - RNA, 19 nt, Artificial Sequence
  Description of Artificial Sequence: Synthetic oligonucleotide
caaucuuaaguuuuguuuu

SEQ ID NO: 2605013 - RNA, 19 nt, Artificial Sequence
  Description of Artificial Sequence: Synthetic oligonucleotide
cugccaggacauaaaguug

SEQ ID NO: 2605014 - RNA, 19 nt, Artificial Sequence
  Description of Artificial Sequence: Synthetic oligonucleotide
caagauacugguggauggc

SEQ ID NO: 2605015 - RNA, 19 nt, Artificial Sequence
  Description of Artificial Sequence: Synthetic oligonucleotide
uguuuaaggccaggaguga

SEQ ID NO: 2605016 - RNA, 19 nt, Artificial Sequence
  Description of Artificial Sequence: Synthetic oligonucleotide
aguaauacacauaggcauu

SEQ ID NO: 2605017 - RNA, 19 nt, Artificial Sequence
  Description of Artificial Sequence: Synthetic oligonucleotide
cauaggcauuguuggguag

SEQ ID NO: 2605018 - RNA, 19 nt, Artificial Sequence
  Description of Artificial Sequence: Synthetic oligonucleotide
aaagccuggcuaagcaacu

SEQ ID NO: 2605019 - RNA, 19 nt, Artificial Sequence
  Description of Artificial Sequence: Synthetic oligonucleotide
gguggagcaacuguuuaag

SEQ ID NO: 2605020 - RNA, 19 nt, Artificial Sequence
  Description of Artificial Sequence: Synthetic oligonucleotide
agaugugcaaggccuugga

SEQ ID NO: 2605021 - RNA, 19 nt, Artificial Sequence
  Description of Artificial Sequence: Synthetic oligonucleotide
cuggggcuucccuuaaggc

SEQ ID NO: 2605022 - RNA, 19 nt, Artificial Sequence
  Description of Artificial Sequence: Synthetic oligonucleotide
guacuuuaacauaagggcu

SEQ ID NO: 2605023 - RNA, 19 nt, Artificial Sequence
  Description of Artificial Sequence: Synthetic oligonucleotide
uucagggccaagaguacuu

SEQ ID NO: 2605024 - RNA, 19 nt, Artificial Sequence
  Description of Artificial Sequence: Synthetic oligonucleotide
ucccgaagaaacgccaaga

SEQ ID NO: 2605025 - RNA, 19 nt, Artificial Sequence
  Description of Artificial Sequence: Synthetic oligonucleotide
cacccaauauaguaauaca

SEQ ID NO: 2605026 - RNA, 19 nt, Artificial Sequence
  Description of Artificial Sequence: Synthetic oligonucleotide
acauaggcauuguugggua

SEQ ID NO: 2605027 - RNA, 19 nt, Artificial Sequence
  Description of Artificial Sequence: Synthetic oligonucleotide
uguauagcucugucuuuau

SEQ ID NO: 2605028 - RNA, 19 nt, Artificial Sequence
  Description of Artificial Sequence: Synthetic oligonucleotide
uugccauaccguaggugga

SEQ ID NO: 2605029 - RNA, 19 nt, Artificial Sequence
  Description of Artificial Sequence: Synthetic oligonucleotide
cuuggagucaaauccauuu

SEQ ID NO: 2605030 - RNA, 19 nt, Artificial Sequence
  Description of Artificial Sequence: Synthetic oligonucleotide
uguuggguaggaguucuaa

SEQ ID NO: 2605031 - RNA, 19 nt, Artificial Sequence
  Description of Artificial Sequence: Synthetic oligonucleotide
aucuuaaguuuuguuuugu

SEQ ID NO: 2605032 - RNA, 19 nt, Artificial Sequence
  Description of Artificial Sequence: Synthetic oligonucleotide
aacucccgaagaaacgcca

SEQ ID NO: 2605033 - RNA, 19 nt, Artificial Sequence
  Description of Artificial Sequence: Synthetic oligonucleotide
aucaugugucuuauaauaa

SEQ ID NO: 2605034 - RNA, 19 nt, Artificial Sequence
  Description of Artificial Sequence: Synthetic oligonucleotide
cagagucuuuagcagcuug

SEQ ID NO: 2605035 - RNA, 19 nt, Artificial Sequence
  Description of Artificial Sequence: Synthetic oligonucleotide
auggccuugucuucacacu

SEQ ID NO: 2605036 - RNA, 19 nt, Artificial Sequence
  Description of Artificial Sequence: Synthetic oligonucleotide
cauucuaauggcuugcuuu

SEQ ID NO: 2605037 - RNA, 19 nt, Artificial Sequence
  Description of Artificial Sequence: Synthetic oligonucleotide
ugccauaccguagguggag

SEQ ID NO: 2605038 - RNA, 19 nt, Artificial Sequence
  Description of Artificial Sequence: Synthetic oligonucleotide
uaauacacauaggcauugu

SEQ ID NO: 2605039 - RNA, 19 nt, Artificial Sequence
  Description of Artificial Sequence: Synthetic oligonucleotide
acauaaaguugagcaaggu

SEQ ID NO: 2605040 - RNA, 19 nt, Artificial Sequence
  Description of Artificial Sequence: Synthetic oligonucleotide
gacuuuugaccuauagaaa

SEQ ID NO: 2605041 - RNA, 19 nt, Artificial Sequence
  Description of Artificial Sequence: Synthetic oligonucleotide
gagcaacuguuuaaggcca

SEQ ID NO: 2605042 - RNA, 19 nt, Artificial Sequence
  Description of Artificial Sequence: Synthetic oligonucleotide
cgaagaaacgccaagaugu

SEQ ID NO: 2605043 - RNA, 19 nt, Artificial Sequence
  Description of Artificial Sequence: Synthetic oligonucleotide
ugcucugccaggacauaaa

SEQ ID NO: 2605044 - RNA, 19 nt, Artificial Sequence
  Description of Artificial Sequence: Synthetic oligonucleotide
ucucuucugcuuucuuuaa

SEQ ID NO: 2605045 - RNA, 19 nt, Artificial Sequence
  Description of Artificial Sequence: Synthetic oligonucleotide
uucuaauggcuugcuuuca

SEQ ID NO: 2605046 - RNA, 19 nt, Artificial Sequence
  Description of Artificial Sequence: Synthetic oligonucleotide
ggcuaagcaacuguauagc

SEQ ID NO: 2605047 - RNA, 19 nt, Artificial Sequence
  Description of Artificial Sequence: Synthetic oligonucleotide
gaaguacaucugucucacc

SEQ ID NO: 2605048 - RNA, 19 nt, Artificial Sequence
  Description of Artificial Sequence: Synthetic oligonucleotide
aaccuggcugcacuucgaa

SEQ ID NO: 2605049 - RNA, 19 nt, Artificial Sequence
  Description of Artificial Sequence: Synthetic oligonucleotide
agguggagcaacuguuuaa

SEQ ID NO: 2605050 - RNA, 19 nt, Artificial Sequence
  Description of Artificial Sequence: Synthetic oligonucleotide
guauagcucugucuuuauc

SEQ ID NO: 2605051 - RNA, 19 nt, Artificial Sequence
  Description of Artificial Sequence: Synthetic oligonucleotide
acuguauagcucugucuuu

SEQ ID NO: 2605052 - RNA, 19 nt, Artificial Sequence
  Description of Artificial Sequence: Synthetic oligonucleotide
uaccguagguggagcaacu

SEQ ID NO: 2605053 - RNA, 19 nt, Artificial Sequence
  Description of Artificial Sequence: Synthetic oligonucleotide
cauaagggcuguugggaga

SEQ ID NO: 2605054 - RNA, 19 nt, Artificial Sequence
  Description of Artificial Sequence: Synthetic oligonucleotide
gaaacgccaagaugugcaa

SEQ ID NO: 2605055 - RNA, 19 nt, Artificial Sequence
  Description of Artificial Sequence: Synthetic oligonucleotide
uuagcagcuugcuggcuuu

SEQ ID NO: 2605056 - RNA, 19 nt, Artificial Sequence
  Description of Artificial Sequence: Synthetic oligonucleotide
uaggcauuguuggguagga

SEQ ID NO: 2605057 - RNA, 19 nt, Artificial Sequence
  Description of Artificial Sequence: Synthetic oligonucleotide
cuaaagccuggcuaagcaa

SEQ ID NO: 2605058 - RNA, 19 nt, Artificial Sequence
  Description of Artificial Sequence: Synthetic oligonucleotide
uacaggaaucuuugaucau

SEQ ID NO: 2605059 - RNA, 19 nt, Artificial Sequence
  Description of Artificial Sequence: Synthetic oligonucleotide
aagccuggcuaagcaacug

SEQ ID NO: 2605060 - RNA, 19 nt, Artificial Sequence
  Description of Artificial Sequence: Synthetic oligonucleotide
agccuggcuaagcaacugu

SEQ ID NO: 2605061 - RNA, 19 nt, Artificial Sequence
  Description of Artificial Sequence: Synthetic oligonucleotide
guacugcucugccaggaca

SEQ ID NO: 2605062 - RNA, 19 nt, Artificial Sequence
  Description of Artificial Sequence: Synthetic oligonucleotide
guuggguaggaguucuaaa

SEQ ID NO: 2605063 - RNA, 19 nt, Artificial Sequence
  Description of Artificial Sequence: Synthetic oligonucleotide
cuucgaaguacaucugucu

SEQ ID NO: 2605064 - RNA, 19 nt, Artificial Sequence
  Description of Artificial Sequence: Synthetic oligonucleotide
ggccaagaguacuuuaaca

SEQ ID NO: 2605065 - RNA, 19 nt, Artificial Sequence
  Description of Artificial Sequence: Synthetic oligonucleotide
gcuucuuuguacugcucug

SEQ ID NO: 2605066 - RNA, 19 nt, Artificial Sequence
  Description of Artificial Sequence: Synthetic oligonucleotide
uagcuacaggaaucuuuga

SEQ ID NO: 2605067 - RNA, 19 nt, Artificial Sequence
  Description of Artificial Sequence: Synthetic oligonucleotide
acauucuaauggcuugcuu

SEQ ID NO: 2605068 - RNA, 19 nt, Artificial Sequence
  Description of Artificial Sequence: Synthetic oligonucleotide
aagggcuguugggagacau

SEQ ID NO: 2605069 - RNA, 19 nt, Artificial Sequence
  Description of Artificial Sequence: Synthetic oligonucleotide
cuauagaaacacccaauau

SEQ ID NO: 2605070 - RNA, 19 nt, Artificial Sequence
  Description of Artificial Sequence: Synthetic oligonucleotide
ucucaccuggggcuucccu

SEQ ID NO: 2605071 - RNA, 19 nt, Artificial Sequence
  Description of Artificial Sequence: Synthetic oligonucleotide
ucaccuggggcuucccuua

SEQ ID NO: 2605072 - RNA, 19 nt, Artificial Sequence
  Description of Artificial Sequence: Synthetic oligonucleotide
ggagugaguuccuucuuga

SEQ ID NO: 2605073 - RNA, 19 nt, Artificial Sequence
  Description of Artificial Sequence: Synthetic oligonucleotide
caagaugugcaaggccuug

SEQ ID NO: 2605074 - RNA, 19 nt, Artificial Sequence
  Description of Artificial Sequence: Synthetic oligonucleotide
uuucccugguuuuccugau

SEQ ID NO: 2605075 - RNA, 19 nt, Artificial Sequence
  Description of Artificial Sequence: Synthetic oligonucleotide
cuggcuaagcaacuguaua

SEQ ID NO: 2605076 - RNA, 19 nt, Artificial Sequence
  Description of Artificial Sequence: Synthetic oligonucleotide
agcaacuguauagcucugu

SEQ ID NO: 2605077 - RNA, 19 nt, Artificial Sequence
  Description of Artificial Sequence: Synthetic oligonucleotide
agcaagguagcuacaggaa

SEQ ID NO: 2605078 - RNA, 19 nt, Artificial Sequence
  Description of Artificial Sequence: Synthetic oligonucleotide
gcaacuguauagcucuguc

SEQ ID NO: 2605079 - RNA, 19 nt, Artificial Sequence
  Description of Artificial Sequence: Synthetic oligonucleotide
ggcauuguuggguaggagu

SEQ ID NO: 2605080 - RNA, 19 nt, Artificial Sequence
  Description of Artificial Sequence: Synthetic oligonucleotide
cauuguuggguaggaguuc

SEQ ID NO: 2605081 - RNA, 19 nt, Artificial Sequence
  Description of Artificial Sequence: Synthetic oligonucleotide
gagugaguuccuucuugaa

SEQ ID NO: 2605082 - RNA, 19 nt, Artificial Sequence
  Description of Artificial Sequence: Synthetic oligonucleotide
ccuggggcuucccuuaagg

SEQ ID NO: 2605083 - RNA, 19 nt, Artificial Sequence
  Description of Artificial Sequence: Synthetic oligonucleotide
ccgaagaaacgccaagaug

SEQ ID NO: 2605084 - RNA, 19 nt, Artificial Sequence
  Description of Artificial Sequence: Synthetic oligonucleotide
auacugguggauggccuug

SEQ ID NO: 2605085 - RNA, 19 nt, Artificial Sequence
  Description of Artificial Sequence: Synthetic oligonucleotide
ugaauccuuucuggaagua

SEQ ID NO: 2605086 - RNA, 19 nt, Artificial Sequence
  Description of Artificial Sequence: Synthetic oligonucleotide
aaaccuggcugcacuucga

SEQ ID NO: 2605087 - RNA, 19 nt, Artificial Sequence
  Description of Artificial Sequence: Synthetic oligonucleotide
cacccucaagauacuggug

SEQ ID NO: 2605088 - RNA, 19 nt, Artificial Sequence
  Description of Artificial Sequence: Synthetic oligonucleotide
uggauggccuugucuucac

SEQ ID NO: 2605089 - RNA, 19 nt, Artificial Sequence
  Description of Artificial Sequence: Synthetic oligonucleotide
uggcuugcuuucagagagu

SEQ ID NO: 2605090 - RNA, 19 nt, Artificial Sequence
  Description of Artificial Sequence: Synthetic oligonucleotide
agggccaagaguacuuuaa

SEQ ID NO: 2605091 - RNA, 19 nt, Artificial Sequence
  Description of Artificial Sequence: Synthetic oligonucleotide
cugcacuucgaaguacauc

SEQ ID NO: 2605092 - RNA, 19 nt, Artificial Sequence
  Description of Artificial Sequence: Synthetic oligonucleotide
agcaacuguuuaaggccag

SEQ ID NO: 2605093 - RNA, 19 nt, Artificial Sequence
  Description of Artificial Sequence: Synthetic oligonucleotide
aaguaauaaucggcuucuu

SEQ ID NO: 2605094 - RNA, 19 nt, Artificial Sequence
  Description of Artificial Sequence: Synthetic oligonucleotide
cuguugggagacauucuaa

SEQ ID NO: 2605095 - RNA, 19 nt, Artificial Sequence
  Description of Artificial Sequence: Synthetic oligonucleotide
ccuauagaaacacccaaua

SEQ ID NO: 2605096 - RNA, 19 nt, Artificial Sequence
  Description of Artificial Sequence: Synthetic oligonucleotide
caacuguuuaaggccagga

SEQ ID NO: 2605097 - RNA, 19 nt, Artificial Sequence
  Description of Artificial Sequence: Synthetic oligonucleotide
aagcaacuguauagcucug

SEQ ID NO: 2605098 - RNA, 19 nt, Artificial Sequence
  Description of Artificial Sequence: Synthetic oligonucleotide
gccuuauuuucacacccuc

SEQ ID NO: 2605099 - RNA, 19 nt, Artificial Sequence
  Description of Artificial Sequence: Synthetic oligonucleotide
gggccaagaguacuuuaac

SEQ ID NO: 2605100 - RNA, 19 nt, Artificial Sequence
  Description of Artificial Sequence: Synthetic oligonucleotide
gagucuuuagcagcuugcu

SEQ ID NO: 2605101 - RNA, 19 nt, Artificial Sequence
  Description of Artificial Sequence: Synthetic oligonucleotide
ugucucaccuggggcuucc

SEQ ID NO: 2605102 - RNA, 19 nt, Artificial Sequence
  Description of Artificial Sequence: Synthetic oligonucleotide
cuguauagcucugucuuua

SEQ ID NO: 2605103 - RNA, 19 nt, Artificial Sequence
  Description of Artificial Sequence: Synthetic oligonucleotide
gcaacuguuuaaggccagg

SEQ ID NO: 2605104 - RNA, 19 nt, Artificial Sequence
  Description of Artificial Sequence: Synthetic oligonucleotide
gcuguugggagacauucua

SEQ ID NO: 2605105 - RNA, 19 nt, Artificial Sequence
  Description of Artificial Sequence: Synthetic oligonucleotide
uccccucucagagucuuua

SEQ ID NO: 2605106 - RNA, 19 nt, Artificial Sequence
  Description of Artificial Sequence: Synthetic oligonucleotide
gcuggcuuucuuuauucaa

SEQ ID NO: 2605107 - RNA, 19 nt, Artificial Sequence
  Description of Artificial Sequence: Synthetic oligonucleotide
cccucucagagucuuuagc

SEQ ID NO: 2605108 - RNA, 19 nt, Artificial Sequence
  Description of Artificial Sequence: Synthetic oligonucleotide
ucugucucaccuggggcuu

SEQ ID NO: 2605109 - RNA, 19 nt, Artificial Sequence
  Description of Artificial Sequence: Synthetic oligonucleotide
cuucugccuuauuuucaca

SEQ ID NO: 2605110 - RNA, 19 nt, Artificial Sequence
  Description of Artificial Sequence: Synthetic oligonucleotide
cacauaggcauuguugggu

SEQ ID NO: 2605111 - RNA, 19 nt, Artificial Sequence
  Description of Artificial Sequence: Synthetic oligonucleotide
uacugguggauggccuugu

SEQ ID NO: 2605112 - RNA, 19 nt, Artificial Sequence
  Description of Artificial Sequence: Synthetic oligonucleotide
gcuaagcaacuguauagcu

SEQ ID NO: 2605113 - RNA, 19 nt, Artificial Sequence
  Description of Artificial Sequence: Synthetic oligonucleotide
ccaagaguacuuuaacaua

SEQ ID NO: 2605114 - RNA, 19 nt, Artificial Sequence
  Description of Artificial Sequence: Synthetic oligonucleotide
accuggggcuucccuuaag

SEQ ID NO: 2605115 - RNA, 19 nt, Artificial Sequence
  Description of Artificial Sequence: Synthetic oligonucleotide
accguagguggagcaacug

SEQ ID NO: 2605116 - RNA, 19 nt, Artificial Sequence
  Description of Artificial Sequence: Synthetic oligonucleotide
acgucuccuuucagcaauc

SEQ ID NO: 2605117 - RNA, 19 nt, Artificial Sequence
  Description of Artificial Sequence: Synthetic oligonucleotide
uuguuggguaggaguucua

SEQ ID NO: 2605118 - RNA, 19 nt, Artificial Sequence
  Description of Artificial Sequence: Synthetic oligonucleotide
uguccccucucagagucuu

SEQ ID NO: 2605119 - RNA, 19 nt, Artificial Sequence
  Description of Artificial Sequence: Synthetic oligonucleotide
cucugucuuuaucaugugu

SEQ ID NO: 2605120 - RNA, 19 nt, Artificial Sequence
  Description of Artificial Sequence: Synthetic oligonucleotide
gacauucuaauggcuugcu

SEQ ID NO: 2605121 - RNA, 19 nt, Artificial Sequence
  Description of Artificial Sequence: Synthetic oligonucleotide
cucaaguuucagggccaag

SEQ ID NO: 2605122 - RNA, 19 nt, Artificial Sequence
  Description of Artificial Sequence: Synthetic oligonucleotide
gccaagaugugcaaggccu

SEQ ID NO: 2605123 - RNA, 19 nt, Artificial Sequence
  Description of Artificial Sequence: Synthetic oligonucleotide
cccuuaaggcuucuucaac

SEQ ID NO: 2605124 - RNA, 19 nt, Artificial Sequence
  Description of Artificial Sequence: Synthetic oligonucleotide
uggucucuucugcuuucuu

SEQ ID NO: 2605125 - RNA, 19 nt, Artificial Sequence
  Description of Artificial Sequence: Synthetic oligonucleotide
gguggauggccuugucuuc

SEQ ID NO: 2605126 - RNA, 19 nt, Artificial Sequence
  Description of Artificial Sequence: Synthetic oligonucleotide
cucugccaggacauaaagu

SEQ ID NO: 2605127 - RNA, 19 nt, Artificial Sequence
  Description of Artificial Sequence: Synthetic oligonucleotide
ccaggacauaaaguugagc

SEQ ID NO: 2605128 - RNA, 19 nt, Artificial Sequence
  Description of Artificial Sequence: Synthetic oligonucleotide
cauaccguagguggagcaa

SEQ ID NO: 2605129 - RNA, 19 nt, Artificial Sequence
  Description of Artificial Sequence: Synthetic oligonucleotide
ggcuugcuuucagagaguc

SEQ ID NO: 2605130 - RNA, 19 nt, Artificial Sequence
  Description of Artificial Sequence: Synthetic oligonucleotide
gcaaucaaucuuaaguuuu

SEQ ID NO: 2605131 - RNA, 19 nt, Artificial Sequence
  Description of Artificial Sequence: Synthetic oligonucleotide
gcaagguagcuacaggaau

SEQ ID NO: 2605132 - RNA, 19 nt, Artificial Sequence
  Description of Artificial Sequence: Synthetic oligonucleotide
gccaggagugaguuccuuc

SEQ ID NO: 2605133 - RNA, 19 nt, Artificial Sequence
  Description of Artificial Sequence: Synthetic oligonucleotide
gcucugucuuuaucaugug

SEQ ID NO: 2605134 - RNA, 19 nt, Artificial Sequence
  Description of Artificial Sequence: Synthetic oligonucleotide
ggaguucuaaagccuggcu

SEQ ID NO: 2605135 - RNA, 19 nt, Artificial Sequence
  Description of Artificial Sequence: Synthetic oligonucleotide
acucccgaagaaacgccaa

SEQ ID NO: 2605136 - RNA, 19 nt, Artificial Sequence
  Description of Artificial Sequence: Synthetic oligonucleotide
gguagcuacaggaaucuuu

SEQ ID NO: 2605137 - RNA, 19 nt, Artificial Sequence
  Description of Artificial Sequence: Synthetic oligonucleotide
ggccuuggagucaaaucca

SEQ ID NO: 2605138 - RNA, 19 nt, Artificial Sequence
  Description of Artificial Sequence: Synthetic oligonucleotide
ggagacauucuaauggcuu

SEQ ID NO: 2605139 - RNA, 19 nt, Artificial Sequence
  Description of Artificial Sequence: Synthetic oligonucleotide
ccugauucaucucaaguuu

SEQ ID NO: 2605140 - RNA, 19 nt, Artificial Sequence
  Description of Artificial Sequence: Synthetic oligonucleotide
ggucucuucugcuuucuuu

SEQ ID NO: 2605141 - RNA, 19 nt, Artificial Sequence
  Description of Artificial Sequence: Synthetic oligonucleotide
cgccaagaugugcaaggcc

SEQ ID NO: 2605142 - RNA, 19 nt, Artificial Sequence
  Description of Artificial Sequence: Synthetic oligonucleotide
ccuuucagcaaucaaucuu

SEQ ID NO: 2605143 - RNA, 19 nt, Artificial Sequence
  Description of Artificial Sequence: Synthetic oligonucleotide
gaguuccuucuugaauccu

SEQ ID NO: 2605144 - RNA, 19 nt, Artificial Sequence
  Description of Artificial Sequence: Synthetic oligonucleotide
gccauaccguagguggagc

SEQ ID NO: 2605145 - RNA, 19 nt, Artificial Sequence
  Description of Artificial Sequence: Synthetic oligonucleotide
cagggccaagaguacuuua

SEQ ID NO: 2605146 - RNA, 19 nt, Artificial Sequence
  Description of Artificial Sequence: Synthetic oligonucleotide
guagguggagcaacuguuu

SEQ ID NO: 2605147 - RNA, 19 nt, Artificial Sequence
  Description of Artificial Sequence: Synthetic oligonucleotide
cccucaagauacuggugga

SEQ ID NO: 2605148 - RNA, 19 nt, Artificial Sequence
  Description of Artificial Sequence: Synthetic oligonucleotide
ccccucucagagucuuuag

SEQ ID NO: 2605149 - RNA, 19 nt, Artificial Sequence
  Description of Artificial Sequence: Synthetic oligonucleotide
cuuuaaguugaaggacuuu

SEQ ID NO: 2605150 - RNA, 19 nt, Artificial Sequence
  Description of Artificial Sequence: Synthetic oligonucleotide
ccauaccguagguggagca

SEQ ID NO: 2605151 - RNA, 19 nt, Artificial Sequence
  Description of Artificial Sequence: Synthetic oligonucleotide
gcauuguuggguaggaguu

SEQ ID NO: 2605152 - RNA, 19 nt, Artificial Sequence
  Description of Artificial Sequence: Synthetic oligonucleotide
cucaccuggggcuucccuu

SEQ ID NO: 2605153 - RNA, 19 nt, Artificial Sequence
  Description of Artificial Sequence: Synthetic oligonucleotide
gaaggacuuuugaccuaua

SEQ ID NO: 2605154 - RNA, 19 nt, Artificial Sequence
  Description of Artificial Sequence: Synthetic oligonucleotide
agguagcuacaggaaucuu

SEQ ID NO: 2605155 - RNA, 19 nt, Artificial Sequence
  Description of Artificial Sequence: Synthetic oligonucleotide
ggggcuucccuuaaggcuu

SEQ ID NO: 2605156 - RNA, 19 nt, Artificial Sequence
  Description of Artificial Sequence: Synthetic oligonucleotide
guuucgucuucugccuuau

SEQ ID NO: 2605157 - RNA, 19 nt, Artificial Sequence
  Description of Artificial Sequence: Synthetic oligonucleotide
cugucucaccuggggcuuc

SEQ ID NO: 2605158 - RNA, 19 nt, Artificial Sequence
  Description of Artificial Sequence: Synthetic oligonucleotide
gggagacauucuaauggcu

SEQ ID NO: 2605159 - RNA, 19 nt, Artificial Sequence
  Description of Artificial Sequence: Synthetic oligonucleotide
gucucaccuggggcuuccc

SEQ ID NO: 2605160 - RNA, 19 nt, Artificial Sequence
  Description of Artificial Sequence: Synthetic oligonucleotide
cuuuagcagcuugcuggcu

SEQ ID NO: 2605161 - RNA, 19 nt, Artificial Sequence
  Description of Artificial Sequence: Synthetic oligonucleotide
gccuggcuaagcaacugua

SEQ ID NO: 2605162 - RNA, 19 nt, Artificial Sequence
  Description of Artificial Sequence: Synthetic oligonucleotide
cccgaagaaacgccaagau

SEQ ID NO: 2605163 - RNA, 19 nt, Artificial Sequence
  Description of Artificial Sequence: Synthetic oligonucleotide
cguagguggagcaacuguu

SEQ ID NO: 2605164 - RNA, 19 nt, Artificial Sequence
  Description of Artificial Sequence: Synthetic oligonucleotide
caccuggggcuucccuuaa

SEQ ID NO: 2605165 - RNA, 19 nt, Artificial Sequence
  Description of Artificial Sequence: Synthetic oligonucleotide
ccguagguggagcaacugu

SEQ ID NO: 2605166 - RNA, 19 nt, Artificial Sequence
  Description of Artificial Sequence: Synthetic oligonucleotide
cuuuaacauaagggcuguu

SEQ ID NO: 2605167 - RNA, 19 nt, Artificial Sequence
  Description of Artificial Sequence: Synthetic oligonucleotide
gggcuucccuuaaggcuuc

SEQ ID NO: 2605168 - RNA, 19 nt, Artificial Sequence
  Description of Artificial Sequence: Synthetic oligonucleotide
ccaagaugugcaaggccuu

SEQ ID NO: 2605169 - RNA, 19 nt, Artificial Sequence
  Description of Artificial Sequence: Synthetic oligonucleotide
gccuuggagucaaauccau

SEQ ID NO: 2605170 - RNA, 19 nt, Artificial Sequence
  Description of Artificial Sequence: Synthetic oligonucleotide
ggguuucgucuucugccuu

SEQ ID NO: 2605171 - RNA, 19 nt, Artificial Sequence
  Description of Artificial Sequence: Synthetic oligonucleotide
ccuuggagucaaauccauu

SEQ ID NO: 2605172 - RNA, 19 nt, Artificial Sequence
  Description of Artificial Sequence: Synthetic oligonucleotide
cggcuucuuuguacugcuc

SEQ ID NO: 2605173 - RNA, 19 nt, Artificial Sequence
  Description of Artificial Sequence: Synthetic oligonucleotide
gcugcacuucgaaguacau

SEQ ID NO: 2605174 - RNA, 19 nt, Artificial Sequence
  Description of Artificial Sequence: Synthetic oligonucleotide
ccucaagauacugguggau

SEQ ID NO: 2605175 - RNA, 19 nt, Artificial Sequence
  Description of Artificial Sequence: Synthetic oligonucleotide
cgucuccuuucagcaauca

SEQ ID NO: 2605176 - RNA, 19 nt, Artificial Sequence
  Description of Artificial Sequence: Synthetic oligonucleotide
guccccucucagagucuuu

SEQ ID NO: 2605177 - RNA, 19 nt, Artificial Sequence
  Description of Artificial Sequence: Synthetic oligonucleotide
ggccaggagugaguuccuu

SEQ ID NO: 2605178 - RNA, 19 nt, Artificial Sequence
  Description of Artificial Sequence: Synthetic oligonucleotide
ggcuucccuuaaggcuucu

SEQ ID NO: 2605179 - RNA, 19 nt, Artificial Sequence
  Description of Artificial Sequence: Synthetic oligonucleotide
aaaacuaccauuuaaaagu

SEQ ID NO: 2605180 - RNA, 19 nt, Artificial Sequence
  Description of Artificial Sequence: Synthetic oligonucleotide
aaauauaucacgaaggaac

SEQ ID NO: 2605181 - RNA, 19 nt, Artificial Sequence
  Description of Artificial Sequence: Synthetic oligonucleotide
uuaaauauccuaaauauau

SEQ ID NO: 2605182 - RNA, 19 nt, Artificial Sequence
  Description of Artificial Sequence: Synthetic oligonucleotide
uuaaaagugaucuuguuca

SEQ ID NO: 2605183 - RNA, 19 nt, Artificial Sequence
  Description of Artificial Sequence: Synthetic oligonucleotide
uuuauaacaucuuauaaaa

SEQ ID NO: 2605184 - RNA, 19 nt, Artificial Sequence
  Description of Artificial Sequence: Synthetic oligonucleotide
uugguaauguagaaaagcg

SEQ ID NO: 2605185 - RNA, 19 nt, Artificial Sequence
  Description of Artificial Sequence: Synthetic oligonucleotide
uagauaaaagcccagggcc

SEQ ID NO: 2605186 - RNA, 19 nt, Artificial Sequence
  Description of Artificial Sequence: Synthetic oligonucleotide
auauccuaaauauaucacg

SEQ ID NO: 2605187 - RNA, 19 nt, Artificial Sequence
  Description of Artificial Sequence: Synthetic oligonucleotide
uguagauaaaagcccaggg

SEQ ID NO: 2605188 - RNA, 19 nt, Artificial Sequence
  Description of Artificial Sequence: Synthetic oligonucleotide
ucacauuuugaucucagag

SEQ ID NO: 2605189 - RNA, 19 nt, Artificial Sequence
  Description of Artificial Sequence: Synthetic oligonucleotide
ucuguucugaacuacacug

SEQ ID NO: 2605190 - RNA, 19 nt, Artificial Sequence
  Description of Artificial Sequence: Synthetic oligonucleotide
uaacacaccaccuuaguag

SEQ ID NO: 2605191 - RNA, 19 nt, Artificial Sequence
  Description of Artificial Sequence: Synthetic oligonucleotide
uacucuucaucccagagcc

SEQ ID NO: 2605192 - RNA, 19 nt, Artificial Sequence
  Description of Artificial Sequence: Synthetic oligonucleotide
uccuaaauauaucacgaag

SEQ ID NO: 2605193 - RNA, 19 nt, Artificial Sequence
  Description of Artificial Sequence: Synthetic oligonucleotide
aacaucuuauaaaacuacc

SEQ ID NO: 2605194 - RNA, 19 nt, Artificial Sequence
  Description of Artificial Sequence: Synthetic oligonucleotide
aauauccuaaauauaucac

SEQ ID NO: 2605195 - RNA, 19 nt, Artificial Sequence
  Description of Artificial Sequence: Synthetic oligonucleotide
auuuugaucucagagcacc

SEQ ID NO: 2605196 - RNA, 19 nt, Artificial Sequence
  Description of Artificial Sequence: Synthetic oligonucleotide
uuuaaaagugaucuuguuc

SEQ ID NO: 2605197 - RNA, 19 nt, Artificial Sequence
  Description of Artificial Sequence: Synthetic oligonucleotide
uauccuaaauauaucacga

SEQ ID NO: 2605198 - RNA, 19 nt, Artificial Sequence
  Description of Artificial Sequence: Synthetic oligonucleotide
aaaagguggagcaugguag

SEQ ID NO: 2605199 - RNA, 19 nt, Artificial Sequence
  Description of Artificial Sequence: Synthetic oligonucleotide
agagaugugguuccugagc

SEQ ID NO: 2605200 - RNA, 19 nt, Artificial Sequence
  Description of Artificial Sequence: Synthetic oligonucleotide
gaauuguagauaaaagccc

SEQ ID NO: 2605201 - RNA, 19 nt, Artificial Sequence
  Description of Artificial Sequence: Synthetic oligonucleotide
aaagguggagcaugguagg

SEQ ID NO: 2605202 - RNA, 19 nt, Artificial Sequence
  Description of Artificial Sequence: Synthetic oligonucleotide
uuugcagccauacuguggu

SEQ ID NO: 2605203 - RNA, 19 nt, Artificial Sequence
  Description of Artificial Sequence: Synthetic oligonucleotide
uucuacacacaccugagac

SEQ ID NO: 2605204 - RNA, 19 nt, Artificial Sequence
  Description of Artificial Sequence: Synthetic oligonucleotide
cacauuuugaucucagagc

SEQ ID NO: 2605205 - RNA, 19 nt, Artificial Sequence
  Description of Artificial Sequence: Synthetic oligonucleotide
uuuaaauauccuaaauaua

SEQ ID NO: 2605206 - RNA, 19 nt, Artificial Sequence
  Description of Artificial Sequence: Synthetic oligonucleotide
ggaauuguagauaaaagcc

SEQ ID NO: 2605207 - RNA, 19 nt, Artificial Sequence
  Description of Artificial Sequence: Synthetic oligonucleotide
cauacugugguuucccugg

SEQ ID NO: 2605208 - RNA, 19 nt, Artificial Sequence
  Description of Artificial Sequence: Synthetic oligonucleotide
aaguuuauaacaucuuaua

SEQ ID NO: 2605209 - RNA, 19 nt, Artificial Sequence
  Description of Artificial Sequence: Synthetic oligonucleotide
guuuauaacaucuuauaaa

SEQ ID NO: 2605210 - RNA, 19 nt, Artificial Sequence
  Description of Artificial Sequence: Synthetic oligonucleotide
uguccuauuacucuucauc

SEQ ID NO: 2605211 - RNA, 19 nt, Artificial Sequence
  Description of Artificial Sequence: Synthetic oligonucleotide
ccuaaauauaucacgaagg

SEQ ID NO: 2605212 - RNA, 19 nt, Artificial Sequence
  Description of Artificial Sequence: Synthetic oligonucleotide
uaacaucuuauaaaacuac

SEQ ID NO: 2605213 - RNA, 19 nt, Artificial Sequence
  Description of Artificial Sequence: Synthetic oligonucleotide
uuguucauuugauaguccc

SEQ ID NO: 2605214 - RNA, 19 nt, Artificial Sequence
  Description of Artificial Sequence: Synthetic oligonucleotide
aauuguagauaaaagccca

SEQ ID NO: 2605215 - RNA, 19 nt, Artificial Sequence
  Description of Artificial Sequence: Synthetic oligonucleotide
guagauaaaagcccagggc

SEQ ID NO: 2605216 - RNA, 19 nt, Artificial Sequence
  Description of Artificial Sequence: Synthetic oligonucleotide
aguuuauaacaucuuauaa

SEQ ID NO: 2605217 - RNA, 19 nt, Artificial Sequence
  Description of Artificial Sequence: Synthetic oligonucleotide
cacgaaggaacauacacug

SEQ ID NO: 2605218 - RNA, 19 nt, Artificial Sequence
  Description of Artificial Sequence: Synthetic oligonucleotide
accaccuuaguagagcugc

SEQ ID NO: 2605219 - RNA, 19 nt, Artificial Sequence
  Description of Artificial Sequence: Synthetic oligonucleotide
uaaauauccuaaauauauc

SEQ ID NO: 2605220 - RNA, 19 nt, Artificial Sequence
  Description of Artificial Sequence: Synthetic oligonucleotide
accuuaguagagcugcagc

SEQ ID NO: 2605221 - RNA, 19 nt, Artificial Sequence
  Description of Artificial Sequence: Synthetic oligonucleotide
aauauaucacgaaggaaca

SEQ ID NO: 2605222 - RNA, 19 nt, Artificial Sequence
  Description of Artificial Sequence: Synthetic oligonucleotide
gcaaucaguagcuaagugg

SEQ ID NO: 2605223 - RNA, 19 nt, Artificial Sequence
  Description of Artificial Sequence: Synthetic oligonucleotide
auggagcgcaaucaguagc

SEQ ID NO: 2605224 - RNA, 19 nt, Artificial Sequence
  Description of Artificial Sequence: Synthetic oligonucleotide
uuauaacaucuuauaaaac

SEQ ID NO: 2605225 - RNA, 19 nt, Artificial Sequence
  Description of Artificial Sequence: Synthetic oligonucleotide
gggaauuguagauaaaagc

SEQ ID NO: 2605226 - RNA, 19 nt, Artificial Sequence
  Description of Artificial Sequence: Synthetic oligonucleotide
acugggauuacucugccca

SEQ ID NO: 2605227 - RNA, 19 nt, Artificial Sequence
  Description of Artificial Sequence: Synthetic oligonucleotide
uuacucuucaucccagagc

SEQ ID NO: 2605228 - RNA, 19 nt, Artificial Sequence
  Description of Artificial Sequence: Synthetic oligonucleotide
gagaugugguuccugagcc

SEQ ID NO: 2605229 - RNA, 19 nt, Artificial Sequence
  Description of Artificial Sequence: Synthetic oligonucleotide
uccgugucaagccauggag

SEQ ID NO: 2605230 - RNA, 19 nt, Artificial Sequence
  Description of Artificial Sequence: Synthetic oligonucleotide
ucauuugauaguccccucc

SEQ ID NO: 2605231 - RNA, 19 nt, Artificial Sequence
  Description of Artificial Sequence: Synthetic oligonucleotide
auuugauaguccccucccc

SEQ ID NO: 2605232 - RNA, 19 nt, Artificial Sequence
  Description of Artificial Sequence: Synthetic oligonucleotide
gguaauguagaaaagcgcc

SEQ ID NO: 2605233 - RNA, 19 nt, Artificial Sequence
  Description of Artificial Sequence: Synthetic oligonucleotide
ugagacaucuguccagugc

SEQ ID NO: 2605234 - RNA, 19 nt, Artificial Sequence
  Description of Artificial Sequence: Synthetic oligonucleotide
aacacaccaccuuaguaga

SEQ ID NO: 2605235 - RNA, 19 nt, Artificial Sequence
  Description of Artificial Sequence: Synthetic oligonucleotide
guccuauuacucuucaucc

SEQ ID NO: 2605236 - RNA, 19 nt, Artificial Sequence
  Description of Artificial Sequence: Synthetic oligonucleotide
gauggauggaaggacaggc

SEQ ID NO: 2605237 - RNA, 19 nt, Artificial Sequence
  Description of Artificial Sequence: Synthetic oligonucleotide
cuaaguggugacaggaggc

SEQ ID NO: 2605238 - RNA, 19 nt, Artificial Sequence
  Description of Artificial Sequence: Synthetic oligonucleotide
uguucauuugauagucccc

SEQ ID NO: 2605239 - RNA, 19 nt, Artificial Sequence
  Description of Artificial Sequence: Synthetic oligonucleotide
auaucacgaaggaacauac

SEQ ID NO: 2605240 - RNA, 19 nt, Artificial Sequence
  Description of Artificial Sequence: Synthetic oligonucleotide
auuacucuucaucccagag

SEQ ID NO: 2605241 - RNA, 19 nt, Artificial Sequence
  Description of Artificial Sequence: Synthetic oligonucleotide
uuguagauaaaagcccagg

SEQ ID NO: 2605242 - RNA, 19 nt, Artificial Sequence
  Description of Artificial Sequence: Synthetic oligonucleotide
uguagaaaagcgccauucu

SEQ ID NO: 2605243 - RNA, 19 nt, Artificial Sequence
  Description of Artificial Sequence: Synthetic oligonucleotide
ucacgaaggaacauacacu

SEQ ID NO: 2605244 - RNA, 19 nt, Artificial Sequence
  Description of Artificial Sequence: Synthetic oligonucleotide
gagaggugaaacuguggcg

SEQ ID NO: 2605245 - RNA, 19 nt, Artificial Sequence
  Description of Artificial Sequence: Synthetic oligonucleotide
auguagaaaagcgccauuc

SEQ ID NO: 2605246 - RNA, 19 nt, Artificial Sequence
  Description of Artificial Sequence: Synthetic oligonucleotide
uagaaaagcgccauucuuu

SEQ ID NO: 2605247 - RNA, 19 nt, Artificial Sequence
  Description of Artificial Sequence: Synthetic oligonucleotide
aguagcuaaguggugacag

SEQ ID NO: 2605248 - RNA, 19 nt, Artificial Sequence
  Description of Artificial Sequence: Synthetic oligonucleotide
ucuuguucauuugauaguc

SEQ ID NO: 2605249 - RNA, 19 nt, Artificial Sequence
  Description of Artificial Sequence: Synthetic oligonucleotide
aaacuaccauuuaaaagug

SEQ ID NO: 2605250 - RNA, 19 nt, Artificial Sequence
  Description of Artificial Sequence: Synthetic oligonucleotide
agacggaaggaacugggag

SEQ ID NO: 2605251 - RNA, 19 nt, Artificial Sequence
  Description of Artificial Sequence: Synthetic oligonucleotide
uucguuuccccuuucuaca

SEQ ID NO: 2605252 - RNA, 19 nt, Artificial Sequence
  Description of Artificial Sequence: Synthetic oligonucleotide
cuguccagugcuaacacac

SEQ ID NO: 2605253 - RNA, 19 nt, Artificial Sequence
  Description of Artificial Sequence: Synthetic oligonucleotide
cuuucuacacacaccugag

SEQ ID NO: 2605254 - RNA, 19 nt, Artificial Sequence
  Description of Artificial Sequence: Synthetic oligonucleotide
ugaacuacacugccagcug

SEQ ID NO: 2605255 - RNA, 19 nt, Artificial Sequence
  Description of Artificial Sequence: Synthetic oligonucleotide
cauuugauaguccccuccc

SEQ ID NO: 2605256 - RNA, 19 nt, Artificial Sequence
  Description of Artificial Sequence: Synthetic oligonucleotide
uccuauuacucuucauccc

SEQ ID NO: 2605257 - RNA, 19 nt, Artificial Sequence
  Description of Artificial Sequence: Synthetic oligonucleotide
ggcgaaacuccacucaucg

SEQ ID NO: 2605258 - RNA, 19 nt, Artificial Sequence
  Description of Artificial Sequence: Synthetic oligonucleotide
uaaauauaucacgaaggaa

SEQ ID NO: 2605259 - RNA, 19 nt, Artificial Sequence
  Description of Artificial Sequence: Synthetic oligonucleotide
ugcuaacacaccaccuuag

SEQ ID NO: 2605260 - RNA, 19 nt, Artificial Sequence
  Description of Artificial Sequence: Synthetic oligonucleotide
uguggcgaaacuccacuca

SEQ ID NO: 2605261 - RNA, 19 nt, Artificial Sequence
  Description of Artificial Sequence: Synthetic oligonucleotide
cacauucacauuuugaucu

SEQ ID NO: 2605262 - RNA, 19 nt, Artificial Sequence
  Description of Artificial Sequence: Synthetic oligonucleotide
uuaguagagcugcagcauc

SEQ ID NO: 2605263 - RNA, 19 nt, Artificial Sequence
  Description of Artificial Sequence: Synthetic oligonucleotide
auugugggagcccacccag

SEQ ID NO: 2605264 - RNA, 19 nt, Artificial Sequence
  Description of Artificial Sequence: Synthetic oligonucleotide
ugugguuucccugggguag

SEQ ID NO: 2605265 - RNA, 19 nt, Artificial Sequence
  Description of Artificial Sequence: Synthetic oligonucleotide
uauaucacgaaggaacaua

SEQ ID NO: 2605266 - RNA, 19 nt, Artificial Sequence
  Description of Artificial Sequence: Synthetic oligonucleotide
uacacugccagcugaagua

SEQ ID NO: 2605267 - RNA, 19 nt, Artificial Sequence
  Description of Artificial Sequence: Synthetic oligonucleotide
agaggugaaacuguggcga

SEQ ID NO: 2605268 - RNA, 19 nt, Artificial Sequence
  Description of Artificial Sequence: Synthetic oligonucleotide
agaugugguuccugagccc

SEQ ID NO: 2605269 - RNA, 19 nt, Artificial Sequence
  Description of Artificial Sequence: Synthetic oligonucleotide
aagugaucuuguucauuug

SEQ ID NO: 2605270 - RNA, 19 nt, Artificial Sequence
  Description of Artificial Sequence: Synthetic oligonucleotide
acaucuuauaaaacuacca

SEQ ID NO: 2605271 - RNA, 19 nt, Artificial Sequence
  Description of Artificial Sequence: Synthetic oligonucleotide
agcaucaggcccaggagcc

SEQ ID NO: 2605272 - RNA, 19 nt, Artificial Sequence
  Description of Artificial Sequence: Synthetic oligonucleotide
ugucuguucugaacuacac

SEQ ID NO: 2605273 - RNA, 19 nt, Artificial Sequence
  Description of Artificial Sequence: Synthetic oligonucleotide
cuuguucauuugauagucc

SEQ ID NO: 2605274 - RNA, 19 nt, Artificial Sequence
  Description of Artificial Sequence: Synthetic oligonucleotide
uaguagagcugcagcauca

SEQ ID NO: 2605275 - RNA, 19 nt, Artificial Sequence
  Description of Artificial Sequence: Synthetic oligonucleotide
cuauuacucuucaucccag

SEQ ID NO: 2605276 - RNA, 19 nt, Artificial Sequence
  Description of Artificial Sequence: Synthetic oligonucleotide
uuucuacacacaccugaga

SEQ ID NO: 2605277 - RNA, 19 nt, Artificial Sequence
  Description of Artificial Sequence: Synthetic oligonucleotide
aggagggaauuguagauaa

SEQ ID NO: 2605278 - RNA, 19 nt, Artificial Sequence
  Description of Artificial Sequence: Synthetic oligonucleotide
ugaaacuguggcgaaacuc

SEQ ID NO: 2605279 - RNA, 19 nt, Artificial Sequence
  Description of Artificial Sequence: Synthetic oligonucleotide
acaggcaccagcaagggca

SEQ ID NO: 2605280 - RNA, 19 nt, Artificial Sequence
  Description of Artificial Sequence: Synthetic oligonucleotide
ugucaagccauggagcgca

SEQ ID NO: 2605281 - RNA, 19 nt, Artificial Sequence
  Description of Artificial Sequence: Synthetic oligonucleotide
agggaauuguagauaaaag

SEQ ID NO: 2605282 - RNA, 19 nt, Artificial Sequence
  Description of Artificial Sequence: Synthetic oligonucleotide
gcuaaguggugacaggagg

SEQ ID NO: 2605283 - RNA, 19 nt, Artificial Sequence
  Description of Artificial Sequence: Synthetic oligonucleotide
uuacucugcccacccaacc

SEQ ID NO: 2605284 - RNA, 19 nt, Artificial Sequence
  Description of Artificial Sequence: Synthetic oligonucleotide
gaacccuccgugucaagcc

SEQ ID NO: 2605285 - RNA, 19 nt, Artificial Sequence
  Description of Artificial Sequence: Synthetic oligonucleotide
uucacauuuugaucucaga

SEQ ID NO: 2605286 - RNA, 19 nt, Artificial Sequence
  Description of Artificial Sequence: Synthetic oligonucleotide
acuaccauuuaaaagugau

SEQ ID NO: 2605287 - RNA, 19 nt, Artificial Sequence
  Description of Artificial Sequence: Synthetic oligonucleotide
uuuugaucucagagcaccu

SEQ ID NO: 2605288 - RNA, 19 nt, Artificial Sequence
  Description of Artificial Sequence: Synthetic oligonucleotide
acugggagaggugaaacug

SEQ ID NO: 2605289 - RNA, 19 nt, Artificial Sequence
  Description of Artificial Sequence: Synthetic oligonucleotide
agaaaagcgccauucuuuu

SEQ ID NO: 2605290 - RNA, 19 nt, Artificial Sequence
  Description of Artificial Sequence: Synthetic oligonucleotide
cuaccauuuaaaagugauc

SEQ ID NO: 2605291 - RNA, 19 nt, Artificial Sequence
  Description of Artificial Sequence: Synthetic oligonucleotide
acugugguuucccuggggu

SEQ ID NO: 2605292 - RNA, 19 nt, Artificial Sequence
  Description of Artificial Sequence: Synthetic oligonucleotide
uucccugggguagagaugu

SEQ ID NO: 2605293 - RNA, 19 nt, Artificial Sequence
  Description of Artificial Sequence: Synthetic oligonucleotide
gacggaaggaacugggaga

SEQ ID NO: 2605294 - RNA, 19 nt, Artificial Sequence
  Description of Artificial Sequence: Synthetic oligonucleotide
agugcuaacacaccaccuu

SEQ ID NO: 2605295 - RNA, 19 nt, Artificial Sequence
  Description of Artificial Sequence: Synthetic oligonucleotide
ugggagaggugaaacugug

SEQ ID NO: 2605296 - RNA, 19 nt, Artificial Sequence
  Description of Artificial Sequence: Synthetic oligonucleotide
aucaguagcuaagugguga

SEQ ID NO: 2605297 - RNA, 19 nt, Artificial Sequence
  Description of Artificial Sequence: Synthetic oligonucleotide
agccugucuguucugaacu

SEQ ID NO: 2605298 - RNA, 19 nt, Artificial Sequence
  Description of Artificial Sequence: Synthetic oligonucleotide
ugggagcccacccagggac

SEQ ID NO: 2605299 - RNA, 19 nt, Artificial Sequence
  Description of Artificial Sequence: Synthetic oligonucleotide
ugaucuuguucauuugaua

SEQ ID NO: 2605300 - RNA, 19 nt, Artificial Sequence
  Description of Artificial Sequence: Synthetic oligonucleotide
uaauguagaaaagcgccau

SEQ ID NO: 2605301 - RNA, 19 nt, Artificial Sequence
  Description of Artificial Sequence: Synthetic oligonucleotide
gagggaauuguagauaaaa

SEQ ID NO: 2605302 - RNA, 19 nt, Artificial Sequence
  Description of Artificial Sequence: Synthetic oligonucleotide
uauuacucuucaucccaga

SEQ ID NO: 2605303 - RNA, 19 nt, Artificial Sequence
  Description of Artificial Sequence: Synthetic oligonucleotide
agggacugggauuacucug

SEQ ID NO: 2605304 - RNA, 19 nt, Artificial Sequence
  Description of Artificial Sequence: Synthetic oligonucleotide
gguggagcaugguaggagg

SEQ ID NO: 2605305 - RNA, 19 nt, Artificial Sequence
  Description of Artificial Sequence: Synthetic oligonucleotide
cuuggguguccuauuacuc

SEQ ID NO: 2605306 - RNA, 19 nt, Artificial Sequence
  Description of Artificial Sequence: Synthetic oligonucleotide
ucaucgaacccuccguguc

SEQ ID NO: 2605307 - RNA, 19 nt, Artificial Sequence
  Description of Artificial Sequence: Synthetic oligonucleotide
aggacaggcaccagcaagg

SEQ ID NO: 2605308 - RNA, 19 nt, Artificial Sequence
  Description of Artificial Sequence: Synthetic oligonucleotide
gauuacucugcccacccaa

SEQ ID NO: 2605309 - RNA, 19 nt, Artificial Sequence
  Description of Artificial Sequence: Synthetic oligonucleotide
aacccacauucacauuuug

SEQ ID NO: 2605310 - RNA, 19 nt, Artificial Sequence
  Description of Artificial Sequence: Synthetic oligonucleotide
uaucacgaaggaacauaca

SEQ ID NO: 2605311 - RNA, 19 nt, Artificial Sequence
  Description of Artificial Sequence: Synthetic oligonucleotide
gauggaaggacaggcacca

SEQ ID NO: 2605312 - RNA, 19 nt, Artificial Sequence
  Description of Artificial Sequence: Synthetic oligonucleotide
aguagagacggaaggaacu

SEQ ID NO: 2605313 - RNA, 19 nt, Artificial Sequence
  Description of Artificial Sequence: Synthetic oligonucleotide
uagagacggaaggaacugg

SEQ ID NO: 2605314 - RNA, 19 nt, Artificial Sequence
  Description of Artificial Sequence: Synthetic oligonucleotide
agggcuggcauugugggag

SEQ ID NO: 2605315 - RNA, 19 nt, Artificial Sequence
  Description of Artificial Sequence: Synthetic oligonucleotide
uguccagugcuaacacacc

SEQ ID NO: 2605316 - RNA, 19 nt, Artificial Sequence
  Description of Artificial Sequence: Synthetic oligonucleotide
guagagaugugguuccuga

SEQ ID NO: 2605317 - RNA, 19 nt, Artificial Sequence
  Description of Artificial Sequence: Synthetic oligonucleotide
gauaaaagcccagggccac

SEQ ID NO: 2605318 - RNA, 19 nt, Artificial Sequence
  Description of Artificial Sequence: Synthetic oligonucleotide
ugggguagagaugugguuc

SEQ ID NO: 2605319 - RNA, 19 nt, Artificial Sequence
  Description of Artificial Sequence: Synthetic oligonucleotide
acucaucgaacccuccgug

SEQ ID NO: 2605320 - RNA, 19 nt, Artificial Sequence
  Description of Artificial Sequence: Synthetic oligonucleotide
uacugugguuucccugggg

SEQ ID NO: 2605321 - RNA, 19 nt, Artificial Sequence
  Description of Artificial Sequence: Synthetic oligonucleotide
uaaaagugaucuuguucau

SEQ ID NO: 2605322 - RNA, 19 nt, Artificial Sequence
  Description of Artificial Sequence: Synthetic oligonucleotide
aagccauggagcgcaauca

SEQ ID NO: 2605323 - RNA, 19 nt, Artificial Sequence
  Description of Artificial Sequence: Synthetic oligonucleotide
gagacaucuguccagugcu

SEQ ID NO: 2605324 - RNA, 19 nt, Artificial Sequence
  Description of Artificial Sequence: Synthetic oligonucleotide
gauggcagggcuggcauug

SEQ ID NO: 2605325 - RNA, 19 nt, Artificial Sequence
  Description of Artificial Sequence: Synthetic oligonucleotide
aacuguggcgaaacuccac

SEQ ID NO: 2605326 - RNA, 19 nt, Artificial Sequence
  Description of Artificial Sequence: Synthetic oligonucleotide
caguagagacggaaggaac

SEQ ID NO: 2605327 - RNA, 19 nt, Artificial Sequence
  Description of Artificial Sequence: Synthetic oligonucleotide
aggaacauacacugcacuu

SEQ ID NO: 2605328 - RNA, 19 nt, Artificial Sequence
  Description of Artificial Sequence: Synthetic oligonucleotide
cauggagcgcaaucaguag

SEQ ID NO: 2605329 - RNA, 19 nt, Artificial Sequence
  Description of Artificial Sequence: Synthetic oligonucleotide
agcgcaaucaguagcuaag

SEQ ID NO: 2605330 - RNA, 19 nt, Artificial Sequence
  Description of Artificial Sequence: Synthetic oligonucleotide
accugagacaucuguccag

SEQ ID NO: 2605331 - RNA, 19 nt, Artificial Sequence
  Description of Artificial Sequence: Synthetic oligonucleotide
gaaacuccacucaucgaac

SEQ ID NO: 2605332 - RNA, 19 nt, Artificial Sequence
  Description of Artificial Sequence: Synthetic oligonucleotide
gaaggaacauacacugcac

SEQ ID NO: 2605333 - RNA, 19 nt, Artificial Sequence
  Description of Artificial Sequence: Synthetic oligonucleotide
ucuucguuuccccuuucua

SEQ ID NO: 2605334 - RNA, 19 nt, Artificial Sequence
  Description of Artificial Sequence: Synthetic oligonucleotide
agcaagggcacgauggcag

SEQ ID NO: 2605335 - RNA, 19 nt, Artificial Sequence
  Description of Artificial Sequence: Synthetic oligonucleotide
auuacucugcccacccaac

SEQ ID NO: 2605336 - RNA, 19 nt, Artificial Sequence
  Description of Artificial Sequence: Synthetic oligonucleotide
auccuaaauauaucacgaa

SEQ ID NO: 2605337 - RNA, 19 nt, Artificial Sequence
  Description of Artificial Sequence: Synthetic oligonucleotide
ucugaacuacacugccagc

SEQ ID NO: 2605338 - RNA, 19 nt, Artificial Sequence
  Description of Artificial Sequence: Synthetic oligonucleotide
aaaagugaucuuguucauu

SEQ ID NO: 2605339 - RNA, 19 nt, Artificial Sequence
  Description of Artificial Sequence: Synthetic oligonucleotide
uaaguggugacaggaggcu

SEQ ID NO: 2605340 - RNA, 19 nt, Artificial Sequence
  Description of Artificial Sequence: Synthetic oligonucleotide
cagcaucaggcccaggagc

SEQ ID NO: 2605341 - RNA, 19 nt, Artificial Sequence
  Description of Artificial Sequence: Synthetic oligonucleotide
gguaggagggaauuguaga

SEQ ID NO: 2605342 - RNA, 19 nt, Artificial Sequence
  Description of Artificial Sequence: Synthetic oligonucleotide
gaacuacacugccagcuga

SEQ ID NO: 2605343 - RNA, 19 nt, Artificial Sequence
  Description of Artificial Sequence: Synthetic oligonucleotide
auacugugguuucccuggg

SEQ ID NO: 2605344 - RNA, 19 nt, Artificial Sequence
  Description of Artificial Sequence: Synthetic oligonucleotide
aacccuccgugucaagcca

SEQ ID NO: 2605345 - RNA, 19 nt, Artificial Sequence
  Description of Artificial Sequence: Synthetic oligonucleotide
acgaaggaacauacacugc

SEQ ID NO: 2605346 - RNA, 19 nt, Artificial Sequence
  Description of Artificial Sequence: Synthetic oligonucleotide
guaauguagaaaagcgcca

SEQ ID NO: 2605347 - RNA, 19 nt, Artificial Sequence
  Description of Artificial Sequence: Synthetic oligonucleotide
guagagacggaaggaacug

SEQ ID NO: 2605348 - RNA, 19 nt, Artificial Sequence
  Description of Artificial Sequence: Synthetic oligonucleotide
agccauggagcgcaaucag

SEQ ID NO: 2605349 - RNA, 19 nt, Artificial Sequence
  Description of Artificial Sequence: Synthetic oligonucleotide
caagccauggagcgcaauc

SEQ ID NO: 2605350 - RNA, 19 nt, Artificial Sequence
  Description of Artificial Sequence: Synthetic oligonucleotide
agcaccugccccucucuuc

SEQ ID NO: 2605351 - RNA, 19 nt, Artificial Sequence
  Description of Artificial Sequence: Synthetic oligonucleotide
aaucaguagcuaaguggug

SEQ ID NO: 2605352 - RNA, 19 nt, Artificial Sequence
  Description of Artificial Sequence: Synthetic oligonucleotide
aacuaccauuuaaaaguga

SEQ ID NO: 2605353 - RNA, 19 nt, Artificial Sequence
  Description of Artificial Sequence: Synthetic oligonucleotide
acaguagagacggaaggaa

SEQ ID NO: 2605354 - RNA, 19 nt, Artificial Sequence
  Description of Artificial Sequence: Synthetic oligonucleotide
accauuuaaaagugaucuu

SEQ ID NO: 2605355 - RNA, 19 nt, Artificial Sequence
  Description of Artificial Sequence: Synthetic oligonucleotide
caucuuauaaaacuaccau

SEQ ID NO: 2605356 - RNA, 19 nt, Artificial Sequence
  Description of Artificial Sequence: Synthetic oligonucleotide
uuccugagcccuugggugu

SEQ ID NO: 2605357 - RNA, 19 nt, Artificial Sequence
  Description of Artificial Sequence: Synthetic oligonucleotide
uucauuugauaguccccuc

SEQ ID NO: 2605358 - RNA, 19 nt, Artificial Sequence
  Description of Artificial Sequence: Synthetic oligonucleotide
ucguuuccccuuucuacac

SEQ ID NO: 2605359 - RNA, 19 nt, Artificial Sequence
  Description of Artificial Sequence: Synthetic oligonucleotide
aaacuguggcgaaacucca

SEQ ID NO: 2605360 - RNA, 19 nt, Artificial Sequence
  Description of Artificial Sequence: Synthetic oligonucleotide
gagccugucuguucugaac

SEQ ID NO: 2605361 - RNA, 19 nt, Artificial Sequence
  Description of Artificial Sequence: Synthetic oligonucleotide
acucugcccacccaaccca

SEQ ID NO: 2605362 - RNA, 19 nt, Artificial Sequence
  Description of Artificial Sequence: Synthetic oligonucleotide
cgugucaagccauggagcg

SEQ ID NO: 2605363 - RNA, 19 nt, Artificial Sequence
  Description of Artificial Sequence: Synthetic oligonucleotide
ugggauuacucugcccacc

SEQ ID NO: 2605364 - RNA, 19 nt, Artificial Sequence
  Description of Artificial Sequence: Synthetic oligonucleotide
uggggauggauggaaggac

SEQ ID NO: 2605365 - RNA, 19 nt, Artificial Sequence
  Description of Artificial Sequence: Synthetic oligonucleotide
gacugggauuacucugccc

SEQ ID NO: 2605366 - RNA, 19 nt, Artificial Sequence
  Description of Artificial Sequence: Synthetic oligonucleotide
guucauuugauaguccccu

SEQ ID NO: 2605367 - RNA, 19 nt, Artificial Sequence
  Description of Artificial Sequence: Synthetic oligonucleotide
uggguguccuauuacucuu

SEQ ID NO: 2605368 - RNA, 19 nt, Artificial Sequence
  Description of Artificial Sequence: Synthetic oligonucleotide
agguggagcaugguaggag

SEQ ID NO: 2605369 - RNA, 19 nt, Artificial Sequence
  Description of Artificial Sequence: Synthetic oligonucleotide
aguagagcugcagcaucag

SEQ ID NO: 2605370 - RNA, 19 nt, Artificial Sequence
  Description of Artificial Sequence: Synthetic oligonucleotide
uccacucaucgaacccucc

SEQ ID NO: 2605371 - RNA, 19 nt, Artificial Sequence
  Description of Artificial Sequence: Synthetic oligonucleotide
uucaucccagagccugucu

SEQ ID NO: 2605372 - RNA, 19 nt, Artificial Sequence
  Description of Artificial Sequence: Synthetic oligonucleotide
gacaggcaccagcaagggc

SEQ ID NO: 2605373 - RNA, 19 nt, Artificial Sequence
  Description of Artificial Sequence: Synthetic oligonucleotide
uaggagggaauuguagaua

SEQ ID NO: 2605374 - RNA, 19 nt, Artificial Sequence
  Description of Artificial Sequence: Synthetic oligonucleotide
gggguagagaugugguucc

SEQ ID NO: 2605375 - RNA, 19 nt, Artificial Sequence
  Description of Artificial Sequence: Synthetic oligonucleotide
ugugguuccugagcccuug

SEQ ID NO: 2605376 - RNA, 19 nt, Artificial Sequence
  Description of Artificial Sequence: Synthetic oligonucleotide
cuaacacaccaccuuagua

SEQ ID NO: 2605377 - RNA, 19 nt, Artificial Sequence
  Description of Artificial Sequence: Synthetic oligonucleotide
cacugccagcugaaguagg

SEQ ID NO: 2605378 - RNA, 19 nt, Artificial Sequence
  Description of Artificial Sequence: Synthetic oligonucleotide
gcaccugccccucucuucg

SEQ ID NO: 2605379 - RNA, 19 nt, Artificial Sequence
  Description of Artificial Sequence: Synthetic oligonucleotide
agcuaaguggugacaggag

SEQ ID NO: 2605380 - RNA, 19 nt, Artificial Sequence
  Description of Artificial Sequence: Synthetic oligonucleotide
ccagugcuaacacaccacc

SEQ ID NO: 2605381 - RNA, 19 nt, Artificial Sequence
  Description of Artificial Sequence: Synthetic oligonucleotide
auauaucacgaaggaacau

SEQ ID NO: 2605382 - RNA, 19 nt, Artificial Sequence
  Description of Artificial Sequence: Synthetic oligonucleotide
aagguggagcaugguagga

SEQ ID NO: 2605383 - RNA, 19 nt, Artificial Sequence
  Description of Artificial Sequence: Synthetic oligonucleotide
gggauuacucugcccaccc

SEQ ID NO: 2605384 - RNA, 19 nt, Artificial Sequence
  Description of Artificial Sequence: Synthetic oligonucleotide
guuucccugggguagagau

SEQ ID NO: 2605385 - RNA, 19 nt, Artificial Sequence
  Description of Artificial Sequence: Synthetic oligonucleotide
cugucuguucugaacuaca

SEQ ID NO: 2605386 - RNA, 19 nt, Artificial Sequence
  Description of Artificial Sequence: Synthetic oligonucleotide
cagggccacaguagagacg

SEQ ID NO: 2605387 - RNA, 19 nt, Artificial Sequence
  Description of Artificial Sequence: Synthetic oligonucleotide
guggagcaugguaggaggg

SEQ ID NO: 2605388 - RNA, 19 nt, Artificial Sequence
  Description of Artificial Sequence: Synthetic oligonucleotide
ggcacgauggcagggcugg

SEQ ID NO: 2605389 - RNA, 19 nt, Artificial Sequence
  Description of Artificial Sequence: Synthetic oligonucleotide
cugggauuacucugcccac

SEQ ID NO: 2605390 - RNA, 19 nt, Artificial Sequence
  Description of Artificial Sequence: Synthetic oligonucleotide
gagcgcaaucaguagcuaa

SEQ ID NO: 2605391 - RNA, 19 nt, Artificial Sequence
  Description of Artificial Sequence: Synthetic oligonucleotide
guaggagggaauuguagau

SEQ ID NO: 2605392 - RNA, 19 nt, Artificial Sequence
  Description of Artificial Sequence: Synthetic oligonucleotide
ccuuucuacacacaccuga

SEQ ID NO: 2605393 - RNA, 19 nt, Artificial Sequence
  Description of Artificial Sequence: Synthetic oligonucleotide
ccuauuacucuucauccca

SEQ ID NO: 2605394 - RNA, 19 nt, Artificial Sequence
  Description of Artificial Sequence: Synthetic oligonucleotide
ccacauucacauuuugauc

SEQ ID NO: 2605395 - RNA, 19 nt, Artificial Sequence
  Description of Artificial Sequence: Synthetic oligonucleotide
ugcagccauacugugguuu

SEQ ID NO: 2605396 - RNA, 19 nt, Artificial Sequence
  Description of Artificial Sequence: Synthetic oligonucleotide
acgauggcagggcuggcau

SEQ ID NO: 2605397 - RNA, 19 nt, Artificial Sequence
  Description of Artificial Sequence: Synthetic oligonucleotide
acugcacuuuaaugguaaa

SEQ ID NO: 2605398 - RNA, 19 nt, Artificial Sequence
  Description of Artificial Sequence: Synthetic oligonucleotide
ccuuaguagagcugcagca

SEQ ID NO: 2605399 - RNA, 19 nt, Artificial Sequence
  Description of Artificial Sequence: Synthetic oligonucleotide
caccuuaguagagcugcag

SEQ ID NO: 2605400 - RNA, 19 nt, Artificial Sequence
  Description of Artificial Sequence: Synthetic oligonucleotide
cuguggcgaaacuccacuc

SEQ ID NO: 2605401 - RNA, 19 nt, Artificial Sequence
  Description of Artificial Sequence: Synthetic oligonucleotide
aacauacacugcacuuuaa

SEQ ID NO: 2605402 - RNA, 19 nt, Artificial Sequence
  Description of Artificial Sequence: Synthetic oligonucleotide
ggauggauggaaggacagg

SEQ ID NO: 2605403 - RNA, 19 nt, Artificial Sequence
  Description of Artificial Sequence: Synthetic oligonucleotide
acccacauucacauuuuga

SEQ ID NO: 2605404 - RNA, 19 nt, Artificial Sequence
  Description of Artificial Sequence: Synthetic oligonucleotide
cuccacucaucgaacccuc

SEQ ID NO: 2605405 - RNA, 19 nt, Artificial Sequence
  Description of Artificial Sequence: Synthetic oligonucleotide
ggauggaaggacaggcacc

SEQ ID NO: 2605406 - RNA, 19 nt, Artificial Sequence
  Description of Artificial Sequence: Synthetic oligonucleotide
cugaacuacacugccagcu

SEQ ID NO: 2605407 - RNA, 19 nt, Artificial Sequence
  Description of Artificial Sequence: Synthetic oligonucleotide
cugagacaucuguccagug

SEQ ID NO: 2605408 - RNA, 19 nt, Artificial Sequence
  Description of Artificial Sequence: Synthetic oligonucleotide
gugcuaacacaccaccuua

SEQ ID NO: 2605409 - RNA, 19 nt, Artificial Sequence
  Description of Artificial Sequence: Synthetic oligonucleotide
cauugugggagcccaccca

SEQ ID NO: 2605410 - RNA, 19 nt, Artificial Sequence
  Description of Artificial Sequence: Synthetic oligonucleotide
agcaugguaggagggaauu

SEQ ID NO: 2605411 - RNA, 19 nt, Artificial Sequence
  Description of Artificial Sequence: Synthetic oligonucleotide
gacaucuguccagugcuaa

SEQ ID NO: 2605412 - RNA, 19 nt, Artificial Sequence
  Description of Artificial Sequence: Synthetic oligonucleotide
cgaaggaacauacacugca

SEQ ID NO: 2605413 - RNA, 19 nt, Artificial Sequence
  Description of Artificial Sequence: Synthetic oligonucleotide
ggagccuuugcagccauac

SEQ ID NO: 2605414 - RNA, 19 nt, Artificial Sequence
  Description of Artificial Sequence: Synthetic oligonucleotide
gaggugaaacuguggcgaa

SEQ ID NO: 2605415 - RNA, 19 nt, Artificial Sequence
  Description of Artificial Sequence: Synthetic oligonucleotide
ccgugucaagccauggagc

SEQ ID NO: 2605416 - RNA, 19 nt, Artificial Sequence
  Description of Artificial Sequence: Synthetic oligonucleotide
ccacucaucgaacccuccg

SEQ ID NO: 2605417 - RNA, 19 nt, Artificial Sequence
  Description of Artificial Sequence: Synthetic oligonucleotide
gagacggaaggaacuggga

SEQ ID NO: 2605418 - RNA, 19 nt, Artificial Sequence
  Description of Artificial Sequence: Synthetic oligonucleotide
gggauggauggaaggacag

SEQ ID NO: 2605419 - RNA, 19 nt, Artificial Sequence
  Description of Artificial Sequence: Synthetic oligonucleotide
caugguaggagggaauugu

SEQ ID NO: 2605420 - RNA, 19 nt, Artificial Sequence
  Description of Artificial Sequence: Synthetic oligonucleotide
ccccauagcaaaauaagua

SEQ ID NO: 2605421 - RNA, 19 nt, Artificial Sequence
  Description of Artificial Sequence: Synthetic oligonucleotide
gcaagggcacgauggcagg

SEQ ID NO: 2605422 - RNA, 19 nt, Artificial Sequence
  Description of Artificial Sequence: Synthetic oligonucleotide
caucgaacccuccguguca

SEQ ID NO: 2605423 - RNA, 19 nt, Artificial Sequence
  Description of Artificial Sequence: Synthetic oligonucleotide
gaaggacaggcaccagcaa

SEQ ID NO: 2605424 - RNA, 19 nt, Artificial Sequence
  Description of Artificial Sequence: Synthetic oligonucleotide
gucuguucugaacuacacu

SEQ ID NO: 2605425 - RNA, 19 nt, Artificial Sequence
  Description of Artificial Sequence: Synthetic oligonucleotide
auaaaagcccagggccaca

SEQ ID NO: 2605426 - RNA, 19 nt, Artificial Sequence
  Description of Artificial Sequence: Synthetic oligonucleotide
ccauacugugguuucccug

SEQ ID NO: 2605427 - RNA, 19 nt, Artificial Sequence
  Description of Artificial Sequence: Synthetic oligonucleotide
gcauugugggagcccaccc

SEQ ID NO: 2605428 - RNA, 19 nt, Artificial Sequence
  Description of Artificial Sequence: Synthetic oligonucleotide
gguguccuauuacucuuca

SEQ ID NO: 2605429 - RNA, 19 nt, Artificial Sequence
  Description of Artificial Sequence: Synthetic oligonucleotide
acacaccaccuuaguagag

SEQ ID NO: 2605430 - RNA, 19 nt, Artificial Sequence
  Description of Artificial Sequence: Synthetic oligonucleotide
ccagggacugggauuacuc

SEQ ID NO: 2605431 - RNA, 19 nt, Artificial Sequence
  Description of Artificial Sequence: Synthetic oligonucleotide
ucucuucguuuccccuuuc

SEQ ID NO: 2605432 - RNA, 19 nt, Artificial Sequence
  Description of Artificial Sequence: Synthetic oligonucleotide
agcccacccagggacuggg

SEQ ID NO: 2605433 - RNA, 19 nt, Artificial Sequence
  Description of Artificial Sequence: Synthetic oligonucleotide
cuacacugccagcugaagu

SEQ ID NO: 2605434 - RNA, 19 nt, Artificial Sequence
  Description of Artificial Sequence: Synthetic oligonucleotide
gugucaagccauggagcgc

SEQ ID NO: 2605435 - RNA, 19 nt, Artificial Sequence
  Description of Artificial Sequence: Synthetic oligonucleotide
cgaaacuccacucaucgaa

SEQ ID NO: 2605436 - RNA, 19 nt, Artificial Sequence
  Description of Artificial Sequence: Synthetic oligonucleotide
ggacugggauuacucugcc

SEQ ID NO: 2605437 - RNA, 19 nt, Artificial Sequence
  Description of Artificial Sequence: Synthetic oligonucleotide
gcagccauacugugguuuc

SEQ ID NO: 2605438 - RNA, 19 nt, Artificial Sequence
  Description of Artificial Sequence: Synthetic oligonucleotide
cuggcauugugggagccca

SEQ ID NO: 2605439 - RNA, 19 nt, Artificial Sequence
  Description of Artificial Sequence: Synthetic oligonucleotide
cugcacuuuaaugguaaaa

SEQ ID NO: 2605440 - RNA, 19 nt, Artificial Sequence
  Description of Artificial Sequence: Synthetic oligonucleotide
ggacaggcaccagcaaggg

SEQ ID NO: 2605441 - RNA, 19 nt, Artificial Sequence
  Description of Artificial Sequence: Synthetic oligonucleotide
cugccccucucuucguuuc

SEQ ID NO: 2605442 - RNA, 19 nt, Artificial Sequence
  Description of Artificial Sequence: Synthetic oligonucleotide
cacacaccugagacaucug

SEQ ID NO: 2605443 - RNA, 19 nt, Artificial Sequence
  Description of Artificial Sequence: Synthetic oligonucleotide
cccauagcaaaauaaguau

SEQ ID NO: 2605444 - RNA, 19 nt, Artificial Sequence
  Description of Artificial Sequence: Synthetic oligonucleotide
cuucaucccagagccuguc

SEQ ID NO: 2605445 - RNA, 19 nt, Artificial Sequence
  Description of Artificial Sequence: Synthetic oligonucleotide
ucgaacccuccgugucaag

SEQ ID NO: 2605446 - RNA, 19 nt, Artificial Sequence
  Description of Artificial Sequence: Synthetic oligonucleotide
cuccgugucaagccaugga

SEQ ID NO: 2605447 - RNA, 19 nt, Artificial Sequence
  Description of Artificial Sequence: Synthetic oligonucleotide
uggcauugugggagcccac

SEQ ID NO: 2605448 - RNA, 19 nt, Artificial Sequence
  Description of Artificial Sequence: Synthetic oligonucleotide
cagccauacugugguuucc

SEQ ID NO: 2605449 - RNA, 19 nt, Artificial Sequence
  Description of Artificial Sequence: Synthetic oligonucleotide
ggcauugugggagcccacc

SEQ ID NO: 2605450 - RNA, 19 nt, Artificial Sequence
  Description of Artificial Sequence: Synthetic oligonucleotide
aucgaacccuccgugucaa

SEQ ID NO: 2605451 - RNA, 19 nt, Artificial Sequence
  Description of Artificial Sequence: Synthetic oligonucleotide
ccacccaacccacauucac

SEQ ID NO: 2605452 - RNA, 19 nt, Artificial Sequence
  Description of Artificial Sequence: Synthetic oligonucleotide
cuuaguagagcugcagcau

SEQ ID NO: 2605453 - RNA, 19 nt, Artificial Sequence
  Description of Artificial Sequence: Synthetic oligonucleotide
cugggagaggugaaacugu

SEQ ID NO: 2605454 - RNA, 19 nt, Artificial Sequence
  Description of Artificial Sequence: Synthetic oligonucleotide
cagagcaccugccccucuc

SEQ ID NO: 2605455 - RNA, 19 nt, Artificial Sequence
  Description of Artificial Sequence: Synthetic oligonucleotide
cccacauucacauuuugau

SEQ ID NO: 2605456 - RNA, 19 nt, Artificial Sequence
  Description of Artificial Sequence: Synthetic oligonucleotide
ccauggagcgcaaucagua

SEQ ID NO: 2605457 - RNA, 19 nt, Artificial Sequence
  Description of Artificial Sequence: Synthetic oligonucleotide
gguuccugagcccuugggu

SEQ ID NO: 2605458 - RNA, 19 nt, Artificial Sequence
  Description of Artificial Sequence: Synthetic oligonucleotide
gagcccacccagggacugg

SEQ ID NO: 2605459 - RNA, 19 nt, Artificial Sequence
  Description of Artificial Sequence: Synthetic oligonucleotide
cucaucgaacccuccgugu

SEQ ID NO: 2605460 - RNA, 19 nt, Artificial Sequence
  Description of Artificial Sequence: Synthetic oligonucleotide
guggcgaaacuccacucau

SEQ ID NO: 2605461 - RNA, 19 nt, Artificial Sequence
  Description of Artificial Sequence: Synthetic oligonucleotide
ugcccacccaacccacauu

SEQ ID NO: 2605462 - RNA, 19 nt, Artificial Sequence
  Description of Artificial Sequence: Synthetic oligonucleotide
ggggauggauggaaggaca

SEQ ID NO: 2605463 - RNA, 19 nt, Artificial Sequence
  Description of Artificial Sequence: Synthetic oligonucleotide
aggugaaacuguggcgaaa

SEQ ID NO: 2605464 - RNA, 19 nt, Artificial Sequence
  Description of Artificial Sequence: Synthetic oligonucleotide
gcaugguaggagggaauug

SEQ ID NO: 2605465 - RNA, 19 nt, Artificial Sequence
  Description of Artificial Sequence: Synthetic oligonucleotide
ccugucuguucugaacuac

SEQ ID NO: 2605466 - RNA, 19 nt, Artificial Sequence
  Description of Artificial Sequence: Synthetic oligonucleotide
cacucaucgaacccuccgu

SEQ ID NO: 2605467 - RNA, 19 nt, Artificial Sequence
  Description of Artificial Sequence: Synthetic oligonucleotide
ucaagccauggagcgcaau

SEQ ID NO: 2605468 - RNA, 19 nt, Artificial Sequence
  Description of Artificial Sequence: Synthetic oligonucleotide
uccugagcccuuggguguc

SEQ ID NO: 2605469 - RNA, 19 nt, Artificial Sequence
  Description of Artificial Sequence: Synthetic oligonucleotide
cagugcuaacacaccaccu

SEQ ID NO: 2605470 - RNA, 19 nt, Artificial Sequence
  Description of Artificial Sequence: Synthetic oligonucleotide
ucccugggguagagaugug

SEQ ID NO: 2605471 - RNA, 19 nt, Artificial Sequence
  Description of Artificial Sequence: Synthetic oligonucleotide
acacugcacuuuaauggua

SEQ ID NO: 2605472 - RNA, 19 nt, Artificial Sequence
  Description of Artificial Sequence: Synthetic oligonucleotide
cgcaaucaguagcuaagug

SEQ ID NO: 2605473 - RNA, 19 nt, Artificial Sequence
  Description of Artificial Sequence: Synthetic oligonucleotide
ggagcaugguaggagggaa

SEQ ID NO: 2605474 - RNA, 19 nt, Artificial Sequence
  Description of Artificial Sequence: Synthetic oligonucleotide
gcuaacacaccaccuuagu

SEQ ID NO: 2605475 - RNA, 19 nt, Artificial Sequence
  Description of Artificial Sequence: Synthetic oligonucleotide
gagccuuugcagccauacu

SEQ ID NO: 2605476 - RNA, 19 nt, Artificial Sequence
  Description of Artificial Sequence: Synthetic oligonucleotide
ccccuuucuacacacaccu

SEQ ID NO: 2605477 - RNA, 19 nt, Artificial Sequence
  Description of Artificial Sequence: Synthetic oligonucleotide
cacccagggacugggauua

SEQ ID NO: 2605478 - RNA, 19 nt, Artificial Sequence
  Description of Artificial Sequence: Synthetic oligonucleotide
agcccuuggguguccuauu

SEQ ID NO: 2605479 - RNA, 19 nt, Artificial Sequence
  Description of Artificial Sequence: Synthetic oligonucleotide
ggauuacucugcccaccca

SEQ ID NO: 2605480 - RNA, 19 nt, Artificial Sequence
  Description of Artificial Sequence: Synthetic oligonucleotide
ccaacccacauucacauuu

SEQ ID NO: 2605481 - RNA, 19 nt, Artificial Sequence
  Description of Artificial Sequence: Synthetic oligonucleotide
ugagcccuuggguguccua

SEQ ID NO: 2605482 - RNA, 19 nt, Artificial Sequence
  Description of Artificial Sequence: Synthetic oligonucleotide
cgaacccuccgugucaagc

SEQ ID NO: 2605483 - RNA, 19 nt, Artificial Sequence
  Description of Artificial Sequence: Synthetic oligonucleotide
cacgauggcagggcuggca

SEQ ID NO: 2605484 - RNA, 19 nt, Artificial Sequence
  Description of Artificial Sequence: Synthetic oligonucleotide
cagcaagggcacgauggca

SEQ ID NO: 2605485 - RNA, 19 nt, Artificial Sequence
  Description of Artificial Sequence: Synthetic oligonucleotide
uugcagccauacugugguu

SEQ ID NO: 2605486 - RNA, 19 nt, Artificial Sequence
  Description of Artificial Sequence: Synthetic oligonucleotide
gcuggcauugugggagccc

SEQ ID NO: 2605487 - RNA, 19 nt, Artificial Sequence
  Description of Artificial Sequence: Synthetic oligonucleotide
agacaucuguccagugcua

SEQ ID NO: 2605488 - RNA, 19 nt, Artificial Sequence
  Description of Artificial Sequence: Synthetic oligonucleotide
cagggcuggcauuguggga

SEQ ID NO: 2605489 - RNA, 19 nt, Artificial Sequence
  Description of Artificial Sequence: Synthetic oligonucleotide
cccuuggguguccuauuac

SEQ ID NO: 2605490 - RNA, 19 nt, Artificial Sequence
  Description of Artificial Sequence: Synthetic oligonucleotide
accugccccucucuucguu

SEQ ID NO: 2605491 - RNA, 19 nt, Artificial Sequence
  Description of Artificial Sequence: Synthetic oligonucleotide
gugguuucccugggguaga

SEQ ID NO: 2605492 - RNA, 19 nt, Artificial Sequence
  Description of Artificial Sequence: Synthetic oligonucleotide
cucuucguuuccccuuucu

SEQ ID NO: 2605493 - RNA, 19 nt, Artificial Sequence
  Description of Artificial Sequence: Synthetic oligonucleotide
ccuuggguguccuauuacu

SEQ ID NO: 2605494 - RNA, 19 nt, Artificial Sequence
  Description of Artificial Sequence: Synthetic oligonucleotide
ggccacaguagagacggaa

SEQ ID NO: 2605495 - RNA, 19 nt, Artificial Sequence
  Description of Artificial Sequence: Synthetic oligonucleotide
cccuuucuacacacaccug

SEQ ID NO: 2605496 - RNA, 19 nt, Artificial Sequence
  Description of Artificial Sequence: Synthetic oligonucleotide
ccuccgugucaagccaugg

SEQ ID NO: 2605497 - RNA, 19 nt, Artificial Sequence
  Description of Artificial Sequence: Synthetic oligonucleotide
acccagggacugggauuac

SEQ ID NO: 2605498 - RNA, 19 nt, Artificial Sequence
  Description of Artificial Sequence: Synthetic oligonucleotide
gggcuggcauugugggagc

SEQ ID NO: 2605499 - RNA, 19 nt, Artificial Sequence
  Description of Artificial Sequence: Synthetic oligonucleotide
ggagcccacccagggacug

SEQ ID NO: 2605500 - RNA, 19 nt, Artificial Sequence
  Description of Artificial Sequence: Synthetic oligonucleotide
ggguguccuauuacucuuc

SEQ ID NO: 2605501 - RNA, 19 nt, Artificial Sequence
  Description of Artificial Sequence: Synthetic oligonucleotide
auggcagggcuggcauugu

SEQ ID NO: 2605502 - RNA, 19 nt, Artificial Sequence
  Description of Artificial Sequence: Synthetic oligonucleotide
guguccuauuacucuucau

SEQ ID NO: 2605503 - RNA, 19 nt, Artificial Sequence
  Description of Artificial Sequence: Synthetic oligonucleotide
cugggguagagaugugguu

SEQ ID NO: 2605504 - RNA, 19 nt, Artificial Sequence
  Description of Artificial Sequence: Synthetic oligonucleotide
cucucuucguuuccccuuu

SEQ ID NO: 2605505 - RNA, 19 nt, Artificial Sequence
  Description of Artificial Sequence: Synthetic oligonucleotide
gaggcugguggggauggau

SEQ ID NO: 2605506 - RNA, 19 nt, Artificial Sequence
  Description of Artificial Sequence: Synthetic oligonucleotide
ggagggaauuguagauaaa

SEQ ID NO: 2605507 - RNA, 19 nt, Artificial Sequence
  Description of Artificial Sequence: Synthetic oligonucleotide
acccuccgugucaagccau

SEQ ID NO: 2605508 - RNA, 19 nt, Artificial Sequence
  Description of Artificial Sequence: Synthetic oligonucleotide
cccuccgugucaagccaug

SEQ ID NO: 2605509 - RNA, 19 nt, Artificial Sequence
  Description of Artificial Sequence: Synthetic oligonucleotide
gccugucuguucugaacua

SEQ ID NO: 2605510 - RNA, 19 nt, Artificial Sequence
  Description of Artificial Sequence: Synthetic oligonucleotide
gggcacgauggcagggcug

SEQ ID NO: 2605511 - RNA, 19 nt, Artificial Sequence
  Description of Artificial Sequence: Synthetic oligonucleotide
cccagagccugucuguucu

SEQ ID NO: 2605512 - RNA, 19 nt, Artificial Sequence
  Description of Artificial Sequence: Synthetic oligonucleotide
gccauacugugguuucccu

SEQ ID NO: 2605513 - RNA, 19 nt, Artificial Sequence
  Description of Artificial Sequence: Synthetic oligonucleotide
gcccuuggguguccuauua

SEQ ID NO: 2605514 - RNA, 19 nt, Artificial Sequence
  Description of Artificial Sequence: Synthetic oligonucleotide
ccaccuuaguagagcugca

SEQ ID NO: 2605515 - RNA, 19 nt, Artificial Sequence
  Description of Artificial Sequence: Synthetic oligonucleotide
gguuucccugggguagaga

SEQ ID NO: 2605516 - RNA, 19 nt, Artificial Sequence
  Description of Artificial Sequence: Synthetic oligonucleotide
gcgcaaucaguagcuaagu

SEQ ID NO: 2605517 - RNA, 19 nt, Artificial Sequence
  Description of Artificial Sequence: Synthetic oligonucleotide
gccauggagcgcaaucagu

SEQ ID NO: 2605518 - RNA, 19 nt, Artificial Sequence
  Description of Artificial Sequence: Synthetic oligonucleotide
gucaagccauggagcgcaa

SEQ ID NO: 2605519 - RNA, 19 nt, Artificial Sequence
  Description of Artificial Sequence: Synthetic oligonucleotide
ccugagcccuugggugucc

SEQ ID NO: 2605520 - RNA, 19 nt, Artificial Sequence
  Description of Artificial Sequence: Synthetic oligonucleotide
caucaggcccaggagccuu

SEQ ID NO: 2605521 - RNA, 19 nt, Artificial Sequence
  Description of Artificial Sequence: Synthetic oligonucleotide
gcacgauggcagggcuggc

SEQ ID NO: 2605522 - RNA, 19 nt, Artificial Sequence
  Description of Artificial Sequence: Synthetic oligonucleotide
ggguagagaugugguuccu

SEQ ID NO: 2605523 - RNA, 19 nt, Artificial Sequence
  Description of Artificial Sequence: Synthetic oligonucleotide
cugagcccuuggguguccu

SEQ ID NO: 2605524 - RNA, 19 nt, Artificial Sequence
  Description of Artificial Sequence: Synthetic oligonucleotide
caccugccccucucuucgu

SEQ ID NO: 2605525 - RNA, 19 nt, Artificial Sequence
  Description of Artificial Sequence: Synthetic oligonucleotide
gggagcccacccagggacu

SEQ ID NO: 2605526 - RNA, 19 nt, Artificial Sequence
  Description of Artificial Sequence: Synthetic oligonucleotide
ccugccccucucuucguuu

SEQ ID NO: 2605527 - RNA, 19 nt, Artificial Sequence
  Description of Artificial Sequence: Synthetic oligonucleotide
gggccacaguagagacgga

SEQ ID NO: 2605528 - RNA, 19 nt, Artificial Sequence
  Description of Artificial Sequence: Synthetic oligonucleotide
cccagggacugggauuacu

SEQ ID NO: 2605529 - RNA, 19 nt, Artificial Sequence
  Description of Artificial Sequence: Synthetic oligonucleotide
cccaacccacauucacauu

SEQ ID NO: 2605530 - RNA, 19 nt, Artificial Sequence
  Description of Artificial Sequence: Synthetic oligonucleotide
cgauggcagggcuggcauu

SEQ ID NO: 2605531 - RNA, 19 nt, Artificial Sequence
  Description of Artificial Sequence: Synthetic oligonucleotide
auaaaguuaaauuuuaucc

SEQ ID NO: 2605532 - RNA, 19 nt, Artificial Sequence
  Description of Artificial Sequence: Synthetic oligonucleotide
agugauguaacacaaagac

SEQ ID NO: 2605533 - RNA, 19 nt, Artificial Sequence
  Description of Artificial Sequence: Synthetic oligonucleotide
ugauguaacacaaagacac

SEQ ID NO: 2605534 - RNA, 19 nt, Artificial Sequence
  Description of Artificial Sequence: Synthetic oligonucleotide
uuaacaagcagccuccugg

SEQ ID NO: 2605535 - RNA, 19 nt, Artificial Sequence
  Description of Artificial Sequence: Synthetic oligonucleotide
aauuuuaucccugaaugac

SEQ ID NO: 2605536 - RNA, 19 nt, Artificial Sequence
  Description of Artificial Sequence: Synthetic oligonucleotide
ucuguuucaaagcacaugc

SEQ ID NO: 2605537 - RNA, 19 nt, Artificial Sequence
  Description of Artificial Sequence: Synthetic oligonucleotide
uaaaguuaaauuuuauccc

SEQ ID NO: 2605538 - RNA, 19 nt, Artificial Sequence
  Description of Artificial Sequence: Synthetic oligonucleotide
ugaaugacagugaagaccc

SEQ ID NO: 2605539 - RNA, 19 nt, Artificial Sequence
  Description of Artificial Sequence: Synthetic oligonucleotide
aaaguuaaauuuuaucccu

SEQ ID NO: 2605540 - RNA, 19 nt, Artificial Sequence
  Description of Artificial Sequence: Synthetic oligonucleotide
aagaacacuagagagcacc

SEQ ID NO: 2605541 - RNA, 19 nt, Artificial Sequence
  Description of Artificial Sequence: Synthetic oligonucleotide
aauaaaucccaagugaugu

SEQ ID NO: 2605542 - RNA, 19 nt, Artificial Sequence
  Description of Artificial Sequence: Synthetic oligonucleotide
aaaagaacacuagagagca

SEQ ID NO: 2605543 - RNA, 19 nt, Artificial Sequence
  Description of Artificial Sequence: Synthetic oligonucleotide
uuuuaucccugaaugacag

SEQ ID NO: 2605544 - RNA, 19 nt, Artificial Sequence
  Description of Artificial Sequence: Synthetic oligonucleotide
aaauuuuaucccugaauga

SEQ ID NO: 2605545 - RNA, 19 nt, Artificial Sequence
  Description of Artificial Sequence: Synthetic oligonucleotide
uaggauaggaguguggagg

SEQ ID NO: 2605546 - RNA, 19 nt, Artificial Sequence
  Description of Artificial Sequence: Synthetic oligonucleotide
uguuucaaagcacaugccu

SEQ ID NO: 2605547 - RNA, 19 nt, Artificial Sequence
  Description of Artificial Sequence: Synthetic oligonucleotide
caagugauguaacacaaag

SEQ ID NO: 2605548 - RNA, 19 nt, Artificial Sequence
  Description of Artificial Sequence: Synthetic oligonucleotide
acugugacgagucauccuc

SEQ ID NO: 2605549 - RNA, 19 nt, Artificial Sequence
  Description of Artificial Sequence: Synthetic oligonucleotide
gaaaagaacacuagagagc

SEQ ID NO: 2605550 - RNA, 19 nt, Artificial Sequence
  Description of Artificial Sequence: Synthetic oligonucleotide
agaguagcaguuucugccc

SEQ ID NO: 2605551 - RNA, 19 nt, Artificial Sequence
  Description of Artificial Sequence: Synthetic oligonucleotide
gugucaaccacgcaggcgg

SEQ ID NO: 2605552 - RNA, 19 nt, Artificial Sequence
  Description of Artificial Sequence: Synthetic oligonucleotide
ucaagagcuccuaggauag

SEQ ID NO: 2605553 - RNA, 19 nt, Artificial Sequence
  Description of Artificial Sequence: Synthetic oligonucleotide
uacacacucacacacacau

SEQ ID NO: 2605554 - RNA, 19 nt, Artificial Sequence
  Description of Artificial Sequence: Synthetic oligonucleotide
agugaagacccuucccugc

SEQ ID NO: 2605555 - RNA, 19 nt, Artificial Sequence
  Description of Artificial Sequence: Synthetic oligonucleotide
cucacacacacauacacac

SEQ ID NO: 2605556 - RNA, 19 nt, Artificial Sequence
  Description of Artificial Sequence: Synthetic oligonucleotide
ugcucuuccgagcugcugg

SEQ ID NO: 2605557 - RNA, 19 nt, Artificial Sequence
  Description of Artificial Sequence: Synthetic oligonucleotide
ucuuucuugauggaguggc

SEQ ID NO: 2605558 - RNA, 19 nt, Artificial Sequence
  Description of Artificial Sequence: Synthetic oligonucleotide
uuaucccugaaugacagug

SEQ ID NO: 2605559 - RNA, 19 nt, Artificial Sequence
  Description of Artificial Sequence: Synthetic oligonucleotide
ucucucgccagcauggacc

SEQ ID NO: 2605560 - RNA, 19 nt, Artificial Sequence
  Description of Artificial Sequence: Synthetic oligonucleotide
cugaaugacagugaagacc

SEQ ID NO: 2605561 - RNA, 19 nt, Artificial Sequence
  Description of Artificial Sequence: Synthetic oligonucleotide
uccauguuguguuuggugu

SEQ ID NO: 2605562 - RNA, 19 nt, Artificial Sequence
  Description of Artificial Sequence: Synthetic oligonucleotide
aagugcucuuccgagcugc

SEQ ID NO: 2605563 - RNA, 19 nt, Artificial Sequence
  Description of Artificial Sequence: Synthetic oligonucleotide
cacacacacauacacacag

SEQ ID NO: 2605564 - RNA, 19 nt, Artificial Sequence
  Description of Artificial Sequence: Synthetic oligonucleotide
aaucccaagugauguaaca

SEQ ID NO: 2605565 - RNA, 19 nt, Artificial Sequence
  Description of Artificial Sequence: Synthetic oligonucleotide
gucaucaagagcuccuagg

SEQ ID NO: 2605566 - RNA, 19 nt, Artificial Sequence
  Description of Artificial Sequence: Synthetic oligonucleotide
aacacuagagagcacccaa

SEQ ID NO: 2605567 - RNA, 19 nt, Artificial Sequence
  Description of Artificial Sequence: Synthetic oligonucleotide
ucaagugcucuuccgagcu

SEQ ID NO: 2605568 - RNA, 19 nt, Artificial Sequence
  Description of Artificial Sequence: Synthetic oligonucleotide
ugagaagaguagcaguuuc

SEQ ID NO: 2605569 - RNA, 19 nt, Artificial Sequence
  Description of Artificial Sequence: Synthetic oligonucleotide
gguggugucaaccacgcag

SEQ ID NO: 2605570 - RNA, 19 nt, Artificial Sequence
  Description of Artificial Sequence: Synthetic oligonucleotide
uccucuuucuugauggagu

SEQ ID NO: 2605571 - RNA, 19 nt, Artificial Sequence
  Description of Artificial Sequence: Synthetic oligonucleotide
aagaggcugccauugggug

SEQ ID NO: 2605572 - RNA, 19 nt, Artificial Sequence
  Description of Artificial Sequence: Synthetic oligonucleotide
ugacgagucauccucuuuc

SEQ ID NO: 2605573 - RNA, 19 nt, Artificial Sequence
  Description of Artificial Sequence: Synthetic oligonucleotide
uuucugcccuuucagguug

SEQ ID NO: 2605574 - RNA, 19 nt, Artificial Sequence
  Description of Artificial Sequence: Synthetic oligonucleotide
aaaucccaagugauguaac

SEQ ID NO: 2605575 - RNA, 19 nt, Artificial Sequence
  Description of Artificial Sequence: Synthetic oligonucleotide
uggaggucaggucaggccu

SEQ ID NO: 2605576 - RNA, 19 nt, Artificial Sequence
  Description of Artificial Sequence: Synthetic oligonucleotide
aucaagagcuccuaggaua

SEQ ID NO: 2605577 - RNA, 19 nt, Artificial Sequence
  Description of Artificial Sequence: Synthetic oligonucleotide
aaguuaaauuuuaucccug

SEQ ID NO: 2605578 - RNA, 19 nt, Artificial Sequence
  Description of Artificial Sequence: Synthetic oligonucleotide
uggagcuggccaccgaagg

SEQ ID NO: 2605579 - RNA, 19 nt, Artificial Sequence
  Description of Artificial Sequence: Synthetic oligonucleotide
aacccaggaugucaucaag

SEQ ID NO: 2605580 - RNA, 19 nt, Artificial Sequence
  Description of Artificial Sequence: Synthetic oligonucleotide
aucccaagugauguaacac

SEQ ID NO: 2605581 - RNA, 19 nt, Artificial Sequence
  Description of Artificial Sequence: Synthetic oligonucleotide
ugucaucaagagcuccuag

SEQ ID NO: 2605582 - RNA, 19 nt, Artificial Sequence
  Description of Artificial Sequence: Synthetic oligonucleotide
agaacacuagagagcaccc

SEQ ID NO: 2605583 - RNA, 19 nt, Artificial Sequence
  Description of Artificial Sequence: Synthetic oligonucleotide
agagcacccaagcuuaaca

SEQ ID NO: 2605584 - RNA, 19 nt, Artificial Sequence
  Description of Artificial Sequence: Synthetic oligonucleotide
uagagagcacccaagcuua

SEQ ID NO: 2605585 - RNA, 19 nt, Artificial Sequence
  Description of Artificial Sequence: Synthetic oligonucleotide
uuuccagggagcagucucc

SEQ ID NO: 2605586 - RNA, 19 nt, Artificial Sequence
  Description of Artificial Sequence: Synthetic oligonucleotide
uguuuggugucccgugugc

SEQ ID NO: 2605587 - RNA, 19 nt, Artificial Sequence
  Description of Artificial Sequence: Synthetic oligonucleotide
uaaaucccaagugauguaa

SEQ ID NO: 2605588 - RNA, 19 nt, Artificial Sequence
  Description of Artificial Sequence: Synthetic oligonucleotide
acacaggagcuuuccaggg

SEQ ID NO: 2605589 - RNA, 19 nt, Artificial Sequence
  Description of Artificial Sequence: Synthetic oligonucleotide
auacacacaggagcuuucc

SEQ ID NO: 2605590 - RNA, 19 nt, Artificial Sequence
  Description of Artificial Sequence: Synthetic oligonucleotide
ugacagugaagacccuucc

SEQ ID NO: 2605591 - RNA, 19 nt, Artificial Sequence
  Description of Artificial Sequence: Synthetic oligonucleotide
uaacaagcagccuccuggc

SEQ ID NO: 2605592 - RNA, 19 nt, Artificial Sequence
  Description of Artificial Sequence: Synthetic oligonucleotide
agcacccaagcuuaacaag

SEQ ID NO: 2605593 - RNA, 19 nt, Artificial Sequence
  Description of Artificial Sequence: Synthetic oligonucleotide
uccuaggauaggagugugg

SEQ ID NO: 2605594 - RNA, 19 nt, Artificial Sequence
  Description of Artificial Sequence: Synthetic oligonucleotide
acuagagagcacccaagcu

SEQ ID NO: 2605595 - RNA, 19 nt, Artificial Sequence
  Description of Artificial Sequence: Synthetic oligonucleotide
ggaggcucaaugaagaggc

SEQ ID NO: 2605596 - RNA, 19 nt, Artificial Sequence
  Description of Artificial Sequence: Synthetic oligonucleotide
gacagugaagacccuuccc

SEQ ID NO: 2605597 - RNA, 19 nt, Artificial Sequence
  Description of Artificial Sequence: Synthetic oligonucleotide
uaucccugaaugacaguga

SEQ ID NO: 2605598 - RNA, 19 nt, Artificial Sequence
  Description of Artificial Sequence: Synthetic oligonucleotide
gauaggaguguggagguca

SEQ ID NO: 2605599 - RNA, 19 nt, Artificial Sequence
  Description of Artificial Sequence: Synthetic oligonucleotide
gagcugaggaggcucaaug

SEQ ID NO: 2605600 - RNA, 19 nt, Artificial Sequence
  Description of Artificial Sequence: Synthetic oligonucleotide
aggaggcucaaugaagagg

SEQ ID NO: 2605601 - RNA, 19 nt, Artificial Sequence
  Description of Artificial Sequence: Synthetic oligonucleotide
cacuagagagcacccaagc

SEQ ID NO: 2605602 - RNA, 19 nt, Artificial Sequence
  Description of Artificial Sequence: Synthetic oligonucleotide
uguuguguuuggugucccg

SEQ ID NO: 2605603 - RNA, 19 nt, Artificial Sequence
  Description of Artificial Sequence: Synthetic oligonucleotide
caguuucugcccuuucagg

SEQ ID NO: 2605604 - RNA, 19 nt, Artificial Sequence
  Description of Artificial Sequence: Synthetic oligonucleotide
cuuuccagggagcagucuc

SEQ ID NO: 2605605 - RNA, 19 nt, Artificial Sequence
  Description of Artificial Sequence: Synthetic oligonucleotide
auuuuaucccugaaugaca

SEQ ID NO: 2605606 - RNA, 19 nt, Artificial Sequence
  Description of Artificial Sequence: Synthetic oligonucleotide
ucacacacacauacacaca

SEQ ID NO: 2605607 - RNA, 19 nt, Artificial Sequence
  Description of Artificial Sequence: Synthetic oligonucleotide
ugucccgugugcaauuccu

SEQ ID NO: 2605608 - RNA, 19 nt, Artificial Sequence
  Description of Artificial Sequence: Synthetic oligonucleotide
gauggaguggcugcugcag

SEQ ID NO: 2605609 - RNA, 19 nt, Artificial Sequence
  Description of Artificial Sequence: Synthetic oligonucleotide
cuaggauaggaguguggag

SEQ ID NO: 2605610 - RNA, 19 nt, Artificial Sequence
  Description of Artificial Sequence: Synthetic oligonucleotide
ucaaccacgcaggcggagg

SEQ ID NO: 2605611 - RNA, 19 nt, Artificial Sequence
  Description of Artificial Sequence: Synthetic oligonucleotide
augaagaggcugccauugg

SEQ ID NO: 2605612 - RNA, 19 nt, Artificial Sequence
  Description of Artificial Sequence: Synthetic oligonucleotide
augacagugaagacccuuc

SEQ ID NO: 2605613 - RNA, 19 nt, Artificial Sequence
  Description of Artificial Sequence: Synthetic oligonucleotide
cagcauggaccucaugucc

SEQ ID NO: 2605614 - RNA, 19 nt, Artificial Sequence
  Description of Artificial Sequence: Synthetic oligonucleotide
aggauaggaguguggaggu

SEQ ID NO: 2605615 - RNA, 19 nt, Artificial Sequence
  Description of Artificial Sequence: Synthetic oligonucleotide
aaugacagugaagacccuu

SEQ ID NO: 2605616 - RNA, 19 nt, Artificial Sequence
  Description of Artificial Sequence: Synthetic oligonucleotide
auggaccucauguccaugu

SEQ ID NO: 2605617 - RNA, 19 nt, Artificial Sequence
  Description of Artificial Sequence: Synthetic oligonucleotide
ugccauugggugucaagug

SEQ ID NO: 2605618 - RNA, 19 nt, Artificial Sequence
  Description of Artificial Sequence: Synthetic oligonucleotide
cauguuguguuuggugucc

SEQ ID NO: 2605619 - RNA, 19 nt, Artificial Sequence
  Description of Artificial Sequence: Synthetic oligonucleotide
guggugucaaccacgcagg

SEQ ID NO: 2605620 - RNA, 19 nt, Artificial Sequence
  Description of Artificial Sequence: Synthetic oligonucleotide
ucaggucaggccuccuucc

SEQ ID NO: 2605621 - RNA, 19 nt, Artificial Sequence
  Description of Artificial Sequence: Synthetic oligonucleotide
gaugaggggccugcggugg

SEQ ID NO: 2605622 - RNA, 19 nt, Artificial Sequence
  Description of Artificial Sequence: Synthetic oligonucleotide
gugugcaauuccucugggg

SEQ ID NO: 2605623 - RNA, 19 nt, Artificial Sequence
  Description of Artificial Sequence: Synthetic oligonucleotide
gaagacccuucccugcccc

SEQ ID NO: 2605624 - RNA, 19 nt, Artificial Sequence
  Description of Artificial Sequence: Synthetic oligonucleotide
ucuccuccgagcaccuuug

SEQ ID NO: 2605625 - RNA, 19 nt, Artificial Sequence
  Description of Artificial Sequence: Synthetic oligonucleotide
ugaagacccuucccugccc

SEQ ID NO: 2605626 - RNA, 19 nt, Artificial Sequence
  Description of Artificial Sequence: Synthetic oligonucleotide
gagacaacccaggauguca

SEQ ID NO: 2605627 - RNA, 19 nt, Artificial Sequence
  Description of Artificial Sequence: Synthetic oligonucleotide
acaacccaggaugucauca

SEQ ID NO: 2605628 - RNA, 19 nt, Artificial Sequence
  Description of Artificial Sequence: Synthetic oligonucleotide
acccaagcuuaacaagcag

SEQ ID NO: 2605629 - RNA, 19 nt, Artificial Sequence
  Description of Artificial Sequence: Synthetic oligonucleotide
gucaagugcucuuccgagc

SEQ ID NO: 2605630 - RNA, 19 nt, Artificial Sequence
  Description of Artificial Sequence: Synthetic oligonucleotide
aacaagcagccuccuggca

SEQ ID NO: 2605631 - RNA, 19 nt, Artificial Sequence
  Description of Artificial Sequence: Synthetic oligonucleotide
ggugucaagugcucuuccg

SEQ ID NO: 2605632 - RNA, 19 nt, Artificial Sequence
  Description of Artificial Sequence: Synthetic oligonucleotide
cuuaacaagcagccuccug

SEQ ID NO: 2605633 - RNA, 19 nt, Artificial Sequence
  Description of Artificial Sequence: Synthetic oligonucleotide
ugaugaggggccugcggug

SEQ ID NO: 2605634 - RNA, 19 nt, Artificial Sequence
  Description of Artificial Sequence: Synthetic oligonucleotide
auaaaucccaagugaugua

SEQ ID NO: 2605635 - RNA, 19 nt, Artificial Sequence
  Description of Artificial Sequence: Synthetic oligonucleotide
guggaggucaggucaggcc

SEQ ID NO: 2605636 - RNA, 19 nt, Artificial Sequence
  Description of Artificial Sequence: Synthetic oligonucleotide
gugaagacccuucccugcc

SEQ ID NO: 2605637 - RNA, 19 nt, Artificial Sequence
  Description of Artificial Sequence: Synthetic oligonucleotide
acccuucccugccccaugc

SEQ ID NO: 2605638 - RNA, 19 nt, Artificial Sequence
  Description of Artificial Sequence: Synthetic oligonucleotide
uuuggugucccgugugcaa

SEQ ID NO: 2605639 - RNA, 19 nt, Artificial Sequence
  Description of Artificial Sequence: Synthetic oligonucleotide
gauguaacacaaagacaca

SEQ ID NO: 2605640 - RNA, 19 nt, Artificial Sequence
  Description of Artificial Sequence: Synthetic oligonucleotide
ucccgugugcaauuccucu

SEQ ID NO: 2605641 - RNA, 19 nt, Artificial Sequence
  Description of Artificial Sequence: Synthetic oligonucleotide
auguuguguuugguguccc

SEQ ID NO: 2605642 - RNA, 19 nt, Artificial Sequence
  Description of Artificial Sequence: Synthetic oligonucleotide
cagugaagacccuucccug

SEQ ID NO: 2605643 - RNA, 19 nt, Artificial Sequence
  Description of Artificial Sequence: Synthetic oligonucleotide
cccaagcuuaacaagcagc

SEQ ID NO: 2605644 - RNA, 19 nt, Artificial Sequence
  Description of Artificial Sequence: Synthetic oligonucleotide
aggacugugacgagucauc

SEQ ID NO: 2605645 - RNA, 19 nt, Artificial Sequence
  Description of Artificial Sequence: Synthetic oligonucleotide
aucccugaaugacagugaa

SEQ ID NO: 2605646 - RNA, 19 nt, Artificial Sequence
  Description of Artificial Sequence: Synthetic oligonucleotide
agcagucuccuccgagcac

SEQ ID NO: 2605647 - RNA, 19 nt, Artificial Sequence
  Description of Artificial Sequence: Synthetic oligonucleotide
gugauguaacacaaagaca

SEQ ID NO: 2605648 - RNA, 19 nt, Artificial Sequence
  Description of Artificial Sequence: Synthetic oligonucleotide
uuuaucccugaaugacagu

SEQ ID NO: 2605649 - RNA, 19 nt, Artificial Sequence
  Description of Artificial Sequence: Synthetic oligonucleotide
aggcggaggacugugacga

SEQ ID NO: 2605650 - RNA, 19 nt, Artificial Sequence
  Description of Artificial Sequence: Synthetic oligonucleotide
agcacaugccucaccuggc

SEQ ID NO: 2605651 - RNA, 19 nt, Artificial Sequence
  Description of Artificial Sequence: Synthetic oligonucleotide
gagcuggccaccgaaggug

SEQ ID NO: 2605652 - RNA, 19 nt, Artificial Sequence
  Description of Artificial Sequence: Synthetic oligonucleotide
ugauggaguggcugcugca

SEQ ID NO: 2605653 - RNA, 19 nt, Artificial Sequence
  Description of Artificial Sequence: Synthetic oligonucleotide
cagggagcagucuccuccg

SEQ ID NO: 2605654 - RNA, 19 nt, Artificial Sequence
  Description of Artificial Sequence: Synthetic oligonucleotide
aggcucaaugaagaggcug

SEQ ID NO: 2605655 - RNA, 19 nt, Artificial Sequence
  Description of Artificial Sequence: Synthetic oligonucleotide
gagcacccaagcuuaacaa

SEQ ID NO: 2605656 - RNA, 19 nt, Artificial Sequence
  Description of Artificial Sequence: Synthetic oligonucleotide
ggugguggugucaaccacg

SEQ ID NO: 2605657 - RNA, 19 nt, Artificial Sequence
  Description of Artificial Sequence: Synthetic oligonucleotide
uguggaggucaggucaggc

SEQ ID NO: 2605658 - RNA, 19 nt, Artificial Sequence
  Description of Artificial Sequence: Synthetic oligonucleotide
uggugucaaccacgcaggc

SEQ ID NO: 2605659 - RNA, 19 nt, Artificial Sequence
  Description of Artificial Sequence: Synthetic oligonucleotide
acacacacauacacacagg

SEQ ID NO: 2605660 - RNA, 19 nt, Artificial Sequence
  Description of Artificial Sequence: Synthetic oligonucleotide
gugucaagugcucuuccga

SEQ ID NO: 2605661 - RNA, 19 nt, Artificial Sequence
  Description of Artificial Sequence: Synthetic oligonucleotide
ucuugauggaguggcugcu

SEQ ID NO: 2605662 - RNA, 19 nt, Artificial Sequence
  Description of Artificial Sequence: Synthetic oligonucleotide
caggcggaggacugugacg

SEQ ID NO: 2605663 - RNA, 19 nt, Artificial Sequence
  Description of Artificial Sequence: Synthetic oligonucleotide
ggcucaaugaagaggcugc

SEQ ID NO: 2605664 - RNA, 19 nt, Artificial Sequence
  Description of Artificial Sequence: Synthetic oligonucleotide
gccauugggugucaagugc

SEQ ID NO: 2605665 - RNA, 19 nt, Artificial Sequence
  Description of Artificial Sequence: Synthetic oligonucleotide
gcacccaagcuuaacaagc

SEQ ID NO: 2605666 - RNA, 19 nt, Artificial Sequence
  Description of Artificial Sequence: Synthetic oligonucleotide
ggagcagucuccuccgagc

SEQ ID NO: 2605667 - RNA, 19 nt, Artificial Sequence
  Description of Artificial Sequence: Synthetic oligonucleotide
gagcagucuccuccgagca

SEQ ID NO: 2605668 - RNA, 19 nt, Artificial Sequence
  Description of Artificial Sequence: Synthetic oligonucleotide
acaugccucaccuggcaaa

SEQ ID NO: 2605669 - RNA, 19 nt, Artificial Sequence
  Description of Artificial Sequence: Synthetic oligonucleotide
ugcgguggcgcagggagcc

SEQ ID NO: 2605670 - RNA, 19 nt, Artificial Sequence
  Description of Artificial Sequence: Synthetic oligonucleotide
uccuccgagcaccuuuggu

SEQ ID NO: 2605671 - RNA, 19 nt, Artificial Sequence
  Description of Artificial Sequence: Synthetic oligonucleotide
cucuuucuugauggagugg

SEQ ID NO: 2605672 - RNA, 19 nt, Artificial Sequence
  Description of Artificial Sequence: Synthetic oligonucleotide
aaccacgcaggcggaggac

SEQ ID NO: 2605673 - RNA, 19 nt, Artificial Sequence
  Description of Artificial Sequence: Synthetic oligonucleotide
aguguggaggucaggucag

SEQ ID NO: 2605674 - RNA, 19 nt, Artificial Sequence
  Description of Artificial Sequence: Synthetic oligonucleotide
uucaaagcacaugccucac

SEQ ID NO: 2605675 - RNA, 19 nt, Artificial Sequence
  Description of Artificial Sequence: Synthetic oligonucleotide
acacuagagagcacccaag

SEQ ID NO: 2605676 - RNA, 19 nt, Artificial Sequence
  Description of Artificial Sequence: Synthetic oligonucleotide
gucaggucaggccuccuuc

SEQ ID NO: 2605677 - RNA, 19 nt, Artificial Sequence
  Description of Artificial Sequence: Synthetic oligonucleotide
guguuuggugucccgugug

SEQ ID NO: 2605678 - RNA, 19 nt, Artificial Sequence
  Description of Artificial Sequence: Synthetic oligonucleotide
ccuccgagcaccuuuggug

SEQ ID NO: 2605679 - RNA, 19 nt, Artificial Sequence
  Description of Artificial Sequence: Synthetic oligonucleotide
gaugucaucaagagcuccu

SEQ ID NO: 2605680 - RNA, 19 nt, Artificial Sequence
  Description of Artificial Sequence: Synthetic oligonucleotide
agccgggcagggcugauga

SEQ ID NO: 2605681 - RNA, 19 nt, Artificial Sequence
  Description of Artificial Sequence: Synthetic oligonucleotide
auugggugucaagugcucu

SEQ ID NO: 2605682 - RNA, 19 nt, Artificial Sequence
  Description of Artificial Sequence: Synthetic oligonucleotide
cauugggugucaagugcuc

SEQ ID NO: 2605683 - RNA, 19 nt, Artificial Sequence
  Description of Artificial Sequence: Synthetic oligonucleotide
cuagagagcacccaagcuu

SEQ ID NO: 2605684 - RNA, 19 nt, Artificial Sequence
  Description of Artificial Sequence: Synthetic oligonucleotide
cccugaaugacagugaaga

SEQ ID NO: 2605685 - RNA, 19 nt, Artificial Sequence
  Description of Artificial Sequence: Synthetic oligonucleotide
agcauggaccucaugucca

SEQ ID NO: 2605686 - RNA, 19 nt, Artificial Sequence
  Description of Artificial Sequence: Synthetic oligonucleotide
ggaccucauguccauguug

SEQ ID NO: 2605687 - RNA, 19 nt, Artificial Sequence
  Description of Artificial Sequence: Synthetic oligonucleotide
gaccucauguccauguugu

SEQ ID NO: 2605688 - RNA, 19 nt, Artificial Sequence
  Description of Artificial Sequence: Synthetic oligonucleotide
ugucaaccacgcaggcgga

SEQ ID NO: 2605689 - RNA, 19 nt, Artificial Sequence
  Description of Artificial Sequence: Synthetic oligonucleotide
gaggcugccauuggguguc

SEQ ID NO: 2605690 - RNA, 19 nt, Artificial Sequence
  Description of Artificial Sequence: Synthetic oligonucleotide
gugguggugucaaccacgc

SEQ ID NO: 2605691 - RNA, 19 nt, Artificial Sequence
  Description of Artificial Sequence: Synthetic oligonucleotide
auaggaguguggaggucag

SEQ ID NO: 2605692 - RNA, 19 nt, Artificial Sequence
  Description of Artificial Sequence: Synthetic oligonucleotide
cacccaagcuuaacaagca

SEQ ID NO: 2605693 - RNA, 19 nt, Artificial Sequence
  Description of Artificial Sequence: Synthetic oligonucleotide
gcaucuguuucaaagcaca

SEQ ID NO: 2605694 - RNA, 19 nt, Artificial Sequence
  Description of Artificial Sequence: Synthetic oligonucleotide
gaacacuagagagcaccca

SEQ ID NO: 2605695 - RNA, 19 nt, Artificial Sequence
  Description of Artificial Sequence: Synthetic oligonucleotide
ggugucaaccacgcaggcg

SEQ ID NO: 2605696 - RNA, 19 nt, Artificial Sequence
  Description of Artificial Sequence: Synthetic oligonucleotide
uguccauguuguguuuggu

SEQ ID NO: 2605697 - RNA, 19 nt, Artificial Sequence
  Description of Artificial Sequence: Synthetic oligonucleotide
aggagcuuuccagggagca

SEQ ID NO: 2605698 - RNA, 19 nt, Artificial Sequence
  Description of Artificial Sequence: Synthetic oligonucleotide
gcugaugaggggccugcgg

SEQ ID NO: 2605699 - RNA, 19 nt, Artificial Sequence
  Description of Artificial Sequence: Synthetic oligonucleotide
caggagcuuuccagggagc

SEQ ID NO: 2605700 - RNA, 19 nt, Artificial Sequence
  Description of Artificial Sequence: Synthetic oligonucleotide
ccugcgguggcgcagggag

SEQ ID NO: 2605701 - RNA, 19 nt, Artificial Sequence
  Description of Artificial Sequence: Synthetic oligonucleotide
aggucaggccuccuucccu

SEQ ID NO: 2605702 - RNA, 19 nt, Artificial Sequence
  Description of Artificial Sequence: Synthetic oligonucleotide
gggaguauugggcgcuucc

SEQ ID NO: 2605703 - RNA, 19 nt, Artificial Sequence
  Description of Artificial Sequence: Synthetic oligonucleotide
cuugauggaguggcugcug

SEQ ID NO: 2605704 - RNA, 19 nt, Artificial Sequence
  Description of Artificial Sequence: Synthetic oligonucleotide
agacacacauauacacacu

SEQ ID NO: 2605705 - RNA, 19 nt, Artificial Sequence
  Description of Artificial Sequence: Synthetic oligonucleotide
ggggugagaagaguagcag

SEQ ID NO: 2605706 - RNA, 19 nt, Artificial Sequence
  Description of Artificial Sequence: Synthetic oligonucleotide
gccagcauggaccucaugu

SEQ ID NO: 2605707 - RNA, 19 nt, Artificial Sequence
  Description of Artificial Sequence: Synthetic oligonucleotide
ccgucucucgccagcaugg

SEQ ID NO: 2605708 - RNA, 19 nt, Artificial Sequence
  Description of Artificial Sequence: Synthetic oligonucleotide
uuggugucccgugugcaau

SEQ ID NO: 2605709 - RNA, 19 nt, Artificial Sequence
  Description of Artificial Sequence: Synthetic oligonucleotide
ggcgcagggagccagagcu

SEQ ID NO: 2605710 - RNA, 19 nt, Artificial Sequence
  Description of Artificial Sequence: Synthetic oligonucleotide
uucugcccuuucagguuga

SEQ ID NO: 2605711 - RNA, 19 nt, Artificial Sequence
  Description of Artificial Sequence: Synthetic oligonucleotide
agcaccuuuggugguggug

SEQ ID NO: 2605712 - RNA, 19 nt, Artificial Sequence
  Description of Artificial Sequence: Synthetic oligonucleotide
ggaugucaucaagagcucc

SEQ ID NO: 2605713 - RNA, 19 nt, Artificial Sequence
  Description of Artificial Sequence: Synthetic oligonucleotide
ccgugugcaauuccucugg

SEQ ID NO: 2605714 - RNA, 19 nt, Artificial Sequence
  Description of Artificial Sequence: Synthetic oligonucleotide
aguagcaguuucugcccuu

SEQ ID NO: 2605715 - RNA, 19 nt, Artificial Sequence
  Description of Artificial Sequence: Synthetic oligonucleotide
ggaguauugggcgcuuccc

SEQ ID NO: 2605716 - RNA, 19 nt, Artificial Sequence
  Description of Artificial Sequence: Synthetic oligonucleotide
gacaacccaggaugucauc

SEQ ID NO: 2605717 - RNA, 19 nt, Artificial Sequence
  Description of Artificial Sequence: Synthetic oligonucleotide
uggaccucauguccauguu

SEQ ID NO: 2605718 - RNA, 19 nt, Artificial Sequence
  Description of Artificial Sequence: Synthetic oligonucleotide
gagagcacccaagcuuaac

SEQ ID NO: 2605719 - RNA, 19 nt, Artificial Sequence
  Description of Artificial Sequence: Synthetic oligonucleotide
ggacugugacgagucaucc

SEQ ID NO: 2605720 - RNA, 19 nt, Artificial Sequence
  Description of Artificial Sequence: Synthetic oligonucleotide
cuuucagguugagccgggc

SEQ ID NO: 2605721 - RNA, 19 nt, Artificial Sequence
  Description of Artificial Sequence: Synthetic oligonucleotide
cucgccagcauggaccuca

SEQ ID NO: 2605722 - RNA, 19 nt, Artificial Sequence
  Description of Artificial Sequence: Synthetic oligonucleotide
auacacacucacacacaca

SEQ ID NO: 2605723 - RNA, 19 nt, Artificial Sequence
  Description of Artificial Sequence: Synthetic oligonucleotide
ggcagggcugaugaggggc

SEQ ID NO: 2605724 - RNA, 19 nt, Artificial Sequence
  Description of Artificial Sequence: Synthetic oligonucleotide
cuuuggugguggugucaac

SEQ ID NO: 2605725 - RNA, 19 nt, Artificial Sequence
  Description of Artificial Sequence: Synthetic oligonucleotide
uccgagcaccuuugguggu

SEQ ID NO: 2605726 - RNA, 19 nt, Artificial Sequence
  Description of Artificial Sequence: Synthetic oligonucleotide
gcucuuccgagcugcuggg

SEQ ID NO: 2605727 - RNA, 19 nt, Artificial Sequence
  Description of Artificial Sequence: Synthetic oligonucleotide
guuuggugucccgugugca

SEQ ID NO: 2605728 - RNA, 19 nt, Artificial Sequence
  Description of Artificial Sequence: Synthetic oligonucleotide
uucccugccccaugccccu

SEQ ID NO: 2605729 - RNA, 19 nt, Artificial Sequence
  Description of Artificial Sequence: Synthetic oligonucleotide
gaggucaggucaggccucc

SEQ ID NO: 2605730 - RNA, 19 nt, Artificial Sequence
  Description of Artificial Sequence: Synthetic oligonucleotide
agacaacccaggaugucau

SEQ ID NO: 2605731 - RNA, 19 nt, Artificial Sequence
  Description of Artificial Sequence: Synthetic oligonucleotide
gugucccgugugcaauucc

SEQ ID NO: 2605732 - RNA, 19 nt, Artificial Sequence
  Description of Artificial Sequence: Synthetic oligonucleotide
auggagcuggccaccgaag

SEQ ID NO: 2605733 - RNA, 19 nt, Artificial Sequence
  Description of Artificial Sequence: Synthetic oligonucleotide
gucucucgccagcauggac

SEQ ID NO: 2605734 - RNA, 19 nt, Artificial Sequence
  Description of Artificial Sequence: Synthetic oligonucleotide
cuccuaggauaggagugug

SEQ ID NO: 2605735 - RNA, 19 nt, Artificial Sequence
  Description of Artificial Sequence: Synthetic oligonucleotide
caagagcuccuaggauagg

SEQ ID NO: 2605736 - RNA, 19 nt, Artificial Sequence
  Description of Artificial Sequence: Synthetic oligonucleotide
gggagcagucuccuccgag

SEQ ID NO: 2605737 - RNA, 19 nt, Artificial Sequence
  Description of Artificial Sequence: Synthetic oligonucleotide
caggcggcgccgucucucg

SEQ ID NO: 2605738 - RNA, 19 nt, Artificial Sequence
  Description of Artificial Sequence: Synthetic oligonucleotide
cucaaugaagaggcugcca

SEQ ID NO: 2605739 - RNA, 19 nt, Artificial Sequence
  Description of Artificial Sequence: Synthetic oligonucleotide
uuccgagcugcugggagua

SEQ ID NO: 2605740 - RNA, 19 nt, Artificial Sequence
  Description of Artificial Sequence: Synthetic oligonucleotide
ugguggugucaaccacgca

SEQ ID NO: 2605741 - RNA, 19 nt, Artificial Sequence
  Description of Artificial Sequence: Synthetic oligonucleotide
ucugcccuuucagguugag

SEQ ID NO: 2605742 - RNA, 19 nt, Artificial Sequence
  Description of Artificial Sequence: Synthetic oligonucleotide
ccccacaauaaaucccaag

SEQ ID NO: 2605743 - RNA, 19 nt, Artificial Sequence
  Description of Artificial Sequence: Synthetic oligonucleotide
gacugugacgagucauccu

SEQ ID NO: 2605744 - RNA, 19 nt, Artificial Sequence
  Description of Artificial Sequence: Synthetic oligonucleotide
cugaugaggggccugcggu

SEQ ID NO: 2605745 - RNA, 19 nt, Artificial Sequence
  Description of Artificial Sequence: Synthetic oligonucleotide
gaguagcaguuucugcccu

SEQ ID NO: 2605746 - RNA, 19 nt, Artificial Sequence
  Description of Artificial Sequence: Synthetic oligonucleotide
gggugucaagugcucuucc

SEQ ID NO: 2605747 - RNA, 19 nt, Artificial Sequence
  Description of Artificial Sequence: Synthetic oligonucleotide
ggaguggcugcugcaggcg

SEQ ID NO: 2605748 - RNA, 19 nt, Artificial Sequence
  Description of Artificial Sequence: Synthetic oligonucleotide
ccuaggauaggagugugga

SEQ ID NO: 2605749 - RNA, 19 nt, Artificial Sequence
  Description of Artificial Sequence: Synthetic oligonucleotide
ccauguuguguuugguguc

SEQ ID NO: 2605750 - RNA, 19 nt, Artificial Sequence
  Description of Artificial Sequence: Synthetic oligonucleotide
augucaucaagagcuccua

SEQ ID NO: 2605751 - RNA, 19 nt, Artificial Sequence
  Description of Artificial Sequence: Synthetic oligonucleotide
caacccaggaugucaucaa

SEQ ID NO: 2605752 - RNA, 19 nt, Artificial Sequence
  Description of Artificial Sequence: Synthetic oligonucleotide
cccaagugauguaacacaa

SEQ ID NO: 2605753 - RNA, 19 nt, Artificial Sequence
  Description of Artificial Sequence: Synthetic oligonucleotide
acgagucauccucuuucuu

SEQ ID NO: 2605754 - RNA, 19 nt, Artificial Sequence
  Description of Artificial Sequence: Synthetic oligonucleotide
guuguguuuggugucccgu

SEQ ID NO: 2605755 - RNA, 19 nt, Artificial Sequence
  Description of Artificial Sequence: Synthetic oligonucleotide
cuccuccgagcaccuuugg

SEQ ID NO: 2605756 - RNA, 19 nt, Artificial Sequence
  Description of Artificial Sequence: Synthetic oligonucleotide
cugcccuuucagguugagc

SEQ ID NO: 2605757 - RNA, 19 nt, Artificial Sequence
  Description of Artificial Sequence: Synthetic oligonucleotide
guuucugcccuuucagguu

SEQ ID NO: 2605758 - RNA, 19 nt, Artificial Sequence
  Description of Artificial Sequence: Synthetic oligonucleotide
gucaaccacgcaggcggag

SEQ ID NO: 2605759 - RNA, 19 nt, Artificial Sequence
  Description of Artificial Sequence: Synthetic oligonucleotide
gguugagccgggcagggcu

SEQ ID NO: 2605760 - RNA, 19 nt, Artificial Sequence
  Description of Artificial Sequence: Synthetic oligonucleotide
cauggaccucauguccaug

SEQ ID NO: 2605761 - RNA, 19 nt, Artificial Sequence
  Description of Artificial Sequence: Synthetic oligonucleotide
cuggccaccgaaggugcug

SEQ ID NO: 2605762 - RNA, 19 nt, Artificial Sequence
  Description of Artificial Sequence: Synthetic oligonucleotide
accuuugguggugguguca

SEQ ID NO: 2605763 - RNA, 19 nt, Artificial Sequence
  Description of Artificial Sequence: Synthetic oligonucleotide
caaccacgcaggcggagga

SEQ ID NO: 2605764 - RNA, 19 nt, Artificial Sequence
  Description of Artificial Sequence: Synthetic oligonucleotide
cuuucuugauggaguggcu

SEQ ID NO: 2605765 - RNA, 19 nt, Artificial Sequence
  Description of Artificial Sequence: Synthetic oligonucleotide
uccagggagcagucuccuc

SEQ ID NO: 2605766 - RNA, 19 nt, Artificial Sequence
  Description of Artificial Sequence: Synthetic oligonucleotide
gggugagaagaguagcagu

SEQ ID NO: 2605767 - RNA, 19 nt, Artificial Sequence
  Description of Artificial Sequence: Synthetic oligonucleotide
gaggacugugacgagucau

SEQ ID NO: 2605768 - RNA, 19 nt, Artificial Sequence
  Description of Artificial Sequence: Synthetic oligonucleotide
cccgugugcaauuccucug

SEQ ID NO: 2605769 - RNA, 19 nt, Artificial Sequence
  Description of Artificial Sequence: Synthetic oligonucleotide
ccgggcagggcugaugagg

SEQ ID NO: 2605770 - RNA, 19 nt, Artificial Sequence
  Description of Artificial Sequence: Synthetic oligonucleotide
caugccucaccuggcaaaa

SEQ ID NO: 2605771 - RNA, 19 nt, Artificial Sequence
  Description of Artificial Sequence: Synthetic oligonucleotide
gucaggccuccuucccuac

SEQ ID NO: 2605772 - RNA, 19 nt, Artificial Sequence
  Description of Artificial Sequence: Synthetic oligonucleotide
agggagcagucuccuccga

SEQ ID NO: 2605773 - RNA, 19 nt, Artificial Sequence
  Description of Artificial Sequence: Synthetic oligonucleotide
cuccuucccuacaguaaaa

SEQ ID NO: 2605774 - RNA, 19 nt, Artificial Sequence
  Description of Artificial Sequence: Synthetic oligonucleotide
cuuccgagcugcugggagu

SEQ ID NO: 2605775 - RNA, 19 nt, Artificial Sequence
  Description of Artificial Sequence: Synthetic oligonucleotide
acgcaggcggaggacugug

SEQ ID NO: 2605776 - RNA, 19 nt, Artificial Sequence
  Description of Artificial Sequence: Synthetic oligonucleotide
guggcgcagggagccagag

SEQ ID NO: 2605777 - RNA, 19 nt, Artificial Sequence
  Description of Artificial Sequence: Synthetic oligonucleotide
cucucgccagcauggaccu

SEQ ID NO: 2605778 - RNA, 19 nt, Artificial Sequence
  Description of Artificial Sequence: Synthetic oligonucleotide
cacaugccucaccuggcaa

SEQ ID NO: 2605779 - RNA, 19 nt, Artificial Sequence
  Description of Artificial Sequence: Synthetic oligonucleotide
ggcggcgccgucucucgcc

SEQ ID NO: 2605780 - RNA, 19 nt, Artificial Sequence
  Description of Artificial Sequence: Synthetic oligonucleotide
cugugacgagucauccucu

SEQ ID NO: 2605781 - RNA, 19 nt, Artificial Sequence
  Description of Artificial Sequence: Synthetic oligonucleotide
gucccgugugcaauuccuc

SEQ ID NO: 2605782 - RNA, 19 nt, Artificial Sequence
  Description of Artificial Sequence: Synthetic oligonucleotide
gugcucuuccgagcugcug

SEQ ID NO: 2605783 - RNA, 19 nt, Artificial Sequence
  Description of Artificial Sequence: Synthetic oligonucleotide
gccauggagcuggccaccg

SEQ ID NO: 2605784 - RNA, 19 nt, Artificial Sequence
  Description of Artificial Sequence: Synthetic oligonucleotide
ggaggacugugacgaguca

SEQ ID NO: 2605785 - RNA, 19 nt, Artificial Sequence
  Description of Artificial Sequence: Synthetic oligonucleotide
gucuccuccgagcaccuuu

SEQ ID NO: 2605786 - RNA, 19 nt, Artificial Sequence
  Description of Artificial Sequence: Synthetic oligonucleotide
ucgccagcauggaccucau

SEQ ID NO: 2605787 - RNA, 19 nt, Artificial Sequence
  Description of Artificial Sequence: Synthetic oligonucleotide
ggcgccgucucucgccagc

SEQ ID NO: 2605788 - RNA, 19 nt, Artificial Sequence
  Description of Artificial Sequence: Synthetic oligonucleotide
ccaagugauguaacacaaa

SEQ ID NO: 2605789 - RNA, 19 nt, Artificial Sequence
  Description of Artificial Sequence: Synthetic oligonucleotide
cugcaggcggcgccgucuc

SEQ ID NO: 2605790 - RNA, 19 nt, Artificial Sequence
  Description of Artificial Sequence: Synthetic oligonucleotide
gagccgggcagggcugaug

SEQ ID NO: 2605791 - RNA, 19 nt, Artificial Sequence
  Description of Artificial Sequence: Synthetic oligonucleotide
ggucaggccuccuucccua

SEQ ID NO: 2605792 - RNA, 19 nt, Artificial Sequence
  Description of Artificial Sequence: Synthetic oligonucleotide
acacacucacacacacaua

SEQ ID NO: 2605793 - RNA, 19 nt, Artificial Sequence
  Description of Artificial Sequence: Synthetic oligonucleotide
agagagcacccaagcuuaa

SEQ ID NO: 2605794 - RNA, 19 nt, Artificial Sequence
  Description of Artificial Sequence: Synthetic oligonucleotide
ugcugcaggcggcgccguc

SEQ ID NO: 2605795 - RNA, 19 nt, Artificial Sequence
  Description of Artificial Sequence: Synthetic oligonucleotide
ggcugaugaggggccugcg

SEQ ID NO: 2605796 - RNA, 19 nt, Artificial Sequence
  Description of Artificial Sequence: Synthetic oligonucleotide
ggagcuggccaccgaaggu

SEQ ID NO: 2605797 - RNA, 19 nt, Artificial Sequence
  Description of Artificial Sequence: Synthetic oligonucleotide
ggcggaggacugugacgag

SEQ ID NO: 2605798 - RNA, 19 nt, Artificial Sequence
  Description of Artificial Sequence: Synthetic oligonucleotide
ggugucccgugugcaauuc

SEQ ID NO: 2605799 - RNA, 19 nt, Artificial Sequence
  Description of Artificial Sequence: Synthetic oligonucleotide
gaaugacagugaagacccu

SEQ ID NO: 2605800 - RNA, 19 nt, Artificial Sequence
  Description of Artificial Sequence: Synthetic oligonucleotide
ggauaggaguguggagguc

SEQ ID NO: 2605801 - RNA, 19 nt, Artificial Sequence
  Description of Artificial Sequence: Synthetic oligonucleotide
ccacgcaggcggaggacug

SEQ ID NO: 2605802 - RNA, 19 nt, Artificial Sequence
  Description of Artificial Sequence: Synthetic oligonucleotide
aggggccugcgguggcgca

SEQ ID NO: 2605803 - RNA, 19 nt, Artificial Sequence
  Description of Artificial Sequence: Synthetic oligonucleotide
ggaggucaggucaggccuc

SEQ ID NO: 2605804 - RNA, 19 nt, Artificial Sequence
  Description of Artificial Sequence: Synthetic oligonucleotide
gugacgagucauccucuuu

SEQ ID NO: 2605805 - RNA, 19 nt, Artificial Sequence
  Description of Artificial Sequence: Synthetic oligonucleotide
ggccauggagcuggccacc

SEQ ID NO: 2605806 - RNA, 19 nt, Artificial Sequence
  Description of Artificial Sequence: Synthetic oligonucleotide
gaggcucaaugaagaggcu

SEQ ID NO: 2605807 - RNA, 19 nt, Artificial Sequence
  Description of Artificial Sequence: Synthetic oligonucleotide
gggccugcgguggcgcagg

SEQ ID NO: 2605808 - RNA, 19 nt, Artificial Sequence
  Description of Artificial Sequence: Synthetic oligonucleotide
cgagcaccuuugguggugg

SEQ ID NO: 2605809 - RNA, 19 nt, Artificial Sequence
  Description of Artificial Sequence: Synthetic oligonucleotide
ccucauguccauguugugu

SEQ ID NO: 2605810 - RNA, 19 nt, Artificial Sequence
  Description of Artificial Sequence: Synthetic oligonucleotide
uccgagcugcugggaguau

SEQ ID NO: 2605811 - RNA, 19 nt, Artificial Sequence
  Description of Artificial Sequence: Synthetic oligonucleotide
ccuuuggugguggugucaa

SEQ ID NO: 2605812 - RNA, 19 nt, Artificial Sequence
  Description of Artificial Sequence: Synthetic oligonucleotide
cucuuccgagcugcuggga

SEQ ID NO: 2605813 - RNA, 19 nt, Artificial Sequence
  Description of Artificial Sequence: Synthetic oligonucleotide
ccgagcaccuuugguggug

SEQ ID NO: 2605814 - RNA, 19 nt, Artificial Sequence
  Description of Artificial Sequence: Synthetic oligonucleotide
ugagccgggcagggcugau

SEQ ID NO: 2605815 - RNA, 19 nt, Artificial Sequence
  Description of Artificial Sequence: Synthetic oligonucleotide
gcugggaguauugggcgcu

SEQ ID NO: 2605816 - RNA, 19 nt, Artificial Sequence
  Description of Artificial Sequence: Synthetic oligonucleotide
aggucaggucaggccuccu

SEQ ID NO: 2605817 - RNA, 19 nt, Artificial Sequence
  Description of Artificial Sequence: Synthetic oligonucleotide
ucucgccagcauggaccuc

SEQ ID NO: 2605818 - RNA, 19 nt, Artificial Sequence
  Description of Artificial Sequence: Synthetic oligonucleotide
gccgggcagggcugaugag

SEQ ID NO: 2605819 - RNA, 19 nt, Artificial Sequence
  Description of Artificial Sequence: Synthetic oligonucleotide
ggggccugcgguggcgcag

SEQ ID NO: 2605820 - RNA, 19 nt, Artificial Sequence
  Description of Artificial Sequence: Synthetic oligonucleotide
gcauggaccucauguccau

SEQ ID NO: 2605821 - RNA, 19 nt, Artificial Sequence
  Description of Artificial Sequence: Synthetic oligonucleotide
cagucuccuccgagcaccu

SEQ ID NO: 2605822 - RNA, 19 nt, Artificial Sequence
  Description of Artificial Sequence: Synthetic oligonucleotide
ggccugcgguggcgcaggg

SEQ ID NO: 2605823 - RNA, 19 nt, Artificial Sequence
  Description of Artificial Sequence: Synthetic oligonucleotide
agucuccuccgagcaccuu

SEQ ID NO: 2605824 - RNA, 19 nt, Artificial Sequence
  Description of Artificial Sequence: Synthetic oligonucleotide
ggucaggucaggccuccuu

SEQ ID NO: 2605825 - RNA, 19 nt, Artificial Sequence
  Description of Artificial Sequence: Synthetic oligonucleotide
gcggcgccgucucucgcca

SEQ ID NO: 2605826 - RNA, 19 nt, Artificial Sequence
  Description of Artificial Sequence: Synthetic oligonucleotide
gcuuaacaagcagccuccu

SEQ ID NO: 2605827 - RNA, 19 nt, Artificial Sequence
  Description of Artificial Sequence: Synthetic oligonucleotide
gcgcagggagccagagcug

SEQ ID NO: 2605828 - RNA, 19 nt, Artificial Sequence
  Description of Artificial Sequence: Synthetic oligonucleotide
gguggcgcagggagccaga

SEQ ID NO: 2605829 - RNA, 19 nt, Artificial Sequence
  Description of Artificial Sequence: Synthetic oligonucleotide
aggcugccauuggguguca

SEQ ID NO: 2605830 - RNA, 19 nt, Artificial Sequence
  Description of Artificial Sequence: Synthetic oligonucleotide
gcugcaggcggcgccgucu

SEQ ID NO: 2605831 - RNA, 19 nt, Artificial Sequence
  Description of Artificial Sequence: Synthetic oligonucleotide
ggagcugaggaggcucaau

SEQ ID NO: 2605832 - RNA, 19 nt, Artificial Sequence
  Description of Artificial Sequence: Synthetic oligonucleotide
gcuuuccagggagcagucu

SEQ ID NO: 2605833 - RNA, 19 nt, Artificial Sequence
  Description of Artificial Sequence: Synthetic oligonucleotide
cacgcaggcggaggacugu

SEQ ID NO: 2605834 - RNA, 19 nt, Artificial Sequence
  Description of Artificial Sequence: Synthetic oligonucleotide
gcgccgucucucgccagca

SEQ ID NO: 2605835 - RNA, 19 nt, Artificial Sequence
  Description of Artificial Sequence: Synthetic oligonucleotide
cugggaguauugggcgcuu

SEQ ID NO: 2605836 - RNA, 19 nt, Artificial Sequence
  Description of Artificial Sequence: Synthetic oligonucleotide
gccugcgguggcgcaggga

SEQ ID NO: 2605837 - RNA, 19 nt, Artificial Sequence
  Description of Artificial Sequence: Synthetic oligonucleotide
gcuggccaccgaaggugcu

SEQ ID NO: 2605838 - RNA, 19 nt, Artificial Sequence
  Description of Artificial Sequence: Synthetic oligonucleotide
cgccagcauggaccucaug

SEQ ID NO: 2605839 - RNA, 19 nt, Artificial Sequence
  Description of Artificial Sequence: Synthetic oligonucleotide
cgucucucgccagcaugga

SEQ ID NO: 2605840 - RNA, 19 nt, Artificial Sequence
  Description of Artificial Sequence: Synthetic oligonucleotide
gcgguggcgcagggagcca

SEQ ID NO: 2605841 - RNA, 19 nt, Artificial Sequence
  Description of Artificial Sequence: Synthetic oligonucleotide
cugcugcaggcggcgccgu

SEQ ID NO: 2605842 - RNA, 19 nt, Artificial Sequence
  Description of Artificial Sequence: Synthetic oligonucleotide
cggcgccgucucucgccag

SEQ ID NO: 2605843 - RNA, 19 nt, Artificial Sequence
  Description of Artificial Sequence: Synthetic oligonucleotide
ccgagcugcugggaguauu

SEQ ID NO: 2605844 - RNA, 19 nt, Artificial Sequence
  Description of Artificial Sequence: Synthetic oligonucleotide
cgccgucucucgccagcau

SEQ ID NO: 2605845 - RNA, 19 nt, Artificial Sequence
  Description of Artificial Sequence: Synthetic oligonucleotide
ugaacugaggacaacaguc

SEQ ID NO: 2605846 - RNA, 19 nt, Artificial Sequence
  Description of Artificial Sequence: Synthetic oligonucleotide
ugcuguagaaccaagcucu

SEQ ID NO: 2605847 - RNA, 19 nt, Artificial Sequence
  Description of Artificial Sequence: Synthetic oligonucleotide
cuuugcaacuccauaagcc

SEQ ID NO: 2605848 - RNA, 19 nt, Artificial Sequence
  Description of Artificial Sequence: Synthetic oligonucleotide
uuugcaacuccauaagccc

SEQ ID NO: 2605849 - RNA, 19 nt, Artificial Sequence
  Description of Artificial Sequence: Synthetic oligonucleotide
aggacaacaguccuauuac

SEQ ID NO: 2605850 - RNA, 19 nt, Artificial Sequence
  Description of Artificial Sequence: Synthetic oligonucleotide
guugaagccugccauaggg

SEQ ID NO: 2605851 - RNA, 19 nt, Artificial Sequence
  Description of Artificial Sequence: Synthetic oligonucleotide
cuuauuccagcuucggugg

SEQ ID NO: 2605852 - RNA, 19 nt, Artificial Sequence
  Description of Artificial Sequence: Synthetic oligonucleotide
uguccugugggucagcugc

SEQ ID NO: 2605853 - RNA, 19 nt, Artificial Sequence
  Description of Artificial Sequence: Synthetic oligonucleotide
acuccauaagcccuuuggc

SEQ ID NO: 2605854 - RNA, 19 nt, Artificial Sequence
  Description of Artificial Sequence: Synthetic oligonucleotide
gacaacaguccuauuaccg

SEQ ID NO: 2605855 - RNA, 19 nt, Artificial Sequence
  Description of Artificial Sequence: Synthetic oligonucleotide
uuugucaccaagacagggc

SEQ ID NO: 2605856 - RNA, 19 nt, Artificial Sequence
  Description of Artificial Sequence: Synthetic oligonucleotide
ucugcauccuggaauaugu

SEQ ID NO: 2605857 - RNA, 19 nt, Artificial Sequence
  Description of Artificial Sequence: Synthetic oligonucleotide
agaaagugcucugagcccc

SEQ ID NO: 2605858 - RNA, 19 nt, Artificial Sequence
  Description of Artificial Sequence: Synthetic oligonucleotide
acugcgcuggaacaggccc

SEQ ID NO: 2605859 - RNA, 19 nt, Artificial Sequence
  Description of Artificial Sequence: Synthetic oligonucleotide
ucugaacugaggacaacag

SEQ ID NO: 2605860 - RNA, 19 nt, Artificial Sequence
  Description of Artificial Sequence: Synthetic oligonucleotide
cucagcuacacggugaucc

SEQ ID NO: 2605861 - RNA, 19 nt, Artificial Sequence
  Description of Artificial Sequence: Synthetic oligonucleotide
aagucccugcaauaucagg

SEQ ID NO: 2605862 - RNA, 19 nt, Artificial Sequence
  Description of Artificial Sequence: Synthetic oligonucleotide
uccauaagcccuuuggcaa

SEQ ID NO: 2605863 - RNA, 19 nt, Artificial Sequence
  Description of Artificial Sequence: Synthetic oligonucleotide
uugaagccugccauagggg

SEQ ID NO: 2605864 - RNA, 19 nt, Artificial Sequence
  Description of Artificial Sequence: Synthetic oligonucleotide
uucccagaugaucugggcc

SEQ ID NO: 2605865 - RNA, 19 nt, Artificial Sequence
  Description of Artificial Sequence: Synthetic oligonucleotide
ucccagaugaucugggccc

SEQ ID NO: 2605866 - RNA, 19 nt, Artificial Sequence
  Description of Artificial Sequence: Synthetic oligonucleotide
uucuuagggccucagcuac

SEQ ID NO: 2605867 - RNA, 19 nt, Artificial Sequence
  Description of Artificial Sequence: Synthetic oligonucleotide
ucugaucugaacugaggac

SEQ ID NO: 2605868 - RNA, 19 nt, Artificial Sequence
  Description of Artificial Sequence: Synthetic oligonucleotide
gagucagugucugaucugg

SEQ ID NO: 2605869 - RNA, 19 nt, Artificial Sequence
  Description of Artificial Sequence: Synthetic oligonucleotide
aacugaggacaacaguccu

SEQ ID NO: 2605870 - RNA, 19 nt, Artificial Sequence
  Description of Artificial Sequence: Synthetic oligonucleotide
ucugcaccaacucugcauc

SEQ ID NO: 2605871 - RNA, 19 nt, Artificial Sequence
  Description of Artificial Sequence: Synthetic oligonucleotide
ggaguucccaaacugcucg

SEQ ID NO: 2605872 - RNA, 19 nt, Artificial Sequence
  Description of Artificial Sequence: Synthetic oligonucleotide
auaucaggggaggaccucc

SEQ ID NO: 2605873 - RNA, 19 nt, Artificial Sequence
  Description of Artificial Sequence: Synthetic oligonucleotide
acaacaguccuauuaccgu

SEQ ID NO: 2605874 - RNA, 19 nt, Artificial Sequence
  Description of Artificial Sequence: Synthetic oligonucleotide
gcuuauuccagcuucggug

SEQ ID NO: 2605875 - RNA, 19 nt, Artificial Sequence
  Description of Artificial Sequence: Synthetic oligonucleotide
uggaauauguuggcagagg

SEQ ID NO: 2605876 - RNA, 19 nt, Artificial Sequence
  Description of Artificial Sequence: Synthetic oligonucleotide
auuaccguguuugucacca

SEQ ID NO: 2605877 - RNA, 19 nt, Artificial Sequence
  Description of Artificial Sequence: Synthetic oligonucleotide
gagaaagugcucugagccc

SEQ ID NO: 2605878 - RNA, 19 nt, Artificial Sequence
  Description of Artificial Sequence: Synthetic oligonucleotide
aauaucaggggaggaccuc

SEQ ID NO: 2605879 - RNA, 19 nt, Artificial Sequence
  Description of Artificial Sequence: Synthetic oligonucleotide
aucaccggugcucugguug

SEQ ID NO: 2605880 - RNA, 19 nt, Artificial Sequence
  Description of Artificial Sequence: Synthetic oligonucleotide
guuugucaccaagacaggg

SEQ ID NO: 2605881 - RNA, 19 nt, Artificial Sequence
  Description of Artificial Sequence: Synthetic oligonucleotide
acugagucagugucugauc

SEQ ID NO: 2605882 - RNA, 19 nt, Artificial Sequence
  Description of Artificial Sequence: Synthetic oligonucleotide
caaagucccugcaauauca

SEQ ID NO: 2605883 - RNA, 19 nt, Artificial Sequence
  Description of Artificial Sequence: Synthetic oligonucleotide
uaccguguuugucaccaag

SEQ ID NO: 2605884 - RNA, 19 nt, Artificial Sequence
  Description of Artificial Sequence: Synthetic oligonucleotide
cucuuugcaacuccauaag

SEQ ID NO: 2605885 - RNA, 19 nt, Artificial Sequence
  Description of Artificial Sequence: Synthetic oligonucleotide
ugugggacccggcuuauuc

SEQ ID NO: 2605886 - RNA, 19 nt, Artificial Sequence
  Description of Artificial Sequence: Synthetic oligonucleotide
ugaucugaacugaggacaa

SEQ ID NO: 2605887 - RNA, 19 nt, Artificial Sequence
  Description of Artificial Sequence: Synthetic oligonucleotide
agaaccaagcucuggugcu

SEQ ID NO: 2605888 - RNA, 19 nt, Artificial Sequence
  Description of Artificial Sequence: Synthetic oligonucleotide
gucccugcaauaucagggg

SEQ ID NO: 2605889 - RNA, 19 nt, Artificial Sequence
  Description of Artificial Sequence: Synthetic oligonucleotide
cuucgguggacucuggcac

SEQ ID NO: 2605890 - RNA, 19 nt, Artificial Sequence
  Description of Artificial Sequence: Synthetic oligonucleotide
uugcaacuccauaagcccu

SEQ ID NO: 2605891 - RNA, 19 nt, Artificial Sequence
  Description of Artificial Sequence: Synthetic oligonucleotide
agaggccugcuuucguccc

SEQ ID NO: 2605892 - RNA, 19 nt, Artificial Sequence
  Description of Artificial Sequence: Synthetic oligonucleotide
cucucagccggccacagug

SEQ ID NO: 2605893 - RNA, 19 nt, Artificial Sequence
  Description of Artificial Sequence: Synthetic oligonucleotide
ugcaauaucaggggaggac

SEQ ID NO: 2605894 - RNA, 19 nt, Artificial Sequence
  Description of Artificial Sequence: Synthetic oligonucleotide
uccugcgcagccuucuuag

SEQ ID NO: 2605895 - RNA, 19 nt, Artificial Sequence
  Description of Artificial Sequence: Synthetic oligonucleotide
auagggguggcucgcucac

SEQ ID NO: 2605896 - RNA, 19 nt, Artificial Sequence
  Description of Artificial Sequence: Synthetic oligonucleotide
caacaguccuauuaccgug

SEQ ID NO: 2605897 - RNA, 19 nt, Artificial Sequence
  Description of Artificial Sequence: Synthetic oligonucleotide
cuauuaccguguuugucac

SEQ ID NO: 2605898 - RNA, 19 nt, Artificial Sequence
  Description of Artificial Sequence: Synthetic oligonucleotide
guucccaaacugcucgccg

SEQ ID NO: 2605899 - RNA, 19 nt, Artificial Sequence
  Description of Artificial Sequence: Synthetic oligonucleotide
cauccuggaauauguuggc

SEQ ID NO: 2605900 - RNA, 19 nt, Artificial Sequence
  Description of Artificial Sequence: Synthetic oligonucleotide
gagguaaccugugggaccc

SEQ ID NO: 2605901 - RNA, 19 nt, Artificial Sequence
  Description of Artificial Sequence: Synthetic oligonucleotide
augucaguggugcuguccu

SEQ ID NO: 2605902 - RNA, 19 nt, Artificial Sequence
  Description of Artificial Sequence: Synthetic oligonucleotide
ucgccggaagccaugucag

SEQ ID NO: 2605903 - RNA, 19 nt, Artificial Sequence
  Description of Artificial Sequence: Synthetic oligonucleotide
aacgcagccgggauccugg

SEQ ID NO: 2605904 - RNA, 19 nt, Artificial Sequence
  Description of Artificial Sequence: Synthetic oligonucleotide
aguugaagccugccauagg

SEQ ID NO: 2605905 - RNA, 19 nt, Artificial Sequence
  Description of Artificial Sequence: Synthetic oligonucleotide
ugcacauucccagaugauc

SEQ ID NO: 2605906 - RNA, 19 nt, Artificial Sequence
  Description of Artificial Sequence: Synthetic oligonucleotide
caccccuucacugagucag

SEQ ID NO: 2605907 - RNA, 19 nt, Artificial Sequence
  Description of Artificial Sequence: Synthetic oligonucleotide
uaaccugugggacccggcu

SEQ ID NO: 2605908 - RNA, 19 nt, Artificial Sequence
  Description of Artificial Sequence: Synthetic oligonucleotide
aguuccccggagaaagugc

SEQ ID NO: 2605909 - RNA, 19 nt, Artificial Sequence
  Description of Artificial Sequence: Synthetic oligonucleotide
uggcucgcucaccacagag

SEQ ID NO: 2605910 - RNA, 19 nt, Artificial Sequence
  Description of Artificial Sequence: Synthetic oligonucleotide
aguucccaaacugcucgcc

SEQ ID NO: 2605911 - RNA, 19 nt, Artificial Sequence
  Description of Artificial Sequence: Synthetic oligonucleotide
aaagucccugcaauaucag

SEQ ID NO: 2605912 - RNA, 19 nt, Artificial Sequence
  Description of Artificial Sequence: Synthetic oligonucleotide
ugagucagugucugaucug

SEQ ID NO: 2605913 - RNA, 19 nt, Artificial Sequence
  Description of Artificial Sequence: Synthetic oligonucleotide
ucaggggaggaccucccca

SEQ ID NO: 2605914 - RNA, 19 nt, Artificial Sequence
  Description of Artificial Sequence: Synthetic oligonucleotide
cuccauaagcccuuuggca

SEQ ID NO: 2605915 - RNA, 19 nt, Artificial Sequence
  Description of Artificial Sequence: Synthetic oligonucleotide
ugucaccaagacagggccc

SEQ ID NO: 2605916 - RNA, 19 nt, Artificial Sequence
  Description of Artificial Sequence: Synthetic oligonucleotide
cagaacgcagccgggaucc

SEQ ID NO: 2605917 - RNA, 19 nt, Artificial Sequence
  Description of Artificial Sequence: Synthetic oligonucleotide
uggaacgcagccacaguuc

SEQ ID NO: 2605918 - RNA, 19 nt, Artificial Sequence
  Description of Artificial Sequence: Synthetic oligonucleotide
aacaguccuauuaccgugu

SEQ ID NO: 2605919 - RNA, 19 nt, Artificial Sequence
  Description of Artificial Sequence: Synthetic oligonucleotide
acucuggcacuuguccucc

SEQ ID NO: 2605920 - RNA, 19 nt, Artificial Sequence
  Description of Artificial Sequence: Synthetic oligonucleotide
cucugagccccucaacagc

SEQ ID NO: 2605921 - RNA, 19 nt, Artificial Sequence
  Description of Artificial Sequence: Synthetic oligonucleotide
ccuauuaccguguuuguca

SEQ ID NO: 2605922 - RNA, 19 nt, Artificial Sequence
  Description of Artificial Sequence: Synthetic oligonucleotide
uaucaggggaggaccuccc

SEQ ID NO: 2605923 - RNA, 19 nt, Artificial Sequence
  Description of Artificial Sequence: Synthetic oligonucleotide
ugaucugguggagguaacc

SEQ ID NO: 2605924 - RNA, 19 nt, Artificial Sequence
  Description of Artificial Sequence: Synthetic oligonucleotide
ucaccggugcucugguugc

SEQ ID NO: 2605925 - RNA, 19 nt, Artificial Sequence
  Description of Artificial Sequence: Synthetic oligonucleotide
uauuaccguguuugucacc

SEQ ID NO: 2605926 - RNA, 19 nt, Artificial Sequence
  Description of Artificial Sequence: Synthetic oligonucleotide
uggagguaaccugugggac

SEQ ID NO: 2605927 - RNA, 19 nt, Artificial Sequence
  Description of Artificial Sequence: Synthetic oligonucleotide
cuggaauauguuggcagag

SEQ ID NO: 2605928 - RNA, 19 nt, Artificial Sequence
  Description of Artificial Sequence: Synthetic oligonucleotide
ucaguugaagccugccaua

SEQ ID NO: 2605929 - RNA, 19 nt, Artificial Sequence
  Description of Artificial Sequence: Synthetic oligonucleotide
ugggacccggcuuauucca

SEQ ID NO: 2605930 - RNA, 19 nt, Artificial Sequence
  Description of Artificial Sequence: Synthetic oligonucleotide
uuagggccucagcuacacg

SEQ ID NO: 2605931 - RNA, 19 nt, Artificial Sequence
  Description of Artificial Sequence: Synthetic oligonucleotide
gcaauaucaggggaggacc

SEQ ID NO: 2605932 - RNA, 19 nt, Artificial Sequence
  Description of Artificial Sequence: Synthetic oligonucleotide
aggcgggcagaacgcagcc

SEQ ID NO: 2605933 - RNA, 19 nt, Artificial Sequence
  Description of Artificial Sequence: Synthetic oligonucleotide
ucccugcaauaucagggga

SEQ ID NO: 2605934 - RNA, 19 nt, Artificial Sequence
  Description of Artificial Sequence: Synthetic oligonucleotide
uuauuccagcuucggugga

SEQ ID NO: 2605935 - RNA, 19 nt, Artificial Sequence
  Description of Artificial Sequence: Synthetic oligonucleotide
caagcucuggugcucucag

SEQ ID NO: 2605936 - RNA, 19 nt, Artificial Sequence
  Description of Artificial Sequence: Synthetic oligonucleotide
cugccauagggguggcucg

SEQ ID NO: 2605937 - RNA, 19 nt, Artificial Sequence
  Description of Artificial Sequence: Synthetic oligonucleotide
caugucaguggugcugucc

SEQ ID NO: 2605938 - RNA, 19 nt, Artificial Sequence
  Description of Artificial Sequence: Synthetic oligonucleotide
guggagguaaccuguggga

SEQ ID NO: 2605939 - RNA, 19 nt, Artificial Sequence
  Description of Artificial Sequence: Synthetic oligonucleotide
ggaacgcagccacaguucc

SEQ ID NO: 2605940 - RNA, 19 nt, Artificial Sequence
  Description of Artificial Sequence: Synthetic oligonucleotide
ggagguaaccugugggacc

SEQ ID NO: 2605941 - RNA, 19 nt, Artificial Sequence
  Description of Artificial Sequence: Synthetic oligonucleotide
uggccgagccaccuggaac

SEQ ID NO: 2605942 - RNA, 19 nt, Artificial Sequence
  Description of Artificial Sequence: Synthetic oligonucleotide
cacauucccagaugaucug

SEQ ID NO: 2605943 - RNA, 19 nt, Artificial Sequence
  Description of Artificial Sequence: Synthetic oligonucleotide
cuggcacuuguccuccggg

SEQ ID NO: 2605944 - RNA, 19 nt, Artificial Sequence
  Description of Artificial Sequence: Synthetic oligonucleotide
ucccaaacugcucgccgga

SEQ ID NO: 2605945 - RNA, 19 nt, Artificial Sequence
  Description of Artificial Sequence: Synthetic oligonucleotide
aggaccuccccaccccuuc

SEQ ID NO: 2605946 - RNA, 19 nt, Artificial Sequence
  Description of Artificial Sequence: Synthetic oligonucleotide
uccuauuaccguguuuguc

SEQ ID NO: 2605947 - RNA, 19 nt, Artificial Sequence
  Description of Artificial Sequence: Synthetic oligonucleotide
aggggaggaccuccccacc

SEQ ID NO: 2605948 - RNA, 19 nt, Artificial Sequence
  Description of Artificial Sequence: Synthetic oligonucleotide
uuuuccugcgcagccuucu

SEQ ID NO: 2605949 - RNA, 19 nt, Artificial Sequence
  Description of Artificial Sequence: Synthetic oligonucleotide
agccccucaacagccaauc

SEQ ID NO: 2605950 - RNA, 19 nt, Artificial Sequence
  Description of Artificial Sequence: Synthetic oligonucleotide
acggugauccccugcacau

SEQ ID NO: 2605951 - RNA, 19 nt, Artificial Sequence
  Description of Artificial Sequence: Synthetic oligonucleotide
guccccgggacucaguuga

SEQ ID NO: 2605952 - RNA, 19 nt, Artificial Sequence
  Description of Artificial Sequence: Synthetic oligonucleotide
ggacaacaguccuauuacc

SEQ ID NO: 2605953 - RNA, 19 nt, Artificial Sequence
  Description of Artificial Sequence: Synthetic oligonucleotide
cuuguccuccgggaguucc

SEQ ID NO: 2605954 - RNA, 19 nt, Artificial Sequence
  Description of Artificial Sequence: Synthetic oligonucleotide
guugccuuggcugcccgag

SEQ ID NO: 2605955 - RNA, 19 nt, Artificial Sequence
  Description of Artificial Sequence: Synthetic oligonucleotide
gugucugaucugguggagg

SEQ ID NO: 2605956 - RNA, 19 nt, Artificial Sequence
  Description of Artificial Sequence: Synthetic oligonucleotide
ugggucagcugcuguagaa

SEQ ID NO: 2605957 - RNA, 19 nt, Artificial Sequence
  Description of Artificial Sequence: Synthetic oligonucleotide
gcugggguccccaucaccg

SEQ ID NO: 2605958 - RNA, 19 nt, Artificial Sequence
  Description of Artificial Sequence: Synthetic oligonucleotide
accuggaacgcagccacag

SEQ ID NO: 2605959 - RNA, 19 nt, Artificial Sequence
  Description of Artificial Sequence: Synthetic oligonucleotide
agugcucugagccccucaa

SEQ ID NO: 2605960 - RNA, 19 nt, Artificial Sequence
  Description of Artificial Sequence: Synthetic oligonucleotide
gacucaguugaagccugcc

SEQ ID NO: 2605961 - RNA, 19 nt, Artificial Sequence
  Description of Artificial Sequence: Synthetic oligonucleotide
aaagugcucugagccccuc

SEQ ID NO: 2605962 - RNA, 19 nt, Artificial Sequence
  Description of Artificial Sequence: Synthetic oligonucleotide
cucgccggaagccauguca

SEQ ID NO: 2605963 - RNA, 19 nt, Artificial Sequence
  Description of Artificial Sequence: Synthetic oligonucleotide
gcgggcagaacgcagccgg

SEQ ID NO: 2605964 - RNA, 19 nt, Artificial Sequence
  Description of Artificial Sequence: Synthetic oligonucleotide
uauuccagcuucgguggac

SEQ ID NO: 2605965 - RNA, 19 nt, Artificial Sequence
  Description of Artificial Sequence: Synthetic oligonucleotide
cauaagcccuuuggcaaag

SEQ ID NO: 2605966 - RNA, 19 nt, Artificial Sequence
  Description of Artificial Sequence: Synthetic oligonucleotide
cuuggcugcccgaggcggg

SEQ ID NO: 2605967 - RNA, 19 nt, Artificial Sequence
  Description of Artificial Sequence: Synthetic oligonucleotide
aacugcucgccggaagcca

SEQ ID NO: 2605968 - RNA, 19 nt, Artificial Sequence
  Description of Artificial Sequence: Synthetic oligonucleotide
ugguugccuuggcugcccg

SEQ ID NO: 2605969 - RNA, 19 nt, Artificial Sequence
  Description of Artificial Sequence: Synthetic oligonucleotide
ugagccccucaacagccaa

SEQ ID NO: 2605970 - RNA, 19 nt, Artificial Sequence
  Description of Artificial Sequence: Synthetic oligonucleotide
gaacaggcccuggaucugc

SEQ ID NO: 2605971 - RNA, 19 nt, Artificial Sequence
  Description of Artificial Sequence: Synthetic oligonucleotide
ggugauccccugcacauuc

SEQ ID NO: 2605972 - RNA, 19 nt, Artificial Sequence
  Description of Artificial Sequence: Synthetic oligonucleotide
ugcaccaacucugcauccu

SEQ ID NO: 2605973 - RNA, 19 nt, Artificial Sequence
  Description of Artificial Sequence: Synthetic oligonucleotide
cuacacggugauccccugc

SEQ ID NO: 2605974 - RNA, 19 nt, Artificial Sequence
  Description of Artificial Sequence: Synthetic oligonucleotide
cugcaccaacucugcaucc

SEQ ID NO: 2605975 - RNA, 19 nt, Artificial Sequence
  Description of Artificial Sequence: Synthetic oligonucleotide
uggcagaggccugcuuucg

SEQ ID NO: 2605976 - RNA, 19 nt, Artificial Sequence
  Description of Artificial Sequence: Synthetic oligonucleotide
ugucaguggugcuguccug

SEQ ID NO: 2605977 - RNA, 19 nt, Artificial Sequence
  Description of Artificial Sequence: Synthetic oligonucleotide
uggcaaagucccugcaaua

SEQ ID NO: 2605978 - RNA, 19 nt, Artificial Sequence
  Description of Artificial Sequence: Synthetic oligonucleotide
cucugcauccuggaauaug

SEQ ID NO: 2605979 - RNA, 19 nt, Artificial Sequence
  Description of Artificial Sequence: Synthetic oligonucleotide
cuucuuagggccucagcua

SEQ ID NO: 2605980 - RNA, 19 nt, Artificial Sequence
  Description of Artificial Sequence: Synthetic oligonucleotide
accguguuugucaccaaga

SEQ ID NO: 2605981 - RNA, 19 nt, Artificial Sequence
  Description of Artificial Sequence: Synthetic oligonucleotide
cauagggguggcucgcuca

SEQ ID NO: 2605982 - RNA, 19 nt, Artificial Sequence
  Description of Artificial Sequence: Synthetic oligonucleotide
cagugucugaucuggugga

SEQ ID NO: 2605983 - RNA, 19 nt, Artificial Sequence
  Description of Artificial Sequence: Synthetic oligonucleotide
cccucaacagccaauccuc

SEQ ID NO: 2605984 - RNA, 19 nt, Artificial Sequence
  Description of Artificial Sequence: Synthetic oligonucleotide
cugguccccacugcgcugg

SEQ ID NO: 2605985 - RNA, 19 nt, Artificial Sequence
  Description of Artificial Sequence: Synthetic oligonucleotide
gcccgaggcgggcagaacg

SEQ ID NO: 2605986 - RNA, 19 nt, Artificial Sequence
  Description of Artificial Sequence: Synthetic oligonucleotide
cccugcaauaucaggggag

SEQ ID NO: 2605987 - RNA, 19 nt, Artificial Sequence
  Description of Artificial Sequence: Synthetic oligonucleotide
cacugcgcuggaacaggcc

SEQ ID NO: 2605988 - RNA, 19 nt, Artificial Sequence
  Description of Artificial Sequence: Synthetic oligonucleotide
gaucugggcccgcucuuca

SEQ ID NO: 2605989 - RNA, 19 nt, Artificial Sequence
  Description of Artificial Sequence: Synthetic oligonucleotide
cucaguugaagccugccau

SEQ ID NO: 2605990 - RNA, 19 nt, Artificial Sequence
  Description of Artificial Sequence: Synthetic oligonucleotide
agcuacacggugauccccu

SEQ ID NO: 2605991 - RNA, 19 nt, Artificial Sequence
  Description of Artificial Sequence: Synthetic oligonucleotide
cugaucugguggagguaac

SEQ ID NO: 2605992 - RNA, 19 nt, Artificial Sequence
  Description of Artificial Sequence: Synthetic oligonucleotide
cccgggacucaguugaagc

SEQ ID NO: 2605993 - RNA, 19 nt, Artificial Sequence
  Description of Artificial Sequence: Synthetic oligonucleotide
agccacaguuccccggaga

SEQ ID NO: 2605994 - RNA, 19 nt, Artificial Sequence
  Description of Artificial Sequence: Synthetic oligonucleotide
ggugcucucagccggccac

SEQ ID NO: 2605995 - RNA, 19 nt, Artificial Sequence
  Description of Artificial Sequence: Synthetic oligonucleotide
gaacgcagccacaguuccc

SEQ ID NO: 2605996 - RNA, 19 nt, Artificial Sequence
  Description of Artificial Sequence: Synthetic oligonucleotide
auauguuggcagaggccug

SEQ ID NO: 2605997 - RNA, 19 nt, Artificial Sequence
  Description of Artificial Sequence: Synthetic oligonucleotide
ccgggacucaguugaagcc

SEQ ID NO: 2605998 - RNA, 19 nt, Artificial Sequence
  Description of Artificial Sequence: Synthetic oligonucleotide
uccccaucaccggugcucu

SEQ ID NO: 2605999 - RNA, 19 nt, Artificial Sequence
  Description of Artificial Sequence: Synthetic oligonucleotide
cagccggccacagugguuc

SEQ ID NO: 2606000 - RNA, 19 nt, Artificial Sequence
  Description of Artificial Sequence: Synthetic oligonucleotide
gaaccaagcucuggugcuc

SEQ ID NO: 2606001 - RNA, 19 nt, Artificial Sequence
  Description of Artificial Sequence: Synthetic oligonucleotide
acgcagccgggauccuggc

SEQ ID NO: 2606002 - RNA, 19 nt, Artificial Sequence
  Description of Artificial Sequence: Synthetic oligonucleotide
ugcuuucguccccgggacu

SEQ ID NO: 2606003 - RNA, 19 nt, Artificial Sequence
  Description of Artificial Sequence: Synthetic oligonucleotide
uggugcucucagccggcca

SEQ ID NO: 2606004 - RNA, 19 nt, Artificial Sequence
  Description of Artificial Sequence: Synthetic oligonucleotide
uguccuccgggaguuccca

SEQ ID NO: 2606005 - RNA, 19 nt, Artificial Sequence
  Description of Artificial Sequence: Synthetic oligonucleotide
gcugcuguagaaccaagcu

SEQ ID NO: 2606006 - RNA, 19 nt, Artificial Sequence
  Description of Artificial Sequence: Synthetic oligonucleotide
cacggugauccccugcaca

SEQ ID NO: 2606007 - RNA, 19 nt, Artificial Sequence
  Description of Artificial Sequence: Synthetic oligonucleotide
cuuuggcaaagucccugca

SEQ ID NO: 2606008 - RNA, 19 nt, Artificial Sequence
  Description of Artificial Sequence: Synthetic oligonucleotide
gguaaccugugggacccgg

SEQ ID NO: 2606009 - RNA, 19 nt, Artificial Sequence
  Description of Artificial Sequence: Synthetic oligonucleotide
caauaucaggggaggaccu

SEQ ID NO: 2606010 - RNA, 19 nt, Artificial Sequence
  Description of Artificial Sequence: Synthetic oligonucleotide
ccugcacauucccagauga

SEQ ID NO: 2606011 - RNA, 19 nt, Artificial Sequence
  Description of Artificial Sequence: Synthetic oligonucleotide
gaacgcagccgggauccug

SEQ ID NO: 2606012 - RNA, 19 nt, Artificial Sequence
  Description of Artificial Sequence: Synthetic oligonucleotide
aggccugcuuucguccccg

SEQ ID NO: 2606013 - RNA, 19 nt, Artificial Sequence
  Description of Artificial Sequence: Synthetic oligonucleotide
ugcuggcucugaucugaac

SEQ ID NO: 2606014 - RNA, 19 nt, Artificial Sequence
  Description of Artificial Sequence: Synthetic oligonucleotide
ccguguuugucaccaagac

SEQ ID NO: 2606015 - RNA, 19 nt, Artificial Sequence
  Description of Artificial Sequence: Synthetic oligonucleotide
gguggcucgcucaccacag

SEQ ID NO: 2606016 - RNA, 19 nt, Artificial Sequence
  Description of Artificial Sequence: Synthetic oligonucleotide
cagcuacacggugaucccc

SEQ ID NO: 2606017 - RNA, 19 nt, Artificial Sequence
  Description of Artificial Sequence: Synthetic oligonucleotide
gcuucgguggacucuggca

SEQ ID NO: 2606018 - RNA, 19 nt, Artificial Sequence
  Description of Artificial Sequence: Synthetic oligonucleotide
guaaccugugggacccggc

SEQ ID NO: 2606019 - RNA, 19 nt, Artificial Sequence
  Description of Artificial Sequence: Synthetic oligonucleotide
gcucaggccgccucuuugc

SEQ ID NO: 2606020 - RNA, 19 nt, Artificial Sequence
  Description of Artificial Sequence: Synthetic oligonucleotide
ggcucgcucaccacagagg

SEQ ID NO: 2606021 - RNA, 19 nt, Artificial Sequence
  Description of Artificial Sequence: Synthetic oligonucleotide
ugcucucagccggccacag

SEQ ID NO: 2606022 - RNA, 19 nt, Artificial Sequence
  Description of Artificial Sequence: Synthetic oligonucleotide
uuccccggagaaagugcuc

SEQ ID NO: 2606023 - RNA, 19 nt, Artificial Sequence
  Description of Artificial Sequence: Synthetic oligonucleotide
caacuccauaagcccuuug

SEQ ID NO: 2606024 - RNA, 19 nt, Artificial Sequence
  Description of Artificial Sequence: Synthetic oligonucleotide
uuaccguguuugucaccaa

SEQ ID NO: 2606025 - RNA, 19 nt, Artificial Sequence
  Description of Artificial Sequence: Synthetic oligonucleotide
gcaccaacucugcauccug

SEQ ID NO: 2606026 - RNA, 19 nt, Artificial Sequence
  Description of Artificial Sequence: Synthetic oligonucleotide
ggcucugaucugaacugag

SEQ ID NO: 2606027 - RNA, 19 nt, Artificial Sequence
  Description of Artificial Sequence: Synthetic oligonucleotide
ggacccggcuuauuccagc

SEQ ID NO: 2606028 - RNA, 19 nt, Artificial Sequence
  Description of Artificial Sequence: Synthetic oligonucleotide
cuguccugugggucagcug

SEQ ID NO: 2606029 - RNA, 19 nt, Artificial Sequence
  Description of Artificial Sequence: Synthetic oligonucleotide
ccggagaaagugcucugag

SEQ ID NO: 2606030 - RNA, 19 nt, Artificial Sequence
  Description of Artificial Sequence: Synthetic oligonucleotide
cccggcuuauuccagcuuc

SEQ ID NO: 2606031 - RNA, 19 nt, Artificial Sequence
  Description of Artificial Sequence: Synthetic oligonucleotide
cuucagcaagcuggucccc

SEQ ID NO: 2606032 - RNA, 19 nt, Artificial Sequence
  Description of Artificial Sequence: Synthetic oligonucleotide
ggggaggaccuccccaccc

SEQ ID NO: 2606033 - RNA, 19 nt, Artificial Sequence
  Description of Artificial Sequence: Synthetic oligonucleotide
ccuucuuagggccucagcu

SEQ ID NO: 2606034 - RNA, 19 nt, Artificial Sequence
  Description of Artificial Sequence: Synthetic oligonucleotide
cugguugccuuggcugccc

SEQ ID NO: 2606035 - RNA, 19 nt, Artificial Sequence
  Description of Artificial Sequence: Synthetic oligonucleotide
ugcucgccggaagccaugu

SEQ ID NO: 2606036 - RNA, 19 nt, Artificial Sequence
  Description of Artificial Sequence: Synthetic oligonucleotide
gggaggaccuccccacccc

SEQ ID NO: 2606037 - RNA, 19 nt, Artificial Sequence
  Description of Artificial Sequence: Synthetic oligonucleotide
gggacucaguugaagccug

SEQ ID NO: 2606038 - RNA, 19 nt, Artificial Sequence
  Description of Artificial Sequence: Synthetic oligonucleotide
cugaggacaacaguccuau

SEQ ID NO: 2606039 - RNA, 19 nt, Artificial Sequence
  Description of Artificial Sequence: Synthetic oligonucleotide
cgagccaccuggaacgcag

SEQ ID NO: 2606040 - RNA, 19 nt, Artificial Sequence
  Description of Artificial Sequence: Synthetic oligonucleotide
gggcccgcucuucagcaag

SEQ ID NO: 2606041 - RNA, 19 nt, Artificial Sequence
  Description of Artificial Sequence: Synthetic oligonucleotide
gugauccccugcacauucc

SEQ ID NO: 2606042 - RNA, 19 nt, Artificial Sequence
  Description of Artificial Sequence: Synthetic oligonucleotide
gacccggcuuauuccagcu

SEQ ID NO: 2606043 - RNA, 19 nt, Artificial Sequence
  Description of Artificial Sequence: Synthetic oligonucleotide
gugcucugagccccucaac

SEQ ID NO: 2606044 - RNA, 19 nt, Artificial Sequence
  Description of Artificial Sequence: Synthetic oligonucleotide
acuuguccuccgggaguuc

SEQ ID NO: 2606045 - RNA, 19 nt, Artificial Sequence
  Description of Artificial Sequence: Synthetic oligonucleotide
cuggaacgcagccacaguu

SEQ ID NO: 2606046 - RNA, 19 nt, Artificial Sequence
  Description of Artificial Sequence: Synthetic oligonucleotide
ugaggacaacaguccuauu

SEQ ID NO: 2606047 - RNA, 19 nt, Artificial Sequence
  Description of Artificial Sequence: Synthetic oligonucleotide
gggauccuggccgagccac

SEQ ID NO: 2606048 - RNA, 19 nt, Artificial Sequence
  Description of Artificial Sequence: Synthetic oligonucleotide
gggucagcugcuguagaac

SEQ ID NO: 2606049 - RNA, 19 nt, Artificial Sequence
  Description of Artificial Sequence: Synthetic oligonucleotide
cugugggucagcugcugua

SEQ ID NO: 2606050 - RNA, 19 nt, Artificial Sequence
  Description of Artificial Sequence: Synthetic oligonucleotide
uagggguggcucgcucacc

SEQ ID NO: 2606051 - RNA, 19 nt, Artificial Sequence
  Description of Artificial Sequence: Synthetic oligonucleotide
acaguuccccggagaaagu

SEQ ID NO: 2606052 - RNA, 19 nt, Artificial Sequence
  Description of Artificial Sequence: Synthetic oligonucleotide
guuccccggagaaagugcu

SEQ ID NO: 2606053 - RNA, 19 nt, Artificial Sequence
  Description of Artificial Sequence: Synthetic oligonucleotide
cugcucgccggaagccaug

SEQ ID NO: 2606054 - RNA, 19 nt, Artificial Sequence
  Description of Artificial Sequence: Synthetic oligonucleotide
gcagaacgcagccgggauc

SEQ ID NO: 2606055 - RNA, 19 nt, Artificial Sequence
  Description of Artificial Sequence: Synthetic oligonucleotide
gccuucuuagggccucagc

SEQ ID NO: 2606056 - RNA, 19 nt, Artificial Sequence
  Description of Artificial Sequence: Synthetic oligonucleotide
cuggugcucucagccggcc

SEQ ID NO: 2606057 - RNA, 19 nt, Artificial Sequence
  Description of Artificial Sequence: Synthetic oligonucleotide
agccuucuuagggccucag

SEQ ID NO: 2606058 - RNA, 19 nt, Artificial Sequence
  Description of Artificial Sequence: Synthetic oligonucleotide
cccgaggcgggcagaacgc

SEQ ID NO: 2606059 - RNA, 19 nt, Artificial Sequence
  Description of Artificial Sequence: Synthetic oligonucleotide
ggguggcucgcucaccaca

SEQ ID NO: 2606060 - RNA, 19 nt, Artificial Sequence
  Description of Artificial Sequence: Synthetic oligonucleotide
acugcucgccggaagccau

SEQ ID NO: 2606061 - RNA, 19 nt, Artificial Sequence
  Description of Artificial Sequence: Synthetic oligonucleotide
agguaaccugugggacccg

SEQ ID NO: 2606062 - RNA, 19 nt, Artificial Sequence
  Description of Artificial Sequence: Synthetic oligonucleotide
cugcaauaucaggggagga

SEQ ID NO: 2606063 - RNA, 19 nt, Artificial Sequence
  Description of Artificial Sequence: Synthetic oligonucleotide
aggccgccucuuugcaacu

SEQ ID NO: 2606064 - RNA, 19 nt, Artificial Sequence
  Description of Artificial Sequence: Synthetic oligonucleotide
ccacugcgcuggaacaggc

SEQ ID NO: 2606065 - RNA, 19 nt, Artificial Sequence
  Description of Artificial Sequence: Synthetic oligonucleotide
cccacugcgcuggaacagg

SEQ ID NO: 2606066 - RNA, 19 nt, Artificial Sequence
  Description of Artificial Sequence: Synthetic oligonucleotide
ggcuuauuccagcuucggu

SEQ ID NO: 2606067 - RNA, 19 nt, Artificial Sequence
  Description of Artificial Sequence: Synthetic oligonucleotide
ggcaaagucccugcaauau

SEQ ID NO: 2606068 - RNA, 19 nt, Artificial Sequence
  Description of Artificial Sequence: Synthetic oligonucleotide
gcuacacggugauccccug

SEQ ID NO: 2606069 - RNA, 19 nt, Artificial Sequence
  Description of Artificial Sequence: Synthetic oligonucleotide
uccccgggacucaguugaa

SEQ ID NO: 2606070 - RNA, 19 nt, Artificial Sequence
  Description of Artificial Sequence: Synthetic oligonucleotide
cccagaugaucugggcccg

SEQ ID NO: 2606071 - RNA, 19 nt, Artificial Sequence
  Description of Artificial Sequence: Synthetic oligonucleotide
ccauaagcccuuuggcaaa

SEQ ID NO: 2606072 - RNA, 19 nt, Artificial Sequence
  Description of Artificial Sequence: Synthetic oligonucleotide
gccccucaacagccaaucc

SEQ ID NO: 2606073 - RNA, 19 nt, Artificial Sequence
  Description of Artificial Sequence: Synthetic oligonucleotide
cacagaggcuggggucccc

SEQ ID NO: 2606074 - RNA, 19 nt, Artificial Sequence
  Description of Artificial Sequence: Synthetic oligonucleotide
cccugcacauucccagaug

SEQ ID NO: 2606075 - RNA, 19 nt, Artificial Sequence
  Description of Artificial Sequence: Synthetic oligonucleotide
ugguccccacugcgcugga

SEQ ID NO: 2606076 - RNA, 19 nt, Artificial Sequence
  Description of Artificial Sequence: Synthetic oligonucleotide
gggacccggcuuauuccag

SEQ ID NO: 2606077 - RNA, 19 nt, Artificial Sequence
  Description of Artificial Sequence: Synthetic oligonucleotide
agccggccacagugguucu

SEQ ID NO: 2606078 - RNA, 19 nt, Artificial Sequence
  Description of Artificial Sequence: Synthetic oligonucleotide
agaacgcagccgggauccu

SEQ ID NO: 2606079 - RNA, 19 nt, Artificial Sequence
  Description of Artificial Sequence: Synthetic oligonucleotide
gucugaucugguggaggua

SEQ ID NO: 2606080 - RNA, 19 nt, Artificial Sequence
  Description of Artificial Sequence: Synthetic oligonucleotide
accccuucacugagucagu

SEQ ID NO: 2606081 - RNA, 19 nt, Artificial Sequence
  Description of Artificial Sequence: Synthetic oligonucleotide
cugcacauucccagaugau

SEQ ID NO: 2606082 - RNA, 19 nt, Artificial Sequence
  Description of Artificial Sequence: Synthetic oligonucleotide
gguugccuuggcugcccga

SEQ ID NO: 2606083 - RNA, 19 nt, Artificial Sequence
  Description of Artificial Sequence: Synthetic oligonucleotide
ggaccuccccaccccuuca

SEQ ID NO: 2606084 - RNA, 19 nt, Artificial Sequence
  Description of Artificial Sequence: Synthetic oligonucleotide
cucgcucaccacagaggcu

SEQ ID NO: 2606085 - RNA, 19 nt, Artificial Sequence
  Description of Artificial Sequence: Synthetic oligonucleotide
ccauagggguggcucgcuc

SEQ ID NO: 2606086 - RNA, 19 nt, Artificial Sequence
  Description of Artificial Sequence: Synthetic oligonucleotide
cagccgggauccuggccga

SEQ ID NO: 2606087 - RNA, 19 nt, Artificial Sequence
  Description of Artificial Sequence: Synthetic oligonucleotide
cuccgggaguucccaaacu

SEQ ID NO: 2606088 - RNA, 19 nt, Artificial Sequence
  Description of Artificial Sequence: Synthetic oligonucleotide
gugcucucagccggccaca

SEQ ID NO: 2606089 - RNA, 19 nt, Artificial Sequence
  Description of Artificial Sequence: Synthetic oligonucleotide
ggccugcuuucguccccgg

SEQ ID NO: 2606090 - RNA, 19 nt, Artificial Sequence
  Description of Artificial Sequence: Synthetic oligonucleotide
ugcccgaggcgggcagaac

SEQ ID NO: 2606091 - RNA, 19 nt, Artificial Sequence
  Description of Artificial Sequence: Synthetic oligonucleotide
ccccacugcgcuggaacag

SEQ ID NO: 2606092 - RNA, 19 nt, Artificial Sequence
  Description of Artificial Sequence: Synthetic oligonucleotide
ggcagaacgcagccgggau

SEQ ID NO: 2606093 - RNA, 19 nt, Artificial Sequence
  Description of Artificial Sequence: Synthetic oligonucleotide
gggcagaacgcagccggga

SEQ ID NO: 2606094 - RNA, 19 nt, Artificial Sequence
  Description of Artificial Sequence: Synthetic oligonucleotide
ccccggagaaagugcucug

SEQ ID NO: 2606095 - RNA, 19 nt, Artificial Sequence
  Description of Artificial Sequence: Synthetic oligonucleotide
cugcauccuggaauauguu

SEQ ID NO: 2606096 - RNA, 19 nt, Artificial Sequence
  Description of Artificial Sequence: Synthetic oligonucleotide
ccagaugaucugggcccgc

SEQ ID NO: 2606097 - RNA, 19 nt, Artificial Sequence
  Description of Artificial Sequence: Synthetic oligonucleotide
ccaagcucuggugcucuca

SEQ ID NO: 2606098 - RNA, 19 nt, Artificial Sequence
  Description of Artificial Sequence: Synthetic oligonucleotide
ggcagaggccugcuuucgu

SEQ ID NO: 2606099 - RNA, 19 nt, Artificial Sequence
  Description of Artificial Sequence: Synthetic oligonucleotide
gccgagccaccuggaacgc

SEQ ID NO: 2606100 - RNA, 19 nt, Artificial Sequence
  Description of Artificial Sequence: Synthetic oligonucleotide
cccggagaaagugcucuga

SEQ ID NO: 2606101 - RNA, 19 nt, Artificial Sequence
  Description of Artificial Sequence: Synthetic oligonucleotide
ccgccucuuugcaacucca

SEQ ID NO: 2606102 - RNA, 19 nt, Artificial Sequence
  Description of Artificial Sequence: Synthetic oligonucleotide
ccccgggacucaguugaag

SEQ ID NO: 2606103 - RNA, 19 nt, Artificial Sequence
  Description of Artificial Sequence: Synthetic oligonucleotide
cggugcucugguugccuug

SEQ ID NO: 2606104 - RNA, 19 nt, Artificial Sequence
  Description of Artificial Sequence: Synthetic oligonucleotide
cguccccgggacucaguug

SEQ ID NO: 2606105 - RNA, 19 nt, Artificial Sequence
  Description of Artificial Sequence: Synthetic oligonucleotide
cugcccgaggcgggcagaa

SEQ ID NO: 2606106 - RNA, 19 nt, Artificial Sequence
  Description of Artificial Sequence: Synthetic oligonucleotide
cgcagccgggauccuggcc

SEQ ID NO: 2606107 - RNA, 19 nt, Artificial Sequence
  Description of Artificial Sequence: Synthetic oligonucleotide
ccaccccuucacugaguca

SEQ ID NO: 2606108 - RNA, 19 nt, Artificial Sequence
  Description of Artificial Sequence: Synthetic oligonucleotide
ggccgccucuuugcaacuc

SEQ ID NO: 2606109 - RNA, 19 nt, Artificial Sequence
  Description of Artificial Sequence: Synthetic oligonucleotide
gcucgccggaagccauguc

SEQ ID NO: 2606110 - RNA, 19 nt, Artificial Sequence
  Description of Artificial Sequence: Synthetic oligonucleotide
gccggccacagugguucug

SEQ ID NO: 2606111 - RNA, 19 nt, Artificial Sequence
  Description of Artificial Sequence: Synthetic oligonucleotide
caucaccggugcucugguu

SEQ ID NO: 2606112 - RNA, 19 nt, Artificial Sequence
  Description of Artificial Sequence: Synthetic oligonucleotide
ccucagcuacacggugauc

SEQ ID NO: 2606113 - RNA, 19 nt, Artificial Sequence
  Description of Artificial Sequence: Synthetic oligonucleotide
ccuggaacgcagccacagu

SEQ ID NO: 2606114 - RNA, 19 nt, Artificial Sequence
  Description of Artificial Sequence: Synthetic oligonucleotide
cccaaacugcucgccggaa

SEQ ID NO: 2606115 - RNA, 19 nt, Artificial Sequence
  Description of Artificial Sequence: Synthetic oligonucleotide
gcugcccgaggcgggcaga

SEQ ID NO: 2606116 - RNA, 19 nt, Artificial Sequence
  Description of Artificial Sequence: Synthetic oligonucleotide
ccgaggcgggcagaacgca

SEQ ID NO: 2606117 - RNA, 19 nt, Artificial Sequence
  Description of Artificial Sequence: Synthetic oligonucleotide
gccauagggguggcucgcu

SEQ ID NO: 2606118 - RNA, 19 nt, Artificial Sequence
  Description of Artificial Sequence: Synthetic oligonucleotide
ccccugcacauucccagau

SEQ ID NO: 2606119 - RNA, 19 nt, Artificial Sequence
  Description of Artificial Sequence: Synthetic oligonucleotide
gcccuuuggcaaagucccu

SEQ ID NO: 2606120 - RNA, 19 nt, Artificial Sequence
  Description of Artificial Sequence: Synthetic oligonucleotide
ccgagccaccuggaacgca

SEQ ID NO: 2606121 - RNA, 19 nt, Artificial Sequence
  Description of Artificial Sequence: Synthetic oligonucleotide
cugugggacccggcuuauu

SEQ ID NO: 2606122 - RNA, 19 nt, Artificial Sequence
  Description of Artificial Sequence: Synthetic oligonucleotide
cgccucuuugcaacuccau

SEQ ID NO: 2606123 - RNA, 19 nt, Artificial Sequence
  Description of Artificial Sequence: Synthetic oligonucleotide
ccggugcucugguugccuu

SEQ ID NO: 2606124 - RNA, 19 nt, Artificial Sequence
  Description of Artificial Sequence: Synthetic oligonucleotide
ccccaccccuucacugagu

SEQ ID NO: 2606125 - RNA, 19 nt, Artificial Sequence
  Description of Artificial Sequence: Synthetic oligonucleotide
gccugccauagggguggcu

SEQ ID NO: 2606126 - RNA, 19 nt, Artificial Sequence
  Description of Artificial Sequence: Synthetic oligonucleotide
ccugugggacccggcuuau

SEQ ID NO: 2606127 - RNA, 19 nt, Artificial Sequence
  Description of Artificial Sequence: Synthetic oligonucleotide
auuauaaugagucagcagc

SEQ ID NO: 2606128 - RNA, 19 nt, Artificial Sequence
  Description of Artificial Sequence: Synthetic oligonucleotide
aaaucguguccucuuaacc

SEQ ID NO: 2606129 - RNA, 19 nt, Artificial Sequence
  Description of Artificial Sequence: Synthetic oligonucleotide
ucagccaacucucuaaugg

SEQ ID NO: 2606130 - RNA, 19 nt, Artificial Sequence
  Description of Artificial Sequence: Synthetic oligonucleotide
uuuauuauaaugagucagc

SEQ ID NO: 2606131 - RNA, 19 nt, Artificial Sequence
  Description of Artificial Sequence: Synthetic oligonucleotide
uucauguagaucuucgggg

SEQ ID NO: 2606132 - RNA, 19 nt, Artificial Sequence
  Description of Artificial Sequence: Synthetic oligonucleotide
acguuuauuauaaugaguc

SEQ ID NO: 2606133 - RNA, 19 nt, Artificial Sequence
  Description of Artificial Sequence: Synthetic oligonucleotide
ucauuuguucuucauguag

SEQ ID NO: 2606134 - RNA, 19 nt, Artificial Sequence
  Description of Artificial Sequence: Synthetic oligonucleotide
auagauaccgagcagucag

SEQ ID NO: 2606135 - RNA, 19 nt, Artificial Sequence
  Description of Artificial Sequence: Synthetic oligonucleotide
cucucuaauggacugaugg

SEQ ID NO: 2606136 - RNA, 19 nt, Artificial Sequence
  Description of Artificial Sequence: Synthetic oligonucleotide
cuucaaaucguucucaaac

SEQ ID NO: 2606137 - RNA, 19 nt, Artificial Sequence
  Description of Artificial Sequence: Synthetic oligonucleotide
aucacagucauugggaccc

SEQ ID NO: 2606138 - RNA, 19 nt, Artificial Sequence
  Description of Artificial Sequence: Synthetic oligonucleotide
aaucguguccucuuaacca

SEQ ID NO: 2606139 - RNA, 19 nt, Artificial Sequence
  Description of Artificial Sequence: Synthetic oligonucleotide
uccaacguuuauuauaaug

SEQ ID NO: 2606140 - RNA, 19 nt, Artificial Sequence
  Description of Artificial Sequence: Synthetic oligonucleotide
uauuauaaugagucagcag

SEQ ID NO: 2606141 - RNA, 19 nt, Artificial Sequence
  Description of Artificial Sequence: Synthetic oligonucleotide
uuauaaugagucagcagca

SEQ ID NO: 2606142 - RNA, 19 nt, Artificial Sequence
  Description of Artificial Sequence: Synthetic oligonucleotide
cuuuacgccgcugaaaucg

SEQ ID NO: 2606143 - RNA, 19 nt, Artificial Sequence
  Description of Artificial Sequence: Synthetic oligonucleotide
gagggaaucacagucauug

SEQ ID NO: 2606144 - RNA, 19 nt, Artificial Sequence
  Description of Artificial Sequence: Synthetic oligonucleotide
uguccucuuaaccaguuug

SEQ ID NO: 2606145 - RNA, 19 nt, Artificial Sequence
  Description of Artificial Sequence: Synthetic oligonucleotide
ucugccagcucucaggagc

SEQ ID NO: 2606146 - RNA, 19 nt, Artificial Sequence
  Description of Artificial Sequence: Synthetic oligonucleotide
cuucauguagaucuucggg

SEQ ID NO: 2606147 - RNA, 19 nt, Artificial Sequence
  Description of Artificial Sequence: Synthetic oligonucleotide
aacgacugaaaccugccca

SEQ ID NO: 2606148 - RNA, 19 nt, Artificial Sequence
  Description of Artificial Sequence: Synthetic oligonucleotide
agagagacaagagggaugg

SEQ ID NO: 2606149 - RNA, 19 nt, Artificial Sequence
  Description of Artificial Sequence: Synthetic oligonucleotide
ugaguugauggccaggcca

SEQ ID NO: 2606150 - RNA, 19 nt, Artificial Sequence
  Description of Artificial Sequence: Synthetic oligonucleotide
cugauggacaucuuccugg

SEQ ID NO: 2606151 - RNA, 19 nt, Artificial Sequence
  Description of Artificial Sequence: Synthetic oligonucleotide
ucuaauggacugauggaca

SEQ ID NO: 2606152 - RNA, 19 nt, Artificial Sequence
  Description of Artificial Sequence: Synthetic oligonucleotide
aacuccucaagcuccaacu

SEQ ID NO: 2606153 - RNA, 19 nt, Artificial Sequence
  Description of Artificial Sequence: Synthetic oligonucleotide
aauggacugauggacaucu

SEQ ID NO: 2606154 - RNA, 19 nt, Artificial Sequence
  Description of Artificial Sequence: Synthetic oligonucleotide
aaugagucagcagcaagag

SEQ ID NO: 2606155 - RNA, 19 nt, Artificial Sequence
  Description of Artificial Sequence: Synthetic oligonucleotide
uuuguggugguucaucuuc

SEQ ID NO: 2606156 - RNA, 19 nt, Artificial Sequence
  Description of Artificial Sequence: Synthetic oligonucleotide
acacucguagauuugggag

SEQ ID NO: 2606157 - RNA, 19 nt, Artificial Sequence
  Description of Artificial Sequence: Synthetic oligonucleotide
acaugaugaguugauggcc

SEQ ID NO: 2606158 - RNA, 19 nt, Artificial Sequence
  Description of Artificial Sequence: Synthetic oligonucleotide
uuauuauaaugagucagca

SEQ ID NO: 2606159 - RNA, 19 nt, Artificial Sequence
  Description of Artificial Sequence: Synthetic oligonucleotide
ucaagcuccaacugggccc

SEQ ID NO: 2606160 - RNA, 19 nt, Artificial Sequence
  Description of Artificial Sequence: Synthetic oligonucleotide
ucuucauguagaucuucgg

SEQ ID NO: 2606161 - RNA, 19 nt, Artificial Sequence
  Description of Artificial Sequence: Synthetic oligonucleotide
ugcaaauuguaaaggggug

SEQ ID NO: 2606162 - RNA, 19 nt, Artificial Sequence
  Description of Artificial Sequence: Synthetic oligonucleotide
uucaaaucguucucaaacu

SEQ ID NO: 2606163 - RNA, 19 nt, Artificial Sequence
  Description of Artificial Sequence: Synthetic oligonucleotide
uguaaagggguggaaaagc

SEQ ID NO: 2606164 - RNA, 19 nt, Artificial Sequence
  Description of Artificial Sequence: Synthetic oligonucleotide
uuuugcacugcacugcagu

SEQ ID NO: 2606165 - RNA, 19 nt, Artificial Sequence
  Description of Artificial Sequence: Synthetic oligonucleotide
auaaugagucagcagcaag

SEQ ID NO: 2606166 - RNA, 19 nt, Artificial Sequence
  Description of Artificial Sequence: Synthetic oligonucleotide
aaaucguucucaaacuuga

SEQ ID NO: 2606167 - RNA, 19 nt, Artificial Sequence
  Description of Artificial Sequence: Synthetic oligonucleotide
caguuugcgguauuugugg

SEQ ID NO: 2606168 - RNA, 19 nt, Artificial Sequence
  Description of Artificial Sequence: Synthetic oligonucleotide
gaccccaacauccagucug

SEQ ID NO: 2606169 - RNA, 19 nt, Artificial Sequence
  Description of Artificial Sequence: Synthetic oligonucleotide
aauuguaaagggguggaaa

SEQ ID NO: 2606170 - RNA, 19 nt, Artificial Sequence
  Description of Artificial Sequence: Synthetic oligonucleotide
auuguaaagggguggaaaa

SEQ ID NO: 2606171 - RNA, 19 nt, Artificial Sequence
  Description of Artificial Sequence: Synthetic oligonucleotide
ugccgaucaccccagaggc

SEQ ID NO: 2606172 - RNA, 19 nt, Artificial Sequence
  Description of Artificial Sequence: Synthetic oligonucleotide
uauuuguggugguucaucu

SEQ ID NO: 2606173 - RNA, 19 nt, Artificial Sequence
  Description of Artificial Sequence: Synthetic oligonucleotide
aggugcucaaagcacacag

SEQ ID NO: 2606174 - RNA, 19 nt, Artificial Sequence
  Description of Artificial Sequence: Synthetic oligonucleotide
ugauggacaucuuccuggg

SEQ ID NO: 2606175 - RNA, 19 nt, Artificial Sequence
  Description of Artificial Sequence: Synthetic oligonucleotide
gacucauuuguucuucaug

SEQ ID NO: 2606176 - RNA, 19 nt, Artificial Sequence
  Description of Artificial Sequence: Synthetic oligonucleotide
caaggaacagcccugacca

SEQ ID NO: 2606177 - RNA, 19 nt, Artificial Sequence
  Description of Artificial Sequence: Synthetic oligonucleotide
ucauguagaucuucggggu

SEQ ID NO: 2606178 - RNA, 19 nt, Artificial Sequence
  Description of Artificial Sequence: Synthetic oligonucleotide
caaaucguucucaaacuug

SEQ ID NO: 2606179 - RNA, 19 nt, Artificial Sequence
  Description of Artificial Sequence: Synthetic oligonucleotide
cacucguagauuugggagg

SEQ ID NO: 2606180 - RNA, 19 nt, Artificial Sequence
  Description of Artificial Sequence: Synthetic oligonucleotide
gaugaguugauggccaggc

SEQ ID NO: 2606181 - RNA, 19 nt, Artificial Sequence
  Description of Artificial Sequence: Synthetic oligonucleotide
ucaucuuccgucuucggau

SEQ ID NO: 2606182 - RNA, 19 nt, Artificial Sequence
  Description of Artificial Sequence: Synthetic oligonucleotide
uucaucuuccgucuucgga

SEQ ID NO: 2606183 - RNA, 19 nt, Artificial Sequence
  Description of Artificial Sequence: Synthetic oligonucleotide
aacguuuauuauaaugagu

SEQ ID NO: 2606184 - RNA, 19 nt, Artificial Sequence
  Description of Artificial Sequence: Synthetic oligonucleotide
gaaucacagucauugggac

SEQ ID NO: 2606185 - RNA, 19 nt, Artificial Sequence
  Description of Artificial Sequence: Synthetic oligonucleotide
agcacacagaaccaggcca

SEQ ID NO: 2606186 - RNA, 19 nt, Artificial Sequence
  Description of Artificial Sequence: Synthetic oligonucleotide
ugaccagcugugaagucag

SEQ ID NO: 2606187 - RNA, 19 nt, Artificial Sequence
  Description of Artificial Sequence: Synthetic oligonucleotide
gacugaaaccugcccaagg

SEQ ID NO: 2606188 - RNA, 19 nt, Artificial Sequence
  Description of Artificial Sequence: Synthetic oligonucleotide
aagggguggaaaagcaugg

SEQ ID NO: 2606189 - RNA, 19 nt, Artificial Sequence
  Description of Artificial Sequence: Synthetic oligonucleotide
ucucuaauggacugaugga

SEQ ID NO: 2606190 - RNA, 19 nt, Artificial Sequence
  Description of Artificial Sequence: Synthetic oligonucleotide
aucguguccucuuaaccag

SEQ ID NO: 2606191 - RNA, 19 nt, Artificial Sequence
  Description of Artificial Sequence: Synthetic oligonucleotide
cagcaagagagacaagagg

SEQ ID NO: 2606192 - RNA, 19 nt, Artificial Sequence
  Description of Artificial Sequence: Synthetic oligonucleotide
acugaaaccugcccaagga

SEQ ID NO: 2606193 - RNA, 19 nt, Artificial Sequence
  Description of Artificial Sequence: Synthetic oligonucleotide
cugggcaauagauaccgag

SEQ ID NO: 2606194 - RNA, 19 nt, Artificial Sequence
  Description of Artificial Sequence: Synthetic oligonucleotide
gucugggcaauagauaccg

SEQ ID NO: 2606195 - RNA, 19 nt, Artificial Sequence
  Description of Artificial Sequence: Synthetic oligonucleotide
agucaggcgcgccaggaac

SEQ ID NO: 2606196 - RNA, 19 nt, Artificial Sequence
  Description of Artificial Sequence: Synthetic oligonucleotide
uggaaaagcauggcugccg

SEQ ID NO: 2606197 - RNA, 19 nt, Artificial Sequence
  Description of Artificial Sequence: Synthetic oligonucleotide
uggacacucguagauuugg

SEQ ID NO: 2606198 - RNA, 19 nt, Artificial Sequence
  Description of Artificial Sequence: Synthetic oligonucleotide
ucaaaucguucucaaacuu

SEQ ID NO: 2606199 - RNA, 19 nt, Artificial Sequence
  Description of Artificial Sequence: Synthetic oligonucleotide
ugggacuccagacucauuu

SEQ ID NO: 2606200 - RNA, 19 nt, Artificial Sequence
  Description of Artificial Sequence: Synthetic oligonucleotide
agauaccgagcagucagcc

SEQ ID NO: 2606201 - RNA, 19 nt, Artificial Sequence
  Description of Artificial Sequence: Synthetic oligonucleotide
uucccugacucccugcuug

SEQ ID NO: 2606202 - RNA, 19 nt, Artificial Sequence
  Description of Artificial Sequence: Synthetic oligonucleotide
ugugaagucaggcgcgcca

SEQ ID NO: 2606203 - RNA, 19 nt, Artificial Sequence
  Description of Artificial Sequence: Synthetic oligonucleotide
gaaaucguguccucuuaac

SEQ ID NO: 2606204 - RNA, 19 nt, Artificial Sequence
  Description of Artificial Sequence: Synthetic oligonucleotide
agauuugggagggaaucac

SEQ ID NO: 2606205 - RNA, 19 nt, Artificial Sequence
  Description of Artificial Sequence: Synthetic oligonucleotide
auaccgagcagucagccaa

SEQ ID NO: 2606206 - RNA, 19 nt, Artificial Sequence
  Description of Artificial Sequence: Synthetic oligonucleotide
ccagaugcgcuucaaaucg

SEQ ID NO: 2606207 - RNA, 19 nt, Artificial Sequence
  Description of Artificial Sequence: Synthetic oligonucleotide
uuguaaagggguggaaaag

SEQ ID NO: 2606208 - RNA, 19 nt, Artificial Sequence
  Description of Artificial Sequence: Synthetic oligonucleotide
gggaaucacagucauuggg

SEQ ID NO: 2606209 - RNA, 19 nt, Artificial Sequence
  Description of Artificial Sequence: Synthetic oligonucleotide
cucuaauggacugauggac

SEQ ID NO: 2606210 - RNA, 19 nt, Artificial Sequence
  Description of Artificial Sequence: Synthetic oligonucleotide
uuugcacugcacugcagug

SEQ ID NO: 2606211 - RNA, 19 nt, Artificial Sequence
  Description of Artificial Sequence: Synthetic oligonucleotide
ggcugcaaauuguaaaggg

SEQ ID NO: 2606212 - RNA, 19 nt, Artificial Sequence
  Description of Artificial Sequence: Synthetic oligonucleotide
uccucuuaaccaguuugcg

SEQ ID NO: 2606213 - RNA, 19 nt, Artificial Sequence
  Description of Artificial Sequence: Synthetic oligonucleotide
aggaacagcccugaccagc

SEQ ID NO: 2606214 - RNA, 19 nt, Artificial Sequence
  Description of Artificial Sequence: Synthetic oligonucleotide
aacagcccugaccagcugu

SEQ ID NO: 2606215 - RNA, 19 nt, Artificial Sequence
  Description of Artificial Sequence: Synthetic oligonucleotide
aggaacgacugaaaccugc

SEQ ID NO: 2606216 - RNA, 19 nt, Artificial Sequence
  Description of Artificial Sequence: Synthetic oligonucleotide
uggacugauggacaucuuc

SEQ ID NO: 2606217 - RNA, 19 nt, Artificial Sequence
  Description of Artificial Sequence: Synthetic oligonucleotide
agucauugggaccccaaca

SEQ ID NO: 2606218 - RNA, 19 nt, Artificial Sequence
  Description of Artificial Sequence: Synthetic oligonucleotide
cuuccuggggaccaggaac

SEQ ID NO: 2606219 - RNA, 19 nt, Artificial Sequence
  Description of Artificial Sequence: Synthetic oligonucleotide
auuugggagggaaucacag

SEQ ID NO: 2606220 - RNA, 19 nt, Artificial Sequence
  Description of Artificial Sequence: Synthetic oligonucleotide
ugaaaucguguccucuuaa

SEQ ID NO: 2606221 - RNA, 19 nt, Artificial Sequence
  Description of Artificial Sequence: Synthetic oligonucleotide
accaguuugcgguauuugu

SEQ ID NO: 2606222 - RNA, 19 nt, Artificial Sequence
  Description of Artificial Sequence: Synthetic oligonucleotide
cuucccggacuuuacgccg

SEQ ID NO: 2606223 - RNA, 19 nt, Artificial Sequence
  Description of Artificial Sequence: Synthetic oligonucleotide
uuggcuugcaggcugcaaa

SEQ ID NO: 2606224 - RNA, 19 nt, Artificial Sequence
  Description of Artificial Sequence: Synthetic oligonucleotide
uucggggucugccagcucu

SEQ ID NO: 2606225 - RNA, 19 nt, Artificial Sequence
  Description of Artificial Sequence: Synthetic oligonucleotide
acugauggacaucuuccug

SEQ ID NO: 2606226 - RNA, 19 nt, Artificial Sequence
  Description of Artificial Sequence: Synthetic oligonucleotide
ccaacguuuauuauaauga

SEQ ID NO: 2606227 - RNA, 19 nt, Artificial Sequence
  Description of Artificial Sequence: Synthetic oligonucleotide
accagcugugaagucaggc

SEQ ID NO: 2606228 - RNA, 19 nt, Artificial Sequence
  Description of Artificial Sequence: Synthetic oligonucleotide
caauagauaccgagcaguc

SEQ ID NO: 2606229 - RNA, 19 nt, Artificial Sequence
  Description of Artificial Sequence: Synthetic oligonucleotide
acucguagauuugggaggg

SEQ ID NO: 2606230 - RNA, 19 nt, Artificial Sequence
  Description of Artificial Sequence: Synthetic oligonucleotide
uuguggugguucaucuucc

SEQ ID NO: 2606231 - RNA, 19 nt, Artificial Sequence
  Description of Artificial Sequence: Synthetic oligonucleotide
gagacaagagggaugggac

SEQ ID NO: 2606232 - RNA, 19 nt, Artificial Sequence
  Description of Artificial Sequence: Synthetic oligonucleotide
augcgcuucaaaucguucu

SEQ ID NO: 2606233 - RNA, 19 nt, Artificial Sequence
  Description of Artificial Sequence: Synthetic oligonucleotide
cagcugugaagucaggcgc

SEQ ID NO: 2606234 - RNA, 19 nt, Artificial Sequence
  Description of Artificial Sequence: Synthetic oligonucleotide
ucccagacuucccugacuc

SEQ ID NO: 2606235 - RNA, 19 nt, Artificial Sequence
  Description of Artificial Sequence: Synthetic oligonucleotide
uuccuggggaccaggaacu

SEQ ID NO: 2606236 - RNA, 19 nt, Artificial Sequence
  Description of Artificial Sequence: Synthetic oligonucleotide
agagacaagagggauggga

SEQ ID NO: 2606237 - RNA, 19 nt, Artificial Sequence
  Description of Artificial Sequence: Synthetic oligonucleotide
uccuucccggacuuuacgc

SEQ ID NO: 2606238 - RNA, 19 nt, Artificial Sequence
  Description of Artificial Sequence: Synthetic oligonucleotide
gaucuucggggucugccag

SEQ ID NO: 2606239 - RNA, 19 nt, Artificial Sequence
  Description of Artificial Sequence: Synthetic oligonucleotide
cugccgaucaccccagagg

SEQ ID NO: 2606240 - RNA, 19 nt, Artificial Sequence
  Description of Artificial Sequence: Synthetic oligonucleotide
cucaagcuccaacugggcc

SEQ ID NO: 2606241 - RNA, 19 nt, Artificial Sequence
  Description of Artificial Sequence: Synthetic oligonucleotide
agagggaugggacuccaga

SEQ ID NO: 2606242 - RNA, 19 nt, Artificial Sequence
  Description of Artificial Sequence: Synthetic oligonucleotide
guagauuugggagggaauc

SEQ ID NO: 2606243 - RNA, 19 nt, Artificial Sequence
  Description of Artificial Sequence: Synthetic oligonucleotide
ugggagggaaucacaguca

SEQ ID NO: 2606244 - RNA, 19 nt, Artificial Sequence
  Description of Artificial Sequence: Synthetic oligonucleotide
caugaugaguugauggcca

SEQ ID NO: 2606245 - RNA, 19 nt, Artificial Sequence
  Description of Artificial Sequence: Synthetic oligonucleotide
agggaaucacagucauugg

SEQ ID NO: 2606246 - RNA, 19 nt, Artificial Sequence
  Description of Artificial Sequence: Synthetic oligonucleotide
gaacgacugaaaccugccc

SEQ ID NO: 2606247 - RNA, 19 nt, Artificial Sequence
  Description of Artificial Sequence: Synthetic oligonucleotide
gcaaauuguaaaggggugg

SEQ ID NO: 2606248 - RNA, 19 nt, Artificial Sequence
  Description of Artificial Sequence: Synthetic oligonucleotide
uugcacugcacugcagugg

SEQ ID NO: 2606249 - RNA, 19 nt, Artificial Sequence
  Description of Artificial Sequence: Synthetic oligonucleotide
gcugcaaauuguaaagggg

SEQ ID NO: 2606250 - RNA, 19 nt, Artificial Sequence
  Description of Artificial Sequence: Synthetic oligonucleotide
aaccugcccaaggaacagc

SEQ ID NO: 2606251 - RNA, 19 nt, Artificial Sequence
  Description of Artificial Sequence: Synthetic oligonucleotide
cucuuaaccaguuugcggu

SEQ ID NO: 2606252 - RNA, 19 nt, Artificial Sequence
  Description of Artificial Sequence: Synthetic oligonucleotide
auggcugccgaucacccca

SEQ ID NO: 2606253 - RNA, 19 nt, Artificial Sequence
  Description of Artificial Sequence: Synthetic oligonucleotide
gacacucguagauuuggga

SEQ ID NO: 2606254 - RNA, 19 nt, Artificial Sequence
  Description of Artificial Sequence: Synthetic oligonucleotide
uagauaccgagcagucagc

SEQ ID NO: 2606255 - RNA, 19 nt, Artificial Sequence
  Description of Artificial Sequence: Synthetic oligonucleotide
gagggaugggacuccagac

SEQ ID NO: 2606256 - RNA, 19 nt, Artificial Sequence
  Description of Artificial Sequence: Synthetic oligonucleotide
acaagagggaugggacucc

SEQ ID NO: 2606257 - RNA, 19 nt, Artificial Sequence
  Description of Artificial Sequence: Synthetic oligonucleotide
agccagaugcgcuucaaau

SEQ ID NO: 2606258 - RNA, 19 nt, Artificial Sequence
  Description of Artificial Sequence: Synthetic oligonucleotide
uagauuugggagggaauca

SEQ ID NO: 2606259 - RNA, 19 nt, Artificial Sequence
  Description of Artificial Sequence: Synthetic oligonucleotide
ugaugaguugauggccagg

SEQ ID NO: 2606260 - RNA, 19 nt, Artificial Sequence
  Description of Artificial Sequence: Synthetic oligonucleotide
uacgccgcugaaaucgugu

SEQ ID NO: 2606261 - RNA, 19 nt, Artificial Sequence
  Description of Artificial Sequence: Synthetic oligonucleotide
uggguggacacucguagau

SEQ ID NO: 2606262 - RNA, 19 nt, Artificial Sequence
  Description of Artificial Sequence: Synthetic oligonucleotide
acuuuacgccgcugaaauc

SEQ ID NO: 2606263 - RNA, 19 nt, Artificial Sequence
  Description of Artificial Sequence: Synthetic oligonucleotide
agacaagagggaugggacu

SEQ ID NO: 2606264 - RNA, 19 nt, Artificial Sequence
  Description of Artificial Sequence: Synthetic oligonucleotide
gauggacaucuuccugggg

SEQ ID NO: 2606265 - RNA, 19 nt, Artificial Sequence
  Description of Artificial Sequence: Synthetic oligonucleotide
aucuucggggucugccagc

SEQ ID NO: 2606266 - RNA, 19 nt, Artificial Sequence
  Description of Artificial Sequence: Synthetic oligonucleotide
ugaagucaggcgcgccagg

SEQ ID NO: 2606267 - RNA, 19 nt, Artificial Sequence
  Description of Artificial Sequence: Synthetic oligonucleotide
accugcccaaggaacagcc

SEQ ID NO: 2606268 - RNA, 19 nt, Artificial Sequence
  Description of Artificial Sequence: Synthetic oligonucleotide
uagaucuucggggucugcc

SEQ ID NO: 2606269 - RNA, 19 nt, Artificial Sequence
  Description of Artificial Sequence: Synthetic oligonucleotide
augaugaguugauggccag

SEQ ID NO: 2606270 - RNA, 19 nt, Artificial Sequence
  Description of Artificial Sequence: Synthetic oligonucleotide
aacucucuaauggacugau

SEQ ID NO: 2606271 - RNA, 19 nt, Artificial Sequence
  Description of Artificial Sequence: Synthetic oligonucleotide
acuccucaagcuccaacug

SEQ ID NO: 2606272 - RNA, 19 nt, Artificial Sequence
  Description of Artificial Sequence: Synthetic oligonucleotide
agucugggcaauagauacc

SEQ ID NO: 2606273 - RNA, 19 nt, Artificial Sequence
  Description of Artificial Sequence: Synthetic oligonucleotide
aaacuugaucugcuucuuu

SEQ ID NO: 2606274 - RNA, 19 nt, Artificial Sequence
  Description of Artificial Sequence: Synthetic oligonucleotide
aaccaguuugcgguauuug

SEQ ID NO: 2606275 - RNA, 19 nt, Artificial Sequence
  Description of Artificial Sequence: Synthetic oligonucleotide
uuuacgccgcugaaaucgu

SEQ ID NO: 2606276 - RNA, 19 nt, Artificial Sequence
  Description of Artificial Sequence: Synthetic oligonucleotide
agggaugggacuccagacu

SEQ ID NO: 2606277 - RNA, 19 nt, Artificial Sequence
  Description of Artificial Sequence: Synthetic oligonucleotide
aggcugcaaauuguaaagg

SEQ ID NO: 2606278 - RNA, 19 nt, Artificial Sequence
  Description of Artificial Sequence: Synthetic oligonucleotide
ucauugggaccccaacauc

SEQ ID NO: 2606279 - RNA, 19 nt, Artificial Sequence
  Description of Artificial Sequence: Synthetic oligonucleotide
agaucuucggggucugcca

SEQ ID NO: 2606280 - RNA, 19 nt, Artificial Sequence
  Description of Artificial Sequence: Synthetic oligonucleotide
agccaacucucuaauggac

SEQ ID NO: 2606281 - RNA, 19 nt, Artificial Sequence
  Description of Artificial Sequence: Synthetic oligonucleotide
aaggaacagcccugaccag

SEQ ID NO: 2606282 - RNA, 19 nt, Artificial Sequence
  Description of Artificial Sequence: Synthetic oligonucleotide
guuugcgguauuuguggug

SEQ ID NO: 2606283 - RNA, 19 nt, Artificial Sequence
  Description of Artificial Sequence: Synthetic oligonucleotide
gacuuuacgccgcugaaau

SEQ ID NO: 2606284 - RNA, 19 nt, Artificial Sequence
  Description of Artificial Sequence: Synthetic oligonucleotide
cugcaaauuguaaaggggu

SEQ ID NO: 2606285 - RNA, 19 nt, Artificial Sequence
  Description of Artificial Sequence: Synthetic oligonucleotide
aguuugcgguauuuguggu

SEQ ID NO: 2606286 - RNA, 19 nt, Artificial Sequence
  Description of Artificial Sequence: Synthetic oligonucleotide
ccgacuuuggcuugcaggc

SEQ ID NO: 2606287 - RNA, 19 nt, Artificial Sequence
  Description of Artificial Sequence: Synthetic oligonucleotide
cugccuucagccagaugcg

SEQ ID NO: 2606288 - RNA, 19 nt, Artificial Sequence
  Description of Artificial Sequence: Synthetic oligonucleotide
uugggaccccaacauccag

SEQ ID NO: 2606289 - RNA, 19 nt, Artificial Sequence
  Description of Artificial Sequence: Synthetic oligonucleotide
aaauuguaaagggguggaa

SEQ ID NO: 2606290 - RNA, 19 nt, Artificial Sequence
  Description of Artificial Sequence: Synthetic oligonucleotide
ugcccaaggaacagcccug

SEQ ID NO: 2606291 - RNA, 19 nt, Artificial Sequence
  Description of Artificial Sequence: Synthetic oligonucleotide
gaacuccucaagcuccaac

SEQ ID NO: 2606292 - RNA, 19 nt, Artificial Sequence
  Description of Artificial Sequence: Synthetic oligonucleotide
ccagcugugaagucaggcg

SEQ ID NO: 2606293 - RNA, 19 nt, Artificial Sequence
  Description of Artificial Sequence: Synthetic oligonucleotide
guaaagggguggaaaagca

SEQ ID NO: 2606294 - RNA, 19 nt, Artificial Sequence
  Description of Artificial Sequence: Synthetic oligonucleotide
ggacugauggacaucuucc

SEQ ID NO: 2606295 - RNA, 19 nt, Artificial Sequence
  Description of Artificial Sequence: Synthetic oligonucleotide
ucggaucuucagcacauuu

SEQ ID NO: 2606296 - RNA, 19 nt, Artificial Sequence
  Description of Artificial Sequence: Synthetic oligonucleotide
ccucuuaaccaguuugcgg

SEQ ID NO: 2606297 - RNA, 19 nt, Artificial Sequence
  Description of Artificial Sequence: Synthetic oligonucleotide
ugggaccccaacauccagu

SEQ ID NO: 2606298 - RNA, 19 nt, Artificial Sequence
  Description of Artificial Sequence: Synthetic oligonucleotide
acgacugaaaccugcccaa

SEQ ID NO: 2606299 - RNA, 19 nt, Artificial Sequence
  Description of Artificial Sequence: Synthetic oligonucleotide
ugguucaucuuccgucuuc

SEQ ID NO: 2606300 - RNA, 19 nt, Artificial Sequence
  Description of Artificial Sequence: Synthetic oligonucleotide
ucagccguccuucccggac

SEQ ID NO: 2606301 - RNA, 19 nt, Artificial Sequence
  Description of Artificial Sequence: Synthetic oligonucleotide
acuucccugacucccugcu

SEQ ID NO: 2606302 - RNA, 19 nt, Artificial Sequence
  Description of Artificial Sequence: Synthetic oligonucleotide
caaauuguaaaggggugga

SEQ ID NO: 2606303 - RNA, 19 nt, Artificial Sequence
  Description of Artificial Sequence: Synthetic oligonucleotide
ccaacauccagucugggca

SEQ ID NO: 2606304 - RNA, 19 nt, Artificial Sequence
  Description of Artificial Sequence: Synthetic oligonucleotide
gaggcagcccgacuuuggc

SEQ ID NO: 2606305 - RNA, 19 nt, Artificial Sequence
  Description of Artificial Sequence: Synthetic oligonucleotide
gccaggaacgacugaaacc

SEQ ID NO: 2606306 - RNA, 19 nt, Artificial Sequence
  Description of Artificial Sequence: Synthetic oligonucleotide
ggaaucacagucauuggga

SEQ ID NO: 2606307 - RNA, 19 nt, Artificial Sequence
  Description of Artificial Sequence: Synthetic oligonucleotide
ucguagauuugggagggaa

SEQ ID NO: 2606308 - RNA, 19 nt, Artificial Sequence
  Description of Artificial Sequence: Synthetic oligonucleotide
uggcaucccagacuucccu

SEQ ID NO: 2606309 - RNA, 19 nt, Artificial Sequence
  Description of Artificial Sequence: Synthetic oligonucleotide
cuucaggccugccuucagc

SEQ ID NO: 2606310 - RNA, 19 nt, Artificial Sequence
  Description of Artificial Sequence: Synthetic oligonucleotide
gauaccgagcagucagcca

SEQ ID NO: 2606311 - RNA, 19 nt, Artificial Sequence
  Description of Artificial Sequence: Synthetic oligonucleotide
agcugugaagucaggcgcg

SEQ ID NO: 2606312 - RNA, 19 nt, Artificial Sequence
  Description of Artificial Sequence: Synthetic oligonucleotide
acaggugcucaaagcacac

SEQ ID NO: 2606313 - RNA, 19 nt, Artificial Sequence
  Description of Artificial Sequence: Synthetic oligonucleotide
ucuuaaccaguuugcggua

SEQ ID NO: 2606314 - RNA, 19 nt, Artificial Sequence
  Description of Artificial Sequence: Synthetic oligonucleotide
gggcaauagauaccgagca

SEQ ID NO: 2606315 - RNA, 19 nt, Artificial Sequence
  Description of Artificial Sequence: Synthetic oligonucleotide
ggcaauagauaccgagcag

SEQ ID NO: 2606316 - RNA, 19 nt, Artificial Sequence
  Description of Artificial Sequence: Synthetic oligonucleotide
agucagccaacucucuaau

SEQ ID NO: 2606317 - RNA, 19 nt, Artificial Sequence
  Description of Artificial Sequence: Synthetic oligonucleotide
gcuugcaggcugcaaauug

SEQ ID NO: 2606318 - RNA, 19 nt, Artificial Sequence
  Description of Artificial Sequence: Synthetic oligonucleotide
guccucuuaaccaguuugc

SEQ ID NO: 2606319 - RNA, 19 nt, Artificial Sequence
  Description of Artificial Sequence: Synthetic oligonucleotide
uucccggacuuuacgccgc

SEQ ID NO: 2606320 - RNA, 19 nt, Artificial Sequence
  Description of Artificial Sequence: Synthetic oligonucleotide
guccuucccggacuuuacg

SEQ ID NO: 2606321 - RNA, 19 nt, Artificial Sequence
  Description of Artificial Sequence: Synthetic oligonucleotide
acgccgcugaaaucguguc

SEQ ID NO: 2606322 - RNA, 19 nt, Artificial Sequence
  Description of Artificial Sequence: Synthetic oligonucleotide
ccaaggaacagcccugacc

SEQ ID NO: 2606323 - RNA, 19 nt, Artificial Sequence
  Description of Artificial Sequence: Synthetic oligonucleotide
cauguagaucuucgggguc

SEQ ID NO: 2606324 - RNA, 19 nt, Artificial Sequence
  Description of Artificial Sequence: Synthetic oligonucleotide
cacugcaguggcaucccag

SEQ ID NO: 2606325 - RNA, 19 nt, Artificial Sequence
  Description of Artificial Sequence: Synthetic oligonucleotide
caggccugccuucagccag

SEQ ID NO: 2606326 - RNA, 19 nt, Artificial Sequence
  Description of Artificial Sequence: Synthetic oligonucleotide
guauuuguggugguucauc

SEQ ID NO: 2606327 - RNA, 19 nt, Artificial Sequence
  Description of Artificial Sequence: Synthetic oligonucleotide
cccgacuuuggcuugcagg

SEQ ID NO: 2606328 - RNA, 19 nt, Artificial Sequence
  Description of Artificial Sequence: Synthetic oligonucleotide
uuaaccaguuugcgguauu

SEQ ID NO: 2606329 - RNA, 19 nt, Artificial Sequence
  Description of Artificial Sequence: Synthetic oligonucleotide
caagcuccaacugggcccc

SEQ ID NO: 2606330 - RNA, 19 nt, Artificial Sequence
  Description of Artificial Sequence: Synthetic oligonucleotide
uuacgccgcugaaaucgug

SEQ ID NO: 2606331 - RNA, 19 nt, Artificial Sequence
  Description of Artificial Sequence: Synthetic oligonucleotide
cugcacugcaguggcaucc

SEQ ID NO: 2606332 - RNA, 19 nt, Artificial Sequence
  Description of Artificial Sequence: Synthetic oligonucleotide
ccaacucucuaauggacug

SEQ ID NO: 2606333 - RNA, 19 nt, Artificial Sequence
  Description of Artificial Sequence: Synthetic oligonucleotide
uucagccagaugcgcuuca

SEQ ID NO: 2606334 - RNA, 19 nt, Artificial Sequence
  Description of Artificial Sequence: Synthetic oligonucleotide
uguagaucuucggggucug

SEQ ID NO: 2606335 - RNA, 19 nt, Artificial Sequence
  Description of Artificial Sequence: Synthetic oligonucleotide
gucagccaacucucuaaug

SEQ ID NO: 2606336 - RNA, 19 nt, Artificial Sequence
  Description of Artificial Sequence: Synthetic oligonucleotide
ucugggcaauagauaccga

SEQ ID NO: 2606337 - RNA, 19 nt, Artificial Sequence
  Description of Artificial Sequence: Synthetic oligonucleotide
ucguguccucuuaaccagu

SEQ ID NO: 2606338 - RNA, 19 nt, Artificial Sequence
  Description of Artificial Sequence: Synthetic oligonucleotide
aagucaggcgcgccaggaa

SEQ ID NO: 2606339 - RNA, 19 nt, Artificial Sequence
  Description of Artificial Sequence: Synthetic oligonucleotide
gaucaccccagaggcaggc

SEQ ID NO: 2606340 - RNA, 19 nt, Artificial Sequence
  Description of Artificial Sequence: Synthetic oligonucleotide
auuuguggugguucaucuu

SEQ ID NO: 2606341 - RNA, 19 nt, Artificial Sequence
  Description of Artificial Sequence: Synthetic oligonucleotide
cagucauugggaccccaac

SEQ ID NO: 2606342 - RNA, 19 nt, Artificial Sequence
  Description of Artificial Sequence: Synthetic oligonucleotide
gaugcgcuucaaaucguuc

SEQ ID NO: 2606343 - RNA, 19 nt, Artificial Sequence
  Description of Artificial Sequence: Synthetic oligonucleotide
ucaggccugccuucagcca

SEQ ID NO: 2606344 - RNA, 19 nt, Artificial Sequence
  Description of Artificial Sequence: Synthetic oligonucleotide
gggaugggacuccagacuc

SEQ ID NO: 2606345 - RNA, 19 nt, Artificial Sequence
  Description of Artificial Sequence: Synthetic oligonucleotide
ggaacaugaugaguugaug

SEQ ID NO: 2606346 - RNA, 19 nt, Artificial Sequence
  Description of Artificial Sequence: Synthetic oligonucleotide
ucuucggggucugccagcu

SEQ ID NO: 2606347 - RNA, 19 nt, Artificial Sequence
  Description of Artificial Sequence: Synthetic oligonucleotide
gacuucccugacucccugc

SEQ ID NO: 2606348 - RNA, 19 nt, Artificial Sequence
  Description of Artificial Sequence: Synthetic oligonucleotide
aggaacaugaugaguugau

SEQ ID NO: 2606349 - RNA, 19 nt, Artificial Sequence
  Description of Artificial Sequence: Synthetic oligonucleotide
gucauugggaccccaacau

SEQ ID NO: 2606350 - RNA, 19 nt, Artificial Sequence
  Description of Artificial Sequence: Synthetic oligonucleotide
agacuucccugacucccug

SEQ ID NO: 2606351 - RNA, 19 nt, Artificial Sequence
  Description of Artificial Sequence: Synthetic oligonucleotide
cugaccagcugugaaguca

SEQ ID NO: 2606352 - RNA, 19 nt, Artificial Sequence
  Description of Artificial Sequence: Synthetic oligonucleotide
ggaaaagcauggcugccga

SEQ ID NO: 2606353 - RNA, 19 nt, Artificial Sequence
  Description of Artificial Sequence: Synthetic oligonucleotide
cagccaacucucuaaugga

SEQ ID NO: 2606354 - RNA, 19 nt, Artificial Sequence
  Description of Artificial Sequence: Synthetic oligonucleotide
aucuuccgucuucggaucu

SEQ ID NO: 2606355 - RNA, 19 nt, Artificial Sequence
  Description of Artificial Sequence: Synthetic oligonucleotide
ggaacgacugaaaccugcc

SEQ ID NO: 2606356 - RNA, 19 nt, Artificial Sequence
  Description of Artificial Sequence: Synthetic oligonucleotide
uaauggacugauggacauc

SEQ ID NO: 2606357 - RNA, 19 nt, Artificial Sequence
  Description of Artificial Sequence: Synthetic oligonucleotide
guggaaaagcauggcugcc

SEQ ID NO: 2606358 - RNA, 19 nt, Artificial Sequence
  Description of Artificial Sequence: Synthetic oligonucleotide
gccagaugcgcuucaaauc

SEQ ID NO: 2606359 - RNA, 19 nt, Artificial Sequence
  Description of Artificial Sequence: Synthetic oligonucleotide
gaagucaggcgcgccagga

SEQ ID NO: 2606360 - RNA, 19 nt, Artificial Sequence
  Description of Artificial Sequence: Synthetic oligonucleotide
accccaacauccagucugg

SEQ ID NO: 2606361 - RNA, 19 nt, Artificial Sequence
  Description of Artificial Sequence: Synthetic oligonucleotide
ccagaggcaggccaggaac

SEQ ID NO: 2606362 - RNA, 19 nt, Artificial Sequence
  Description of Artificial Sequence: Synthetic oligonucleotide
aucccagacuucccugacu

SEQ ID NO: 2606363 - RNA, 19 nt, Artificial Sequence
  Description of Artificial Sequence: Synthetic oligonucleotide
uaccgagcagucagccaac

SEQ ID NO: 2606364 - RNA, 19 nt, Artificial Sequence
  Description of Artificial Sequence: Synthetic oligonucleotide
ccuucccggacuuuacgcc

SEQ ID NO: 2606365 - RNA, 19 nt, Artificial Sequence
  Description of Artificial Sequence: Synthetic oligonucleotide
cugaaaccugcccaaggaa

SEQ ID NO: 2606366 - RNA, 19 nt, Artificial Sequence
  Description of Artificial Sequence: Synthetic oligonucleotide
aagagggaugggacuccag

SEQ ID NO: 2606367 - RNA, 19 nt, Artificial Sequence
  Description of Artificial Sequence: Synthetic oligonucleotide
cuaauggacugauggacau

SEQ ID NO: 2606368 - RNA, 19 nt, Artificial Sequence
  Description of Artificial Sequence: Synthetic oligonucleotide
caucccagacuucccugac

SEQ ID NO: 2606369 - RNA, 19 nt, Artificial Sequence
  Description of Artificial Sequence: Synthetic oligonucleotide
aggcagcccgacuuuggcu

SEQ ID NO: 2606370 - RNA, 19 nt, Artificial Sequence
  Description of Artificial Sequence: Synthetic oligonucleotide
uaaccaguuugcgguauuu

SEQ ID NO: 2606371 - RNA, 19 nt, Artificial Sequence
  Description of Artificial Sequence: Synthetic oligonucleotide
uggcugccgaucaccccag

SEQ ID NO: 2606372 - RNA, 19 nt, Artificial Sequence
  Description of Artificial Sequence: Synthetic oligonucleotide
ccgucuucggaucuucagc

SEQ ID NO: 2606373 - RNA, 19 nt, Artificial Sequence
  Description of Artificial Sequence: Synthetic oligonucleotide
ugccuucagccagaugcgc

SEQ ID NO: 2606374 - RNA, 19 nt, Artificial Sequence
  Description of Artificial Sequence: Synthetic oligonucleotide
aggcgcgccaggaacauga

SEQ ID NO: 2606375 - RNA, 19 nt, Artificial Sequence
  Description of Artificial Sequence: Synthetic oligonucleotide
ggccaggaacgacugaaac

SEQ ID NO: 2606376 - RNA, 19 nt, Artificial Sequence
  Description of Artificial Sequence: Synthetic oligonucleotide
ccagacuucccugacuccc

SEQ ID NO: 2606377 - RNA, 19 nt, Artificial Sequence
  Description of Artificial Sequence: Synthetic oligonucleotide
cugcaguggcaucccagac

SEQ ID NO: 2606378 - RNA, 19 nt, Artificial Sequence
  Description of Artificial Sequence: Synthetic oligonucleotide
ggacacucguagauuuggg

SEQ ID NO: 2606379 - RNA, 19 nt, Artificial Sequence
  Description of Artificial Sequence: Synthetic oligonucleotide
gagagacaagagggauggg

SEQ ID NO: 2606380 - RNA, 19 nt, Artificial Sequence
  Description of Artificial Sequence: Synthetic oligonucleotide
caggaacaugaugaguuga

SEQ ID NO: 2606381 - RNA, 19 nt, Artificial Sequence
  Description of Artificial Sequence: Synthetic oligonucleotide
cucauuuguucuucaugua

SEQ ID NO: 2606382 - RNA, 19 nt, Artificial Sequence
  Description of Artificial Sequence: Synthetic oligonucleotide
uggcuggguggacacucgu

SEQ ID NO: 2606383 - RNA, 19 nt, Artificial Sequence
  Description of Artificial Sequence: Synthetic oligonucleotide
caggaacgacugaaaccug

SEQ ID NO: 2606384 - RNA, 19 nt, Artificial Sequence
  Description of Artificial Sequence: Synthetic oligonucleotide
agcccugaccagcugugaa

SEQ ID NO: 2606385 - RNA, 19 nt, Artificial Sequence
  Description of Artificial Sequence: Synthetic oligonucleotide
uuccaacguuuauuauaau

SEQ ID NO: 2606386 - RNA, 19 nt, Artificial Sequence
  Description of Artificial Sequence: Synthetic oligonucleotide
ccaggaacaugaugaguug

SEQ ID NO: 2606387 - RNA, 19 nt, Artificial Sequence
  Description of Artificial Sequence: Synthetic oligonucleotide
ccccuuaccagggagggag

SEQ ID NO: 2606388 - RNA, 19 nt, Artificial Sequence
  Description of Artificial Sequence: Synthetic oligonucleotide
gcccugaccagcugugaag

SEQ ID NO: 2606389 - RNA, 19 nt, Artificial Sequence
  Description of Artificial Sequence: Synthetic oligonucleotide
gggaccccaacauccaguc

SEQ ID NO: 2606390 - RNA, 19 nt, Artificial Sequence
  Description of Artificial Sequence: Synthetic oligonucleotide
gcugccgaucaccccagag

SEQ ID NO: 2606391 - RNA, 19 nt, Artificial Sequence
  Description of Artificial Sequence: Synthetic oligonucleotide
aacauccagucugggcaau

SEQ ID NO: 2606392 - RNA, 19 nt, Artificial Sequence
  Description of Artificial Sequence: Synthetic oligonucleotide
uggccaggccacaggugcu

SEQ ID NO: 2606393 - RNA, 19 nt, Artificial Sequence
  Description of Artificial Sequence: Synthetic oligonucleotide
ccgaucaccccagaggcag

SEQ ID NO: 2606394 - RNA, 19 nt, Artificial Sequence
  Description of Artificial Sequence: Synthetic oligonucleotide
guggacacucguagauuug

SEQ ID NO: 2606395 - RNA, 19 nt, Artificial Sequence
  Description of Artificial Sequence: Synthetic oligonucleotide
acagcccugaccagcugug

SEQ ID NO: 2606396 - RNA, 19 nt, Artificial Sequence
  Description of Artificial Sequence: Synthetic oligonucleotide
cugaaaucguguccucuua

SEQ ID NO: 2606397 - RNA, 19 nt, Artificial Sequence
  Description of Artificial Sequence: Synthetic oligonucleotide
gcaagagagacaagaggga

SEQ ID NO: 2606398 - RNA, 19 nt, Artificial Sequence
  Description of Artificial Sequence: Synthetic oligonucleotide
cuggguggacacucguaga

SEQ ID NO: 2606399 - RNA, 19 nt, Artificial Sequence
  Description of Artificial Sequence: Synthetic oligonucleotide
gagggaggcagcccgacuu

SEQ ID NO: 2606400 - RNA, 19 nt, Artificial Sequence
  Description of Artificial Sequence: Synthetic oligonucleotide
cguuuauuauaaugaguca

SEQ ID NO: 2606401 - RNA, 19 nt, Artificial Sequence
  Description of Artificial Sequence: Synthetic oligonucleotide
ucagccagaugcgcuucaa

SEQ ID NO: 2606402 - RNA, 19 nt, Artificial Sequence
  Description of Artificial Sequence: Synthetic oligonucleotide
cugcccaaggaacagcccu

SEQ ID NO: 2606403 - RNA, 19 nt, Artificial Sequence
  Description of Artificial Sequence: Synthetic oligonucleotide
cuucggaucuucagcacau

SEQ ID NO: 2606404 - RNA, 19 nt, Artificial Sequence
  Description of Artificial Sequence: Synthetic oligonucleotide
ucacagucauugggacccc

SEQ ID NO: 2606405 - RNA, 19 nt, Artificial Sequence
  Description of Artificial Sequence: Synthetic oligonucleotide
uucagccguccuucccgga

SEQ ID NO: 2606406 - RNA, 19 nt, Artificial Sequence
  Description of Artificial Sequence: Synthetic oligonucleotide
cuuaccagggagggaggca

SEQ ID NO: 2606407 - RNA, 19 nt, Artificial Sequence
  Description of Artificial Sequence: Synthetic oligonucleotide
cugugaagucaggcgcgcc

SEQ ID NO: 2606408 - RNA, 19 nt, Artificial Sequence
  Description of Artificial Sequence: Synthetic oligonucleotide
ucggggucugccagcucuc

SEQ ID NO: 2606409 - RNA, 19 nt, Artificial Sequence
  Description of Artificial Sequence: Synthetic oligonucleotide
gguggacacucguagauuu

SEQ ID NO: 2606410 - RNA, 19 nt, Artificial Sequence
  Description of Artificial Sequence: Synthetic oligonucleotide
gcuucaaaucguucucaaa

SEQ ID NO: 2606411 - RNA, 19 nt, Artificial Sequence
  Description of Artificial Sequence: Synthetic oligonucleotide
agaugcgcuucaaaucguu

SEQ ID NO: 2606412 - RNA, 19 nt, Artificial Sequence
  Description of Artificial Sequence: Synthetic oligonucleotide
agcucucaggagcuuccuu

SEQ ID NO: 2606413 - RNA, 19 nt, Artificial Sequence
  Description of Artificial Sequence: Synthetic oligonucleotide
caacucucuaauggacuga

SEQ ID NO: 2606414 - RNA, 19 nt, Artificial Sequence
  Description of Artificial Sequence: Synthetic oligonucleotide
ucccggacuuuacgccgcu

SEQ ID NO: 2606415 - RNA, 19 nt, Artificial Sequence
  Description of Artificial Sequence: Synthetic oligonucleotide
gacucccugcuuggcuucc

SEQ ID NO: 2606416 - RNA, 19 nt, Artificial Sequence
  Description of Artificial Sequence: Synthetic oligonucleotide
acagucauugggaccccaa

SEQ ID NO: 2606417 - RNA, 19 nt, Artificial Sequence
  Description of Artificial Sequence: Synthetic oligonucleotide
gaugggacuccagacucau

SEQ ID NO: 2606418 - RNA, 19 nt, Artificial Sequence
  Description of Artificial Sequence: Synthetic oligonucleotide
gcgguauuuguggugguuc

SEQ ID NO: 2606419 - RNA, 19 nt, Artificial Sequence
  Description of Artificial Sequence: Synthetic oligonucleotide
gcgccaggaacaugaugag

SEQ ID NO: 2606420 - RNA, 19 nt, Artificial Sequence
  Description of Artificial Sequence: Synthetic oligonucleotide
gcaucccagacuucccuga

SEQ ID NO: 2606421 - RNA, 19 nt, Artificial Sequence
  Description of Artificial Sequence: Synthetic oligonucleotide
ucuuccgucuucggaucuu

SEQ ID NO: 2606422 - RNA, 19 nt, Artificial Sequence
  Description of Artificial Sequence: Synthetic oligonucleotide
guagaucuucggggucugc

SEQ ID NO: 2606423 - RNA, 19 nt, Artificial Sequence
  Description of Artificial Sequence: Synthetic oligonucleotide
agggaggcagcccgacuuu

SEQ ID NO: 2606424 - RNA, 19 nt, Artificial Sequence
  Description of Artificial Sequence: Synthetic oligonucleotide
gucaggcgcgccaggaaca

SEQ ID NO: 2606425 - RNA, 19 nt, Artificial Sequence
  Description of Artificial Sequence: Synthetic oligonucleotide
accccagaggcaggccagg

SEQ ID NO: 2606426 - RNA, 19 nt, Artificial Sequence
  Description of Artificial Sequence: Synthetic oligonucleotide
gggguggaaaagcauggcu

SEQ ID NO: 2606427 - RNA, 19 nt, Artificial Sequence
  Description of Artificial Sequence: Synthetic oligonucleotide
gccaggaacaugaugaguu

SEQ ID NO: 2606428 - RNA, 19 nt, Artificial Sequence
  Description of Artificial Sequence: Synthetic oligonucleotide
gcauggcugccgaucaccc

SEQ ID NO: 2606429 - RNA, 19 nt, Artificial Sequence
  Description of Artificial Sequence: Synthetic oligonucleotide
gcaguggcaucccagacuu

SEQ ID NO: 2606430 - RNA, 19 nt, Artificial Sequence
  Description of Artificial Sequence: Synthetic oligonucleotide
guggugguucaucuuccgu

SEQ ID NO: 2606431 - RNA, 19 nt, Artificial Sequence
  Description of Artificial Sequence: Synthetic oligonucleotide
gcugugaagucaggcgcgc

SEQ ID NO: 2606432 - RNA, 19 nt, Artificial Sequence
  Description of Artificial Sequence: Synthetic oligonucleotide
uucggaucuucagcacauu

SEQ ID NO: 2606433 - RNA, 19 nt, Artificial Sequence
  Description of Artificial Sequence: Synthetic oligonucleotide
ggcaggccaggaacgacug

SEQ ID NO: 2606434 - RNA, 19 nt, Artificial Sequence
  Description of Artificial Sequence: Synthetic oligonucleotide
accgagcagucagccaacu

SEQ ID NO: 2606435 - RNA, 19 nt, Artificial Sequence
  Description of Artificial Sequence: Synthetic oligonucleotide
caagagggaugggacucca

SEQ ID NO: 2606436 - RNA, 19 nt, Artificial Sequence
  Description of Artificial Sequence: Synthetic oligonucleotide
ccuuaccagggagggaggc

SEQ ID NO: 2606437 - RNA, 19 nt, Artificial Sequence
  Description of Artificial Sequence: Synthetic oligonucleotide
cugacucccugcuuggcuu

SEQ ID NO: 2606438 - RNA, 19 nt, Artificial Sequence
  Description of Artificial Sequence: Synthetic oligonucleotide
ggacuuuacgccgcugaaa

SEQ ID NO: 2606439 - RNA, 19 nt, Artificial Sequence
  Description of Artificial Sequence: Synthetic oligonucleotide
uccuggggaccaggaacuc

SEQ ID NO: 2606440 - RNA, 19 nt, Artificial Sequence
  Description of Artificial Sequence: Synthetic oligonucleotide
gcugaaaucguguccucuu

SEQ ID NO: 2606441 - RNA, 19 nt, Artificial Sequence
  Description of Artificial Sequence: Synthetic oligonucleotide
cccagacuucccugacucc

SEQ ID NO: 2606442 - RNA, 19 nt, Artificial Sequence
  Description of Artificial Sequence: Synthetic oligonucleotide
cccuuaccagggagggagg

SEQ ID NO: 2606443 - RNA, 19 nt, Artificial Sequence
  Description of Artificial Sequence: Synthetic oligonucleotide
agccguccuucccggacuu

SEQ ID NO: 2606444 - RNA, 19 nt, Artificial Sequence
  Description of Artificial Sequence: Synthetic oligonucleotide
cagacuucccugacucccu

SEQ ID NO: 2606445 - RNA, 19 nt, Artificial Sequence
  Description of Artificial Sequence: Synthetic oligonucleotide
gccgcugaaaucguguccu

SEQ ID NO: 2606446 - RNA, 19 nt, Artificial Sequence
  Description of Artificial Sequence: Synthetic oligonucleotide
ccuggggaccaggaacucc

SEQ ID NO: 2606447 - RNA, 19 nt, Artificial Sequence
  Description of Artificial Sequence: Synthetic oligonucleotide
cagaugcgcuucaaaucgu

SEQ ID NO: 2606448 - RNA, 19 nt, Artificial Sequence
  Description of Artificial Sequence: Synthetic oligonucleotide
cuuaaccaguuugcgguau

SEQ ID NO: 2606449 - RNA, 19 nt, Artificial Sequence
  Description of Artificial Sequence: Synthetic oligonucleotide
cagcccgacuuuggcuugc

SEQ ID NO: 2606450 - RNA, 19 nt, Artificial Sequence
  Description of Artificial Sequence: Synthetic oligonucleotide
aggccaggaacgacugaaa

SEQ ID NO: 2606451 - RNA, 19 nt, Artificial Sequence
  Description of Artificial Sequence: Synthetic oligonucleotide
gcagcccgacuuuggcuug

SEQ ID NO: 2606452 - RNA, 19 nt, Artificial Sequence
  Description of Artificial Sequence: Synthetic oligonucleotide
gggagggaaucacagucau

SEQ ID NO: 2606453 - RNA, 19 nt, Artificial Sequence
  Description of Artificial Sequence: Synthetic oligonucleotide
caggugcucaaagcacaca

SEQ ID NO: 2606454 - RNA, 19 nt, Artificial Sequence
  Description of Artificial Sequence: Synthetic oligonucleotide
cagccagaugcgcuucaaa

SEQ ID NO: 2606455 - RNA, 19 nt, Artificial Sequence
  Description of Artificial Sequence: Synthetic oligonucleotide
ccggacuuuacgccgcuga

SEQ ID NO: 2606456 - RNA, 19 nt, Artificial Sequence
  Description of Artificial Sequence: Synthetic oligonucleotide
ggcagcccgacuuuggcuu

SEQ ID NO: 2606457 - RNA, 19 nt, Artificial Sequence
  Description of Artificial Sequence: Synthetic oligonucleotide
uccuggcuggguggacacu

SEQ ID NO: 2606458 - RNA, 19 nt, Artificial Sequence
  Description of Artificial Sequence: Synthetic oligonucleotide
ggaacagcccugaccagcu

SEQ ID NO: 2606459 - RNA, 19 nt, Artificial Sequence
  Description of Artificial Sequence: Synthetic oligonucleotide
gccaacucucuaauggacu

SEQ ID NO: 2606460 - RNA, 19 nt, Artificial Sequence
  Description of Artificial Sequence: Synthetic oligonucleotide
ggaugggacuccagacuca

SEQ ID NO: 2606461 - RNA, 19 nt, Artificial Sequence
  Description of Artificial Sequence: Synthetic oligonucleotide
uccuccuggcuggguggac

SEQ ID NO: 2606462 - RNA, 19 nt, Artificial Sequence
  Description of Artificial Sequence: Synthetic oligonucleotide
cgguauuuguggugguuca

SEQ ID NO: 2606463 - RNA, 19 nt, Artificial Sequence
  Description of Artificial Sequence: Synthetic oligonucleotide
cgccgcugaaaucgugucc

SEQ ID NO: 2606464 - RNA, 19 nt, Artificial Sequence
  Description of Artificial Sequence: Synthetic oligonucleotide
cuucggggucugccagcuc

SEQ ID NO: 2606465 - RNA, 19 nt, Artificial Sequence
  Description of Artificial Sequence: Synthetic oligonucleotide
aggccugccuucagccaga

SEQ ID NO: 2606466 - RNA, 19 nt, Artificial Sequence
  Description of Artificial Sequence: Synthetic oligonucleotide
gccagcucucaggagcuuc

SEQ ID NO: 2606467 - RNA, 19 nt, Artificial Sequence
  Description of Artificial Sequence: Synthetic oligonucleotide
cgaucaccccagaggcagg

SEQ ID NO: 2606468 - RNA, 19 nt, Artificial Sequence
  Description of Artificial Sequence: Synthetic oligonucleotide
cguccuucccggacuuuac

SEQ ID NO: 2606469 - RNA, 19 nt, Artificial Sequence
  Description of Artificial Sequence: Synthetic oligonucleotide
cucguagauuugggaggga

SEQ ID NO: 2606470 - RNA, 19 nt, Artificial Sequence
  Description of Artificial Sequence: Synthetic oligonucleotide
agcccgacuuuggcuugca

SEQ ID NO: 2606471 - RNA, 19 nt, Artificial Sequence
  Description of Artificial Sequence: Synthetic oligonucleotide
guguccucuuaaccaguuu

SEQ ID NO: 2606472 - RNA, 19 nt, Artificial Sequence
  Description of Artificial Sequence: Synthetic oligonucleotide
gcccgacuuuggcuugcag

SEQ ID NO: 2606473 - RNA, 19 nt, Artificial Sequence
  Description of Artificial Sequence: Synthetic oligonucleotide
auggacugauggacaucuu

SEQ ID NO: 2606474 - RNA, 19 nt, Artificial Sequence
  Description of Artificial Sequence: Synthetic oligonucleotide
ccgagcagucagccaacuc

SEQ ID NO: 2606475 - RNA, 19 nt, Artificial Sequence
  Description of Artificial Sequence: Synthetic oligonucleotide
caggcgcgccaggaacaug

SEQ ID NO: 2606476 - RNA, 19 nt, Artificial Sequence
  Description of Artificial Sequence: Synthetic oligonucleotide
cgacugaaaccugcccaag

SEQ ID NO: 2606477 - RNA, 19 nt, Artificial Sequence
  Description of Artificial Sequence: Synthetic oligonucleotide
gugguucaucuuccgucuu

SEQ ID NO: 2606478 - RNA, 19 nt, Artificial Sequence
  Description of Artificial Sequence: Synthetic oligonucleotide
ccccaacauccagucuggg

SEQ ID NO: 2606479 - RNA, 19 nt, Artificial Sequence
  Description of Artificial Sequence: Synthetic oligonucleotide
gcacugcaguggcauccca

SEQ ID NO: 2606480 - RNA, 19 nt, Artificial Sequence
  Description of Artificial Sequence: Synthetic oligonucleotide
ccugacucccugcuuggcu

SEQ ID NO: 2606481 - RNA, 19 nt, Artificial Sequence
  Description of Artificial Sequence: Synthetic oligonucleotide
cagcccugaccagcuguga

SEQ ID NO: 2606482 - RNA, 19 nt, Artificial Sequence
  Description of Artificial Sequence: Synthetic oligonucleotide
augggacuccagacucauu

SEQ ID NO: 2606483 - RNA, 19 nt, Artificial Sequence
  Description of Artificial Sequence: Synthetic oligonucleotide
cguagauuugggagggaau

SEQ ID NO: 2606484 - RNA, 19 nt, Artificial Sequence
  Description of Artificial Sequence: Synthetic oligonucleotide
ggaacuccucaagcuccaa

SEQ ID NO: 2606485 - RNA, 19 nt, Artificial Sequence
  Description of Artificial Sequence: Synthetic oligonucleotide
ggaccccaacauccagucu

SEQ ID NO: 2606486 - RNA, 19 nt, Artificial Sequence
  Description of Artificial Sequence: Synthetic oligonucleotide
gccgaucaccccagaggca

SEQ ID NO: 2606487 - RNA, 19 nt, Artificial Sequence
  Description of Artificial Sequence: Synthetic oligonucleotide
ggcuggguggacacucgua

SEQ ID NO: 2606488 - RNA, 19 nt, Artificial Sequence
  Description of Artificial Sequence: Synthetic oligonucleotide
cccugaccagcugugaagu

SEQ ID NO: 2606489 - RNA, 19 nt, Artificial Sequence
  Description of Artificial Sequence: Synthetic oligonucleotide
cggacuuuacgccgcugaa

SEQ ID NO: 2606490 - RNA, 19 nt, Artificial Sequence
  Description of Artificial Sequence: Synthetic oligonucleotide
ggguggacacucguagauu

SEQ ID NO: 2606491 - RNA, 19 nt, Artificial Sequence
  Description of Artificial Sequence: Synthetic oligonucleotide
cagcucucaggagcuuccu

SEQ ID NO: 2606492 - RNA, 19 nt, Artificial Sequence
  Description of Artificial Sequence: Synthetic oligonucleotide
ggcugccgaucaccccaga

SEQ ID NO: 2606493 - RNA, 19 nt, Artificial Sequence
  Description of Artificial Sequence: Synthetic oligonucleotide
gcacugcacugcaguggca

SEQ ID NO: 2606494 - RNA, 19 nt, Artificial Sequence
  Description of Artificial Sequence: Synthetic oligonucleotide
ggagggaaucacagucauu

SEQ ID NO: 2606495 - RNA, 19 nt, Artificial Sequence
  Description of Artificial Sequence: Synthetic oligonucleotide
cccggacuuuacgccgcug

SEQ ID NO: 2606496 - RNA, 19 nt, Artificial Sequence
  Description of Artificial Sequence: Synthetic oligonucleotide
ggcuugcaggcugcaaauu

SEQ ID NO: 2606497 - RNA, 19 nt, Artificial Sequence
  Description of Artificial Sequence: Synthetic oligonucleotide
cguguccucuuaaccaguu

SEQ ID NO: 2606498 - RNA, 19 nt, Artificial Sequence
  Description of Artificial Sequence: Synthetic oligonucleotide
cgcugaaaucguguccucu

SEQ ID NO: 2606499 - RNA, 19 nt, Artificial Sequence
  Description of Artificial Sequence: Synthetic oligonucleotide
cgacuuuggcuugcaggcu

SEQ ID NO: 2606500 - RNA, 19 nt, Artificial Sequence
  Description of Artificial Sequence: Synthetic oligonucleotide
ggcgcgccaggaacaugau

SEQ ID NO: 2606501 - RNA, 19 nt, Artificial Sequence
  Description of Artificial Sequence: Synthetic oligonucleotide
cggggucugccagcucuca

SEQ ID NO: 2606502 - RNA, 19 nt, Artificial Sequence
  Description of Artificial Sequence: Synthetic oligonucleotide
ugaaagugcauauugguag

SEQ ID NO: 2606503 - RNA, 19 nt, Artificial Sequence
  Description of Artificial Sequence: Synthetic oligonucleotide
uuuccauuguccauguugg

SEQ ID NO: 2606504 - RNA, 19 nt, Artificial Sequence
  Description of Artificial Sequence: Synthetic oligonucleotide
aggaaugggaguuagcugg

SEQ ID NO: 2606505 - RNA, 19 nt, Artificial Sequence
  Description of Artificial Sequence: Synthetic oligonucleotide
uguuugugaacuuuuguag

SEQ ID NO: 2606506 - RNA, 19 nt, Artificial Sequence
  Description of Artificial Sequence: Synthetic oligonucleotide
guuuaggaagcucacaacg

SEQ ID NO: 2606507 - RNA, 19 nt, Artificial Sequence
  Description of Artificial Sequence: Synthetic oligonucleotide
agucgugacgucuugaacg

SEQ ID NO: 2606508 - RNA, 19 nt, Artificial Sequence
  Description of Artificial Sequence: Synthetic oligonucleotide
  modified_base (16)..(16): a, c, u, g, unknown or other
ugucucuugauggagnggg

SEQ ID NO: 2606509 - RNA, 19 nt, Artificial Sequence
  Description of Artificial Sequence: Synthetic oligonucleotide
uuguucucaagaaaggaga

SEQ ID NO: 2606510 - RNA, 19 nt, Artificial Sequence
  Description of Artificial Sequence: Synthetic oligonucleotide
ugcauugucacguaccagc

SEQ ID NO: 2606511 - RNA, 19 nt, Artificial Sequence
  Description of Artificial Sequence: Synthetic oligonucleotide
ugaacgaacagcuugcgaa

SEQ ID NO: 2606512 - RNA, 19 nt, Artificial Sequence
  Description of Artificial Sequence: Synthetic oligonucleotide
uugucguugauaucugugg

SEQ ID NO: 2606513 - RNA, 19 nt, Artificial Sequence
  Description of Artificial Sequence: Synthetic oligonucleotide
uuuaggaagcucacaacgc

SEQ ID NO: 2606514 - RNA, 19 nt, Artificial Sequence
  Description of Artificial Sequence: Synthetic oligonucleotide
uucucaagaaaggagaucu

SEQ ID NO: 2606515 - RNA, 19 nt, Artificial Sequence
  Description of Artificial Sequence: Synthetic oligonucleotide
uguggcauuuccauugucc

SEQ ID NO: 2606516 - RNA, 19 nt, Artificial Sequence
  Description of Artificial Sequence: Synthetic oligonucleotide
ucuuguagcgcacagcuuc

SEQ ID NO: 2606517 - RNA, 19 nt, Artificial Sequence
  Description of Artificial Sequence: Synthetic oligonucleotide
  modified_base (3)..(3): a, c, u, g, unknown or other
agngggaaaagcuuggccu

SEQ ID NO: 2606518 - RNA, 19 nt, Artificial Sequence
  Description of Artificial Sequence: Synthetic oligonucleotide
aaucugggcagaguggccc

SEQ ID NO: 2606519 - RNA, 19 nt, Artificial Sequence
  Description of Artificial Sequence: Synthetic oligonucleotide
acuuuucuugacucgaguc

SEQ ID NO: 2606520 - RNA, 19 nt, Artificial Sequence
  Description of Artificial Sequence: Synthetic oligonucleotide
ucuugaacgaacagcuugc

SEQ ID NO: 2606521 - RNA, 19 nt, Artificial Sequence
  Description of Artificial Sequence: Synthetic oligonucleotide
aagaaaggagaucuucugu

SEQ ID NO: 2606522 - RNA, 19 nt, Artificial Sequence
  Description of Artificial Sequence: Synthetic oligonucleotide
aaagugcauauugguagcc

SEQ ID NO: 2606523 - RNA, 19 nt, Artificial Sequence
  Description of Artificial Sequence: Synthetic oligonucleotide
aacgcaaaucugcauuguc

SEQ ID NO: 2606524 - RNA, 19 nt, Artificial Sequence
  Description of Artificial Sequence: Synthetic oligonucleotide
uuugugaacuuuuguagcu

SEQ ID NO: 2606525 - RNA, 19 nt, Artificial Sequence
  Description of Artificial Sequence: Synthetic oligonucleotide
gaaaagcuuggccuggucc

SEQ ID NO: 2606526 - RNA, 19 nt, Artificial Sequence
  Description of Artificial Sequence: Synthetic oligonucleotide
  modified_base (9)..(9): a, c, u, g, unknown or other
ugauggagngggaaaagcu

SEQ ID NO: 2606527 - RNA, 19 nt, Artificial Sequence
  Description of Artificial Sequence: Synthetic oligonucleotide
uuaggaagcucacaacgca

SEQ ID NO: 2606528 - RNA, 19 nt, Artificial Sequence
  Description of Artificial Sequence: Synthetic oligonucleotide
aguuuaggaagcucacaac

SEQ ID NO: 2606529 - RNA, 19 nt, Artificial Sequence
  Description of Artificial Sequence: Synthetic oligonucleotide
auugucacguaccagcugu

SEQ ID NO: 2606530 - RNA, 19 nt, Artificial Sequence
  Description of Artificial Sequence: Synthetic oligonucleotide
guuugugaacuuuuguagc

SEQ ID NO: 2606531 - RNA, 19 nt, Artificial Sequence
  Description of Artificial Sequence: Synthetic oligonucleotide
gaaagugcauauugguagc

SEQ ID NO: 2606532 - RNA, 19 nt, Artificial Sequence
  Description of Artificial Sequence: Synthetic oligonucleotide
aucuguggcauuuccauug

SEQ ID NO: 2606533 - RNA, 19 nt, Artificial Sequence
  Description of Artificial Sequence: Synthetic oligonucleotide
cuugcgaagguuguggagg

SEQ ID NO: 2606534 - RNA, 19 nt, Artificial Sequence
  Description of Artificial Sequence: Synthetic oligonucleotide
ucagccguagcccuaaguc

SEQ ID NO: 2606535 - RNA, 19 nt, Artificial Sequence
  Description of Artificial Sequence: Synthetic oligonucleotide
  modified_base (10)..(10): a, c, u, g, unknown or other
uugauggagngggaaaagc

SEQ ID NO: 2606536 - RNA, 19 nt, Artificial Sequence
  Description of Artificial Sequence: Synthetic oligonucleotide
ugucguugauaucuguggc

SEQ ID NO: 2606537 - RNA, 19 nt, Artificial Sequence
  Description of Artificial Sequence: Synthetic oligonucleotide
ugauaucuguggcauuucc

SEQ ID NO: 2606538 - RNA, 19 nt, Artificial Sequence
  Description of Artificial Sequence: Synthetic oligonucleotide
aggcuuagcaaucugggca

SEQ ID NO: 2606539 - RNA, 19 nt, Artificial Sequence
  Description of Artificial Sequence: Synthetic oligonucleotide
agugcauauugguagccag

SEQ ID NO: 2606540 - RNA, 19 nt, Artificial Sequence
  Description of Artificial Sequence: Synthetic oligonucleotide
uugguagccaggaauggga

SEQ ID NO: 2606541 - RNA, 19 nt, Artificial Sequence
  Description of Artificial Sequence: Synthetic oligonucleotide
  modified_base (6)..(6): a, c, u, g, unknown or other
uggagngggaaaagcuugg

SEQ ID NO: 2606542 - RNA, 19 nt, Artificial Sequence
  Description of Artificial Sequence: Synthetic oligonucleotide
guuguucucaagaaaggag

SEQ ID NO: 2606543 - RNA, 19 nt, Artificial Sequence
  Description of Artificial Sequence: Synthetic oligonucleotide
agggccuuaacucucucag

SEQ ID NO: 2606544 - RNA, 19 nt, Artificial Sequence
  Description of Artificial Sequence: Synthetic oligonucleotide
gaacgaacagcuugcgaag

SEQ ID NO: 2606545 - RNA, 19 nt, Artificial Sequence
  Description of Artificial Sequence: Synthetic oligonucleotide
uuccagguuguucucaaga

SEQ ID NO: 2606546 - RNA, 19 nt, Artificial Sequence
  Description of Artificial Sequence: Synthetic oligonucleotide
cuugacucgagucgugacg

SEQ ID NO: 2606547 - RNA, 19 nt, Artificial Sequence
  Description of Artificial Sequence: Synthetic oligonucleotide
aacuuuuguagcuguucca

SEQ ID NO: 2606548 - RNA, 19 nt, Artificial Sequence
  Description of Artificial Sequence: Synthetic oligonucleotide
  modified_base (4)..(4): a, c, u, g, unknown or other
gagngggaaaagcuuggcc

SEQ ID NO: 2606549 - RNA, 19 nt, Artificial Sequence
  Description of Artificial Sequence: Synthetic oligonucleotide
acaacgcaaaucugcauug

SEQ ID NO: 2606550 - RNA, 19 nt, Artificial Sequence
  Description of Artificial Sequence: Synthetic oligonucleotide
ucugcacuuuucuugacuc

SEQ ID NO: 2606551 - RNA, 19 nt, Artificial Sequence
  Description of Artificial Sequence: Synthetic oligonucleotide
caagaaaggagaucuucug

SEQ ID NO: 2606552 - RNA, 19 nt, Artificial Sequence
  Description of Artificial Sequence: Synthetic oligonucleotide
agaaaggagaucuucuguu

SEQ ID NO: 2606553 - RNA, 19 nt, Artificial Sequence
  Description of Artificial Sequence: Synthetic oligonucleotide
ugugaacuuuuguagcugu

SEQ ID NO: 2606554 - RNA, 19 nt, Artificial Sequence
  Description of Artificial Sequence: Synthetic oligonucleotide
gacgucuugaacgaacagc

SEQ ID NO: 2606555 - RNA, 19 nt, Artificial Sequence
  Description of Artificial Sequence: Synthetic oligonucleotide
  modified_base (2)..(2): a, c, u, g, unknown or other
gngggaaaagcuuggccug

SEQ ID NO: 2606556 - RNA, 19 nt, Artificial Sequence
  Description of Artificial Sequence: Synthetic oligonucleotide
cacaggcuuagcaaucugg

SEQ ID NO: 2606557 - RNA, 19 nt, Artificial Sequence
  Description of Artificial Sequence: Synthetic oligonucleotide
uauugguagccaggaaugg

SEQ ID NO: 2606558 - RNA, 19 nt, Artificial Sequence
  Description of Artificial Sequence: Synthetic oligonucleotide
uuuucuugacucgagucgu

SEQ ID NO: 2606559 - RNA, 19 nt, Artificial Sequence
  Description of Artificial Sequence: Synthetic oligonucleotide
uguucucaagaaaggagau

SEQ ID NO: 2606560 - RNA, 19 nt, Artificial Sequence
  Description of Artificial Sequence: Synthetic oligonucleotide
aacgaacagcuugcgaagg

SEQ ID NO: 2606561 - RNA, 19 nt, Artificial Sequence
  Description of Artificial Sequence: Synthetic oligonucleotide
cucauagccgcauggcagg

SEQ ID NO: 2606562 - RNA, 19 nt, Artificial Sequence
  Description of Artificial Sequence: Synthetic oligonucleotide
gauguggcuccgcugcugg

SEQ ID NO: 2606563 - RNA, 19 nt, Artificial Sequence
  Description of Artificial Sequence: Synthetic oligonucleotide
aagcuaaggggccaccaga

SEQ ID NO: 2606564 - RNA, 19 nt, Artificial Sequence
  Description of Artificial Sequence: Synthetic oligonucleotide
gcuuggacugcucaugucg

SEQ ID NO: 2606565 - RNA, 19 nt, Artificial Sequence
  Description of Artificial Sequence: Synthetic oligonucleotide
auauugguagccaggaaug

SEQ ID NO: 2606566 - RNA, 19 nt, Artificial Sequence
  Description of Artificial Sequence: Synthetic oligonucleotide
ugcauauugguagccagga

SEQ ID NO: 2606567 - RNA, 19 nt, Artificial Sequence
  Description of Artificial Sequence: Synthetic oligonucleotide
uugcgaagguuguggaggg

SEQ ID NO: 2606568 - RNA, 19 nt, Artificial Sequence
  Description of Artificial Sequence: Synthetic oligonucleotide
uuucugggagugaaucccc

SEQ ID NO: 2606569 - RNA, 19 nt, Artificial Sequence
  Description of Artificial Sequence: Synthetic oligonucleotide
cuugccggagcucuuguag

SEQ ID NO: 2606570 - RNA, 19 nt, Artificial Sequence
  Description of Artificial Sequence: Synthetic oligonucleotide
gaagcuaaggggccaccag

SEQ ID NO: 2606571 - RNA, 19 nt, Artificial Sequence
  Description of Artificial Sequence: Synthetic oligonucleotide
auugguagccaggaauggg

SEQ ID NO: 2606572 - RNA, 19 nt, Artificial Sequence
  Description of Artificial Sequence: Synthetic oligonucleotide
cuuggacugcucaugucgc

SEQ ID NO: 2606573 - RNA, 19 nt, Artificial Sequence
  Description of Artificial Sequence: Synthetic oligonucleotide
acaggcuuagcaaucuggg

SEQ ID NO: 2606574 - RNA, 19 nt, Artificial Sequence
  Description of Artificial Sequence: Synthetic oligonucleotide
  modified_base (7)..(7): a, c, u, g, unknown or other
auggagngggaaaagcuug

SEQ ID NO: 2606575 - RNA, 19 nt, Artificial Sequence
  Description of Artificial Sequence: Synthetic oligonucleotide
uaaggggccaccagaugug

SEQ ID NO: 2606576 - RNA, 19 nt, Artificial Sequence
  Description of Artificial Sequence: Synthetic oligonucleotide
ugaacuuuuguagcuguuc

SEQ ID NO: 2606577 - RNA, 19 nt, Artificial Sequence
  Description of Artificial Sequence: Synthetic oligonucleotide
uggugggugaggaggcugg

SEQ ID NO: 2606578 - RNA, 19 nt, Artificial Sequence
  Description of Artificial Sequence: Synthetic oligonucleotide
cagccguagcccuaagucg

SEQ ID NO: 2606579 - RNA, 19 nt, Artificial Sequence
  Description of Artificial Sequence: Synthetic oligonucleotide
augucgcucguacagaaau

SEQ ID NO: 2606580 - RNA, 19 nt, Artificial Sequence
  Description of Artificial Sequence: Synthetic oligonucleotide
  modified_base (12)..(12): a, c, u, g, unknown or other
ucuugauggagngggaaaa

SEQ ID NO: 2606581 - RNA, 19 nt, Artificial Sequence
  Description of Artificial Sequence: Synthetic oligonucleotide
acgucuugaacgaacagcu

SEQ ID NO: 2606582 - RNA, 19 nt, Artificial Sequence
  Description of Artificial Sequence: Synthetic oligonucleotide
auagccgcauggcagguca

SEQ ID NO: 2606583 - RNA, 19 nt, Artificial Sequence
  Description of Artificial Sequence: Synthetic oligonucleotide
uugaacgaacagcuugcga

SEQ ID NO: 2606584 - RNA, 19 nt, Artificial Sequence
  Description of Artificial Sequence: Synthetic oligonucleotide
ugcacuuuucuugacucga

SEQ ID NO: 2606585 - RNA, 19 nt, Artificial Sequence
  Description of Artificial Sequence: Synthetic oligonucleotide
ggccuuaacucucucagcc

SEQ ID NO: 2606586 - RNA, 19 nt, Artificial Sequence
  Description of Artificial Sequence: Synthetic oligonucleotide
ugacgucuugaacgaacag

SEQ ID NO: 2606587 - RNA, 19 nt, Artificial Sequence
  Description of Artificial Sequence: Synthetic oligonucleotide
ugccggagcucuuguagcg

SEQ ID NO: 2606588 - RNA, 19 nt, Artificial Sequence
  Description of Artificial Sequence: Synthetic oligonucleotide
uccagguuguucucaagaa

SEQ ID NO: 2606589 - RNA, 19 nt, Artificial Sequence
  Description of Artificial Sequence: Synthetic oligonucleotide
cagugcacccuccagggcc

SEQ ID NO: 2606590 - RNA, 19 nt, Artificial Sequence
  Description of Artificial Sequence: Synthetic oligonucleotide
aagguuguggagggucugg

SEQ ID NO: 2606591 - RNA, 19 nt, Artificial Sequence
  Description of Artificial Sequence: Synthetic oligonucleotide
  modified_base (19)..(19): a, c, u, g, unknown or other
ugcugucucuugauggagn

SEQ ID NO: 2606592 - RNA, 19 nt, Artificial Sequence
  Description of Artificial Sequence: Synthetic oligonucleotide
cucaagaaaggagaucuuc

SEQ ID NO: 2606593 - RNA, 19 nt, Artificial Sequence
  Description of Artificial Sequence: Synthetic oligonucleotide
gaggaggcuggguaguggc

SEQ ID NO: 2606594 - RNA, 19 nt, Artificial Sequence
  Description of Artificial Sequence: Synthetic oligonucleotide
cuuguagcgcacagcuucc

SEQ ID NO: 2606595 - RNA, 19 nt, Artificial Sequence
  Description of Artificial Sequence: Synthetic oligonucleotide
uugacucgagucgugacgu

SEQ ID NO: 2606596 - RNA, 19 nt, Artificial Sequence
  Description of Artificial Sequence: Synthetic oligonucleotide
uaggaagcucacaacgcaa

SEQ ID NO: 2606597 - RNA, 19 nt, Artificial Sequence
  Description of Artificial Sequence: Synthetic oligonucleotide
ugucgcucguacagaaaug

SEQ ID NO: 2606598 - RNA, 19 nt, Artificial Sequence
  Description of Artificial Sequence: Synthetic oligonucleotide
gagggucuggaguucccgg

SEQ ID NO: 2606599 - RNA, 19 nt, Artificial Sequence
  Description of Artificial Sequence: Synthetic oligonucleotide
  modified_base (14)..(14): a, c, u, g, unknown or other
ucucuugauggagngggaa

SEQ ID NO: 2606600 - RNA, 19 nt, Artificial Sequence
  Description of Artificial Sequence: Synthetic oligonucleotide
guugucguugauaucugug

SEQ ID NO: 2606601 - RNA, 19 nt, Artificial Sequence
  Description of Artificial Sequence: Synthetic oligonucleotide
uugugaacuuuuguagcug

SEQ ID NO: 2606602 - RNA, 19 nt, Artificial Sequence
  Description of Artificial Sequence: Synthetic oligonucleotide
agaguggccccgcuugccg

SEQ ID NO: 2606603 - RNA, 19 nt, Artificial Sequence
  Description of Artificial Sequence: Synthetic oligonucleotide
ucaugucgcucguacagaa

SEQ ID NO: 2606604 - RNA, 19 nt, Artificial Sequence
  Description of Artificial Sequence: Synthetic oligonucleotide
auguuggccuucugguagg

SEQ ID NO: 2606605 - RNA, 19 nt, Artificial Sequence
  Description of Artificial Sequence: Synthetic oligonucleotide
agggucuggaguucccggg

SEQ ID NO: 2606606 - RNA, 19 nt, Artificial Sequence
  Description of Artificial Sequence: Synthetic oligonucleotide
uuucuugacucgagucgug

SEQ ID NO: 2606607 - RNA, 19 nt, Artificial Sequence
  Description of Artificial Sequence: Synthetic oligonucleotide
gauaucuguggcauuucca

SEQ ID NO: 2606608 - RNA, 19 nt, Artificial Sequence
  Description of Artificial Sequence: Synthetic oligonucleotide
cucacaacgcaaaucugca

SEQ ID NO: 2606609 - RNA, 19 nt, Artificial Sequence
  Description of Artificial Sequence: Synthetic oligonucleotide
aagugcauauugguagcca

SEQ ID NO: 2606610 - RNA, 19 nt, Artificial Sequence
  Description of Artificial Sequence: Synthetic oligonucleotide
aaaucugcauugucacgua

SEQ ID NO: 2606611 - RNA, 19 nt, Artificial Sequence
  Description of Artificial Sequence: Synthetic oligonucleotide
cuugagguccugcuuggac

SEQ ID NO: 2606612 - RNA, 19 nt, Artificial Sequence
  Description of Artificial Sequence: Synthetic oligonucleotide
ucguugauaucuguggcau

SEQ ID NO: 2606613 - RNA, 19 nt, Artificial Sequence
  Description of Artificial Sequence: Synthetic oligonucleotide
gaagcucacaacgcaaauc

SEQ ID NO: 2606614 - RNA, 19 nt, Artificial Sequence
  Description of Artificial Sequence: Synthetic oligonucleotide
cugcacuuuucuugacucg

SEQ ID NO: 2606615 - RNA, 19 nt, Artificial Sequence
  Description of Artificial Sequence: Synthetic oligonucleotide
  modified_base (11)..(11): a, c, u, g, unknown or other
cuugauggagngggaaaag

SEQ ID NO: 2606616 - RNA, 19 nt, Artificial Sequence
  Description of Artificial Sequence: Synthetic oligonucleotide
uguugucguugauaucugu

SEQ ID NO: 2606617 - RNA, 19 nt, Artificial Sequence
  Description of Artificial Sequence: Synthetic oligonucleotide
uccgcugcuggcaggguug

SEQ ID NO: 2606618 - RNA, 19 nt, Artificial Sequence
  Description of Artificial Sequence: Synthetic oligonucleotide
caggaaugggaguuagcug

SEQ ID NO: 2606619 - RNA, 19 nt, Artificial Sequence
  Description of Artificial Sequence: Synthetic oligonucleotide
ucuugacucgagucgugac

SEQ ID NO: 2606620 - RNA, 19 nt, Artificial Sequence
  Description of Artificial Sequence: Synthetic oligonucleotide
caggcuuagcaaucugggc

SEQ ID NO: 2606621 - RNA, 19 nt, Artificial Sequence
  Description of Artificial Sequence: Synthetic oligonucleotide
ggcuuagcaaucugggcag

SEQ ID NO: 2606622 - RNA, 19 nt, Artificial Sequence
  Description of Artificial Sequence: Synthetic oligonucleotide
cuugaacgaacagcuugcg

SEQ ID NO: 2606623 - RNA, 19 nt, Artificial Sequence
  Description of Artificial Sequence: Synthetic oligonucleotide
cauggcgccuuccuuggcc

SEQ ID NO: 2606624 - RNA, 19 nt, Artificial Sequence
  Description of Artificial Sequence: Synthetic oligonucleotide
uuagcuggcugcugucucu

SEQ ID NO: 2606625 - RNA, 19 nt, Artificial Sequence
  Description of Artificial Sequence: Synthetic oligonucleotide
gcucaugucgcucguacag

SEQ ID NO: 2606626 - RNA, 19 nt, Artificial Sequence
  Description of Artificial Sequence: Synthetic oligonucleotide
uguuccagguuguucucaa

SEQ ID NO: 2606627 - RNA, 19 nt, Artificial Sequence
  Description of Artificial Sequence: Synthetic oligonucleotide
ggagaucuucuguuucugg

SEQ ID NO: 2606628 - RNA, 19 nt, Artificial Sequence
  Description of Artificial Sequence: Synthetic oligonucleotide
agccucauagccgcauggc

SEQ ID NO: 2606629 - RNA, 19 nt, Artificial Sequence
  Description of Artificial Sequence: Synthetic oligonucleotide
uuguggagggucuggaguu

SEQ ID NO: 2606630 - RNA, 19 nt, Artificial Sequence
  Description of Artificial Sequence: Synthetic oligonucleotide
ucagccucauagccgcaug

SEQ ID NO: 2606631 - RNA, 19 nt, Artificial Sequence
  Description of Artificial Sequence: Synthetic oligonucleotide
caggucacuccuguugucg

SEQ ID NO: 2606632 - RNA, 19 nt, Artificial Sequence
  Description of Artificial Sequence: Synthetic oligonucleotide
ugaggaggcuggguagugg

SEQ ID NO: 2606633 - RNA, 19 nt, Artificial Sequence
  Description of Artificial Sequence: Synthetic oligonucleotide
aaggggccaccagaugugg

SEQ ID NO: 2606634 - RNA, 19 nt, Artificial Sequence
  Description of Artificial Sequence: Synthetic oligonucleotide
ucacaggcuuagcaaucug

SEQ ID NO: 2606635 - RNA, 19 nt, Artificial Sequence
  Description of Artificial Sequence: Synthetic oligonucleotide
cuguuucugggagugaauc

SEQ ID NO: 2606636 - RNA, 19 nt, Artificial Sequence
  Description of Artificial Sequence: Synthetic oligonucleotide
cuucugguaggaagcuaag

SEQ ID NO: 2606637 - RNA, 19 nt, Artificial Sequence
  Description of Artificial Sequence: Synthetic oligonucleotide
gugcauauugguagccagg

SEQ ID NO: 2606638 - RNA, 19 nt, Artificial Sequence
  Description of Artificial Sequence: Synthetic oligonucleotide
gguccucagccucauagcc

SEQ ID NO: 2606639 - RNA, 19 nt, Artificial Sequence
  Description of Artificial Sequence: Synthetic oligonucleotide
gucguugauaucuguggca

SEQ ID NO: 2606640 - RNA, 19 nt, Artificial Sequence
  Description of Artificial Sequence: Synthetic oligonucleotide
uagcgcacagcuuccuuga

SEQ ID NO: 2606641 - RNA, 19 nt, Artificial Sequence
  Description of Artificial Sequence: Synthetic oligonucleotide
cugaaagugcauauuggua

SEQ ID NO: 2606642 - RNA, 19 nt, Artificial Sequence
  Description of Artificial Sequence: Synthetic oligonucleotide
cagcuugcgaagguugugg

SEQ ID NO: 2606643 - RNA, 19 nt, Artificial Sequence
  Description of Artificial Sequence: Synthetic oligonucleotide
acgcaaaucugcauuguca

SEQ ID NO: 2606644 - RNA, 19 nt, Artificial Sequence
  Description of Artificial Sequence: Synthetic oligonucleotide
ucuguuucugggagugaau

SEQ ID NO: 2606645 - RNA, 19 nt, Artificial Sequence
  Description of Artificial Sequence: Synthetic oligonucleotide
uggguaguggccaggccuc

SEQ ID NO: 2606646 - RNA, 19 nt, Artificial Sequence
  Description of Artificial Sequence: Synthetic oligonucleotide
uaacucucucagccguagc

SEQ ID NO: 2606647 - RNA, 19 nt, Artificial Sequence
  Description of Artificial Sequence: Synthetic oligonucleotide
gcucacaacgcaaaucugc

SEQ ID NO: 2606648 - RNA, 19 nt, Artificial Sequence
  Description of Artificial Sequence: Synthetic oligonucleotide
uucuugacucgagucguga

SEQ ID NO: 2606649 - RNA, 19 nt, Artificial Sequence
  Description of Artificial Sequence: Synthetic oligonucleotide
uaccagcuguuugugaacu

SEQ ID NO: 2606650 - RNA, 19 nt, Artificial Sequence
  Description of Artificial Sequence: Synthetic oligonucleotide
uucccgggcaacugucucc

SEQ ID NO: 2606651 - RNA, 19 nt, Artificial Sequence
  Description of Artificial Sequence: Synthetic oligonucleotide
uccucgggcuccauuucug

SEQ ID NO: 2606652 - RNA, 19 nt, Artificial Sequence
  Description of Artificial Sequence: Synthetic oligonucleotide
gagucgugacgucuugaac

SEQ ID NO: 2606653 - RNA, 19 nt, Artificial Sequence
  Description of Artificial Sequence: Synthetic oligonucleotide
aggccucacaggcuuagca

SEQ ID NO: 2606654 - RNA, 19 nt, Artificial Sequence
  Description of Artificial Sequence: Synthetic oligonucleotide
  modified_base (18)..(18): a, c, u, g, unknown or other
gcugucucuugauggagng

SEQ ID NO: 2606655 - RNA, 19 nt, Artificial Sequence
  Description of Artificial Sequence: Synthetic oligonucleotide
gcgcuuguccuucauggcg

SEQ ID NO: 2606656 - RNA, 19 nt, Artificial Sequence
  Description of Artificial Sequence: Synthetic oligonucleotide
gagcucuuguagcgcacag

SEQ ID NO: 2606657 - RNA, 19 nt, Artificial Sequence
  Description of Artificial Sequence: Synthetic oligonucleotide
cuuagcaaucugggcagag

SEQ ID NO: 2606658 - RNA, 19 nt, Artificial Sequence
  Description of Artificial Sequence: Synthetic oligonucleotide
cuaaggggccaccagaugu

SEQ ID NO: 2606659 - RNA, 19 nt, Artificial Sequence
  Description of Artificial Sequence: Synthetic oligonucleotide
ccucauagccgcauggcag

SEQ ID NO: 2606660 - RNA, 19 nt, Artificial Sequence
  Description of Artificial Sequence: Synthetic oligonucleotide
gucgugacgucuugaacga

SEQ ID NO: 2606661 - RNA, 19 nt, Artificial Sequence
  Description of Artificial Sequence: Synthetic oligonucleotide
cugcucaugucgcucguac

SEQ ID NO: 2606662 - RNA, 19 nt, Artificial Sequence
  Description of Artificial Sequence: Synthetic oligonucleotide
caaaucugcauugucacgu

SEQ ID NO: 2606663 - RNA, 19 nt, Artificial Sequence
  Description of Artificial Sequence: Synthetic oligonucleotide
ggacugcucaugucgcucg

SEQ ID NO: 2606664 - RNA, 19 nt, Artificial Sequence
  Description of Artificial Sequence: Synthetic oligonucleotide
ugcucaugucgcucguaca

SEQ ID NO: 2606665 - RNA, 19 nt, Artificial Sequence
  Description of Artificial Sequence: Synthetic oligonucleotide
ucagugcacccuccagggc

SEQ ID NO: 2606666 - RNA, 19 nt, Artificial Sequence
  Description of Artificial Sequence: Synthetic oligonucleotide
cagccucauagccgcaugg

SEQ ID NO: 2606667 - RNA, 19 nt, Artificial Sequence
  Description of Artificial Sequence: Synthetic oligonucleotide
caaucugggcagaguggcc

SEQ ID NO: 2606668 - RNA, 19 nt, Artificial Sequence
  Description of Artificial Sequence: Synthetic oligonucleotide
uaucuguggcauuuccauu

SEQ ID NO: 2606669 - RNA, 19 nt, Artificial Sequence
  Description of Artificial Sequence: Synthetic oligonucleotide
ucucaagaaaggagaucuu

SEQ ID NO: 2606670 - RNA, 19 nt, Artificial Sequence
  Description of Artificial Sequence: Synthetic oligonucleotide
cugguaccggcgcuugucc

SEQ ID NO: 2606671 - RNA, 19 nt, Artificial Sequence
  Description of Artificial Sequence: Synthetic oligonucleotide
ucacaacgcaaaucugcau

SEQ ID NO: 2606672 - RNA, 19 nt, Artificial Sequence
  Description of Artificial Sequence: Synthetic oligonucleotide
uguggcuccgcugcuggca

SEQ ID NO: 2606673 - RNA, 19 nt, Artificial Sequence
  Description of Artificial Sequence: Synthetic oligonucleotide
guuagcuggcugcugucuc

SEQ ID NO: 2606674 - RNA, 19 nt, Artificial Sequence
  Description of Artificial Sequence: Synthetic oligonucleotide
agcuugcgaagguugugga

SEQ ID NO: 2606675 - RNA, 19 nt, Artificial Sequence
  Description of Artificial Sequence: Synthetic oligonucleotide
gcaaucugggcagaguggc

SEQ ID NO: 2606676 - RNA, 19 nt, Artificial Sequence
  Description of Artificial Sequence: Synthetic oligonucleotide
aggagaucuucuguuucug

SEQ ID NO: 2606677 - RNA, 19 nt, Artificial Sequence
  Description of Artificial Sequence: Synthetic oligonucleotide
gccuuaacucucucagccg

SEQ ID NO: 2606678 - RNA, 19 nt, Artificial Sequence
  Description of Artificial Sequence: Synthetic oligonucleotide
uuggacugcucaugucgcu

SEQ ID NO: 2606679 - RNA, 19 nt, Artificial Sequence
  Description of Artificial Sequence: Synthetic oligonucleotide
guuccagguuguucucaag

SEQ ID NO: 2606680 - RNA, 19 nt, Artificial Sequence
  Description of Artificial Sequence: Synthetic oligonucleotide
gguuguucucaagaaagga

SEQ ID NO: 2606681 - RNA, 19 nt, Artificial Sequence
  Description of Artificial Sequence: Synthetic oligonucleotide
gaagguuguggagggucug

SEQ ID NO: 2606682 - RNA, 19 nt, Artificial Sequence
  Description of Artificial Sequence: Synthetic oligonucleotide
gaggcuggguaguggccag

SEQ ID NO: 2606683 - RNA, 19 nt, Artificial Sequence
  Description of Artificial Sequence: Synthetic oligonucleotide
gguaggaagcuaaggggcc

SEQ ID NO: 2606684 - RNA, 19 nt, Artificial Sequence
  Description of Artificial Sequence: Synthetic oligonucleotide
aggaagcuaaggggccacc

SEQ ID NO: 2606685 - RNA, 19 nt, Artificial Sequence
  Description of Artificial Sequence: Synthetic oligonucleotide
auguggcuccgcugcuggc

SEQ ID NO: 2606686 - RNA, 19 nt, Artificial Sequence
  Description of Artificial Sequence: Synthetic oligonucleotide
ggcagaguggccccgcuug

SEQ ID NO: 2606687 - RNA, 19 nt, Artificial Sequence
  Description of Artificial Sequence: Synthetic oligonucleotide
  modified_base (13)..(13): a, c, u, g, unknown or other
cucuugauggagngggaaa

SEQ ID NO: 2606688 - RNA, 19 nt, Artificial Sequence
  Description of Artificial Sequence: Synthetic oligonucleotide
uguagcgcacagcuuccuu

SEQ ID NO: 2606689 - RNA, 19 nt, Artificial Sequence
  Description of Artificial Sequence: Synthetic oligonucleotide
caacugucuccuccagccc

SEQ ID NO: 2606690 - RNA, 19 nt, Artificial Sequence
  Description of Artificial Sequence: Synthetic oligonucleotide
agccguagcccuaagucgu

SEQ ID NO: 2606691 - RNA, 19 nt, Artificial Sequence
  Description of Artificial Sequence: Synthetic oligonucleotide
ucacuccuguugucguuga

SEQ ID NO: 2606692 - RNA, 19 nt, Artificial Sequence
  Description of Artificial Sequence: Synthetic oligonucleotide
auggcgccuuccuuggccu

SEQ ID NO: 2606693 - RNA, 19 nt, Artificial Sequence
  Description of Artificial Sequence: Synthetic oligonucleotide
uguccucgggcuccauuuc

SEQ ID NO: 2606694 - RNA, 19 nt, Artificial Sequence
  Description of Artificial Sequence: Synthetic oligonucleotide
ugggaguuagcuggcugcu

SEQ ID NO: 2606695 - RNA, 19 nt, Artificial Sequence
  Description of Artificial Sequence: Synthetic oligonucleotide
gguuguggagggucuggag

SEQ ID NO: 2606696 - RNA, 19 nt, Artificial Sequence
  Description of Artificial Sequence: Synthetic oligonucleotide
guugauaucuguggcauuu

SEQ ID NO: 2606697 - RNA, 19 nt, Artificial Sequence
  Description of Artificial Sequence: Synthetic oligonucleotide
uggacugcucaugucgcuc

SEQ ID NO: 2606698 - RNA, 19 nt, Artificial Sequence
  Description of Artificial Sequence: Synthetic oligonucleotide
gaguuagcuggcugcuguc

SEQ ID NO: 2606699 - RNA, 19 nt, Artificial Sequence
  Description of Artificial Sequence: Synthetic oligonucleotide
gugacgucuugaacgaaca

SEQ ID NO: 2606700 - RNA, 19 nt, Artificial Sequence
  Description of Artificial Sequence: Synthetic oligonucleotide
aggguuggugggugaggag

SEQ ID NO: 2606701 - RNA, 19 nt, Artificial Sequence
  Description of Artificial Sequence: Synthetic oligonucleotide
agccaggaaugggaguuag

SEQ ID NO: 2606702 - RNA, 19 nt, Artificial Sequence
  Description of Artificial Sequence: Synthetic oligonucleotide
uccugcuuggacugcucau

SEQ ID NO: 2606703 - RNA, 19 nt, Artificial Sequence
  Description of Artificial Sequence: Synthetic oligonucleotide
uguccuucauggcgccuuc

SEQ ID NO: 2606704 - RNA, 19 nt, Artificial Sequence
  Description of Artificial Sequence: Synthetic oligonucleotide
acagcuugcgaagguugug

SEQ ID NO: 2606705 - RNA, 19 nt, Artificial Sequence
  Description of Artificial Sequence: Synthetic oligonucleotide
uaggaagcuaaggggccac

SEQ ID NO: 2606706 - RNA, 19 nt, Artificial Sequence
  Description of Artificial Sequence: Synthetic oligonucleotide
  modified_base (8)..(8): a, c, u, g, unknown or other
gauggagngggaaaagcuu

SEQ ID NO: 2606707 - RNA, 19 nt, Artificial Sequence
  Description of Artificial Sequence: Synthetic oligonucleotide
cuccagccccuugaggucc

SEQ ID NO: 2606708 - RNA, 19 nt, Artificial Sequence
  Description of Artificial Sequence: Synthetic oligonucleotide
gcuugcgaagguuguggag

SEQ ID NO: 2606709 - RNA, 19 nt, Artificial Sequence
  Description of Artificial Sequence: Synthetic oligonucleotide
acuccuguugucguugaua

SEQ ID NO: 2606710 - RNA, 19 nt, Artificial Sequence
  Description of Artificial Sequence: Synthetic oligonucleotide
acguaccagcuguuuguga

SEQ ID NO: 2606711 - RNA, 19 nt, Artificial Sequence
  Description of Artificial Sequence: Synthetic oligonucleotide
ugguaccggcgcuuguccu

SEQ ID NO: 2606712 - RNA, 19 nt, Artificial Sequence
  Description of Artificial Sequence: Synthetic oligonucleotide
gggugaggaggcuggguag

SEQ ID NO: 2606713 - RNA, 19 nt, Artificial Sequence
  Description of Artificial Sequence: Synthetic oligonucleotide
uuguccuucauggcgccuu

SEQ ID NO: 2606714 - RNA, 19 nt, Artificial Sequence
  Description of Artificial Sequence: Synthetic oligonucleotide
aggaagcucacaacgcaaa

SEQ ID NO: 2606715 - RNA, 19 nt, Artificial Sequence
  Description of Artificial Sequence: Synthetic oligonucleotide
ucgagucgugacgucuuga

SEQ ID NO: 2606716 - RNA, 19 nt, Artificial Sequence
  Description of Artificial Sequence: Synthetic oligonucleotide
guaguggccaggccucaca

SEQ ID NO: 2606717 - RNA, 19 nt, Artificial Sequence
  Description of Artificial Sequence: Synthetic oligonucleotide
guaggaagcuaaggggcca

SEQ ID NO: 2606718 - RNA, 19 nt, Artificial Sequence
  Description of Artificial Sequence: Synthetic oligonucleotide
ucccgggcaacugucuccu

SEQ ID NO: 2606719 - RNA, 19 nt, Artificial Sequence
  Description of Artificial Sequence: Synthetic oligonucleotide
cacaacgcaaaucugcauu

SEQ ID NO: 2606720 - RNA, 19 nt, Artificial Sequence
  Description of Artificial Sequence: Synthetic oligonucleotide
cggcgcuuguccuucaugg

SEQ ID NO: 2606721 - RNA, 19 nt, Artificial Sequence
  Description of Artificial Sequence: Synthetic oligonucleotide
ggcaacugucuccuccagc

SEQ ID NO: 2606722 - RNA, 19 nt, Artificial Sequence
  Description of Artificial Sequence: Synthetic oligonucleotide
uccuguugucguugauauc

SEQ ID NO: 2606723 - RNA, 19 nt, Artificial Sequence
  Description of Artificial Sequence: Synthetic oligonucleotide
ucucagccguagcccuaag

SEQ ID NO: 2606724 - RNA, 19 nt, Artificial Sequence
  Description of Artificial Sequence: Synthetic oligonucleotide
guucccgggcaacugucuc

SEQ ID NO: 2606725 - RNA, 19 nt, Artificial Sequence
  Description of Artificial Sequence: Synthetic oligonucleotide
ccuguugucguugauaucu

SEQ ID NO: 2606726 - RNA, 19 nt, Artificial Sequence
  Description of Artificial Sequence: Synthetic oligonucleotide
cugcauugucacguaccag

SEQ ID NO: 2606727 - RNA, 19 nt, Artificial Sequence
  Description of Artificial Sequence: Synthetic oligonucleotide
gguuggugggugaggaggc

SEQ ID NO: 2606728 - RNA, 19 nt, Artificial Sequence
  Description of Artificial Sequence: Synthetic oligonucleotide
cucgagucgugacgucuug

SEQ ID NO: 2606729 - RNA, 19 nt, Artificial Sequence
  Description of Artificial Sequence: Synthetic oligonucleotide
uguggagggucuggaguuc

SEQ ID NO: 2606730 - RNA, 19 nt, Artificial Sequence
  Description of Artificial Sequence: Synthetic oligonucleotide
ucauagccgcauggcaggu

SEQ ID NO: 2606731 - RNA, 19 nt, Artificial Sequence
  Description of Artificial Sequence: Synthetic oligonucleotide
  modified_base (5)..(5): a, c, u, g, unknown or other
ggagngggaaaagcuuggc

SEQ ID NO: 2606732 - RNA, 19 nt, Artificial Sequence
  Description of Artificial Sequence: Synthetic oligonucleotide
ggagggucuggaguucccg

SEQ ID NO: 2606733 - RNA, 19 nt, Artificial Sequence
  Description of Artificial Sequence: Synthetic oligonucleotide
uugucacguaccagcuguu

SEQ ID NO: 2606734 - RNA, 19 nt, Artificial Sequence
  Description of Artificial Sequence: Synthetic oligonucleotide
uguuggccuucugguagga

SEQ ID NO: 2606735 - RNA, 19 nt, Artificial Sequence
  Description of Artificial Sequence: Synthetic oligonucleotide
ccuucugguaggaagcuaa

SEQ ID NO: 2606736 - RNA, 19 nt, Artificial Sequence
  Description of Artificial Sequence: Synthetic oligonucleotide
ugucacguaccagcuguuu

SEQ ID NO: 2606737 - RNA, 19 nt, Artificial Sequence
  Description of Artificial Sequence: Synthetic oligonucleotide
cuuaacucucucagccgua

SEQ ID NO: 2606738 - RNA, 19 nt, Artificial Sequence
  Description of Artificial Sequence: Synthetic oligonucleotide
ggaaugggaguuagcuggc

SEQ ID NO: 2606739 - RNA, 19 nt, Artificial Sequence
  Description of Artificial Sequence: Synthetic oligonucleotide
ggaguuagcuggcugcugu

SEQ ID NO: 2606740 - RNA, 19 nt, Artificial Sequence
  Description of Artificial Sequence: Synthetic oligonucleotide
aguggccccgcuugccgga

SEQ ID NO: 2606741 - RNA, 19 nt, Artificial Sequence
  Description of Artificial Sequence: Synthetic oligonucleotide
uuguagcgcacagcuuccu

SEQ ID NO: 2606742 - RNA, 19 nt, Artificial Sequence
  Description of Artificial Sequence: Synthetic oligonucleotide
gaguucccgggcaacuguc

SEQ ID NO: 2606743 - RNA, 19 nt, Artificial Sequence
  Description of Artificial Sequence: Synthetic oligonucleotide
gggucuggaguucccgggc

SEQ ID NO: 2606744 - RNA, 19 nt, Artificial Sequence
  Description of Artificial Sequence: Synthetic oligonucleotide
ggcgcuuguccuucauggc

SEQ ID NO: 2606745 - RNA, 19 nt, Artificial Sequence
  Description of Artificial Sequence: Synthetic oligonucleotide
agguuguggagggucugga

SEQ ID NO: 2606746 - RNA, 19 nt, Artificial Sequence
  Description of Artificial Sequence: Synthetic oligonucleotide
acuguccucgggcuccauu

SEQ ID NO: 2606747 - RNA, 19 nt, Artificial Sequence
  Description of Artificial Sequence: Synthetic oligonucleotide
gggccuuaacucucucagc

SEQ ID NO: 2606748 - RNA, 19 nt, Artificial Sequence
  Description of Artificial Sequence: Synthetic oligonucleotide
ccccuugagguccugcuug

SEQ ID NO: 2606749 - RNA, 19 nt, Artificial Sequence
  Description of Artificial Sequence: Synthetic oligonucleotide
ugacucgagucgugacguc

SEQ ID NO: 2606750 - RNA, 19 nt, Artificial Sequence
  Description of Artificial Sequence: Synthetic oligonucleotide
cagggccuuaacucucuca

SEQ ID NO: 2606751 - RNA, 19 nt, Artificial Sequence
  Description of Artificial Sequence: Synthetic oligonucleotide
cagaguggccccgcuugcc

SEQ ID NO: 2606752 - RNA, 19 nt, Artificial Sequence
  Description of Artificial Sequence: Synthetic oligonucleotide
ugcugguaccggcgcuugu

SEQ ID NO: 2606753 - RNA, 19 nt, Artificial Sequence
  Description of Artificial Sequence: Synthetic oligonucleotide
agugcacccuccagggccu

SEQ ID NO: 2606754 - RNA, 19 nt, Artificial Sequence
  Description of Artificial Sequence: Synthetic oligonucleotide
cucaugucgcucguacaga

SEQ ID NO: 2606755 - RNA, 19 nt, Artificial Sequence
  Description of Artificial Sequence: Synthetic oligonucleotide
caggguuggugggugagga

SEQ ID NO: 2606756 - RNA, 19 nt, Artificial Sequence
  Description of Artificial Sequence: Synthetic oligonucleotide
gcacuuuucuugacucgag

SEQ ID NO: 2606757 - RNA, 19 nt, Artificial Sequence
  Description of Artificial Sequence: Synthetic oligonucleotide
cauggcaggucacuccugu

SEQ ID NO: 2606758 - RNA, 19 nt, Artificial Sequence
  Description of Artificial Sequence: Synthetic oligonucleotide
ccgggcaacugucuccucc

SEQ ID NO: 2606759 - RNA, 19 nt, Artificial Sequence
  Description of Artificial Sequence: Synthetic oligonucleotide
ccauuguccauguuggccu

SEQ ID NO: 2606760 - RNA, 19 nt, Artificial Sequence
  Description of Artificial Sequence: Synthetic oligonucleotide
gugaggaggcuggguagug

SEQ ID NO: 2606761 - RNA, 19 nt, Artificial Sequence
  Description of Artificial Sequence: Synthetic oligonucleotide
aguucccgggcaacugucu

SEQ ID NO: 2606762 - RNA, 19 nt, Artificial Sequence
  Description of Artificial Sequence: Synthetic oligonucleotide
gccucauagccgcauggca

SEQ ID NO: 2606763 - RNA, 19 nt, Artificial Sequence
  Description of Artificial Sequence: Synthetic oligonucleotide
cacuuuucuugacucgagu

SEQ ID NO: 2606764 - RNA, 19 nt, Artificial Sequence
  Description of Artificial Sequence: Synthetic oligonucleotide
ccucacaggcuuagcaauc

SEQ ID NO: 2606765 - RNA, 19 nt, Artificial Sequence
  Description of Artificial Sequence: Synthetic oligonucleotide
cuuccuugaugcgguccac

SEQ ID NO: 2606766 - RNA, 19 nt, Artificial Sequence
  Description of Artificial Sequence: Synthetic oligonucleotide
caugucgcucguacagaaa

SEQ ID NO: 2606767 - RNA, 19 nt, Artificial Sequence
  Description of Artificial Sequence: Synthetic oligonucleotide
gcgcacagcuuccuugaug

SEQ ID NO: 2606768 - RNA, 19 nt, Artificial Sequence
  Description of Artificial Sequence: Synthetic oligonucleotide
ccugcuuggacugcucaug

SEQ ID NO: 2606769 - RNA, 19 nt, Artificial Sequence
  Description of Artificial Sequence: Synthetic oligonucleotide
uagccgcauggcaggucac

SEQ ID NO: 2606770 - RNA, 19 nt, Artificial Sequence
  Description of Artificial Sequence: Synthetic oligonucleotide
gagguccugcuuggacugc

SEQ ID NO: 2606771 - RNA, 19 nt, Artificial Sequence
  Description of Artificial Sequence: Synthetic oligonucleotide
cguaccagcuguuugugaa

SEQ ID NO: 2606772 - RNA, 19 nt, Artificial Sequence
  Description of Artificial Sequence: Synthetic oligonucleotide
ugcgaagguuguggagggu

SEQ ID NO: 2606773 - RNA, 19 nt, Artificial Sequence
  Description of Artificial Sequence: Synthetic oligonucleotide
gcgaagguuguggaggguc

SEQ ID NO: 2606774 - RNA, 19 nt, Artificial Sequence
  Description of Artificial Sequence: Synthetic oligonucleotide
ggaagcuaaggggccacca

SEQ ID NO: 2606775 - RNA, 19 nt, Artificial Sequence
  Description of Artificial Sequence: Synthetic oligonucleotide
ggcuccgcugcuggcaggg

SEQ ID NO: 2606776 - RNA, 19 nt, Artificial Sequence
  Description of Artificial Sequence: Synthetic oligonucleotide
ggccaccagauguggcucc

SEQ ID NO: 2606777 - RNA, 19 nt, Artificial Sequence
  Description of Artificial Sequence: Synthetic oligonucleotide
ggucuggaguucccgggca

SEQ ID NO: 2606778 - RNA, 19 nt, Artificial Sequence
  Description of Artificial Sequence: Synthetic oligonucleotide
guaccggcgcuuguccuuc

SEQ ID NO: 2606779 - RNA, 19 nt, Artificial Sequence
  Description of Artificial Sequence: Synthetic oligonucleotide
cauagccgcauggcagguc

SEQ ID NO: 2606780 - RNA, 19 nt, Artificial Sequence
  Description of Artificial Sequence: Synthetic oligonucleotide
gcagaguggccccgcuugc

SEQ ID NO: 2606781 - RNA, 19 nt, Artificial Sequence
  Description of Artificial Sequence: Synthetic oligonucleotide
ccgcauggcaggucacucc

SEQ ID NO: 2606782 - RNA, 19 nt, Artificial Sequence
  Description of Artificial Sequence: Synthetic oligonucleotide
agccgcauggcaggucacu

SEQ ID NO: 2606783 - RNA, 19 nt, Artificial Sequence
  Description of Artificial Sequence: Synthetic oligonucleotide
aggcuggguaguggccagg

SEQ ID NO: 2606784 - RNA, 19 nt, Artificial Sequence
  Description of Artificial Sequence: Synthetic oligonucleotide
gcaggguuggugggugagg

SEQ ID NO: 2606785 - RNA, 19 nt, Artificial Sequence
  Description of Artificial Sequence: Synthetic oligonucleotide
acucgagucgugacgucuu

SEQ ID NO: 2606786 - RNA, 19 nt, Artificial Sequence
  Description of Artificial Sequence: Synthetic oligonucleotide
ccaggaaugggaguuagcu

SEQ ID NO: 2606787 - RNA, 19 nt, Artificial Sequence
  Description of Artificial Sequence: Synthetic oligonucleotide
  modified_base (15)..(15): a, c, u, g, unknown or other
gucucuugauggagnggga

SEQ ID NO: 2606788 - RNA, 19 nt, Artificial Sequence
  Description of Artificial Sequence: Synthetic oligonucleotide
cugcuuggacugcucaugu

SEQ ID NO: 2606789 - RNA, 19 nt, Artificial Sequence
  Description of Artificial Sequence: Synthetic oligonucleotide
ccagguuguucucaagaaa

SEQ ID NO: 2606790 - RNA, 19 nt, Artificial Sequence
  Description of Artificial Sequence: Synthetic oligonucleotide
ucgugacgucuugaacgaa

SEQ ID NO: 2606791 - RNA, 19 nt, Artificial Sequence
  Description of Artificial Sequence: Synthetic oligonucleotide
uagcuggcugcugucucuu

SEQ ID NO: 2606792 - RNA, 19 nt, Artificial Sequence
  Description of Artificial Sequence: Synthetic oligonucleotide
gggcaacugucuccuccag

SEQ ID NO: 2606793 - RNA, 19 nt, Artificial Sequence
  Description of Artificial Sequence: Synthetic oligonucleotide
cuguccucgggcuccauuu

SEQ ID NO: 2606794 - RNA, 19 nt, Artificial Sequence
  Description of Artificial Sequence: Synthetic oligonucleotide
ggcuggguaguggccaggc

SEQ ID NO: 2606795 - RNA, 19 nt, Artificial Sequence
  Description of Artificial Sequence: Synthetic oligonucleotide
gcauauugguagccaggaa

SEQ ID NO: 2606796 - RNA, 19 nt, Artificial Sequence
  Description of Artificial Sequence: Synthetic oligonucleotide
ccuuaacucucucagccgu

SEQ ID NO: 2606797 - RNA, 19 nt, Artificial Sequence
  Description of Artificial Sequence: Synthetic oligonucleotide
cugggcagaguggccccgc

SEQ ID NO: 2606798 - RNA, 19 nt, Artificial Sequence
  Description of Artificial Sequence: Synthetic oligonucleotide
caggccucacaggcuuagc

SEQ ID NO: 2606799 - RNA, 19 nt, Artificial Sequence
  Description of Artificial Sequence: Synthetic oligonucleotide
gcugguaccggcgcuuguc

SEQ ID NO: 2606800 - RNA, 19 nt, Artificial Sequence
  Description of Artificial Sequence: Synthetic oligonucleotide
gccaccagauguggcuccg

SEQ ID NO: 2606801 - RNA, 19 nt, Artificial Sequence
  Description of Artificial Sequence: Synthetic oligonucleotide
ccuugaugcgguccaccuc

SEQ ID NO: 2606802 - RNA, 19 nt, Artificial Sequence
  Description of Artificial Sequence: Synthetic oligonucleotide
ggaagcucacaacgcaaau

SEQ ID NO: 2606803 - RNA, 19 nt, Artificial Sequence
  Description of Artificial Sequence: Synthetic oligonucleotide
ggagcucuuguagcgcaca

SEQ ID NO: 2606804 - RNA, 19 nt, Artificial Sequence
  Description of Artificial Sequence: Synthetic oligonucleotide
ggaguucccgggcaacugu

SEQ ID NO: 2606805 - RNA, 19 nt, Artificial Sequence
  Description of Artificial Sequence: Synthetic oligonucleotide
gacugcucaugucgcucgu

SEQ ID NO: 2606806 - RNA, 19 nt, Artificial Sequence
  Description of Artificial Sequence: Synthetic oligonucleotide
uaccggcgcuuguccuuca

SEQ ID NO: 2606807 - RNA, 19 nt, Artificial Sequence
  Description of Artificial Sequence: Synthetic oligonucleotide
gggaguuagcuggcugcug

SEQ ID NO: 2606808 - RNA, 19 nt, Artificial Sequence
  Description of Artificial Sequence: Synthetic oligonucleotide
acugcucaugucgcucgua

SEQ ID NO: 2606809 - RNA, 19 nt, Artificial Sequence
  Description of Artificial Sequence: Synthetic oligonucleotide
cagcuuccuugaugcgguc

SEQ ID NO: 2606810 - RNA, 19 nt, Artificial Sequence
  Description of Artificial Sequence: Synthetic oligonucleotide
ggcgccuuccuuggccucc

SEQ ID NO: 2606811 - RNA, 19 nt, Artificial Sequence
  Description of Artificial Sequence: Synthetic oligonucleotide
uggcgccuuccuuggccuc

SEQ ID NO: 2606812 - RNA, 19 nt, Artificial Sequence
  Description of Artificial Sequence: Synthetic oligonucleotide
cacccuccagggccuuaac

SEQ ID NO: 2606813 - RNA, 19 nt, Artificial Sequence
  Description of Artificial Sequence: Synthetic oligonucleotide
cucagccguagcccuaagu

SEQ ID NO: 2606814 - RNA, 19 nt, Artificial Sequence
  Description of Artificial Sequence: Synthetic oligonucleotide
accggcgcuuguccuucau

SEQ ID NO: 2606815 - RNA, 19 nt, Artificial Sequence
  Description of Artificial Sequence: Synthetic oligonucleotide
gccaggaaugggaguuagc

SEQ ID NO: 2606816 - RNA, 19 nt, Artificial Sequence
  Description of Artificial Sequence: Synthetic oligonucleotide
caacgcaaaucugcauugu

SEQ ID NO: 2606817 - RNA, 19 nt, Artificial Sequence
  Description of Artificial Sequence: Synthetic oligonucleotide
gccggagcucuuguagcgc

SEQ ID NO: 2606818 - RNA, 19 nt, Artificial Sequence
  Description of Artificial Sequence: Synthetic oligonucleotide
gguaguggccaggccucac

SEQ ID NO: 2606819 - RNA, 19 nt, Artificial Sequence
  Description of Artificial Sequence: Synthetic oligonucleotide
ccggagcucuuguagcgca

SEQ ID NO: 2606820 - RNA, 19 nt, Artificial Sequence
  Description of Artificial Sequence: Synthetic oligonucleotide
gugaacuuuuguagcuguu

SEQ ID NO: 2606821 - RNA, 19 nt, Artificial Sequence
  Description of Artificial Sequence: Synthetic oligonucleotide
ggugaggaggcuggguagu

SEQ ID NO: 2606822 - RNA, 19 nt, Artificial Sequence
  Description of Artificial Sequence: Synthetic oligonucleotide
cuggaguucccgggcaacu

SEQ ID NO: 2606823 - RNA, 19 nt, Artificial Sequence
  Description of Artificial Sequence: Synthetic oligonucleotide
gcuccauuucugcacuuuu

SEQ ID NO: 2606824 - RNA, 19 nt, Artificial Sequence
  Description of Artificial Sequence: Synthetic oligonucleotide
guggccccgcuugccggag

SEQ ID NO: 2606825 - RNA, 19 nt, Artificial Sequence
  Description of Artificial Sequence: Synthetic oligonucleotide
gccgcauggcaggucacuc

SEQ ID NO: 2606826 - RNA, 19 nt, Artificial Sequence
  Description of Artificial Sequence: Synthetic oligonucleotide
guuggugggugaggaggcu

SEQ ID NO: 2606827 - RNA, 19 nt, Artificial Sequence
  Description of Artificial Sequence: Synthetic oligonucleotide
cucuuguagcgcacagcuu

SEQ ID NO: 2606828 - RNA, 19 nt, Artificial Sequence
  Description of Artificial Sequence: Synthetic oligonucleotide
ccggcgcuuguccuucaug

SEQ ID NO: 2606829 - RNA, 19 nt, Artificial Sequence
  Description of Artificial Sequence: Synthetic oligonucleotide
gcauggcaggucacuccug

SEQ ID NO: 2606830 - RNA, 19 nt, Artificial Sequence
  Description of Artificial Sequence: Synthetic oligonucleotide
gcuuagcaaucugggcaga

SEQ ID NO: 2606831 - RNA, 19 nt, Artificial Sequence
  Description of Artificial Sequence: Synthetic oligonucleotide
gguaccggcgcuuguccuu

SEQ ID NO: 2606832 - RNA, 19 nt, Artificial Sequence
  Description of Artificial Sequence: Synthetic oligonucleotide
gguccugcuuggacugcuc

SEQ ID NO: 2606833 - RNA, 19 nt, Artificial Sequence
  Description of Artificial Sequence: Synthetic oligonucleotide
gcuugccggagcucuugua

SEQ ID NO: 2606834 - RNA, 19 nt, Artificial Sequence
  Description of Artificial Sequence: Synthetic oligonucleotide
cggagcucuuguagcgcac

SEQ ID NO: 2606835 - RNA, 19 nt, Artificial Sequence
  Description of Artificial Sequence: Synthetic oligonucleotide
cgaagguuguggagggucu

SEQ ID NO: 2606836 - RNA, 19 nt, Artificial Sequence
  Description of Artificial Sequence: Synthetic oligonucleotide
gggaaaagcuuggccuggu

SEQ ID NO: 2606837 - RNA, 19 nt, Artificial Sequence
  Description of Artificial Sequence: Synthetic oligonucleotide
ccgcugcuggcaggguugg

SEQ ID NO: 2606838 - RNA, 19 nt, Artificial Sequence
  Description of Artificial Sequence: Synthetic oligonucleotide
ggguaguggccaggccuca

SEQ ID NO: 2606839 - RNA, 19 nt, Artificial Sequence
  Description of Artificial Sequence: Synthetic oligonucleotide
cuccgcugcuggcaggguu

SEQ ID NO: 2606840 - RNA, 19 nt, Artificial Sequence
  Description of Artificial Sequence: Synthetic oligonucleotide
ccgcuugccggagcucuug

SEQ ID NO: 2606841 - RNA, 19 nt, Artificial Sequence
  Description of Artificial Sequence: Synthetic oligonucleotide
gcacccuccagggccuuaa

SEQ ID NO: 2606842 - RNA, 19 nt, Artificial Sequence
  Description of Artificial Sequence: Synthetic oligonucleotide
cgcauggcaggucacuccu

SEQ ID NO: 2606843 - RNA, 19 nt, Artificial Sequence
  Description of Artificial Sequence: Synthetic oligonucleotide
gccuucugguaggaagcua

SEQ ID NO: 2606844 - RNA, 19 nt, Artificial Sequence
  Description of Artificial Sequence: Synthetic oligonucleotide
ggccccgcuugccggagcu

SEQ ID NO: 2606845 - RNA, 19 nt, Artificial Sequence
  Description of Artificial Sequence: Synthetic oligonucleotide
ggcuccauuucugcacuuu

SEQ ID NO: 2606846 - RNA, 19 nt, Artificial Sequence
  Description of Artificial Sequence: Synthetic oligonucleotide
cguagcccuaagucguuuu

SEQ ID NO: 2606847 - RNA, 19 nt, Artificial Sequence
  Description of Artificial Sequence: Synthetic oligonucleotide
cccgggcaacugucuccuc

SEQ ID NO: 2606848 - RNA, 19 nt, Artificial Sequence
  Description of Artificial Sequence: Synthetic oligonucleotide
gggcagaguggccccgcuu

SEQ ID NO: 2606849 - RNA, 19 nt, Artificial Sequence
  Description of Artificial Sequence: Synthetic oligonucleotide
cgaacagcuugcgaagguu

SEQ ID NO: 2606850 - RNA, 19 nt, Artificial Sequence
  Description of Artificial Sequence: Synthetic oligonucleotide
cguugauaucuguggcauu

SEQ ID NO: 2606851 - RNA, 19 nt, Artificial Sequence
  Description of Artificial Sequence: Synthetic oligonucleotide
cgucuugaacgaacagcuu

SEQ ID NO: 2606852 - RNA, 19 nt, Artificial Sequence
  Description of Artificial Sequence: Synthetic oligonucleotide
ccagccccuugagguccug

SEQ ID NO: 2606853 - RNA, 19 nt, Artificial Sequence
  Description of Artificial Sequence: Synthetic oligonucleotide
gccguagcccuaagucguu

SEQ ID NO: 2606854 - RNA, 19 nt, Artificial Sequence
  Description of Artificial Sequence: Synthetic oligonucleotide
cgcuugccggagcucuugu

SEQ ID NO: 2606855 - RNA, 19 nt, Artificial Sequence
  Description of Artificial Sequence: Synthetic oligonucleotide
ccguagcccuaagucguuu

SEQ ID NO: 2606856 - RNA, 19 nt, Artificial Sequence
  Description of Artificial Sequence: Synthetic oligonucleotide
cacuguccucgggcuccau

SEQ ID NO: 2606857 - RNA, 19 nt, Artificial Sequence
  Description of Artificial Sequence: Synthetic oligonucleotide
cccgcuugccggagcucuu

SEQ ID NO: 2606858 - RNA, 19 nt, Artificial Sequence
  Description of Artificial Sequence: Synthetic oligonucleotide
  modified_base (1)..(1): a, c, u, g, unknown or other
ngggaaaagcuuggccugg

SEQ ID NO: 2606859 - RNA, 19 nt, Artificial Sequence
  Description of Artificial Sequence: Synthetic oligonucleotide
ugugccuucauccagaaag

SEQ ID NO: 2606860 - RNA, 19 nt, Artificial Sequence
  Description of Artificial Sequence: Synthetic oligonucleotide
aaaguaucuaaaugacacc

SEQ ID NO: 2606861 - RNA, 19 nt, Artificial Sequence
  Description of Artificial Sequence: Synthetic oligonucleotide
ucagaagccaguuuaaucc

SEQ ID NO: 2606862 - RNA, 19 nt, Artificial Sequence
  Description of Artificial Sequence: Synthetic oligonucleotide
caaaguaucuaaaugacac

SEQ ID NO: 2606863 - RNA, 19 nt, Artificial Sequence
  Description of Artificial Sequence: Synthetic oligonucleotide
aauccgaagaaccucagca

SEQ ID NO: 2606864 - RNA, 19 nt, Artificial Sequence
  Description of Artificial Sequence: Synthetic oligonucleotide
ucuaaaugacaccugacca

SEQ ID NO: 2606865 - RNA, 19 nt, Artificial Sequence
  Description of Artificial Sequence: Synthetic oligonucleotide
uccgucgguacacagaucg

SEQ ID NO: 2606866 - RNA, 19 nt, Artificial Sequence
  Description of Artificial Sequence: Synthetic oligonucleotide
ugugacgugugcuaugucg

SEQ ID NO: 2606867 - RNA, 19 nt, Artificial Sequence
  Description of Artificial Sequence: Synthetic oligonucleotide
uuuaauccgaagaaccuca

SEQ ID NO: 2606868 - RNA, 19 nt, Artificial Sequence
  Description of Artificial Sequence: Synthetic oligonucleotide
uguuccauguuccuggacc

SEQ ID NO: 2606869 - RNA, 19 nt, Artificial Sequence
  Description of Artificial Sequence: Synthetic oligonucleotide
aaguaucuaaaugacaccu

SEQ ID NO: 2606870 - RNA, 19 nt, Artificial Sequence
  Description of Artificial Sequence: Synthetic oligonucleotide
aaugacaccugaccagcac

SEQ ID NO: 2606871 - RNA, 19 nt, Artificial Sequence
  Description of Artificial Sequence: Synthetic oligonucleotide
caguuuaauccgaagaacc

SEQ ID NO: 2606872 - RNA, 19 nt, Artificial Sequence
  Description of Artificial Sequence: Synthetic oligonucleotide
aaagccaucgccaaaccag

SEQ ID NO: 2606873 - RNA, 19 nt, Artificial Sequence
  Description of Artificial Sequence: Synthetic oligonucleotide
aaaccggacuuguaaagag

SEQ ID NO: 2606874 - RNA, 19 nt, Artificial Sequence
  Description of Artificial Sequence: Synthetic oligonucleotide
gacucaaaguaucuaaaug

SEQ ID NO: 2606875 - RNA, 19 nt, Artificial Sequence
  Description of Artificial Sequence: Synthetic oligonucleotide
ucugcuugauuccagcacc

SEQ ID NO: 2606876 - RNA, 19 nt, Artificial Sequence
  Description of Artificial Sequence: Synthetic oligonucleotide
ugucucucuauccucaggc

SEQ ID NO: 2606877 - RNA, 19 nt, Artificial Sequence
  Description of Artificial Sequence: Synthetic oligonucleotide
aaggcaugucuguuucucc

SEQ ID NO: 2606878 - RNA, 19 nt, Artificial Sequence
  Description of Artificial Sequence: Synthetic oligonucleotide
cucaaaguaucuaaaugac

SEQ ID NO: 2606879 - RNA, 19 nt, Artificial Sequence
  Description of Artificial Sequence: Synthetic oligonucleotide
cuuucccacacccuaaggg

SEQ ID NO: 2606880 - RNA, 19 nt, Artificial Sequence
  Description of Artificial Sequence: Synthetic oligonucleotide
uguuccuggaccuaucugu

SEQ ID NO: 2606881 - RNA, 19 nt, Artificial Sequence
  Description of Artificial Sequence: Synthetic oligonucleotide
aaggccaccgugucucugc

SEQ ID NO: 2606882 - RNA, 19 nt, Artificial Sequence
  Description of Artificial Sequence: Synthetic oligonucleotide
augacaccugaccagcacc

SEQ ID NO: 2606883 - RNA, 19 nt, Artificial Sequence
  Description of Artificial Sequence: Synthetic oligonucleotide
cuuguaaagagggugcagg

SEQ ID NO: 2606884 - RNA, 19 nt, Artificial Sequence
  Description of Artificial Sequence: Synthetic oligonucleotide
uuucccacacccuaagggc

SEQ ID NO: 2606885 - RNA, 19 nt, Artificial Sequence
  Description of Artificial Sequence: Synthetic oligonucleotide
ugauuccagcaccaaaucc

SEQ ID NO: 2606886 - RNA, 19 nt, Artificial Sequence
  Description of Artificial Sequence: Synthetic oligonucleotide
acuucugcuugauuccagc

SEQ ID NO: 2606887 - RNA, 19 nt, Artificial Sequence
  Description of Artificial Sequence: Synthetic oligonucleotide
ucgguacacagaucgaggg

SEQ ID NO: 2606888 - RNA, 19 nt, Artificial Sequence
  Description of Artificial Sequence: Synthetic oligonucleotide
aaccucagcaaagccaucg

SEQ ID NO: 2606889 - RNA, 19 nt, Artificial Sequence
  Description of Artificial Sequence: Synthetic oligonucleotide
uucagccauacccacacug

SEQ ID NO: 2606890 - RNA, 19 nt, Artificial Sequence
  Description of Artificial Sequence: Synthetic oligonucleotide
uggacugagcuucuucagg

SEQ ID NO: 2606891 - RNA, 19 nt, Artificial Sequence
  Description of Artificial Sequence: Synthetic oligonucleotide
cagcaugaggaguaaaccg

SEQ ID NO: 2606892 - RNA, 19 nt, Artificial Sequence
  Description of Artificial Sequence: Synthetic oligonucleotide
agcuuuucagauccugugg

SEQ ID NO: 2606893 - RNA, 19 nt, Artificial Sequence
  Description of Artificial Sequence: Synthetic oligonucleotide
ugugcuaugucgacaguga

SEQ ID NO: 2606894 - RNA, 19 nt, Artificial Sequence
  Description of Artificial Sequence: Synthetic oligonucleotide
uccagaaagcuuuucagau

SEQ ID NO: 2606895 - RNA, 19 nt, Artificial Sequence
  Description of Artificial Sequence: Synthetic oligonucleotide
acuacugucucucuauccu

SEQ ID NO: 2606896 - RNA, 19 nt, Artificial Sequence
  Description of Artificial Sequence: Synthetic oligonucleotide
uaaaugacaccugaccagc

SEQ ID NO: 2606897 - RNA, 19 nt, Artificial Sequence
  Description of Artificial Sequence: Synthetic oligonucleotide
uguaaagagggugcagggg

SEQ ID NO: 2606898 - RNA, 19 nt, Artificial Sequence
  Description of Artificial Sequence: Synthetic oligonucleotide
ugaggaguaaaccggacuu

SEQ ID NO: 2606899 - RNA, 19 nt, Artificial Sequence
  Description of Artificial Sequence: Synthetic oligonucleotide
guaaaccggacuuguaaag

SEQ ID NO: 2606900 - RNA, 19 nt, Artificial Sequence
  Description of Artificial Sequence: Synthetic oligonucleotide
uuuucagauccugugggcc

SEQ ID NO: 2606901 - RNA, 19 nt, Artificial Sequence
  Description of Artificial Sequence: Synthetic oligonucleotide
gauuccagcaccaaaucca

SEQ ID NO: 2606902 - RNA, 19 nt, Artificial Sequence
  Description of Artificial Sequence: Synthetic oligonucleotide
ugucucuggacuuugugaa

SEQ ID NO: 2606903 - RNA, 19 nt, Artificial Sequence
  Description of Artificial Sequence: Synthetic oligonucleotide
agcaugaggaguaaaccgg

SEQ ID NO: 2606904 - RNA, 19 nt, Artificial Sequence
  Description of Artificial Sequence: Synthetic oligonucleotide
guggggacgacacugcagg

SEQ ID NO: 2606905 - RNA, 19 nt, Artificial Sequence
  Description of Artificial Sequence: Synthetic oligonucleotide
ucuguggacucaaaguauc

SEQ ID NO: 2606906 - RNA, 19 nt, Artificial Sequence
  Description of Artificial Sequence: Synthetic oligonucleotide
acacccuaagggcagccgc

SEQ ID NO: 2606907 - RNA, 19 nt, Artificial Sequence
  Description of Artificial Sequence: Synthetic oligonucleotide
ucucucuauccucaggcga

SEQ ID NO: 2606908 - RNA, 19 nt, Artificial Sequence
  Description of Artificial Sequence: Synthetic oligonucleotide
guaucuaaaugacaccuga

SEQ ID NO: 2606909 - RNA, 19 nt, Artificial Sequence
  Description of Artificial Sequence: Synthetic oligonucleotide
acugcuccccugcaggccc

SEQ ID NO: 2606910 - RNA, 19 nt, Artificial Sequence
  Description of Artificial Sequence: Synthetic oligonucleotide
gaagaaccucagcaaagcc

SEQ ID NO: 2606911 - RNA, 19 nt, Artificial Sequence
  Description of Artificial Sequence: Synthetic oligonucleotide
uaucuaaaugacaccugac

SEQ ID NO: 2606912 - RNA, 19 nt, Artificial Sequence
  Description of Artificial Sequence: Synthetic oligonucleotide
aaguuuucuucugggguuc

SEQ ID NO: 2606913 - RNA, 19 nt, Artificial Sequence
  Description of Artificial Sequence: Synthetic oligonucleotide
aagccaucgccaaaccagc

SEQ ID NO: 2606914 - RNA, 19 nt, Artificial Sequence
  Description of Artificial Sequence: Synthetic oligonucleotide
accagcaugugacgugugc

SEQ ID NO: 2606915 - RNA, 19 nt, Artificial Sequence
  Description of Artificial Sequence: Synthetic oligonucleotide
cucagcaugaggaguaaac

SEQ ID NO: 2606916 - RNA, 19 nt, Artificial Sequence
  Description of Artificial Sequence: Synthetic oligonucleotide
uucaaggcaugucuguuuc

SEQ ID NO: 2606917 - RNA, 19 nt, Artificial Sequence
  Description of Artificial Sequence: Synthetic oligonucleotide
agccaguuuaauccgaaga

SEQ ID NO: 2606918 - RNA, 19 nt, Artificial Sequence
  Description of Artificial Sequence: Synthetic oligonucleotide
aguaaaccggacuuguaaa

SEQ ID NO: 2606919 - RNA, 19 nt, Artificial Sequence
  Description of Artificial Sequence: Synthetic oligonucleotide
aaaggcgguccugacagag

SEQ ID NO: 2606920 - RNA, 19 nt, Artificial Sequence
  Description of Artificial Sequence: Synthetic oligonucleotide
uuaauccgaagaaccucag

SEQ ID NO: 2606921 - RNA, 19 nt, Artificial Sequence
  Description of Artificial Sequence: Synthetic oligonucleotide
agugcuacggccaugcugu

SEQ ID NO: 2606922 - RNA, 19 nt, Artificial Sequence
  Description of Artificial Sequence: Synthetic oligonucleotide
uaugucgacagugaagaaa

SEQ ID NO: 2606923 - RNA, 19 nt, Artificial Sequence
  Description of Artificial Sequence: Synthetic oligonucleotide
uuucuccucagugcuacgg

SEQ ID NO: 2606924 - RNA, 19 nt, Artificial Sequence
  Description of Artificial Sequence: Synthetic oligonucleotide
acgugugcuaugucgacag

SEQ ID NO: 2606925 - RNA, 19 nt, Artificial Sequence
  Description of Artificial Sequence: Synthetic oligonucleotide
uccgaagaaccucagcaaa

SEQ ID NO: 2606926 - RNA, 19 nt, Artificial Sequence
  Description of Artificial Sequence: Synthetic oligonucleotide
agaucgagggucugcugac

SEQ ID NO: 2606927 - RNA, 19 nt, Artificial Sequence
  Description of Artificial Sequence: Synthetic oligonucleotide
cuuuucagauccugugggc

SEQ ID NO: 2606928 - RNA, 19 nt, Artificial Sequence
  Description of Artificial Sequence: Synthetic oligonucleotide
gcuuuucagauccuguggg

SEQ ID NO: 2606929 - RNA, 19 nt, Artificial Sequence
  Description of Artificial Sequence: Synthetic oligonucleotide
cucagaagccaguuuaauc

SEQ ID NO: 2606930 - RNA, 19 nt, Artificial Sequence
  Description of Artificial Sequence: Synthetic oligonucleotide
uuucagauccugugggcca

SEQ ID NO: 2606931 - RNA, 19 nt, Artificial Sequence
  Description of Artificial Sequence: Synthetic oligonucleotide
uggacucaaaguaucuaaa

SEQ ID NO: 2606932 - RNA, 19 nt, Artificial Sequence
  Description of Artificial Sequence: Synthetic oligonucleotide
ccuaucugugccuucaucc

SEQ ID NO: 2606933 - RNA, 19 nt, Artificial Sequence
  Description of Artificial Sequence: Synthetic oligonucleotide
gaguaaaccggacuuguaa

SEQ ID NO: 2606934 - RNA, 19 nt, Artificial Sequence
  Description of Artificial Sequence: Synthetic oligonucleotide
uaaaccggacuuguaaaga

SEQ ID NO: 2606935 - RNA, 19 nt, Artificial Sequence
  Description of Artificial Sequence: Synthetic oligonucleotide
gucuguuucuccucagugc

SEQ ID NO: 2606936 - RNA, 19 nt, Artificial Sequence
  Description of Artificial Sequence: Synthetic oligonucleotide
aaccggacuuguaaagagg

SEQ ID NO: 2606937 - RNA, 19 nt, Artificial Sequence
  Description of Artificial Sequence: Synthetic oligonucleotide
accggacuuguaaagaggg

SEQ ID NO: 2606938 - RNA, 19 nt, Artificial Sequence
  Description of Artificial Sequence: Synthetic oligonucleotide
accuccuggacugagcuuc

SEQ ID NO: 2606939 - RNA, 19 nt, Artificial Sequence
  Description of Artificial Sequence: Synthetic oligonucleotide
augaggaguaaaccggacu

SEQ ID NO: 2606940 - RNA, 19 nt, Artificial Sequence
  Description of Artificial Sequence: Synthetic oligonucleotide
aggaaggccaccgugucuc

SEQ ID NO: 2606941 - RNA, 19 nt, Artificial Sequence
  Description of Artificial Sequence: Synthetic oligonucleotide
uugauuccagcaccaaauc

SEQ ID NO: 2606942 - RNA, 19 nt, Artificial Sequence
  Description of Artificial Sequence: Synthetic oligonucleotide
aaaccagcaugugacgugu

SEQ ID NO: 2606943 - RNA, 19 nt, Artificial Sequence
  Description of Artificial Sequence: Synthetic oligonucleotide
ugucaguuguccuggcaug

SEQ ID NO: 2606944 - RNA, 19 nt, Artificial Sequence
  Description of Artificial Sequence: Synthetic oligonucleotide
uucccacacccuaagggca

SEQ ID NO: 2606945 - RNA, 19 nt, Artificial Sequence
  Description of Artificial Sequence: Synthetic oligonucleotide
ugacaccugaccagcaccu

SEQ ID NO: 2606946 - RNA, 19 nt, Artificial Sequence
  Description of Artificial Sequence: Synthetic oligonucleotide
uguuucuccucagugcuac

SEQ ID NO: 2606947 - RNA, 19 nt, Artificial Sequence
  Description of Artificial Sequence: Synthetic oligonucleotide
ucaacaggcucagaagcca

SEQ ID NO: 2606948 - RNA, 19 nt, Artificial Sequence
  Description of Artificial Sequence: Synthetic oligonucleotide
ucgccaaaccagcauguga

SEQ ID NO: 2606949 - RNA, 19 nt, Artificial Sequence
  Description of Artificial Sequence: Synthetic oligonucleotide
auuccagcaccaaauccac

SEQ ID NO: 2606950 - RNA, 19 nt, Artificial Sequence
  Description of Artificial Sequence: Synthetic oligonucleotide
cacuacugucucucuaucc

SEQ ID NO: 2606951 - RNA, 19 nt, Artificial Sequence
  Description of Artificial Sequence: Synthetic oligonucleotide
ucucuggacuuugugaagu

SEQ ID NO: 2606952 - RNA, 19 nt, Artificial Sequence
  Description of Artificial Sequence: Synthetic oligonucleotide
uccacuacugucucucuau

SEQ ID NO: 2606953 - RNA, 19 nt, Artificial Sequence
  Description of Artificial Sequence: Synthetic oligonucleotide
gucucucuauccucaggcg

SEQ ID NO: 2606954 - RNA, 19 nt, Artificial Sequence
  Description of Artificial Sequence: Synthetic oligonucleotide
guuuaauccgaagaaccuc

SEQ ID NO: 2606955 - RNA, 19 nt, Artificial Sequence
  Description of Artificial Sequence: Synthetic oligonucleotide
cacucugucaguuguccug

SEQ ID NO: 2606956 - RNA, 19 nt, Artificial Sequence
  Description of Artificial Sequence: Synthetic oligonucleotide
acagagcuuccgucgguac

SEQ ID NO: 2606957 - RNA, 19 nt, Artificial Sequence
  Description of Artificial Sequence: Synthetic oligonucleotide
ucugucaguuguccuggca

SEQ ID NO: 2606958 - RNA, 19 nt, Artificial Sequence
  Description of Artificial Sequence: Synthetic oligonucleotide
augucgacagugaagaaaa

SEQ ID NO: 2606959 - RNA, 19 nt, Artificial Sequence
  Description of Artificial Sequence: Synthetic oligonucleotide
accuaucugugccuucauc

SEQ ID NO: 2606960 - RNA, 19 nt, Artificial Sequence
  Description of Artificial Sequence: Synthetic oligonucleotide
cugacagagcuuccgucgg

SEQ ID NO: 2606961 - RNA, 19 nt, Artificial Sequence
  Description of Artificial Sequence: Synthetic oligonucleotide
auacccacacugucacuuc

SEQ ID NO: 2606962 - RNA, 19 nt, Artificial Sequence
  Description of Artificial Sequence: Synthetic oligonucleotide
aauccacuacugucucucu

SEQ ID NO: 2606963 - RNA, 19 nt, Artificial Sequence
  Description of Artificial Sequence: Synthetic oligonucleotide
gcuaugucgacagugaaga

SEQ ID NO: 2606964 - RNA, 19 nt, Artificial Sequence
  Description of Artificial Sequence: Synthetic oligonucleotide
aguaucuaaaugacaccug

SEQ ID NO: 2606965 - RNA, 19 nt, Artificial Sequence
  Description of Artificial Sequence: Synthetic oligonucleotide
uccuggcauggcaggaagg

SEQ ID NO: 2606966 - RNA, 19 nt, Artificial Sequence
  Description of Artificial Sequence: Synthetic oligonucleotide
acacagaucgagggucugc

SEQ ID NO: 2606967 - RNA, 19 nt, Artificial Sequence
  Description of Artificial Sequence: Synthetic oligonucleotide
cugcagggcacucugucag

SEQ ID NO: 2606968 - RNA, 19 nt, Artificial Sequence
  Description of Artificial Sequence: Synthetic oligonucleotide
gucgguacacagaucgagg

SEQ ID NO: 2606969 - RNA, 19 nt, Artificial Sequence
  Description of Artificial Sequence: Synthetic oligonucleotide
aggcaugucuguuucuccu

SEQ ID NO: 2606970 - RNA, 19 nt, Artificial Sequence
  Description of Artificial Sequence: Synthetic oligonucleotide
guggacucaaaguaucuaa

SEQ ID NO: 2606971 - RNA, 19 nt, Artificial Sequence
  Description of Artificial Sequence: Synthetic oligonucleotide
ucccacacccuaagggcag

SEQ ID NO: 2606972 - RNA, 19 nt, Artificial Sequence
  Description of Artificial Sequence: Synthetic oligonucleotide
ccugacagagcuuccgucg

SEQ ID NO: 2606973 - RNA, 19 nt, Artificial Sequence
  Description of Artificial Sequence: Synthetic oligonucleotide
uccccugcaggcccaaggc

SEQ ID NO: 2606974 - RNA, 19 nt, Artificial Sequence
  Description of Artificial Sequence: Synthetic oligonucleotide
agggcacucugucaguugu

SEQ ID NO: 2606975 - RNA, 19 nt, Artificial Sequence
  Description of Artificial Sequence: Synthetic oligonucleotide
agcaccaaauccacuacug

SEQ ID NO: 2606976 - RNA, 19 nt, Artificial Sequence
  Description of Artificial Sequence: Synthetic oligonucleotide
ugucagcugugccaucaga

SEQ ID NO: 2606977 - RNA, 19 nt, Artificial Sequence
  Description of Artificial Sequence: Synthetic oligonucleotide
gucugcugacagcacagcc

SEQ ID NO: 2606978 - RNA, 19 nt, Artificial Sequence
  Description of Artificial Sequence: Synthetic oligonucleotide
aggcgguccugacagagcu

SEQ ID NO: 2606979 - RNA, 19 nt, Artificial Sequence
  Description of Artificial Sequence: Synthetic oligonucleotide
acuuguaaagagggugcag

SEQ ID NO: 2606980 - RNA, 19 nt, Artificial Sequence
  Description of Artificial Sequence: Synthetic oligonucleotide
cuggacugagcuucuucag

SEQ ID NO: 2606981 - RNA, 19 nt, Artificial Sequence
  Description of Artificial Sequence: Synthetic oligonucleotide
caugaggaguaaaccggac

SEQ ID NO: 2606982 - RNA, 19 nt, Artificial Sequence
  Description of Artificial Sequence: Synthetic oligonucleotide
cuaucugugccuucaucca

SEQ ID NO: 2606983 - RNA, 19 nt, Artificial Sequence
  Description of Artificial Sequence: Synthetic oligonucleotide
gugugcuggauuucuguac

SEQ ID NO: 2606984 - RNA, 19 nt, Artificial Sequence
  Description of Artificial Sequence: Synthetic oligonucleotide
auccgaagaaccucagcaa

SEQ ID NO: 2606985 - RNA, 19 nt, Artificial Sequence
  Description of Artificial Sequence: Synthetic oligonucleotide
caggcccaaggcauguucc

SEQ ID NO: 2606986 - RNA, 19 nt, Artificial Sequence
  Description of Artificial Sequence: Synthetic oligonucleotide
cugcugacagcacagccuc

SEQ ID NO: 2606987 - RNA, 19 nt, Artificial Sequence
  Description of Artificial Sequence: Synthetic oligonucleotide
agcugugccaucagacugg

SEQ ID NO: 2606988 - RNA, 19 nt, Artificial Sequence
  Description of Artificial Sequence: Synthetic oligonucleotide
gaggaguaaaccggacuug

SEQ ID NO: 2606989 - RNA, 19 nt, Artificial Sequence
  Description of Artificial Sequence: Synthetic oligonucleotide
gugugcuaugucgacagug

SEQ ID NO: 2606990 - RNA, 19 nt, Artificial Sequence
  Description of Artificial Sequence: Synthetic oligonucleotide
auguuccuggaccuaucug

SEQ ID NO: 2606991 - RNA, 19 nt, Artificial Sequence
  Description of Artificial Sequence: Synthetic oligonucleotide
aggaguaaaccggacuugu

SEQ ID NO: 2606992 - RNA, 19 nt, Artificial Sequence
  Description of Artificial Sequence: Synthetic oligonucleotide
cucaggcgaagugugcugg

SEQ ID NO: 2606993 - RNA, 19 nt, Artificial Sequence
  Description of Artificial Sequence: Synthetic oligonucleotide
acugcagggcacucuguca

SEQ ID NO: 2606994 - RNA, 19 nt, Artificial Sequence
  Description of Artificial Sequence: Synthetic oligonucleotide
ugcaggggccuccuucacc

SEQ ID NO: 2606995 - RNA, 19 nt, Artificial Sequence
  Description of Artificial Sequence: Synthetic oligonucleotide
cuacugucucucuauccuc

SEQ ID NO: 2606996 - RNA, 19 nt, Artificial Sequence
  Description of Artificial Sequence: Synthetic oligonucleotide
gucagcugugccaucagac

SEQ ID NO: 2606997 - RNA, 19 nt, Artificial Sequence
  Description of Artificial Sequence: Synthetic oligonucleotide
uacccacacugucacuucu

SEQ ID NO: 2606998 - RNA, 19 nt, Artificial Sequence
  Description of Artificial Sequence: Synthetic oligonucleotide
agugugcuggauuucugua

SEQ ID NO: 2606999 - RNA, 19 nt, Artificial Sequence
  Description of Artificial Sequence: Synthetic oligonucleotide
ggacuuguaaagagggugc

SEQ ID NO: 2607000 - RNA, 19 nt, Artificial Sequence
  Description of Artificial Sequence: Synthetic oligonucleotide
aacugucagcugugccauc

SEQ ID NO: 2607001 - RNA, 19 nt, Artificial Sequence
  Description of Artificial Sequence: Synthetic oligonucleotide
cagugcuacggccaugcug

SEQ ID NO: 2607002 - RNA, 19 nt, Artificial Sequence
  Description of Artificial Sequence: Synthetic oligonucleotide
ugggccacgcugcucuuca

SEQ ID NO: 2607003 - RNA, 19 nt, Artificial Sequence
  Description of Artificial Sequence: Synthetic oligonucleotide
agggucugcugacagcaca

SEQ ID NO: 2607004 - RNA, 19 nt, Artificial Sequence
  Description of Artificial Sequence: Synthetic oligonucleotide
ugaccagcaccuccuggac

SEQ ID NO: 2607005 - RNA, 19 nt, Artificial Sequence
  Description of Artificial Sequence: Synthetic oligonucleotide
ucugucuucaaggcauguc

SEQ ID NO: 2607006 - RNA, 19 nt, Artificial Sequence
  Description of Artificial Sequence: Synthetic oligonucleotide
caugucuguuucuccucag

SEQ ID NO: 2607007 - RNA, 19 nt, Artificial Sequence
  Description of Artificial Sequence: Synthetic oligonucleotide
uguggacucaaaguaucua

SEQ ID NO: 2607008 - RNA, 19 nt, Artificial Sequence
  Description of Artificial Sequence: Synthetic oligonucleotide
gguacacagaucgaggguc

SEQ ID NO: 2607009 - RNA, 19 nt, Artificial Sequence
  Description of Artificial Sequence: Synthetic oligonucleotide
aaaaggcgguccugacaga

SEQ ID NO: 2607010 - RNA, 19 nt, Artificial Sequence
  Description of Artificial Sequence: Synthetic oligonucleotide
uccuggacugagcuucuuc

SEQ ID NO: 2607011 - RNA, 19 nt, Artificial Sequence
  Description of Artificial Sequence: Synthetic oligonucleotide
acugucagcugugccauca

SEQ ID NO: 2607012 - RNA, 19 nt, Artificial Sequence
  Description of Artificial Sequence: Synthetic oligonucleotide
ugcugacagcacagccucg

SEQ ID NO: 2607013 - RNA, 19 nt, Artificial Sequence
  Description of Artificial Sequence: Synthetic oligonucleotide
uccugacagagcuuccguc

SEQ ID NO: 2607014 - RNA, 19 nt, Artificial Sequence
  Description of Artificial Sequence: Synthetic oligonucleotide
aaaugacaccugaccagca

SEQ ID NO: 2607015 - RNA, 19 nt, Artificial Sequence
  Description of Artificial Sequence: Synthetic oligonucleotide
cugucucucuauccucagg

SEQ ID NO: 2607016 - RNA, 19 nt, Artificial Sequence
  Description of Artificial Sequence: Synthetic oligonucleotide
caugcugugcuuucccaca

SEQ ID NO: 2607017 - RNA, 19 nt, Artificial Sequence
  Description of Artificial Sequence: Synthetic oligonucleotide
ucucuauccucaggcgaag

SEQ ID NO: 2607018 - RNA, 19 nt, Artificial Sequence
  Description of Artificial Sequence: Synthetic oligonucleotide
uguacugucucuggacuuu

SEQ ID NO: 2607019 - RNA, 19 nt, Artificial Sequence
  Description of Artificial Sequence: Synthetic oligonucleotide
gaagugugcuggauuucug

SEQ ID NO: 2607020 - RNA, 19 nt, Artificial Sequence
  Description of Artificial Sequence: Synthetic oligonucleotide
uggggacgacacugcaggg

SEQ ID NO: 2607021 - RNA, 19 nt, Artificial Sequence
  Description of Artificial Sequence: Synthetic oligonucleotide
ugacgugugcuaugucgac

SEQ ID NO: 2607022 - RNA, 19 nt, Artificial Sequence
  Description of Artificial Sequence: Synthetic oligonucleotide
uccucaggcgaagugugcu

SEQ ID NO: 2607023 - RNA, 19 nt, Artificial Sequence
  Description of Artificial Sequence: Synthetic oligonucleotide
ucaaggcaugucuguuucu

SEQ ID NO: 2607024 - RNA, 19 nt, Artificial Sequence
  Description of Artificial Sequence: Synthetic oligonucleotide
ucgauggcacgcuuggcuu

SEQ ID NO: 2607025 - RNA, 19 nt, Artificial Sequence
  Description of Artificial Sequence: Synthetic oligonucleotide
gcugugcuuucccacaccc

SEQ ID NO: 2607026 - RNA, 19 nt, Artificial Sequence
  Description of Artificial Sequence: Synthetic oligonucleotide
gccaguuuaauccgaagaa

SEQ ID NO: 2607027 - RNA, 19 nt, Artificial Sequence
  Description of Artificial Sequence: Synthetic oligonucleotide
gacuuguaaagagggugca

SEQ ID NO: 2607028 - RNA, 19 nt, Artificial Sequence
  Description of Artificial Sequence: Synthetic oligonucleotide
guuccuggaccuaucugug

SEQ ID NO: 2607029 - RNA, 19 nt, Artificial Sequence
  Description of Artificial Sequence: Synthetic oligonucleotide
cuccccugcaggcccaagg

SEQ ID NO: 2607030 - RNA, 19 nt, Artificial Sequence
  Description of Artificial Sequence: Synthetic oligonucleotide
gacugagcuucuucagguc

SEQ ID NO: 2607031 - RNA, 19 nt, Artificial Sequence
  Description of Artificial Sequence: Synthetic oligonucleotide
cucucuauccucaggcgaa

SEQ ID NO: 2607032 - RNA, 19 nt, Artificial Sequence
  Description of Artificial Sequence: Synthetic oligonucleotide
ucgagggucugcugacagc

SEQ ID NO: 2607033 - RNA, 19 nt, Artificial Sequence
  Description of Artificial Sequence: Synthetic oligonucleotide
ugacagagcuuccgucggu

SEQ ID NO: 2607034 - RNA, 19 nt, Artificial Sequence
  Description of Artificial Sequence: Synthetic oligonucleotide
cuucugcuugauuccagca

SEQ ID NO: 2607035 - RNA, 19 nt, Artificial Sequence
  Description of Artificial Sequence: Synthetic oligonucleotide
guuucuccucagugcuacg

SEQ ID NO: 2607036 - RNA, 19 nt, Artificial Sequence
  Description of Artificial Sequence: Synthetic oligonucleotide
guccuggcauggcaggaag

SEQ ID NO: 2607037 - RNA, 19 nt, Artificial Sequence
  Description of Artificial Sequence: Synthetic oligonucleotide
ucacaacugucagcugugc

SEQ ID NO: 2607038 - RNA, 19 nt, Artificial Sequence
  Description of Artificial Sequence: Synthetic oligonucleotide
uccauguuccuggaccuau

SEQ ID NO: 2607039 - RNA, 19 nt, Artificial Sequence
  Description of Artificial Sequence: Synthetic oligonucleotide
cuggucacaacugucagcu

SEQ ID NO: 2607040 - RNA, 19 nt, Artificial Sequence
  Description of Artificial Sequence: Synthetic oligonucleotide
agcuuccgucgguacacag

SEQ ID NO: 2607041 - RNA, 19 nt, Artificial Sequence
  Description of Artificial Sequence: Synthetic oligonucleotide
aagagggugcaggggccuc

SEQ ID NO: 2607042 - RNA, 19 nt, Artificial Sequence
  Description of Artificial Sequence: Synthetic oligonucleotide
uucagauccugugggccac

SEQ ID NO: 2607043 - RNA, 19 nt, Artificial Sequence
  Description of Artificial Sequence: Synthetic oligonucleotide
caaagccaucgccaaacca

SEQ ID NO: 2607044 - RNA, 19 nt, Artificial Sequence
  Description of Artificial Sequence: Synthetic oligonucleotide
ugccuucauccagaaagcu

SEQ ID NO: 2607045 - RNA, 19 nt, Artificial Sequence
  Description of Artificial Sequence: Synthetic oligonucleotide
ccgaagaaccucagcaaag

SEQ ID NO: 2607046 - RNA, 19 nt, Artificial Sequence
  Description of Artificial Sequence: Synthetic oligonucleotide
ucaggcgaagugugcugga

SEQ ID NO: 2607047 - RNA, 19 nt, Artificial Sequence
  Description of Artificial Sequence: Synthetic oligonucleotide
gccaaaccagcaugugacg

SEQ ID NO: 2607048 - RNA, 19 nt, Artificial Sequence
  Description of Artificial Sequence: Synthetic oligonucleotide
gugacgugugcuaugucga

SEQ ID NO: 2607049 - RNA, 19 nt, Artificial Sequence
  Description of Artificial Sequence: Synthetic oligonucleotide
uccucagugcuacggccau

SEQ ID NO: 2607050 - RNA, 19 nt, Artificial Sequence
  Description of Artificial Sequence: Synthetic oligonucleotide
ccaguuuaauccgaagaac

SEQ ID NO: 2607051 - RNA, 19 nt, Artificial Sequence
  Description of Artificial Sequence: Synthetic oligonucleotide
gaagccaguuuaauccgaa

SEQ ID NO: 2607052 - RNA, 19 nt, Artificial Sequence
  Description of Artificial Sequence: Synthetic oligonucleotide
ucuggacuuugugaaguuu

SEQ ID NO: 2607053 - RNA, 19 nt, Artificial Sequence
  Description of Artificial Sequence: Synthetic oligonucleotide
gguccugacagagcuuccg

SEQ ID NO: 2607054 - RNA, 19 nt, Artificial Sequence
  Description of Artificial Sequence: Synthetic oligonucleotide
cgccaaaccagcaugugac

SEQ ID NO: 2607055 - RNA, 19 nt, Artificial Sequence
  Description of Artificial Sequence: Synthetic oligonucleotide
uacacagaucgagggucug

SEQ ID NO: 2607056 - RNA, 19 nt, Artificial Sequence
  Description of Artificial Sequence: Synthetic oligonucleotide
agccauacccacacuguca

SEQ ID NO: 2607057 - RNA, 19 nt, Artificial Sequence
  Description of Artificial Sequence: Synthetic oligonucleotide
aggcauguuccauguuccu

SEQ ID NO: 2607058 - RNA, 19 nt, Artificial Sequence
  Description of Artificial Sequence: Synthetic oligonucleotide
guuccauguuccuggaccu

SEQ ID NO: 2607059 - RNA, 19 nt, Artificial Sequence
  Description of Artificial Sequence: Synthetic oligonucleotide
ucagauccugugggccacg

SEQ ID NO: 2607060 - RNA, 19 nt, Artificial Sequence
  Description of Artificial Sequence: Synthetic oligonucleotide
gggacgacacugcagggca

SEQ ID NO: 2607061 - RNA, 19 nt, Artificial Sequence
  Description of Artificial Sequence: Synthetic oligonucleotide
uucugucuucaaggcaugu

SEQ ID NO: 2607062 - RNA, 19 nt, Artificial Sequence
  Description of Artificial Sequence: Synthetic oligonucleotide
uucugggguucugucuuca

SEQ ID NO: 2607063 - RNA, 19 nt, Artificial Sequence
  Description of Artificial Sequence: Synthetic oligonucleotide
aucugugccuucauccaga

SEQ ID NO: 2607064 - RNA, 19 nt, Artificial Sequence
  Description of Artificial Sequence: Synthetic oligonucleotide
ccagaaagcuuuucagauc

SEQ ID NO: 2607065 - RNA, 19 nt, Artificial Sequence
  Description of Artificial Sequence: Synthetic oligonucleotide
cacacugucacuucugcuu

SEQ ID NO: 2607066 - RNA, 19 nt, Artificial Sequence
  Description of Artificial Sequence: Synthetic oligonucleotide
gacgugugcuaugucgaca

SEQ ID NO: 2607067 - RNA, 19 nt, Artificial Sequence
  Description of Artificial Sequence: Synthetic oligonucleotide
agccgcuggucacaacugu

SEQ ID NO: 2607068 - RNA, 19 nt, Artificial Sequence
  Description of Artificial Sequence: Synthetic oligonucleotide
agcaugugacgugugcuau

SEQ ID NO: 2607069 - RNA, 19 nt, Artificial Sequence
  Description of Artificial Sequence: Synthetic oligonucleotide
accgugucucugcacugcu

SEQ ID NO: 2607070 - RNA, 19 nt, Artificial Sequence
  Description of Artificial Sequence: Synthetic oligonucleotide
uuguccuggcauggcagga

SEQ ID NO: 2607071 - RNA, 19 nt, Artificial Sequence
  Description of Artificial Sequence: Synthetic oligonucleotide
ggcacucugucaguugucc

SEQ ID NO: 2607072 - RNA, 19 nt, Artificial Sequence
  Description of Artificial Sequence: Synthetic oligonucleotide
auccacuacugucucucua

SEQ ID NO: 2607073 - RNA, 19 nt, Artificial Sequence
  Description of Artificial Sequence: Synthetic oligonucleotide
ccaucgccaaaccagcaug

SEQ ID NO: 2607074 - RNA, 19 nt, Artificial Sequence
  Description of Artificial Sequence: Synthetic oligonucleotide
gcacgcuuggcuucgucug

SEQ ID NO: 2607075 - RNA, 19 nt, Artificial Sequence
  Description of Artificial Sequence: Synthetic oligonucleotide
uucacccagguggggacga

SEQ ID NO: 2607076 - RNA, 19 nt, Artificial Sequence
  Description of Artificial Sequence: Synthetic oligonucleotide
cuuccgucgguacacagau

SEQ ID NO: 2607077 - RNA, 19 nt, Artificial Sequence
  Description of Artificial Sequence: Synthetic oligonucleotide
auggcaggaaggccaccgu

SEQ ID NO: 2607078 - RNA, 19 nt, Artificial Sequence
  Description of Artificial Sequence: Synthetic oligonucleotide
ugcuacggccaugcugugc

SEQ ID NO: 2607079 - RNA, 19 nt, Artificial Sequence
  Description of Artificial Sequence: Synthetic oligonucleotide
cacacccuaagggcagccg

SEQ ID NO: 2607080 - RNA, 19 nt, Artificial Sequence
  Description of Artificial Sequence: Synthetic oligonucleotide
cacagccucgauggcacgc

SEQ ID NO: 2607081 - RNA, 19 nt, Artificial Sequence
  Description of Artificial Sequence: Synthetic oligonucleotide
aucgccaaaccagcaugug

SEQ ID NO: 2607082 - RNA, 19 nt, Artificial Sequence
  Description of Artificial Sequence: Synthetic oligonucleotide
cugcuugauuccagcacca

SEQ ID NO: 2607083 - RNA, 19 nt, Artificial Sequence
  Description of Artificial Sequence: Synthetic oligonucleotide
cauguuccauguuccugga

SEQ ID NO: 2607084 - RNA, 19 nt, Artificial Sequence
  Description of Artificial Sequence: Synthetic oligonucleotide
ccucagcaaagccaucgcc

SEQ ID NO: 2607085 - RNA, 19 nt, Artificial Sequence
  Description of Artificial Sequence: Synthetic oligonucleotide
ggcauguuccauguuccug

SEQ ID NO: 2607086 - RNA, 19 nt, Artificial Sequence
  Description of Artificial Sequence: Synthetic oligonucleotide
aggcgaagugugcuggauu

SEQ ID NO: 2607087 - RNA, 19 nt, Artificial Sequence
  Description of Artificial Sequence: Synthetic oligonucleotide
cucugucaguuguccuggc

SEQ ID NO: 2607088 - RNA, 19 nt, Artificial Sequence
  Description of Artificial Sequence: Synthetic oligonucleotide
cugucagcugugccaucag

SEQ ID NO: 2607089 - RNA, 19 nt, Artificial Sequence
  Description of Artificial Sequence: Synthetic oligonucleotide
cucgauggcacgcuuggcu

SEQ ID NO: 2607090 - RNA, 19 nt, Artificial Sequence
  Description of Artificial Sequence: Synthetic oligonucleotide
cagggcacucugucaguug

SEQ ID NO: 2607091 - RNA, 19 nt, Artificial Sequence
  Description of Artificial Sequence: Synthetic oligonucleotide
agauccugugggccacgcu

SEQ ID NO: 2607092 - RNA, 19 nt, Artificial Sequence
  Description of Artificial Sequence: Synthetic oligonucleotide
ccaaauccacuacugucuc

SEQ ID NO: 2607093 - RNA, 19 nt, Artificial Sequence
  Description of Artificial Sequence: Synthetic oligonucleotide
cgaagaaccucagcaaagc

SEQ ID NO: 2607094 - RNA, 19 nt, Artificial Sequence
  Description of Artificial Sequence: Synthetic oligonucleotide
ccuggacugagcuucuuca

SEQ ID NO: 2607095 - RNA, 19 nt, Artificial Sequence
  Description of Artificial Sequence: Synthetic oligonucleotide
gcaaagccaucgccaaacc

SEQ ID NO: 2607096 - RNA, 19 nt, Artificial Sequence
  Description of Artificial Sequence: Synthetic oligonucleotide
uggaccuaucugugccuuc

SEQ ID NO: 2607097 - RNA, 19 nt, Artificial Sequence
  Description of Artificial Sequence: Synthetic oligonucleotide
caguuguccuggcauggca

SEQ ID NO: 2607098 - RNA, 19 nt, Artificial Sequence
  Description of Artificial Sequence: Synthetic oligonucleotide
caccgugucucugcacugc

SEQ ID NO: 2607099 - RNA, 19 nt, Artificial Sequence
  Description of Artificial Sequence: Synthetic oligonucleotide
cagcucagcaugaggagua

SEQ ID NO: 2607100 - RNA, 19 nt, Artificial Sequence
  Description of Artificial Sequence: Synthetic oligonucleotide
cggacuuguaaagagggug

SEQ ID NO: 2607101 - RNA, 19 nt, Artificial Sequence
  Description of Artificial Sequence: Synthetic oligonucleotide
ugcuugauuccagcaccaa

SEQ ID NO: 2607102 - RNA, 19 nt, Artificial Sequence
  Description of Artificial Sequence: Synthetic oligonucleotide
gugcuaugucgacagugaa

SEQ ID NO: 2607103 - RNA, 19 nt, Artificial Sequence
  Description of Artificial Sequence: Synthetic oligonucleotide
cagagcuuccgucgguaca

SEQ ID NO: 2607104 - RNA, 19 nt, Artificial Sequence
  Description of Artificial Sequence: Synthetic oligonucleotide
gaaggccaccgugucucug

SEQ ID NO: 2607105 - RNA, 19 nt, Artificial Sequence
  Description of Artificial Sequence: Synthetic oligonucleotide
gggucugcugacagcacag

SEQ ID NO: 2607106 - RNA, 19 nt, Artificial Sequence
  Description of Artificial Sequence: Synthetic oligonucleotide
ccaugcugugcuuucccac

SEQ ID NO: 2607107 - RNA, 19 nt, Artificial Sequence
  Description of Artificial Sequence: Synthetic oligonucleotide
ggacucaaaguaucuaaau

SEQ ID NO: 2607108 - RNA, 19 nt, Artificial Sequence
  Description of Artificial Sequence: Synthetic oligonucleotide
gcccaaggcauguuccaug

SEQ ID NO: 2607109 - RNA, 19 nt, Artificial Sequence
  Description of Artificial Sequence: Synthetic oligonucleotide
cugucaguuguccuggcau

SEQ ID NO: 2607110 - RNA, 19 nt, Artificial Sequence
  Description of Artificial Sequence: Synthetic oligonucleotide
accugaccagcaccuccug

SEQ ID NO: 2607111 - RNA, 19 nt, Artificial Sequence
  Description of Artificial Sequence: Synthetic oligonucleotide
acgacacugcagggcacuc

SEQ ID NO: 2607112 - RNA, 19 nt, Artificial Sequence
  Description of Artificial Sequence: Synthetic oligonucleotide
gcaugugacgugugcuaug

SEQ ID NO: 2607113 - RNA, 19 nt, Artificial Sequence
  Description of Artificial Sequence: Synthetic oligonucleotide
cauguuccuggaccuaucu

SEQ ID NO: 2607114 - RNA, 19 nt, Artificial Sequence
  Description of Artificial Sequence: Synthetic oligonucleotide
gguggggacgacacugcag

SEQ ID NO: 2607115 - RNA, 19 nt, Artificial Sequence
  Description of Artificial Sequence: Synthetic oligonucleotide
gcuacggccaugcugugcu

SEQ ID NO: 2607116 - RNA, 19 nt, Artificial Sequence
  Description of Artificial Sequence: Synthetic oligonucleotide
aaccagcaugugacgugug

SEQ ID NO: 2607117 - RNA, 19 nt, Artificial Sequence
  Description of Artificial Sequence: Synthetic oligonucleotide
gaucgagggucugcugaca

SEQ ID NO: 2607118 - RNA, 19 nt, Artificial Sequence
  Description of Artificial Sequence: Synthetic oligonucleotide
caugugacgugugcuaugu

SEQ ID NO: 2607119 - RNA, 19 nt, Artificial Sequence
  Description of Artificial Sequence: Synthetic oligonucleotide
cacugcuccccugcaggcc

SEQ ID NO: 2607120 - RNA, 19 nt, Artificial Sequence
  Description of Artificial Sequence: Synthetic oligonucleotide
gacagagcuuccgucggua

SEQ ID NO: 2607121 - RNA, 19 nt, Artificial Sequence
  Description of Artificial Sequence: Synthetic oligonucleotide
cagcaugugacgugugcua

SEQ ID NO: 2607122 - RNA, 19 nt, Artificial Sequence
  Description of Artificial Sequence: Synthetic oligonucleotide
cuguggacucaaaguaucu

SEQ ID NO: 2607123 - RNA, 19 nt, Artificial Sequence
  Description of Artificial Sequence: Synthetic oligonucleotide
ggccacgcugcucuucagc

SEQ ID NO: 2607124 - RNA, 19 nt, Artificial Sequence
  Description of Artificial Sequence: Synthetic oligonucleotide
uuccgucgguacacagauc

SEQ ID NO: 2607125 - RNA, 19 nt, Artificial Sequence
  Description of Artificial Sequence: Synthetic oligonucleotide
caucgccaaaccagcaugu

SEQ ID NO: 2607126 - RNA, 19 nt, Artificial Sequence
  Description of Artificial Sequence: Synthetic oligonucleotide
ccagcaccaaauccacuac

SEQ ID NO: 2607127 - RNA, 19 nt, Artificial Sequence
  Description of Artificial Sequence: Synthetic oligonucleotide
ggggacgacacugcagggc

SEQ ID NO: 2607128 - RNA, 19 nt, Artificial Sequence
  Description of Artificial Sequence: Synthetic oligonucleotide
cuaugucgacagugaagaa

SEQ ID NO: 2607129 - RNA, 19 nt, Artificial Sequence
  Description of Artificial Sequence: Synthetic oligonucleotide
acccacacugucacuucug

SEQ ID NO: 2607130 - RNA, 19 nt, Artificial Sequence
  Description of Artificial Sequence: Synthetic oligonucleotide
gcaugaggaguaaaccgga

SEQ ID NO: 2607131 - RNA, 19 nt, Artificial Sequence
  Description of Artificial Sequence: Synthetic oligonucleotide
acgcuuggcuucgucugug

SEQ ID NO: 2607132 - RNA, 19 nt, Artificial Sequence
  Description of Artificial Sequence: Synthetic oligonucleotide
cagauccugugggccacgc

SEQ ID NO: 2607133 - RNA, 19 nt, Artificial Sequence
  Description of Artificial Sequence: Synthetic oligonucleotide
gaccagcaccuccuggacu

SEQ ID NO: 2607134 - RNA, 19 nt, Artificial Sequence
  Description of Artificial Sequence: Synthetic oligonucleotide
uuccauguuccuggaccua

SEQ ID NO: 2607135 - RNA, 19 nt, Artificial Sequence
  Description of Artificial Sequence: Synthetic oligonucleotide
gcaggcccaaggcauguuc

SEQ ID NO: 2607136 - RNA, 19 nt, Artificial Sequence
  Description of Artificial Sequence: Synthetic oligonucleotide
uggcacgcuuggcuucguc

SEQ ID NO: 2607137 - RNA, 19 nt, Artificial Sequence
  Description of Artificial Sequence: Synthetic oligonucleotide
gacaccugaccagcaccuc

SEQ ID NO: 2607138 - RNA, 19 nt, Artificial Sequence
  Description of Artificial Sequence: Synthetic oligonucleotide
agccucgauggcacgcuug

SEQ ID NO: 2607139 - RNA, 19 nt, Artificial Sequence
  Description of Artificial Sequence: Synthetic oligonucleotide
uggcuucgucuguggacuc

SEQ ID NO: 2607140 - RNA, 19 nt, Artificial Sequence
  Description of Artificial Sequence: Synthetic oligonucleotide
cgucgguacacagaucgag

SEQ ID NO: 2607141 - RNA, 19 nt, Artificial Sequence
  Description of Artificial Sequence: Synthetic oligonucleotide
gcacugcuccccugcaggc

SEQ ID NO: 2607142 - RNA, 19 nt, Artificial Sequence
  Description of Artificial Sequence: Synthetic oligonucleotide
gucuguggacucaaaguau

SEQ ID NO: 2607143 - RNA, 19 nt, Artificial Sequence
  Description of Artificial Sequence: Synthetic oligonucleotide
gacgacacugcagggcacu

SEQ ID NO: 2607144 - RNA, 19 nt, Artificial Sequence
  Description of Artificial Sequence: Synthetic oligonucleotide
cuccuucacccaggugggg

SEQ ID NO: 2607145 - RNA, 19 nt, Artificial Sequence
  Description of Artificial Sequence: Synthetic oligonucleotide
gagggucugcugacagcac

SEQ ID NO: 2607146 - RNA, 19 nt, Artificial Sequence
  Description of Artificial Sequence: Synthetic oligonucleotide
guacacagaucgagggucu

SEQ ID NO: 2607147 - RNA, 19 nt, Artificial Sequence
  Description of Artificial Sequence: Synthetic oligonucleotide
gcgguccugacagagcuuc

SEQ ID NO: 2607148 - RNA, 19 nt, Artificial Sequence
  Description of Artificial Sequence: Synthetic oligonucleotide
ggcgaagugugcuggauuu

SEQ ID NO: 2607149 - RNA, 19 nt, Artificial Sequence
  Description of Artificial Sequence: Synthetic oligonucleotide
ccucaggcgaagugugcug

SEQ ID NO: 2607150 - RNA, 19 nt, Artificial Sequence
  Description of Artificial Sequence: Synthetic oligonucleotide
agccaucgccaaaccagca

SEQ ID NO: 2607151 - RNA, 19 nt, Artificial Sequence
  Description of Artificial Sequence: Synthetic oligonucleotide
cagcaccaaauccacuacu

SEQ ID NO: 2607152 - RNA, 19 nt, Artificial Sequence
  Description of Artificial Sequence: Synthetic oligonucleotide
gccaccgugucucugcacu

SEQ ID NO: 2607153 - RNA, 19 nt, Artificial Sequence
  Description of Artificial Sequence: Synthetic oligonucleotide
gucucugcacugcuccccu

SEQ ID NO: 2607154 - RNA, 19 nt, Artificial Sequence
  Description of Artificial Sequence: Synthetic oligonucleotide
agcucagcaugaggaguaa

SEQ ID NO: 2607155 - RNA, 19 nt, Artificial Sequence
  Description of Artificial Sequence: Synthetic oligonucleotide
cacgcugcucuucagccau

SEQ ID NO: 2607156 - RNA, 19 nt, Artificial Sequence
  Description of Artificial Sequence: Synthetic oligonucleotide
ccacuacugucucucuauc

SEQ ID NO: 2607157 - RNA, 19 nt, Artificial Sequence
  Description of Artificial Sequence: Synthetic oligonucleotide
ggcacgcuuggcuucgucu

SEQ ID NO: 2607158 - RNA, 19 nt, Artificial Sequence
  Description of Artificial Sequence: Synthetic oligonucleotide
gcaccuccuggacugagcu

SEQ ID NO: 2607159 - RNA, 19 nt, Artificial Sequence
  Description of Artificial Sequence: Synthetic oligonucleotide
gcuuccgucgguacacaga

SEQ ID NO: 2607160 - RNA, 19 nt, Artificial Sequence
  Description of Artificial Sequence: Synthetic oligonucleotide
ccgcuggucacaacuguca

SEQ ID NO: 2607161 - RNA, 19 nt, Artificial Sequence
  Description of Artificial Sequence: Synthetic oligonucleotide
caacugucagcugugccau

SEQ ID NO: 2607162 - RNA, 19 nt, Artificial Sequence
  Description of Artificial Sequence: Synthetic oligonucleotide
ggacuuugugaaguuuucu

SEQ ID NO: 2607163 - RNA, 19 nt, Artificial Sequence
  Description of Artificial Sequence: Synthetic oligonucleotide
cacccuaagggcagccgcu

SEQ ID NO: 2607164 - RNA, 19 nt, Artificial Sequence
  Description of Artificial Sequence: Synthetic oligonucleotide
gcacagccucgauggcacg

SEQ ID NO: 2607165 - RNA, 19 nt, Artificial Sequence
  Description of Artificial Sequence: Synthetic oligonucleotide
gugcuacggccaugcugug

SEQ ID NO: 2607166 - RNA, 19 nt, Artificial Sequence
  Description of Artificial Sequence: Synthetic oligonucleotide
gagcuuccgucgguacaca

SEQ ID NO: 2607167 - RNA, 19 nt, Artificial Sequence
  Description of Artificial Sequence: Synthetic oligonucleotide
ucacccagguggggacgac

SEQ ID NO: 2607168 - RNA, 19 nt, Artificial Sequence
  Description of Artificial Sequence: Synthetic oligonucleotide
ugugggccacgcugcucuu

SEQ ID NO: 2607169 - RNA, 19 nt, Artificial Sequence
  Description of Artificial Sequence: Synthetic oligonucleotide
ccaccgugucucugcacug

SEQ ID NO: 2607170 - RNA, 19 nt, Artificial Sequence
  Description of Artificial Sequence: Synthetic oligonucleotide
gaccuaucugugccuucau

SEQ ID NO: 2607171 - RNA, 19 nt, Artificial Sequence
  Description of Artificial Sequence: Synthetic oligonucleotide
cgagggucugcugacagca

SEQ ID NO: 2607172 - RNA, 19 nt, Artificial Sequence
  Description of Artificial Sequence: Synthetic oligonucleotide
ggcaggaaggccaccgugu

SEQ ID NO: 2607173 - RNA, 19 nt, Artificial Sequence
  Description of Artificial Sequence: Synthetic oligonucleotide
ggaguaaaccggacuugua

SEQ ID NO: 2607174 - RNA, 19 nt, Artificial Sequence
  Description of Artificial Sequence: Synthetic oligonucleotide
ugcaggcccaaggcauguu

SEQ ID NO: 2607175 - RNA, 19 nt, Artificial Sequence
  Description of Artificial Sequence: Synthetic oligonucleotide
cgcuuggcuucgucugugg

SEQ ID NO: 2607176 - RNA, 19 nt, Artificial Sequence
  Description of Artificial Sequence: Synthetic oligonucleotide
cacgcuuggcuucgucugu

SEQ ID NO: 2607177 - RNA, 19 nt, Artificial Sequence
  Description of Artificial Sequence: Synthetic oligonucleotide
gccgcuggucacaacuguc

SEQ ID NO: 2607178 - RNA, 19 nt, Artificial Sequence
  Description of Artificial Sequence: Synthetic oligonucleotide
gcuucgucuguggacucaa

SEQ ID NO: 2607179 - RNA, 19 nt, Artificial Sequence
  Description of Artificial Sequence: Synthetic oligonucleotide
cacccagguggggacgaca

SEQ ID NO: 2607180 - RNA, 19 nt, Artificial Sequence
  Description of Artificial Sequence: Synthetic oligonucleotide
cugugccuucauccagaaa

SEQ ID NO: 2607181 - RNA, 19 nt, Artificial Sequence
  Description of Artificial Sequence: Synthetic oligonucleotide
ccaaaccagcaugugacgu

SEQ ID NO: 2607182 - RNA, 19 nt, Artificial Sequence
  Description of Artificial Sequence: Synthetic oligonucleotide
gccaucgccaaaccagcau

SEQ ID NO: 2607183 - RNA, 19 nt, Artificial Sequence
  Description of Artificial Sequence: Synthetic oligonucleotide
gcgaagugugcuggauuuc

SEQ ID NO: 2607184 - RNA, 19 nt, Artificial Sequence
  Description of Artificial Sequence: Synthetic oligonucleotide
ggcuucgucuguggacuca

SEQ ID NO: 2607185 - RNA, 19 nt, Artificial Sequence
  Description of Artificial Sequence: Synthetic oligonucleotide
gugggccacgcugcucuuc

SEQ ID NO: 2607186 - RNA, 19 nt, Artificial Sequence
  Description of Artificial Sequence: Synthetic oligonucleotide
ggacgacacugcagggcac

SEQ ID NO: 2607187 - RNA, 19 nt, Artificial Sequence
  Description of Artificial Sequence: Synthetic oligonucleotide
ccgugucucugcacugcuc

SEQ ID NO: 2607188 - RNA, 19 nt, Artificial Sequence
  Description of Artificial Sequence: Synthetic oligonucleotide
cuucagccauacccacacu

SEQ ID NO: 2607189 - RNA, 19 nt, Artificial Sequence
  Description of Artificial Sequence: Synthetic oligonucleotide
cugcuccccugcaggccca

SEQ ID NO: 2607190 - RNA, 19 nt, Artificial Sequence
  Description of Artificial Sequence: Synthetic oligonucleotide
ccucgauggcacgcuuggc

SEQ ID NO: 2607191 - RNA, 19 nt, Artificial Sequence
  Description of Artificial Sequence: Synthetic oligonucleotide
ggccaccgugucucugcac

SEQ ID NO: 2607192 - RNA, 19 nt, Artificial Sequence
  Description of Artificial Sequence: Synthetic oligonucleotide
caggcucagaagccaguuu

SEQ ID NO: 2607193 - RNA, 19 nt, Artificial Sequence
  Description of Artificial Sequence: Synthetic oligonucleotide
auggcacgcuuggcuucgu

SEQ ID NO: 2607194 - RNA, 19 nt, Artificial Sequence
  Description of Artificial Sequence: Synthetic oligonucleotide
gagggugcaggggccuccu

SEQ ID NO: 2607195 - RNA, 19 nt, Artificial Sequence
  Description of Artificial Sequence: Synthetic oligonucleotide
ccagcaugugacgugugcu

SEQ ID NO: 2607196 - RNA, 19 nt, Artificial Sequence
  Description of Artificial Sequence: Synthetic oligonucleotide
ugcuccccugcaggcccaa

SEQ ID NO: 2607197 - RNA, 19 nt, Artificial Sequence
  Description of Artificial Sequence: Synthetic oligonucleotide
gcucagaagccaguuuaau

SEQ ID NO: 2607198 - RNA, 19 nt, Artificial Sequence
  Description of Artificial Sequence: Synthetic oligonucleotide
gcauggcaggaaggccacc

SEQ ID NO: 2607199 - RNA, 19 nt, Artificial Sequence
  Description of Artificial Sequence: Synthetic oligonucleotide
ccuaagggcagccgcuggu

SEQ ID NO: 2607200 - RNA, 19 nt, Artificial Sequence
  Description of Artificial Sequence: Synthetic oligonucleotide
ccagcucagcaugaggagu

SEQ ID NO: 2607201 - RNA, 19 nt, Artificial Sequence
  Description of Artificial Sequence: Synthetic oligonucleotide
ccgucgguacacagaucga

SEQ ID NO: 2607202 - RNA, 19 nt, Artificial Sequence
  Description of Artificial Sequence: Synthetic oligonucleotide
cugcaggcccaaggcaugu

SEQ ID NO: 2607203 - RNA, 19 nt, Artificial Sequence
  Description of Artificial Sequence: Synthetic oligonucleotide
ggaaggccaccgugucucu

SEQ ID NO: 2607204 - RNA, 19 nt, Artificial Sequence
  Description of Artificial Sequence: Synthetic oligonucleotide
ccggacuuguaaagagggu

SEQ ID NO: 2607205 - RNA, 19 nt, Artificial Sequence
  Description of Artificial Sequence: Synthetic oligonucleotide
caggcgaagugugcuggau

SEQ ID NO: 2607206 - RNA, 19 nt, Artificial Sequence
  Description of Artificial Sequence: Synthetic oligonucleotide
ccucagugcuacggccaug

SEQ ID NO: 2607207 - RNA, 19 nt, Artificial Sequence
  Description of Artificial Sequence: Synthetic oligonucleotide
caccuccuggacugagcuu

SEQ ID NO: 2607208 - RNA, 19 nt, Artificial Sequence
  Description of Artificial Sequence: Synthetic oligonucleotide
ggcccaaggcauguuccau

SEQ ID NO: 2607209 - RNA, 19 nt, Artificial Sequence
  Description of Artificial Sequence: Synthetic oligonucleotide
acgcugcucuucagccaua

SEQ ID NO: 2607210 - RNA, 19 nt, Artificial Sequence
  Description of Artificial Sequence: Synthetic oligonucleotide
gcuccccugcaggcccaag

SEQ ID NO: 2607211 - RNA, 19 nt, Artificial Sequence
  Description of Artificial Sequence: Synthetic oligonucleotide
cuacggccaugcugugcuu

SEQ ID NO: 2607212 - RNA, 19 nt, Artificial Sequence
  Description of Artificial Sequence: Synthetic oligonucleotide
ccuccuggacugagcuucu

SEQ ID NO: 2607213 - RNA, 19 nt, Artificial Sequence
  Description of Artificial Sequence: Synthetic oligonucleotide
gggcagccgcuggucacaa

SEQ ID NO: 2607214 - RNA, 19 nt, Artificial Sequence
  Description of Artificial Sequence: Synthetic oligonucleotide
cagccucgauggcacgcuu

SEQ ID NO: 2607215 - RNA, 19 nt, Artificial Sequence
  Description of Artificial Sequence: Synthetic oligonucleotide
cccagguggggacgacacu

SEQ ID NO: 2607216 - RNA, 19 nt, Artificial Sequence
  Description of Artificial Sequence: Synthetic oligonucleotide
ccaaggcauguuccauguu

SEQ ID NO: 2607217 - RNA, 19 nt, Artificial Sequence
  Description of Artificial Sequence: Synthetic oligonucleotide
cgugugcuaugucgacagu

SEQ ID NO: 2607218 - RNA, 19 nt, Artificial Sequence
  Description of Artificial Sequence: Synthetic oligonucleotide
ggcgguccugacagagcuu

SEQ ID NO: 2607219 - RNA, 19 nt, Artificial Sequence
  Description of Artificial Sequence: Synthetic oligonucleotide
cgacacugcagggcacucu

SEQ ID NO: 2607220 - RNA, 19 nt, Artificial Sequence
  Description of Artificial Sequence: Synthetic oligonucleotide
uguuguagaaaucaaauag

SEQ ID NO: 2607221 - RNA, 19 nt, Artificial Sequence
  Description of Artificial Sequence: Synthetic oligonucleotide
aauaaacgauauuauuucc

SEQ ID NO: 2607222 - RNA, 19 nt, Artificial Sequence
  Description of Artificial Sequence: Synthetic oligonucleotide
guagaaaucaaauagcucc

SEQ ID NO: 2607223 - RNA, 19 nt, Artificial Sequence
  Description of Artificial Sequence: Synthetic oligonucleotide
aagaauucggauaagaagg

SEQ ID NO: 2607224 - RNA, 19 nt, Artificial Sequence
  Description of Artificial Sequence: Synthetic oligonucleotide
augaauauucuccaguugc

SEQ ID NO: 2607225 - RNA, 19 nt, Artificial Sequence
  Description of Artificial Sequence: Synthetic oligonucleotide
uguuucuugacccauagcc

SEQ ID NO: 2607226 - RNA, 19 nt, Artificial Sequence
  Description of Artificial Sequence: Synthetic oligonucleotide
ucuauugcauuuaucagcg

SEQ ID NO: 2607227 - RNA, 19 nt, Artificial Sequence
  Description of Artificial Sequence: Synthetic oligonucleotide
aucuauugcauuuaucagc

SEQ ID NO: 2607228 - RNA, 19 nt, Artificial Sequence
  Description of Artificial Sequence: Synthetic oligonucleotide
cucuaagaaauauacacgg

SEQ ID NO: 2607229 - RNA, 19 nt, Artificial Sequence
  Description of Artificial Sequence: Synthetic oligonucleotide
gaagaauucggauaagaag

SEQ ID NO: 2607230 - RNA, 19 nt, Artificial Sequence
  Description of Artificial Sequence: Synthetic oligonucleotide
aggaaugugauggagaagc

SEQ ID NO: 2607231 - RNA, 19 nt, Artificial Sequence
  Description of Artificial Sequence: Synthetic oligonucleotide
aaaaugaauauucuccagu

SEQ ID NO: 2607232 - RNA, 19 nt, Artificial Sequence
  Description of Artificial Sequence: Synthetic oligonucleotide
uucaagagcaucaugugag

SEQ ID NO: 2607233 - RNA, 19 nt, Artificial Sequence
  Description of Artificial Sequence: Synthetic oligonucleotide
aacgauauuauuuccagaa

SEQ ID NO: 2607234 - RNA, 19 nt, Artificial Sequence
  Description of Artificial Sequence: Synthetic oligonucleotide
uccucuaagaaauauacac

SEQ ID NO: 2607235 - RNA, 19 nt, Artificial Sequence
  Description of Artificial Sequence: Synthetic oligonucleotide
uuugucuugcguaaaauga

SEQ ID NO: 2607236 - RNA, 19 nt, Artificial Sequence
  Description of Artificial Sequence: Synthetic oligonucleotide
aauauacacgggcaguuuc

SEQ ID NO: 2607237 - RNA, 19 nt, Artificial Sequence
  Description of Artificial Sequence: Synthetic oligonucleotide
cuaagaaauauacacgggc

SEQ ID NO: 2607238 - RNA, 19 nt, Artificial Sequence
  Description of Artificial Sequence: Synthetic oligonucleotide
uuuugaagaauucggauaa

SEQ ID NO: 2607239 - RNA, 19 nt, Artificial Sequence
  Description of Artificial Sequence: Synthetic oligonucleotide
gaauaaacgauauuauuuc

SEQ ID NO: 2607240 - RNA, 19 nt, Artificial Sequence
  Description of Artificial Sequence: Synthetic oligonucleotide
aagaaauauacacgggcag

SEQ ID NO: 2607241 - RNA, 19 nt, Artificial Sequence
  Description of Artificial Sequence: Synthetic oligonucleotide
guaucuauugcauuuauca

SEQ ID NO: 2607242 - RNA, 19 nt, Artificial Sequence
  Description of Artificial Sequence: Synthetic oligonucleotide
uaaacgauauuauuuccag

SEQ ID NO: 2607243 - RNA, 19 nt, Artificial Sequence
  Description of Artificial Sequence: Synthetic oligonucleotide
uaagaaauauacacgggca

SEQ ID NO: 2607244 - RNA, 19 nt, Artificial Sequence
  Description of Artificial Sequence: Synthetic oligonucleotide
uauugcauuuaucagcggc

SEQ ID NO: 2607245 - RNA, 19 nt, Artificial Sequence
  Description of Artificial Sequence: Synthetic oligonucleotide
aaucaaauagcuccuugug

SEQ ID NO: 2607246 - RNA, 19 nt, Artificial Sequence
  Description of Artificial Sequence: Synthetic oligonucleotide
aaaucaaauagcuccuugu

SEQ ID NO: 2607247 - RNA, 19 nt, Artificial Sequence
  Description of Artificial Sequence: Synthetic oligonucleotide
agccgaaugagccauuugc

SEQ ID NO: 2607248 - RNA, 19 nt, Artificial Sequence
  Description of Artificial Sequence: Synthetic oligonucleotide
ucuaagaaauauacacggg

SEQ ID NO: 2607249 - RNA, 19 nt, Artificial Sequence
  Description of Artificial Sequence: Synthetic oligonucleotide
ugugauugaauuccacuag

SEQ ID NO: 2607250 - RNA, 19 nt, Artificial Sequence
  Description of Artificial Sequence: Synthetic oligonucleotide
uacauugugguacacugcc

SEQ ID NO: 2607251 - RNA, 19 nt, Artificial Sequence
  Description of Artificial Sequence: Synthetic oligonucleotide
ugucucgagcuuaugaggg

SEQ ID NO: 2607252 - RNA, 19 nt, Artificial Sequence
  Description of Artificial Sequence: Synthetic oligonucleotide
uugcguaaaaugaauauuc

SEQ ID NO: 2607253 - RNA, 19 nt, Artificial Sequence
  Description of Artificial Sequence: Synthetic oligonucleotide
cuuaugagggcccagaauc

SEQ ID NO: 2607254 - RNA, 19 nt, Artificial Sequence
  Description of Artificial Sequence: Synthetic oligonucleotide
aaugaggugaagcucuugu

SEQ ID NO: 2607255 - RNA, 19 nt, Artificial Sequence
  Description of Artificial Sequence: Synthetic oligonucleotide
aaugaauauucuccaguug

SEQ ID NO: 2607256 - RNA, 19 nt, Artificial Sequence
  Description of Artificial Sequence: Synthetic oligonucleotide
aaaugaauauucuccaguu

SEQ ID NO: 2607257 - RNA, 19 nt, Artificial Sequence
  Description of Artificial Sequence: Synthetic oligonucleotide
uccagaauaaacgauauua

SEQ ID NO: 2607258 - RNA, 19 nt, Artificial Sequence
  Description of Artificial Sequence: Synthetic oligonucleotide
uccacuagaaccuucucca

SEQ ID NO: 2607259 - RNA, 19 nt, Artificial Sequence
  Description of Artificial Sequence: Synthetic oligonucleotide
uaucuauugcauuuaucag

SEQ ID NO: 2607260 - RNA, 19 nt, Artificial Sequence
  Description of Artificial Sequence: Synthetic oligonucleotide
cucuuguuucucuagagag

SEQ ID NO: 2607261 - RNA, 19 nt, Artificial Sequence
  Description of Artificial Sequence: Synthetic oligonucleotide
ucaaauagcuccuugugau

SEQ ID NO: 2607262 - RNA, 19 nt, Artificial Sequence
  Description of Artificial Sequence: Synthetic oligonucleotide
ugaagaauucggauaagaa

SEQ ID NO: 2607263 - RNA, 19 nt, Artificial Sequence
  Description of Artificial Sequence: Synthetic oligonucleotide
guaaaaugaauauucucca

SEQ ID NO: 2607264 - RNA, 19 nt, Artificial Sequence
  Description of Artificial Sequence: Synthetic oligonucleotide
auaagaaggcgugggaacc

SEQ ID NO: 2607265 - RNA, 19 nt, Artificial Sequence
  Description of Artificial Sequence: Synthetic oligonucleotide
uccggcaagaucagcaccg

SEQ ID NO: 2607266 - RNA, 19 nt, Artificial Sequence
  Description of Artificial Sequence: Synthetic oligonucleotide
gauugaauuccacuagaac

SEQ ID NO: 2607267 - RNA, 19 nt, Artificial Sequence
  Description of Artificial Sequence: Synthetic oligonucleotide
ugcuugagccgaaugagcc

SEQ ID NO: 2607268 - RNA, 19 nt, Artificial Sequence
  Description of Artificial Sequence: Synthetic oligonucleotide
gaaaucaaauagcuccuug

SEQ ID NO: 2607269 - RNA, 19 nt, Artificial Sequence
  Description of Artificial Sequence: Synthetic oligonucleotide
acugucucgagcuuaugag

SEQ ID NO: 2607270 - RNA, 19 nt, Artificial Sequence
  Description of Artificial Sequence: Synthetic oligonucleotide
agaauaaacgauauuauuu

SEQ ID NO: 2607271 - RNA, 19 nt, Artificial Sequence
  Description of Artificial Sequence: Synthetic oligonucleotide
aagaucagcaccgcagacg

SEQ ID NO: 2607272 - RNA, 19 nt, Artificial Sequence
  Description of Artificial Sequence: Synthetic oligonucleotide
uuucuugacccauagccga

SEQ ID NO: 2607273 - RNA, 19 nt, Artificial Sequence
  Description of Artificial Sequence: Synthetic oligonucleotide
gauaagaaggcgugggaac

SEQ ID NO: 2607274 - RNA, 19 nt, Artificial Sequence
  Description of Artificial Sequence: Synthetic oligonucleotide
uguagaaaucaaauagcuc

SEQ ID NO: 2607275 - RNA, 19 nt, Artificial Sequence
  Description of Artificial Sequence: Synthetic oligonucleotide
gagcuuuugaagaauucgg

SEQ ID NO: 2607276 - RNA, 19 nt, Artificial Sequence
  Description of Artificial Sequence: Synthetic oligonucleotide
uuugcuugagccgaaugag

SEQ ID NO: 2607277 - RNA, 19 nt, Artificial Sequence
  Description of Artificial Sequence: Synthetic oligonucleotide
uagaaaucaaauagcuccu

SEQ ID NO: 2607278 - RNA, 19 nt, Artificial Sequence
  Description of Artificial Sequence: Synthetic oligonucleotide
auugugguacacugccugc

SEQ ID NO: 2607279 - RNA, 19 nt, Artificial Sequence
  Description of Artificial Sequence: Synthetic oligonucleotide
cuuugucuugcguaaaaug

SEQ ID NO: 2607280 - RNA, 19 nt, Artificial Sequence
  Description of Artificial Sequence: Synthetic oligonucleotide
ugaauauucuccaguugcu

SEQ ID NO: 2607281 - RNA, 19 nt, Artificial Sequence
  Description of Artificial Sequence: Synthetic oligonucleotide
gacgccgccauccucaaag

SEQ ID NO: 2607282 - RNA, 19 nt, Artificial Sequence
  Description of Artificial Sequence: Synthetic oligonucleotide
aauucggauaagaaggcgu

SEQ ID NO: 2607283 - RNA, 19 nt, Artificial Sequence
  Description of Artificial Sequence: Synthetic oligonucleotide
cauuugcagguuaagcugc

SEQ ID NO: 2607284 - RNA, 19 nt, Artificial Sequence
  Description of Artificial Sequence: Synthetic oligonucleotide
agaauucggauaagaaggc

SEQ ID NO: 2607285 - RNA, 19 nt, Artificial Sequence
  Description of Artificial Sequence: Synthetic oligonucleotide
cuagagagaaugcagccug

SEQ ID NO: 2607286 - RNA, 19 nt, Artificial Sequence
  Description of Artificial Sequence: Synthetic oligonucleotide
aaacgauauuauuuccaga

SEQ ID NO: 2607287 - RNA, 19 nt, Artificial Sequence
  Description of Artificial Sequence: Synthetic oligonucleotide
ucuugcguaaaaugaauau

SEQ ID NO: 2607288 - RNA, 19 nt, Artificial Sequence
  Description of Artificial Sequence: Synthetic oligonucleotide
uugugauugaauuccacua

SEQ ID NO: 2607289 - RNA, 19 nt, Artificial Sequence
  Description of Artificial Sequence: Synthetic oligonucleotide
ucaagagcaucaugugagg

SEQ ID NO: 2607290 - RNA, 19 nt, Artificial Sequence
  Description of Artificial Sequence: Synthetic oligonucleotide
ugcguaaaaugaauauucu

SEQ ID NO: 2607291 - RNA, 19 nt, Artificial Sequence
  Description of Artificial Sequence: Synthetic oligonucleotide
uuaugagggcccagaaucc

SEQ ID NO: 2607292 - RNA, 19 nt, Artificial Sequence
  Description of Artificial Sequence: Synthetic oligonucleotide
ugacccauagccgaccagg

SEQ ID NO: 2607293 - RNA, 19 nt, Artificial Sequence
  Description of Artificial Sequence: Synthetic oligonucleotide
auauuauuuccagaaugag

SEQ ID NO: 2607294 - RNA, 19 nt, Artificial Sequence
  Description of Artificial Sequence: Synthetic oligonucleotide
uuaagcugccaucccacug

SEQ ID NO: 2607295 - RNA, 19 nt, Artificial Sequence
  Description of Artificial Sequence: Synthetic oligonucleotide
ugauugaauuccacuagaa

SEQ ID NO: 2607296 - RNA, 19 nt, Artificial Sequence
  Description of Artificial Sequence: Synthetic oligonucleotide
guuucuugacccauagccg

SEQ ID NO: 2607297 - RNA, 19 nt, Artificial Sequence
  Description of Artificial Sequence: Synthetic oligonucleotide
uuacauugugguacacugc

SEQ ID NO: 2607298 - RNA, 19 nt, Artificial Sequence
  Description of Artificial Sequence: Synthetic oligonucleotide
ugcaaaagagugagguggc

SEQ ID NO: 2607299 - RNA, 19 nt, Artificial Sequence
  Description of Artificial Sequence: Synthetic oligonucleotide
uuggcucacucccaguugc

SEQ ID NO: 2607300 - RNA, 19 nt, Artificial Sequence
  Description of Artificial Sequence: Synthetic oligonucleotide
ucggauaagaaggcguggg

SEQ ID NO: 2607301 - RNA, 19 nt, Artificial Sequence
  Description of Artificial Sequence: Synthetic oligonucleotide
uugucuugcguaaaaugaa

SEQ ID NO: 2607302 - RNA, 19 nt, Artificial Sequence
  Description of Artificial Sequence: Synthetic oligonucleotide
uugaagaauucggauaaga

SEQ ID NO: 2607303 - RNA, 19 nt, Artificial Sequence
  Description of Artificial Sequence: Synthetic oligonucleotide
uuaucagcggcacugcuuu

SEQ ID NO: 2607304 - RNA, 19 nt, Artificial Sequence
  Description of Artificial Sequence: Synthetic oligonucleotide
gaauucggauaagaaggcg

SEQ ID NO: 2607305 - RNA, 19 nt, Artificial Sequence
  Description of Artificial Sequence: Synthetic oligonucleotide
ugcuccagaauaaacgaua

SEQ ID NO: 2607306 - RNA, 19 nt, Artificial Sequence
  Description of Artificial Sequence: Synthetic oligonucleotide
auaaacgauauuauuucca

SEQ ID NO: 2607307 - RNA, 19 nt, Artificial Sequence
  Description of Artificial Sequence: Synthetic oligonucleotide
uuguuguagaaaucaaaua

SEQ ID NO: 2607308 - RNA, 19 nt, Artificial Sequence
  Description of Artificial Sequence: Synthetic oligonucleotide
ugcggcuggcuuuacauug

SEQ ID NO: 2607309 - RNA, 19 nt, Artificial Sequence
  Description of Artificial Sequence: Synthetic oligonucleotide
cugucucgagcuuaugagg

SEQ ID NO: 2607310 - RNA, 19 nt, Artificial Sequence
  Description of Artificial Sequence: Synthetic oligonucleotide
gucuucuuggcucacuccc

SEQ ID NO: 2607311 - RNA, 19 nt, Artificial Sequence
  Description of Artificial Sequence: Synthetic oligonucleotide
aaggcgugggaaccguccg

SEQ ID NO: 2607312 - RNA, 19 nt, Artificial Sequence
  Description of Artificial Sequence: Synthetic oligonucleotide
ucugcuuugucuugcguaa

SEQ ID NO: 2607313 - RNA, 19 nt, Artificial Sequence
  Description of Artificial Sequence: Synthetic oligonucleotide
aucagcaccgcagacgccg

SEQ ID NO: 2607314 - RNA, 19 nt, Artificial Sequence
  Description of Artificial Sequence: Synthetic oligonucleotide
aauagcuccuugugauuga

SEQ ID NO: 2607315 - RNA, 19 nt, Artificial Sequence
  Description of Artificial Sequence: Synthetic oligonucleotide
ccucuaagaaauauacacg

SEQ ID NO: 2607316 - RNA, 19 nt, Artificial Sequence
  Description of Artificial Sequence: Synthetic oligonucleotide
ugucuugcguaaaaugaau

SEQ ID NO: 2607317 - RNA, 19 nt, Artificial Sequence
  Description of Artificial Sequence: Synthetic oligonucleotide
cuuuugaagaauucggaua

SEQ ID NO: 2607318 - RNA, 19 nt, Artificial Sequence
  Description of Artificial Sequence: Synthetic oligonucleotide
uguauggucuccagcuugu

SEQ ID NO: 2607319 - RNA, 19 nt, Artificial Sequence
  Description of Artificial Sequence: Synthetic oligonucleotide
uucucaacuguuucuugac

SEQ ID NO: 2607320 - RNA, 19 nt, Artificial Sequence
  Description of Artificial Sequence: Synthetic oligonucleotide
ucagugcaaaagagugagg

SEQ ID NO: 2607321 - RNA, 19 nt, Artificial Sequence
  Description of Artificial Sequence: Synthetic oligonucleotide
cacuagaaccuucuccagg

SEQ ID NO: 2607322 - RNA, 19 nt, Artificial Sequence
  Description of Artificial Sequence: Synthetic oligonucleotide
agcucuuguuucucuagag

SEQ ID NO: 2607323 - RNA, 19 nt, Artificial Sequence
  Description of Artificial Sequence: Synthetic oligonucleotide
aagcucuuguuucucuaga

SEQ ID NO: 2607324 - RNA, 19 nt, Artificial Sequence
  Description of Artificial Sequence: Synthetic oligonucleotide
uucagguggagcuuuugaa

SEQ ID NO: 2607325 - RNA, 19 nt, Artificial Sequence
  Description of Artificial Sequence: Synthetic oligonucleotide
uucaugcuggggcucuccg

SEQ ID NO: 2607326 - RNA, 19 nt, Artificial Sequence
  Description of Artificial Sequence: Synthetic oligonucleotide
ucuuggagucuucuuggcu

SEQ ID NO: 2607327 - RNA, 19 nt, Artificial Sequence
  Description of Artificial Sequence: Synthetic oligonucleotide
aaccguccgguaucuauug

SEQ ID NO: 2607328 - RNA, 19 nt, Artificial Sequence
  Description of Artificial Sequence: Synthetic oligonucleotide
agaaauauacacgggcagu

SEQ ID NO: 2607329 - RNA, 19 nt, Artificial Sequence
  Description of Artificial Sequence: Synthetic oligonucleotide
gaagccggccuucaagagc

SEQ ID NO: 2607330 - RNA, 19 nt, Artificial Sequence
  Description of Artificial Sequence: Synthetic oligonucleotide
uugcuugagccgaaugagc

SEQ ID NO: 2607331 - RNA, 19 nt, Artificial Sequence
  Description of Artificial Sequence: Synthetic oligonucleotide
uaagaaggcgugggaaccg

SEQ ID NO: 2607332 - RNA, 19 nt, Artificial Sequence
  Description of Artificial Sequence: Synthetic oligonucleotide
aauccagcugugcuuguau

SEQ ID NO: 2607333 - RNA, 19 nt, Artificial Sequence
  Description of Artificial Sequence: Synthetic oligonucleotide
agcaucaugugagggaauc

SEQ ID NO: 2607334 - RNA, 19 nt, Artificial Sequence
  Description of Artificial Sequence: Synthetic oligonucleotide
ucggccuucagguggagcu

SEQ ID NO: 2607335 - RNA, 19 nt, Artificial Sequence
  Description of Artificial Sequence: Synthetic oligonucleotide
ucuagagagaaugcagccu

SEQ ID NO: 2607336 - RNA, 19 nt, Artificial Sequence
  Description of Artificial Sequence: Synthetic oligonucleotide
uccgguaucuauugcauuu

SEQ ID NO: 2607337 - RNA, 19 nt, Artificial Sequence
  Description of Artificial Sequence: Synthetic oligonucleotide
uuuaucagcggcacugcuu

SEQ ID NO: 2607338 - RNA, 19 nt, Artificial Sequence
  Description of Artificial Sequence: Synthetic oligonucleotide
gaaugagccauuugcaggu

SEQ ID NO: 2607339 - RNA, 19 nt, Artificial Sequence
  Description of Artificial Sequence: Synthetic oligonucleotide
cuuugcuugagccgaauga

SEQ ID NO: 2607340 - RNA, 19 nt, Artificial Sequence
  Description of Artificial Sequence: Synthetic oligonucleotide
ugcagcacggccugaggag

SEQ ID NO: 2607341 - RNA, 19 nt, Artificial Sequence
  Description of Artificial Sequence: Synthetic oligonucleotide
caaaagagugagguggcag

SEQ ID NO: 2607342 - RNA, 19 nt, Artificial Sequence
  Description of Artificial Sequence: Synthetic oligonucleotide
cuuguuguagaaaucaaau

SEQ ID NO: 2607343 - RNA, 19 nt, Artificial Sequence
  Description of Artificial Sequence: Synthetic oligonucleotide
ugagccauuugcagguuaa

SEQ ID NO: 2607344 - RNA, 19 nt, Artificial Sequence
  Description of Artificial Sequence: Synthetic oligonucleotide
uucugcuuugucuugcgua

SEQ ID NO: 2607345 - RNA, 19 nt, Artificial Sequence
  Description of Artificial Sequence: Synthetic oligonucleotide
auugcauuuaucagcggca

SEQ ID NO: 2607346 - RNA, 19 nt, Artificial Sequence
  Description of Artificial Sequence: Synthetic oligonucleotide
accgcagacgccgccaucc

SEQ ID NO: 2607347 - RNA, 19 nt, Artificial Sequence
  Description of Artificial Sequence: Synthetic oligonucleotide
gagaagccggccuucaaga

SEQ ID NO: 2607348 - RNA, 19 nt, Artificial Sequence
  Description of Artificial Sequence: Synthetic oligonucleotide
ugccugaacuucucaacug

SEQ ID NO: 2607349 - RNA, 19 nt, Artificial Sequence
  Description of Artificial Sequence: Synthetic oligonucleotide
uucggauaagaaggcgugg

SEQ ID NO: 2607350 - RNA, 19 nt, Artificial Sequence
  Description of Artificial Sequence: Synthetic oligonucleotide
uuugaagaauucggauaag

SEQ ID NO: 2607351 - RNA, 19 nt, Artificial Sequence
  Description of Artificial Sequence: Synthetic oligonucleotide
ucuucuuggcucacuccca

SEQ ID NO: 2607352 - RNA, 19 nt, Artificial Sequence
  Description of Artificial Sequence: Synthetic oligonucleotide
caagagcaucaugugaggg

SEQ ID NO: 2607353 - RNA, 19 nt, Artificial Sequence
  Description of Artificial Sequence: Synthetic oligonucleotide
ucucgagcuuaugagggcc

SEQ ID NO: 2607354 - RNA, 19 nt, Artificial Sequence
  Description of Artificial Sequence: Synthetic oligonucleotide
agcggcacugcuuucuuca

SEQ ID NO: 2607355 - RNA, 19 nt, Artificial Sequence
  Description of Artificial Sequence: Synthetic oligonucleotide
cugcagcuuugcuugagcc

SEQ ID NO: 2607356 - RNA, 19 nt, Artificial Sequence
  Description of Artificial Sequence: Synthetic oligonucleotide
ggcaguuucucuucagugc

SEQ ID NO: 2607357 - RNA, 19 nt, Artificial Sequence
  Description of Artificial Sequence: Synthetic oligonucleotide
accaggcguuggcaaaugc

SEQ ID NO: 2607358 - RNA, 19 nt, Artificial Sequence
  Description of Artificial Sequence: Synthetic oligonucleotide
gugauugaauuccacuaga

SEQ ID NO: 2607359 - RNA, 19 nt, Artificial Sequence
  Description of Artificial Sequence: Synthetic oligonucleotide
guuucucuagagagaaugc

SEQ ID NO: 2607360 - RNA, 19 nt, Artificial Sequence
  Description of Artificial Sequence: Synthetic oligonucleotide
auuccacuagaaccuucuc

SEQ ID NO: 2607361 - RNA, 19 nt, Artificial Sequence
  Description of Artificial Sequence: Synthetic oligonucleotide
cuucaagagcaucauguga

SEQ ID NO: 2607362 - RNA, 19 nt, Artificial Sequence
  Description of Artificial Sequence: Synthetic oligonucleotide
ucccaguugcagcacggcc

SEQ ID NO: 2607363 - RNA, 19 nt, Artificial Sequence
  Description of Artificial Sequence: Synthetic oligonucleotide
agguuaagcugccauccca

SEQ ID NO: 2607364 - RNA, 19 nt, Artificial Sequence
  Description of Artificial Sequence: Synthetic oligonucleotide
cuucucaacuguuucuuga

SEQ ID NO: 2607365 - RNA, 19 nt, Artificial Sequence
  Description of Artificial Sequence: Synthetic oligonucleotide
uggagcuuuugaagaauuc

SEQ ID NO: 2607366 - RNA, 19 nt, Artificial Sequence
  Description of Artificial Sequence: Synthetic oligonucleotide
auuugcagguuaagcugcc

SEQ ID NO: 2607367 - RNA, 19 nt, Artificial Sequence
  Description of Artificial Sequence: Synthetic oligonucleotide
cgauauuauuuccagaaug

SEQ ID NO: 2607368 - RNA, 19 nt, Artificial Sequence
  Description of Artificial Sequence: Synthetic oligonucleotide
auucggauaagaaggcgug

SEQ ID NO: 2607369 - RNA, 19 nt, Artificial Sequence
  Description of Artificial Sequence: Synthetic oligonucleotide
auuuaucagcggcacugcu

SEQ ID NO: 2607370 - RNA, 19 nt, Artificial Sequence
  Description of Artificial Sequence: Synthetic oligonucleotide
ugaggagacugcagcuuug

SEQ ID NO: 2607371 - RNA, 19 nt, Artificial Sequence
  Description of Artificial Sequence: Synthetic oligonucleotide
acgauauuauuuccagaau

SEQ ID NO: 2607372 - RNA, 19 nt, Artificial Sequence
  Description of Artificial Sequence: Synthetic oligonucleotide
ugcuuugucuugcguaaaa

SEQ ID NO: 2607373 - RNA, 19 nt, Artificial Sequence
  Description of Artificial Sequence: Synthetic oligonucleotide
agaagccggccuucaagag

SEQ ID NO: 2607374 - RNA, 19 nt, Artificial Sequence
  Description of Artificial Sequence: Synthetic oligonucleotide
gcauuuaucagcggcacug

SEQ ID NO: 2607375 - RNA, 19 nt, Artificial Sequence
  Description of Artificial Sequence: Synthetic oligonucleotide
ugcagguuaagcugccauc

SEQ ID NO: 2607376 - RNA, 19 nt, Artificial Sequence
  Description of Artificial Sequence: Synthetic oligonucleotide
uugcagguuaagcugccau

SEQ ID NO: 2607377 - RNA, 19 nt, Artificial Sequence
  Description of Artificial Sequence: Synthetic oligonucleotide
agagugagguggcaggaau

SEQ ID NO: 2607378 - RNA, 19 nt, Artificial Sequence
  Description of Artificial Sequence: Synthetic oligonucleotide
agagcaucaugugagggaa

SEQ ID NO: 2607379 - RNA, 19 nt, Artificial Sequence
  Description of Artificial Sequence: Synthetic oligonucleotide
aaauauacacgggcaguuu

SEQ ID NO: 2607380 - RNA, 19 nt, Artificial Sequence
  Description of Artificial Sequence: Synthetic oligonucleotide
uagagagaaugcagccuga

SEQ ID NO: 2607381 - RNA, 19 nt, Artificial Sequence
  Description of Artificial Sequence: Synthetic oligonucleotide
ucuccagguucuuggaguc

SEQ ID NO: 2607382 - RNA, 19 nt, Artificial Sequence
  Description of Artificial Sequence: Synthetic oligonucleotide
uacacgggcaguuucucuu

SEQ ID NO: 2607383 - RNA, 19 nt, Artificial Sequence
  Description of Artificial Sequence: Synthetic oligonucleotide
accguccgguaucuauugc

SEQ ID NO: 2607384 - RNA, 19 nt, Artificial Sequence
  Description of Artificial Sequence: Synthetic oligonucleotide
ugcauuuaucagcggcacu

SEQ ID NO: 2607385 - RNA, 19 nt, Artificial Sequence
  Description of Artificial Sequence: Synthetic oligonucleotide
uucuugacccauagccgac

SEQ ID NO: 2607386 - RNA, 19 nt, Artificial Sequence
  Description of Artificial Sequence: Synthetic oligonucleotide
agcuuuugaagaauucgga

SEQ ID NO: 2607387 - RNA, 19 nt, Artificial Sequence
  Description of Artificial Sequence: Synthetic oligonucleotide
ugaagcucuuguuucucua

SEQ ID NO: 2607388 - RNA, 19 nt, Artificial Sequence
  Description of Artificial Sequence: Synthetic oligonucleotide
cagguggagcuuuugaaga

SEQ ID NO: 2607389 - RNA, 19 nt, Artificial Sequence
  Description of Artificial Sequence: Synthetic oligonucleotide
gaaggcgugggaaccgucc

SEQ ID NO: 2607390 - RNA, 19 nt, Artificial Sequence
  Description of Artificial Sequence: Synthetic oligonucleotide
cuugugauugaauuccacu

SEQ ID NO: 2607391 - RNA, 19 nt, Artificial Sequence
  Description of Artificial Sequence: Synthetic oligonucleotide
agugagguggcaggaaugu

SEQ ID NO: 2607392 - RNA, 19 nt, Artificial Sequence
  Description of Artificial Sequence: Synthetic oligonucleotide
gccugcuccagaauaaacg

SEQ ID NO: 2607393 - RNA, 19 nt, Artificial Sequence
  Description of Artificial Sequence: Synthetic oligonucleotide
ugugguacacugccugcuc

SEQ ID NO: 2607394 - RNA, 19 nt, Artificial Sequence
  Description of Artificial Sequence: Synthetic oligonucleotide
uugcauuuaucagcggcac

SEQ ID NO: 2607395 - RNA, 19 nt, Artificial Sequence
  Description of Artificial Sequence: Synthetic oligonucleotide
augugauggagaagccggc

SEQ ID NO: 2607396 - RNA, 19 nt, Artificial Sequence
  Description of Artificial Sequence: Synthetic oligonucleotide
cuauugcauuuaucagcgg

SEQ ID NO: 2607397 - RNA, 19 nt, Artificial Sequence
  Description of Artificial Sequence: Synthetic oligonucleotide
cgaaugagccauuugcagg

SEQ ID NO: 2607398 - RNA, 19 nt, Artificial Sequence
  Description of Artificial Sequence: Synthetic oligonucleotide
ggcaagaucagcaccgcag

SEQ ID NO: 2607399 - RNA, 19 nt, Artificial Sequence
  Description of Artificial Sequence: Synthetic oligonucleotide
ggagaagccggccuucaag

SEQ ID NO: 2607400 - RNA, 19 nt, Artificial Sequence
  Description of Artificial Sequence: Synthetic oligonucleotide
cauuuaucagcggcacugc

SEQ ID NO: 2607401 - RNA, 19 nt, Artificial Sequence
  Description of Artificial Sequence: Synthetic oligonucleotide
cagaaugaggugaagcucu

SEQ ID NO: 2607402 - RNA, 19 nt, Artificial Sequence
  Description of Artificial Sequence: Synthetic oligonucleotide
cuucagugcaaaagaguga

SEQ ID NO: 2607403 - RNA, 19 nt, Artificial Sequence
  Description of Artificial Sequence: Synthetic oligonucleotide
aggugaagcucuuguuucu

SEQ ID NO: 2607404 - RNA, 19 nt, Artificial Sequence
  Description of Artificial Sequence: Synthetic oligonucleotide
cucuccggcaagaucagca

SEQ ID NO: 2607405 - RNA, 19 nt, Artificial Sequence
  Description of Artificial Sequence: Synthetic oligonucleotide
aucaugugagggaauccag

SEQ ID NO: 2607406 - RNA, 19 nt, Artificial Sequence
  Description of Artificial Sequence: Synthetic oligonucleotide
ucuugacccauagccgacc

SEQ ID NO: 2607407 - RNA, 19 nt, Artificial Sequence
  Description of Artificial Sequence: Synthetic oligonucleotide
uugacccauagccgaccag

SEQ ID NO: 2607408 - RNA, 19 nt, Artificial Sequence
  Description of Artificial Sequence: Synthetic oligonucleotide
cucgagcuuaugagggccc

SEQ ID NO: 2607409 - RNA, 19 nt, Artificial Sequence
  Description of Artificial Sequence: Synthetic oligonucleotide
gugguacacugccugcucc

SEQ ID NO: 2607410 - RNA, 19 nt, Artificial Sequence
  Description of Artificial Sequence: Synthetic oligonucleotide
guugcagcacggccugagg

SEQ ID NO: 2607411 - RNA, 19 nt, Artificial Sequence
  Description of Artificial Sequence: Synthetic oligonucleotide
gcguaaaaugaauauucuc

SEQ ID NO: 2607412 - RNA, 19 nt, Artificial Sequence
  Description of Artificial Sequence: Synthetic oligonucleotide
caagaucagcaccgcagac

SEQ ID NO: 2607413 - RNA, 19 nt, Artificial Sequence
  Description of Artificial Sequence: Synthetic oligonucleotide
cuucacugaagcugcucuc

SEQ ID NO: 2607414 - RNA, 19 nt, Artificial Sequence
  Description of Artificial Sequence: Synthetic oligonucleotide
cugccaucccacugucucg

SEQ ID NO: 2607415 - RNA, 19 nt, Artificial Sequence
  Description of Artificial Sequence: Synthetic oligonucleotide
ugagggaauccagcugugc

SEQ ID NO: 2607416 - RNA, 19 nt, Artificial Sequence
  Description of Artificial Sequence: Synthetic oligonucleotide
gcagguuaagcugccaucc

SEQ ID NO: 2607417 - RNA, 19 nt, Artificial Sequence
  Description of Artificial Sequence: Synthetic oligonucleotide
caucaugugagggaaucca

SEQ ID NO: 2607418 - RNA, 19 nt, Artificial Sequence
  Description of Artificial Sequence: Synthetic oligonucleotide
auacacgggcaguuucucu

SEQ ID NO: 2607419 - RNA, 19 nt, Artificial Sequence
  Description of Artificial Sequence: Synthetic oligonucleotide
gagaaugcagccugaaguu

SEQ ID NO: 2607420 - RNA, 19 nt, Artificial Sequence
  Description of Artificial Sequence: Synthetic oligonucleotide
cuuggcucacucccaguug

SEQ ID NO: 2607421 - RNA, 19 nt, Artificial Sequence
  Description of Artificial Sequence: Synthetic oligonucleotide
acgccgccauccucaaagc

SEQ ID NO: 2607422 - RNA, 19 nt, Artificial Sequence
  Description of Artificial Sequence: Synthetic oligonucleotide
gcaguuucucuucagugca

SEQ ID NO: 2607423 - RNA, 19 nt, Artificial Sequence
  Description of Artificial Sequence: Synthetic oligonucleotide
gaggagacugcagcuuugc

SEQ ID NO: 2607424 - RNA, 19 nt, Artificial Sequence
  Description of Artificial Sequence: Synthetic oligonucleotide
gagugagguggcaggaaug

SEQ ID NO: 2607425 - RNA, 19 nt, Artificial Sequence
  Description of Artificial Sequence: Synthetic oligonucleotide
cuguuucuugacccauagc

SEQ ID NO: 2607426 - RNA, 19 nt, Artificial Sequence
  Description of Artificial Sequence: Synthetic oligonucleotide
cagguuaagcugccauccc

SEQ ID NO: 2607427 - RNA, 19 nt, Artificial Sequence
  Description of Artificial Sequence: Synthetic oligonucleotide
cuccggcaagaucagcacc

SEQ ID NO: 2607428 - RNA, 19 nt, Artificial Sequence
  Description of Artificial Sequence: Synthetic oligonucleotide
ccgaaugagccauuugcag

SEQ ID NO: 2607429 - RNA, 19 nt, Artificial Sequence
  Description of Artificial Sequence: Synthetic oligonucleotide
uagccgaccaggcguuggc

SEQ ID NO: 2607430 - RNA, 19 nt, Artificial Sequence
  Description of Artificial Sequence: Synthetic oligonucleotide
aguugcagcacggccugag

SEQ ID NO: 2607431 - RNA, 19 nt, Artificial Sequence
  Description of Artificial Sequence: Synthetic oligonucleotide
gucucgagcuuaugagggc

SEQ ID NO: 2607432 - RNA, 19 nt, Artificial Sequence
  Description of Artificial Sequence: Synthetic oligonucleotide
agcugugcuuguauggucu

SEQ ID NO: 2607433 - RNA, 19 nt, Artificial Sequence
  Description of Artificial Sequence: Synthetic oligonucleotide
cacugucucgagcuuauga

SEQ ID NO: 2607434 - RNA, 19 nt, Artificial Sequence
  Description of Artificial Sequence: Synthetic oligonucleotide
gucuccagcuuguuguaga

SEQ ID NO: 2607435 - RNA, 19 nt, Artificial Sequence
  Description of Artificial Sequence: Synthetic oligonucleotide
aagaaggcgugggaaccgu

SEQ ID NO: 2607436 - RNA, 19 nt, Artificial Sequence
  Description of Artificial Sequence: Synthetic oligonucleotide
agguggagcuuuugaagaa

SEQ ID NO: 2607437 - RNA, 19 nt, Artificial Sequence
  Description of Artificial Sequence: Synthetic oligonucleotide
auagccgaccaggcguugg

SEQ ID NO: 2607438 - RNA, 19 nt, Artificial Sequence
  Description of Artificial Sequence: Synthetic oligonucleotide
cuucagguggagcuuuuga

SEQ ID NO: 2607439 - RNA, 19 nt, Artificial Sequence
  Description of Artificial Sequence: Synthetic oligonucleotide
gaaauauacacgggcaguu

SEQ ID NO: 2607440 - RNA, 19 nt, Artificial Sequence
  Description of Artificial Sequence: Synthetic oligonucleotide
augaggugaagcucuuguu

SEQ ID NO: 2607441 - RNA, 19 nt, Artificial Sequence
  Description of Artificial Sequence: Synthetic oligonucleotide
gaaugaggugaagcucuug

SEQ ID NO: 2607442 - RNA, 19 nt, Artificial Sequence
  Description of Artificial Sequence: Synthetic oligonucleotide
cacucccaguugcagcacg

SEQ ID NO: 2607443 - RNA, 19 nt, Artificial Sequence
  Description of Artificial Sequence: Synthetic oligonucleotide
ugaagcugcucucggccuu

SEQ ID NO: 2607444 - RNA, 19 nt, Artificial Sequence
  Description of Artificial Sequence: Synthetic oligonucleotide
uucuucaugcuggggcucu

SEQ ID NO: 2607445 - RNA, 19 nt, Artificial Sequence
  Description of Artificial Sequence: Synthetic oligonucleotide
uuugcagguuaagcugcca

SEQ ID NO: 2607446 - RNA, 19 nt, Artificial Sequence
  Description of Artificial Sequence: Synthetic oligonucleotide
agcuuaugagggcccagaa

SEQ ID NO: 2607447 - RNA, 19 nt, Artificial Sequence
  Description of Artificial Sequence: Synthetic oligonucleotide
gcaggaaugugauggagaa

SEQ ID NO: 2607448 - RNA, 19 nt, Artificial Sequence
  Description of Artificial Sequence: Synthetic oligonucleotide
aguuucucuucagugcaaa

SEQ ID NO: 2607449 - RNA, 19 nt, Artificial Sequence
  Description of Artificial Sequence: Synthetic oligonucleotide
ugccaucccacugucucga

SEQ ID NO: 2607450 - RNA, 19 nt, Artificial Sequence
  Description of Artificial Sequence: Synthetic oligonucleotide
aggcgugggaaccguccgg

SEQ ID NO: 2607451 - RNA, 19 nt, Artificial Sequence
  Description of Artificial Sequence: Synthetic oligonucleotide
gaauuccacuagaaccuuc

SEQ ID NO: 2607452 - RNA, 19 nt, Artificial Sequence
  Description of Artificial Sequence: Synthetic oligonucleotide
ggccugaggagacugcagc

SEQ ID NO: 2607453 - RNA, 19 nt, Artificial Sequence
  Description of Artificial Sequence: Synthetic oligonucleotide
gcugccaucccacugucuc

SEQ ID NO: 2607454 - RNA, 19 nt, Artificial Sequence
  Description of Artificial Sequence: Synthetic oligonucleotide
gacccauagccgaccaggc

SEQ ID NO: 2607455 - RNA, 19 nt, Artificial Sequence
  Description of Artificial Sequence: Synthetic oligonucleotide
ugaauuccacuagaaccuu

SEQ ID NO: 2607456 - RNA, 19 nt, Artificial Sequence
  Description of Artificial Sequence: Synthetic oligonucleotide
caucccacugucucgagcu

SEQ ID NO: 2607457 - RNA, 19 nt, Artificial Sequence
  Description of Artificial Sequence: Synthetic oligonucleotide
gagccgaaugagccauuug

SEQ ID NO: 2607458 - RNA, 19 nt, Artificial Sequence
  Description of Artificial Sequence: Synthetic oligonucleotide
aagagugagguggcaggaa

SEQ ID NO: 2607459 - RNA, 19 nt, Artificial Sequence
  Description of Artificial Sequence: Synthetic oligonucleotide
gcuggcuuuacauuguggu

SEQ ID NO: 2607460 - RNA, 19 nt, Artificial Sequence
  Description of Artificial Sequence: Synthetic oligonucleotide
gagccauuugcagguuaag

SEQ ID NO: 2607461 - RNA, 19 nt, Artificial Sequence
  Description of Artificial Sequence: Synthetic oligonucleotide
gugggaaccguccgguauc

SEQ ID NO: 2607462 - RNA, 19 nt, Artificial Sequence
  Description of Artificial Sequence: Synthetic oligonucleotide
uuguuucucuagagagaau

SEQ ID NO: 2607463 - RNA, 19 nt, Artificial Sequence
  Description of Artificial Sequence: Synthetic oligonucleotide
acucccaguugcagcacgg

SEQ ID NO: 2607464 - RNA, 19 nt, Artificial Sequence
  Description of Artificial Sequence: Synthetic oligonucleotide
augagggcccagaauccuc

SEQ ID NO: 2607465 - RNA, 19 nt, Artificial Sequence
  Description of Artificial Sequence: Synthetic oligonucleotide
gauggagaagccggccuuc

SEQ ID NO: 2607466 - RNA, 19 nt, Artificial Sequence
  Description of Artificial Sequence: Synthetic oligonucleotide
gggcccagaauccucugcc

SEQ ID NO: 2607467 - RNA, 19 nt, Artificial Sequence
  Description of Artificial Sequence: Synthetic oligonucleotide
ugcucucggccuucaggug

SEQ ID NO: 2607468 - RNA, 19 nt, Artificial Sequence
  Description of Artificial Sequence: Synthetic oligonucleotide
gguuaagcugccaucccac

SEQ ID NO: 2607469 - RNA, 19 nt, Artificial Sequence
  Description of Artificial Sequence: Synthetic oligonucleotide
gcuccuugugauugaauuc

SEQ ID NO: 2607470 - RNA, 19 nt, Artificial Sequence
  Description of Artificial Sequence: Synthetic oligonucleotide
acgggcaguuucucuucag

SEQ ID NO: 2607471 - RNA, 19 nt, Artificial Sequence
  Description of Artificial Sequence: Synthetic oligonucleotide
gaauccucugccugaacuu

SEQ ID NO: 2607472 - RNA, 19 nt, Artificial Sequence
  Description of Artificial Sequence: Synthetic oligonucleotide
gcucuuguuucucuagaga

SEQ ID NO: 2607473 - RNA, 19 nt, Artificial Sequence
  Description of Artificial Sequence: Synthetic oligonucleotide
agaaugcagccugaaguuu

SEQ ID NO: 2607474 - RNA, 19 nt, Artificial Sequence
  Description of Artificial Sequence: Synthetic oligonucleotide
gcaagaucagcaccgcaga

SEQ ID NO: 2607475 - RNA, 19 nt, Artificial Sequence
  Description of Artificial Sequence: Synthetic oligonucleotide
gagcuuaugagggcccaga

SEQ ID NO: 2607476 - RNA, 19 nt, Artificial Sequence
  Description of Artificial Sequence: Synthetic oligonucleotide
uggcucacucccaguugca

SEQ ID NO: 2607477 - RNA, 19 nt, Artificial Sequence
  Description of Artificial Sequence: Synthetic oligonucleotide
gggcucuccggcaagauca

SEQ ID NO: 2607478 - RNA, 19 nt, Artificial Sequence
  Description of Artificial Sequence: Synthetic oligonucleotide
gcucacucccaguugcagc

SEQ ID NO: 2607479 - RNA, 19 nt, Artificial Sequence
  Description of Artificial Sequence: Synthetic oligonucleotide
ucgagcuuaugagggccca

SEQ ID NO: 2607480 - RNA, 19 nt, Artificial Sequence
  Description of Artificial Sequence: Synthetic oligonucleotide
cugugcuuguauggucucc

SEQ ID NO: 2607481 - RNA, 19 nt, Artificial Sequence
  Description of Artificial Sequence: Synthetic oligonucleotide
gguaucuauugcauuuauc

SEQ ID NO: 2607482 - RNA, 19 nt, Artificial Sequence
  Description of Artificial Sequence: Synthetic oligonucleotide
cuucaugcuggggcucucc

SEQ ID NO: 2607483 - RNA, 19 nt, Artificial Sequence
  Description of Artificial Sequence: Synthetic oligonucleotide
ggauaagaaggcgugggaa

SEQ ID NO: 2607484 - RNA, 19 nt, Artificial Sequence
  Description of Artificial Sequence: Synthetic oligonucleotide
augagccauuugcagguua

SEQ ID NO: 2607485 - RNA, 19 nt, Artificial Sequence
  Description of Artificial Sequence: Synthetic oligonucleotide
agagagaaugcagccugaa

SEQ ID NO: 2607486 - RNA, 19 nt, Artificial Sequence
  Description of Artificial Sequence: Synthetic oligonucleotide
caggaaugugauggagaag

SEQ ID NO: 2607487 - RNA, 19 nt, Artificial Sequence
  Description of Artificial Sequence: Synthetic oligonucleotide
uggagaagccggccuucaa

SEQ ID NO: 2607488 - RNA, 19 nt, Artificial Sequence
  Description of Artificial Sequence: Synthetic oligonucleotide
cucugccugaacuucucaa

SEQ ID NO: 2607489 - RNA, 19 nt, Artificial Sequence
  Description of Artificial Sequence: Synthetic oligonucleotide
cuggcuuuacauuguggua

SEQ ID NO: 2607490 - RNA, 19 nt, Artificial Sequence
  Description of Artificial Sequence: Synthetic oligonucleotide
cuugacccauagccgacca

SEQ ID NO: 2607491 - RNA, 19 nt, Artificial Sequence
  Description of Artificial Sequence: Synthetic oligonucleotide
ucagcggcacugcuuucuu

SEQ ID NO: 2607492 - RNA, 19 nt, Artificial Sequence
  Description of Artificial Sequence: Synthetic oligonucleotide
ggcuuuacauugugguaca

SEQ ID NO: 2607493 - RNA, 19 nt, Artificial Sequence
  Description of Artificial Sequence: Synthetic oligonucleotide
uagcuccuugugauugaau

SEQ ID NO: 2607494 - RNA, 19 nt, Artificial Sequence
  Description of Artificial Sequence: Synthetic oligonucleotide
acugccugcuccagaauaa

SEQ ID NO: 2607495 - RNA, 19 nt, Artificial Sequence
  Description of Artificial Sequence: Synthetic oligonucleotide
ugagccgaaugagccauuu

SEQ ID NO: 2607496 - RNA, 19 nt, Artificial Sequence
  Description of Artificial Sequence: Synthetic oligonucleotide
agcuuguuguagaaaucaa

SEQ ID NO: 2607497 - RNA, 19 nt, Artificial Sequence
  Description of Artificial Sequence: Synthetic oligonucleotide
gucuugcguaaaaugaaua

SEQ ID NO: 2607498 - RNA, 19 nt, Artificial Sequence
  Description of Artificial Sequence: Synthetic oligonucleotide
aaugagccauuugcagguu

SEQ ID NO: 2607499 - RNA, 19 nt, Artificial Sequence
  Description of Artificial Sequence: Synthetic oligonucleotide
gcuuuugaagaauucggau

SEQ ID NO: 2607500 - RNA, 19 nt, Artificial Sequence
  Description of Artificial Sequence: Synthetic oligonucleotide
cuuuacauugugguacacu

SEQ ID NO: 2607501 - RNA, 19 nt, Artificial Sequence
  Description of Artificial Sequence: Synthetic oligonucleotide
ccuugugauugaauuccac

SEQ ID NO: 2607502 - RNA, 19 nt, Artificial Sequence
  Description of Artificial Sequence: Synthetic oligonucleotide
cuugcguaaaaugaauauu

SEQ ID NO: 2607503 - RNA, 19 nt, Artificial Sequence
  Description of Artificial Sequence: Synthetic oligonucleotide
cugcucucggccuucaggu

SEQ ID NO: 2607504 - RNA, 19 nt, Artificial Sequence
  Description of Artificial Sequence: Synthetic oligonucleotide
ugggaaccguccgguaucu

SEQ ID NO: 2607505 - RNA, 19 nt, Artificial Sequence
  Description of Artificial Sequence: Synthetic oligonucleotide
acauugugguacacugccu

SEQ ID NO: 2607506 - RNA, 19 nt, Artificial Sequence
  Description of Artificial Sequence: Synthetic oligonucleotide
gaaugcagccugaaguuuu

SEQ ID NO: 2607507 - RNA, 19 nt, Artificial Sequence
  Description of Artificial Sequence: Synthetic oligonucleotide
cacggccugaggagacugc

SEQ ID NO: 2607508 - RNA, 19 nt, Artificial Sequence
  Description of Artificial Sequence: Synthetic oligonucleotide
cugccugaacuucucaacu

SEQ ID NO: 2607509 - RNA, 19 nt, Artificial Sequence
  Description of Artificial Sequence: Synthetic oligonucleotide
ugcagugcggcuggcuuua

SEQ ID NO: 2607510 - RNA, 19 nt, Artificial Sequence
  Description of Artificial Sequence: Synthetic oligonucleotide
guuaagcugccaucccacu

SEQ ID NO: 2607511 - RNA, 19 nt, Artificial Sequence
  Description of Artificial Sequence: Synthetic oligonucleotide
ggcuggcuuuacauugugg

SEQ ID NO: 2607512 - RNA, 19 nt, Artificial Sequence
  Description of Artificial Sequence: Synthetic oligonucleotide
cagcacggccugaggagac

SEQ ID NO: 2607513 - RNA, 19 nt, Artificial Sequence
  Description of Artificial Sequence: Synthetic oligonucleotide
gcaucaugugagggaaucc

SEQ ID NO: 2607514 - RNA, 19 nt, Artificial Sequence
  Description of Artificial Sequence: Synthetic oligonucleotide
cucccaguugcagcacggc

SEQ ID NO: 2607515 - RNA, 19 nt, Artificial Sequence
  Description of Artificial Sequence: Synthetic oligonucleotide
acggccugaggagacugca

SEQ ID NO: 2607516 - RNA, 19 nt, Artificial Sequence
  Description of Artificial Sequence: Synthetic oligonucleotide
cugaacuucucaacuguuu

SEQ ID NO: 2607517 - RNA, 19 nt, Artificial Sequence
  Description of Artificial Sequence: Synthetic oligonucleotide
uaucagcggcacugcuuuc

SEQ ID NO: 2607518 - RNA, 19 nt, Artificial Sequence
  Description of Artificial Sequence: Synthetic oligonucleotide
ccagaauaaacgauauuau

SEQ ID NO: 2607519 - RNA, 19 nt, Artificial Sequence
  Description of Artificial Sequence: Synthetic oligonucleotide
gaccaggcguuggcaaaug

SEQ ID NO: 2607520 - RNA, 19 nt, Artificial Sequence
  Description of Artificial Sequence: Synthetic oligonucleotide
ccacuagaaccuucuccag

SEQ ID NO: 2607521 - RNA, 19 nt, Artificial Sequence
  Description of Artificial Sequence: Synthetic oligonucleotide
gaucagcaccgcagacgcc

SEQ ID NO: 2607522 - RNA, 19 nt, Artificial Sequence
  Description of Artificial Sequence: Synthetic oligonucleotide
caggcguuggcaaaugcuu

SEQ ID NO: 2607523 - RNA, 19 nt, Artificial Sequence
  Description of Artificial Sequence: Synthetic oligonucleotide
ccaguugcagcacggccug

SEQ ID NO: 2607524 - RNA, 19 nt, Artificial Sequence
  Description of Artificial Sequence: Synthetic oligonucleotide
gccgaaugagccauuugca

SEQ ID NO: 2607525 - RNA, 19 nt, Artificial Sequence
  Description of Artificial Sequence: Synthetic oligonucleotide
cucucggccuucaggugga

SEQ ID NO: 2607526 - RNA, 19 nt, Artificial Sequence
  Description of Artificial Sequence: Synthetic oligonucleotide
ggugaagcucuuguuucuc

SEQ ID NO: 2607527 - RNA, 19 nt, Artificial Sequence
  Description of Artificial Sequence: Synthetic oligonucleotide
gaauccagcugugcuugua

SEQ ID NO: 2607528 - RNA, 19 nt, Artificial Sequence
  Description of Artificial Sequence: Synthetic oligonucleotide
agcaccgcagacgccgcca

SEQ ID NO: 2607529 - RNA, 19 nt, Artificial Sequence
  Description of Artificial Sequence: Synthetic oligonucleotide
gcagacgccgccauccuca

SEQ ID NO: 2607530 - RNA, 19 nt, Artificial Sequence
  Description of Artificial Sequence: Synthetic oligonucleotide
ucacucccaguugcagcac

SEQ ID NO: 2607531 - RNA, 19 nt, Artificial Sequence
  Description of Artificial Sequence: Synthetic oligonucleotide
ggaaccguccgguaucuau

SEQ ID NO: 2607532 - RNA, 19 nt, Artificial Sequence
  Description of Artificial Sequence: Synthetic oligonucleotide
cucggccuucagguggagc

SEQ ID NO: 2607533 - RNA, 19 nt, Artificial Sequence
  Description of Artificial Sequence: Synthetic oligonucleotide
ugcugcagugcggcuggcu

SEQ ID NO: 2607534 - RNA, 19 nt, Artificial Sequence
  Description of Artificial Sequence: Synthetic oligonucleotide
uggagucuucuuggcucac

SEQ ID NO: 2607535 - RNA, 19 nt, Artificial Sequence
  Description of Artificial Sequence: Synthetic oligonucleotide
cguuggcaaaugcuucugc

SEQ ID NO: 2607536 - RNA, 19 nt, Artificial Sequence
  Description of Artificial Sequence: Synthetic oligonucleotide
ccaucccacugucucgagc

SEQ ID NO: 2607537 - RNA, 19 nt, Artificial Sequence
  Description of Artificial Sequence: Synthetic oligonucleotide
gaaccguccgguaucuauu

SEQ ID NO: 2607538 - RNA, 19 nt, Artificial Sequence
  Description of Artificial Sequence: Synthetic oligonucleotide
cccagaauccucugccuga

SEQ ID NO: 2607539 - RNA, 19 nt, Artificial Sequence
  Description of Artificial Sequence: Synthetic oligonucleotide
cagcggcacugcuuucuuc

SEQ ID NO: 2607540 - RNA, 19 nt, Artificial Sequence
  Description of Artificial Sequence: Synthetic oligonucleotide
cacgggcaguuucucuuca

SEQ ID NO: 2607541 - RNA, 19 nt, Artificial Sequence
  Description of Artificial Sequence: Synthetic oligonucleotide
ccguccgguaucuauugca

SEQ ID NO: 2607542 - RNA, 19 nt, Artificial Sequence
  Description of Artificial Sequence: Synthetic oligonucleotide
aucccacugucucgagcuu

SEQ ID NO: 2607543 - RNA, 19 nt, Artificial Sequence
  Description of Artificial Sequence: Synthetic oligonucleotide
cauagccgaccaggcguug

SEQ ID NO: 2607544 - RNA, 19 nt, Artificial Sequence
  Description of Artificial Sequence: Synthetic oligonucleotide
cuuguauggucuccagcuu

SEQ ID NO: 2607545 - RNA, 19 nt, Artificial Sequence
  Description of Artificial Sequence: Synthetic oligonucleotide
cugaggagacugcagcuuu

SEQ ID NO: 2607546 - RNA, 19 nt, Artificial Sequence
  Description of Artificial Sequence: Synthetic oligonucleotide
agcacggccugaggagacu

SEQ ID NO: 2607547 - RNA, 19 nt, Artificial Sequence
  Description of Artificial Sequence: Synthetic oligonucleotide
gcaaaagagugagguggca

SEQ ID NO: 2607548 - RNA, 19 nt, Artificial Sequence
  Description of Artificial Sequence: Synthetic oligonucleotide
cagcaccgcagacgccgcc

SEQ ID NO: 2607549 - RNA, 19 nt, Artificial Sequence
  Description of Artificial Sequence: Synthetic oligonucleotide
ggggcucuccggcaagauc

SEQ ID NO: 2607550 - RNA, 19 nt, Artificial Sequence
  Description of Artificial Sequence: Synthetic oligonucleotide
gcguuggcaaaugcuucug

SEQ ID NO: 2607551 - RNA, 19 nt, Artificial Sequence
  Description of Artificial Sequence: Synthetic oligonucleotide
gcuuaugagggcccagaau

SEQ ID NO: 2607552 - RNA, 19 nt, Artificial Sequence
  Description of Artificial Sequence: Synthetic oligonucleotide
gcuuuacauugugguacac

SEQ ID NO: 2607553 - RNA, 19 nt, Artificial Sequence
  Description of Artificial Sequence: Synthetic oligonucleotide
uggggcucuccggcaagau

SEQ ID NO: 2607554 - RNA, 19 nt, Artificial Sequence
  Description of Artificial Sequence: Synthetic oligonucleotide
ggcucuccggcaagaucag

SEQ ID NO: 2607555 - RNA, 19 nt, Artificial Sequence
  Description of Artificial Sequence: Synthetic oligonucleotide
gcagcacggccugaggaga

SEQ ID NO: 2607556 - RNA, 19 nt, Artificial Sequence
  Description of Artificial Sequence: Synthetic oligonucleotide
gcacggccugaggagacug

SEQ ID NO: 2607557 - RNA, 19 nt, Artificial Sequence
  Description of Artificial Sequence: Synthetic oligonucleotide
cagugcggcuggcuuuaca

SEQ ID NO: 2607558 - RNA, 19 nt, Artificial Sequence
  Description of Artificial Sequence: Synthetic oligonucleotide
guccgguaucuauugcauu

SEQ ID NO: 2607559 - RNA, 19 nt, Artificial Sequence
  Description of Artificial Sequence: Synthetic oligonucleotide
cuccagaauaaacgauauu

SEQ ID NO: 2607560 - RNA, 19 nt, Artificial Sequence
  Description of Artificial Sequence: Synthetic oligonucleotide
agcugccaucccacugucu

SEQ ID NO: 2607561 - RNA, 19 nt, Artificial Sequence
  Description of Artificial Sequence: Synthetic oligonucleotide
gccugaggagacugcagcu

SEQ ID NO: 2607562 - RNA, 19 nt, Artificial Sequence
  Description of Artificial Sequence: Synthetic oligonucleotide
ccaggcguuggcaaaugcu

SEQ ID NO: 2607563 - RNA, 19 nt, Artificial Sequence
  Description of Artificial Sequence: Synthetic oligonucleotide
gccaucccacugucucgag

SEQ ID NO: 2607564 - RNA, 19 nt, Artificial Sequence
  Description of Artificial Sequence: Synthetic oligonucleotide
gccgaccaggcguuggcaa

SEQ ID NO: 2607565 - RNA, 19 nt, Artificial Sequence
  Description of Artificial Sequence: Synthetic oligonucleotide
gguggagcuuuugaagaau

SEQ ID NO: 2607566 - RNA, 19 nt, Artificial Sequence
  Description of Artificial Sequence: Synthetic oligonucleotide
agacgccgccauccucaaa

SEQ ID NO: 2607567 - RNA, 19 nt, Artificial Sequence
  Description of Artificial Sequence: Synthetic oligonucleotide
ccuucagguggagcuuuug

SEQ ID NO: 2607568 - RNA, 19 nt, Artificial Sequence
  Description of Artificial Sequence: Synthetic oligonucleotide
gcuuugucuugcguaaaau

SEQ ID NO: 2607569 - RNA, 19 nt, Artificial Sequence
  Description of Artificial Sequence: Synthetic oligonucleotide
cugcuuugucuugcguaaa

SEQ ID NO: 2607570 - RNA, 19 nt, Artificial Sequence
  Description of Artificial Sequence: Synthetic oligonucleotide
cagcuuugcuugagccgaa

SEQ ID NO: 2607571 - RNA, 19 nt, Artificial Sequence
  Description of Artificial Sequence: Synthetic oligonucleotide
caccgcagacgccgccauc

SEQ ID NO: 2607572 - RNA, 19 nt, Artificial Sequence
  Description of Artificial Sequence: Synthetic oligonucleotide
ccggcaagaucagcaccgc

SEQ ID NO: 2607573 - RNA, 19 nt, Artificial Sequence
  Description of Artificial Sequence: Synthetic oligonucleotide
cuggggcucuccggcaaga

SEQ ID NO: 2607574 - RNA, 19 nt, Artificial Sequence
  Description of Artificial Sequence: Synthetic oligonucleotide
gugcggcuggcuuuacauu

SEQ ID NO: 2607575 - RNA, 19 nt, Artificial Sequence
  Description of Artificial Sequence: Synthetic oligonucleotide
gcucuccggcaagaucagc

SEQ ID NO: 2607576 - RNA, 19 nt, Artificial Sequence
  Description of Artificial Sequence: Synthetic oligonucleotide
gaaccuucuccagguucuu

SEQ ID NO: 2607577 - RNA, 19 nt, Artificial Sequence
  Description of Artificial Sequence: Synthetic oligonucleotide
gagcaucaugugagggaau

SEQ ID NO: 2607578 - RNA, 19 nt, Artificial Sequence
  Description of Artificial Sequence: Synthetic oligonucleotide
ggaauccagcugugcuugu

SEQ ID NO: 2607579 - RNA, 19 nt, Artificial Sequence
  Description of Artificial Sequence: Synthetic oligonucleotide
ccugaacuucucaacuguu

SEQ ID NO: 2607580 - RNA, 19 nt, Artificial Sequence
  Description of Artificial Sequence: Synthetic oligonucleotide
ggcgugggaaccguccggu

SEQ ID NO: 2607581 - RNA, 19 nt, Artificial Sequence
  Description of Artificial Sequence: Synthetic oligonucleotide
cgagcuuaugagggcccag

SEQ ID NO: 2607582 - RNA, 19 nt, Artificial Sequence
  Description of Artificial Sequence: Synthetic oligonucleotide
ccgaccaggcguuggcaaa

SEQ ID NO: 2607583 - RNA, 19 nt, Artificial Sequence
  Description of Artificial Sequence: Synthetic oligonucleotide
ggagucuucuuggcucacu

SEQ ID NO: 2607584 - RNA, 19 nt, Artificial Sequence
  Description of Artificial Sequence: Synthetic oligonucleotide
cugcugcagugcggcuggc

SEQ ID NO: 2607585 - RNA, 19 nt, Artificial Sequence
  Description of Artificial Sequence: Synthetic oligonucleotide
ccgguaucuauugcauuua

SEQ ID NO: 2607586 - RNA, 19 nt, Artificial Sequence
  Description of Artificial Sequence: Synthetic oligonucleotide
gccggccuucaagagcauc

SEQ ID NO: 2607587 - RNA, 19 nt, Artificial Sequence
  Description of Artificial Sequence: Synthetic oligonucleotide
cguccgguaucuauugcau

SEQ ID NO: 2607588 - RNA, 19 nt, Artificial Sequence
  Description of Artificial Sequence: Synthetic oligonucleotide
caguugcagcacggccuga

SEQ ID NO: 2607589 - RNA, 19 nt, Artificial Sequence
  Description of Artificial Sequence: Synthetic oligonucleotide
ccacugucucgagcuuaug

SEQ ID NO: 2607590 - RNA, 19 nt, Artificial Sequence
  Description of Artificial Sequence: Synthetic oligonucleotide
cgcagacgccgccauccuc

SEQ ID NO: 2607591 - RNA, 19 nt, Artificial Sequence
  Description of Artificial Sequence: Synthetic oligonucleotide
gcggcuggcuuuacauugu

SEQ ID NO: 2607592 - RNA, 19 nt, Artificial Sequence
  Description of Artificial Sequence: Synthetic oligonucleotide
cgugggaaccguccgguau

SEQ ID NO: 2607593 - RNA, 19 nt, Artificial Sequence
  Description of Artificial Sequence: Synthetic oligonucleotide
ccauagccgaccaggcguu

SEQ ID NO: 2607594 - RNA, 19 nt, Artificial Sequence
  Description of Artificial Sequence: Synthetic oligonucleotide
cggcaagaucagcaccgca

SEQ ID NO: 2607595 - RNA, 19 nt, Artificial Sequence
  Description of Artificial Sequence: Synthetic oligonucleotide
gcgugggaaccguccggua

SEQ ID NO: 2607596 - RNA, 19 nt, Artificial Sequence
  Description of Artificial Sequence: Synthetic oligonucleotide
gcggcacugcuuucuucau

SEQ ID NO: 2607597 - RNA, 19 nt, Artificial Sequence
  Description of Artificial Sequence: Synthetic oligonucleotide
ggccuucagguggagcuuu

SEQ ID NO: 2607598 - RNA, 19 nt, Artificial Sequence
  Description of Artificial Sequence: Synthetic oligonucleotide
cgguaucuauugcauuuau

SEQ ID NO: 2607599 - RNA, 19 nt, Artificial Sequence
  Description of Artificial Sequence: Synthetic oligonucleotide
gcagugcggcuggcuuuac

SEQ ID NO: 2607600 - RNA, 19 nt, Artificial Sequence
  Description of Artificial Sequence: Synthetic oligonucleotide
gcaccgcagacgccgccau

SEQ ID NO: 2607601 - RNA, 19 nt, Artificial Sequence
  Description of Artificial Sequence: Synthetic oligonucleotide
gggaaccguccgguaucua

SEQ ID NO: 2607602 - RNA, 19 nt, Artificial Sequence
  Description of Artificial Sequence: Synthetic oligonucleotide
cgccgccauccucaaagcu

SEQ ID NO: 2607603 - RNA, 19 nt, Artificial Sequence
  Description of Artificial Sequence: Synthetic oligonucleotide
gccuucagguggagcuuuu

SEQ ID NO: 2607604 - RNA, 19 nt, Artificial Sequence
  Description of Artificial Sequence: Synthetic oligonucleotide
cgaccaggcguuggcaaau

SEQ ID NO: 2607605 - RNA, 19 nt, Artificial Sequence
  Description of Artificial Sequence: Synthetic oligonucleotide
ccgcagacgccgccauccu

SEQ ID NO: 2607606 - RNA, 19 nt, Artificial Sequence
  Description of Artificial Sequence: Synthetic oligonucleotide
auugaagggcaacacacgc

SEQ ID NO: 2607607 - RNA, 19 nt, Artificial Sequence
  Description of Artificial Sequence: Synthetic oligonucleotide
uguuccaucacuugggugu

SEQ ID NO: 2607608 - RNA, 19 nt, Artificial Sequence
  Description of Artificial Sequence: Synthetic oligonucleotide
uguaccuccucgaaugcgg

SEQ ID NO: 2607609 - RNA, 19 nt, Artificial Sequence
  Description of Artificial Sequence: Synthetic oligonucleotide
uauugaagggcaacacacg

SEQ ID NO: 2607610 - RNA, 19 nt, Artificial Sequence
  Description of Artificial Sequence: Synthetic oligonucleotide
cuuccaguaagcaucuucc

SEQ ID NO: 2607611 - RNA, 19 nt, Artificial Sequence
  Description of Artificial Sequence: Synthetic oligonucleotide
uguacucgggcuuuguucc

SEQ ID NO: 2607612 - RNA, 19 nt, Artificial Sequence
  Description of Artificial Sequence: Synthetic oligonucleotide
ugaagggcaacacacgcug

SEQ ID NO: 2607613 - RNA, 19 nt, Artificial Sequence
  Description of Artificial Sequence: Synthetic oligonucleotide
uguauugaagggcaacaca

SEQ ID NO: 2607614 - RNA, 19 nt, Artificial Sequence
  Description of Artificial Sequence: Synthetic oligonucleotide
uacugugcgagcuuccagg

SEQ ID NO: 2607615 - RNA, 19 nt, Artificial Sequence
  Description of Artificial Sequence: Synthetic oligonucleotide
uccaguaagcaucuuccag

SEQ ID NO: 2607616 - RNA, 19 nt, Artificial Sequence
  Description of Artificial Sequence: Synthetic oligonucleotide
ucgaaugcggugaaggcug

SEQ ID NO: 2607617 - RNA, 19 nt, Artificial Sequence
  Description of Artificial Sequence: Synthetic oligonucleotide
gaaggcugcacgcaugcgg

SEQ ID NO: 2607618 - RNA, 19 nt, Artificial Sequence
  Description of Artificial Sequence: Synthetic oligonucleotide
uccucauccuuccaguaag

SEQ ID NO: 2607619 - RNA, 19 nt, Artificial Sequence
  Description of Artificial Sequence: Synthetic oligonucleotide
cauccuuccaguaagcauc

SEQ ID NO: 2607620 - RNA, 19 nt, Artificial Sequence
  Description of Artificial Sequence: Synthetic oligonucleotide
ugugcgagcuuccaggcug

SEQ ID NO: 2607621 - RNA, 19 nt, Artificial Sequence
  Description of Artificial Sequence: Synthetic oligonucleotide
aacacacgcugguucauag

SEQ ID NO: 2607622 - RNA, 19 nt, Artificial Sequence
  Description of Artificial Sequence: Synthetic oligonucleotide
uuggguguauugaagggca

SEQ ID NO: 2607623 - RNA, 19 nt, Artificial Sequence
  Description of Artificial Sequence: Synthetic oligonucleotide
acuuggguguauugaaggg

SEQ ID NO: 2607624 - RNA, 19 nt, Artificial Sequence
  Description of Artificial Sequence: Synthetic oligonucleotide
cacuuggguguauugaagg

SEQ ID NO: 2607625 - RNA, 19 nt, Artificial Sequence
  Description of Artificial Sequence: Synthetic oligonucleotide
cacguguuuguccucaucc

SEQ ID NO: 2607626 - RNA, 19 nt, Artificial Sequence
  Description of Artificial Sequence: Synthetic oligonucleotide
cacacgcugguucauaggg

SEQ ID NO: 2607627 - RNA, 19 nt, Artificial Sequence
  Description of Artificial Sequence: Synthetic oligonucleotide
guauugaagggcaacacac

SEQ ID NO: 2607628 - RNA, 19 nt, Artificial Sequence
  Description of Artificial Sequence: Synthetic oligonucleotide
aaggcugcacgcaugcggc

SEQ ID NO: 2607629 - RNA, 19 nt, Artificial Sequence
  Description of Artificial Sequence: Synthetic oligonucleotide
ucuccacugauuccacacg

SEQ ID NO: 2607630 - RNA, 19 nt, Artificial Sequence
  Description of Artificial Sequence: Synthetic oligonucleotide
ucuugggcaucccucagca

SEQ ID NO: 2607631 - RNA, 19 nt, Artificial Sequence
  Description of Artificial Sequence: Synthetic oligonucleotide
acacgaggggccuugccgc

SEQ ID NO: 2607632 - RNA, 19 nt, Artificial Sequence
  Description of Artificial Sequence: Synthetic oligonucleotide
acugugcgagcuuccaggc

SEQ ID NO: 2607633 - RNA, 19 nt, Artificial Sequence
  Description of Artificial Sequence: Synthetic oligonucleotide
ugcuauggcauccucuacu

SEQ ID NO: 2607634 - RNA, 19 nt, Artificial Sequence
  Description of Artificial Sequence: Synthetic oligonucleotide
cuucuuucgcuccaacugc

SEQ ID NO: 2607635 - RNA, 19 nt, Artificial Sequence
  Description of Artificial Sequence: Synthetic oligonucleotide
ucacuuggguguauugaag

SEQ ID NO: 2607636 - RNA, 19 nt, Artificial Sequence
  Description of Artificial Sequence: Synthetic oligonucleotide
guucauaggguugucgggg

SEQ ID NO: 2607637 - RNA, 19 nt, Artificial Sequence
  Description of Artificial Sequence: Synthetic oligonucleotide
acacugagcacugcuaugg

SEQ ID NO: 2607638 - RNA, 19 nt, Artificial Sequence
  Description of Artificial Sequence: Synthetic oligonucleotide
cauguugggguucuccugc

SEQ ID NO: 2607639 - RNA, 19 nt, Artificial Sequence
  Description of Artificial Sequence: Synthetic oligonucleotide
ucgcccuggaacuucuugg

SEQ ID NO: 2607640 - RNA, 19 nt, Artificial Sequence
  Description of Artificial Sequence: Synthetic oligonucleotide
uucuccacugauuccacac

SEQ ID NO: 2607641 - RNA, 19 nt, Artificial Sequence
  Description of Artificial Sequence: Synthetic oligonucleotide
gcuuuguuccaucacuugg

SEQ ID NO: 2607642 - RNA, 19 nt, Artificial Sequence
  Description of Artificial Sequence: Synthetic oligonucleotide
ggaguccucaaucugcgcg

SEQ ID NO: 2607643 - RNA, 19 nt, Artificial Sequence
  Description of Artificial Sequence: Synthetic oligonucleotide
ugcuccuuccgcaucacgu

SEQ ID NO: 2607644 - RNA, 19 nt, Artificial Sequence
  Description of Artificial Sequence: Synthetic oligonucleotide
cuuggguguauugaagggc

SEQ ID NO: 2607645 - RNA, 19 nt, Artificial Sequence
  Description of Artificial Sequence: Synthetic oligonucleotide
aagggcaacacacgcuggu

SEQ ID NO: 2607646 - RNA, 19 nt, Artificial Sequence
  Description of Artificial Sequence: Synthetic oligonucleotide
cagggaguccucaaucugc

SEQ ID NO: 2607647 - RNA, 19 nt, Artificial Sequence
  Description of Artificial Sequence: Synthetic oligonucleotide
uugaagggcaacacacgcu

SEQ ID NO: 2607648 - RNA, 19 nt, Artificial Sequence
  Description of Artificial Sequence: Synthetic oligonucleotide
ucaaucugcgcgcggguga

SEQ ID NO: 2607649 - RNA, 19 nt, Artificial Sequence
  Description of Artificial Sequence: Synthetic oligonucleotide
acgcaugcggcgcucaggg

SEQ ID NO: 2607650 - RNA, 19 nt, Artificial Sequence
  Description of Artificial Sequence: Synthetic oligonucleotide
cuuucgcuccaacugcucc

SEQ ID NO: 2607651 - RNA, 19 nt, Artificial Sequence
  Description of Artificial Sequence: Synthetic oligonucleotide
cacugauuccacacgcugc

SEQ ID NO: 2607652 - RNA, 19 nt, Artificial Sequence
  Description of Artificial Sequence: Synthetic oligonucleotide
cacacgaggggccuugccg

SEQ ID NO: 2607653 - RNA, 19 nt, Artificial Sequence
  Description of Artificial Sequence: Synthetic oligonucleotide
gaguccucaaucugcgcgc

SEQ ID NO: 2607654 - RNA, 19 nt, Artificial Sequence
  Description of Artificial Sequence: Synthetic oligonucleotide
acuucuugggcaucccuca

SEQ ID NO: 2607655 - RNA, 19 nt, Artificial Sequence
  Description of Artificial Sequence: Synthetic oligonucleotide
cuccacugauuccacacgc

SEQ ID NO: 2607656 - RNA, 19 nt, Artificial Sequence
  Description of Artificial Sequence: Synthetic oligonucleotide
agggugccggucugcaucc

SEQ ID NO: 2607657 - RNA, 19 nt, Artificial Sequence
  Description of Artificial Sequence: Synthetic oligonucleotide
cuguacucgggcuuuguuc

SEQ ID NO: 2607658 - RNA, 19 nt, Artificial Sequence
  Description of Artificial Sequence: Synthetic oligonucleotide
ugcggugaaggcugcacgc

SEQ ID NO: 2607659 - RNA, 19 nt, Artificial Sequence
  Description of Artificial Sequence: Synthetic oligonucleotide
ugggcaucccucagcaggc

SEQ ID NO: 2607660 - RNA, 19 nt, Artificial Sequence
  Description of Artificial Sequence: Synthetic oligonucleotide
augcggugaaggcugcacg

SEQ ID NO: 2607661 - RNA, 19 nt, Artificial Sequence
  Description of Artificial Sequence: Synthetic oligonucleotide
uggcauccucuacugugcg

SEQ ID NO: 2607662 - RNA, 19 nt, Artificial Sequence
  Description of Artificial Sequence: Synthetic oligonucleotide
uuguaccuccucgaaugcg

SEQ ID NO: 2607663 - RNA, 19 nt, Artificial Sequence
  Description of Artificial Sequence: Synthetic oligonucleotide
uccuucuuucgcuccaacu

SEQ ID NO: 2607664 - RNA, 19 nt, Artificial Sequence
  Description of Artificial Sequence: Synthetic oligonucleotide
acugagcacugcuauggca

SEQ ID NO: 2607665 - RNA, 19 nt, Artificial Sequence
  Description of Artificial Sequence: Synthetic oligonucleotide
uuguuccaucacuugggug

SEQ ID NO: 2607666 - RNA, 19 nt, Artificial Sequence
  Description of Artificial Sequence: Synthetic oligonucleotide
ucugcauccucugccacac

SEQ ID NO: 2607667 - RNA, 19 nt, Artificial Sequence
  Description of Artificial Sequence: Synthetic oligonucleotide
uuccgcaucacguguuugu

SEQ ID NO: 2607668 - RNA, 19 nt, Artificial Sequence
  Description of Artificial Sequence: Synthetic oligonucleotide
aguaagcaucuuccagcuc

SEQ ID NO: 2607669 - RNA, 19 nt, Artificial Sequence
  Description of Artificial Sequence: Synthetic oligonucleotide
uuccaguaagcaucuucca

SEQ ID NO: 2607670 - RNA, 19 nt, Artificial Sequence
  Description of Artificial Sequence: Synthetic oligonucleotide
ugagccgugaguccuccuc

SEQ ID NO: 2607671 - RNA, 19 nt, Artificial Sequence
  Description of Artificial Sequence: Synthetic oligonucleotide
cagcgguagcuccaggugg

SEQ ID NO: 2607672 - RNA, 19 nt, Artificial Sequence
  Description of Artificial Sequence: Synthetic oligonucleotide
uccgugcucgggcagcugc

SEQ ID NO: 2607673 - RNA, 19 nt, Artificial Sequence
  Description of Artificial Sequence: Synthetic oligonucleotide
uccacugauuccacacgcu

SEQ ID NO: 2607674 - RNA, 19 nt, Artificial Sequence
  Description of Artificial Sequence: Synthetic oligonucleotide
guuguaccuccucgaaugc

SEQ ID NO: 2607675 - RNA, 19 nt, Artificial Sequence
  Description of Artificial Sequence: Synthetic oligonucleotide
agcuccagguggcucuugg

SEQ ID NO: 2607676 - RNA, 19 nt, Artificial Sequence
  Description of Artificial Sequence: Synthetic oligonucleotide
uccagcgguagcuccaggu

SEQ ID NO: 2607677 - RNA, 19 nt, Artificial Sequence
  Description of Artificial Sequence: Synthetic oligonucleotide
cauccucugccacacugag

SEQ ID NO: 2607678 - RNA, 19 nt, Artificial Sequence
  Description of Artificial Sequence: Synthetic oligonucleotide
agcgguagcuccagguggc

SEQ ID NO: 2607679 - RNA, 19 nt, Artificial Sequence
  Description of Artificial Sequence: Synthetic oligonucleotide
caugcggcgcucagggugc

SEQ ID NO: 2607680 - RNA, 19 nt, Artificial Sequence
  Description of Artificial Sequence: Synthetic oligonucleotide
ucuacugugcgagcuucca

SEQ ID NO: 2607681 - RNA, 19 nt, Artificial Sequence
  Description of Artificial Sequence: Synthetic oligonucleotide
cuucagcugcgacagccgc

SEQ ID NO: 2607682 - RNA, 19 nt, Artificial Sequence
  Description of Artificial Sequence: Synthetic oligonucleotide
uucagcugcgacagccgca

SEQ ID NO: 2607683 - RNA, 19 nt, Artificial Sequence
  Description of Artificial Sequence: Synthetic oligonucleotide
uuccacacgcugcucucug

SEQ ID NO: 2607684 - RNA, 19 nt, Artificial Sequence
  Description of Artificial Sequence: Synthetic oligonucleotide
acguguuuguccucauccu

SEQ ID NO: 2607685 - RNA, 19 nt, Artificial Sequence
  Description of Artificial Sequence: Synthetic oligonucleotide
agcugcgacagccgcaugu

SEQ ID NO: 2607686 - RNA, 19 nt, Artificial Sequence
  Description of Artificial Sequence: Synthetic oligonucleotide
gagccgugaguccuccucc

SEQ ID NO: 2607687 - RNA, 19 nt, Artificial Sequence
  Description of Artificial Sequence: Synthetic oligonucleotide
agggaguccucaaucugcg

SEQ ID NO: 2607688 - RNA, 19 nt, Artificial Sequence
  Description of Artificial Sequence: Synthetic oligonucleotide
cugguucauaggguugucg

SEQ ID NO: 2607689 - RNA, 19 nt, Artificial Sequence
  Description of Artificial Sequence: Synthetic oligonucleotide
ugccgccuuggcuucagcc

SEQ ID NO: 2607690 - RNA, 19 nt, Artificial Sequence
  Description of Artificial Sequence: Synthetic oligonucleotide
agcgcaaccacuccuucuu

SEQ ID NO: 2607691 - RNA, 19 nt, Artificial Sequence
  Description of Artificial Sequence: Synthetic oligonucleotide
gaagggcaacacacgcugg

SEQ ID NO: 2607692 - RNA, 19 nt, Artificial Sequence
  Description of Artificial Sequence: Synthetic oligonucleotide
gcuguucucgcccuggaac

SEQ ID NO: 2607693 - RNA, 19 nt, Artificial Sequence
  Description of Artificial Sequence: Synthetic oligonucleotide
aucagcugccgccuuggcu

SEQ ID NO: 2607694 - RNA, 19 nt, Artificial Sequence
  Description of Artificial Sequence: Synthetic oligonucleotide
ugccgacuugcuguucucg

SEQ ID NO: 2607695 - RNA, 19 nt, Artificial Sequence
  Description of Artificial Sequence: Synthetic oligonucleotide
gcaggugccacacgagggg

SEQ ID NO: 2607696 - RNA, 19 nt, Artificial Sequence
  Description of Artificial Sequence: Synthetic oligonucleotide
cuacugugcgagcuuccag

SEQ ID NO: 2607697 - RNA, 19 nt, Artificial Sequence
  Description of Artificial Sequence: Synthetic oligonucleotide
cuugcgcugcuccuuccgc

SEQ ID NO: 2607698 - RNA, 19 nt, Artificial Sequence
  Description of Artificial Sequence: Synthetic oligonucleotide
gcauccucuacugugcgag

SEQ ID NO: 2607699 - RNA, 19 nt, Artificial Sequence
  Description of Artificial Sequence: Synthetic oligonucleotide
cuucagcccuccgugcucg

SEQ ID NO: 2607700 - RNA, 19 nt, Artificial Sequence
  Description of Artificial Sequence: Synthetic oligonucleotide
ucgggcuuuguuccaucac

SEQ ID NO: 2607701 - RNA, 19 nt, Artificial Sequence
  Description of Artificial Sequence: Synthetic oligonucleotide
ugaaggcugcacgcaugcg

SEQ ID NO: 2607702 - RNA, 19 nt, Artificial Sequence
  Description of Artificial Sequence: Synthetic oligonucleotide
cucuacugugcgagcuucc

SEQ ID NO: 2607703 - RNA, 19 nt, Artificial Sequence
  Description of Artificial Sequence: Synthetic oligonucleotide
accuccucgaaugcgguga

SEQ ID NO: 2607704 - RNA, 19 nt, Artificial Sequence
  Description of Artificial Sequence: Synthetic oligonucleotide
cagggugccggucugcauc

SEQ ID NO: 2607705 - RNA, 19 nt, Artificial Sequence
  Description of Artificial Sequence: Synthetic oligonucleotide
aguccucaaucugcgcgcg

SEQ ID NO: 2607706 - RNA, 19 nt, Artificial Sequence
  Description of Artificial Sequence: Synthetic oligonucleotide
gcaaccacuccuucuucag

SEQ ID NO: 2607707 - RNA, 19 nt, Artificial Sequence
  Description of Artificial Sequence: Synthetic oligonucleotide
uugcgcugcuccuuccgca

SEQ ID NO: 2607708 - RNA, 19 nt, Artificial Sequence
  Description of Artificial Sequence: Synthetic oligonucleotide
uucucgcccuggaacuucu

SEQ ID NO: 2607709 - RNA, 19 nt, Artificial Sequence
  Description of Artificial Sequence: Synthetic oligonucleotide
gguguauugaagggcaaca

SEQ ID NO: 2607710 - RNA, 19 nt, Artificial Sequence
  Description of Artificial Sequence: Synthetic oligonucleotide
cuucuugggcaucccucag

SEQ ID NO: 2607711 - RNA, 19 nt, Artificial Sequence
  Description of Artificial Sequence: Synthetic oligonucleotide
gcaugcggcgcucagggug

SEQ ID NO: 2607712 - RNA, 19 nt, Artificial Sequence
  Description of Artificial Sequence: Synthetic oligonucleotide
ugcucucugcgcagggagu

SEQ ID NO: 2607713 - RNA, 19 nt, Artificial Sequence
  Description of Artificial Sequence: Synthetic oligonucleotide
caucacuuggguguauuga

SEQ ID NO: 2607714 - RNA, 19 nt, Artificial Sequence
  Description of Artificial Sequence: Synthetic oligonucleotide
gcgcgggugaccuuggcag

SEQ ID NO: 2607715 - RNA, 19 nt, Artificial Sequence
  Description of Artificial Sequence: Synthetic oligonucleotide
gagcacugcuauggcaucc

SEQ ID NO: 2607716 - RNA, 19 nt, Artificial Sequence
  Description of Artificial Sequence: Synthetic oligonucleotide
cacugagcacugcuauggc

SEQ ID NO: 2607717 - RNA, 19 nt, Artificial Sequence
  Description of Artificial Sequence: Synthetic oligonucleotide
ugcgcagggaguccucaau

SEQ ID NO: 2607718 - RNA, 19 nt, Artificial Sequence
  Description of Artificial Sequence: Synthetic oligonucleotide
cucgcccuggaacuucuug

SEQ ID NO: 2607719 - RNA, 19 nt, Artificial Sequence
  Description of Artificial Sequence: Synthetic oligonucleotide
uccacacgcugcucucugc

SEQ ID NO: 2607720 - RNA, 19 nt, Artificial Sequence
  Description of Artificial Sequence: Synthetic oligonucleotide
uggguguauugaagggcaa

SEQ ID NO: 2607721 - RNA, 19 nt, Artificial Sequence
  Description of Artificial Sequence: Synthetic oligonucleotide
agccgcggcaguuguaccu

SEQ ID NO: 2607722 - RNA, 19 nt, Artificial Sequence
  Description of Artificial Sequence: Synthetic oligonucleotide
cauccucuacugugcgagc

SEQ ID NO: 2607723 - RNA, 19 nt, Artificial Sequence
  Description of Artificial Sequence: Synthetic oligonucleotide
caggcgccgguucagguuc

SEQ ID NO: 2607724 - RNA, 19 nt, Artificial Sequence
  Description of Artificial Sequence: Synthetic oligonucleotide
auccucugccacacugagc

SEQ ID NO: 2607725 - RNA, 19 nt, Artificial Sequence
  Description of Artificial Sequence: Synthetic oligonucleotide
auccucuacugugcgagcu

SEQ ID NO: 2607726 - RNA, 19 nt, Artificial Sequence
  Description of Artificial Sequence: Synthetic oligonucleotide
uaccuccucgaaugcggug

SEQ ID NO: 2607727 - RNA, 19 nt, Artificial Sequence
  Description of Artificial Sequence: Synthetic oligonucleotide
ggcaggugccacacgaggg

SEQ ID NO: 2607728 - RNA, 19 nt, Artificial Sequence
  Description of Artificial Sequence: Synthetic oligonucleotide
aggugccacacgaggggcc

SEQ ID NO: 2607729 - RNA, 19 nt, Artificial Sequence
  Description of Artificial Sequence: Synthetic oligonucleotide
uggcuucagcccuccgugc

SEQ ID NO: 2607730 - RNA, 19 nt, Artificial Sequence
  Description of Artificial Sequence: Synthetic oligonucleotide
cugagcacugcuauggcau

SEQ ID NO: 2607731 - RNA, 19 nt, Artificial Sequence
  Description of Artificial Sequence: Synthetic oligonucleotide
cuugagccgugaguccucc

SEQ ID NO: 2607732 - RNA, 19 nt, Artificial Sequence
  Description of Artificial Sequence: Synthetic oligonucleotide
gcgacagccgcauguuggg

SEQ ID NO: 2607733 - RNA, 19 nt, Artificial Sequence
  Description of Artificial Sequence: Synthetic oligonucleotide
ggccuugccgcccuugagc

SEQ ID NO: 2607734 - RNA, 19 nt, Artificial Sequence
  Description of Artificial Sequence: Synthetic oligonucleotide
uccucuacugugcgagcuu

SEQ ID NO: 2607735 - RNA, 19 nt, Artificial Sequence
  Description of Artificial Sequence: Synthetic oligonucleotide
cuugggcaucccucagcag

SEQ ID NO: 2607736 - RNA, 19 nt, Artificial Sequence
  Description of Artificial Sequence: Synthetic oligonucleotide
ggcaacacacgcugguuca

SEQ ID NO: 2607737 - RNA, 19 nt, Artificial Sequence
  Description of Artificial Sequence: Synthetic oligonucleotide
gacagccgcauguuggggu

SEQ ID NO: 2607738 - RNA, 19 nt, Artificial Sequence
  Description of Artificial Sequence: Synthetic oligonucleotide
caguaagcaucuuccagcu

SEQ ID NO: 2607739 - RNA, 19 nt, Artificial Sequence
  Description of Artificial Sequence: Synthetic oligonucleotide
uccgcaucacguguuuguc

SEQ ID NO: 2607740 - RNA, 19 nt, Artificial Sequence
  Description of Artificial Sequence: Synthetic oligonucleotide
cacgcugcucucugcgcag

SEQ ID NO: 2607741 - RNA, 19 nt, Artificial Sequence
  Description of Artificial Sequence: Synthetic oligonucleotide
ucgggcagcugccgacuug

SEQ ID NO: 2607742 - RNA, 19 nt, Artificial Sequence
  Description of Artificial Sequence: Synthetic oligonucleotide
cucaaucugcgcgcgggug

SEQ ID NO: 2607743 - RNA, 19 nt, Artificial Sequence
  Description of Artificial Sequence: Synthetic oligonucleotide
aggcugcacgcaugcggcg

SEQ ID NO: 2607744 - RNA, 19 nt, Artificial Sequence
  Description of Artificial Sequence: Synthetic oligonucleotide
ugggguucuccugcuucag

SEQ ID NO: 2607745 - RNA, 19 nt, Artificial Sequence
  Description of Artificial Sequence: Synthetic oligonucleotide
ccucgaaugcggugaaggc

SEQ ID NO: 2607746 - RNA, 19 nt, Artificial Sequence
  Description of Artificial Sequence: Synthetic oligonucleotide
gccuugccgcccuugagcc

SEQ ID NO: 2607747 - RNA, 19 nt, Artificial Sequence
  Description of Artificial Sequence: Synthetic oligonucleotide
ucucugcgcagggaguccu

SEQ ID NO: 2607748 - RNA, 19 nt, Artificial Sequence
  Description of Artificial Sequence: Synthetic oligonucleotide
uccuuccgcaucacguguu

SEQ ID NO: 2607749 - RNA, 19 nt, Artificial Sequence
  Description of Artificial Sequence: Synthetic oligonucleotide
caggcgucgcuucuccuuc

SEQ ID NO: 2607750 - RNA, 19 nt, Artificial Sequence
  Description of Artificial Sequence: Synthetic oligonucleotide
ggcaguuguaccuccucga

SEQ ID NO: 2607751 - RNA, 19 nt, Artificial Sequence
  Description of Artificial Sequence: Synthetic oligonucleotide
gcauguugggguucuccug

SEQ ID NO: 2607752 - RNA, 19 nt, Artificial Sequence
  Description of Artificial Sequence: Synthetic oligonucleotide
caucacguguuuguccuca

SEQ ID NO: 2607753 - RNA, 19 nt, Artificial Sequence
  Description of Artificial Sequence: Synthetic oligonucleotide
ucagcccuccgugcucggg

SEQ ID NO: 2607754 - RNA, 19 nt, Artificial Sequence
  Description of Artificial Sequence: Synthetic oligonucleotide
gaacuucuugggcaucccu

SEQ ID NO: 2607755 - RNA, 19 nt, Artificial Sequence
  Description of Artificial Sequence: Synthetic oligonucleotide
guccucauccuuccaguaa

SEQ ID NO: 2607756 - RNA, 19 nt, Artificial Sequence
  Description of Artificial Sequence: Synthetic oligonucleotide
cagcccuccgugcucgggc

SEQ ID NO: 2607757 - RNA, 19 nt, Artificial Sequence
  Description of Artificial Sequence: Synthetic oligonucleotide
gccgccuuggcuucagccc

SEQ ID NO: 2607758 - RNA, 19 nt, Artificial Sequence
  Description of Artificial Sequence: Synthetic oligonucleotide
gaccuuggcaggugccaca

SEQ ID NO: 2607759 - RNA, 19 nt, Artificial Sequence
  Description of Artificial Sequence: Synthetic oligonucleotide
ugcgcgcgggugaccuugg

SEQ ID NO: 2607760 - RNA, 19 nt, Artificial Sequence
  Description of Artificial Sequence: Synthetic oligonucleotide
cugcuauggcauccucuac

SEQ ID NO: 2607761 - RNA, 19 nt, Artificial Sequence
  Description of Artificial Sequence: Synthetic oligonucleotide
ugccggucugcauccucug

SEQ ID NO: 2607762 - RNA, 19 nt, Artificial Sequence
  Description of Artificial Sequence: Synthetic oligonucleotide
auccuuccaguaagcaucu

SEQ ID NO: 2607763 - RNA, 19 nt, Artificial Sequence
  Description of Artificial Sequence: Synthetic oligonucleotide
agcacugcuauggcauccu

SEQ ID NO: 2607764 - RNA, 19 nt, Artificial Sequence
  Description of Artificial Sequence: Synthetic oligonucleotide
gcagcugccgacuugcugu

SEQ ID NO: 2607765 - RNA, 19 nt, Artificial Sequence
  Description of Artificial Sequence: Synthetic oligonucleotide
cugcuccuuccgcaucacg

SEQ ID NO: 2607766 - RNA, 19 nt, Artificial Sequence
  Description of Artificial Sequence: Synthetic oligonucleotide
uccaucacuuggguguauu

SEQ ID NO: 2607767 - RNA, 19 nt, Artificial Sequence
  Description of Artificial Sequence: Synthetic oligonucleotide
uguugggguucuccugcuu

SEQ ID NO: 2607768 - RNA, 19 nt, Artificial Sequence
  Description of Artificial Sequence: Synthetic oligonucleotide
agccgugaguccuccuccu

SEQ ID NO: 2607769 - RNA, 19 nt, Artificial Sequence
  Description of Artificial Sequence: Synthetic oligonucleotide
uucagcccuccgugcucgg

SEQ ID NO: 2607770 - RNA, 19 nt, Artificial Sequence
  Description of Artificial Sequence: Synthetic oligonucleotide
caggugccacacgaggggc

SEQ ID NO: 2607771 - RNA, 19 nt, Artificial Sequence
  Description of Artificial Sequence: Synthetic oligonucleotide
cacgaggggccuugccgcc

SEQ ID NO: 2607772 - RNA, 19 nt, Artificial Sequence
  Description of Artificial Sequence: Synthetic oligonucleotide
acgaggggccuugccgccc

SEQ ID NO: 2607773 - RNA, 19 nt, Artificial Sequence
  Description of Artificial Sequence: Synthetic oligonucleotide
gugaguccuccuccuccag

SEQ ID NO: 2607774 - RNA, 19 nt, Artificial Sequence
  Description of Artificial Sequence: Synthetic oligonucleotide
cacgcaugcggcgcucagg

SEQ ID NO: 2607775 - RNA, 19 nt, Artificial Sequence
  Description of Artificial Sequence: Synthetic oligonucleotide
caaucugcgcgcgggugac

SEQ ID NO: 2607776 - RNA, 19 nt, Artificial Sequence
  Description of Artificial Sequence: Synthetic oligonucleotide
gggcaacacacgcugguuc

SEQ ID NO: 2607777 - RNA, 19 nt, Artificial Sequence
  Description of Artificial Sequence: Synthetic oligonucleotide
cuguucucgcccuggaacu

SEQ ID NO: 2607778 - RNA, 19 nt, Artificial Sequence
  Description of Artificial Sequence: Synthetic oligonucleotide
gccgacuugcuguucucgc

SEQ ID NO: 2607779 - RNA, 19 nt, Artificial Sequence
  Description of Artificial Sequence: Synthetic oligonucleotide
gcuucagcugcgacagccg

SEQ ID NO: 2607780 - RNA, 19 nt, Artificial Sequence
  Description of Artificial Sequence: Synthetic oligonucleotide
cuuccgcaucacguguuug

SEQ ID NO: 2607781 - RNA, 19 nt, Artificial Sequence
  Description of Artificial Sequence: Synthetic oligonucleotide
ggugaaggcugcacgcaug

SEQ ID NO: 2607782 - RNA, 19 nt, Artificial Sequence
  Description of Artificial Sequence: Synthetic oligonucleotide
aucacguguuuguccucau

SEQ ID NO: 2607783 - RNA, 19 nt, Artificial Sequence
  Description of Artificial Sequence: Synthetic oligonucleotide
acacgcugguucauagggu

SEQ ID NO: 2607784 - RNA, 19 nt, Artificial Sequence
  Description of Artificial Sequence: Synthetic oligonucleotide
ccgugaguccuccuccucc

SEQ ID NO: 2607785 - RNA, 19 nt, Artificial Sequence
  Description of Artificial Sequence: Synthetic oligonucleotide
cugcgacagccgcauguug

SEQ ID NO: 2607786 - RNA, 19 nt, Artificial Sequence
  Description of Artificial Sequence: Synthetic oligonucleotide
gcaucagcugccgccuugg

SEQ ID NO: 2607787 - RNA, 19 nt, Artificial Sequence
  Description of Artificial Sequence: Synthetic oligonucleotide
cucucugcgcagggagucc

SEQ ID NO: 2607788 - RNA, 19 nt, Artificial Sequence
  Description of Artificial Sequence: Synthetic oligonucleotide
aggcgcugugucuccuucu

SEQ ID NO: 2607789 - RNA, 19 nt, Artificial Sequence
  Description of Artificial Sequence: Synthetic oligonucleotide
ccgcaucacguguuugucc

SEQ ID NO: 2607790 - RNA, 19 nt, Artificial Sequence
  Description of Artificial Sequence: Synthetic oligonucleotide
ggcagcugccgacuugcug

SEQ ID NO: 2607791 - RNA, 19 nt, Artificial Sequence
  Description of Artificial Sequence: Synthetic oligonucleotide
cucgaaugcggugaaggcu

SEQ ID NO: 2607792 - RNA, 19 nt, Artificial Sequence
  Description of Artificial Sequence: Synthetic oligonucleotide
ggguguauugaagggcaac

SEQ ID NO: 2607793 - RNA, 19 nt, Artificial Sequence
  Description of Artificial Sequence: Synthetic oligonucleotide
cgacuugcuguucucgccc

SEQ ID NO: 2607794 - RNA, 19 nt, Artificial Sequence
  Description of Artificial Sequence: Synthetic oligonucleotide
agcccuccgugcucgggca

SEQ ID NO: 2607795 - RNA, 19 nt, Artificial Sequence
  Description of Artificial Sequence: Synthetic oligonucleotide
caucagcugccgccuuggc

SEQ ID NO: 2607796 - RNA, 19 nt, Artificial Sequence
  Description of Artificial Sequence: Synthetic oligonucleotide
uguucucgcccuggaacuu

SEQ ID NO: 2607797 - RNA, 19 nt, Artificial Sequence
  Description of Artificial Sequence: Synthetic oligonucleotide
uccaggcgucgcuucuccu

SEQ ID NO: 2607798 - RNA, 19 nt, Artificial Sequence
  Description of Artificial Sequence: Synthetic oligonucleotide
ucagggugccggucugcau

SEQ ID NO: 2607799 - RNA, 19 nt, Artificial Sequence
  Description of Artificial Sequence: Synthetic oligonucleotide
ccagcgguagcuccaggug

SEQ ID NO: 2607800 - RNA, 19 nt, Artificial Sequence
  Description of Artificial Sequence: Synthetic oligonucleotide
ccacuccuucuucagcagc

SEQ ID NO: 2607801 - RNA, 19 nt, Artificial Sequence
  Description of Artificial Sequence: Synthetic oligonucleotide
gagcgcaaccacuccuucu

SEQ ID NO: 2607802 - RNA, 19 nt, Artificial Sequence
  Description of Artificial Sequence: Synthetic oligonucleotide
acgcugguucauaggguug

SEQ ID NO: 2607803 - RNA, 19 nt, Artificial Sequence
  Description of Artificial Sequence: Synthetic oligonucleotide
guacucgggcuuuguucca

SEQ ID NO: 2607804 - RNA, 19 nt, Artificial Sequence
  Description of Artificial Sequence: Synthetic oligonucleotide
guucucgcccuggaacuuc

SEQ ID NO: 2607805 - RNA, 19 nt, Artificial Sequence
  Description of Artificial Sequence: Synthetic oligonucleotide
ggaacuucuugggcauccc

SEQ ID NO: 2607806 - RNA, 19 nt, Artificial Sequence
  Description of Artificial Sequence: Synthetic oligonucleotide
ccuugcgcugcuccuuccg

SEQ ID NO: 2607807 - RNA, 19 nt, Artificial Sequence
  Description of Artificial Sequence: Synthetic oligonucleotide
uugagccgugaguccuccu

SEQ ID NO: 2607808 - RNA, 19 nt, Artificial Sequence
  Description of Artificial Sequence: Synthetic oligonucleotide
gcaguuguaccuccucgaa

SEQ ID NO: 2607809 - RNA, 19 nt, Artificial Sequence
  Description of Artificial Sequence: Synthetic oligonucleotide
ugcacgcaugcggcgcuca

SEQ ID NO: 2607810 - RNA, 19 nt, Artificial Sequence
  Description of Artificial Sequence: Synthetic oligonucleotide
cagguucuccuccagcggu

SEQ ID NO: 2607811 - RNA, 19 nt, Artificial Sequence
  Description of Artificial Sequence: Synthetic oligonucleotide
cagccgcggcaguuguacc

SEQ ID NO: 2607812 - RNA, 19 nt, Artificial Sequence
  Description of Artificial Sequence: Synthetic oligonucleotide
uucagccgcggcaguugua

SEQ ID NO: 2607813 - RNA, 19 nt, Artificial Sequence
  Description of Artificial Sequence: Synthetic oligonucleotide
gcccuggaacuucuugggc

SEQ ID NO: 2607814 - RNA, 19 nt, Artificial Sequence
  Description of Artificial Sequence: Synthetic oligonucleotide
cacgcugguucauaggguu

SEQ ID NO: 2607815 - RNA, 19 nt, Artificial Sequence
  Description of Artificial Sequence: Synthetic oligonucleotide
cugcgcgcgggugaccuug

SEQ ID NO: 2607816 - RNA, 19 nt, Artificial Sequence
  Description of Artificial Sequence: Synthetic oligonucleotide
acgcugcucucugcgcagg

SEQ ID NO: 2607817 - RNA, 19 nt, Artificial Sequence
  Description of Artificial Sequence: Synthetic oligonucleotide
cggcaguuguaccuccucg

SEQ ID NO: 2607818 - RNA, 19 nt, Artificial Sequence
  Description of Artificial Sequence: Synthetic oligonucleotide
cugccgacuugcuguucuc

SEQ ID NO: 2607819 - RNA, 19 nt, Artificial Sequence
  Description of Artificial Sequence: Synthetic oligonucleotide
gugcgagcuuccaggcugc

SEQ ID NO: 2607820 - RNA, 19 nt, Artificial Sequence
  Description of Artificial Sequence: Synthetic oligonucleotide
cuccaacugcuccaggcgu

SEQ ID NO: 2607821 - RNA, 19 nt, Artificial Sequence
  Description of Artificial Sequence: Synthetic oligonucleotide
cugauuccacacgcugcuc

SEQ ID NO: 2607822 - RNA, 19 nt, Artificial Sequence
  Description of Artificial Sequence: Synthetic oligonucleotide
gaaugcggugaaggcugca

SEQ ID NO: 2607823 - RNA, 19 nt, Artificial Sequence
  Description of Artificial Sequence: Synthetic oligonucleotide
agcuguacucgggcuuugu

SEQ ID NO: 2607824 - RNA, 19 nt, Artificial Sequence
  Description of Artificial Sequence: Synthetic oligonucleotide
aggcgucgcuucuccuucu

SEQ ID NO: 2607825 - RNA, 19 nt, Artificial Sequence
  Description of Artificial Sequence: Synthetic oligonucleotide
agggcaacacacgcugguu

SEQ ID NO: 2607826 - RNA, 19 nt, Artificial Sequence
  Description of Artificial Sequence: Synthetic oligonucleotide
agccgcauguugggguucu

SEQ ID NO: 2607827 - RNA, 19 nt, Artificial Sequence
  Description of Artificial Sequence: Synthetic oligonucleotide
gcgcagggaguccucaauc

SEQ ID NO: 2607828 - RNA, 19 nt, Artificial Sequence
  Description of Artificial Sequence: Synthetic oligonucleotide
cagcugcuucagcugcgac

SEQ ID NO: 2607829 - RNA, 19 nt, Artificial Sequence
  Description of Artificial Sequence: Synthetic oligonucleotide
ggagcgcaaccacuccuuc

SEQ ID NO: 2607830 - RNA, 19 nt, Artificial Sequence
  Description of Artificial Sequence: Synthetic oligonucleotide
cuugccgcccuugagccgu

SEQ ID NO: 2607831 - RNA, 19 nt, Artificial Sequence
  Description of Artificial Sequence: Synthetic oligonucleotide
guuccaucacuugggugua

SEQ ID NO: 2607832 - RNA, 19 nt, Artificial Sequence
  Description of Artificial Sequence: Synthetic oligonucleotide
aggcugcccucuuccugca

SEQ ID NO: 2607833 - RNA, 19 nt, Artificial Sequence
  Description of Artificial Sequence: Synthetic oligonucleotide
ugcgagcuuccaggcugcc

SEQ ID NO: 2607834 - RNA, 19 nt, Artificial Sequence
  Description of Artificial Sequence: Synthetic oligonucleotide
agcugccgacuugcuguuc

SEQ ID NO: 2607835 - RNA, 19 nt, Artificial Sequence
  Description of Artificial Sequence: Synthetic oligonucleotide
cuccucgaaugcggugaag

SEQ ID NO: 2607836 - RNA, 19 nt, Artificial Sequence
  Description of Artificial Sequence: Synthetic oligonucleotide
ggcugcacgcaugcggcgc

SEQ ID NO: 2607837 - RNA, 19 nt, Artificial Sequence
  Description of Artificial Sequence: Synthetic oligonucleotide
caacugcuccaggcgucgc

SEQ ID NO: 2607838 - RNA, 19 nt, Artificial Sequence
  Description of Artificial Sequence: Synthetic oligonucleotide
gcccuugagccgugagucc

SEQ ID NO: 2607839 - RNA, 19 nt, Artificial Sequence
  Description of Artificial Sequence: Synthetic oligonucleotide
ggcauccucuacugugcga

SEQ ID NO: 2607840 - RNA, 19 nt, Artificial Sequence
  Description of Artificial Sequence: Synthetic oligonucleotide
augcggcgcucagggugcc

SEQ ID NO: 2607841 - RNA, 19 nt, Artificial Sequence
  Description of Artificial Sequence: Synthetic oligonucleotide
ugcggcgcucagggugccg

SEQ ID NO: 2607842 - RNA, 19 nt, Artificial Sequence
  Description of Artificial Sequence: Synthetic oligonucleotide
aucccucagcaggcucuuc

SEQ ID NO: 2607843 - RNA, 19 nt, Artificial Sequence
  Description of Artificial Sequence: Synthetic oligonucleotide
ggcaucccucagcaggcuc

SEQ ID NO: 2607844 - RNA, 19 nt, Artificial Sequence
  Description of Artificial Sequence: Synthetic oligonucleotide
cuauggcauccucuacugu

SEQ ID NO: 2607845 - RNA, 19 nt, Artificial Sequence
  Description of Artificial Sequence: Synthetic oligonucleotide
uuccaucacuuggguguau

SEQ ID NO: 2607846 - RNA, 19 nt, Artificial Sequence
  Description of Artificial Sequence: Synthetic oligonucleotide
gcugccgacuugcuguucu

SEQ ID NO: 2607847 - RNA, 19 nt, Artificial Sequence
  Description of Artificial Sequence: Synthetic oligonucleotide
ccucuacugugcgagcuuc

SEQ ID NO: 2607848 - RNA, 19 nt, Artificial Sequence
  Description of Artificial Sequence: Synthetic oligonucleotide
gcucucugcgcagggaguc

SEQ ID NO: 2607849 - RNA, 19 nt, Artificial Sequence
  Description of Artificial Sequence: Synthetic oligonucleotide
uugccgcccuugagccgug

SEQ ID NO: 2607850 - RNA, 19 nt, Artificial Sequence
  Description of Artificial Sequence: Synthetic oligonucleotide
ggugccggucugcauccuc

SEQ ID NO: 2607851 - RNA, 19 nt, Artificial Sequence
  Description of Artificial Sequence: Synthetic oligonucleotide
gcggcgcucagggugccgg

SEQ ID NO: 2607852 - RNA, 19 nt, Artificial Sequence
  Description of Artificial Sequence: Synthetic oligonucleotide
ccuugccgcccuugagccg

SEQ ID NO: 2607853 - RNA, 19 nt, Artificial Sequence
  Description of Artificial Sequence: Synthetic oligonucleotide
ccgcauguugggguucucc

SEQ ID NO: 2607854 - RNA, 19 nt, Artificial Sequence
  Description of Artificial Sequence: Synthetic oligonucleotide
gugcucgggcagcugccga

SEQ ID NO: 2607855 - RNA, 19 nt, Artificial Sequence
  Description of Artificial Sequence: Synthetic oligonucleotide
cgcccuugagccgugaguc

SEQ ID NO: 2607856 - RNA, 19 nt, Artificial Sequence
  Description of Artificial Sequence: Synthetic oligonucleotide
agguucuccuccagcggua

SEQ ID NO: 2607857 - RNA, 19 nt, Artificial Sequence
  Description of Artificial Sequence: Synthetic oligonucleotide
cuucagccgcggcaguugu

SEQ ID NO: 2607858 - RNA, 19 nt, Artificial Sequence
  Description of Artificial Sequence: Synthetic oligonucleotide
caacacacgcugguucaua

SEQ ID NO: 2607859 - RNA, 19 nt, Artificial Sequence
  Description of Artificial Sequence: Synthetic oligonucleotide
gcggcaguuguaccuccuc

SEQ ID NO: 2607860 - RNA, 19 nt, Artificial Sequence
  Description of Artificial Sequence: Synthetic oligonucleotide
gcacgcaugcggcgcucag

SEQ ID NO: 2607861 - RNA, 19 nt, Artificial Sequence
  Description of Artificial Sequence: Synthetic oligonucleotide
ggcuucagcccuccgugcu

SEQ ID NO: 2607862 - RNA, 19 nt, Artificial Sequence
  Description of Artificial Sequence: Synthetic oligonucleotide
cgaaugcggugaaggcugc

SEQ ID NO: 2607863 - RNA, 19 nt, Artificial Sequence
  Description of Artificial Sequence: Synthetic oligonucleotide
gcaucacguguuuguccuc

SEQ ID NO: 2607864 - RNA, 19 nt, Artificial Sequence
  Description of Artificial Sequence: Synthetic oligonucleotide
guaccuccucgaaugcggu

SEQ ID NO: 2607865 - RNA, 19 nt, Artificial Sequence
  Description of Artificial Sequence: Synthetic oligonucleotide
ccgugcucgggcagcugcc

SEQ ID NO: 2607866 - RNA, 19 nt, Artificial Sequence
  Description of Artificial Sequence: Synthetic oligonucleotide
ccacacgaggggccuugcc

SEQ ID NO: 2607867 - RNA, 19 nt, Artificial Sequence
  Description of Artificial Sequence: Synthetic oligonucleotide
ggggagcgcaaccacuccu

SEQ ID NO: 2607868 - RNA, 19 nt, Artificial Sequence
  Description of Artificial Sequence: Synthetic oligonucleotide
cgcaucacguguuuguccu

SEQ ID NO: 2607869 - RNA, 19 nt, Artificial Sequence
  Description of Artificial Sequence: Synthetic oligonucleotide
gcacugcuauggcauccuc

SEQ ID NO: 2607870 - RNA, 19 nt, Artificial Sequence
  Description of Artificial Sequence: Synthetic oligonucleotide
gccgcccuugagccgugag

SEQ ID NO: 2607871 - RNA, 19 nt, Artificial Sequence
  Description of Artificial Sequence: Synthetic oligonucleotide
cugcgcagggaguccucaa

SEQ ID NO: 2607872 - RNA, 19 nt, Artificial Sequence
  Description of Artificial Sequence: Synthetic oligonucleotide
ggcgucgcuucuccuucuc

SEQ ID NO: 2607873 - RNA, 19 nt, Artificial Sequence
  Description of Artificial Sequence: Synthetic oligonucleotide
gcgagcuuccaggcugccc

SEQ ID NO: 2607874 - RNA, 19 nt, Artificial Sequence
  Description of Artificial Sequence: Synthetic oligonucleotide
gcgcaaccacuccuucuuc

SEQ ID NO: 2607875 - RNA, 19 nt, Artificial Sequence
  Description of Artificial Sequence: Synthetic oligonucleotide
gguggcucuuggccuucuc

SEQ ID NO: 2607876 - RNA, 19 nt, Artificial Sequence
  Description of Artificial Sequence: Synthetic oligonucleotide
gcggugaaggcugcacgca

SEQ ID NO: 2607877 - RNA, 19 nt, Artificial Sequence
  Description of Artificial Sequence: Synthetic oligonucleotide
cugugcgagcuuccaggcu

SEQ ID NO: 2607878 - RNA, 19 nt, Artificial Sequence
  Description of Artificial Sequence: Synthetic oligonucleotide
cagccgcauguugggguuc

SEQ ID NO: 2607879 - RNA, 19 nt, Artificial Sequence
  Description of Artificial Sequence: Synthetic oligonucleotide
uccuuccaguaagcaucuu

SEQ ID NO: 2607880 - RNA, 19 nt, Artificial Sequence
  Description of Artificial Sequence: Synthetic oligonucleotide
ccuccagcgguagcuccag

SEQ ID NO: 2607881 - RNA, 19 nt, Artificial Sequence
  Description of Artificial Sequence: Synthetic oligonucleotide
ccgcggcaguuguaccucc

SEQ ID NO: 2607882 - RNA, 19 nt, Artificial Sequence
  Description of Artificial Sequence: Synthetic oligonucleotide
gccgugaguccuccuccuc

SEQ ID NO: 2607883 - RNA, 19 nt, Artificial Sequence
  Description of Artificial Sequence: Synthetic oligonucleotide
gccgcggcaguuguaccuc

SEQ ID NO: 2607884 - RNA, 19 nt, Artificial Sequence
  Description of Artificial Sequence: Synthetic oligonucleotide
cagcugcgacagccgcaug

SEQ ID NO: 2607885 - RNA, 19 nt, Artificial Sequence
  Description of Artificial Sequence: Synthetic oligonucleotide
cgugcucgggcagcugccg

SEQ ID NO: 2607886 - RNA, 19 nt, Artificial Sequence
  Description of Artificial Sequence: Synthetic oligonucleotide
cuccgugcucgggcagcug

SEQ ID NO: 2607887 - RNA, 19 nt, Artificial Sequence
  Description of Artificial Sequence: Synthetic oligonucleotide
cggucugcauccucugcca

SEQ ID NO: 2607888 - RNA, 19 nt, Artificial Sequence
  Description of Artificial Sequence: Synthetic oligonucleotide
gggcuuuguuccaucacuu

SEQ ID NO: 2607889 - RNA, 19 nt, Artificial Sequence
  Description of Artificial Sequence: Synthetic oligonucleotide
gcccuccgugcucgggcag

SEQ ID NO: 2607890 - RNA, 19 nt, Artificial Sequence
  Description of Artificial Sequence: Synthetic oligonucleotide
ugccgcccuugagccguga

SEQ ID NO: 2607891 - RNA, 19 nt, Artificial Sequence
  Description of Artificial Sequence: Synthetic oligonucleotide
gcugcuccuuccgcaucac

SEQ ID NO: 2607892 - RNA, 19 nt, Artificial Sequence
  Description of Artificial Sequence: Synthetic oligonucleotide
ggcgcugugucuccuucuu

SEQ ID NO: 2607893 - RNA, 19 nt, Artificial Sequence
  Description of Artificial Sequence: Synthetic oligonucleotide
gcgccgguucagguucucc

SEQ ID NO: 2607894 - RNA, 19 nt, Artificial Sequence
  Description of Artificial Sequence: Synthetic oligonucleotide
cgcauguugggguucuccu

SEQ ID NO: 2607895 - RNA, 19 nt, Artificial Sequence
  Description of Artificial Sequence: Synthetic oligonucleotide
aggcgccgguucagguucu

SEQ ID NO: 2607896 - RNA, 19 nt, Artificial Sequence
  Description of Artificial Sequence: Synthetic oligonucleotide
ggcgcucagggugccgguc

SEQ ID NO: 2607897 - RNA, 19 nt, Artificial Sequence
  Description of Artificial Sequence: Synthetic oligonucleotide
gcaggcgccgguucagguu

SEQ ID NO: 2607898 - RNA, 19 nt, Artificial Sequence
  Description of Artificial Sequence: Synthetic oligonucleotide
guagcuccagguggcucuu

SEQ ID NO: 2607899 - RNA, 19 nt, Artificial Sequence
  Description of Artificial Sequence: Synthetic oligonucleotide
ccuccucgaaugcggugaa

SEQ ID NO: 2607900 - RNA, 19 nt, Artificial Sequence
  Description of Artificial Sequence: Synthetic oligonucleotide
cguguuuguccucauccuu

SEQ ID NO: 2607901 - RNA, 19 nt, Artificial Sequence
  Description of Artificial Sequence: Synthetic oligonucleotide
gggagcgcaaccacuccuu

SEQ ID NO: 2607902 - RNA, 19 nt, Artificial Sequence
  Description of Artificial Sequence: Synthetic oligonucleotide
cagcugccgacuugcuguu

SEQ ID NO: 2607903 - RNA, 19 nt, Artificial Sequence
  Description of Artificial Sequence: Synthetic oligonucleotide
gcugcgacagccgcauguu

SEQ ID NO: 2607904 - RNA, 19 nt, Artificial Sequence
  Description of Artificial Sequence: Synthetic oligonucleotide
cgcgcgggugaccuuggca

SEQ ID NO: 2607905 - RNA, 19 nt, Artificial Sequence
  Description of Artificial Sequence: Synthetic oligonucleotide
gcgggugaccuuggcaggu

SEQ ID NO: 2607906 - RNA, 19 nt, Artificial Sequence
  Description of Artificial Sequence: Synthetic oligonucleotide
ccaggcgucgcuucuccuu

SEQ ID NO: 2607907 - RNA, 19 nt, Artificial Sequence
  Description of Artificial Sequence: Synthetic oligonucleotide
caucccucagcaggcucuu

SEQ ID NO: 2607908 - RNA, 19 nt, Artificial Sequence
  Description of Artificial Sequence: Synthetic oligonucleotide
ccucaaucugcgcgcgggu

SEQ ID NO: 2607909 - RNA, 19 nt, Artificial Sequence
  Description of Artificial Sequence: Synthetic oligonucleotide
cucgggcagcugccgacuu

SEQ ID NO: 2607910 - RNA, 19 nt, Artificial Sequence
  Description of Artificial Sequence: Synthetic oligonucleotide
cugcauccucugccacacu

SEQ ID NO: 2607911 - RNA, 19 nt, Artificial Sequence
  Description of Artificial Sequence: Synthetic oligonucleotide
cgguagcuccagguggcuc

SEQ ID NO: 2607912 - RNA, 19 nt, Artificial Sequence
  Description of Artificial Sequence: Synthetic oligonucleotide
cgggugaccuuggcaggug

SEQ ID NO: 2607913 - RNA, 19 nt, Artificial Sequence
  Description of Artificial Sequence: Synthetic oligonucleotide
cgcugguucauaggguugu

SEQ ID NO: 2607914 - RNA, 19 nt, Artificial Sequence
  Description of Artificial Sequence: Synthetic oligonucleotide
gcucgggcagcugccgacu

SEQ ID NO: 2607915 - RNA, 19 nt, Artificial Sequence
  Description of Artificial Sequence: Synthetic oligonucleotide
ccgcccuugagccgugagu

SEQ ID NO: 2607916 - RNA, 19 nt, Artificial Sequence
  Description of Artificial Sequence: Synthetic oligonucleotide
gcuuccaggcugcccucuu

SEQ ID NO: 2607917 - RNA, 19 nt, Artificial Sequence
  Description of Artificial Sequence: Synthetic oligonucleotide
ccuuccgcaucacguguuu

SEQ ID NO: 2607918 - RNA, 19 nt, Artificial Sequence
  Description of Artificial Sequence: Synthetic oligonucleotide
ggcgccgguucagguucuc

SEQ ID NO: 2607919 - RNA, 19 nt, Artificial Sequence
  Description of Artificial Sequence: Synthetic oligonucleotide
gcgcugugucuccuucuuu

SEQ ID NO: 2607920 - RNA, 19 nt, Artificial Sequence
  Description of Artificial Sequence: Synthetic oligonucleotide
gggcaucccucagcaggcu

SEQ ID NO: 2607921 - RNA, 19 nt, Artificial Sequence
  Description of Artificial Sequence: Synthetic oligonucleotide
gccgcauguugggguucuc

SEQ ID NO: 2607922 - RNA, 19 nt, Artificial Sequence
  Description of Artificial Sequence: Synthetic oligonucleotide
gaggggccuugccgcccuu

SEQ ID NO: 2607923 - RNA, 19 nt, Artificial Sequence
  Description of Artificial Sequence: Synthetic oligonucleotide
gugccacacgaggggccuu

SEQ ID NO: 2607924 - RNA, 19 nt, Artificial Sequence
  Description of Artificial Sequence: Synthetic oligonucleotide
gggcagcugccgacuugcu

SEQ ID NO: 2607925 - RNA, 19 nt, Artificial Sequence
  Description of Artificial Sequence: Synthetic oligonucleotide
cgcggcaguuguaccuccu

SEQ ID NO: 2607926 - RNA, 19 nt, Artificial Sequence
  Description of Artificial Sequence: Synthetic oligonucleotide
ccuccgugcucgggcagcu

SEQ ID NO: 2607927 - RNA, 19 nt, Artificial Sequence
  Description of Artificial Sequence: Synthetic oligonucleotide
cgaggggccuugccgcccu

SEQ ID NO: 2607928 - RNA, 19 nt, Artificial Sequence
  Description of Artificial Sequence: Synthetic oligonucleotide
cgcaugcggcgcucagggu

SEQ ID NO: 2607929 - RNA, 19 nt, Artificial Sequence
  Description of Artificial Sequence: Synthetic oligonucleotide
cggcgcucagggugccggu

SEQ ID NO: 2607930 - RNA, 19 nt, Artificial Sequence
  Description of Artificial Sequence: Synthetic oligonucleotide
auuagaacagcccuggggc

SEQ ID NO: 2607931 - RNA, 19 nt, Artificial Sequence
  Description of Artificial Sequence: Synthetic oligonucleotide
aaugucaacuuucacacug

SEQ ID NO: 2607932 - RNA, 19 nt, Artificial Sequence
  Description of Artificial Sequence: Synthetic oligonucleotide
aauuagaacagcccugggg

SEQ ID NO: 2607933 - RNA, 19 nt, Artificial Sequence
  Description of Artificial Sequence: Synthetic oligonucleotide
aacuuucacacuguuaucc

SEQ ID NO: 2607934 - RNA, 19 nt, Artificial Sequence
  Description of Artificial Sequence: Synthetic oligonucleotide
aagauuucuuguuggaugg

SEQ ID NO: 2607935 - RNA, 19 nt, Artificial Sequence
  Description of Artificial Sequence: Synthetic oligonucleotide
acuauucuaauacagagcu

SEQ ID NO: 2607936 - RNA, 19 nt, Artificial Sequence
  Description of Artificial Sequence: Synthetic oligonucleotide
gaagcaaagagacuuggcg

SEQ ID NO: 2607937 - RNA, 19 nt, Artificial Sequence
  Description of Artificial Sequence: Synthetic oligonucleotide
ucaacuuucacacuguuau

SEQ ID NO: 2607938 - RNA, 19 nt, Artificial Sequence
  Description of Artificial Sequence: Synthetic oligonucleotide
guuaacacuauucuaauac

SEQ ID NO: 2607939 - RNA, 19 nt, Artificial Sequence
  Description of Artificial Sequence: Synthetic oligonucleotide
acuguuauccuccagagga

SEQ ID NO: 2607940 - RNA, 19 nt, Artificial Sequence
  Description of Artificial Sequence: Synthetic oligonucleotide
aguccuaagaagcaaagag

SEQ ID NO: 2607941 - RNA, 19 nt, Artificial Sequence
  Description of Artificial Sequence: Synthetic oligonucleotide
aagaaugccgugcacaucu

SEQ ID NO: 2607942 - RNA, 19 nt, Artificial Sequence
  Description of Artificial Sequence: Synthetic oligonucleotide
aaggaauuagaacagcccu

SEQ ID NO: 2607943 - RNA, 19 nt, Artificial Sequence
  Description of Artificial Sequence: Synthetic oligonucleotide
uccuaagaagcaaagagac

SEQ ID NO: 2607944 - RNA, 19 nt, Artificial Sequence
  Description of Artificial Sequence: Synthetic oligonucleotide
gauguuguaaucccauggg

SEQ ID NO: 2607945 - RNA, 19 nt, Artificial Sequence
  Description of Artificial Sequence: Synthetic oligonucleotide
uaacacuauucuaauacag

SEQ ID NO: 2607946 - RNA, 19 nt, Artificial Sequence
  Description of Artificial Sequence: Synthetic oligonucleotide
aaagagaggcauuugcuca

SEQ ID NO: 2607947 - RNA, 19 nt, Artificial Sequence
  Description of Artificial Sequence: Synthetic oligonucleotide
aaaguuaacacuauucuaa

SEQ ID NO: 2607948 - RNA, 19 nt, Artificial Sequence
  Description of Artificial Sequence: Synthetic oligonucleotide
ucuucaacugaguuugacg

SEQ ID NO: 2607949 - RNA, 19 nt, Artificial Sequence
  Description of Artificial Sequence: Synthetic oligonucleotide
ugaaggaauuagaacagcc

SEQ ID NO: 2607950 - RNA, 19 nt, Artificial Sequence
  Description of Artificial Sequence: Synthetic oligonucleotide
ucugcauugggccucagca

SEQ ID NO: 2607951 - RNA, 19 nt, Artificial Sequence
  Description of Artificial Sequence: Synthetic oligonucleotide
uauucuaauacagagcuuc

SEQ ID NO: 2607952 - RNA, 19 nt, Artificial Sequence
  Description of Artificial Sequence: Synthetic oligonucleotide
cugaauaucugcauugggc

SEQ ID NO: 2607953 - RNA, 19 nt, Artificial Sequence
  Description of Artificial Sequence: Synthetic oligonucleotide
uaugcagagaacuggauaa

SEQ ID NO: 2607954 - RNA, 19 nt, Artificial Sequence
  Description of Artificial Sequence: Synthetic oligonucleotide
ucaggcuuuaugcagagaa

SEQ ID NO: 2607955 - RNA, 19 nt, Artificial Sequence
  Description of Artificial Sequence: Synthetic oligonucleotide
uuacuaagaguccuaagaa

SEQ ID NO: 2607956 - RNA, 19 nt, Artificial Sequence
  Description of Artificial Sequence: Synthetic oligonucleotide
ugucccugcgcauugaugc

SEQ ID NO: 2607957 - RNA, 19 nt, Artificial Sequence
  Description of Artificial Sequence: Synthetic oligonucleotide
uacuaagaguccuaagaag

SEQ ID NO: 2607958 - RNA, 19 nt, Artificial Sequence
  Description of Artificial Sequence: Synthetic oligonucleotide
uuaacacuauucuaauaca

SEQ ID NO: 2607959 - RNA, 19 nt, Artificial Sequence
  Description of Artificial Sequence: Synthetic oligonucleotide
cuuacuaagaguccuaaga

SEQ ID NO: 2607960 - RNA, 19 nt, Artificial Sequence
  Description of Artificial Sequence: Synthetic oligonucleotide
ugcgcauugaugcagccug

SEQ ID NO: 2607961 - RNA, 19 nt, Artificial Sequence
  Description of Artificial Sequence: Synthetic oligonucleotide
guuguaaucccauggggag

SEQ ID NO: 2607962 - RNA, 19 nt, Artificial Sequence
  Description of Artificial Sequence: Synthetic oligonucleotide
uguagcuucgucaggcugc

SEQ ID NO: 2607963 - RNA, 19 nt, Artificial Sequence
  Description of Artificial Sequence: Synthetic oligonucleotide
ugacugaagauucgaaugu

SEQ ID NO: 2607964 - RNA, 19 nt, Artificial Sequence
  Description of Artificial Sequence: Synthetic oligonucleotide
gaacuggauaaagagaggc

SEQ ID NO: 2607965 - RNA, 19 nt, Artificial Sequence
  Description of Artificial Sequence: Synthetic oligonucleotide
aagaagcaaagagacuugg

SEQ ID NO: 2607966 - RNA, 19 nt, Artificial Sequence
  Description of Artificial Sequence: Synthetic oligonucleotide
aaugccgugcacaucuuac

SEQ ID NO: 2607967 - RNA, 19 nt, Artificial Sequence
  Description of Artificial Sequence: Synthetic oligonucleotide
gaccaagauuucuuguugg

SEQ ID NO: 2607968 - RNA, 19 nt, Artificial Sequence
  Description of Artificial Sequence: Synthetic oligonucleotide
auguuguaaucccaugggg

SEQ ID NO: 2607969 - RNA, 19 nt, Artificial Sequence
  Description of Artificial Sequence: Synthetic oligonucleotide
aagagaggcauuugcucag

SEQ ID NO: 2607970 - RNA, 19 nt, Artificial Sequence
  Description of Artificial Sequence: Synthetic oligonucleotide
cauguuuguucccugcugg

SEQ ID NO: 2607971 - RNA, 19 nt, Artificial Sequence
  Description of Artificial Sequence: Synthetic oligonucleotide
ugguuuugacugaagauuc

SEQ ID NO: 2607972 - RNA, 19 nt, Artificial Sequence
  Description of Artificial Sequence: Synthetic oligonucleotide
aaaacgcccugguuuugac

SEQ ID NO: 2607973 - RNA, 19 nt, Artificial Sequence
  Description of Artificial Sequence: Synthetic oligonucleotide
gaaggaauuagaacagccc

SEQ ID NO: 2607974 - RNA, 19 nt, Artificial Sequence
  Description of Artificial Sequence: Synthetic oligonucleotide
auugaugcagccugaauau

SEQ ID NO: 2607975 - RNA, 19 nt, Artificial Sequence
  Description of Artificial Sequence: Synthetic oligonucleotide
uuuggaagucaugugagac

SEQ ID NO: 2607976 - RNA, 19 nt, Artificial Sequence
  Description of Artificial Sequence: Synthetic oligonucleotide
aaaacacuuucuucugagu

SEQ ID NO: 2607977 - RNA, 19 nt, Artificial Sequence
  Description of Artificial Sequence: Synthetic oligonucleotide
cacuauucuaauacagagc

SEQ ID NO: 2607978 - RNA, 19 nt, Artificial Sequence
  Description of Artificial Sequence: Synthetic oligonucleotide
uugacguguagcuucguca

SEQ ID NO: 2607979 - RNA, 19 nt, Artificial Sequence
  Description of Artificial Sequence: Synthetic oligonucleotide
ucugaggggaaccgguggg

SEQ ID NO: 2607980 - RNA, 19 nt, Artificial Sequence
  Description of Artificial Sequence: Synthetic oligonucleotide
uuggcgaucaggcuuuaug

SEQ ID NO: 2607981 - RNA, 19 nt, Artificial Sequence
  Description of Artificial Sequence: Synthetic oligonucleotide
ugacguguagcuucgucag

SEQ ID NO: 2607982 - RNA, 19 nt, Artificial Sequence
  Description of Artificial Sequence: Synthetic oligonucleotide
gacgaugggagcgacacag

SEQ ID NO: 2607983 - RNA, 19 nt, Artificial Sequence
  Description of Artificial Sequence: Synthetic oligonucleotide
uuaugcagagaacuggaua

SEQ ID NO: 2607984 - RNA, 19 nt, Artificial Sequence
  Description of Artificial Sequence: Synthetic oligonucleotide
uggcgaucaggcuuuaugc

SEQ ID NO: 2607985 - RNA, 19 nt, Artificial Sequence
  Description of Artificial Sequence: Synthetic oligonucleotide
uuguuggauggcaacggag

SEQ ID NO: 2607986 - RNA, 19 nt, Artificial Sequence
  Description of Artificial Sequence: Synthetic oligonucleotide
agcuucaagaaugccgugc

SEQ ID NO: 2607987 - RNA, 19 nt, Artificial Sequence
  Description of Artificial Sequence: Synthetic oligonucleotide
agcuucgucaggcugcgcg

SEQ ID NO: 2607988 - RNA, 19 nt, Artificial Sequence
  Description of Artificial Sequence: Synthetic oligonucleotide
ugaagauucgaaugucaac

SEQ ID NO: 2607989 - RNA, 19 nt, Artificial Sequence
  Description of Artificial Sequence: Synthetic oligonucleotide
gaagauucgaaugucaacu

SEQ ID NO: 2607990 - RNA, 19 nt, Artificial Sequence
  Description of Artificial Sequence: Synthetic oligonucleotide
agaauggcaagccccaaca

SEQ ID NO: 2607991 - RNA, 19 nt, Artificial Sequence
  Description of Artificial Sequence: Synthetic oligonucleotide
gaguuugacguguagcuuc

SEQ ID NO: 2607992 - RNA, 19 nt, Artificial Sequence
  Description of Artificial Sequence: Synthetic oligonucleotide
aggagggcaauucccggcc

SEQ ID NO: 2607993 - RNA, 19 nt, Artificial Sequence
  Description of Artificial Sequence: Synthetic oligonucleotide
gaaaguuaacacuauucua

SEQ ID NO: 2607994 - RNA, 19 nt, Artificial Sequence
  Description of Artificial Sequence: Synthetic oligonucleotide
uucaagaaugccgugcaca

SEQ ID NO: 2607995 - RNA, 19 nt, Artificial Sequence
  Description of Artificial Sequence: Synthetic oligonucleotide
acacuguuauccuccagag

SEQ ID NO: 2607996 - RNA, 19 nt, Artificial Sequence
  Description of Artificial Sequence: Synthetic oligonucleotide
ucaacugaguuugacgugu

SEQ ID NO: 2607997 - RNA, 19 nt, Artificial Sequence
  Description of Artificial Sequence: Synthetic oligonucleotide
ucuuacuaagaguccuaag

SEQ ID NO: 2607998 - RNA, 19 nt, Artificial Sequence
  Description of Artificial Sequence: Synthetic oligonucleotide
acguguagcuucgucaggc

SEQ ID NO: 2607999 - RNA, 19 nt, Artificial Sequence
  Description of Artificial Sequence: Synthetic oligonucleotide
gauucgaaugucaacuuuc

SEQ ID NO: 2608000 - RNA, 19 nt, Artificial Sequence
  Description of Artificial Sequence: Synthetic oligonucleotide
acuugagcaugguugucuc

SEQ ID NO: 2608001 - RNA, 19 nt, Artificial Sequence
  Description of Artificial Sequence: Synthetic oligonucleotide
aguuucuucaacugaguuu

SEQ ID NO: 2608002 - RNA, 19 nt, Artificial Sequence
  Description of Artificial Sequence: Synthetic oligonucleotide
aauucccggccuucugagg

SEQ ID NO: 2608003 - RNA, 19 nt, Artificial Sequence
  Description of Artificial Sequence: Synthetic oligonucleotide
agccugaauaucugcauug

SEQ ID NO: 2608004 - RNA, 19 nt, Artificial Sequence
  Description of Artificial Sequence: Synthetic oligonucleotide
uuuuggaagucaugugaga

SEQ ID NO: 2608005 - RNA, 19 nt, Artificial Sequence
  Description of Artificial Sequence: Synthetic oligonucleotide
uugagcaugguugucucgc

SEQ ID NO: 2608006 - RNA, 19 nt, Artificial Sequence
  Description of Artificial Sequence: Synthetic oligonucleotide
ucgggugauguuguaaucc

SEQ ID NO: 2608007 - RNA, 19 nt, Artificial Sequence
  Description of Artificial Sequence: Synthetic oligonucleotide
agaagcaaagagacuuggc

SEQ ID NO: 2608008 - RNA, 19 nt, Artificial Sequence
  Description of Artificial Sequence: Synthetic oligonucleotide
ggaauuagaacagcccugg

SEQ ID NO: 2608009 - RNA, 19 nt, Artificial Sequence
  Description of Artificial Sequence: Synthetic oligonucleotide
uggaagucaugugagacaa

SEQ ID NO: 2608010 - RNA, 19 nt, Artificial Sequence
  Description of Artificial Sequence: Synthetic oligonucleotide
agagcuucaagaaugccgu

SEQ ID NO: 2608011 - RNA, 19 nt, Artificial Sequence
  Description of Artificial Sequence: Synthetic oligonucleotide
ggugcagccaacuuucacc

SEQ ID NO: 2608012 - RNA, 19 nt, Artificial Sequence
  Description of Artificial Sequence: Synthetic oligonucleotide
gaauuagaacagcccuggg

SEQ ID NO: 2608013 - RNA, 19 nt, Artificial Sequence
  Description of Artificial Sequence: Synthetic oligonucleotide
uguaaucccauggggagcu

SEQ ID NO: 2608014 - RNA, 19 nt, Artificial Sequence
  Description of Artificial Sequence: Synthetic oligonucleotide
cacaucuuacuaagagucc

SEQ ID NO: 2608015 - RNA, 19 nt, Artificial Sequence
  Description of Artificial Sequence: Synthetic oligonucleotide
aagauucgaaugucaacuu

SEQ ID NO: 2608016 - RNA, 19 nt, Artificial Sequence
  Description of Artificial Sequence: Synthetic oligonucleotide
uucaacugaguuugacgug

SEQ ID NO: 2608017 - RNA, 19 nt, Artificial Sequence
  Description of Artificial Sequence: Synthetic oligonucleotide
uggauggcaacggaguuca

SEQ ID NO: 2608018 - RNA, 19 nt, Artificial Sequence
  Description of Artificial Sequence: Synthetic oligonucleotide
gguuuuggaagucauguga

SEQ ID NO: 2608019 - RNA, 19 nt, Artificial Sequence
  Description of Artificial Sequence: Synthetic oligonucleotide
uucugagugugucucccug

SEQ ID NO: 2608020 - RNA, 19 nt, Artificial Sequence
  Description of Artificial Sequence: Synthetic oligonucleotide
aaucucugaggggaaccgg

SEQ ID NO: 2608021 - RNA, 19 nt, Artificial Sequence
  Description of Artificial Sequence: Synthetic oligonucleotide
acuggauaaagagaggcau

SEQ ID NO: 2608022 - RNA, 19 nt, Artificial Sequence
  Description of Artificial Sequence: Synthetic oligonucleotide
uuuguucccugcugguugc

SEQ ID NO: 2608023 - RNA, 19 nt, Artificial Sequence
  Description of Artificial Sequence: Synthetic oligonucleotide
ugguugucucgcaugggcc

SEQ ID NO: 2608024 - RNA, 19 nt, Artificial Sequence
  Description of Artificial Sequence: Synthetic oligonucleotide
uuuaugcagagaacuggau

SEQ ID NO: 2608025 - RNA, 19 nt, Artificial Sequence
  Description of Artificial Sequence: Synthetic oligonucleotide
acaucuuacuaagaguccu

SEQ ID NO: 2608026 - RNA, 19 nt, Artificial Sequence
  Description of Artificial Sequence: Synthetic oligonucleotide
cauugaugcagccugaaua

SEQ ID NO: 2608027 - RNA, 19 nt, Artificial Sequence
  Description of Artificial Sequence: Synthetic oligonucleotide
cgaaugucaacuuucacac

SEQ ID NO: 2608028 - RNA, 19 nt, Artificial Sequence
  Description of Artificial Sequence: Synthetic oligonucleotide
uuugacguguagcuucguc

SEQ ID NO: 2608029 - RNA, 19 nt, Artificial Sequence
  Description of Artificial Sequence: Synthetic oligonucleotide
cuucaacugaguuugacgu

SEQ ID NO: 2608030 - RNA, 19 nt, Artificial Sequence
  Description of Artificial Sequence: Synthetic oligonucleotide
auggcaagccccaacauca

SEQ ID NO: 2608031 - RNA, 19 nt, Artificial Sequence
  Description of Artificial Sequence: Synthetic oligonucleotide
aggcuuuaugcagagaacu

SEQ ID NO: 2608032 - RNA, 19 nt, Artificial Sequence
  Description of Artificial Sequence: Synthetic oligonucleotide
cuaagaguccuaagaagca

SEQ ID NO: 2608033 - RNA, 19 nt, Artificial Sequence
  Description of Artificial Sequence: Synthetic oligonucleotide
ugcuuugggguucuuccga

SEQ ID NO: 2608034 - RNA, 19 nt, Artificial Sequence
  Description of Artificial Sequence: Synthetic oligonucleotide
aacuggauaaagagaggca

SEQ ID NO: 2608035 - RNA, 19 nt, Artificial Sequence
  Description of Artificial Sequence: Synthetic oligonucleotide
uucgaaugucaacuuucac

SEQ ID NO: 2608036 - RNA, 19 nt, Artificial Sequence
  Description of Artificial Sequence: Synthetic oligonucleotide
agcaugguugucucgcaug

SEQ ID NO: 2608037 - RNA, 19 nt, Artificial Sequence
  Description of Artificial Sequence: Synthetic oligonucleotide
uggacgaugggagcgacac

SEQ ID NO: 2608038 - RNA, 19 nt, Artificial Sequence
  Description of Artificial Sequence: Synthetic oligonucleotide
uggauaaagagaggcauuu

SEQ ID NO: 2608039 - RNA, 19 nt, Artificial Sequence
  Description of Artificial Sequence: Synthetic oligonucleotide
gauggcaacggaguucaug

SEQ ID NO: 2608040 - RNA, 19 nt, Artificial Sequence
  Description of Artificial Sequence: Synthetic oligonucleotide
ucgcaugggcccuucaugu

SEQ ID NO: 2608041 - RNA, 19 nt, Artificial Sequence
  Description of Artificial Sequence: Synthetic oligonucleotide
uuagaacagcccuggggcu

SEQ ID NO: 2608042 - RNA, 19 nt, Artificial Sequence
  Description of Artificial Sequence: Synthetic oligonucleotide
guuauccuccagaggaggg

SEQ ID NO: 2608043 - RNA, 19 nt, Artificial Sequence
  Description of Artificial Sequence: Synthetic oligonucleotide
cucagcaaucucugagggg

SEQ ID NO: 2608044 - RNA, 19 nt, Artificial Sequence
  Description of Artificial Sequence: Synthetic oligonucleotide
agacuuggcgaucaggcuu

SEQ ID NO: 2608045 - RNA, 19 nt, Artificial Sequence
  Description of Artificial Sequence: Synthetic oligonucleotide
aggugcagccaacuuucac

SEQ ID NO: 2608046 - RNA, 19 nt, Artificial Sequence
  Description of Artificial Sequence: Synthetic oligonucleotide
acagagcuucaagaaugcc

SEQ ID NO: 2608047 - RNA, 19 nt, Artificial Sequence
  Description of Artificial Sequence: Synthetic oligonucleotide
uaagaguccuaagaagcaa

SEQ ID NO: 2608048 - RNA, 19 nt, Artificial Sequence
  Description of Artificial Sequence: Synthetic oligonucleotide
uuauccuccagaggagggc

SEQ ID NO: 2608049 - RNA, 19 nt, Artificial Sequence
  Description of Artificial Sequence: Synthetic oligonucleotide
uaaucccauggggagcugg

SEQ ID NO: 2608050 - RNA, 19 nt, Artificial Sequence
  Description of Artificial Sequence: Synthetic oligonucleotide
guucauggagcugucuucc

SEQ ID NO: 2608051 - RNA, 19 nt, Artificial Sequence
  Description of Artificial Sequence: Synthetic oligonucleotide
aaacgcccugguuuugacu

SEQ ID NO: 2608052 - RNA, 19 nt, Artificial Sequence
  Description of Artificial Sequence: Synthetic oligonucleotide
ucugagggacaagagcccc

SEQ ID NO: 2608053 - RNA, 19 nt, Artificial Sequence
  Description of Artificial Sequence: Synthetic oligonucleotide
aguuugacguguagcuucg

SEQ ID NO: 2608054 - RNA, 19 nt, Artificial Sequence
  Description of Artificial Sequence: Synthetic oligonucleotide
aggaccaagauuucuuguu

SEQ ID NO: 2608055 - RNA, 19 nt, Artificial Sequence
  Description of Artificial Sequence: Synthetic oligonucleotide
cacacuguuauccuccaga

SEQ ID NO: 2608056 - RNA, 19 nt, Artificial Sequence
  Description of Artificial Sequence: Synthetic oligonucleotide
aguuaacacuauucuaaua

SEQ ID NO: 2608057 - RNA, 19 nt, Artificial Sequence
  Description of Artificial Sequence: Synthetic oligonucleotide
cuaagaagcaaagagacuu

SEQ ID NO: 2608058 - RNA, 19 nt, Artificial Sequence
  Description of Artificial Sequence: Synthetic oligonucleotide
agaacuggauaaagagagg

SEQ ID NO: 2608059 - RNA, 19 nt, Artificial Sequence
  Description of Artificial Sequence: Synthetic oligonucleotide
gagaauggcaagccccaac

SEQ ID NO: 2608060 - RNA, 19 nt, Artificial Sequence
  Description of Artificial Sequence: Synthetic oligonucleotide
gguucuuccgagcugcuac

SEQ ID NO: 2608061 - RNA, 19 nt, Artificial Sequence
  Description of Artificial Sequence: Synthetic oligonucleotide
caauucccggccuucugag

SEQ ID NO: 2608062 - RNA, 19 nt, Artificial Sequence
  Description of Artificial Sequence: Synthetic oligonucleotide
aagaguccuaagaagcaaa

SEQ ID NO: 2608063 - RNA, 19 nt, Artificial Sequence
  Description of Artificial Sequence: Synthetic oligonucleotide
uuguaaucccauggggagc

SEQ ID NO: 2608064 - RNA, 19 nt, Artificial Sequence
  Description of Artificial Sequence: Synthetic oligonucleotide
aggaauuagaacagcccug

SEQ ID NO: 2608065 - RNA, 19 nt, Artificial Sequence
  Description of Artificial Sequence: Synthetic oligonucleotide
agauucgaaugucaacuuu

SEQ ID NO: 2608066 - RNA, 19 nt, Artificial Sequence
  Description of Artificial Sequence: Synthetic oligonucleotide
acugaagauucgaauguca

SEQ ID NO: 2608067 - RNA, 19 nt, Artificial Sequence
  Description of Artificial Sequence: Synthetic oligonucleotide
agaguccuaagaagcaaag

SEQ ID NO: 2608068 - RNA, 19 nt, Artificial Sequence
  Description of Artificial Sequence: Synthetic oligonucleotide
ggcaacggaguucauggag

SEQ ID NO: 2608069 - RNA, 19 nt, Artificial Sequence
  Description of Artificial Sequence: Synthetic oligonucleotide
ccugcuuugggguucuucc

SEQ ID NO: 2608070 - RNA, 19 nt, Artificial Sequence
  Description of Artificial Sequence: Synthetic oligonucleotide
gcugcuaccucccugagaa

SEQ ID NO: 2608071 - RNA, 19 nt, Artificial Sequence
  Description of Artificial Sequence: Synthetic oligonucleotide
gacguguagcuucgucagg

SEQ ID NO: 2608072 - RNA, 19 nt, Artificial Sequence
  Description of Artificial Sequence: Synthetic oligonucleotide
gugauguuguaaucccaug

SEQ ID NO: 2608073 - RNA, 19 nt, Artificial Sequence
  Description of Artificial Sequence: Synthetic oligonucleotide
cacuguuauccuccagagg

SEQ ID NO: 2608074 - RNA, 19 nt, Artificial Sequence
  Description of Artificial Sequence: Synthetic oligonucleotide
guccuaagaagcaaagaga

SEQ ID NO: 2608075 - RNA, 19 nt, Artificial Sequence
  Description of Artificial Sequence: Synthetic oligonucleotide
ggaccaagauuucuuguug

SEQ ID NO: 2608076 - RNA, 19 nt, Artificial Sequence
  Description of Artificial Sequence: Synthetic oligonucleotide
cugaagauucgaaugucaa

SEQ ID NO: 2608077 - RNA, 19 nt, Artificial Sequence
  Description of Artificial Sequence: Synthetic oligonucleotide
uucuaauacagagcuucaa

SEQ ID NO: 2608078 - RNA, 19 nt, Artificial Sequence
  Description of Artificial Sequence: Synthetic oligonucleotide
uauccuccagaggagggca

SEQ ID NO: 2608079 - RNA, 19 nt, Artificial Sequence
  Description of Artificial Sequence: Synthetic oligonucleotide
agggacaagagccccugcu

SEQ ID NO: 2608080 - RNA, 19 nt, Artificial Sequence
  Description of Artificial Sequence: Synthetic oligonucleotide
uucuucaacugaguuugac

SEQ ID NO: 2608081 - RNA, 19 nt, Artificial Sequence
  Description of Artificial Sequence: Synthetic oligonucleotide
auucgaaugucaacuuuca

SEQ ID NO: 2608082 - RNA, 19 nt, Artificial Sequence
  Description of Artificial Sequence: Synthetic oligonucleotide
cugaguuugacguguagcu

SEQ ID NO: 2608083 - RNA, 19 nt, Artificial Sequence
  Description of Artificial Sequence: Synthetic oligonucleotide
uggagcugucuuccugucc

SEQ ID NO: 2608084 - RNA, 19 nt, Artificial Sequence
  Description of Artificial Sequence: Synthetic oligonucleotide
gcgaucaggcuuuaugcag

SEQ ID NO: 2608085 - RNA, 19 nt, Artificial Sequence
  Description of Artificial Sequence: Synthetic oligonucleotide
caggcuuuaugcagagaac

SEQ ID NO: 2608086 - RNA, 19 nt, Artificial Sequence
  Description of Artificial Sequence: Synthetic oligonucleotide
uugggguucuuccgagcug

SEQ ID NO: 2608087 - RNA, 19 nt, Artificial Sequence
  Description of Artificial Sequence: Synthetic oligonucleotide
agcaaucucugaggggaac

SEQ ID NO: 2608088 - RNA, 19 nt, Artificial Sequence
  Description of Artificial Sequence: Synthetic oligonucleotide
cucccugagaauggcaagc

SEQ ID NO: 2608089 - RNA, 19 nt, Artificial Sequence
  Description of Artificial Sequence: Synthetic oligonucleotide
caugggcccuucauguuug

SEQ ID NO: 2608090 - RNA, 19 nt, Artificial Sequence
  Description of Artificial Sequence: Synthetic oligonucleotide
agcuggagcgguuuuggaa

SEQ ID NO: 2608091 - RNA, 19 nt, Artificial Sequence
  Description of Artificial Sequence: Synthetic oligonucleotide
ugccgugcacaucuuacua

SEQ ID NO: 2608092 - RNA, 19 nt, Artificial Sequence
  Description of Artificial Sequence: Synthetic oligonucleotide
gaauaucugcauugggccu

SEQ ID NO: 2608093 - RNA, 19 nt, Artificial Sequence
  Description of Artificial Sequence: Synthetic oligonucleotide
cuuugggguucuuccgagc

SEQ ID NO: 2608094 - RNA, 19 nt, Artificial Sequence
  Description of Artificial Sequence: Synthetic oligonucleotide
ugucaacuuucacacuguu

SEQ ID NO: 2608095 - RNA, 19 nt, Artificial Sequence
  Description of Artificial Sequence: Synthetic oligonucleotide
gcagccaacuuucaccagc

SEQ ID NO: 2608096 - RNA, 19 nt, Artificial Sequence
  Description of Artificial Sequence: Synthetic oligonucleotide
cucgcaugggcccuucaug

SEQ ID NO: 2608097 - RNA, 19 nt, Artificial Sequence
  Description of Artificial Sequence: Synthetic oligonucleotide
gacugaagauucgaauguc

SEQ ID NO: 2608098 - RNA, 19 nt, Artificial Sequence
  Description of Artificial Sequence: Synthetic oligonucleotide
uuccgagcugcuaccuccc

SEQ ID NO: 2608099 - RNA, 19 nt, Artificial Sequence
  Description of Artificial Sequence: Synthetic oligonucleotide
gguugucucgcaugggccc

SEQ ID NO: 2608100 - RNA, 19 nt, Artificial Sequence
  Description of Artificial Sequence: Synthetic oligonucleotide
ugcgcgguggacgauggga

SEQ ID NO: 2608101 - RNA, 19 nt, Artificial Sequence
  Description of Artificial Sequence: Synthetic oligonucleotide
agaggcauuugcucaguuu

SEQ ID NO: 2608102 - RNA, 19 nt, Artificial Sequence
  Description of Artificial Sequence: Synthetic oligonucleotide
guagcuucgucaggcugcg

SEQ ID NO: 2608103 - RNA, 19 nt, Artificial Sequence
  Description of Artificial Sequence: Synthetic oligonucleotide
gguuuugacugaagauucg

SEQ ID NO: 2608104 - RNA, 19 nt, Artificial Sequence
  Description of Artificial Sequence: Synthetic oligonucleotide
ggccucagcaaucucugag

SEQ ID NO: 2608105 - RNA, 19 nt, Artificial Sequence
  Description of Artificial Sequence: Synthetic oligonucleotide
uggcaagccccaacaucag

SEQ ID NO: 2608106 - RNA, 19 nt, Artificial Sequence
  Description of Artificial Sequence: Synthetic oligonucleotide
uuggauggcaacggaguuc

SEQ ID NO: 2608107 - RNA, 19 nt, Artificial Sequence
  Description of Artificial Sequence: Synthetic oligonucleotide
auucuaauacagagcuuca

SEQ ID NO: 2608108 - RNA, 19 nt, Artificial Sequence
  Description of Artificial Sequence: Synthetic oligonucleotide
ucucgcaugggcccuucau

SEQ ID NO: 2608109 - RNA, 19 nt, Artificial Sequence
  Description of Artificial Sequence: Synthetic oligonucleotide
auugggccucagcaaucuc

SEQ ID NO: 2608110 - RNA, 19 nt, Artificial Sequence
  Description of Artificial Sequence: Synthetic oligonucleotide
ccucagcaaucucugaggg

SEQ ID NO: 2608111 - RNA, 19 nt, Artificial Sequence
  Description of Artificial Sequence: Synthetic oligonucleotide
ucuuccgagcugcuaccuc

SEQ ID NO: 2608112 - RNA, 19 nt, Artificial Sequence
  Description of Artificial Sequence: Synthetic oligonucleotide
cuucaagaaugccgugcac

SEQ ID NO: 2608113 - RNA, 19 nt, Artificial Sequence
  Description of Artificial Sequence: Synthetic oligonucleotide
aucuuacuaagaguccuaa

SEQ ID NO: 2608114 - RNA, 19 nt, Artificial Sequence
  Description of Artificial Sequence: Synthetic oligonucleotide
aaucccauggggagcugga

SEQ ID NO: 2608115 - RNA, 19 nt, Artificial Sequence
  Description of Artificial Sequence: Synthetic oligonucleotide
ugaguuugacguguagcuu

SEQ ID NO: 2608116 - RNA, 19 nt, Artificial Sequence
  Description of Artificial Sequence: Synthetic oligonucleotide
cuccggaggaccaagauuu

SEQ ID NO: 2608117 - RNA, 19 nt, Artificial Sequence
  Description of Artificial Sequence: Synthetic oligonucleotide
cuuguuggauggcaacgga

SEQ ID NO: 2608118 - RNA, 19 nt, Artificial Sequence
  Description of Artificial Sequence: Synthetic oligonucleotide
ugcagccaacuuucaccag

SEQ ID NO: 2608119 - RNA, 19 nt, Artificial Sequence
  Description of Artificial Sequence: Synthetic oligonucleotide
ucccugcgcauugaugcag

SEQ ID NO: 2608120 - RNA, 19 nt, Artificial Sequence
  Description of Artificial Sequence: Synthetic oligonucleotide
ggagcuggagcgguuuugg

SEQ ID NO: 2608121 - RNA, 19 nt, Artificial Sequence
  Description of Artificial Sequence: Synthetic oligonucleotide
gcuaccucccugagaaugg

SEQ ID NO: 2608122 - RNA, 19 nt, Artificial Sequence
  Description of Artificial Sequence: Synthetic oligonucleotide
cucgggugauguuguaauc

SEQ ID NO: 2608123 - RNA, 19 nt, Artificial Sequence
  Description of Artificial Sequence: Synthetic oligonucleotide
gacuugagcaugguugucu

SEQ ID NO: 2608124 - RNA, 19 nt, Artificial Sequence
  Description of Artificial Sequence: Synthetic oligonucleotide
agggcaauucccggccuuc

SEQ ID NO: 2608125 - RNA, 19 nt, Artificial Sequence
  Description of Artificial Sequence: Synthetic oligonucleotide
aucucugaggggaaccggu

SEQ ID NO: 2608126 - RNA, 19 nt, Artificial Sequence
  Description of Artificial Sequence: Synthetic oligonucleotide
ccgugcacaucuuacuaag

SEQ ID NO: 2608127 - RNA, 19 nt, Artificial Sequence
  Description of Artificial Sequence: Synthetic oligonucleotide
gaggaccaagauuucuugu

SEQ ID NO: 2608128 - RNA, 19 nt, Artificial Sequence
  Description of Artificial Sequence: Synthetic oligonucleotide
ggcuuuaugcagagaacug

SEQ ID NO: 2608129 - RNA, 19 nt, Artificial Sequence
  Description of Artificial Sequence: Synthetic oligonucleotide
gccugaauaucugcauugg

SEQ ID NO: 2608130 - RNA, 19 nt, Artificial Sequence
  Description of Artificial Sequence: Synthetic oligonucleotide
gggcccuucauguuuguuc

SEQ ID NO: 2608131 - RNA, 19 nt, Artificial Sequence
  Description of Artificial Sequence: Synthetic oligonucleotide
gaguucauggagcugucuu

SEQ ID NO: 2608132 - RNA, 19 nt, Artificial Sequence
  Description of Artificial Sequence: Synthetic oligonucleotide
ugguugcuucuucuuucaa

SEQ ID NO: 2608133 - RNA, 19 nt, Artificial Sequence
  Description of Artificial Sequence: Synthetic oligonucleotide
cagccaacuuucaccagca

SEQ ID NO: 2608134 - RNA, 19 nt, Artificial Sequence
  Description of Artificial Sequence: Synthetic oligonucleotide
augucaacuuucacacugu

SEQ ID NO: 2608135 - RNA, 19 nt, Artificial Sequence
  Description of Artificial Sequence: Synthetic oligonucleotide
cuaccucccugagaauggc

SEQ ID NO: 2608136 - RNA, 19 nt, Artificial Sequence
  Description of Artificial Sequence: Synthetic oligonucleotide
cugguuuugacugaagauu

SEQ ID NO: 2608137 - RNA, 19 nt, Artificial Sequence
  Description of Artificial Sequence: Synthetic oligonucleotide
gagacuuggcgaucaggcu

SEQ ID NO: 2608138 - RNA, 19 nt, Artificial Sequence
  Description of Artificial Sequence: Synthetic oligonucleotide
gaaugucaacuuucacacu

SEQ ID NO: 2608139 - RNA, 19 nt, Artificial Sequence
  Description of Artificial Sequence: Synthetic oligonucleotide
agcugcuaccucccugaga

SEQ ID NO: 2608140 - RNA, 19 nt, Artificial Sequence
  Description of Artificial Sequence: Synthetic oligonucleotide
caucuuacuaagaguccua

SEQ ID NO: 2608141 - RNA, 19 nt, Artificial Sequence
  Description of Artificial Sequence: Synthetic oligonucleotide
gaaugccgugcacaucuua

SEQ ID NO: 2608142 - RNA, 19 nt, Artificial Sequence
  Description of Artificial Sequence: Synthetic oligonucleotide
uccggaggaccaagauuuc

SEQ ID NO: 2608143 - RNA, 19 nt, Artificial Sequence
  Description of Artificial Sequence: Synthetic oligonucleotide
gcaauucccggccuucuga

SEQ ID NO: 2608144 - RNA, 19 nt, Artificial Sequence
  Description of Artificial Sequence: Synthetic oligonucleotide
auaucugcauugggccuca

SEQ ID NO: 2608145 - RNA, 19 nt, Artificial Sequence
  Description of Artificial Sequence: Synthetic oligonucleotide
agcgguuuuggaagucaug

SEQ ID NO: 2608146 - RNA, 19 nt, Artificial Sequence
  Description of Artificial Sequence: Synthetic oligonucleotide
ucccuccggaggaccaaga

SEQ ID NO: 2608147 - RNA, 19 nt, Artificial Sequence
  Description of Artificial Sequence: Synthetic oligonucleotide
ggggucucgggugauguug

SEQ ID NO: 2608148 - RNA, 19 nt, Artificial Sequence
  Description of Artificial Sequence: Synthetic oligonucleotide
ggcaagccccaacaucagc

SEQ ID NO: 2608149 - RNA, 19 nt, Artificial Sequence
  Description of Artificial Sequence: Synthetic oligonucleotide
ugggagcgacacaggugca

SEQ ID NO: 2608150 - RNA, 19 nt, Artificial Sequence
  Description of Artificial Sequence: Synthetic oligonucleotide
ggagcgacacaggugcagc

SEQ ID NO: 2608151 - RNA, 19 nt, Artificial Sequence
  Description of Artificial Sequence: Synthetic oligonucleotide
cgggugauguuguaauccc

SEQ ID NO: 2608152 - RNA, 19 nt, Artificial Sequence
  Description of Artificial Sequence: Synthetic oligonucleotide
gcgguggacgaugggagcg

SEQ ID NO: 2608153 - RNA, 19 nt, Artificial Sequence
  Description of Artificial Sequence: Synthetic oligonucleotide
acgaugggagcgacacagg

SEQ ID NO: 2608154 - RNA, 19 nt, Artificial Sequence
  Description of Artificial Sequence: Synthetic oligonucleotide
gucaacuuucacacuguua

SEQ ID NO: 2608155 - RNA, 19 nt, Artificial Sequence
  Description of Artificial Sequence: Synthetic oligonucleotide
uccgagcugcuaccucccu

SEQ ID NO: 2608156 - RNA, 19 nt, Artificial Sequence
  Description of Artificial Sequence: Synthetic oligonucleotide
cagcagggacuugagcaug

SEQ ID NO: 2608157 - RNA, 19 nt, Artificial Sequence
  Description of Artificial Sequence: Synthetic oligonucleotide
ggcaauucccggccuucug

SEQ ID NO: 2608158 - RNA, 19 nt, Artificial Sequence
  Description of Artificial Sequence: Synthetic oligonucleotide
gcgguuuuggaagucaugu

SEQ ID NO: 2608159 - RNA, 19 nt, Artificial Sequence
  Description of Artificial Sequence: Synthetic oligonucleotide
caggcugcgcgguggacga

SEQ ID NO: 2608160 - RNA, 19 nt, Artificial Sequence
  Description of Artificial Sequence: Synthetic oligonucleotide
gucccugcgcauugaugca

SEQ ID NO: 2608161 - RNA, 19 nt, Artificial Sequence
  Description of Artificial Sequence: Synthetic oligonucleotide
ccucccugagaauggcaag

SEQ ID NO: 2608162 - RNA, 19 nt, Artificial Sequence
  Description of Artificial Sequence: Synthetic oligonucleotide
uggagcgguuuuggaaguc

SEQ ID NO: 2608163 - RNA, 19 nt, Artificial Sequence
  Description of Artificial Sequence: Synthetic oligonucleotide
acgcccugguuuugacuga

SEQ ID NO: 2608164 - RNA, 19 nt, Artificial Sequence
  Description of Artificial Sequence: Synthetic oligonucleotide
ggagcgguuuuggaaguca

SEQ ID NO: 2608165 - RNA, 19 nt, Artificial Sequence
  Description of Artificial Sequence: Synthetic oligonucleotide
cccugguuuugacugaaga

SEQ ID NO: 2608166 - RNA, 19 nt, Artificial Sequence
  Description of Artificial Sequence: Synthetic oligonucleotide
agccaacuuucaccagcau

SEQ ID NO: 2608167 - RNA, 19 nt, Artificial Sequence
  Description of Artificial Sequence: Synthetic oligonucleotide
aucaggcuuuaugcagaga

SEQ ID NO: 2608168 - RNA, 19 nt, Artificial Sequence
  Description of Artificial Sequence: Synthetic oligonucleotide
cucccuccggaggaccaag

SEQ ID NO: 2608169 - RNA, 19 nt, Artificial Sequence
  Description of Artificial Sequence: Synthetic oligonucleotide
gucucgggugauguuguaa

SEQ ID NO: 2608170 - RNA, 19 nt, Artificial Sequence
  Description of Artificial Sequence: Synthetic oligonucleotide
uguucccugcugguugcuu

SEQ ID NO: 2608171 - RNA, 19 nt, Artificial Sequence
  Description of Artificial Sequence: Synthetic oligonucleotide
cuauucuaauacagagcuu

SEQ ID NO: 2608172 - RNA, 19 nt, Artificial Sequence
  Description of Artificial Sequence: Synthetic oligonucleotide
ucccggccuucugagggac

SEQ ID NO: 2608173 - RNA, 19 nt, Artificial Sequence
  Description of Artificial Sequence: Synthetic oligonucleotide
gccgugcacaucuuacuaa

SEQ ID NO: 2608174 - RNA, 19 nt, Artificial Sequence
  Description of Artificial Sequence: Synthetic oligonucleotide
cccugcgcauugaugcagc

SEQ ID NO: 2608175 - RNA, 19 nt, Artificial Sequence
  Description of Artificial Sequence: Synthetic oligonucleotide
gagcaugguugucucgcau

SEQ ID NO: 2608176 - RNA, 19 nt, Artificial Sequence
  Description of Artificial Sequence: Synthetic oligonucleotide
gacuuggcgaucaggcuuu

SEQ ID NO: 2608177 - RNA, 19 nt, Artificial Sequence
  Description of Artificial Sequence: Synthetic oligonucleotide
uggggagcuggagcgguuu

SEQ ID NO: 2608178 - RNA, 19 nt, Artificial Sequence
  Description of Artificial Sequence: Synthetic oligonucleotide
uuguucccugcugguugcu

SEQ ID NO: 2608179 - RNA, 19 nt, Artificial Sequence
  Description of Artificial Sequence: Synthetic oligonucleotide
uccugucccugcgcauuga

SEQ ID NO: 2608180 - RNA, 19 nt, Artificial Sequence
  Description of Artificial Sequence: Synthetic oligonucleotide
ccugcgcauugaugcagcc

SEQ ID NO: 2608181 - RNA, 19 nt, Artificial Sequence
  Description of Artificial Sequence: Synthetic oligonucleotide
gcgcgguggacgaugggag

SEQ ID NO: 2608182 - RNA, 19 nt, Artificial Sequence
  Description of Artificial Sequence: Synthetic oligonucleotide
gcugcgcgguggacgaugg

SEQ ID NO: 2608183 - RNA, 19 nt, Artificial Sequence
  Description of Artificial Sequence: Synthetic oligonucleotide
cauugggccucagcaaucu

SEQ ID NO: 2608184 - RNA, 19 nt, Artificial Sequence
  Description of Artificial Sequence: Synthetic oligonucleotide
ccugguuuugacugaagau

SEQ ID NO: 2608185 - RNA, 19 nt, Artificial Sequence
  Description of Artificial Sequence: Synthetic oligonucleotide
guaaucccauggggagcug

SEQ ID NO: 2608186 - RNA, 19 nt, Artificial Sequence
  Description of Artificial Sequence: Synthetic oligonucleotide
cuucugagugugucucccu

SEQ ID NO: 2608187 - RNA, 19 nt, Artificial Sequence
  Description of Artificial Sequence: Synthetic oligonucleotide
cugcgcgguggacgauggg

SEQ ID NO: 2608188 - RNA, 19 nt, Artificial Sequence
  Description of Artificial Sequence: Synthetic oligonucleotide
ccuaagaagcaaagagacu

SEQ ID NO: 2608189 - RNA, 19 nt, Artificial Sequence
  Description of Artificial Sequence: Synthetic oligonucleotide
cuggagcgguuuuggaagu

SEQ ID NO: 2608190 - RNA, 19 nt, Artificial Sequence
  Description of Artificial Sequence: Synthetic oligonucleotide
gcccuucauguuuguuccc

SEQ ID NO: 2608191 - RNA, 19 nt, Artificial Sequence
  Description of Artificial Sequence: Synthetic oligonucleotide
guugucucgcaugggcccu

SEQ ID NO: 2608192 - RNA, 19 nt, Artificial Sequence
  Description of Artificial Sequence: Synthetic oligonucleotide
ugucucgcaugggcccuuc

SEQ ID NO: 2608193 - RNA, 19 nt, Artificial Sequence
  Description of Artificial Sequence: Synthetic oligonucleotide
ugggcccuucauguuuguu

SEQ ID NO: 2608194 - RNA, 19 nt, Artificial Sequence
  Description of Artificial Sequence: Synthetic oligonucleotide
gagcgguuuuggaagucau

SEQ ID NO: 2608195 - RNA, 19 nt, Artificial Sequence
  Description of Artificial Sequence: Synthetic oligonucleotide
ggcugcgcgguggacgaug

SEQ ID NO: 2608196 - RNA, 19 nt, Artificial Sequence
  Description of Artificial Sequence: Synthetic oligonucleotide
gguggacgaugggagcgac

SEQ ID NO: 2608197 - RNA, 19 nt, Artificial Sequence
  Description of Artificial Sequence: Synthetic oligonucleotide
gagggcaauucccggccuu

SEQ ID NO: 2608198 - RNA, 19 nt, Artificial Sequence
  Description of Artificial Sequence: Synthetic oligonucleotide
ccccaacaucagcagcagc

SEQ ID NO: 2608199 - RNA, 19 nt, Artificial Sequence
  Description of Artificial Sequence: Synthetic oligonucleotide
agaaugccgugcacaucuu

SEQ ID NO: 2608200 - RNA, 19 nt, Artificial Sequence
  Description of Artificial Sequence: Synthetic oligonucleotide
guggacgaugggagcgaca

SEQ ID NO: 2608201 - RNA, 19 nt, Artificial Sequence
  Description of Artificial Sequence: Synthetic oligonucleotide
ccauggggagcuggagcgg

SEQ ID NO: 2608202 - RNA, 19 nt, Artificial Sequence
  Description of Artificial Sequence: Synthetic oligonucleotide
uugucucgcaugggcccuu

SEQ ID NO: 2608203 - RNA, 19 nt, Artificial Sequence
  Description of Artificial Sequence: Synthetic oligonucleotide
ggacuugagcaugguuguc

SEQ ID NO: 2608204 - RNA, 19 nt, Artificial Sequence
  Description of Artificial Sequence: Synthetic oligonucleotide
ggacgaugggagcgacaca

SEQ ID NO: 2608205 - RNA, 19 nt, Artificial Sequence
  Description of Artificial Sequence: Synthetic oligonucleotide
gucucgcaugggcccuuca

SEQ ID NO: 2608206 - RNA, 19 nt, Artificial Sequence
  Description of Artificial Sequence: Synthetic oligonucleotide
gcaugggcccuucauguuu

SEQ ID NO: 2608207 - RNA, 19 nt, Artificial Sequence
  Description of Artificial Sequence: Synthetic oligonucleotide
cgcgguggacgaugggagc

SEQ ID NO: 2608208 - RNA, 19 nt, Artificial Sequence
  Description of Artificial Sequence: Synthetic oligonucleotide
cuuccugucccugcgcauu

SEQ ID NO: 2608209 - RNA, 19 nt, Artificial Sequence
  Description of Artificial Sequence: Synthetic oligonucleotide
ucccugcugguugcuucuu

SEQ ID NO: 2608210 - RNA, 19 nt, Artificial Sequence
  Description of Artificial Sequence: Synthetic oligonucleotide
gggccucagcaaucucuga

SEQ ID NO: 2608211 - RNA, 19 nt, Artificial Sequence
  Description of Artificial Sequence: Synthetic oligonucleotide
cugcgcauugaugcagccu

SEQ ID NO: 2608212 - RNA, 19 nt, Artificial Sequence
  Description of Artificial Sequence: Synthetic oligonucleotide
ccaagauuucuuguuggau

SEQ ID NO: 2608213 - RNA, 19 nt, Artificial Sequence
  Description of Artificial Sequence: Synthetic oligonucleotide
cuucgucaggcugcgcggu

SEQ ID NO: 2608214 - RNA, 19 nt, Artificial Sequence
  Description of Artificial Sequence: Synthetic oligonucleotide
ggaagucaugugagacaaa

SEQ ID NO: 2608215 - RNA, 19 nt, Artificial Sequence
  Description of Artificial Sequence: Synthetic oligonucleotide
cccugcuuugggguucuuc

SEQ ID NO: 2608216 - RNA, 19 nt, Artificial Sequence
  Description of Artificial Sequence: Synthetic oligonucleotide
guuugacguguagcuucgu

SEQ ID NO: 2608217 - RNA, 19 nt, Artificial Sequence
  Description of Artificial Sequence: Synthetic oligonucleotide
acuuggcgaucaggcuuua

SEQ ID NO: 2608218 - RNA, 19 nt, Artificial Sequence
  Description of Artificial Sequence: Synthetic oligonucleotide
ggcucccuccggaggacca

SEQ ID NO: 2608219 - RNA, 19 nt, Artificial Sequence
  Description of Artificial Sequence: Synthetic oligonucleotide
gggcucccuccggaggacc

SEQ ID NO: 2608220 - RNA, 19 nt, Artificial Sequence
  Description of Artificial Sequence: Synthetic oligonucleotide
gcgcauugaugcagccuga

SEQ ID NO: 2608221 - RNA, 19 nt, Artificial Sequence
  Description of Artificial Sequence: Synthetic oligonucleotide
ggguucuuccgagcugcua

SEQ ID NO: 2608222 - RNA, 19 nt, Artificial Sequence
  Description of Artificial Sequence: Synthetic oligonucleotide
ggggcucccuccggaggac

SEQ ID NO: 2608223 - RNA, 19 nt, Artificial Sequence
  Description of Artificial Sequence: Synthetic oligonucleotide
cggaggaccaagauuucuu

SEQ ID NO: 2608224 - RNA, 19 nt, Artificial Sequence
  Description of Artificial Sequence: Synthetic oligonucleotide
gggcaauucccggccuucu

SEQ ID NO: 2608225 - RNA, 19 nt, Artificial Sequence
  Description of Artificial Sequence: Synthetic oligonucleotide
cuuggcgaucaggcuuuau

SEQ ID NO: 2608226 - RNA, 19 nt, Artificial Sequence
  Description of Artificial Sequence: Synthetic oligonucleotide
ccggaggaccaagauuucu

SEQ ID NO: 2608227 - RNA, 19 nt, Artificial Sequence
  Description of Artificial Sequence: Synthetic oligonucleotide
aggcugcgcgguggacgau

SEQ ID NO: 2608228 - RNA, 19 nt, Artificial Sequence
  Description of Artificial Sequence: Synthetic oligonucleotide
gcucccuccggaggaccaa

SEQ ID NO: 2608229 - RNA, 19 nt, Artificial Sequence
  Description of Artificial Sequence: Synthetic oligonucleotide
cgucaggcugcgcggugga

SEQ ID NO: 2608230 - RNA, 19 nt, Artificial Sequence
  Description of Artificial Sequence: Synthetic oligonucleotide
ccugucccugcgcauugau

SEQ ID NO: 2608231 - RNA, 19 nt, Artificial Sequence
  Description of Artificial Sequence: Synthetic oligonucleotide
cccggccuucugagggaca

SEQ ID NO: 2608232 - RNA, 19 nt, Artificial Sequence
  Description of Artificial Sequence: Synthetic oligonucleotide
cccuccggaggaccaagau

SEQ ID NO: 2608233 - RNA, 19 nt, Artificial Sequence
  Description of Artificial Sequence: Synthetic oligonucleotide
cgguggacgaugggagcga

SEQ ID NO: 2608234 - RNA, 19 nt, Artificial Sequence
  Description of Artificial Sequence: Synthetic oligonucleotide
ggauggcaacggaguucau

SEQ ID NO: 2608235 - RNA, 19 nt, Artificial Sequence
  Description of Artificial Sequence: Synthetic oligonucleotide
aaauacugcaguuggagcc

SEQ ID NO: 2608236 - RNA, 19 nt, Artificial Sequence
  Description of Artificial Sequence: Synthetic oligonucleotide
aaaauacugcaguuggagc

SEQ ID NO: 2608237 - RNA, 19 nt, Artificial Sequence
  Description of Artificial Sequence: Synthetic oligonucleotide
aucuucucaagauaugccc

SEQ ID NO: 2608238 - RNA, 19 nt, Artificial Sequence
  Description of Artificial Sequence: Synthetic oligonucleotide
ugaguaacugucuuuauac

SEQ ID NO: 2608239 - RNA, 19 nt, Artificial Sequence
  Description of Artificial Sequence: Synthetic oligonucleotide
ugucuuuauacuaugccug

SEQ ID NO: 2608240 - RNA, 19 nt, Artificial Sequence
  Description of Artificial Sequence: Synthetic oligonucleotide
ugcaucucggaacaugucg

SEQ ID NO: 2608241 - RNA, 19 nt, Artificial Sequence
  Description of Artificial Sequence: Synthetic oligonucleotide
ucucuuauucugcucaucc

SEQ ID NO: 2608242 - RNA, 19 nt, Artificial Sequence
  Description of Artificial Sequence: Synthetic oligonucleotide
uuuauacuaugccugguga

SEQ ID NO: 2608243 - RNA, 19 nt, Artificial Sequence
  Description of Artificial Sequence: Synthetic oligonucleotide
gaaaauacugcaguuggag

SEQ ID NO: 2608244 - RNA, 19 nt, Artificial Sequence
  Description of Artificial Sequence: Synthetic oligonucleotide
gaugcugcagcccauuuag

SEQ ID NO: 2608245 - RNA, 19 nt, Artificial Sequence
  Description of Artificial Sequence: Synthetic oligonucleotide
aacaugucguaccacaccu

SEQ ID NO: 2608246 - RNA, 19 nt, Artificial Sequence
  Description of Artificial Sequence: Synthetic oligonucleotide
accucguaugcucaguucc

SEQ ID NO: 2608247 - RNA, 19 nt, Artificial Sequence
  Description of Artificial Sequence: Synthetic oligonucleotide
ucucguucugacauguggg

SEQ ID NO: 2608248 - RNA, 19 nt, Artificial Sequence
  Description of Artificial Sequence: Synthetic oligonucleotide
ugugggaaaauacugcagu

SEQ ID NO: 2608249 - RNA, 19 nt, Artificial Sequence
  Description of Artificial Sequence: Synthetic oligonucleotide
ugcaguuggagccaaaguc

SEQ ID NO: 2608250 - RNA, 19 nt, Artificial Sequence
  Description of Artificial Sequence: Synthetic oligonucleotide
ugcuacuugggacugagcu

SEQ ID NO: 2608251 - RNA, 19 nt, Artificial Sequence
  Description of Artificial Sequence: Synthetic oligonucleotide
gucagaagaaacuuccugc

SEQ ID NO: 2608252 - RNA, 19 nt, Artificial Sequence
  Description of Artificial Sequence: Synthetic oligonucleotide
aagauaugcccugagggag

SEQ ID NO: 2608253 - RNA, 19 nt, Artificial Sequence
  Description of Artificial Sequence: Synthetic oligonucleotide
gugaccagaagucaggcag

SEQ ID NO: 2608254 - RNA, 19 nt, Artificial Sequence
  Description of Artificial Sequence: Synthetic oligonucleotide
acagaaguaucgcuucccc

SEQ ID NO: 2608255 - RNA, 19 nt, Artificial Sequence
  Description of Artificial Sequence: Synthetic oligonucleotide
auuuaggugcuucuuucgg

SEQ ID NO: 2608256 - RNA, 19 nt, Artificial Sequence
  Description of Artificial Sequence: Synthetic oligonucleotide
aguaaucacagaaguaucg

SEQ ID NO: 2608257 - RNA, 19 nt, Artificial Sequence
  Description of Artificial Sequence: Synthetic oligonucleotide
acuuccuugguugaguaac

SEQ ID NO: 2608258 - RNA, 19 nt, Artificial Sequence
  Description of Artificial Sequence: Synthetic oligonucleotide
uuccaggugacccucagga

SEQ ID NO: 2608259 - RNA, 19 nt, Artificial Sequence
  Description of Artificial Sequence: Synthetic oligonucleotide
aucacagaaguaucgcuuc

SEQ ID NO: 2608260 - RNA, 19 nt, Artificial Sequence
  Description of Artificial Sequence: Synthetic oligonucleotide
ugacaugugggaaaauacu

SEQ ID NO: 2608261 - RNA, 19 nt, Artificial Sequence
  Description of Artificial Sequence: Synthetic oligonucleotide
gggaaaauacugcaguugg

SEQ ID NO: 2608262 - RNA, 19 nt, Artificial Sequence
  Description of Artificial Sequence: Synthetic oligonucleotide
acaugugggaaaauacugc

SEQ ID NO: 2608263 - RNA, 19 nt, Artificial Sequence
  Description of Artificial Sequence: Synthetic oligonucleotide
uauacuaugccuggugacc

SEQ ID NO: 2608264 - RNA, 19 nt, Artificial Sequence
  Description of Artificial Sequence: Synthetic oligonucleotide
gacaugugggaaaauacug

SEQ ID NO: 2608265 - RNA, 19 nt, Artificial Sequence
  Description of Artificial Sequence: Synthetic oligonucleotide
cuuauucugcucauccagc

SEQ ID NO: 2608266 - RNA, 19 nt, Artificial Sequence
  Description of Artificial Sequence: Synthetic oligonucleotide
gucuuuauacuaugccugg

SEQ ID NO: 2608267 - RNA, 19 nt, Artificial Sequence
  Description of Artificial Sequence: Synthetic oligonucleotide
accuucuuggccuugagau

SEQ ID NO: 2608268 - RNA, 19 nt, Artificial Sequence
  Description of Artificial Sequence: Synthetic oligonucleotide
cuucuuucgguuguggagg

SEQ ID NO: 2608269 - RNA, 19 nt, Artificial Sequence
  Description of Artificial Sequence: Synthetic oligonucleotide
uuauucugcucauccagca

SEQ ID NO: 2608270 - RNA, 19 nt, Artificial Sequence
  Description of Artificial Sequence: Synthetic oligonucleotide
cugacaugugggaaaauac

SEQ ID NO: 2608271 - RNA, 19 nt, Artificial Sequence
  Description of Artificial Sequence: Synthetic oligonucleotide
cauuuaggugcuucuuucg

SEQ ID NO: 2608272 - RNA, 19 nt, Artificial Sequence
  Description of Artificial Sequence: Synthetic oligonucleotide
ucuccaguggccauucucu

SEQ ID NO: 2608273 - RNA, 19 nt, Artificial Sequence
  Description of Artificial Sequence: Synthetic oligonucleotide
cuuuauacuaugccuggug

SEQ ID NO: 2608274 - RNA, 19 nt, Artificial Sequence
  Description of Artificial Sequence: Synthetic oligonucleotide
aguaacugucuuuauacua

SEQ ID NO: 2608275 - RNA, 19 nt, Artificial Sequence
  Description of Artificial Sequence: Synthetic oligonucleotide
agaaguaucgcuuccccau

SEQ ID NO: 2608276 - RNA, 19 nt, Artificial Sequence
  Description of Artificial Sequence: Synthetic oligonucleotide
aaguaucgcuuccccauag

SEQ ID NO: 2608277 - RNA, 19 nt, Artificial Sequence
  Description of Artificial Sequence: Synthetic oligonucleotide
aacucugggcuguagggga

SEQ ID NO: 2608278 - RNA, 19 nt, Artificial Sequence
  Description of Artificial Sequence: Synthetic oligonucleotide
guucugauggguucagucc

SEQ ID NO: 2608279 - RNA, 19 nt, Artificial Sequence
  Description of Artificial Sequence: Synthetic oligonucleotide
ugaccagaagucaggcagg

SEQ ID NO: 2608280 - RNA, 19 nt, Artificial Sequence
  Description of Artificial Sequence: Synthetic oligonucleotide
uuauacuaugccuggugac

SEQ ID NO: 2608281 - RNA, 19 nt, Artificial Sequence
  Description of Artificial Sequence: Synthetic oligonucleotide
cuugggacugagcucagcc

SEQ ID NO: 2608282 - RNA, 19 nt, Artificial Sequence
  Description of Artificial Sequence: Synthetic oligonucleotide
ucucggaacaugucguacc

SEQ ID NO: 2608283 - RNA, 19 nt, Artificial Sequence
  Description of Artificial Sequence: Synthetic oligonucleotide
aguggccauucucuggccc

SEQ ID NO: 2608284 - RNA, 19 nt, Artificial Sequence
  Description of Artificial Sequence: Synthetic oligonucleotide
ugcauugguggccagccca

SEQ ID NO: 2608285 - RNA, 19 nt, Artificial Sequence
  Description of Artificial Sequence: Synthetic oligonucleotide
aguaucgcuuccccauagc

SEQ ID NO: 2608286 - RNA, 19 nt, Artificial Sequence
  Description of Artificial Sequence: Synthetic oligonucleotide
gaacaugucguaccacacc

SEQ ID NO: 2608287 - RNA, 19 nt, Artificial Sequence
  Description of Artificial Sequence: Synthetic oligonucleotide
uuuaggugcuucuuucggu

SEQ ID NO: 2608288 - RNA, 19 nt, Artificial Sequence
  Description of Artificial Sequence: Synthetic oligonucleotide
uguaggggacccauccucc

SEQ ID NO: 2608289 - RNA, 19 nt, Artificial Sequence
  Description of Artificial Sequence: Synthetic oligonucleotide
gaagacagugguucugaug

SEQ ID NO: 2608290 - RNA, 19 nt, Artificial Sequence
  Description of Artificial Sequence: Synthetic oligonucleotide
uaugcucaguuccugcaga

SEQ ID NO: 2608291 - RNA, 19 nt, Artificial Sequence
  Description of Artificial Sequence: Synthetic oligonucleotide
aagcucagcagucuccagu

SEQ ID NO: 2608292 - RNA, 19 nt, Artificial Sequence
  Description of Artificial Sequence: Synthetic oligonucleotide
aauacugcaguuggagcca

SEQ ID NO: 2608293 - RNA, 19 nt, Artificial Sequence
  Description of Artificial Sequence: Synthetic oligonucleotide
ucagcagucuccaguggcc

SEQ ID NO: 2608294 - RNA, 19 nt, Artificial Sequence
  Description of Artificial Sequence: Synthetic oligonucleotide
ugggaaaauacugcaguug

SEQ ID NO: 2608295 - RNA, 19 nt, Artificial Sequence
  Description of Artificial Sequence: Synthetic oligonucleotide
uaacugucuuuauacuaug

SEQ ID NO: 2608296 - RNA, 19 nt, Artificial Sequence
  Description of Artificial Sequence: Synthetic oligonucleotide
guaaucacagaaguaucgc

SEQ ID NO: 2608297 - RNA, 19 nt, Artificial Sequence
  Description of Artificial Sequence: Synthetic oligonucleotide
uaccacaccuucuuggccu

SEQ ID NO: 2608298 - RNA, 19 nt, Artificial Sequence
  Description of Artificial Sequence: Synthetic oligonucleotide
acagagcgaaggcagcuuc

SEQ ID NO: 2608299 - RNA, 19 nt, Artificial Sequence
  Description of Artificial Sequence: Synthetic oligonucleotide
uggccugucagaagaaacu

SEQ ID NO: 2608300 - RNA, 19 nt, Artificial Sequence
  Description of Artificial Sequence: Synthetic oligonucleotide
ucucaagauaugcccugag

SEQ ID NO: 2608301 - RNA, 19 nt, Artificial Sequence
  Description of Artificial Sequence: Synthetic oligonucleotide
guaucgcuuccccauagcc

SEQ ID NO: 2608302 - RNA, 19 nt, Artificial Sequence
  Description of Artificial Sequence: Synthetic oligonucleotide
ucacagaaguaucgcuucc

SEQ ID NO: 2608303 - RNA, 19 nt, Artificial Sequence
  Description of Artificial Sequence: Synthetic oligonucleotide
ccugucagaagaaacuucc

SEQ ID NO: 2608304 - RNA, 19 nt, Artificial Sequence
  Description of Artificial Sequence: Synthetic oligonucleotide
augccuggugaccagaagu

SEQ ID NO: 2608305 - RNA, 19 nt, Artificial Sequence
  Description of Artificial Sequence: Synthetic oligonucleotide
guggagguuguccuggaag

SEQ ID NO: 2608306 - RNA, 19 nt, Artificial Sequence
  Description of Artificial Sequence: Synthetic oligonucleotide
ugcugcagcccauuuaggu

SEQ ID NO: 2608307 - RNA, 19 nt, Artificial Sequence
  Description of Artificial Sequence: Synthetic oligonucleotide
caugugggaaaauacugca

SEQ ID NO: 2608308 - RNA, 19 nt, Artificial Sequence
  Description of Artificial Sequence: Synthetic oligonucleotide
gauggcagcugcaucucgg

SEQ ID NO: 2608309 - RNA, 19 nt, Artificial Sequence
  Description of Artificial Sequence: Synthetic oligonucleotide
ucugacaugugggaaaaua

SEQ ID NO: 2608310 - RNA, 19 nt, Artificial Sequence
  Description of Artificial Sequence: Synthetic oligonucleotide
agucgcacuggccugucag

SEQ ID NO: 2608311 - RNA, 19 nt, Artificial Sequence
  Description of Artificial Sequence: Synthetic oligonucleotide
cuucucaagauaugcccug

SEQ ID NO: 2608312 - RNA, 19 nt, Artificial Sequence
  Description of Artificial Sequence: Synthetic oligonucleotide
ugggacugagcucagccuc

SEQ ID NO: 2608313 - RNA, 19 nt, Artificial Sequence
  Description of Artificial Sequence: Synthetic oligonucleotide
agcgaaggcagcuucacuu

SEQ ID NO: 2608314 - RNA, 19 nt, Artificial Sequence
  Description of Artificial Sequence: Synthetic oligonucleotide
cucagcagucuccaguggc

SEQ ID NO: 2608315 - RNA, 19 nt, Artificial Sequence
  Description of Artificial Sequence: Synthetic oligonucleotide
caggugacccucaggaagc

SEQ ID NO: 2608316 - RNA, 19 nt, Artificial Sequence
  Description of Artificial Sequence: Synthetic oligonucleotide
caguuggagccaaagucgc

SEQ ID NO: 2608317 - RNA, 19 nt, Artificial Sequence
  Description of Artificial Sequence: Synthetic oligonucleotide
gacccauccuccaggaggg

SEQ ID NO: 2608318 - RNA, 19 nt, Artificial Sequence
  Description of Artificial Sequence: Synthetic oligonucleotide
caguaaucacagaaguauc

SEQ ID NO: 2608319 - RNA, 19 nt, Artificial Sequence
  Description of Artificial Sequence: Synthetic oligonucleotide
gguuacagagcgaaggcag

SEQ ID NO: 2608320 - RNA, 19 nt, Artificial Sequence
  Description of Artificial Sequence: Synthetic oligonucleotide
caagauaugcccugaggga

SEQ ID NO: 2608321 - RNA, 19 nt, Artificial Sequence
  Description of Artificial Sequence: Synthetic oligonucleotide
cuugagaugcugcagccca

SEQ ID NO: 2608322 - RNA, 19 nt, Artificial Sequence
  Description of Artificial Sequence: Synthetic oligonucleotide
agguuguccuggaaggagc

SEQ ID NO: 2608323 - RNA, 19 nt, Artificial Sequence
  Description of Artificial Sequence: Synthetic oligonucleotide
uccuugguugaguaacugu

SEQ ID NO: 2608324 - RNA, 19 nt, Artificial Sequence
  Description of Artificial Sequence: Synthetic oligonucleotide
uuccccauagccaccucca

SEQ ID NO: 2608325 - RNA, 19 nt, Artificial Sequence
  Description of Artificial Sequence: Synthetic oligonucleotide
caugucguaccacaccuuc

SEQ ID NO: 2608326 - RNA, 19 nt, Artificial Sequence
  Description of Artificial Sequence: Synthetic oligonucleotide
guaugcucaguuccugcag

SEQ ID NO: 2608327 - RNA, 19 nt, Artificial Sequence
  Description of Artificial Sequence: Synthetic oligonucleotide
gagccaaagucgcacuggc

SEQ ID NO: 2608328 - RNA, 19 nt, Artificial Sequence
  Description of Artificial Sequence: Synthetic oligonucleotide
ucgguuguggagguugucc

SEQ ID NO: 2608329 - RNA, 19 nt, Artificial Sequence
  Description of Artificial Sequence: Synthetic oligonucleotide
uucucacccaucuucucaa

SEQ ID NO: 2608330 - RNA, 19 nt, Artificial Sequence
  Description of Artificial Sequence: Synthetic oligonucleotide
uugguugaguaacugucuu

SEQ ID NO: 2608331 - RNA, 19 nt, Artificial Sequence
  Description of Artificial Sequence: Synthetic oligonucleotide
ucuuccaggugacccucag

SEQ ID NO: 2608332 - RNA, 19 nt, Artificial Sequence
  Description of Artificial Sequence: Synthetic oligonucleotide
uauucugcucauccagcaa

SEQ ID NO: 2608333 - RNA, 19 nt, Artificial Sequence
  Description of Artificial Sequence: Synthetic oligonucleotide
gcuucuuucgguuguggag

SEQ ID NO: 2608334 - RNA, 19 nt, Artificial Sequence
  Description of Artificial Sequence: Synthetic oligonucleotide
ucguaugcucaguuccugc

SEQ ID NO: 2608335 - RNA, 19 nt, Artificial Sequence
  Description of Artificial Sequence: Synthetic oligonucleotide
gagguuguccuggaaggag

SEQ ID NO: 2608336 - RNA, 19 nt, Artificial Sequence
  Description of Artificial Sequence: Synthetic oligonucleotide
cuggccugucagaagaaac

SEQ ID NO: 2608337 - RNA, 19 nt, Artificial Sequence
  Description of Artificial Sequence: Synthetic oligonucleotide
aucucggaacaugucguac

SEQ ID NO: 2608338 - RNA, 19 nt, Artificial Sequence
  Description of Artificial Sequence: Synthetic oligonucleotide
ugcuucuuucgguugugga

SEQ ID NO: 2608339 - RNA, 19 nt, Artificial Sequence
  Description of Artificial Sequence: Synthetic oligonucleotide
cuacuugggacugagcuca

SEQ ID NO: 2608340 - RNA, 19 nt, Artificial Sequence
  Description of Artificial Sequence: Synthetic oligonucleotide
uggagccaaagucgcacug

SEQ ID NO: 2608341 - RNA, 19 nt, Artificial Sequence
  Description of Artificial Sequence: Synthetic oligonucleotide
agagcucagccccaacucu

SEQ ID NO: 2608342 - RNA, 19 nt, Artificial Sequence
  Description of Artificial Sequence: Synthetic oligonucleotide
guggccauucucuggcccg

SEQ ID NO: 2608343 - RNA, 19 nt, Artificial Sequence
  Description of Artificial Sequence: Synthetic oligonucleotide
caguccugcuacuugggac

SEQ ID NO: 2608344 - RNA, 19 nt, Artificial Sequence
  Description of Artificial Sequence: Synthetic oligonucleotide
acuggaagacagugguucu

SEQ ID NO: 2608345 - RNA, 19 nt, Artificial Sequence
  Description of Artificial Sequence: Synthetic oligonucleotide
agagcgaaggcagcuucac

SEQ ID NO: 2608346 - RNA, 19 nt, Artificial Sequence
  Description of Artificial Sequence: Synthetic oligonucleotide
agauggcagcugcaucucg

SEQ ID NO: 2608347 - RNA, 19 nt, Artificial Sequence
  Description of Artificial Sequence: Synthetic oligonucleotide
uucacuuccuugguugagu

SEQ ID NO: 2608348 - RNA, 19 nt, Artificial Sequence
  Description of Artificial Sequence: Synthetic oligonucleotide
ugcagaucucguucugaca

SEQ ID NO: 2608349 - RNA, 19 nt, Artificial Sequence
  Description of Artificial Sequence: Synthetic oligonucleotide
uaugcccugagggaguggu

SEQ ID NO: 2608350 - RNA, 19 nt, Artificial Sequence
  Description of Artificial Sequence: Synthetic oligonucleotide
guuggagccaaagucgcac

SEQ ID NO: 2608351 - RNA, 19 nt, Artificial Sequence
  Description of Artificial Sequence: Synthetic oligonucleotide
gauggguucaguccugcua

SEQ ID NO: 2608352 - RNA, 19 nt, Artificial Sequence
  Description of Artificial Sequence: Synthetic oligonucleotide
uuacagagcgaaggcagcu

SEQ ID NO: 2608353 - RNA, 19 nt, Artificial Sequence
  Description of Artificial Sequence: Synthetic oligonucleotide
agacagugguucugauggg

SEQ ID NO: 2608354 - RNA, 19 nt, Artificial Sequence
  Description of Artificial Sequence: Synthetic oligonucleotide
agaagucaggcaggggagg

SEQ ID NO: 2608355 - RNA, 19 nt, Artificial Sequence
  Description of Artificial Sequence: Synthetic oligonucleotide
auacuaugccuggugacca

SEQ ID NO: 2608356 - RNA, 19 nt, Artificial Sequence
  Description of Artificial Sequence: Synthetic oligonucleotide
ucuuuauacuaugccuggu

SEQ ID NO: 2608357 - RNA, 19 nt, Artificial Sequence
  Description of Artificial Sequence: Synthetic oligonucleotide
cugucuuuauacuaugccu

SEQ ID NO: 2608358 - RNA, 19 nt, Artificial Sequence
  Description of Artificial Sequence: Synthetic oligonucleotide
agggucucuuauucugcuc

SEQ ID NO: 2608359 - RNA, 19 nt, Artificial Sequence
  Description of Artificial Sequence: Synthetic oligonucleotide
ggagcggucacaguaauca

SEQ ID NO: 2608360 - RNA, 19 nt, Artificial Sequence
  Description of Artificial Sequence: Synthetic oligonucleotide
uugggacugagcucagccu

SEQ ID NO: 2608361 - RNA, 19 nt, Artificial Sequence
  Description of Artificial Sequence: Synthetic oligonucleotide
uuucgguuguggagguugu

SEQ ID NO: 2608362 - RNA, 19 nt, Artificial Sequence
  Description of Artificial Sequence: Synthetic oligonucleotide
uaggggacccauccuccag

SEQ ID NO: 2608363 - RNA, 19 nt, Artificial Sequence
  Description of Artificial Sequence: Synthetic oligonucleotide
agaucucguucugacaugu

SEQ ID NO: 2608364 - RNA, 19 nt, Artificial Sequence
  Description of Artificial Sequence: Synthetic oligonucleotide
ccuugguugaguaacuguc

SEQ ID NO: 2608365 - RNA, 19 nt, Artificial Sequence
  Description of Artificial Sequence: Synthetic oligonucleotide
gguucugauggguucaguc

SEQ ID NO: 2608366 - RNA, 19 nt, Artificial Sequence
  Description of Artificial Sequence: Synthetic oligonucleotide
aaggagcggucacaguaau

SEQ ID NO: 2608367 - RNA, 19 nt, Artificial Sequence
  Description of Artificial Sequence: Synthetic oligonucleotide
aggccaagcucauggucuc

SEQ ID NO: 2608368 - RNA, 19 nt, Artificial Sequence
  Description of Artificial Sequence: Synthetic oligonucleotide
aaacuuccugcagggucuc

SEQ ID NO: 2608369 - RNA, 19 nt, Artificial Sequence
  Description of Artificial Sequence: Synthetic oligonucleotide
caagauggcagcugcaucu

SEQ ID NO: 2608370 - RNA, 19 nt, Artificial Sequence
  Description of Artificial Sequence: Synthetic oligonucleotide
cacagaaguaucgcuuccc

SEQ ID NO: 2608371 - RNA, 19 nt, Artificial Sequence
  Description of Artificial Sequence: Synthetic oligonucleotide
gguacuggaagacaguggu

SEQ ID NO: 2608372 - RNA, 19 nt, Artificial Sequence
  Description of Artificial Sequence: Synthetic oligonucleotide
ccaacucugggcuguaggg

SEQ ID NO: 2608373 - RNA, 19 nt, Artificial Sequence
  Description of Artificial Sequence: Synthetic oligonucleotide
cuguaggggacccauccuc

SEQ ID NO: 2608374 - RNA, 19 nt, Artificial Sequence
  Description of Artificial Sequence: Synthetic oligonucleotide
cugcucauccagcaagaug

SEQ ID NO: 2608375 - RNA, 19 nt, Artificial Sequence
  Description of Artificial Sequence: Synthetic oligonucleotide
guaccacaccuucuuggcc

SEQ ID NO: 2608376 - RNA, 19 nt, Artificial Sequence
  Description of Artificial Sequence: Synthetic oligonucleotide
ccaucuucucaagauaugc

SEQ ID NO: 2608377 - RNA, 19 nt, Artificial Sequence
  Description of Artificial Sequence: Synthetic oligonucleotide
guuacagagcgaaggcagc

SEQ ID NO: 2608378 - RNA, 19 nt, Artificial Sequence
  Description of Artificial Sequence: Synthetic oligonucleotide
ccucuuagcucucuuuucc

SEQ ID NO: 2608379 - RNA, 19 nt, Artificial Sequence
  Description of Artificial Sequence: Synthetic oligonucleotide
augugggaaaauacugcag

SEQ ID NO: 2608380 - RNA, 19 nt, Artificial Sequence
  Description of Artificial Sequence: Synthetic oligonucleotide
gagugguggguggaugggg

SEQ ID NO: 2608381 - RNA, 19 nt, Artificial Sequence
  Description of Artificial Sequence: Synthetic oligonucleotide
uucucaagauaugcccuga

SEQ ID NO: 2608382 - RNA, 19 nt, Artificial Sequence
  Description of Artificial Sequence: Synthetic oligonucleotide
acgggguacuggaagacag

SEQ ID NO: 2608383 - RNA, 19 nt, Artificial Sequence
  Description of Artificial Sequence: Synthetic oligonucleotide
agugguucugauggguuca

SEQ ID NO: 2608384 - RNA, 19 nt, Artificial Sequence
  Description of Artificial Sequence: Synthetic oligonucleotide
uccagcaagauggcagcug

SEQ ID NO: 2608385 - RNA, 19 nt, Artificial Sequence
  Description of Artificial Sequence: Synthetic oligonucleotide
uucuuucgguuguggaggu

SEQ ID NO: 2608386 - RNA, 19 nt, Artificial Sequence
  Description of Artificial Sequence: Synthetic oligonucleotide
ucacuuccuugguugagua

SEQ ID NO: 2608387 - RNA, 19 nt, Artificial Sequence
  Description of Artificial Sequence: Synthetic oligonucleotide
cuggaaggagcggucacag

SEQ ID NO: 2608388 - RNA, 19 nt, Artificial Sequence
  Description of Artificial Sequence: Synthetic oligonucleotide
ccaggugacccucaggaag

SEQ ID NO: 2608389 - RNA, 19 nt, Artificial Sequence
  Description of Artificial Sequence: Synthetic oligonucleotide
ucucacccaucuucucaag

SEQ ID NO: 2608390 - RNA, 19 nt, Artificial Sequence
  Description of Artificial Sequence: Synthetic oligonucleotide
uuggagccaaagucgcacu

SEQ ID NO: 2608391 - RNA, 19 nt, Artificial Sequence
  Description of Artificial Sequence: Synthetic oligonucleotide
aaagucgcacuggccuguc

SEQ ID NO: 2608392 - RNA, 19 nt, Artificial Sequence
  Description of Artificial Sequence: Synthetic oligonucleotide
gaguaacugucuuuauacu

SEQ ID NO: 2608393 - RNA, 19 nt, Artificial Sequence
  Description of Artificial Sequence: Synthetic oligonucleotide
gagcucagccucuuagcuc

SEQ ID NO: 2608394 - RNA, 19 nt, Artificial Sequence
  Description of Artificial Sequence: Synthetic oligonucleotide
agcccauuuaggugcuucu

SEQ ID NO: 2608395 - RNA, 19 nt, Artificial Sequence
  Description of Artificial Sequence: Synthetic oligonucleotide
gggguuacagagcgaaggc

SEQ ID NO: 2608396 - RNA, 19 nt, Artificial Sequence
  Description of Artificial Sequence: Synthetic oligonucleotide
gggucucuuauucugcuca

SEQ ID NO: 2608397 - RNA, 19 nt, Artificial Sequence
  Description of Artificial Sequence: Synthetic oligonucleotide
cucuuauucugcucaucca

SEQ ID NO: 2608398 - RNA, 19 nt, Artificial Sequence
  Description of Artificial Sequence: Synthetic oligonucleotide
ugguugaguaacugucuuu

SEQ ID NO: 2608399 - RNA, 19 nt, Artificial Sequence
  Description of Artificial Sequence: Synthetic oligonucleotide
cagugguucugauggguuc

SEQ ID NO: 2608400 - RNA, 19 nt, Artificial Sequence
  Description of Artificial Sequence: Synthetic oligonucleotide
agccaaagucgcacuggcc

SEQ ID NO: 2608401 - RNA, 19 nt, Artificial Sequence
  Description of Artificial Sequence: Synthetic oligonucleotide
ggccuugagaugcugcagc

SEQ ID NO: 2608402 - RNA, 19 nt, Artificial Sequence
  Description of Artificial Sequence: Synthetic oligonucleotide
cucguucugacauguggga

SEQ ID NO: 2608403 - RNA, 19 nt, Artificial Sequence
  Description of Artificial Sequence: Synthetic oligonucleotide
ccauuuaggugcuucuuuc

SEQ ID NO: 2608404 - RNA, 19 nt, Artificial Sequence
  Description of Artificial Sequence: Synthetic oligonucleotide
agcggucacaguaaucaca

SEQ ID NO: 2608405 - RNA, 19 nt, Artificial Sequence
  Description of Artificial Sequence: Synthetic oligonucleotide
acuugggacugagcucagc

SEQ ID NO: 2608406 - RNA, 19 nt, Artificial Sequence
  Description of Artificial Sequence: Synthetic oligonucleotide
agaugcugcagcccauuua

SEQ ID NO: 2608407 - RNA, 19 nt, Artificial Sequence
  Description of Artificial Sequence: Synthetic oligonucleotide
agcugcaucucggaacaug

SEQ ID NO: 2608408 - RNA, 19 nt, Artificial Sequence
  Description of Artificial Sequence: Synthetic oligonucleotide
gguuguccuggaaggagcg

SEQ ID NO: 2608409 - RNA, 19 nt, Artificial Sequence
  Description of Artificial Sequence: Synthetic oligonucleotide
cacaguaaucacagaagua

SEQ ID NO: 2608410 - RNA, 19 nt, Artificial Sequence
  Description of Artificial Sequence: Synthetic oligonucleotide
uguggagguuguccuggaa

SEQ ID NO: 2608411 - RNA, 19 nt, Artificial Sequence
  Description of Artificial Sequence: Synthetic oligonucleotide
ggagccaaagucgcacugg

SEQ ID NO: 2608412 - RNA, 19 nt, Artificial Sequence
  Description of Artificial Sequence: Synthetic oligonucleotide
cagaucucguucugacaug

SEQ ID NO: 2608413 - RNA, 19 nt, Artificial Sequence
  Description of Artificial Sequence: Synthetic oligonucleotide
aagucaggcaggggaggug

SEQ ID NO: 2608414 - RNA, 19 nt, Artificial Sequence
  Description of Artificial Sequence: Synthetic oligonucleotide
cuugguugaguaacugucu

SEQ ID NO: 2608415 - RNA, 19 nt, Artificial Sequence
  Description of Artificial Sequence: Synthetic oligonucleotide
cucuuagcucucuuuucca

SEQ ID NO: 2608416 - RNA, 19 nt, Artificial Sequence
  Description of Artificial Sequence: Synthetic oligonucleotide
ucguucugacaugugggaa

SEQ ID NO: 2608417 - RNA, 19 nt, Artificial Sequence
  Description of Artificial Sequence: Synthetic oligonucleotide
cucggaacaugucguacca

SEQ ID NO: 2608418 - RNA, 19 nt, Artificial Sequence
  Description of Artificial Sequence: Synthetic oligonucleotide
gagcggucacaguaaucac

SEQ ID NO: 2608419 - RNA, 19 nt, Artificial Sequence
  Description of Artificial Sequence: Synthetic oligonucleotide
gaaguaucgcuuccccaua

SEQ ID NO: 2608420 - RNA, 19 nt, Artificial Sequence
  Description of Artificial Sequence: Synthetic oligonucleotide
cagaaguaucgcuucccca

SEQ ID NO: 2608421 - RNA, 19 nt, Artificial Sequence
  Description of Artificial Sequence: Synthetic oligonucleotide
ugauggguucaguccugcu

SEQ ID NO: 2608422 - RNA, 19 nt, Artificial Sequence
  Description of Artificial Sequence: Synthetic oligonucleotide
acaccuucuuggccuugag

SEQ ID NO: 2608423 - RNA, 19 nt, Artificial Sequence
  Description of Artificial Sequence: Synthetic oligonucleotide
guuucucacccaucuucuc

SEQ ID NO: 2608424 - RNA, 19 nt, Artificial Sequence
  Description of Artificial Sequence: Synthetic oligonucleotide
ccagucuuccaggugaccc

SEQ ID NO: 2608425 - RNA, 19 nt, Artificial Sequence
  Description of Artificial Sequence: Synthetic oligonucleotide
gguugaguaacugucuuua

SEQ ID NO: 2608426 - RNA, 19 nt, Artificial Sequence
  Description of Artificial Sequence: Synthetic oligonucleotide
uacuugggacugagcucag

SEQ ID NO: 2608427 - RNA, 19 nt, Artificial Sequence
  Description of Artificial Sequence: Synthetic oligonucleotide
augcucaguuccugcagau

SEQ ID NO: 2608428 - RNA, 19 nt, Artificial Sequence
  Description of Artificial Sequence: Synthetic oligonucleotide
cucguaugcucaguuccug

SEQ ID NO: 2608429 - RNA, 19 nt, Artificial Sequence
  Description of Artificial Sequence: Synthetic oligonucleotide
gcuacuugggacugagcuc

SEQ ID NO: 2608430 - RNA, 19 nt, Artificial Sequence
  Description of Artificial Sequence: Synthetic oligonucleotide
gggguacuggaagacagug

SEQ ID NO: 2608431 - RNA, 19 nt, Artificial Sequence
  Description of Artificial Sequence: Synthetic oligonucleotide
ucugggcuguaggggaccc

SEQ ID NO: 2608432 - RNA, 19 nt, Artificial Sequence
  Description of Artificial Sequence: Synthetic oligonucleotide
aagucgcacuggccuguca

SEQ ID NO: 2608433 - RNA, 19 nt, Artificial Sequence
  Description of Artificial Sequence: Synthetic oligonucleotide
gccaaagucgcacuggccu

SEQ ID NO: 2608434 - RNA, 19 nt, Artificial Sequence
  Description of Artificial Sequence: Synthetic oligonucleotide
cucacccaucuucucaaga

SEQ ID NO: 2608435 - RNA, 19 nt, Artificial Sequence
  Description of Artificial Sequence: Synthetic oligonucleotide
ggaacaugucguaccacac

SEQ ID NO: 2608436 - RNA, 19 nt, Artificial Sequence
  Description of Artificial Sequence: Synthetic oligonucleotide
accagaagucaggcagggg

SEQ ID NO: 2608437 - RNA, 19 nt, Artificial Sequence
  Description of Artificial Sequence: Synthetic oligonucleotide
caccucguaugcucaguuc

SEQ ID NO: 2608438 - RNA, 19 nt, Artificial Sequence
  Description of Artificial Sequence: Synthetic oligonucleotide
uggguucaguccugcuacu

SEQ ID NO: 2608439 - RNA, 19 nt, Artificial Sequence
  Description of Artificial Sequence: Synthetic oligonucleotide
cccaacucugggcuguagg

SEQ ID NO: 2608440 - RNA, 19 nt, Artificial Sequence
  Description of Artificial Sequence: Synthetic oligonucleotide
ucgcacuggccugucagaa

SEQ ID NO: 2608441 - RNA, 19 nt, Artificial Sequence
  Description of Artificial Sequence: Synthetic oligonucleotide
gccuugagaugcugcagcc

SEQ ID NO: 2608442 - RNA, 19 nt, Artificial Sequence
  Description of Artificial Sequence: Synthetic oligonucleotide
guggauggggaggccaagc

SEQ ID NO: 2608443 - RNA, 19 nt, Artificial Sequence
  Description of Artificial Sequence: Synthetic oligonucleotide
uggaaggagcggucacagu

SEQ ID NO: 2608444 - RNA, 19 nt, Artificial Sequence
  Description of Artificial Sequence: Synthetic oligonucleotide
cugcaucucggaacauguc

SEQ ID NO: 2608445 - RNA, 19 nt, Artificial Sequence
  Description of Artificial Sequence: Synthetic oligonucleotide
agccagucuuccaggugac

SEQ ID NO: 2608446 - RNA, 19 nt, Artificial Sequence
  Description of Artificial Sequence: Synthetic oligonucleotide
cauugguggccagcccacg

SEQ ID NO: 2608447 - RNA, 19 nt, Artificial Sequence
  Description of Artificial Sequence: Synthetic oligonucleotide
cuccaccucguaugcucag

SEQ ID NO: 2608448 - RNA, 19 nt, Artificial Sequence
  Description of Artificial Sequence: Synthetic oligonucleotide
ucggaacaugucguaccac

SEQ ID NO: 2608449 - RNA, 19 nt, Artificial Sequence
  Description of Artificial Sequence: Synthetic oligonucleotide
aggagcggucacaguaauc

SEQ ID NO: 2608450 - RNA, 19 nt, Artificial Sequence
  Description of Artificial Sequence: Synthetic oligonucleotide
ucgcuuccccauagccacc

SEQ ID NO: 2608451 - RNA, 19 nt, Artificial Sequence
  Description of Artificial Sequence: Synthetic oligonucleotide
cugcuacuugggacugagc

SEQ ID NO: 2608452 - RNA, 19 nt, Artificial Sequence
  Description of Artificial Sequence: Synthetic oligonucleotide
ggaggccaagcucaugguc

SEQ ID NO: 2608453 - RNA, 19 nt, Artificial Sequence
  Description of Artificial Sequence: Synthetic oligonucleotide
ggaaaauacugcaguugga

SEQ ID NO: 2608454 - RNA, 19 nt, Artificial Sequence
  Description of Artificial Sequence: Synthetic oligonucleotide
guaggggacccauccucca

SEQ ID NO: 2608455 - RNA, 19 nt, Artificial Sequence
  Description of Artificial Sequence: Synthetic oligonucleotide
ugcucaguuccugcagauc

SEQ ID NO: 2608456 - RNA, 19 nt, Artificial Sequence
  Description of Artificial Sequence: Synthetic oligonucleotide
uacagagcgaaggcagcuu

SEQ ID NO: 2608457 - RNA, 19 nt, Artificial Sequence
  Description of Artificial Sequence: Synthetic oligonucleotide
caguggccauucucuggcc

SEQ ID NO: 2608458 - RNA, 19 nt, Artificial Sequence
  Description of Artificial Sequence: Synthetic oligonucleotide
ccaaagucgcacuggccug

SEQ ID NO: 2608459 - RNA, 19 nt, Artificial Sequence
  Description of Artificial Sequence: Synthetic oligonucleotide
cagcuccugcauugguggc

SEQ ID NO: 2608460 - RNA, 19 nt, Artificial Sequence
  Description of Artificial Sequence: Synthetic oligonucleotide
cuaugccuggugaccagaa

SEQ ID NO: 2608461 - RNA, 19 nt, Artificial Sequence
  Description of Artificial Sequence: Synthetic oligonucleotide
augucguaccacaccuucu

SEQ ID NO: 2608462 - RNA, 19 nt, Artificial Sequence
  Description of Artificial Sequence: Synthetic oligonucleotide
augcugcagcccauuuagg

SEQ ID NO: 2608463 - RNA, 19 nt, Artificial Sequence
  Description of Artificial Sequence: Synthetic oligonucleotide
acagugguucugauggguu

SEQ ID NO: 2608464 - RNA, 19 nt, Artificial Sequence
  Description of Artificial Sequence: Synthetic oligonucleotide
acuggccugucagaagaaa

SEQ ID NO: 2608465 - RNA, 19 nt, Artificial Sequence
  Description of Artificial Sequence: Synthetic oligonucleotide
aguuggagccaaagucgca

SEQ ID NO: 2608466 - RNA, 19 nt, Artificial Sequence
  Description of Artificial Sequence: Synthetic oligonucleotide
ggaagcucagcagucucca

SEQ ID NO: 2608467 - RNA, 19 nt, Artificial Sequence
  Description of Artificial Sequence: Synthetic oligonucleotide
cagagcgaaggcagcuuca

SEQ ID NO: 2608468 - RNA, 19 nt, Artificial Sequence
  Description of Artificial Sequence: Synthetic oligonucleotide
gugggaaaauacugcaguu

SEQ ID NO: 2608469 - RNA, 19 nt, Artificial Sequence
  Description of Artificial Sequence: Synthetic oligonucleotide
cagcccauuuaggugcuuc

SEQ ID NO: 2608470 - RNA, 19 nt, Artificial Sequence
  Description of Artificial Sequence: Synthetic oligonucleotide
cagcccacgggguacugga

SEQ ID NO: 2608471 - RNA, 19 nt, Artificial Sequence
  Description of Artificial Sequence: Synthetic oligonucleotide
ggcagcuccugcauuggug

SEQ ID NO: 2608472 - RNA, 19 nt, Artificial Sequence
  Description of Artificial Sequence: Synthetic oligonucleotide
gcccacgggguacuggaag

SEQ ID NO: 2608473 - RNA, 19 nt, Artificial Sequence
  Description of Artificial Sequence: Synthetic oligonucleotide
gcagggucucuuauucugc

SEQ ID NO: 2608474 - RNA, 19 nt, Artificial Sequence
  Description of Artificial Sequence: Synthetic oligonucleotide
cuuccuugguugaguaacu

SEQ ID NO: 2608475 - RNA, 19 nt, Artificial Sequence
  Description of Artificial Sequence: Synthetic oligonucleotide
gucgcacuggccugucaga

SEQ ID NO: 2608476 - RNA, 19 nt, Artificial Sequence
  Description of Artificial Sequence: Synthetic oligonucleotide
uggcccgucucuccuccuc

SEQ ID NO: 2608477 - RNA, 19 nt, Artificial Sequence
  Description of Artificial Sequence: Synthetic oligonucleotide
cacccaucuucucaagaua

SEQ ID NO: 2608478 - RNA, 19 nt, Artificial Sequence
  Description of Artificial Sequence: Synthetic oligonucleotide
uacugcaguuggagccaaa

SEQ ID NO: 2608479 - RNA, 19 nt, Artificial Sequence
  Description of Artificial Sequence: Synthetic oligonucleotide
ccugcuacuugggacugag

SEQ ID NO: 2608480 - RNA, 19 nt, Artificial Sequence
  Description of Artificial Sequence: Synthetic oligonucleotide
gccucuuagcucucuuuuc

SEQ ID NO: 2608481 - RNA, 19 nt, Artificial Sequence
  Description of Artificial Sequence: Synthetic oligonucleotide
cugucagaagaaacuuccu

SEQ ID NO: 2608482 - RNA, 19 nt, Artificial Sequence
  Description of Artificial Sequence: Synthetic oligonucleotide
auccagcaagauggcagcu

SEQ ID NO: 2608483 - RNA, 19 nt, Artificial Sequence
  Description of Artificial Sequence: Synthetic oligonucleotide
caucucggaacaugucgua

SEQ ID NO: 2608484 - RNA, 19 nt, Artificial Sequence
  Description of Artificial Sequence: Synthetic oligonucleotide
agccccaacucugggcugu

SEQ ID NO: 2608485 - RNA, 19 nt, Artificial Sequence
  Description of Artificial Sequence: Synthetic oligonucleotide
uggccauucucuggcccgu

SEQ ID NO: 2608486 - RNA, 19 nt, Artificial Sequence
  Description of Artificial Sequence: Synthetic oligonucleotide
ggguuacagagcgaaggca

SEQ ID NO: 2608487 - RNA, 19 nt, Artificial Sequence
  Description of Artificial Sequence: Synthetic oligonucleotide
uucgguuguggagguuguc

SEQ ID NO: 2608488 - RNA, 19 nt, Artificial Sequence
  Description of Artificial Sequence: Synthetic oligonucleotide
cuuccugcagggucucuua

SEQ ID NO: 2608489 - RNA, 19 nt, Artificial Sequence
  Description of Artificial Sequence: Synthetic oligonucleotide
accacaccuucuuggccuu

SEQ ID NO: 2608490 - RNA, 19 nt, Artificial Sequence
  Description of Artificial Sequence: Synthetic oligonucleotide
guccugcuacuugggacug

SEQ ID NO: 2608491 - RNA, 19 nt, Artificial Sequence
  Description of Artificial Sequence: Synthetic oligonucleotide
cauucucuggcccgucucu

SEQ ID NO: 2608492 - RNA, 19 nt, Artificial Sequence
  Description of Artificial Sequence: Synthetic oligonucleotide
cagucuccaguggccauuc

SEQ ID NO: 2608493 - RNA, 19 nt, Artificial Sequence
  Description of Artificial Sequence: Synthetic oligonucleotide
uggccagcccacgggguac

SEQ ID NO: 2608494 - RNA, 19 nt, Artificial Sequence
  Description of Artificial Sequence: Synthetic oligonucleotide
uucugacaugugggaaaau

SEQ ID NO: 2608495 - RNA, 19 nt, Artificial Sequence
  Description of Artificial Sequence: Synthetic oligonucleotide
cggaacaugucguaccaca

SEQ ID NO: 2608496 - RNA, 19 nt, Artificial Sequence
  Description of Artificial Sequence: Synthetic oligonucleotide
ggugcuucuuucgguugug

SEQ ID NO: 2608497 - RNA, 19 nt, Artificial Sequence
  Description of Artificial Sequence: Synthetic oligonucleotide
ccuugagaugcugcagccc

SEQ ID NO: 2608498 - RNA, 19 nt, Artificial Sequence
  Description of Artificial Sequence: Synthetic oligonucleotide
uccugcuacuugggacuga

SEQ ID NO: 2608499 - RNA, 19 nt, Artificial Sequence
  Description of Artificial Sequence: Synthetic oligonucleotide
auacugcaguuggagccaa

SEQ ID NO: 2608500 - RNA, 19 nt, Artificial Sequence
  Description of Artificial Sequence: Synthetic oligonucleotide
cacuuccuugguugaguaa

SEQ ID NO: 2608501 - RNA, 19 nt, Artificial Sequence
  Description of Artificial Sequence: Synthetic oligonucleotide
gagcgaaggcagcuucacu

SEQ ID NO: 2608502 - RNA, 19 nt, Artificial Sequence
  Description of Artificial Sequence: Synthetic oligonucleotide
cagucuuccaggugacccu

SEQ ID NO: 2608503 - RNA, 19 nt, Artificial Sequence
  Description of Artificial Sequence: Synthetic oligonucleotide
ggcccgucucuccuccucc

SEQ ID NO: 2608504 - RNA, 19 nt, Artificial Sequence
  Description of Artificial Sequence: Synthetic oligonucleotide
cugcaguuggagccaaagu

SEQ ID NO: 2608505 - RNA, 19 nt, Artificial Sequence
  Description of Artificial Sequence: Synthetic oligonucleotide
aggugacccucaggaagcu

SEQ ID NO: 2608506 - RNA, 19 nt, Artificial Sequence
  Description of Artificial Sequence: Synthetic oligonucleotide
ccgucucuccuccuccacc

SEQ ID NO: 2608507 - RNA, 19 nt, Artificial Sequence
  Description of Artificial Sequence: Synthetic oligonucleotide
ggagguuguccuggaagga

SEQ ID NO: 2608508 - RNA, 19 nt, Artificial Sequence
  Description of Artificial Sequence: Synthetic oligonucleotide
cacgggguacuggaagaca

SEQ ID NO: 2608509 - RNA, 19 nt, Artificial Sequence
  Description of Artificial Sequence: Synthetic oligonucleotide
cguucugacaugugggaaa

SEQ ID NO: 2608510 - RNA, 19 nt, Artificial Sequence
  Description of Artificial Sequence: Synthetic oligonucleotide
cagccccaacucugggcug

SEQ ID NO: 2608511 - RNA, 19 nt, Artificial Sequence
  Description of Artificial Sequence: Synthetic oligonucleotide
cguaugcucaguuccugca

SEQ ID NO: 2608512 - RNA, 19 nt, Artificial Sequence
  Description of Artificial Sequence: Synthetic oligonucleotide
ucuuucgguuguggagguu

SEQ ID NO: 2608513 - RNA, 19 nt, Artificial Sequence
  Description of Artificial Sequence: Synthetic oligonucleotide
gggacccauccuccaggag

SEQ ID NO: 2608514 - RNA, 19 nt, Artificial Sequence
  Description of Artificial Sequence: Synthetic oligonucleotide
ccauucucuggcccgucuc

SEQ ID NO: 2608515 - RNA, 19 nt, Artificial Sequence
  Description of Artificial Sequence: Synthetic oligonucleotide
acaugucguaccacaccuu

SEQ ID NO: 2608516 - RNA, 19 nt, Artificial Sequence
  Description of Artificial Sequence: Synthetic oligonucleotide
gagaugcugcagcccauuu

SEQ ID NO: 2608517 - RNA, 19 nt, Artificial Sequence
  Description of Artificial Sequence: Synthetic oligonucleotide
gacugagcucagccucuua

SEQ ID NO: 2608518 - RNA, 19 nt, Artificial Sequence
  Description of Artificial Sequence: Synthetic oligonucleotide
gcaucucggaacaugucgu

SEQ ID NO: 2608519 - RNA, 19 nt, Artificial Sequence
  Description of Artificial Sequence: Synthetic oligonucleotide
gcauugguggccagcccac

SEQ ID NO: 2608520 - RNA, 19 nt, Artificial Sequence
  Description of Artificial Sequence: Synthetic oligonucleotide
guggccagcccacggggua

SEQ ID NO: 2608521 - RNA, 19 nt, Artificial Sequence
  Description of Artificial Sequence: Synthetic oligonucleotide
ggggacccauccuccagga

SEQ ID NO: 2608522 - RNA, 19 nt, Artificial Sequence
  Description of Artificial Sequence: Synthetic oligonucleotide
cuccugcauugguggccag

SEQ ID NO: 2608523 - RNA, 19 nt, Artificial Sequence
  Description of Artificial Sequence: Synthetic oligonucleotide
cacuggccugucagaagaa

SEQ ID NO: 2608524 - RNA, 19 nt, Artificial Sequence
  Description of Artificial Sequence: Synthetic oligonucleotide
ccucaggaagcucagcagu

SEQ ID NO: 2608525 - RNA, 19 nt, Artificial Sequence
  Description of Artificial Sequence: Synthetic oligonucleotide
caaagucgcacuggccugu

SEQ ID NO: 2608526 - RNA, 19 nt, Artificial Sequence
  Description of Artificial Sequence: Synthetic oligonucleotide
cccacgggguacuggaaga

SEQ ID NO: 2608527 - RNA, 19 nt, Artificial Sequence
  Description of Artificial Sequence: Synthetic oligonucleotide
ccuccaccucguaugcuca

SEQ ID NO: 2608528 - RNA, 19 nt, Artificial Sequence
  Description of Artificial Sequence: Synthetic oligonucleotide
ggucucuuauucugcucau

SEQ ID NO: 2608529 - RNA, 19 nt, Artificial Sequence
  Description of Artificial Sequence: Synthetic oligonucleotide
ccacgggguacuggaagac

SEQ ID NO: 2608530 - RNA, 19 nt, Artificial Sequence
  Description of Artificial Sequence: Synthetic oligonucleotide
gcuguaggggacccauccu

SEQ ID NO: 2608531 - RNA, 19 nt, Artificial Sequence
  Description of Artificial Sequence: Synthetic oligonucleotide
ggaagacagugguucugau

SEQ ID NO: 2608532 - RNA, 19 nt, Artificial Sequence
  Description of Artificial Sequence: Synthetic oligonucleotide
ccagcccacgggguacugg

SEQ ID NO: 2608533 - RNA, 19 nt, Artificial Sequence
  Description of Artificial Sequence: Synthetic oligonucleotide
gccagucuuccaggugacc

SEQ ID NO: 2608534 - RNA, 19 nt, Artificial Sequence
  Description of Artificial Sequence: Synthetic oligonucleotide
ggugacccucaggaagcuc

SEQ ID NO: 2608535 - RNA, 19 nt, Artificial Sequence
  Description of Artificial Sequence: Synthetic oligonucleotide
guacuggaagacagugguu

SEQ ID NO: 2608536 - RNA, 19 nt, Artificial Sequence
  Description of Artificial Sequence: Synthetic oligonucleotide
gggugcccgcaggacgggg

SEQ ID NO: 2608537 - RNA, 19 nt, Artificial Sequence
  Description of Artificial Sequence: Synthetic oligonucleotide
ggccugucagaagaaacuu

SEQ ID NO: 2608538 - RNA, 19 nt, Artificial Sequence
  Description of Artificial Sequence: Synthetic oligonucleotide
ccucguaugcucaguuccu

SEQ ID NO: 2608539 - RNA, 19 nt, Artificial Sequence
  Description of Artificial Sequence: Synthetic oligonucleotide
gggaggccaagcucauggu

SEQ ID NO: 2608540 - RNA, 19 nt, Artificial Sequence
  Description of Artificial Sequence: Synthetic oligonucleotide
cccauuuaggugcuucuuu

SEQ ID NO: 2608541 - RNA, 19 nt, Artificial Sequence
  Description of Artificial Sequence: Synthetic oligonucleotide
ggguggauggggaggccaa

SEQ ID NO: 2608542 - RNA, 19 nt, Artificial Sequence
  Description of Artificial Sequence: Synthetic oligonucleotide
gggacugagcucagccucu

SEQ ID NO: 2608543 - RNA, 19 nt, Artificial Sequence
  Description of Artificial Sequence: Synthetic oligonucleotide
agcccacgggguacuggaa

SEQ ID NO: 2608544 - RNA, 19 nt, Artificial Sequence
  Description of Artificial Sequence: Synthetic oligonucleotide
ggggugcccgcaggacggg

SEQ ID NO: 2608545 - RNA, 19 nt, Artificial Sequence
  Description of Artificial Sequence: Synthetic oligonucleotide
gcccgucucuccuccucca

SEQ ID NO: 2608546 - RNA, 19 nt, Artificial Sequence
  Description of Artificial Sequence: Synthetic oligonucleotide
gccauucucuggcccgucu

SEQ ID NO: 2608547 - RNA, 19 nt, Artificial Sequence
  Description of Artificial Sequence: Synthetic oligonucleotide
ggccaagcucauggucuca

SEQ ID NO: 2608548 - RNA, 19 nt, Artificial Sequence
  Description of Artificial Sequence: Synthetic oligonucleotide
gcucauggucucagaggcu

SEQ ID NO: 2608549 - RNA, 19 nt, Artificial Sequence
  Description of Artificial Sequence: Synthetic oligonucleotide
ccccaacucugggcuguag

SEQ ID NO: 2608550 - RNA, 19 nt, Artificial Sequence
  Description of Artificial Sequence: Synthetic oligonucleotide
ggccauucucuggcccguc

SEQ ID NO: 2608551 - RNA, 19 nt, Artificial Sequence
  Description of Artificial Sequence: Synthetic oligonucleotide
ggguucaguccugcuacuu

SEQ ID NO: 2608552 - RNA, 19 nt, Artificial Sequence
  Description of Artificial Sequence: Synthetic oligonucleotide
ccaccucguaugcucaguu

SEQ ID NO: 2608553 - RNA, 19 nt, Artificial Sequence
  Description of Artificial Sequence: Synthetic oligonucleotide
gcccauuuaggugcuucuu

SEQ ID NO: 2608554 - RNA, 19 nt, Artificial Sequence
  Description of Artificial Sequence: Synthetic oligonucleotide
cuggcccgucucuccuccu

SEQ ID NO: 2608555 - RNA, 19 nt, Artificial Sequence
  Description of Artificial Sequence: Synthetic oligonucleotide
cgggguacuggaagacagu

SEQ ID NO: 2608556 - RNA, 19 nt, Artificial Sequence
  Description of Artificial Sequence: Synthetic oligonucleotide
cagcugcaucucggaacau

SEQ ID NO: 2608557 - RNA, 19 nt, Artificial Sequence
  Description of Artificial Sequence: Synthetic oligonucleotide
cgcuuccccauagccaccu

SEQ ID NO: 2608558 - RNA, 19 nt, Artificial Sequence
  Description of Artificial Sequence: Synthetic oligonucleotide
gccccaacucugggcugua

SEQ ID NO: 2608559 - RNA, 19 nt, Artificial Sequence
  Description of Artificial Sequence: Synthetic oligonucleotide
gcagcccauuuaggugcuu

SEQ ID NO: 2608560 - RNA, 19 nt, Artificial Sequence
  Description of Artificial Sequence: Synthetic oligonucleotide
uucuacaccacaaaguaag

SEQ ID NO: 2608561 - RNA, 19 nt, Artificial Sequence
  Description of Artificial Sequence: Synthetic oligonucleotide
uuaauuaucaguccaaauu

SEQ ID NO: 2608562 - RNA, 19 nt, Artificial Sequence
  Description of Artificial Sequence: Synthetic oligonucleotide
uaauuaucaguccaaauuc

SEQ ID NO: 2608563 - RNA, 19 nt, Artificial Sequence
  Description of Artificial Sequence: Synthetic oligonucleotide
aguaagaacagucauuuaa

SEQ ID NO: 2608564 - RNA, 19 nt, Artificial Sequence
  Description of Artificial Sequence: Synthetic oligonucleotide
aaaguaagaacagucauuu

SEQ ID NO: 2608565 - RNA, 19 nt, Artificial Sequence
  Description of Artificial Sequence: Synthetic oligonucleotide
ugccgcuugaucuuggacg

SEQ ID NO: 2608566 - RNA, 19 nt, Artificial Sequence
  Description of Artificial Sequence: Synthetic oligonucleotide
ucgcuaggcauccagauca

SEQ ID NO: 2608567 - RNA, 19 nt, Artificial Sequence
  Description of Artificial Sequence: Synthetic oligonucleotide
uacaccacaaaguaagaac

SEQ ID NO: 2608568 - RNA, 19 nt, Artificial Sequence
  Description of Artificial Sequence: Synthetic oligonucleotide
uggaacuuaagcuuccgca

SEQ ID NO: 2608569 - RNA, 19 nt, Artificial Sequence
  Description of Artificial Sequence: Synthetic oligonucleotide
aacguccuugcuucuacac

SEQ ID NO: 2608570 - RNA, 19 nt, Artificial Sequence
  Description of Artificial Sequence: Synthetic oligonucleotide
uaguugugaagccucgggg

SEQ ID NO: 2608571 - RNA, 19 nt, Artificial Sequence
  Description of Artificial Sequence: Synthetic oligonucleotide
aacagcgccgccgaggcgc

SEQ ID NO: 2608572 - RNA, 19 nt, Artificial Sequence
  Description of Artificial Sequence: Synthetic oligonucleotide
aggguaacguccuugcuuc

SEQ ID NO: 2608573 - RNA, 19 nt, Artificial Sequence
  Description of Artificial Sequence: Synthetic oligonucleotide
gagcaaaguaggcaggcgg

SEQ ID NO: 2608574 - RNA, 19 nt, Artificial Sequence
  Description of Artificial Sequence: Synthetic oligonucleotide
acagucauuuaauuaucag

SEQ ID NO: 2608575 - RNA, 19 nt, Artificial Sequence
  Description of Artificial Sequence: Synthetic oligonucleotide
cucguuguacuccagcacg

SEQ ID NO: 2608576 - RNA, 19 nt, Artificial Sequence
  Description of Artificial Sequence: Synthetic oligonucleotide
acaaaguaagaacagucau

SEQ ID NO: 2608577 - RNA, 19 nt, Artificial Sequence
  Description of Artificial Sequence: Synthetic oligonucleotide
agugacaaaguccuccaug

SEQ ID NO: 2608578 - RNA, 19 nt, Artificial Sequence
  Description of Artificial Sequence: Synthetic oligonucleotide
ugcucguggaacuuaagcu

SEQ ID NO: 2608579 - RNA, 19 nt, Artificial Sequence
  Description of Artificial Sequence: Synthetic oligonucleotide
guggguaccaggccgagcg

SEQ ID NO: 2608580 - RNA, 19 nt, Artificial Sequence
  Description of Artificial Sequence: Synthetic oligonucleotide
aucuuggacgaguccaccc

SEQ ID NO: 2608581 - RNA, 19 nt, Artificial Sequence
  Description of Artificial Sequence: Synthetic oligonucleotide
gacgagaaaggcgggaucg

SEQ ID NO: 2608582 - RNA, 19 nt, Artificial Sequence
  Description of Artificial Sequence: Synthetic oligonucleotide
gacgaguccacccaaguga

SEQ ID NO: 2608583 - RNA, 19 nt, Artificial Sequence
  Description of Artificial Sequence: Synthetic oligonucleotide
aacucaggggcgauucucc

SEQ ID NO: 2608584 - RNA, 19 nt, Artificial Sequence
  Description of Artificial Sequence: Synthetic oligonucleotide
cucagcugguuauagcgcg

SEQ ID NO: 2608585 - RNA, 19 nt, Artificial Sequence
  Description of Artificial Sequence: Synthetic oligonucleotide
cucgugaagguuguggucg

SEQ ID NO: 2608586 - RNA, 19 nt, Artificial Sequence
  Description of Artificial Sequence: Synthetic oligonucleotide
uuuaggaaguccaccugcu

SEQ ID NO: 2608587 - RNA, 19 nt, Artificial Sequence
  Description of Artificial Sequence: Synthetic oligonucleotide
acguccuugcuucuacacc

SEQ ID NO: 2608588 - RNA, 19 nt, Artificial Sequence
  Description of Artificial Sequence: Synthetic oligonucleotide
uaucaguccaaauucuaau

SEQ ID NO: 2608589 - RNA, 19 nt, Artificial Sequence
  Description of Artificial Sequence: Synthetic oligonucleotide
ucccaguuuaggaagucca

SEQ ID NO: 2608590 - RNA, 19 nt, Artificial Sequence
  Description of Artificial Sequence: Synthetic oligonucleotide
aaaggcgggaucggugacc

SEQ ID NO: 2608591 - RNA, 19 nt, Artificial Sequence
  Description of Artificial Sequence: Synthetic oligonucleotide
agcacgugccgcuugaucu

SEQ ID NO: 2608592 - RNA, 19 nt, Artificial Sequence
  Description of Artificial Sequence: Synthetic oligonucleotide
ugacccugcuccacaaagg

SEQ ID NO: 2608593 - RNA, 19 nt, Artificial Sequence
  Description of Artificial Sequence: Synthetic oligonucleotide
cacccaagugacaaagucc

SEQ ID NO: 2608594 - RNA, 19 nt, Artificial Sequence
  Description of Artificial Sequence: Synthetic oligonucleotide
ggcucagcugguuauagcg

SEQ ID NO: 2608595 - RNA, 19 nt, Artificial Sequence
  Description of Artificial Sequence: Synthetic oligonucleotide
ucuagugagccgcgcgugg

SEQ ID NO: 2608596 - RNA, 19 nt, Artificial Sequence
  Description of Artificial Sequence: Synthetic oligonucleotide
ucuuggacgaguccaccca

SEQ ID NO: 2608597 - RNA, 19 nt, Artificial Sequence
  Description of Artificial Sequence: Synthetic oligonucleotide
agcuugaggagcaaaguag

SEQ ID NO: 2608598 - RNA, 19 nt, Artificial Sequence
  Description of Artificial Sequence: Synthetic oligonucleotide
agcaaaguaggcaggcggc

SEQ ID NO: 2608599 - RNA, 19 nt, Artificial Sequence
  Description of Artificial Sequence: Synthetic oligonucleotide
uugaggagcaaaguaggca

SEQ ID NO: 2608600 - RNA, 19 nt, Artificial Sequence
  Description of Artificial Sequence: Synthetic oligonucleotide
cacaaaguaagaacaguca

SEQ ID NO: 2608601 - RNA, 19 nt, Artificial Sequence
  Description of Artificial Sequence: Synthetic oligonucleotide
uccagaucaaagucaucgc

SEQ ID NO: 2608602 - RNA, 19 nt, Artificial Sequence
  Description of Artificial Sequence: Synthetic oligonucleotide
agaaaggcgggaucgguga

SEQ ID NO: 2608603 - RNA, 19 nt, Artificial Sequence
  Description of Artificial Sequence: Synthetic oligonucleotide
gucgcagagcucuagugag

SEQ ID NO: 2608604 - RNA, 19 nt, Artificial Sequence
  Description of Artificial Sequence: Synthetic oligonucleotide
agcgcguacagcuugucca

SEQ ID NO: 2608605 - RNA, 19 nt, Artificial Sequence
  Description of Artificial Sequence: Synthetic oligonucleotide
ugaagguuguggucgguga

SEQ ID NO: 2608606 - RNA, 19 nt, Artificial Sequence
  Description of Artificial Sequence: Synthetic oligonucleotide
acaccacaaaguaagaaca

SEQ ID NO: 2608607 - RNA, 19 nt, Artificial Sequence
  Description of Artificial Sequence: Synthetic oligonucleotide
gucgcguuccggcaggucg

SEQ ID NO: 2608608 - RNA, 19 nt, Artificial Sequence
  Description of Artificial Sequence: Synthetic oligonucleotide
ucuacaccacaaaguaaga

SEQ ID NO: 2608609 - RNA, 19 nt, Artificial Sequence
  Description of Artificial Sequence: Synthetic oligonucleotide
auagcgcguguacuccucc

SEQ ID NO: 2608610 - RNA, 19 nt, Artificial Sequence
  Description of Artificial Sequence: Synthetic oligonucleotide
aguuuaggaaguccaccug

SEQ ID NO: 2608611 - RNA, 19 nt, Artificial Sequence
  Description of Artificial Sequence: Synthetic oligonucleotide
gaaggggucgcguuccggc

SEQ ID NO: 2608612 - RNA, 19 nt, Artificial Sequence
  Description of Artificial Sequence: Synthetic oligonucleotide
uuguccaacagcgccgccg

SEQ ID NO: 2608613 - RNA, 19 nt, Artificial Sequence
  Description of Artificial Sequence: Synthetic oligonucleotide
cugcgagugacgagaaagg

SEQ ID NO: 2608614 - RNA, 19 nt, Artificial Sequence
  Description of Artificial Sequence: Synthetic oligonucleotide
aguccaaauucuaauaaaa

SEQ ID NO: 2608615 - RNA, 19 nt, Artificial Sequence
  Description of Artificial Sequence: Synthetic oligonucleotide
caugcguagcuugaggagc

SEQ ID NO: 2608616 - RNA, 19 nt, Artificial Sequence
  Description of Artificial Sequence: Synthetic oligonucleotide
ugagccaugcguagcuuga

SEQ ID NO: 2608617 - RNA, 19 nt, Artificial Sequence
  Description of Artificial Sequence: Synthetic oligonucleotide
uagcuugaggagcaaagua

SEQ ID NO: 2608618 - RNA, 19 nt, Artificial Sequence
  Description of Artificial Sequence: Synthetic oligonucleotide
ucggugaccucccaguuua

SEQ ID NO: 2608619 - RNA, 19 nt, Artificial Sequence
  Description of Artificial Sequence: Synthetic oligonucleotide
ucagugaccuguaguugug

SEQ ID NO: 2608620 - RNA, 19 nt, Artificial Sequence
  Description of Artificial Sequence: Synthetic oligonucleotide
aucaguccaaauucuaaua

SEQ ID NO: 2608621 - RNA, 19 nt, Artificial Sequence
  Description of Artificial Sequence: Synthetic oligonucleotide
auuuaauuaucaguccaaa

SEQ ID NO: 2608622 - RNA, 19 nt, Artificial Sequence
  Description of Artificial Sequence: Synthetic oligonucleotide
gugacccugcuccacaaag

SEQ ID NO: 2608623 - RNA, 19 nt, Artificial Sequence
  Description of Artificial Sequence: Synthetic oligonucleotide
ucggugaccacgucugggc

SEQ ID NO: 2608624 - RNA, 19 nt, Artificial Sequence
  Description of Artificial Sequence: Synthetic oligonucleotide
cucguggaacuuaagcuuc

SEQ ID NO: 2608625 - RNA, 19 nt, Artificial Sequence
  Description of Artificial Sequence: Synthetic oligonucleotide
agcucuagugagccgcgcg

SEQ ID NO: 2608626 - RNA, 19 nt, Artificial Sequence
  Description of Artificial Sequence: Synthetic oligonucleotide
guuauagcgcguguacucc

SEQ ID NO: 2608627 - RNA, 19 nt, Artificial Sequence
  Description of Artificial Sequence: Synthetic oligonucleotide
accacgucugggcccacgc

SEQ ID NO: 2608628 - RNA, 19 nt, Artificial Sequence
  Description of Artificial Sequence: Synthetic oligonucleotide
gaggcgcgcacacggaagg

SEQ ID NO: 2608629 - RNA, 19 nt, Artificial Sequence
  Description of Artificial Sequence: Synthetic oligonucleotide
cugguuauagcgcguguac

SEQ ID NO: 2608630 - RNA, 19 nt, Artificial Sequence
  Description of Artificial Sequence: Synthetic oligonucleotide
uguccaacagcgccgccga

SEQ ID NO: 2608631 - RNA, 19 nt, Artificial Sequence
  Description of Artificial Sequence: Synthetic oligonucleotide
cuguaguugugaagccucg

SEQ ID NO: 2608632 - RNA, 19 nt, Artificial Sequence
  Description of Artificial Sequence: Synthetic oligonucleotide
aaggaggguaacguccuug

SEQ ID NO: 2608633 - RNA, 19 nt, Artificial Sequence
  Description of Artificial Sequence: Synthetic oligonucleotide
caccgcucggcucagcugg

SEQ ID NO: 2608634 - RNA, 19 nt, Artificial Sequence
  Description of Artificial Sequence: Synthetic oligonucleotide
gagucgcagagcucuagug

SEQ ID NO: 2608635 - RNA, 19 nt, Artificial Sequence
  Description of Artificial Sequence: Synthetic oligonucleotide
ccagaucaaagucaucgcg

SEQ ID NO: 2608636 - RNA, 19 nt, Artificial Sequence
  Description of Artificial Sequence: Synthetic oligonucleotide
agcucgugaagguuguggu

SEQ ID NO: 2608637 - RNA, 19 nt, Artificial Sequence
  Description of Artificial Sequence: Synthetic oligonucleotide
uccaacagcgccgccgagg

SEQ ID NO: 2608638 - RNA, 19 nt, Artificial Sequence
  Description of Artificial Sequence: Synthetic oligonucleotide
gugaccuguaguugugaag

SEQ ID NO: 2608639 - RNA, 19 nt, Artificial Sequence
  Description of Artificial Sequence: Synthetic oligonucleotide
cagagcucuagugagccgc

SEQ ID NO: 2608640 - RNA, 19 nt, Artificial Sequence
  Description of Artificial Sequence: Synthetic oligonucleotide
gaacagucauuuaauuauc

SEQ ID NO: 2608641 - RNA, 19 nt, Artificial Sequence
  Description of Artificial Sequence: Synthetic oligonucleotide
ggcgauucuccccaugccg

SEQ ID NO: 2608642 - RNA, 19 nt, Artificial Sequence
  Description of Artificial Sequence: Synthetic oligonucleotide
ugcgagugacgagaaaggc

SEQ ID NO: 2608643 - RNA, 19 nt, Artificial Sequence
  Description of Artificial Sequence: Synthetic oligonucleotide
uuauagcgcguguacuccu

SEQ ID NO: 2608644 - RNA, 19 nt, Artificial Sequence
  Description of Artificial Sequence: Synthetic oligonucleotide
gaagguuguggucggugac

SEQ ID NO: 2608645 - RNA, 19 nt, Artificial Sequence
  Description of Artificial Sequence: Synthetic oligonucleotide
agccaugcguagcuugagg

SEQ ID NO: 2608646 - RNA, 19 nt, Artificial Sequence
  Description of Artificial Sequence: Synthetic oligonucleotide
ucgugaagguuguggucgg

SEQ ID NO: 2608647 - RNA, 19 nt, Artificial Sequence
  Description of Artificial Sequence: Synthetic oligonucleotide
guaacguccuugcuucuac

SEQ ID NO: 2608648 - RNA, 19 nt, Artificial Sequence
  Description of Artificial Sequence: Synthetic oligonucleotide
ugacaaaguccuccaugcu

SEQ ID NO: 2608649 - RNA, 19 nt, Artificial Sequence
  Description of Artificial Sequence: Synthetic oligonucleotide
cacgucugggcccacgcgg

SEQ ID NO: 2608650 - RNA, 19 nt, Artificial Sequence
  Description of Artificial Sequence: Synthetic oligonucleotide
ccacaaaguaagaacaguc

SEQ ID NO: 2608651 - RNA, 19 nt, Artificial Sequence
  Description of Artificial Sequence: Synthetic oligonucleotide
cagucauuuaauuaucagu

SEQ ID NO: 2608652 - RNA, 19 nt, Artificial Sequence
  Description of Artificial Sequence: Synthetic oligonucleotide
aggccgagcgcguacagcu

SEQ ID NO: 2608653 - RNA, 19 nt, Artificial Sequence
  Description of Artificial Sequence: Synthetic oligonucleotide
uuggacgaguccacccaag

SEQ ID NO: 2608654 - RNA, 19 nt, Artificial Sequence
  Description of Artificial Sequence: Synthetic oligonucleotide
aagucaucgcgcuccucgu

SEQ ID NO: 2608655 - RNA, 19 nt, Artificial Sequence
  Description of Artificial Sequence: Synthetic oligonucleotide
agcgcguguacuccucccg

SEQ ID NO: 2608656 - RNA, 19 nt, Artificial Sequence
  Description of Artificial Sequence: Synthetic oligonucleotide
gcugcgagugacgagaaag

SEQ ID NO: 2608657 - RNA, 19 nt, Artificial Sequence
  Description of Artificial Sequence: Synthetic oligonucleotide
gguuauagcgcguguacuc

SEQ ID NO: 2608658 - RNA, 19 nt, Artificial Sequence
  Description of Artificial Sequence: Synthetic oligonucleotide
gagaaaggcgggaucggug

SEQ ID NO: 2608659 - RNA, 19 nt, Artificial Sequence
  Description of Artificial Sequence: Synthetic oligonucleotide
ucugcucguggaacuuaag

SEQ ID NO: 2608660 - RNA, 19 nt, Artificial Sequence
  Description of Artificial Sequence: Synthetic oligonucleotide
acggaaggggucgcguucc

SEQ ID NO: 2608661 - RNA, 19 nt, Artificial Sequence
  Description of Artificial Sequence: Synthetic oligonucleotide
guggaacuuaagcuuccgc

SEQ ID NO: 2608662 - RNA, 19 nt, Artificial Sequence
  Description of Artificial Sequence: Synthetic oligonucleotide
uggucggugaccucccagu

SEQ ID NO: 2608663 - RNA, 19 nt, Artificial Sequence
  Description of Artificial Sequence: Synthetic oligonucleotide
gcggacgugacccugcucc

SEQ ID NO: 2608664 - RNA, 19 nt, Artificial Sequence
  Description of Artificial Sequence: Synthetic oligonucleotide
uucugcucguggaacuuaa

SEQ ID NO: 2608665 - RNA, 19 nt, Artificial Sequence
  Description of Artificial Sequence: Synthetic oligonucleotide
gucaucgcgcuccucguug

SEQ ID NO: 2608666 - RNA, 19 nt, Artificial Sequence
  Description of Artificial Sequence: Synthetic oligonucleotide
gaucggugaccacgucugg

SEQ ID NO: 2608667 - RNA, 19 nt, Artificial Sequence
  Description of Artificial Sequence: Synthetic oligonucleotide
ugacgagaaaggcgggauc

SEQ ID NO: 2608668 - RNA, 19 nt, Artificial Sequence
  Description of Artificial Sequence: Synthetic oligonucleotide
uauagcgcguguacuccuc

SEQ ID NO: 2608669 - RNA, 19 nt, Artificial Sequence
  Description of Artificial Sequence: Synthetic oligonucleotide
ugguuauagcgcguguacu

SEQ ID NO: 2608670 - RNA, 19 nt, Artificial Sequence
  Description of Artificial Sequence: Synthetic oligonucleotide
gaaggcucgcuaggcaucc

SEQ ID NO: 2608671 - RNA, 19 nt, Artificial Sequence
  Description of Artificial Sequence: Synthetic oligonucleotide
aaggggucgcguuccggca

SEQ ID NO: 2608672 - RNA, 19 nt, Artificial Sequence
  Description of Artificial Sequence: Synthetic oligonucleotide
uccaugcugcgagugacga

SEQ ID NO: 2608673 - RNA, 19 nt, Artificial Sequence
  Description of Artificial Sequence: Synthetic oligonucleotide
aaggcgggaucggugacca

SEQ ID NO: 2608674 - RNA, 19 nt, Artificial Sequence
  Description of Artificial Sequence: Synthetic oligonucleotide
aucggugaccacgucuggg

SEQ ID NO: 2608675 - RNA, 19 nt, Artificial Sequence
  Description of Artificial Sequence: Synthetic oligonucleotide
cagcucgugaagguugugg

SEQ ID NO: 2608676 - RNA, 19 nt, Artificial Sequence
  Description of Artificial Sequence: Synthetic oligonucleotide
auuaucaguccaaauucua

SEQ ID NO: 2608677 - RNA, 19 nt, Artificial Sequence
  Description of Artificial Sequence: Synthetic oligonucleotide
ucgcagagcucuagugagc

SEQ ID NO: 2608678 - RNA, 19 nt, Artificial Sequence
  Description of Artificial Sequence: Synthetic oligonucleotide
gaguccacccaagugacaa

SEQ ID NO: 2608679 - RNA, 19 nt, Artificial Sequence
  Description of Artificial Sequence: Synthetic oligonucleotide
uccacccaagugacaaagu

SEQ ID NO: 2608680 - RNA, 19 nt, Artificial Sequence
  Description of Artificial Sequence: Synthetic oligonucleotide
ugugaagccucggggagaa

SEQ ID NO: 2608681 - RNA, 19 nt, Artificial Sequence
  Description of Artificial Sequence: Synthetic oligonucleotide
uaacguccuugcuucuaca

SEQ ID NO: 2608682 - RNA, 19 nt, Artificial Sequence
  Description of Artificial Sequence: Synthetic oligonucleotide
gagcgcguacagcuugucc

SEQ ID NO: 2608683 - RNA, 19 nt, Artificial Sequence
  Description of Artificial Sequence: Synthetic oligonucleotide
ucccgcaccgcucggcuca

SEQ ID NO: 2608684 - RNA, 19 nt, Artificial Sequence
  Description of Artificial Sequence: Synthetic oligonucleotide
agaaggcucgcuaggcauc

SEQ ID NO: 2608685 - RNA, 19 nt, Artificial Sequence
  Description of Artificial Sequence: Synthetic oligonucleotide
ggugcugagccaugcguag

SEQ ID NO: 2608686 - RNA, 19 nt, Artificial Sequence
  Description of Artificial Sequence: Synthetic oligonucleotide
ucgcguuccggcaggucgc

SEQ ID NO: 2608687 - RNA, 19 nt, Artificial Sequence
  Description of Artificial Sequence: Synthetic oligonucleotide
uccagcacgugccgcuuga

SEQ ID NO: 2608688 - RNA, 19 nt, Artificial Sequence
  Description of Artificial Sequence: Synthetic oligonucleotide
gcgagugacgagaaaggcg

SEQ ID NO: 2608689 - RNA, 19 nt, Artificial Sequence
  Description of Artificial Sequence: Synthetic oligonucleotide
aucgcgcuccucguuguac

SEQ ID NO: 2608690 - RNA, 19 nt, Artificial Sequence
  Description of Artificial Sequence: Synthetic oligonucleotide
cuagugagccgcgcguggg

SEQ ID NO: 2608691 - RNA, 19 nt, Artificial Sequence
  Description of Artificial Sequence: Synthetic oligonucleotide
caguuuaggaaguccaccu

SEQ ID NO: 2608692 - RNA, 19 nt, Artificial Sequence
  Description of Artificial Sequence: Synthetic oligonucleotide
gaaaggcgggaucggugac

SEQ ID NO: 2608693 - RNA, 19 nt, Artificial Sequence
  Description of Artificial Sequence: Synthetic oligonucleotide
aggcucgcuaggcauccag

SEQ ID NO: 2608694 - RNA, 19 nt, Artificial Sequence
  Description of Artificial Sequence: Synthetic oligonucleotide
agaacucaggggcgauucu

SEQ ID NO: 2608695 - RNA, 19 nt, Artificial Sequence
  Description of Artificial Sequence: Synthetic oligonucleotide
ucggggagaaggcucgcua

SEQ ID NO: 2608696 - RNA, 19 nt, Artificial Sequence
  Description of Artificial Sequence: Synthetic oligonucleotide
ggaucggugaccacgucug

SEQ ID NO: 2608697 - RNA, 19 nt, Artificial Sequence
  Description of Artificial Sequence: Synthetic oligonucleotide
agugacgagaaaggcggga

SEQ ID NO: 2608698 - RNA, 19 nt, Artificial Sequence
  Description of Artificial Sequence: Synthetic oligonucleotide
caugccgggcucagugacc

SEQ ID NO: 2608699 - RNA, 19 nt, Artificial Sequence
  Description of Artificial Sequence: Synthetic oligonucleotide
acgagaaaggcgggaucgg

SEQ ID NO: 2608700 - RNA, 19 nt, Artificial Sequence
  Description of Artificial Sequence: Synthetic oligonucleotide
cguagcuugaggagcaaag

SEQ ID NO: 2608701 - RNA, 19 nt, Artificial Sequence
  Description of Artificial Sequence: Synthetic oligonucleotide
ucaucgcgcuccucguugu

SEQ ID NO: 2608702 - RNA, 19 nt, Artificial Sequence
  Description of Artificial Sequence: Synthetic oligonucleotide
uugugaagccucggggaga

SEQ ID NO: 2608703 - RNA, 19 nt, Artificial Sequence
  Description of Artificial Sequence: Synthetic oligonucleotide
cucgcuaggcauccagauc

SEQ ID NO: 2608704 - RNA, 19 nt, Artificial Sequence
  Description of Artificial Sequence: Synthetic oligonucleotide
cacgcgcagcucgugaagg

SEQ ID NO: 2608705 - RNA, 19 nt, Artificial Sequence
  Description of Artificial Sequence: Synthetic oligonucleotide
gauucuccccaugccgggc

SEQ ID NO: 2608706 - RNA, 19 nt, Artificial Sequence
  Description of Artificial Sequence: Synthetic oligonucleotide
gaggguaacguccuugcuu

SEQ ID NO: 2608707 - RNA, 19 nt, Artificial Sequence
  Description of Artificial Sequence: Synthetic oligonucleotide
ggggcgauucuccccaugc

SEQ ID NO: 2608708 - RNA, 19 nt, Artificial Sequence
  Description of Artificial Sequence: Synthetic oligonucleotide
gagugacgagaaaggcggg

SEQ ID NO: 2608709 - RNA, 19 nt, Artificial Sequence
  Description of Artificial Sequence: Synthetic oligonucleotide
gagaaggcucgcuaggcau

SEQ ID NO: 2608710 - RNA, 19 nt, Artificial Sequence
  Description of Artificial Sequence: Synthetic oligonucleotide
agagcucuagugagccgcg

SEQ ID NO: 2608711 - RNA, 19 nt, Artificial Sequence
  Description of Artificial Sequence: Synthetic oligonucleotide
ucgcgcuccucguuguacu

SEQ ID NO: 2608712 - RNA, 19 nt, Artificial Sequence
  Description of Artificial Sequence: Synthetic oligonucleotide
uagcgcguguacuccuccc

SEQ ID NO: 2608713 - RNA, 19 nt, Artificial Sequence
  Description of Artificial Sequence: Synthetic oligonucleotide
ggacgaguccacccaagug

SEQ ID NO: 2608714 - RNA, 19 nt, Artificial Sequence
  Description of Artificial Sequence: Synthetic oligonucleotide
aggggucgcguuccggcag

SEQ ID NO: 2608715 - RNA, 19 nt, Artificial Sequence
  Description of Artificial Sequence: Synthetic oligonucleotide
ggagcaaaguaggcaggcg

SEQ ID NO: 2608716 - RNA, 19 nt, Artificial Sequence
  Description of Artificial Sequence: Synthetic oligonucleotide
guacuccucccgccgcugg

SEQ ID NO: 2608717 - RNA, 19 nt, Artificial Sequence
  Description of Artificial Sequence: Synthetic oligonucleotide
gcgauucuccccaugccgg

SEQ ID NO: 2608718 - RNA, 19 nt, Artificial Sequence
  Description of Artificial Sequence: Synthetic oligonucleotide
uggguaccaggccgagcgc

SEQ ID NO: 2608719 - RNA, 19 nt, Artificial Sequence
  Description of Artificial Sequence: Synthetic oligonucleotide
gccaugcguagcuugagga

SEQ ID NO: 2608720 - RNA, 19 nt, Artificial Sequence
  Description of Artificial Sequence: Synthetic oligonucleotide
cugaaggugcugagccaug

SEQ ID NO: 2608721 - RNA, 19 nt, Artificial Sequence
  Description of Artificial Sequence: Synthetic oligonucleotide
gaccgagucgcagagcucu

SEQ ID NO: 2608722 - RNA, 19 nt, Artificial Sequence
  Description of Artificial Sequence: Synthetic oligonucleotide
agccucggggagaaggcuc

SEQ ID NO: 2608723 - RNA, 19 nt, Artificial Sequence
  Description of Artificial Sequence: Synthetic oligonucleotide
ccacccaagugacaaaguc

SEQ ID NO: 2608724 - RNA, 19 nt, Artificial Sequence
  Description of Artificial Sequence: Synthetic oligonucleotide
cacgcggacgugacccugc

SEQ ID NO: 2608725 - RNA, 19 nt, Artificial Sequence
  Description of Artificial Sequence: Synthetic oligonucleotide
aaggccacggcagccugaa

SEQ ID NO: 2608726 - RNA, 19 nt, Artificial Sequence
  Description of Artificial Sequence: Synthetic oligonucleotide
cacggaaggggucgcguuc

SEQ ID NO: 2608727 - RNA, 19 nt, Artificial Sequence
  Description of Artificial Sequence: Synthetic oligonucleotide
augcguagcuugaggagca

SEQ ID NO: 2608728 - RNA, 19 nt, Artificial Sequence
  Description of Artificial Sequence: Synthetic oligonucleotide
cucuagugagccgcgcgug

SEQ ID NO: 2608729 - RNA, 19 nt, Artificial Sequence
  Description of Artificial Sequence: Synthetic oligonucleotide
gcguguacuccucccgccg

SEQ ID NO: 2608730 - RNA, 19 nt, Artificial Sequence
  Description of Artificial Sequence: Synthetic oligonucleotide
ccaguucccgcaccgcucg

SEQ ID NO: 2608731 - RNA, 19 nt, Artificial Sequence
  Description of Artificial Sequence: Synthetic oligonucleotide
ugagccgcgcguggguacc

SEQ ID NO: 2608732 - RNA, 19 nt, Artificial Sequence
  Description of Artificial Sequence: Synthetic oligonucleotide
gccgcuugaucuuggacga

SEQ ID NO: 2608733 - RNA, 19 nt, Artificial Sequence
  Description of Artificial Sequence: Synthetic oligonucleotide
gcugagaccgagucgcaga

SEQ ID NO: 2608734 - RNA, 19 nt, Artificial Sequence
  Description of Artificial Sequence: Synthetic oligonucleotide
ggagaaggcucgcuaggca

SEQ ID NO: 2608735 - RNA, 19 nt, Artificial Sequence
  Description of Artificial Sequence: Synthetic oligonucleotide
ggguaccaggccgagcgcg

SEQ ID NO: 2608736 - RNA, 19 nt, Artificial Sequence
  Description of Artificial Sequence: Synthetic oligonucleotide
gagcccguaccgccgcagc

SEQ ID NO: 2608737 - RNA, 19 nt, Artificial Sequence
  Description of Artificial Sequence: Synthetic oligonucleotide
aguccacccaagugacaaa

SEQ ID NO: 2608738 - RNA, 19 nt, Artificial Sequence
  Description of Artificial Sequence: Synthetic oligonucleotide
guagcuugaggagcaaagu

SEQ ID NO: 2608739 - RNA, 19 nt, Artificial Sequence
  Description of Artificial Sequence: Synthetic oligonucleotide
gugccgcuugaucuuggac

SEQ ID NO: 2608740 - RNA, 19 nt, Artificial Sequence
  Description of Artificial Sequence: Synthetic oligonucleotide
gucugggcccacgcggacg

SEQ ID NO: 2608741 - RNA, 19 nt, Artificial Sequence
  Description of Artificial Sequence: Synthetic oligonucleotide
agcccguaccgccgcagca

SEQ ID NO: 2608742 - RNA, 19 nt, Artificial Sequence
  Description of Artificial Sequence: Synthetic oligonucleotide
cuuggacgaguccacccaa

SEQ ID NO: 2608743 - RNA, 19 nt, Artificial Sequence
  Description of Artificial Sequence: Synthetic oligonucleotide
guaggcaggcggcggcggc

SEQ ID NO: 2608744 - RNA, 19 nt, Artificial Sequence
  Description of Artificial Sequence: Synthetic oligonucleotide
ugcugcgagugacgagaaa

SEQ ID NO: 2608745 - RNA, 19 nt, Artificial Sequence
  Description of Artificial Sequence: Synthetic oligonucleotide
cguccuugcuucuacacca

SEQ ID NO: 2608746 - RNA, 19 nt, Artificial Sequence
  Description of Artificial Sequence: Synthetic oligonucleotide
gcagagcucuagugagccg

SEQ ID NO: 2608747 - RNA, 19 nt, Artificial Sequence
  Description of Artificial Sequence: Synthetic oligonucleotide
agucaucgcgcuccucguu

SEQ ID NO: 2608748 - RNA, 19 nt, Artificial Sequence
  Description of Artificial Sequence: Synthetic oligonucleotide
cagcacgugccgcuugauc

SEQ ID NO: 2608749 - RNA, 19 nt, Artificial Sequence
  Description of Artificial Sequence: Synthetic oligonucleotide
ugggcccacgcggacguga

SEQ ID NO: 2608750 - RNA, 19 nt, Artificial Sequence
  Description of Artificial Sequence: Synthetic oligonucleotide
uucuccccaugccgggcuc

SEQ ID NO: 2608751 - RNA, 19 nt, Artificial Sequence
  Description of Artificial Sequence: Synthetic oligonucleotide
gaccacgucugggcccacg

SEQ ID NO: 2608752 - RNA, 19 nt, Artificial Sequence
  Description of Artificial Sequence: Synthetic oligonucleotide
aggggcgauucuccccaug

SEQ ID NO: 2608753 - RNA, 19 nt, Artificial Sequence
  Description of Artificial Sequence: Synthetic oligonucleotide
ccucguuguacuccagcac

SEQ ID NO: 2608754 - RNA, 19 nt, Artificial Sequence
  Description of Artificial Sequence: Synthetic oligonucleotide
acgugacccugcuccacaa

SEQ ID NO: 2608755 - RNA, 19 nt, Artificial Sequence
  Description of Artificial Sequence: Synthetic oligonucleotide
gggcgauucuccccaugcc

SEQ ID NO: 2608756 - RNA, 19 nt, Artificial Sequence
  Description of Artificial Sequence: Synthetic oligonucleotide
gugaccacgucugggccca

SEQ ID NO: 2608757 - RNA, 19 nt, Artificial Sequence
  Description of Artificial Sequence: Synthetic oligonucleotide
agaccgagucgcagagcuc

SEQ ID NO: 2608758 - RNA, 19 nt, Artificial Sequence
  Description of Artificial Sequence: Synthetic oligonucleotide
aggugcugagccaugcgua

SEQ ID NO: 2608759 - RNA, 19 nt, Artificial Sequence
  Description of Artificial Sequence: Synthetic oligonucleotide
guccuccaugcugcgagug

SEQ ID NO: 2608760 - RNA, 19 nt, Artificial Sequence
  Description of Artificial Sequence: Synthetic oligonucleotide
gugcugagccaugcguagc

SEQ ID NO: 2608761 - RNA, 19 nt, Artificial Sequence
  Description of Artificial Sequence: Synthetic oligonucleotide
gccgagcgcguacagcuug

SEQ ID NO: 2608762 - RNA, 19 nt, Artificial Sequence
  Description of Artificial Sequence: Synthetic oligonucleotide
cuccucccgccgcuggagc

SEQ ID NO: 2608763 - RNA, 19 nt, Artificial Sequence
  Description of Artificial Sequence: Synthetic oligonucleotide
gugagccgcgcguggguac

SEQ ID NO: 2608764 - RNA, 19 nt, Artificial Sequence
  Description of Artificial Sequence: Synthetic oligonucleotide
gcccacgcggacgugaccc

SEQ ID NO: 2608765 - RNA, 19 nt, Artificial Sequence
  Description of Artificial Sequence: Synthetic oligonucleotide
gcucgugaagguugugguc

SEQ ID NO: 2608766 - RNA, 19 nt, Artificial Sequence
  Description of Artificial Sequence: Synthetic oligonucleotide
gcucguggaacuuaagcuu

SEQ ID NO: 2608767 - RNA, 19 nt, Artificial Sequence
  Description of Artificial Sequence: Synthetic oligonucleotide
gcguacagcuuguccaaca

SEQ ID NO: 2608768 - RNA, 19 nt, Artificial Sequence
  Description of Artificial Sequence: Synthetic oligonucleotide
cacgugccgcuugaucuug

SEQ ID NO: 2608769 - RNA, 19 nt, Artificial Sequence
  Description of Artificial Sequence: Synthetic oligonucleotide
caggccgagcgcguacagc

SEQ ID NO: 2608770 - RNA, 19 nt, Artificial Sequence
  Description of Artificial Sequence: Synthetic oligonucleotide
gcuugaucuuggacgaguc

SEQ ID NO: 2608771 - RNA, 19 nt, Artificial Sequence
  Description of Artificial Sequence: Synthetic oligonucleotide
ggggucgcguuccggcagg

SEQ ID NO: 2608772 - RNA, 19 nt, Artificial Sequence
  Description of Artificial Sequence: Synthetic oligonucleotide
caacagcgccgccgaggcg

SEQ ID NO: 2608773 - RNA, 19 nt, Artificial Sequence
  Description of Artificial Sequence: Synthetic oligonucleotide
guccuugcuucuacaccac

SEQ ID NO: 2608774 - RNA, 19 nt, Artificial Sequence
  Description of Artificial Sequence: Synthetic oligonucleotide
ccccaugccgggcucagug

SEQ ID NO: 2608775 - RNA, 19 nt, Artificial Sequence
  Description of Artificial Sequence: Synthetic oligonucleotide
gggaucggugaccacgucu

SEQ ID NO: 2608776 - RNA, 19 nt, Artificial Sequence
  Description of Artificial Sequence: Synthetic oligonucleotide
gcgcguguacuccucccgc

SEQ ID NO: 2608777 - RNA, 19 nt, Artificial Sequence
  Description of Artificial Sequence: Synthetic oligonucleotide
accaggccgagcgcguaca

SEQ ID NO: 2608778 - RNA, 19 nt, Artificial Sequence
  Description of Artificial Sequence: Synthetic oligonucleotide
gcacgcgcagcucgugaag

SEQ ID NO: 2608779 - RNA, 19 nt, Artificial Sequence
  Description of Artificial Sequence: Synthetic oligonucleotide
cgauucuccccaugccggg

SEQ ID NO: 2608780 - RNA, 19 nt, Artificial Sequence
  Description of Artificial Sequence: Synthetic oligonucleotide
agugagccgcgcgugggua

SEQ ID NO: 2608781 - RNA, 19 nt, Artificial Sequence
  Description of Artificial Sequence: Synthetic oligonucleotide
aaggcucgcuaggcaucca

SEQ ID NO: 2608782 - RNA, 19 nt, Artificial Sequence
  Description of Artificial Sequence: Synthetic oligonucleotide
aggcgggaucggugaccac

SEQ ID NO: 2608783 - RNA, 19 nt, Artificial Sequence
  Description of Artificial Sequence: Synthetic oligonucleotide
acgucugggcccacgcgga

SEQ ID NO: 2608784 - RNA, 19 nt, Artificial Sequence
  Description of Artificial Sequence: Synthetic oligonucleotide
caguucccgcaccgcucgg

SEQ ID NO: 2608785 - RNA, 19 nt, Artificial Sequence
  Description of Artificial Sequence: Synthetic oligonucleotide
ccgcgcguggguaccaggc

SEQ ID NO: 2608786 - RNA, 19 nt, Artificial Sequence
  Description of Artificial Sequence: Synthetic oligonucleotide
cccguaccgccgcagcacg

SEQ ID NO: 2608787 - RNA, 19 nt, Artificial Sequence
  Description of Artificial Sequence: Synthetic oligonucleotide
ugcguagcuugaggagcaa

SEQ ID NO: 2608788 - RNA, 19 nt, Artificial Sequence
  Description of Artificial Sequence: Synthetic oligonucleotide
gugacgagaaaggcgggau

SEQ ID NO: 2608789 - RNA, 19 nt, Artificial Sequence
  Description of Artificial Sequence: Synthetic oligonucleotide
ggaaggaggguaacguccu

SEQ ID NO: 2608790 - RNA, 19 nt, Artificial Sequence
  Description of Artificial Sequence: Synthetic oligonucleotide
cagugaccuguaguuguga

SEQ ID NO: 2608791 - RNA, 19 nt, Artificial Sequence
  Description of Artificial Sequence: Synthetic oligonucleotide
guucccgcaccgcucggcu

SEQ ID NO: 2608792 - RNA, 19 nt, Artificial Sequence
  Description of Artificial Sequence: Synthetic oligonucleotide
cggcaggucgcgcaggcgc

SEQ ID NO: 2608793 - RNA, 19 nt, Artificial Sequence
  Description of Artificial Sequence: Synthetic oligonucleotide
cguggaacuuaagcuuccg

SEQ ID NO: 2608794 - RNA, 19 nt, Artificial Sequence
  Description of Artificial Sequence: Synthetic oligonucleotide
cagcacgcgcagcucguga

SEQ ID NO: 2608795 - RNA, 19 nt, Artificial Sequence
  Description of Artificial Sequence: Synthetic oligonucleotide
ccacgucugggcccacgcg

SEQ ID NO: 2608796 - RNA, 19 nt, Artificial Sequence
  Description of Artificial Sequence: Synthetic oligonucleotide
gguaacguccuugcuucua

SEQ ID NO: 2608797 - RNA, 19 nt, Artificial Sequence
  Description of Artificial Sequence: Synthetic oligonucleotide
gcucuagugagccgcgcgu

SEQ ID NO: 2608798 - RNA, 19 nt, Artificial Sequence
  Description of Artificial Sequence: Synthetic oligonucleotide
cgaggcgcgcacacggaag

SEQ ID NO: 2608799 - RNA, 19 nt, Artificial Sequence
  Description of Artificial Sequence: Synthetic oligonucleotide
gggcucagugaccuguagu

SEQ ID NO: 2608800 - RNA, 19 nt, Artificial Sequence
  Description of Artificial Sequence: Synthetic oligonucleotide
cgcguguacuccucccgcc

SEQ ID NO: 2608801 - RNA, 19 nt, Artificial Sequence
  Description of Artificial Sequence: Synthetic oligonucleotide
gccgcgcguggguaccagg

SEQ ID NO: 2608802 - RNA, 19 nt, Artificial Sequence
  Description of Artificial Sequence: Synthetic oligonucleotide
cguaccgccgcagcacgcg

SEQ ID NO: 2608803 - RNA, 19 nt, Artificial Sequence
  Description of Artificial Sequence: Synthetic oligonucleotide
augcugcgagugacgagaa

SEQ ID NO: 2608804 - RNA, 19 nt, Artificial Sequence
  Description of Artificial Sequence: Synthetic oligonucleotide
gcucgcuaggcauccagau

SEQ ID NO: 2608805 - RNA, 19 nt, Artificial Sequence
  Description of Artificial Sequence: Synthetic oligonucleotide
gcgcuccucguuguacucc

SEQ ID NO: 2608806 - RNA, 19 nt, Artificial Sequence
  Description of Artificial Sequence: Synthetic oligonucleotide
gucggugaccucccaguuu

SEQ ID NO: 2608807 - RNA, 19 nt, Artificial Sequence
  Description of Artificial Sequence: Synthetic oligonucleotide
cggugaccacgucugggcc

SEQ ID NO: 2608808 - RNA, 19 nt, Artificial Sequence
  Description of Artificial Sequence: Synthetic oligonucleotide
ggacgugacccugcuccac

SEQ ID NO: 2608809 - RNA, 19 nt, Artificial Sequence
  Description of Artificial Sequence: Synthetic oligonucleotide
ggaggguaacguccuugcu

SEQ ID NO: 2608810 - RNA, 19 nt, Artificial Sequence
  Description of Artificial Sequence: Synthetic oligonucleotide
gguuguggucggugaccuc

SEQ ID NO: 2608811 - RNA, 19 nt, Artificial Sequence
  Description of Artificial Sequence: Synthetic oligonucleotide
ggcucgcuaggcauccaga

SEQ ID NO: 2608812 - RNA, 19 nt, Artificial Sequence
  Description of Artificial Sequence: Synthetic oligonucleotide
agccgcgcguggguaccag

SEQ ID NO: 2608813 - RNA, 19 nt, Artificial Sequence
  Description of Artificial Sequence: Synthetic oligonucleotide
gugaagccucggggagaag

SEQ ID NO: 2608814 - RNA, 19 nt, Artificial Sequence
  Description of Artificial Sequence: Synthetic oligonucleotide
gccgccgaggcgcgcacac

SEQ ID NO: 2608815 - RNA, 19 nt, Artificial Sequence
  Description of Artificial Sequence: Synthetic oligonucleotide
uccccaugccgggcucagu

SEQ ID NO: 2608816 - RNA, 19 nt, Artificial Sequence
  Description of Artificial Sequence: Synthetic oligonucleotide
ccgagucgcagagcucuag

SEQ ID NO: 2608817 - RNA, 19 nt, Artificial Sequence
  Description of Artificial Sequence: Synthetic oligonucleotide
gcccguaccgccgcagcac

SEQ ID NO: 2608818 - RNA, 19 nt, Artificial Sequence
  Description of Artificial Sequence: Synthetic oligonucleotide
cacacggaaggggucgcgu

SEQ ID NO: 2608819 - RNA, 19 nt, Artificial Sequence
  Description of Artificial Sequence: Synthetic oligonucleotide
cguuccggcaggucgcgca

SEQ ID NO: 2608820 - RNA, 19 nt, Artificial Sequence
  Description of Artificial Sequence: Synthetic oligonucleotide
ccucccaguuuaggaaguc

SEQ ID NO: 2608821 - RNA, 19 nt, Artificial Sequence
  Description of Artificial Sequence: Synthetic oligonucleotide
cucggcucagcugguuaua

SEQ ID NO: 2608822 - RNA, 19 nt, Artificial Sequence
  Description of Artificial Sequence: Synthetic oligonucleotide
ccguaccgccgcagcacgc

SEQ ID NO: 2608823 - RNA, 19 nt, Artificial Sequence
  Description of Artificial Sequence: Synthetic oligonucleotide
cgcgcguggguaccaggcc

SEQ ID NO: 2608824 - RNA, 19 nt, Artificial Sequence
  Description of Artificial Sequence: Synthetic oligonucleotide
guaccaggccgagcgcgua

SEQ ID NO: 2608825 - RNA, 19 nt, Artificial Sequence
  Description of Artificial Sequence: Synthetic oligonucleotide
gcuaggcauccagaucaaa

SEQ ID NO: 2608826 - RNA, 19 nt, Artificial Sequence
  Description of Artificial Sequence: Synthetic oligonucleotide
gcucggcucagcugguuau

SEQ ID NO: 2608827 - RNA, 19 nt, Artificial Sequence
  Description of Artificial Sequence: Synthetic oligonucleotide
cccaugccgggcucaguga

SEQ ID NO: 2608828 - RNA, 19 nt, Artificial Sequence
  Description of Artificial Sequence: Synthetic oligonucleotide
caucgcgcuccucguugua

SEQ ID NO: 2608829 - RNA, 19 nt, Artificial Sequence
  Description of Artificial Sequence: Synthetic oligonucleotide
accgcucggcucagcuggu

SEQ ID NO: 2608830 - RNA, 19 nt, Artificial Sequence
  Description of Artificial Sequence: Synthetic oligonucleotide
gcguagcuugaggagcaaa

SEQ ID NO: 2608831 - RNA, 19 nt, Artificial Sequence
  Description of Artificial Sequence: Synthetic oligonucleotide
gagccgcgcguggguacca

SEQ ID NO: 2608832 - RNA, 19 nt, Artificial Sequence
  Description of Artificial Sequence: Synthetic oligonucleotide
gccgcgccaguucccgcac

SEQ ID NO: 2608833 - RNA, 19 nt, Artificial Sequence
  Description of Artificial Sequence: Synthetic oligonucleotide
ggucggugaccucccaguu

SEQ ID NO: 2608834 - RNA, 19 nt, Artificial Sequence
  Description of Artificial Sequence: Synthetic oligonucleotide
gcguggguaccaggccgag

SEQ ID NO: 2608835 - RNA, 19 nt, Artificial Sequence
  Description of Artificial Sequence: Synthetic oligonucleotide
cgggcucagugaccuguag

SEQ ID NO: 2608836 - RNA, 19 nt, Artificial Sequence
  Description of Artificial Sequence: Synthetic oligonucleotide
gguaccaggccgagcgcgu

SEQ ID NO: 2608837 - RNA, 19 nt, Artificial Sequence
  Description of Artificial Sequence: Synthetic oligonucleotide
cggaaggggucgcguuccg

SEQ ID NO: 2608838 - RNA, 19 nt, Artificial Sequence
  Description of Artificial Sequence: Synthetic oligonucleotide
ugaccacgucugggcccac

SEQ ID NO: 2608839 - RNA, 19 nt, Artificial Sequence
  Description of Artificial Sequence: Synthetic oligonucleotide
ggguaacguccuugcuucu

SEQ ID NO: 2608840 - RNA, 19 nt, Artificial Sequence
  Description of Artificial Sequence: Synthetic oligonucleotide
gggcccacgcggacgugac

SEQ ID NO: 2608841 - RNA, 19 nt, Artificial Sequence
  Description of Artificial Sequence: Synthetic oligonucleotide
gccgggcucagugaccugu

SEQ ID NO: 2608842 - RNA, 19 nt, Artificial Sequence
  Description of Artificial Sequence: Synthetic oligonucleotide
cucggggagaaggcucgcu

SEQ ID NO: 2608843 - RNA, 19 nt, Artificial Sequence
  Description of Artificial Sequence: Synthetic oligonucleotide
ccacgcggacgugacccug

SEQ ID NO: 2608844 - RNA, 19 nt, Artificial Sequence
  Description of Artificial Sequence: Synthetic oligonucleotide
cguggguaccaggccgagc

SEQ ID NO: 2608845 - RNA, 19 nt, Artificial Sequence
  Description of Artificial Sequence: Synthetic oligonucleotide
gcgccaguucccgcaccgc

SEQ ID NO: 2608846 - RNA, 19 nt, Artificial Sequence
  Description of Artificial Sequence: Synthetic oligonucleotide
gcgggaucggugaccacgu

SEQ ID NO: 2608847 - RNA, 19 nt, Artificial Sequence
  Description of Artificial Sequence: Synthetic oligonucleotide
cggugaccucccaguuuag

SEQ ID NO: 2608848 - RNA, 19 nt, Artificial Sequence
  Description of Artificial Sequence: Synthetic oligonucleotide
ggucgcguuccggcagguc

SEQ ID NO: 2608849 - RNA, 19 nt, Artificial Sequence
  Description of Artificial Sequence: Synthetic oligonucleotide
cgugccgcuugaucuugga

SEQ ID NO: 2608850 - RNA, 19 nt, Artificial Sequence
  Description of Artificial Sequence: Synthetic oligonucleotide
cgcacacggaaggggucgc

SEQ ID NO: 2608851 - RNA, 19 nt, Artificial Sequence
  Description of Artificial Sequence: Synthetic oligonucleotide
cugggcccacgcggacgug

SEQ ID NO: 2608852 - RNA, 19 nt, Artificial Sequence
  Description of Artificial Sequence: Synthetic oligonucleotide
ccgaggcgcgcacacggaa

SEQ ID NO: 2608853 - RNA, 19 nt, Artificial Sequence
  Description of Artificial Sequence: Synthetic oligonucleotide
cgcguacagcuuguccaac

SEQ ID NO: 2608854 - RNA, 19 nt, Artificial Sequence
  Description of Artificial Sequence: Synthetic oligonucleotide
cgaguccacccaagugaca

SEQ ID NO: 2608855 - RNA, 19 nt, Artificial Sequence
  Description of Artificial Sequence: Synthetic oligonucleotide
gcgcgcacacggaaggggu

SEQ ID NO: 2608856 - RNA, 19 nt, Artificial Sequence
  Description of Artificial Sequence: Synthetic oligonucleotide
cgcguuccggcaggucgcg

SEQ ID NO: 2608857 - RNA, 19 nt, Artificial Sequence
  Description of Artificial Sequence: Synthetic oligonucleotide
ccgcgccaguucccgcacc

SEQ ID NO: 2608858 - RNA, 19 nt, Artificial Sequence
  Description of Artificial Sequence: Synthetic oligonucleotide
cggacgugacccugcucca

SEQ ID NO: 2608859 - RNA, 19 nt, Artificial Sequence
  Description of Artificial Sequence: Synthetic oligonucleotide
ccgccgaggcgcgcacacg

SEQ ID NO: 2608860 - RNA, 19 nt, Artificial Sequence
  Description of Artificial Sequence: Synthetic oligonucleotide
gcguuccggcaggucgcgc

SEQ ID NO: 2608861 - RNA, 19 nt, Artificial Sequence
  Description of Artificial Sequence: Synthetic oligonucleotide
cgcuugaucuuggacgagu

SEQ ID NO: 2608862 - RNA, 19 nt, Artificial Sequence
  Description of Artificial Sequence: Synthetic oligonucleotide
ccgccgcuggagcccguac

SEQ ID NO: 2608863 - RNA, 19 nt, Artificial Sequence
  Description of Artificial Sequence: Synthetic oligonucleotide
cgagucgcagagcucuagu

SEQ ID NO: 2608864 - RNA, 19 nt, Artificial Sequence
  Description of Artificial Sequence: Synthetic oligonucleotide
cgccgcgccaguucccgca

SEQ ID NO: 2608865 - RNA, 19 nt, Artificial Sequence
  Description of Artificial Sequence: Synthetic oligonucleotide
cgcuaggcauccagaucaa

SEQ ID NO: 2608866 - RNA, 19 nt, Artificial Sequence
  Description of Artificial Sequence: Synthetic oligonucleotide
cgagaaaggcgggaucggu

SEQ ID NO: 2608867 - RNA, 19 nt, Artificial Sequence
  Description of Artificial Sequence: Synthetic oligonucleotide
cgcagcucgugaagguugu

SEQ ID NO: 2608868 - RNA, 19 nt, Artificial Sequence
  Description of Artificial Sequence: Synthetic oligonucleotide
cgugacccugcuccacaaa

SEQ ID NO: 2608869 - RNA, 19 nt, Artificial Sequence
  Description of Artificial Sequence: Synthetic oligonucleotide
ccgagcgcguacagcuugu

SEQ ID NO: 2608870 - RNA, 19 nt, Artificial Sequence
  Description of Artificial Sequence: Synthetic oligonucleotide
cgagcgcguacagcuuguc

SEQ ID NO: 2608871 - RNA, 19 nt, Artificial Sequence
  Description of Artificial Sequence: Synthetic oligonucleotide
cgcucggcucagcugguua

SEQ ID NO: 2608872 - RNA, 19 nt, Artificial Sequence
  Description of Artificial Sequence: Synthetic oligonucleotide
caggggcgauucuccccau

SEQ ID NO: 2608873 - RNA, 19 nt, Artificial Sequence
  Description of Artificial Sequence: Synthetic oligonucleotide
cgggaucggugaccacguc

SEQ ID NO: 2608874 - RNA, 19 nt, Artificial Sequence
  Description of Artificial Sequence: Synthetic oligonucleotide
cccgcaccgcucggcucag

SEQ ID NO: 2608875 - RNA, 19 nt, Artificial Sequence
  Description of Artificial Sequence: Synthetic oligonucleotide
cccacgcggacgugacccu

SEQ ID NO: 2608876 - RNA, 19 nt, Artificial Sequence
  Description of Artificial Sequence: Synthetic oligonucleotide
gggucgcguuccggcaggu

SEQ ID NO: 2608877 - RNA, 19 nt, Artificial Sequence
  Description of Artificial Sequence: Synthetic oligonucleotide
ggccgagcgcguacagcuu

SEQ ID NO: 2608878 - RNA, 19 nt, Artificial Sequence
  Description of Artificial Sequence: Synthetic oligonucleotide
cccagaacucaggggcgau

SEQ ID NO: 2608879 - RNA, 19 nt, Artificial Sequence
  Description of Artificial Sequence: Synthetic oligonucleotide
ccagcacgugccgcuugau

SEQ ID NO: 2608880 - RNA, 19 nt, Artificial Sequence
  Description of Artificial Sequence: Synthetic oligonucleotide
cgccgccgaggcgcgcaca

SEQ ID NO: 2608881 - RNA, 19 nt, Artificial Sequence
  Description of Artificial Sequence: Synthetic oligonucleotide
ccgcucggcucagcugguu

SEQ ID NO: 2608882 - RNA, 19 nt, Artificial Sequence
  Description of Artificial Sequence: Synthetic oligonucleotide
agaucaauccaacagagcg

SEQ ID NO: 2608883 - RNA, 19 nt, Artificial Sequence
  Description of Artificial Sequence: Synthetic oligonucleotide
auagauuugugacugaugg

SEQ ID NO: 2608884 - RNA, 19 nt, Artificial Sequence
  Description of Artificial Sequence: Synthetic oligonucleotide
auuugaagcagccauauuc

SEQ ID NO: 2608885 - RNA, 19 nt, Artificial Sequence
  Description of Artificial Sequence: Synthetic oligonucleotide
uuugcauucacaccaaugc

SEQ ID NO: 2608886 - RNA, 19 nt, Artificial Sequence
  Description of Artificial Sequence: Synthetic oligonucleotide
uuugcaucguuaaaguccg

SEQ ID NO: 2608887 - RNA, 19 nt, Artificial Sequence
  Description of Artificial Sequence: Synthetic oligonucleotide
aaaucguacucuucaaagg

SEQ ID NO: 2608888 - RNA, 19 nt, Artificial Sequence
  Description of Artificial Sequence: Synthetic oligonucleotide
ugaguuugcagucuuuugg

SEQ ID NO: 2608889 - RNA, 19 nt, Artificial Sequence
  Description of Artificial Sequence: Synthetic oligonucleotide
aagguauuugugcagauca

SEQ ID NO: 2608890 - RNA, 19 nt, Artificial Sequence
  Description of Artificial Sequence: Synthetic oligonucleotide
uuaaaguccguguaggacc

SEQ ID NO: 2608891 - RNA, 19 nt, Artificial Sequence
  Description of Artificial Sequence: Synthetic oligonucleotide
gaaaucguacucuucaaag

SEQ ID NO: 2608892 - RNA, 19 nt, Artificial Sequence
  Description of Artificial Sequence: Synthetic oligonucleotide
agaguauucauguucaugu

SEQ ID NO: 2608893 - RNA, 19 nt, Artificial Sequence
  Description of Artificial Sequence: Synthetic oligonucleotide
uuuacgcucauguucaugc

SEQ ID NO: 2608894 - RNA, 19 nt, Artificial Sequence
  Description of Artificial Sequence: Synthetic oligonucleotide
uuugaagcagccauauucc

SEQ ID NO: 2608895 - RNA, 19 nt, Artificial Sequence
  Description of Artificial Sequence: Synthetic oligonucleotide
uauuugugcagaucaaucc

SEQ ID NO: 2608896 - RNA, 19 nt, Artificial Sequence
  Description of Artificial Sequence: Synthetic oligonucleotide
aauuaaauggugccaacaa

SEQ ID NO: 2608897 - RNA, 19 nt, Artificial Sequence
  Description of Artificial Sequence: Synthetic oligonucleotide
agaugccaauauuugaagc

SEQ ID NO: 2608898 - RNA, 19 nt, Artificial Sequence
  Description of Artificial Sequence: Synthetic oligonucleotide
acggaguugacauuguagg

SEQ ID NO: 2608899 - RNA, 19 nt, Artificial Sequence
  Description of Artificial Sequence: Synthetic oligonucleotide
aucaaguuuacgcucaugu

SEQ ID NO: 2608900 - RNA, 19 nt, Artificial Sequence
  Description of Artificial Sequence: Synthetic oligonucleotide
aucaauccaacagagcggc

SEQ ID NO: 2608901 - RNA, 19 nt, Artificial Sequence
  Description of Artificial Sequence: Synthetic oligonucleotide
guuggcggcagauucaugg

SEQ ID NO: 2608902 - RNA, 19 nt, Artificial Sequence
  Description of Artificial Sequence: Synthetic oligonucleotide
ugcauucacaccaaugcug

SEQ ID NO: 2608903 - RNA, 19 nt, Artificial Sequence
  Description of Artificial Sequence: Synthetic oligonucleotide
ugcagaucaauccaacaga

SEQ ID NO: 2608904 - RNA, 19 nt, Artificial Sequence
  Description of Artificial Sequence: Synthetic oligonucleotide
auugagagacuguuuggac

SEQ ID NO: 2608905 - RNA, 19 nt, Artificial Sequence
  Description of Artificial Sequence: Synthetic oligonucleotide
acuugguucucauugggag

SEQ ID NO: 2608906 - RNA, 19 nt, Artificial Sequence
  Description of Artificial Sequence: Synthetic oligonucleotide
uuuugcauucacaccaaug

SEQ ID NO: 2608907 - RNA, 19 nt, Artificial Sequence
  Description of Artificial Sequence: Synthetic oligonucleotide
gaugccaauauuugaagca

SEQ ID NO: 2608908 - RNA, 19 nt, Artificial Sequence
  Description of Artificial Sequence: Synthetic oligonucleotide
ucugggaacgcccauagau

SEQ ID NO: 2608909 - RNA, 19 nt, Artificial Sequence
  Description of Artificial Sequence: Synthetic oligonucleotide
ucucauguaggacccauug

SEQ ID NO: 2608910 - RNA, 19 nt, Artificial Sequence
  Description of Artificial Sequence: Synthetic oligonucleotide
auguaggacccauugagag

SEQ ID NO: 2608911 - RNA, 19 nt, Artificial Sequence
  Description of Artificial Sequence: Synthetic oligonucleotide
auuugugacugaugggugg

SEQ ID NO: 2608912 - RNA, 19 nt, Artificial Sequence
  Description of Artificial Sequence: Synthetic oligonucleotide
acgcccauagauuugugac

SEQ ID NO: 2608913 - RNA, 19 nt, Artificial Sequence
  Description of Artificial Sequence: Synthetic oligonucleotide
aaauuaaauggugccaaca

SEQ ID NO: 2608914 - RNA, 19 nt, Artificial Sequence
  Description of Artificial Sequence: Synthetic oligonucleotide
caaguuuacgcucauguuc

SEQ ID NO: 2608915 - RNA, 19 nt, Artificial Sequence
  Description of Artificial Sequence: Synthetic oligonucleotide
agauuugugacugaugggu

SEQ ID NO: 2608916 - RNA, 19 nt, Artificial Sequence
  Description of Artificial Sequence: Synthetic oligonucleotide
uugagagacuguuuggaca

SEQ ID NO: 2608917 - RNA, 19 nt, Artificial Sequence
  Description of Artificial Sequence: Synthetic oligonucleotide
ugacuugguucucauuggg

SEQ ID NO: 2608918 - RNA, 19 nt, Artificial Sequence
  Description of Artificial Sequence: Synthetic oligonucleotide
aauggugccaacaauguuu

SEQ ID NO: 2608919 - RNA, 19 nt, Artificial Sequence
  Description of Artificial Sequence: Synthetic oligonucleotide
agucuuuuggcugugggag

SEQ ID NO: 2608920 - RNA, 19 nt, Artificial Sequence
  Description of Artificial Sequence: Synthetic oligonucleotide
aaguuuacgcucauguuca

SEQ ID NO: 2608921 - RNA, 19 nt, Artificial Sequence
  Description of Artificial Sequence: Synthetic oligonucleotide
gagacguggcccuugcugg

SEQ ID NO: 2608922 - RNA, 19 nt, Artificial Sequence
  Description of Artificial Sequence: Synthetic oligonucleotide
aucguuaaaguccguguag

SEQ ID NO: 2608923 - RNA, 19 nt, Artificial Sequence
  Description of Artificial Sequence: Synthetic oligonucleotide
ucugcauuggcugcguggg

SEQ ID NO: 2608924 - RNA, 19 nt, Artificial Sequence
  Description of Artificial Sequence: Synthetic oligonucleotide
gugcagaucaauccaacag

SEQ ID NO: 2608925 - RNA, 19 nt, Artificial Sequence
  Description of Artificial Sequence: Synthetic oligonucleotide
ucguuaaaguccguguagg

SEQ ID NO: 2608926 - RNA, 19 nt, Artificial Sequence
  Description of Artificial Sequence: Synthetic oligonucleotide
uagauuugugacugauggg

SEQ ID NO: 2608927 - RNA, 19 nt, Artificial Sequence
  Description of Artificial Sequence: Synthetic oligonucleotide
uguaggaccuugcauggcu

SEQ ID NO: 2608928 - RNA, 19 nt, Artificial Sequence
  Description of Artificial Sequence: Synthetic oligonucleotide
uugaagcagccauauuccg

SEQ ID NO: 2608929 - RNA, 19 nt, Artificial Sequence
  Description of Artificial Sequence: Synthetic oligonucleotide
ugaaaucguacucuucaaa

SEQ ID NO: 2608930 - RNA, 19 nt, Artificial Sequence
  Description of Artificial Sequence: Synthetic oligonucleotide
gcuggcaucaaguuuacgc

SEQ ID NO: 2608931 - RNA, 19 nt, Artificial Sequence
  Description of Artificial Sequence: Synthetic oligonucleotide
ugacauuguaggccggugc

SEQ ID NO: 2608932 - RNA, 19 nt, Artificial Sequence
  Description of Artificial Sequence: Synthetic oligonucleotide
uauuccgcugcaagagagg

SEQ ID NO: 2608933 - RNA, 19 nt, Artificial Sequence
  Description of Artificial Sequence: Synthetic oligonucleotide
uccgcugcaagagagguug

SEQ ID NO: 2608934 - RNA, 19 nt, Artificial Sequence
  Description of Artificial Sequence: Synthetic oligonucleotide
gacuguuuggacaugccug

SEQ ID NO: 2608935 - RNA, 19 nt, Artificial Sequence
  Description of Artificial Sequence: Synthetic oligonucleotide
ucgagugguagcuugugcu

SEQ ID NO: 2608936 - RNA, 19 nt, Artificial Sequence
  Description of Artificial Sequence: Synthetic oligonucleotide
caugccuguguucauguag

SEQ ID NO: 2608937 - RNA, 19 nt, Artificial Sequence
  Description of Artificial Sequence: Synthetic oligonucleotide
uuggacaugccuguguuca

SEQ ID NO: 2608938 - RNA, 19 nt, Artificial Sequence
  Description of Artificial Sequence: Synthetic oligonucleotide
uaaaguccguguaggaccu

SEQ ID NO: 2608939 - RNA, 19 nt, Artificial Sequence
  Description of Artificial Sequence: Synthetic oligonucleotide
aauccaacagagcggccca

SEQ ID NO: 2608940 - RNA, 19 nt, Artificial Sequence
  Description of Artificial Sequence: Synthetic oligonucleotide
aacgcccauagauuuguga

SEQ ID NO: 2608941 - RNA, 19 nt, Artificial Sequence
  Description of Artificial Sequence: Synthetic oligonucleotide
uugcauucacaccaaugcu

SEQ ID NO: 2608942 - RNA, 19 nt, Artificial Sequence
  Description of Artificial Sequence: Synthetic oligonucleotide
agcagccauauuccgcugc

SEQ ID NO: 2608943 - RNA, 19 nt, Artificial Sequence
  Description of Artificial Sequence: Synthetic oligonucleotide
cauguucauguucacggag

SEQ ID NO: 2608944 - RNA, 19 nt, Artificial Sequence
  Description of Artificial Sequence: Synthetic oligonucleotide
guauucauguucauguuca

SEQ ID NO: 2608945 - RNA, 19 nt, Artificial Sequence
  Description of Artificial Sequence: Synthetic oligonucleotide
uguguucauguagccaugg

SEQ ID NO: 2608946 - RNA, 19 nt, Artificial Sequence
  Description of Artificial Sequence: Synthetic oligonucleotide
uucaugccucuuugcaucg

SEQ ID NO: 2608947 - RNA, 19 nt, Artificial Sequence
  Description of Artificial Sequence: Synthetic oligonucleotide
ugcaagagagguuggcggc

SEQ ID NO: 2608948 - RNA, 19 nt, Artificial Sequence
  Description of Artificial Sequence: Synthetic oligonucleotide
ucguacucuucaaagguau

SEQ ID NO: 2608949 - RNA, 19 nt, Artificial Sequence
  Description of Artificial Sequence: Synthetic oligonucleotide
cauagauuugugacugaug

SEQ ID NO: 2608950 - RNA, 19 nt, Artificial Sequence
  Description of Artificial Sequence: Synthetic oligonucleotide
agugguagcuugugcuugg

SEQ ID NO: 2608951 - RNA, 19 nt, Artificial Sequence
  Description of Artificial Sequence: Synthetic oligonucleotide
uguaggacccauugagaga

SEQ ID NO: 2608952 - RNA, 19 nt, Artificial Sequence
  Description of Artificial Sequence: Synthetic oligonucleotide
cuugcauggcuacagucug

SEQ ID NO: 2608953 - RNA, 19 nt, Artificial Sequence
  Description of Artificial Sequence: Synthetic oligonucleotide
gagaguauucauguucaug

SEQ ID NO: 2608954 - RNA, 19 nt, Artificial Sequence
  Description of Artificial Sequence: Synthetic oligonucleotide
accuugcauggcuacaguc

SEQ ID NO: 2608955 - RNA, 19 nt, Artificial Sequence
  Description of Artificial Sequence: Synthetic oligonucleotide
auucaugggaggaggaguc

SEQ ID NO: 2608956 - RNA, 19 nt, Artificial Sequence
  Description of Artificial Sequence: Synthetic oligonucleotide
guucaugccucuuugcauc

SEQ ID NO: 2608957 - RNA, 19 nt, Artificial Sequence
  Description of Artificial Sequence: Synthetic oligonucleotide
uucacaccaaugcugguuu

SEQ ID NO: 2608958 - RNA, 19 nt, Artificial Sequence
  Description of Artificial Sequence: Synthetic oligonucleotide
caucauguuacuggugggg

SEQ ID NO: 2608959 - RNA, 19 nt, Artificial Sequence
  Description of Artificial Sequence: Synthetic oligonucleotide
uugguucucauugggagac

SEQ ID NO: 2608960 - RNA, 19 nt, Artificial Sequence
  Description of Artificial Sequence: Synthetic oligonucleotide
caauccaacagagcggccc

SEQ ID NO: 2608961 - RNA, 19 nt, Artificial Sequence
  Description of Artificial Sequence: Synthetic oligonucleotide
cuugggguccccagggacg

SEQ ID NO: 2608962 - RNA, 19 nt, Artificial Sequence
  Description of Artificial Sequence: Synthetic oligonucleotide
ucauguuacugguggggug

SEQ ID NO: 2608963 - RNA, 19 nt, Artificial Sequence
  Description of Artificial Sequence: Synthetic oligonucleotide
cauggcauugagaguauuc

SEQ ID NO: 2608964 - RNA, 19 nt, Artificial Sequence
  Description of Artificial Sequence: Synthetic oligonucleotide
uuggcggcagauucauggg

SEQ ID NO: 2608965 - RNA, 19 nt, Artificial Sequence
  Description of Artificial Sequence: Synthetic oligonucleotide
aaauggugccaacaauguu

SEQ ID NO: 2608966 - RNA, 19 nt, Artificial Sequence
  Description of Artificial Sequence: Synthetic oligonucleotide
ucauguucauguucacgga

SEQ ID NO: 2608967 - RNA, 19 nt, Artificial Sequence
  Description of Artificial Sequence: Synthetic oligonucleotide
uacgcucauguucaugccu

SEQ ID NO: 2608968 - RNA, 19 nt, Artificial Sequence
  Description of Artificial Sequence: Synthetic oligonucleotide
gaagcagccauauuccgcu

SEQ ID NO: 2608969 - RNA, 19 nt, Artificial Sequence
  Description of Artificial Sequence: Synthetic oligonucleotide
agggacggaguguggagac

SEQ ID NO: 2608970 - RNA, 19 nt, Artificial Sequence
  Description of Artificial Sequence: Synthetic oligonucleotide
guucacggaguugacauug

SEQ ID NO: 2608971 - RNA, 19 nt, Artificial Sequence
  Description of Artificial Sequence: Synthetic oligonucleotide
auauuccgcugcaagagag

SEQ ID NO: 2608972 - RNA, 19 nt, Artificial Sequence
  Description of Artificial Sequence: Synthetic oligonucleotide
ugcaucguuaaaguccgug

SEQ ID NO: 2608973 - RNA, 19 nt, Artificial Sequence
  Description of Artificial Sequence: Synthetic oligonucleotide
gucugcauuggcugcgugg

SEQ ID NO: 2608974 - RNA, 19 nt, Artificial Sequence
  Description of Artificial Sequence: Synthetic oligonucleotide
ucauugggagacguggccc

SEQ ID NO: 2608975 - RNA, 19 nt, Artificial Sequence
  Description of Artificial Sequence: Synthetic oligonucleotide
cauguucaugccucuuugc

SEQ ID NO: 2608976 - RNA, 19 nt, Artificial Sequence
  Description of Artificial Sequence: Synthetic oligonucleotide
ggaggagucaggguuaggg

SEQ ID NO: 2608977 - RNA, 19 nt, Artificial Sequence
  Description of Artificial Sequence: Synthetic oligonucleotide
uugcauggcuacagucugg

SEQ ID NO: 2608978 - RNA, 19 nt, Artificial Sequence
  Description of Artificial Sequence: Synthetic oligonucleotide
auauuugaagcagccauau

SEQ ID NO: 2608979 - RNA, 19 nt, Artificial Sequence
  Description of Artificial Sequence: Synthetic oligonucleotide
uugaaaucguacucuucaa

SEQ ID NO: 2608980 - RNA, 19 nt, Artificial Sequence
  Description of Artificial Sequence: Synthetic oligonucleotide
uugugcagaucaauccaac

SEQ ID NO: 2608981 - RNA, 19 nt, Artificial Sequence
  Description of Artificial Sequence: Synthetic oligonucleotide
aguuugcagucuuuuggcu

SEQ ID NO: 2608982 - RNA, 19 nt, Artificial Sequence
  Description of Artificial Sequence: Synthetic oligonucleotide
uguucauguucacggaguu

SEQ ID NO: 2608983 - RNA, 19 nt, Artificial Sequence
  Description of Artificial Sequence: Synthetic oligonucleotide
ucaaguuuacgcucauguu

SEQ ID NO: 2608984 - RNA, 19 nt, Artificial Sequence
  Description of Artificial Sequence: Synthetic oligonucleotide
ugcauuggcugcgugggcc

SEQ ID NO: 2608985 - RNA, 19 nt, Artificial Sequence
  Description of Artificial Sequence: Synthetic oligonucleotide
uauucauguucauguucac

SEQ ID NO: 2608986 - RNA, 19 nt, Artificial Sequence
  Description of Artificial Sequence: Synthetic oligonucleotide
ugggaacgcccauagauuu

SEQ ID NO: 2608987 - RNA, 19 nt, Artificial Sequence
  Description of Artificial Sequence: Synthetic oligonucleotide
cauggcuacagucugggaa

SEQ ID NO: 2608988 - RNA, 19 nt, Artificial Sequence
  Description of Artificial Sequence: Synthetic oligonucleotide
uuacgcucauguucaugcc

SEQ ID NO: 2608989 - RNA, 19 nt, Artificial Sequence
  Description of Artificial Sequence: Synthetic oligonucleotide
uuacugguggggugggucu

SEQ ID NO: 2608990 - RNA, 19 nt, Artificial Sequence
  Description of Artificial Sequence: Synthetic oligonucleotide
cugaguuugcagucuuuug

SEQ ID NO: 2608991 - RNA, 19 nt, Artificial Sequence
  Description of Artificial Sequence: Synthetic oligonucleotide
uccguguaggaccuugcau

SEQ ID NO: 2608992 - RNA, 19 nt, Artificial Sequence
  Description of Artificial Sequence: Synthetic oligonucleotide
uggcaucaaguuuacgcuc

SEQ ID NO: 2608993 - RNA, 19 nt, Artificial Sequence
  Description of Artificial Sequence: Synthetic oligonucleotide
gcagaucaauccaacagag

SEQ ID NO: 2608994 - RNA, 19 nt, Artificial Sequence
  Description of Artificial Sequence: Synthetic oligonucleotide
ugggacaugcuguacccau

SEQ ID NO: 2608995 - RNA, 19 nt, Artificial Sequence
  Description of Artificial Sequence: Synthetic oligonucleotide
ugacugaugggugggcagc

SEQ ID NO: 2608996 - RNA, 19 nt, Artificial Sequence
  Description of Artificial Sequence: Synthetic oligonucleotide
gugacugaugggugggcag

SEQ ID NO: 2608997 - RNA, 19 nt, Artificial Sequence
  Description of Artificial Sequence: Synthetic oligonucleotide
cauguaggacccauugaga

SEQ ID NO: 2608998 - RNA, 19 nt, Artificial Sequence
  Description of Artificial Sequence: Synthetic oligonucleotide
ugugacugaugggugggca

SEQ ID NO: 2608999 - RNA, 19 nt, Artificial Sequence
  Description of Artificial Sequence: Synthetic oligonucleotide
ugaugggugggcagcggcu

SEQ ID NO: 2609000 - RNA, 19 nt, Artificial Sequence
  Description of Artificial Sequence: Synthetic oligonucleotide
ggagacguggcccuugcug

SEQ ID NO: 2609001 - RNA, 19 nt, Artificial Sequence
  Description of Artificial Sequence: Synthetic oligonucleotide
cauugagagacuguuugga

SEQ ID NO: 2609002 - RNA, 19 nt, Artificial Sequence
  Description of Artificial Sequence: Synthetic oligonucleotide
ugccucuuugcaucguuaa

SEQ ID NO: 2609003 - RNA, 19 nt, Artificial Sequence
  Description of Artificial Sequence: Synthetic oligonucleotide
uggcggcagauucauggga

SEQ ID NO: 2609004 - RNA, 19 nt, Artificial Sequence
  Description of Artificial Sequence: Synthetic oligonucleotide
gagugguagcuugugcuug

SEQ ID NO: 2609005 - RNA, 19 nt, Artificial Sequence
  Description of Artificial Sequence: Synthetic oligonucleotide
ucuuuuggcugugggagau

SEQ ID NO: 2609006 - RNA, 19 nt, Artificial Sequence
  Description of Artificial Sequence: Synthetic oligonucleotide
acgcucauguucaugccuc

SEQ ID NO: 2609007 - RNA, 19 nt, Artificial Sequence
  Description of Artificial Sequence: Synthetic oligonucleotide
uugacauuguaggccggug

SEQ ID NO: 2609008 - RNA, 19 nt, Artificial Sequence
  Description of Artificial Sequence: Synthetic oligonucleotide
auuccgcugcaagagaggu

SEQ ID NO: 2609009 - RNA, 19 nt, Artificial Sequence
  Description of Artificial Sequence: Synthetic oligonucleotide
ccguguaggaccuugcaug

SEQ ID NO: 2609010 - RNA, 19 nt, Artificial Sequence
  Description of Artificial Sequence: Synthetic oligonucleotide
gacugaugggugggcagcg

SEQ ID NO: 2609011 - RNA, 19 nt, Artificial Sequence
  Description of Artificial Sequence: Synthetic oligonucleotide
ucauguucacggaguugac

SEQ ID NO: 2609012 - RNA, 19 nt, Artificial Sequence
  Description of Artificial Sequence: Synthetic oligonucleotide
gaugcugacuugguucuca

SEQ ID NO: 2609013 - RNA, 19 nt, Artificial Sequence
  Description of Artificial Sequence: Synthetic oligonucleotide
gacauuguaggccggugcu

SEQ ID NO: 2609014 - RNA, 19 nt, Artificial Sequence
  Description of Artificial Sequence: Synthetic oligonucleotide
ucaauccaacagagcggcc

SEQ ID NO: 2609015 - RNA, 19 nt, Artificial Sequence
  Description of Artificial Sequence: Synthetic oligonucleotide
agccacuguucaucauugg

SEQ ID NO: 2609016 - RNA, 19 nt, Artificial Sequence
  Description of Artificial Sequence: Synthetic oligonucleotide
gccaauauuugaagcagcc

SEQ ID NO: 2609017 - RNA, 19 nt, Artificial Sequence
  Description of Artificial Sequence: Synthetic oligonucleotide
uacccauucauggcauuga

SEQ ID NO: 2609018 - RNA, 19 nt, Artificial Sequence
  Description of Artificial Sequence: Synthetic oligonucleotide
uguaggccggugcuggcau

SEQ ID NO: 2609019 - RNA, 19 nt, Artificial Sequence
  Description of Artificial Sequence: Synthetic oligonucleotide
gucgagugguagcuugugc

SEQ ID NO: 2609020 - RNA, 19 nt, Artificial Sequence
  Description of Artificial Sequence: Synthetic oligonucleotide
uaggaccuugcauggcuac

SEQ ID NO: 2609021 - RNA, 19 nt, Artificial Sequence
  Description of Artificial Sequence: Synthetic oligonucleotide
cuaccuucucauguaggac

SEQ ID NO: 2609022 - RNA, 19 nt, Artificial Sequence
  Description of Artificial Sequence: Synthetic oligonucleotide
uggcuacagucugggaacg

SEQ ID NO: 2609023 - RNA, 19 nt, Artificial Sequence
  Description of Artificial Sequence: Synthetic oligonucleotide
ugagaguauucauguucau

SEQ ID NO: 2609024 - RNA, 19 nt, Artificial Sequence
  Description of Artificial Sequence: Synthetic oligonucleotide
gcuguacccauucauggca

SEQ ID NO: 2609025 - RNA, 19 nt, Artificial Sequence
  Description of Artificial Sequence: Synthetic oligonucleotide
auucacaccaaugcugguu

SEQ ID NO: 2609026 - RNA, 19 nt, Artificial Sequence
  Description of Artificial Sequence: Synthetic oligonucleotide
aguccguguaggaccuugc

SEQ ID NO: 2609027 - RNA, 19 nt, Artificial Sequence
  Description of Artificial Sequence: Synthetic oligonucleotide
gcauugagaguauucaugu

SEQ ID NO: 2609028 - RNA, 19 nt, Artificial Sequence
  Description of Artificial Sequence: Synthetic oligonucleotide
ggagaugccaauauuugaa

SEQ ID NO: 2609029 - RNA, 19 nt, Artificial Sequence
  Description of Artificial Sequence: Synthetic oligonucleotide
ugcuggcaaucugaguuug

SEQ ID NO: 2609030 - RNA, 19 nt, Artificial Sequence
  Description of Artificial Sequence: Synthetic oligonucleotide
cuggcaucaaguuuacgcu

SEQ ID NO: 2609031 - RNA, 19 nt, Artificial Sequence
  Description of Artificial Sequence: Synthetic oligonucleotide
ccauauuccgcugcaagag

SEQ ID NO: 2609032 - RNA, 19 nt, Artificial Sequence
  Description of Artificial Sequence: Synthetic oligonucleotide
uuggcugggacaugcugua

SEQ ID NO: 2609033 - RNA, 19 nt, Artificial Sequence
  Description of Artificial Sequence: Synthetic oligonucleotide
ugggagacguggcccuugc

SEQ ID NO: 2609034 - RNA, 19 nt, Artificial Sequence
  Description of Artificial Sequence: Synthetic oligonucleotide
guuuacgcucauguucaug

SEQ ID NO: 2609035 - RNA, 19 nt, Artificial Sequence
  Description of Artificial Sequence: Synthetic oligonucleotide
gaugggugggcagcggcug

SEQ ID NO: 2609036 - RNA, 19 nt, Artificial Sequence
  Description of Artificial Sequence: Synthetic oligonucleotide
ucauuggcugggacaugcu

SEQ ID NO: 2609037 - RNA, 19 nt, Artificial Sequence
  Description of Artificial Sequence: Synthetic oligonucleotide
cauauuccgcugcaagaga

SEQ ID NO: 2609038 - RNA, 19 nt, Artificial Sequence
  Description of Artificial Sequence: Synthetic oligonucleotide
guuacuggugggguggguc

SEQ ID NO: 2609039 - RNA, 19 nt, Artificial Sequence
  Description of Artificial Sequence: Synthetic oligonucleotide
gacuugguucucauuggga

SEQ ID NO: 2609040 - RNA, 19 nt, Artificial Sequence
  Description of Artificial Sequence: Synthetic oligonucleotide
cuguguucauguagccaug

SEQ ID NO: 2609041 - RNA, 19 nt, Artificial Sequence
  Description of Artificial Sequence: Synthetic oligonucleotide
gcugggacaugcuguaccc

SEQ ID NO: 2609042 - RNA, 19 nt, Artificial Sequence
  Description of Artificial Sequence: Synthetic oligonucleotide
aggacccauugagagacug

SEQ ID NO: 2609043 - RNA, 19 nt, Artificial Sequence
  Description of Artificial Sequence: Synthetic oligonucleotide
ggcugggacaugcuguacc

SEQ ID NO: 2609044 - RNA, 19 nt, Artificial Sequence
  Description of Artificial Sequence: Synthetic oligonucleotide
caucguuaaaguccgugua

SEQ ID NO: 2609045 - RNA, 19 nt, Artificial Sequence
  Description of Artificial Sequence: Synthetic oligonucleotide
gccguguacaucauguuac

SEQ ID NO: 2609046 - RNA, 19 nt, Artificial Sequence
  Description of Artificial Sequence: Synthetic oligonucleotide
gggagaugccaauauuuga

SEQ ID NO: 2609047 - RNA, 19 nt, Artificial Sequence
  Description of Artificial Sequence: Synthetic oligonucleotide
aagagagguuggcggcaga

SEQ ID NO: 2609048 - RNA, 19 nt, Artificial Sequence
  Description of Artificial Sequence: Synthetic oligonucleotide
gguagcuugugcuuggggu

SEQ ID NO: 2609049 - RNA, 19 nt, Artificial Sequence
  Description of Artificial Sequence: Synthetic oligonucleotide
uugcuggcaaucugaguuu

SEQ ID NO: 2609050 - RNA, 19 nt, Artificial Sequence
  Description of Artificial Sequence: Synthetic oligonucleotide
gaggaggagucaggguuag

SEQ ID NO: 2609051 - RNA, 19 nt, Artificial Sequence
  Description of Artificial Sequence: Synthetic oligonucleotide
cguguaggaccuugcaugg

SEQ ID NO: 2609052 - RNA, 19 nt, Artificial Sequence
  Description of Artificial Sequence: Synthetic oligonucleotide
uguucacggaguugacauu

SEQ ID NO: 2609053 - RNA, 19 nt, Artificial Sequence
  Description of Artificial Sequence: Synthetic oligonucleotide
ggacaugcuguacccauuc

SEQ ID NO: 2609054 - RNA, 19 nt, Artificial Sequence
  Description of Artificial Sequence: Synthetic oligonucleotide
uggcugugggagaugccaa

SEQ ID NO: 2609055 - RNA, 19 nt, Artificial Sequence
  Description of Artificial Sequence: Synthetic oligonucleotide
ugguucucauugggagacg

SEQ ID NO: 2609056 - RNA, 19 nt, Artificial Sequence
  Description of Artificial Sequence: Synthetic oligonucleotide
uuguaggccggugcuggca

SEQ ID NO: 2609057 - RNA, 19 nt, Artificial Sequence
  Description of Artificial Sequence: Synthetic oligonucleotide
uguagccauggugguccgg

SEQ ID NO: 2609058 - RNA, 19 nt, Artificial Sequence
  Description of Artificial Sequence: Synthetic oligonucleotide
ugguccggggccguguaca

SEQ ID NO: 2609059 - RNA, 19 nt, Artificial Sequence
  Description of Artificial Sequence: Synthetic oligonucleotide
uugugacugaugggugggc

SEQ ID NO: 2609060 - RNA, 19 nt, Artificial Sequence
  Description of Artificial Sequence: Synthetic oligonucleotide
gccauauuccgcugcaaga

SEQ ID NO: 2609061 - RNA, 19 nt, Artificial Sequence
  Description of Artificial Sequence: Synthetic oligonucleotide
ccuaccuucucauguagga

SEQ ID NO: 2609062 - RNA, 19 nt, Artificial Sequence
  Description of Artificial Sequence: Synthetic oligonucleotide
ggcagauucaugggaggag

SEQ ID NO: 2609063 - RNA, 19 nt, Artificial Sequence
  Description of Artificial Sequence: Synthetic oligonucleotide
cugcgugggccugugguag

SEQ ID NO: 2609064 - RNA, 19 nt, Artificial Sequence
  Description of Artificial Sequence: Synthetic oligonucleotide
gguggggucgagugguagc

SEQ ID NO: 2609065 - RNA, 19 nt, Artificial Sequence
  Description of Artificial Sequence: Synthetic oligonucleotide
ggcggcagauucaugggag

SEQ ID NO: 2609066 - RNA, 19 nt, Artificial Sequence
  Description of Artificial Sequence: Synthetic oligonucleotide
uaggccggugcuggcauca

SEQ ID NO: 2609067 - RNA, 19 nt, Artificial Sequence
  Description of Artificial Sequence: Synthetic oligonucleotide
cauguucacggaguugaca

SEQ ID NO: 2609068 - RNA, 19 nt, Artificial Sequence
  Description of Artificial Sequence: Synthetic oligonucleotide
gcagcggcuggugacagag

SEQ ID NO: 2609069 - RNA, 19 nt, Artificial Sequence
  Description of Artificial Sequence: Synthetic oligonucleotide
caucaaguuuacgcucaug

SEQ ID NO: 2609070 - RNA, 19 nt, Artificial Sequence
  Description of Artificial Sequence: Synthetic oligonucleotide
ggggucgagugguagcuug

SEQ ID NO: 2609071 - RNA, 19 nt, Artificial Sequence
  Description of Artificial Sequence: Synthetic oligonucleotide
auggugccaacaauguuuu

SEQ ID NO: 2609072 - RNA, 19 nt, Artificial Sequence
  Description of Artificial Sequence: Synthetic oligonucleotide
agagagguuggcggcagau

SEQ ID NO: 2609073 - RNA, 19 nt, Artificial Sequence
  Description of Artificial Sequence: Synthetic oligonucleotide
aucguacucuucaaaggua

SEQ ID NO: 2609074 - RNA, 19 nt, Artificial Sequence
  Description of Artificial Sequence: Synthetic oligonucleotide
gcggcagauucaugggagg

SEQ ID NO: 2609075 - RNA, 19 nt, Artificial Sequence
  Description of Artificial Sequence: Synthetic oligonucleotide
aguuuacgcucauguucau

SEQ ID NO: 2609076 - RNA, 19 nt, Artificial Sequence
  Description of Artificial Sequence: Synthetic oligonucleotide
ggcaucaaguuuacgcuca

SEQ ID NO: 2609077 - RNA, 19 nt, Artificial Sequence
  Description of Artificial Sequence: Synthetic oligonucleotide
gaguauucauguucauguu

SEQ ID NO: 2609078 - RNA, 19 nt, Artificial Sequence
  Description of Artificial Sequence: Synthetic oligonucleotide
ugcgugggccugugguagc

SEQ ID NO: 2609079 - RNA, 19 nt, Artificial Sequence
  Description of Artificial Sequence: Synthetic oligonucleotide
gagguuggcggcagauuca

SEQ ID NO: 2609080 - RNA, 19 nt, Artificial Sequence
  Description of Artificial Sequence: Synthetic oligonucleotide
ugggccugugguagccacu

SEQ ID NO: 2609081 - RNA, 19 nt, Artificial Sequence
  Description of Artificial Sequence: Synthetic oligonucleotide
augcugacuugguucucau

SEQ ID NO: 2609082 - RNA, 19 nt, Artificial Sequence
  Description of Artificial Sequence: Synthetic oligonucleotide
uggacaugccuguguucau

SEQ ID NO: 2609083 - RNA, 19 nt, Artificial Sequence
  Description of Artificial Sequence: Synthetic oligonucleotide
guccguguaggaccuugca

SEQ ID NO: 2609084 - RNA, 19 nt, Artificial Sequence
  Description of Artificial Sequence: Synthetic oligonucleotide
gugggccugugguagccac

SEQ ID NO: 2609085 - RNA, 19 nt, Artificial Sequence
  Description of Artificial Sequence: Synthetic oligonucleotide
uaggacccauugagagacu

SEQ ID NO: 2609086 - RNA, 19 nt, Artificial Sequence
  Description of Artificial Sequence: Synthetic oligonucleotide
uuccgcugcaagagagguu

SEQ ID NO: 2609087 - RNA, 19 nt, Artificial Sequence
  Description of Artificial Sequence: Synthetic oligonucleotide
cauucauggcauugagagu

SEQ ID NO: 2609088 - RNA, 19 nt, Artificial Sequence
  Description of Artificial Sequence: Synthetic oligonucleotide
guacucuucaaagguauuu

SEQ ID NO: 2609089 - RNA, 19 nt, Artificial Sequence
  Description of Artificial Sequence: Synthetic oligonucleotide
aggcugccuaccuucucau

SEQ ID NO: 2609090 - RNA, 19 nt, Artificial Sequence
  Description of Artificial Sequence: Synthetic oligonucleotide
gcaucguuaaaguccgugu

SEQ ID NO: 2609091 - RNA, 19 nt, Artificial Sequence
  Description of Artificial Sequence: Synthetic oligonucleotide
ggacaugccuguguucaug

SEQ ID NO: 2609092 - RNA, 19 nt, Artificial Sequence
  Description of Artificial Sequence: Synthetic oligonucleotide
gacccauugagagacuguu

SEQ ID NO: 2609093 - RNA, 19 nt, Artificial Sequence
  Description of Artificial Sequence: Synthetic oligonucleotide
aggaccuugcauggcuaca

SEQ ID NO: 2609094 - RNA, 19 nt, Artificial Sequence
  Description of Artificial Sequence: Synthetic oligonucleotide
agguuggcggcagauucau

SEQ ID NO: 2609095 - RNA, 19 nt, Artificial Sequence
  Description of Artificial Sequence: Synthetic oligonucleotide
gccuaccuucucauguagg

SEQ ID NO: 2609096 - RNA, 19 nt, Artificial Sequence
  Description of Artificial Sequence: Synthetic oligonucleotide
guguaggaccuugcauggc

SEQ ID NO: 2609097 - RNA, 19 nt, Artificial Sequence
  Description of Artificial Sequence: Synthetic oligonucleotide
uugcaucguuaaaguccgu

SEQ ID NO: 2609098 - RNA, 19 nt, Artificial Sequence
  Description of Artificial Sequence: Synthetic oligonucleotide
ucaugccucuuugcaucgu

SEQ ID NO: 2609099 - RNA, 19 nt, Artificial Sequence
  Description of Artificial Sequence: Synthetic oligonucleotide
cauugggagacguggcccu

SEQ ID NO: 2609100 - RNA, 19 nt, Artificial Sequence
  Description of Artificial Sequence: Synthetic oligonucleotide
acaugccuguguucaugua

SEQ ID NO: 2609101 - RNA, 19 nt, Artificial Sequence
  Description of Artificial Sequence: Synthetic oligonucleotide
cccuugcuggcaaucugag

SEQ ID NO: 2609102 - RNA, 19 nt, Artificial Sequence
  Description of Artificial Sequence: Synthetic oligonucleotide
gcagccauauuccgcugca

SEQ ID NO: 2609103 - RNA, 19 nt, Artificial Sequence
  Description of Artificial Sequence: Synthetic oligonucleotide
guugacauuguaggccggu

SEQ ID NO: 2609104 - RNA, 19 nt, Artificial Sequence
  Description of Artificial Sequence: Synthetic oligonucleotide
ccagggacggaguguggag

SEQ ID NO: 2609105 - RNA, 19 nt, Artificial Sequence
  Description of Artificial Sequence: Synthetic oligonucleotide
cugccuaccuucucaugua

SEQ ID NO: 2609106 - RNA, 19 nt, Artificial Sequence
  Description of Artificial Sequence: Synthetic oligonucleotide
aggaggagucaggguuagg

SEQ ID NO: 2609107 - RNA, 19 nt, Artificial Sequence
  Description of Artificial Sequence: Synthetic oligonucleotide
ccaacagagcggcccagug

SEQ ID NO: 2609108 - RNA, 19 nt, Artificial Sequence
  Description of Artificial Sequence: Synthetic oligonucleotide
caaagguauuugugcagau

SEQ ID NO: 2609109 - RNA, 19 nt, Artificial Sequence
  Description of Artificial Sequence: Synthetic oligonucleotide
uuggcugcgugggccugug

SEQ ID NO: 2609110 - RNA, 19 nt, Artificial Sequence
  Description of Artificial Sequence: Synthetic oligonucleotide
gaccuugcauggcuacagu

SEQ ID NO: 2609111 - RNA, 19 nt, Artificial Sequence
  Description of Artificial Sequence: Synthetic oligonucleotide
ccuugcauggcuacagucu

SEQ ID NO: 2609112 - RNA, 19 nt, Artificial Sequence
  Description of Artificial Sequence: Synthetic oligonucleotide
ccaauauuugaagcagcca

SEQ ID NO: 2609113 - RNA, 19 nt, Artificial Sequence
  Description of Artificial Sequence: Synthetic oligonucleotide
cugggaacgcccauagauu

SEQ ID NO: 2609114 - RNA, 19 nt, Artificial Sequence
  Description of Artificial Sequence: Synthetic oligonucleotide
ggucgagugguagcuugug

SEQ ID NO: 2609115 - RNA, 19 nt, Artificial Sequence
  Description of Artificial Sequence: Synthetic oligonucleotide
gggccugugguagccacug

SEQ ID NO: 2609116 - RNA, 19 nt, Artificial Sequence
  Description of Artificial Sequence: Synthetic oligonucleotide
gacguggcccuugcuggca

SEQ ID NO: 2609117 - RNA, 19 nt, Artificial Sequence
  Description of Artificial Sequence: Synthetic oligonucleotide
gggaacgcccauagauuug

SEQ ID NO: 2609118 - RNA, 19 nt, Artificial Sequence
  Description of Artificial Sequence: Synthetic oligonucleotide
cauugagaguauucauguu

SEQ ID NO: 2609119 - RNA, 19 nt, Artificial Sequence
  Description of Artificial Sequence: Synthetic oligonucleotide
ggaacgcccauagauuugu

SEQ ID NO: 2609120 - RNA, 19 nt, Artificial Sequence
  Description of Artificial Sequence: Synthetic oligonucleotide
guaggaccuugcauggcua

SEQ ID NO: 2609121 - RNA, 19 nt, Artificial Sequence
  Description of Artificial Sequence: Synthetic oligonucleotide
uggugguccggggccgugu

SEQ ID NO: 2609122 - RNA, 19 nt, Artificial Sequence
  Description of Artificial Sequence: Synthetic oligonucleotide
gucugggaacgcccauaga

SEQ ID NO: 2609123 - RNA, 19 nt, Artificial Sequence
  Description of Artificial Sequence: Synthetic oligonucleotide
acguggcccuugcuggcaa

SEQ ID NO: 2609124 - RNA, 19 nt, Artificial Sequence
  Description of Artificial Sequence: Synthetic oligonucleotide
cguuaaaguccguguagga

SEQ ID NO: 2609125 - RNA, 19 nt, Artificial Sequence
  Description of Artificial Sequence: Synthetic oligonucleotide
acccauugagagacuguuu

SEQ ID NO: 2609126 - RNA, 19 nt, Artificial Sequence
  Description of Artificial Sequence: Synthetic oligonucleotide
cauuggcugcgugggccug

SEQ ID NO: 2609127 - RNA, 19 nt, Artificial Sequence
  Description of Artificial Sequence: Synthetic oligonucleotide
cuguacccauucauggcau

SEQ ID NO: 2609128 - RNA, 19 nt, Artificial Sequence
  Description of Artificial Sequence: Synthetic oligonucleotide
aucugaguuugcagucuuu

SEQ ID NO: 2609129 - RNA, 19 nt, Artificial Sequence
  Description of Artificial Sequence: Synthetic oligonucleotide
gcaagagagguuggcggca

SEQ ID NO: 2609130 - RNA, 19 nt, Artificial Sequence
  Description of Artificial Sequence: Synthetic oligonucleotide
ggggccguguacaucaugu

SEQ ID NO: 2609131 - RNA, 19 nt, Artificial Sequence
  Description of Artificial Sequence: Synthetic oligonucleotide
ggucugcauuggcugcgug

SEQ ID NO: 2609132 - RNA, 19 nt, Artificial Sequence
  Description of Artificial Sequence: Synthetic oligonucleotide
guaggccggugcuggcauc

SEQ ID NO: 2609133 - RNA, 19 nt, Artificial Sequence
  Description of Artificial Sequence: Synthetic oligonucleotide
gcuggcaaucugaguuugc

SEQ ID NO: 2609134 - RNA, 19 nt, Artificial Sequence
  Description of Artificial Sequence: Synthetic oligonucleotide
gguucucauugggagacgu

SEQ ID NO: 2609135 - RNA, 19 nt, Artificial Sequence
  Description of Artificial Sequence: Synthetic oligonucleotide
cuugugcuuggggucccca

SEQ ID NO: 2609136 - RNA, 19 nt, Artificial Sequence
  Description of Artificial Sequence: Synthetic oligonucleotide
gccucuuugcaucguuaaa

SEQ ID NO: 2609137 - RNA, 19 nt, Artificial Sequence
  Description of Artificial Sequence: Synthetic oligonucleotide
cauucacaccaaugcuggu

SEQ ID NO: 2609138 - RNA, 19 nt, Artificial Sequence
  Description of Artificial Sequence: Synthetic oligonucleotide
cguguacaucauguuacug

SEQ ID NO: 2609139 - RNA, 19 nt, Artificial Sequence
  Description of Artificial Sequence: Synthetic oligonucleotide
ggguggggucgagugguag

SEQ ID NO: 2609140 - RNA, 19 nt, Artificial Sequence
  Description of Artificial Sequence: Synthetic oligonucleotide
gggguccccagggacggag

SEQ ID NO: 2609141 - RNA, 19 nt, Artificial Sequence
  Description of Artificial Sequence: Synthetic oligonucleotide
auugggagacguggcccuu

SEQ ID NO: 2609142 - RNA, 19 nt, Artificial Sequence
  Description of Artificial Sequence: Synthetic oligonucleotide
ggugggcagcggcugguga

SEQ ID NO: 2609143 - RNA, 19 nt, Artificial Sequence
  Description of Artificial Sequence: Synthetic oligonucleotide
gugguccggggccguguac

SEQ ID NO: 2609144 - RNA, 19 nt, Artificial Sequence
  Description of Artificial Sequence: Synthetic oligonucleotide
ggcuacagucugggaacgc

SEQ ID NO: 2609145 - RNA, 19 nt, Artificial Sequence
  Description of Artificial Sequence: Synthetic oligonucleotide
gcccuugcuggcaaucuga

SEQ ID NO: 2609146 - RNA, 19 nt, Artificial Sequence
  Description of Artificial Sequence: Synthetic oligonucleotide
ggcugcgugggccuguggu

SEQ ID NO: 2609147 - RNA, 19 nt, Artificial Sequence
  Description of Artificial Sequence: Synthetic oligonucleotide
uggggucgagugguagcuu

SEQ ID NO: 2609148 - RNA, 19 nt, Artificial Sequence
  Description of Artificial Sequence: Synthetic oligonucleotide
caugccucuuugcaucguu

SEQ ID NO: 2609149 - RNA, 19 nt, Artificial Sequence
  Description of Artificial Sequence: Synthetic oligonucleotide
gcugcgugggccuguggua

SEQ ID NO: 2609150 - RNA, 19 nt, Artificial Sequence
  Description of Artificial Sequence: Synthetic oligonucleotide
gagagguuggcggcagauu

SEQ ID NO: 2609151 - RNA, 19 nt, Artificial Sequence
  Description of Artificial Sequence: Synthetic oligonucleotide
ccgcugcaagagagguugg

SEQ ID NO: 2609152 - RNA, 19 nt, Artificial Sequence
  Description of Artificial Sequence: Synthetic oligonucleotide
gcugugggagaugccaaua

SEQ ID NO: 2609153 - RNA, 19 nt, Artificial Sequence
  Description of Artificial Sequence: Synthetic oligonucleotide
gccggugcuggcaucaagu

SEQ ID NO: 2609154 - RNA, 19 nt, Artificial Sequence
  Description of Artificial Sequence: Synthetic oligonucleotide
cccauagauuugugacuga

SEQ ID NO: 2609155 - RNA, 19 nt, Artificial Sequence
  Description of Artificial Sequence: Synthetic oligonucleotide
gggcagcggcuggugacag

SEQ ID NO: 2609156 - RNA, 19 nt, Artificial Sequence
  Description of Artificial Sequence: Synthetic oligonucleotide
gcauuggcugcgugggccu

SEQ ID NO: 2609157 - RNA, 19 nt, Artificial Sequence
  Description of Artificial Sequence: Synthetic oligonucleotide
gcgugggccugugguagcc

SEQ ID NO: 2609158 - RNA, 19 nt, Artificial Sequence
  Description of Artificial Sequence: Synthetic oligonucleotide
cgcugcaagagagguuggc

SEQ ID NO: 2609159 - RNA, 19 nt, Artificial Sequence
  Description of Artificial Sequence: Synthetic oligonucleotide
cagcggcuggugacagaga

SEQ ID NO: 2609160 - RNA, 19 nt, Artificial Sequence
  Description of Artificial Sequence: Synthetic oligonucleotide
ccauagauuugugacugau

SEQ ID NO: 2609161 - RNA, 19 nt, Artificial Sequence
  Description of Artificial Sequence: Synthetic oligonucleotide
gggugggucugcauuggcu

SEQ ID NO: 2609162 - RNA, 19 nt, Artificial Sequence
  Description of Artificial Sequence: Synthetic oligonucleotide
cagccauauuccgcugcaa

SEQ ID NO: 2609163 - RNA, 19 nt, Artificial Sequence
  Description of Artificial Sequence: Synthetic oligonucleotide
ggacccauugagagacugu

SEQ ID NO: 2609164 - RNA, 19 nt, Artificial Sequence
  Description of Artificial Sequence: Synthetic oligonucleotide
guccggggccguguacauc

SEQ ID NO: 2609165 - RNA, 19 nt, Artificial Sequence
  Description of Artificial Sequence: Synthetic oligonucleotide
cccagggacggagugugga

SEQ ID NO: 2609166 - RNA, 19 nt, Artificial Sequence
  Description of Artificial Sequence: Synthetic oligonucleotide
ccaggcugccuaccuucuc

SEQ ID NO: 2609167 - RNA, 19 nt, Artificial Sequence
  Description of Artificial Sequence: Synthetic oligonucleotide
ggcugccaggcugccuacc

SEQ ID NO: 2609168 - RNA, 19 nt, Artificial Sequence
  Description of Artificial Sequence: Synthetic oligonucleotide
ccguguacaucauguuacu

SEQ ID NO: 2609169 - RNA, 19 nt, Artificial Sequence
  Description of Artificial Sequence: Synthetic oligonucleotide
ggugguccggggccgugua

SEQ ID NO: 2609170 - RNA, 19 nt, Artificial Sequence
  Description of Artificial Sequence: Synthetic oligonucleotide
gcaucaaguuuacgcucau

SEQ ID NO: 2609171 - RNA, 19 nt, Artificial Sequence
  Description of Artificial Sequence: Synthetic oligonucleotide
gagcggcccagugggcucu

SEQ ID NO: 2609172 - RNA, 19 nt, Artificial Sequence
  Description of Artificial Sequence: Synthetic oligonucleotide
cgcccauagauuugugacu

SEQ ID NO: 2609173 - RNA, 19 nt, Artificial Sequence
  Description of Artificial Sequence: Synthetic oligonucleotide
aggccggugcuggcaucaa

SEQ ID NO: 2609174 - RNA, 19 nt, Artificial Sequence
  Description of Artificial Sequence: Synthetic oligonucleotide
gggucgagugguagcuugu

SEQ ID NO: 2609175 - RNA, 19 nt, Artificial Sequence
  Description of Artificial Sequence: Synthetic oligonucleotide
cugccaggcugccuaccuu

SEQ ID NO: 2609176 - RNA, 19 nt, Artificial Sequence
  Description of Artificial Sequence: Synthetic oligonucleotide
gguccggggccguguacau

SEQ ID NO: 2609177 - RNA, 19 nt, Artificial Sequence
  Description of Artificial Sequence: Synthetic oligonucleotide
cauggugguccggggccgu

SEQ ID NO: 2609178 - RNA, 19 nt, Artificial Sequence
  Description of Artificial Sequence: Synthetic oligonucleotide
gggagacguggcccuugcu

SEQ ID NO: 2609179 - RNA, 19 nt, Artificial Sequence
  Description of Artificial Sequence: Synthetic oligonucleotide
cggggccguguacaucaug

SEQ ID NO: 2609180 - RNA, 19 nt, Artificial Sequence
  Description of Artificial Sequence: Synthetic oligonucleotide
cgagugguagcuugugcuu

SEQ ID NO: 2609181 - RNA, 19 nt, Artificial Sequence
  Description of Artificial Sequence: Synthetic oligonucleotide
gggucugcauuggcugcgu

SEQ ID NO: 2609182 - RNA, 19 nt, Artificial Sequence
  Description of Artificial Sequence: Synthetic oligonucleotide
gcucauguucaugccucuu

SEQ ID NO: 2609183 - RNA, 19 nt, Artificial Sequence
  Description of Artificial Sequence: Synthetic oligonucleotide
gugggcugccaggcugccu

SEQ ID NO: 2609184 - RNA, 19 nt, Artificial Sequence
  Description of Artificial Sequence: Synthetic oligonucleotide
cgcucauguucaugccucu

SEQ ID NO: 2609185 - RNA, 19 nt, Artificial Sequence
  Description of Artificial Sequence: Synthetic oligonucleotide
cggugcuggcaucaaguuu

SEQ ID NO: 2609186 - RNA, 19 nt, Artificial Sequence
  Description of Artificial Sequence: Synthetic oligonucleotide
ccggggccguguacaucau

SEQ ID NO: 2609187 - RNA, 19 nt, Artificial Sequence
  Description of Artificial Sequence: Synthetic oligonucleotide
gcggcccagugggcucugu

SEQ ID NO: 2609188 - RNA, 19 nt, Artificial Sequence
  Description of Artificial Sequence: Synthetic oligonucleotide
aaaacuuuggaccaggauc

SEQ ID NO: 2609189 - RNA, 19 nt, Artificial Sequence
  Description of Artificial Sequence: Synthetic oligonucleotide
agugcuauugcacaggucc

SEQ ID NO: 2609190 - RNA, 19 nt, Artificial Sequence
  Description of Artificial Sequence: Synthetic oligonucleotide
aaaccaucagcacaaacgc

SEQ ID NO: 2609191 - RNA, 19 nt, Artificial Sequence
  Description of Artificial Sequence: Synthetic oligonucleotide
acauaucucagguagagcc

SEQ ID NO: 2609192 - RNA, 19 nt, Artificial Sequence
  Description of Artificial Sequence: Synthetic oligonucleotide
aacauaagcagugaaaagg

SEQ ID NO: 2609193 - RNA, 19 nt, Artificial Sequence
  Description of Artificial Sequence: Synthetic oligonucleotide
uaaacagcuacccuggacg

SEQ ID NO: 2609194 - RNA, 19 nt, Artificial Sequence
  Description of Artificial Sequence: Synthetic oligonucleotide
aaacuuuggaccaggaucc

SEQ ID NO: 2609195 - RNA, 19 nt, Artificial Sequence
  Description of Artificial Sequence: Synthetic oligonucleotide
uaagcagugaaaaggagcc

SEQ ID NO: 2609196 - RNA, 19 nt, Artificial Sequence
  Description of Artificial Sequence: Synthetic oligonucleotide
gagaggauuugcuugaagg

SEQ ID NO: 2609197 - RNA, 19 nt, Artificial Sequence
  Description of Artificial Sequence: Synthetic oligonucleotide
gaaaauguuggucaaacca

SEQ ID NO: 2609198 - RNA, 19 nt, Artificial Sequence
  Description of Artificial Sequence: Synthetic oligonucleotide
aaacgcauugcaaaagacc

SEQ ID NO: 2609199 - RNA, 19 nt, Artificial Sequence
  Description of Artificial Sequence: Synthetic oligonucleotide
ugaaggucuaugauaagag

SEQ ID NO: 2609200 - RNA, 19 nt, Artificial Sequence
  Description of Artificial Sequence: Synthetic oligonucleotide
agaucuagccccaagaugg

SEQ ID NO: 2609201 - RNA, 19 nt, Artificial Sequence
  Description of Artificial Sequence: Synthetic oligonucleotide
ugauaagagcaguagaagc

SEQ ID NO: 2609202 - RNA, 19 nt, Artificial Sequence
  Description of Artificial Sequence: Synthetic oligonucleotide
agagguaauacuuucccag

SEQ ID NO: 2609203 - RNA, 19 nt, Artificial Sequence
  Description of Artificial Sequence: Synthetic oligonucleotide
aguucuggagaucuagccc

SEQ ID NO: 2609204 - RNA, 19 nt, Artificial Sequence
  Description of Artificial Sequence: Synthetic oligonucleotide
acaagauccauucucagga

SEQ ID NO: 2609205 - RNA, 19 nt, Artificial Sequence
  Description of Artificial Sequence: Synthetic oligonucleotide
acaguaaacagcuacccug

SEQ ID NO: 2609206 - RNA, 19 nt, Artificial Sequence
  Description of Artificial Sequence: Synthetic oligonucleotide
auaagcagugaaaaggagc

SEQ ID NO: 2609207 - RNA, 19 nt, Artificial Sequence
  Description of Artificial Sequence: Synthetic oligonucleotide
gauaagagcaguagaagcc

SEQ ID NO: 2609208 - RNA, 19 nt, Artificial Sequence
  Description of Artificial Sequence: Synthetic oligonucleotide
ucugacucaggcagcaucg

SEQ ID NO: 2609209 - RNA, 19 nt, Artificial Sequence
  Description of Artificial Sequence: Synthetic oligonucleotide
ucucaggacacacuucugg

SEQ ID NO: 2609210 - RNA, 19 nt, Artificial Sequence
  Description of Artificial Sequence: Synthetic oligonucleotide
aauguuggucaaaccaucc

SEQ ID NO: 2609211 - RNA, 19 nt, Artificial Sequence
  Description of Artificial Sequence: Synthetic oligonucleotide
auuaauaccuccaggacag

SEQ ID NO: 2609212 - RNA, 19 nt, Artificial Sequence
  Description of Artificial Sequence: Synthetic oligonucleotide
uugcaaaagaccaggaccu

SEQ ID NO: 2609213 - RNA, 19 nt, Artificial Sequence
  Description of Artificial Sequence: Synthetic oligonucleotide
ucuaugauaagagcaguag

SEQ ID NO: 2609214 - RNA, 19 nt, Artificial Sequence
  Description of Artificial Sequence: Synthetic oligonucleotide
ucucacaguaaacagcuac

SEQ ID NO: 2609215 - RNA, 19 nt, Artificial Sequence
  Description of Artificial Sequence: Synthetic oligonucleotide
ucuaagaagcccugugagg

SEQ ID NO: 2609216 - RNA, 19 nt, Artificial Sequence
  Description of Artificial Sequence: Synthetic oligonucleotide
uggaccaggauccuucagg

SEQ ID NO: 2609217 - RNA, 19 nt, Artificial Sequence
  Description of Artificial Sequence: Synthetic oligonucleotide
agcaguagaagccugaaaa

SEQ ID NO: 2609218 - RNA, 19 nt, Artificial Sequence
  Description of Artificial Sequence: Synthetic oligonucleotide
aacgcauugcaaaagacca

SEQ ID NO: 2609219 - RNA, 19 nt, Artificial Sequence
  Description of Artificial Sequence: Synthetic oligonucleotide
acuuguauccauggaaacc

SEQ ID NO: 2609220 - RNA, 19 nt, Artificial Sequence
  Description of Artificial Sequence: Synthetic oligonucleotide
agugaaaaggagcccugcc

SEQ ID NO: 2609221 - RNA, 19 nt, Artificial Sequence
  Description of Artificial Sequence: Synthetic oligonucleotide
cauacacuuguauccaugg

SEQ ID NO: 2609222 - RNA, 19 nt, Artificial Sequence
  Description of Artificial Sequence: Synthetic oligonucleotide
uggcaaauuugcuuguccg

SEQ ID NO: 2609223 - RNA, 19 nt, Artificial Sequence
  Description of Artificial Sequence: Synthetic oligonucleotide
uauuuugcacgccucccgg

SEQ ID NO: 2609224 - RNA, 19 nt, Artificial Sequence
  Description of Artificial Sequence: Synthetic oligonucleotide
aguuccccaaaguagaaug

SEQ ID NO: 2609225 - RNA, 19 nt, Artificial Sequence
  Description of Artificial Sequence: Synthetic oligonucleotide
uucccaggcauuaauaccu

SEQ ID NO: 2609226 - RNA, 19 nt, Artificial Sequence
  Description of Artificial Sequence: Synthetic oligonucleotide
uacacuuguauccauggaa

SEQ ID NO: 2609227 - RNA, 19 nt, Artificial Sequence
  Description of Artificial Sequence: Synthetic oligonucleotide
cauucucacaguaaacagc

SEQ ID NO: 2609228 - RNA, 19 nt, Artificial Sequence
  Description of Artificial Sequence: Synthetic oligonucleotide
aagccuuggccuuucggcg

SEQ ID NO: 2609229 - RNA, 19 nt, Artificial Sequence
  Description of Artificial Sequence: Synthetic oligonucleotide
aaagaacauaagcagugaa

SEQ ID NO: 2609230 - RNA, 19 nt, Artificial Sequence
  Description of Artificial Sequence: Synthetic oligonucleotide
gaagccuuggccuuucggc

SEQ ID NO: 2609231 - RNA, 19 nt, Artificial Sequence
  Description of Artificial Sequence: Synthetic oligonucleotide
acaggugacaucuuguggu

SEQ ID NO: 2609232 - RNA, 19 nt, Artificial Sequence
  Description of Artificial Sequence: Synthetic oligonucleotide
aaauguuggucaaaccauc

SEQ ID NO: 2609233 - RNA, 19 nt, Artificial Sequence
  Description of Artificial Sequence: Synthetic oligonucleotide
gucaaaccauccuugagag

SEQ ID NO: 2609234 - RNA, 19 nt, Artificial Sequence
  Description of Artificial Sequence: Synthetic oligonucleotide
gagguaauacuuucccagg

SEQ ID NO: 2609235 - RNA, 19 nt, Artificial Sequence
  Description of Artificial Sequence: Synthetic oligonucleotide
aggugcacaagauccauuc

SEQ ID NO: 2609236 - RNA, 19 nt, Artificial Sequence
  Description of Artificial Sequence: Synthetic oligonucleotide
ucuagccccaagauggugc

SEQ ID NO: 2609237 - RNA, 19 nt, Artificial Sequence
  Description of Artificial Sequence: Synthetic oligonucleotide
ugcacaagauccauucuca

SEQ ID NO: 2609238 - RNA, 19 nt, Artificial Sequence
  Description of Artificial Sequence: Synthetic oligonucleotide
uugugguaguaucagaguc

SEQ ID NO: 2609239 - RNA, 19 nt, Artificial Sequence
  Description of Artificial Sequence: Synthetic oligonucleotide
ugcuuguccgugaaagagg

SEQ ID NO: 2609240 - RNA, 19 nt, Artificial Sequence
  Description of Artificial Sequence: Synthetic oligonucleotide
aaaauguuggucaaaccau

SEQ ID NO: 2609241 - RNA, 19 nt, Artificial Sequence
  Description of Artificial Sequence: Synthetic oligonucleotide
guagaauggagauggcuag

SEQ ID NO: 2609242 - RNA, 19 nt, Artificial Sequence
  Description of Artificial Sequence: Synthetic oligonucleotide
ugcauucucacaguaaaca

SEQ ID NO: 2609243 - RNA, 19 nt, Artificial Sequence
  Description of Artificial Sequence: Synthetic oligonucleotide
ugugguaguaucagagucu

SEQ ID NO: 2609244 - RNA, 19 nt, Artificial Sequence
  Description of Artificial Sequence: Synthetic oligonucleotide
acguauuuugcacgccucc

SEQ ID NO: 2609245 - RNA, 19 nt, Artificial Sequence
  Description of Artificial Sequence: Synthetic oligonucleotide
uugaaggucuaugauaaga

SEQ ID NO: 2609246 - RNA, 19 nt, Artificial Sequence
  Description of Artificial Sequence: Synthetic oligonucleotide
gaugcauucucacaguaaa

SEQ ID NO: 2609247 - RNA, 19 nt, Artificial Sequence
  Description of Artificial Sequence: Synthetic oligonucleotide
agaacauaagcagugaaaa

SEQ ID NO: 2609248 - RNA, 19 nt, Artificial Sequence
  Description of Artificial Sequence: Synthetic oligonucleotide
gauggugcccuucugacuc

SEQ ID NO: 2609249 - RNA, 19 nt, Artificial Sequence
  Description of Artificial Sequence: Synthetic oligonucleotide
agcacaaacgcauugcaaa

SEQ ID NO: 2609250 - RNA, 19 nt, Artificial Sequence
  Description of Artificial Sequence: Synthetic oligonucleotide
uccuucagggaacaguucu

SEQ ID NO: 2609251 - RNA, 19 nt, Artificial Sequence
  Description of Artificial Sequence: Synthetic oligonucleotide
caguaaacagcuacccugg

SEQ ID NO: 2609252 - RNA, 19 nt, Artificial Sequence
  Description of Artificial Sequence: Synthetic oligonucleotide
ucauacacuuguauccaug

SEQ ID NO: 2609253 - RNA, 19 nt, Artificial Sequence
  Description of Artificial Sequence: Synthetic oligonucleotide
gacaggugacaucuugugg

SEQ ID NO: 2609254 - RNA, 19 nt, Artificial Sequence
  Description of Artificial Sequence: Synthetic oligonucleotide
uuggcaaauuugcuugucc

SEQ ID NO: 2609255 - RNA, 19 nt, Artificial Sequence
  Description of Artificial Sequence: Synthetic oligonucleotide
cucacaguaaacagcuacc

SEQ ID NO: 2609256 - RNA, 19 nt, Artificial Sequence
  Description of Artificial Sequence: Synthetic oligonucleotide
ggguacauaucucagguag

SEQ ID NO: 2609257 - RNA, 19 nt, Artificial Sequence
  Description of Artificial Sequence: Synthetic oligonucleotide
aucagcacaaacgcauugc

SEQ ID NO: 2609258 - RNA, 19 nt, Artificial Sequence
  Description of Artificial Sequence: Synthetic oligonucleotide
agaggauuugcuugaaggu

SEQ ID NO: 2609259 - RNA, 19 nt, Artificial Sequence
  Description of Artificial Sequence: Synthetic oligonucleotide
aagauccauucucaggaca

SEQ ID NO: 2609260 - RNA, 19 nt, Artificial Sequence
  Description of Artificial Sequence: Synthetic oligonucleotide
gagauggcuagcguggugg

SEQ ID NO: 2609261 - RNA, 19 nt, Artificial Sequence
  Description of Artificial Sequence: Synthetic oligonucleotide
acaaacgcauugcaaaaga

SEQ ID NO: 2609262 - RNA, 19 nt, Artificial Sequence
  Description of Artificial Sequence: Synthetic oligonucleotide
cucuaagaagcccugugag

SEQ ID NO: 2609263 - RNA, 19 nt, Artificial Sequence
  Description of Artificial Sequence: Synthetic oligonucleotide
caaaccauccuugagagga

SEQ ID NO: 2609264 - RNA, 19 nt, Artificial Sequence
  Description of Artificial Sequence: Synthetic oligonucleotide
auucucacaguaaacagcu

SEQ ID NO: 2609265 - RNA, 19 nt, Artificial Sequence
  Description of Artificial Sequence: Synthetic oligonucleotide
cauuaauaccuccaggaca

SEQ ID NO: 2609266 - RNA, 19 nt, Artificial Sequence
  Description of Artificial Sequence: Synthetic oligonucleotide
ucagcacaaacgcauugca

SEQ ID NO: 2609267 - RNA, 19 nt, Artificial Sequence
  Description of Artificial Sequence: Synthetic oligonucleotide
uggagaucuagccccaaga

SEQ ID NO: 2609268 - RNA, 19 nt, Artificial Sequence
  Description of Artificial Sequence: Synthetic oligonucleotide
aucccaaagaacauaagca

SEQ ID NO: 2609269 - RNA, 19 nt, Artificial Sequence
  Description of Artificial Sequence: Synthetic oligonucleotide
gagaucuagccccaagaug

SEQ ID NO: 2609270 - RNA, 19 nt, Artificial Sequence
  Description of Artificial Sequence: Synthetic oligonucleotide
uugcuuguccgugaaagag

SEQ ID NO: 2609271 - RNA, 19 nt, Artificial Sequence
  Description of Artificial Sequence: Synthetic oligonucleotide
agaauggagauggcuagcg

SEQ ID NO: 2609272 - RNA, 19 nt, Artificial Sequence
  Description of Artificial Sequence: Synthetic oligonucleotide
aagaagcccugugagguuc

SEQ ID NO: 2609273 - RNA, 19 nt, Artificial Sequence
  Description of Artificial Sequence: Synthetic oligonucleotide
uccaggacaggugacaucu

SEQ ID NO: 2609274 - RNA, 19 nt, Artificial Sequence
  Description of Artificial Sequence: Synthetic oligonucleotide
augauaagagcaguagaag

SEQ ID NO: 2609275 - RNA, 19 nt, Artificial Sequence
  Description of Artificial Sequence: Synthetic oligonucleotide
cucaggacacacuucuggg

SEQ ID NO: 2609276 - RNA, 19 nt, Artificial Sequence
  Description of Artificial Sequence: Synthetic oligonucleotide
acaguggguacauaucuca

SEQ ID NO: 2609277 - RNA, 19 nt, Artificial Sequence
  Description of Artificial Sequence: Synthetic oligonucleotide
aucgggcuugcauuauugc

SEQ ID NO: 2609278 - RNA, 19 nt, Artificial Sequence
  Description of Artificial Sequence: Synthetic oligonucleotide
ugaagccuuggccuuucgg

SEQ ID NO: 2609279 - RNA, 19 nt, Artificial Sequence
  Description of Artificial Sequence: Synthetic oligonucleotide
agcccugugagguucauga

SEQ ID NO: 2609280 - RNA, 19 nt, Artificial Sequence
  Description of Artificial Sequence: Synthetic oligonucleotide
ucacaguaaacagcuaccc

SEQ ID NO: 2609281 - RNA, 19 nt, Artificial Sequence
  Description of Artificial Sequence: Synthetic oligonucleotide
gguaaagccacggaaaaug

SEQ ID NO: 2609282 - RNA, 19 nt, Artificial Sequence
  Description of Artificial Sequence: Synthetic oligonucleotide
gacaucuugugguaguauc

SEQ ID NO: 2609283 - RNA, 19 nt, Artificial Sequence
  Description of Artificial Sequence: Synthetic oligonucleotide
aaguagaauggagauggcu

SEQ ID NO: 2609284 - RNA, 19 nt, Artificial Sequence
  Description of Artificial Sequence: Synthetic oligonucleotide
aaacagcuacccuggacgu

SEQ ID NO: 2609285 - RNA, 19 nt, Artificial Sequence
  Description of Artificial Sequence: Synthetic oligonucleotide
aauaccuccaggacaggug

SEQ ID NO: 2609286 - RNA, 19 nt, Artificial Sequence
  Description of Artificial Sequence: Synthetic oligonucleotide
cauaagcagugaaaaggag

SEQ ID NO: 2609287 - RNA, 19 nt, Artificial Sequence
  Description of Artificial Sequence: Synthetic oligonucleotide
aagaacauaagcagugaaa

SEQ ID NO: 2609288 - RNA, 19 nt, Artificial Sequence
  Description of Artificial Sequence: Synthetic oligonucleotide
aaaguagaauggagauggc

SEQ ID NO: 2609289 - RNA, 19 nt, Artificial Sequence
  Description of Artificial Sequence: Synthetic oligonucleotide
aggcauuaauaccuccagg

SEQ ID NO: 2609290 - RNA, 19 nt, Artificial Sequence
  Description of Artificial Sequence: Synthetic oligonucleotide
aaauuugcuuguccgugaa

SEQ ID NO: 2609291 - RNA, 19 nt, Artificial Sequence
  Description of Artificial Sequence: Synthetic oligonucleotide
guacauaucucagguagag

SEQ ID NO: 2609292 - RNA, 19 nt, Artificial Sequence
  Description of Artificial Sequence: Synthetic oligonucleotide
gaccaggaccuucaggugc

SEQ ID NO: 2609293 - RNA, 19 nt, Artificial Sequence
  Description of Artificial Sequence: Synthetic oligonucleotide
ugcuugaaggucuaugaua

SEQ ID NO: 2609294 - RNA, 19 nt, Artificial Sequence
  Description of Artificial Sequence: Synthetic oligonucleotide
cuuguauccauggaaacca

SEQ ID NO: 2609295 - RNA, 19 nt, Artificial Sequence
  Description of Artificial Sequence: Synthetic oligonucleotide
guaguaucagagucuggag

SEQ ID NO: 2609296 - RNA, 19 nt, Artificial Sequence
  Description of Artificial Sequence: Synthetic oligonucleotide
aagcagugaaaaggagccc

SEQ ID NO: 2609297 - RNA, 19 nt, Artificial Sequence
  Description of Artificial Sequence: Synthetic oligonucleotide
ugacucaggcagcaucggg

SEQ ID NO: 2609298 - RNA, 19 nt, Artificial Sequence
  Description of Artificial Sequence: Synthetic oligonucleotide
aagccacggaaaauguugg

SEQ ID NO: 2609299 - RNA, 19 nt, Artificial Sequence
  Description of Artificial Sequence: Synthetic oligonucleotide
uaucagagucuggagcugg

SEQ ID NO: 2609300 - RNA, 19 nt, Artificial Sequence
  Description of Artificial Sequence: Synthetic oligonucleotide
ugagaggauuugcuugaag

SEQ ID NO: 2609301 - RNA, 19 nt, Artificial Sequence
  Description of Artificial Sequence: Synthetic oligonucleotide
ggcauuaauaccuccagga

SEQ ID NO: 2609302 - RNA, 19 nt, Artificial Sequence
  Description of Artificial Sequence: Synthetic oligonucleotide
ugggcuuccagugcuauug

SEQ ID NO: 2609303 - RNA, 19 nt, Artificial Sequence
  Description of Artificial Sequence: Synthetic oligonucleotide
caaacgcauugcaaaagac

SEQ ID NO: 2609304 - RNA, 19 nt, Artificial Sequence
  Description of Artificial Sequence: Synthetic oligonucleotide
cuacccuggacguauuuug

SEQ ID NO: 2609305 - RNA, 19 nt, Artificial Sequence
  Description of Artificial Sequence: Synthetic oligonucleotide
uggguaaagccacggaaaa

SEQ ID NO: 2609306 - RNA, 19 nt, Artificial Sequence
  Description of Artificial Sequence: Synthetic oligonucleotide
auuauugccgccgaugcau

SEQ ID NO: 2609307 - RNA, 19 nt, Artificial Sequence
  Description of Artificial Sequence: Synthetic oligonucleotide
ugcauuauugccgccgaug

SEQ ID NO: 2609308 - RNA, 19 nt, Artificial Sequence
  Description of Artificial Sequence: Synthetic oligonucleotide
uuugcuuguccgugaaaga

SEQ ID NO: 2609309 - RNA, 19 nt, Artificial Sequence
  Description of Artificial Sequence: Synthetic oligonucleotide
gccucauacacuuguaucc

SEQ ID NO: 2609310 - RNA, 19 nt, Artificial Sequence
  Description of Artificial Sequence: Synthetic oligonucleotide
auaccuccaggacagguga

SEQ ID NO: 2609311 - RNA, 19 nt, Artificial Sequence
  Description of Artificial Sequence: Synthetic oligonucleotide
ucaaaccauccuugagagg

SEQ ID NO: 2609312 - RNA, 19 nt, Artificial Sequence
  Description of Artificial Sequence: Synthetic oligonucleotide
aggucuaugauaagagcag

SEQ ID NO: 2609313 - RNA, 19 nt, Artificial Sequence
  Description of Artificial Sequence: Synthetic oligonucleotide
auaucucagguagagccag

SEQ ID NO: 2609314 - RNA, 19 nt, Artificial Sequence
  Description of Artificial Sequence: Synthetic oligonucleotide
cuggacguauuuugcacgc

SEQ ID NO: 2609315 - RNA, 19 nt, Artificial Sequence
  Description of Artificial Sequence: Synthetic oligonucleotide
uuuugcacgccucccggac

SEQ ID NO: 2609316 - RNA, 19 nt, Artificial Sequence
  Description of Artificial Sequence: Synthetic oligonucleotide
cuaugauaagagcaguaga

SEQ ID NO: 2609317 - RNA, 19 nt, Artificial Sequence
  Description of Artificial Sequence: Synthetic oligonucleotide
uccgugaaagagguaauac

SEQ ID NO: 2609318 - RNA, 19 nt, Artificial Sequence
  Description of Artificial Sequence: Synthetic oligonucleotide
ucccagaaucccaaagaac

SEQ ID NO: 2609319 - RNA, 19 nt, Artificial Sequence
  Description of Artificial Sequence: Synthetic oligonucleotide
aguagaauggagauggcua

SEQ ID NO: 2609320 - RNA, 19 nt, Artificial Sequence
  Description of Artificial Sequence: Synthetic oligonucleotide
agagccagagcccuuucca

SEQ ID NO: 2609321 - RNA, 19 nt, Artificial Sequence
  Description of Artificial Sequence: Synthetic oligonucleotide
ugccucauacacuuguauc

SEQ ID NO: 2609322 - RNA, 19 nt, Artificial Sequence
  Description of Artificial Sequence: Synthetic oligonucleotide
agccuuggccuuucggcgc

SEQ ID NO: 2609323 - RNA, 19 nt, Artificial Sequence
  Description of Artificial Sequence: Synthetic oligonucleotide
ugagguucaugaagccuug

SEQ ID NO: 2609324 - RNA, 19 nt, Artificial Sequence
  Description of Artificial Sequence: Synthetic oligonucleotide
cuugagaggauuugcuuga

SEQ ID NO: 2609325 - RNA, 19 nt, Artificial Sequence
  Description of Artificial Sequence: Synthetic oligonucleotide
caggcauuaauaccuccag

SEQ ID NO: 2609326 - RNA, 19 nt, Artificial Sequence
  Description of Artificial Sequence: Synthetic oligonucleotide
caaaagaccaggaccuuca

SEQ ID NO: 2609327 - RNA, 19 nt, Artificial Sequence
  Description of Artificial Sequence: Synthetic oligonucleotide
uccagugcuauugcacagg

SEQ ID NO: 2609328 - RNA, 19 nt, Artificial Sequence
  Description of Artificial Sequence: Synthetic oligonucleotide
ggaccaggauccuucaggg

SEQ ID NO: 2609329 - RNA, 19 nt, Artificial Sequence
  Description of Artificial Sequence: Synthetic oligonucleotide
ggucaaaccauccuugaga

SEQ ID NO: 2609330 - RNA, 19 nt, Artificial Sequence
  Description of Artificial Sequence: Synthetic oligonucleotide
uuccagugcuauugcacag

SEQ ID NO: 2609331 - RNA, 19 nt, Artificial Sequence
  Description of Artificial Sequence: Synthetic oligonucleotide
uguauccauggaaaccauc

SEQ ID NO: 2609332 - RNA, 19 nt, Artificial Sequence
  Description of Artificial Sequence: Synthetic oligonucleotide
auggcuagcgugguggauc

SEQ ID NO: 2609333 - RNA, 19 nt, Artificial Sequence
  Description of Artificial Sequence: Synthetic oligonucleotide
uuggucaaaccauccuuga

SEQ ID NO: 2609334 - RNA, 19 nt, Artificial Sequence
  Description of Artificial Sequence: Synthetic oligonucleotide
uacccuggacguauuuugc

SEQ ID NO: 2609335 - RNA, 19 nt, Artificial Sequence
  Description of Artificial Sequence: Synthetic oligonucleotide
ugugagguucaugaagccu

SEQ ID NO: 2609336 - RNA, 19 nt, Artificial Sequence
  Description of Artificial Sequence: Synthetic oligonucleotide
agagucuggagcuggguaa

SEQ ID NO: 2609337 - RNA, 19 nt, Artificial Sequence
  Description of Artificial Sequence: Synthetic oligonucleotide
agcagugaaaaggagcccu

SEQ ID NO: 2609338 - RNA, 19 nt, Artificial Sequence
  Description of Artificial Sequence: Synthetic oligonucleotide
aggauuugcuugaaggucu

SEQ ID NO: 2609339 - RNA, 19 nt, Artificial Sequence
  Description of Artificial Sequence: Synthetic oligonucleotide
uugcacgccucccggacag

SEQ ID NO: 2609340 - RNA, 19 nt, Artificial Sequence
  Description of Artificial Sequence: Synthetic oligonucleotide
gugcacaagauccauucuc

SEQ ID NO: 2609341 - RNA, 19 nt, Artificial Sequence
  Description of Artificial Sequence: Synthetic oligonucleotide
guuccccaaaguagaaugg

SEQ ID NO: 2609342 - RNA, 19 nt, Artificial Sequence
  Description of Artificial Sequence: Synthetic oligonucleotide
gguaguaucagagucugga

SEQ ID NO: 2609343 - RNA, 19 nt, Artificial Sequence
  Description of Artificial Sequence: Synthetic oligonucleotide
auguuggucaaaccauccu

SEQ ID NO: 2609344 - RNA, 19 nt, Artificial Sequence
  Description of Artificial Sequence: Synthetic oligonucleotide
caucuugugguaguaucag

SEQ ID NO: 2609345 - RNA, 19 nt, Artificial Sequence
  Description of Artificial Sequence: Synthetic oligonucleotide
gcauuauugccgccgaugc

SEQ ID NO: 2609346 - RNA, 19 nt, Artificial Sequence
  Description of Artificial Sequence: Synthetic oligonucleotide
cacuuguauccauggaaac

SEQ ID NO: 2609347 - RNA, 19 nt, Artificial Sequence
  Description of Artificial Sequence: Synthetic oligonucleotide
uugcuugaaggucuaugau

SEQ ID NO: 2609348 - RNA, 19 nt, Artificial Sequence
  Description of Artificial Sequence: Synthetic oligonucleotide
uaaagccacggaaaauguu

SEQ ID NO: 2609349 - RNA, 19 nt, Artificial Sequence
  Description of Artificial Sequence: Synthetic oligonucleotide
uaauaccuccaggacaggu

SEQ ID NO: 2609350 - RNA, 19 nt, Artificial Sequence
  Description of Artificial Sequence: Synthetic oligonucleotide
uacauaucucagguagagc

SEQ ID NO: 2609351 - RNA, 19 nt, Artificial Sequence
  Description of Artificial Sequence: Synthetic oligonucleotide
gcugaguuccccaaaguag

SEQ ID NO: 2609352 - RNA, 19 nt, Artificial Sequence
  Description of Artificial Sequence: Synthetic oligonucleotide
auggaaaccaucagcacaa

SEQ ID NO: 2609353 - RNA, 19 nt, Artificial Sequence
  Description of Artificial Sequence: Synthetic oligonucleotide
cuagccccaagauggugcc

SEQ ID NO: 2609354 - RNA, 19 nt, Artificial Sequence
  Description of Artificial Sequence: Synthetic oligonucleotide
aauuugcuuguccgugaaa

SEQ ID NO: 2609355 - RNA, 19 nt, Artificial Sequence
  Description of Artificial Sequence: Synthetic oligonucleotide
auacacuuguauccaugga

SEQ ID NO: 2609356 - RNA, 19 nt, Artificial Sequence
  Description of Artificial Sequence: Synthetic oligonucleotide
caucgggcuugcauuauug

SEQ ID NO: 2609357 - RNA, 19 nt, Artificial Sequence
  Description of Artificial Sequence: Synthetic oligonucleotide
ugguaguaucagagucugg

SEQ ID NO: 2609358 - RNA, 19 nt, Artificial Sequence
  Description of Artificial Sequence: Synthetic oligonucleotide
accaucagcacaaacgcau

SEQ ID NO: 2609359 - RNA, 19 nt, Artificial Sequence
  Description of Artificial Sequence: Synthetic oligonucleotide
cagggaacaguucuggaga

SEQ ID NO: 2609360 - RNA, 19 nt, Artificial Sequence
  Description of Artificial Sequence: Synthetic oligonucleotide
cacaaacgcauugcaaaag

SEQ ID NO: 2609361 - RNA, 19 nt, Artificial Sequence
  Description of Artificial Sequence: Synthetic oligonucleotide
gugguaguaucagagucug

SEQ ID NO: 2609362 - RNA, 19 nt, Artificial Sequence
  Description of Artificial Sequence: Synthetic oligonucleotide
ugaguuccccaaaguagaa

SEQ ID NO: 2609363 - RNA, 19 nt, Artificial Sequence
  Description of Artificial Sequence: Synthetic oligonucleotide
uucagggaacaguucugga

SEQ ID NO: 2609364 - RNA, 19 nt, Artificial Sequence
  Description of Artificial Sequence: Synthetic oligonucleotide
ccuugagaggauuugcuug

SEQ ID NO: 2609365 - RNA, 19 nt, Artificial Sequence
  Description of Artificial Sequence: Synthetic oligonucleotide
gugcccuucugacucaggc

SEQ ID NO: 2609366 - RNA, 19 nt, Artificial Sequence
  Description of Artificial Sequence: Synthetic oligonucleotide
uucaugaagccuuggccuu

SEQ ID NO: 2609367 - RNA, 19 nt, Artificial Sequence
  Description of Artificial Sequence: Synthetic oligonucleotide
uuugcacgccucccggaca

SEQ ID NO: 2609368 - RNA, 19 nt, Artificial Sequence
  Description of Artificial Sequence: Synthetic oligonucleotide
augcauucucacaguaaac

SEQ ID NO: 2609369 - RNA, 19 nt, Artificial Sequence
  Description of Artificial Sequence: Synthetic oligonucleotide
acaucuugugguaguauca

SEQ ID NO: 2609370 - RNA, 19 nt, Artificial Sequence
  Description of Artificial Sequence: Synthetic oligonucleotide
cauaucucagguagagcca

SEQ ID NO: 2609371 - RNA, 19 nt, Artificial Sequence
  Description of Artificial Sequence: Synthetic oligonucleotide
augcccacaaccaggagca

SEQ ID NO: 2609372 - RNA, 19 nt, Artificial Sequence
  Description of Artificial Sequence: Synthetic oligonucleotide
uagaauggagauggcuagc

SEQ ID NO: 2609373 - RNA, 19 nt, Artificial Sequence
  Description of Artificial Sequence: Synthetic oligonucleotide
gguaauacuuucccaggca

SEQ ID NO: 2609374 - RNA, 19 nt, Artificial Sequence
  Description of Artificial Sequence: Synthetic oligonucleotide
caaauuugcuuguccguga

SEQ ID NO: 2609375 - RNA, 19 nt, Artificial Sequence
  Description of Artificial Sequence: Synthetic oligonucleotide
uggcuagcgugguggaucc

SEQ ID NO: 2609376 - RNA, 19 nt, Artificial Sequence
  Description of Artificial Sequence: Synthetic oligonucleotide
acacuucugggcuuccagu

SEQ ID NO: 2609377 - RNA, 19 nt, Artificial Sequence
  Description of Artificial Sequence: Synthetic oligonucleotide
aucuugugguaguaucaga

SEQ ID NO: 2609378 - RNA, 19 nt, Artificial Sequence
  Description of Artificial Sequence: Synthetic oligonucleotide
acacuuguauccauggaaa

SEQ ID NO: 2609379 - RNA, 19 nt, Artificial Sequence
  Description of Artificial Sequence: Synthetic oligonucleotide
acgccucccggacaguggg

SEQ ID NO: 2609380 - RNA, 19 nt, Artificial Sequence
  Description of Artificial Sequence: Synthetic oligonucleotide
aucucagguagagccagag

SEQ ID NO: 2609381 - RNA, 19 nt, Artificial Sequence
  Description of Artificial Sequence: Synthetic oligonucleotide
aagagcaguagaagccuga

SEQ ID NO: 2609382 - RNA, 19 nt, Artificial Sequence
  Description of Artificial Sequence: Synthetic oligonucleotide
gcauuaauaccuccaggac

SEQ ID NO: 2609383 - RNA, 19 nt, Artificial Sequence
  Description of Artificial Sequence: Synthetic oligonucleotide
uucuggagaucuagcccca

SEQ ID NO: 2609384 - RNA, 19 nt, Artificial Sequence
  Description of Artificial Sequence: Synthetic oligonucleotide
guggguacauaucucaggu

SEQ ID NO: 2609385 - RNA, 19 nt, Artificial Sequence
  Description of Artificial Sequence: Synthetic oligonucleotide
agcccugccucauacacuu

SEQ ID NO: 2609386 - RNA, 19 nt, Artificial Sequence
  Description of Artificial Sequence: Synthetic oligonucleotide
ccuggacguauuuugcacg

SEQ ID NO: 2609387 - RNA, 19 nt, Artificial Sequence
  Description of Artificial Sequence: Synthetic oligonucleotide
uuaauaccuccaggacagg

SEQ ID NO: 2609388 - RNA, 19 nt, Artificial Sequence
  Description of Artificial Sequence: Synthetic oligonucleotide
gcaaauuugcuuguccgug

SEQ ID NO: 2609389 - RNA, 19 nt, Artificial Sequence
  Description of Artificial Sequence: Synthetic oligonucleotide
agauggugcccuucugacu

SEQ ID NO: 2609390 - RNA, 19 nt, Artificial Sequence
  Description of Artificial Sequence: Synthetic oligonucleotide
gguccuuuuguccuuggca

SEQ ID NO: 2609391 - RNA, 19 nt, Artificial Sequence
  Description of Artificial Sequence: Synthetic oligonucleotide
uguccgugaaagagguaau

SEQ ID NO: 2609392 - RNA, 19 nt, Artificial Sequence
  Description of Artificial Sequence: Synthetic oligonucleotide
agcgugguggaucccagaa

SEQ ID NO: 2609393 - RNA, 19 nt, Artificial Sequence
  Description of Artificial Sequence: Synthetic oligonucleotide
agaccaggaccuucaggug

SEQ ID NO: 2609394 - RNA, 19 nt, Artificial Sequence
  Description of Artificial Sequence: Synthetic oligonucleotide
ggacaggugacaucuugug

SEQ ID NO: 2609395 - RNA, 19 nt, Artificial Sequence
  Description of Artificial Sequence: Synthetic oligonucleotide
auuuugcacgccucccgga

SEQ ID NO: 2609396 - RNA, 19 nt, Artificial Sequence
  Description of Artificial Sequence: Synthetic oligonucleotide
aaccaucagcacaaacgca

SEQ ID NO: 2609397 - RNA, 19 nt, Artificial Sequence
  Description of Artificial Sequence: Synthetic oligonucleotide
uccuuuuguccuuggcaaa

SEQ ID NO: 2609398 - RNA, 19 nt, Artificial Sequence
  Description of Artificial Sequence: Synthetic oligonucleotide
guaauacuuucccaggcau

SEQ ID NO: 2609399 - RNA, 19 nt, Artificial Sequence
  Description of Artificial Sequence: Synthetic oligonucleotide
acagcuacccuggacguau

SEQ ID NO: 2609400 - RNA, 19 nt, Artificial Sequence
  Description of Artificial Sequence: Synthetic oligonucleotide
cuagcgugguggaucccag

SEQ ID NO: 2609401 - RNA, 19 nt, Artificial Sequence
  Description of Artificial Sequence: Synthetic oligonucleotide
cgggcuugcauuauugccg

SEQ ID NO: 2609402 - RNA, 19 nt, Artificial Sequence
  Description of Artificial Sequence: Synthetic oligonucleotide
gagcuggguaaagccacgg

SEQ ID NO: 2609403 - RNA, 19 nt, Artificial Sequence
  Description of Artificial Sequence: Synthetic oligonucleotide
acccuggacguauuuugca

SEQ ID NO: 2609404 - RNA, 19 nt, Artificial Sequence
  Description of Artificial Sequence: Synthetic oligonucleotide
uaucucagguagagccaga

SEQ ID NO: 2609405 - RNA, 19 nt, Artificial Sequence
  Description of Artificial Sequence: Synthetic oligonucleotide
cuugcauuauugccgccga

SEQ ID NO: 2609406 - RNA, 19 nt, Artificial Sequence
  Description of Artificial Sequence: Synthetic oligonucleotide
ccuuuccaugcccacaacc

SEQ ID NO: 2609407 - RNA, 19 nt, Artificial Sequence
  Description of Artificial Sequence: Synthetic oligonucleotide
gacaguggguacauaucuc

SEQ ID NO: 2609408 - RNA, 19 nt, Artificial Sequence
  Description of Artificial Sequence: Synthetic oligonucleotide
agggaacaguucuggagau

SEQ ID NO: 2609409 - RNA, 19 nt, Artificial Sequence
  Description of Artificial Sequence: Synthetic oligonucleotide
cagugaaaaggagcccugc

SEQ ID NO: 2609410 - RNA, 19 nt, Artificial Sequence
  Description of Artificial Sequence: Synthetic oligonucleotide
auccuugagaggauuugcu

SEQ ID NO: 2609411 - RNA, 19 nt, Artificial Sequence
  Description of Artificial Sequence: Synthetic oligonucleotide
ggaaaccaucagcacaaac

SEQ ID NO: 2609412 - RNA, 19 nt, Artificial Sequence
  Description of Artificial Sequence: Synthetic oligonucleotide
gacguauuuugcacgccuc

SEQ ID NO: 2609413 - RNA, 19 nt, Artificial Sequence
  Description of Artificial Sequence: Synthetic oligonucleotide
uuauugccgccgaugcauu

SEQ ID NO: 2609414 - RNA, 19 nt, Artificial Sequence
  Description of Artificial Sequence: Synthetic oligonucleotide
uaagaagcccugugagguu

SEQ ID NO: 2609415 - RNA, 19 nt, Artificial Sequence
  Description of Artificial Sequence: Synthetic oligonucleotide
uggguacauaucucaggua

SEQ ID NO: 2609416 - RNA, 19 nt, Artificial Sequence
  Description of Artificial Sequence: Synthetic oligonucleotide
gggcuugcauuauugccgc

SEQ ID NO: 2609417 - RNA, 19 nt, Artificial Sequence
  Description of Artificial Sequence: Synthetic oligonucleotide
gcacaagauccauucucag

SEQ ID NO: 2609418 - RNA, 19 nt, Artificial Sequence
  Description of Artificial Sequence: Synthetic oligonucleotide
gauccuucagggaacaguu

SEQ ID NO: 2609419 - RNA, 19 nt, Artificial Sequence
  Description of Artificial Sequence: Synthetic oligonucleotide
ccacggaaaauguugguca

SEQ ID NO: 2609420 - RNA, 19 nt, Artificial Sequence
  Description of Artificial Sequence: Synthetic oligonucleotide
auugccgccgaugcauucu

SEQ ID NO: 2609421 - RNA, 19 nt, Artificial Sequence
  Description of Artificial Sequence: Synthetic oligonucleotide
augaagccuuggccuuucg

SEQ ID NO: 2609422 - RNA, 19 nt, Artificial Sequence
  Description of Artificial Sequence: Synthetic oligonucleotide
ucccaggcauuaauaccuc

SEQ ID NO: 2609423 - RNA, 19 nt, Artificial Sequence
  Description of Artificial Sequence: Synthetic oligonucleotide
aaaggagcccugccucaua

SEQ ID NO: 2609424 - RNA, 19 nt, Artificial Sequence
  Description of Artificial Sequence: Synthetic oligonucleotide
aggacaggugacaucuugu

SEQ ID NO: 2609425 - RNA, 19 nt, Artificial Sequence
  Description of Artificial Sequence: Synthetic oligonucleotide
agauggcuagcguggugga

SEQ ID NO: 2609426 - RNA, 19 nt, Artificial Sequence
  Description of Artificial Sequence: Synthetic oligonucleotide
cuuucggcgcugaguuccc

SEQ ID NO: 2609427 - RNA, 19 nt, Artificial Sequence
  Description of Artificial Sequence: Synthetic oligonucleotide
uggacguauuuugcacgcc

SEQ ID NO: 2609428 - RNA, 19 nt, Artificial Sequence
  Description of Artificial Sequence: Synthetic oligonucleotide
ccuuucggcgcugaguucc

SEQ ID NO: 2609429 - RNA, 19 nt, Artificial Sequence
  Description of Artificial Sequence: Synthetic oligonucleotide
cagagcccuuuccaugccc

SEQ ID NO: 2609430 - RNA, 19 nt, Artificial Sequence
  Description of Artificial Sequence: Synthetic oligonucleotide
uauugccgccgaugcauuc

SEQ ID NO: 2609431 - RNA, 19 nt, Artificial Sequence
  Description of Artificial Sequence: Synthetic oligonucleotide
uuggccuuucggcgcugag

SEQ ID NO: 2609432 - RNA, 19 nt, Artificial Sequence
  Description of Artificial Sequence: Synthetic oligonucleotide
ugacaucuugugguaguau

SEQ ID NO: 2609433 - RNA, 19 nt, Artificial Sequence
  Description of Artificial Sequence: Synthetic oligonucleotide
cuuggcaaauuugcuuguc

SEQ ID NO: 2609434 - RNA, 19 nt, Artificial Sequence
  Description of Artificial Sequence: Synthetic oligonucleotide
aacuuuggaccaggauccu

SEQ ID NO: 2609435 - RNA, 19 nt, Artificial Sequence
  Description of Artificial Sequence: Synthetic oligonucleotide
guaucagagucuggagcug

SEQ ID NO: 2609436 - RNA, 19 nt, Artificial Sequence
  Description of Artificial Sequence: Synthetic oligonucleotide
agccacggaaaauguuggu

SEQ ID NO: 2609437 - RNA, 19 nt, Artificial Sequence
  Description of Artificial Sequence: Synthetic oligonucleotide
ggacaguggguacauaucu

SEQ ID NO: 2609438 - RNA, 19 nt, Artificial Sequence
  Description of Artificial Sequence: Synthetic oligonucleotide
ggaacaguucuggagaucu

SEQ ID NO: 2609439 - RNA, 19 nt, Artificial Sequence
  Description of Artificial Sequence: Synthetic oligonucleotide
gauccauucucaggacaca

SEQ ID NO: 2609440 - RNA, 19 nt, Artificial Sequence
  Description of Artificial Sequence: Synthetic oligonucleotide
acgcauugcaaaagaccag

SEQ ID NO: 2609441 - RNA, 19 nt, Artificial Sequence
  Description of Artificial Sequence: Synthetic oligonucleotide
cacgccucccggacagugg

SEQ ID NO: 2609442 - RNA, 19 nt, Artificial Sequence
  Description of Artificial Sequence: Synthetic oligonucleotide
gcuggguaaagccacggaa

SEQ ID NO: 2609443 - RNA, 19 nt, Artificial Sequence
  Description of Artificial Sequence: Synthetic oligonucleotide
agccccaagauggugcccu

SEQ ID NO: 2609444 - RNA, 19 nt, Artificial Sequence
  Description of Artificial Sequence: Synthetic oligonucleotide
uucucacaguaaacagcua

SEQ ID NO: 2609445 - RNA, 19 nt, Artificial Sequence
  Description of Artificial Sequence: Synthetic oligonucleotide
cugacucaggcagcaucgg

SEQ ID NO: 2609446 - RNA, 19 nt, Artificial Sequence
  Description of Artificial Sequence: Synthetic oligonucleotide
cauuauugccgccgaugca

SEQ ID NO: 2609447 - RNA, 19 nt, Artificial Sequence
  Description of Artificial Sequence: Synthetic oligonucleotide
gaauggagauggcuagcgu

SEQ ID NO: 2609448 - RNA, 19 nt, Artificial Sequence
  Description of Artificial Sequence: Synthetic oligonucleotide
aaaccauccuugagaggau

SEQ ID NO: 2609449 - RNA, 19 nt, Artificial Sequence
  Description of Artificial Sequence: Synthetic oligonucleotide
agagcaguagaagccugaa

SEQ ID NO: 2609450 - RNA, 19 nt, Artificial Sequence
  Description of Artificial Sequence: Synthetic oligonucleotide
uugcauuauugccgccgau

SEQ ID NO: 2609451 - RNA, 19 nt, Artificial Sequence
  Description of Artificial Sequence: Synthetic oligonucleotide
acuuucccaggcauuaaua

SEQ ID NO: 2609452 - RNA, 19 nt, Artificial Sequence
  Description of Artificial Sequence: Synthetic oligonucleotide
gcuuccagugcuauugcac

SEQ ID NO: 2609453 - RNA, 19 nt, Artificial Sequence
  Description of Artificial Sequence: Synthetic oligonucleotide
auccuucagggaacaguuc

SEQ ID NO: 2609454 - RNA, 19 nt, Artificial Sequence
  Description of Artificial Sequence: Synthetic oligonucleotide
cacggaaaauguuggucaa

SEQ ID NO: 2609455 - RNA, 19 nt, Artificial Sequence
  Description of Artificial Sequence: Synthetic oligonucleotide
uaccuccaggacaggugac

SEQ ID NO: 2609456 - RNA, 19 nt, Artificial Sequence
  Description of Artificial Sequence: Synthetic oligonucleotide
ugcuauugcacagguccuu

SEQ ID NO: 2609457 - RNA, 19 nt, Artificial Sequence
  Description of Artificial Sequence: Synthetic oligonucleotide
aucuagccccaagauggug

SEQ ID NO: 2609458 - RNA, 19 nt, Artificial Sequence
  Description of Artificial Sequence: Synthetic oligonucleotide
gucuaugauaagagcagua

SEQ ID NO: 2609459 - RNA, 19 nt, Artificial Sequence
  Description of Artificial Sequence: Synthetic oligonucleotide
guaaagccacggaaaaugu

SEQ ID NO: 2609460 - RNA, 19 nt, Artificial Sequence
  Description of Artificial Sequence: Synthetic oligonucleotide
uggccuuucggcgcugagu

SEQ ID NO: 2609461 - RNA, 19 nt, Artificial Sequence
  Description of Artificial Sequence: Synthetic oligonucleotide
agagcccuuuccaugccca

SEQ ID NO: 2609462 - RNA, 19 nt, Artificial Sequence
  Description of Artificial Sequence: Synthetic oligonucleotide
gaccaggauccuucaggga

SEQ ID NO: 2609463 - RNA, 19 nt, Artificial Sequence
  Description of Artificial Sequence: Synthetic oligonucleotide
aagcccugugagguucaug

SEQ ID NO: 2609464 - RNA, 19 nt, Artificial Sequence
  Description of Artificial Sequence: Synthetic oligonucleotide
uggagauggcuagcguggu

SEQ ID NO: 2609465 - RNA, 19 nt, Artificial Sequence
  Description of Artificial Sequence: Synthetic oligonucleotide
uugagaggauuugcuugaa

SEQ ID NO: 2609466 - RNA, 19 nt, Artificial Sequence
  Description of Artificial Sequence: Synthetic oligonucleotide
gcacaaacgcauugcaaaa

SEQ ID NO: 2609467 - RNA, 19 nt, Artificial Sequence
  Description of Artificial Sequence: Synthetic oligonucleotide
ucggcgcugaguuccccaa

SEQ ID NO: 2609468 - RNA, 19 nt, Artificial Sequence
  Description of Artificial Sequence: Synthetic oligonucleotide
cagcacaaacgcauugcaa

SEQ ID NO: 2609469 - RNA, 19 nt, Artificial Sequence
  Description of Artificial Sequence: Synthetic oligonucleotide
ucugggcuuccagugcuau

SEQ ID NO: 2609470 - RNA, 19 nt, Artificial Sequence
  Description of Artificial Sequence: Synthetic oligonucleotide
ccuucagggaacaguucug

SEQ ID NO: 2609471 - RNA, 19 nt, Artificial Sequence
  Description of Artificial Sequence: Synthetic oligonucleotide
cccuggacguauuuugcac

SEQ ID NO: 2609472 - RNA, 19 nt, Artificial Sequence
  Description of Artificial Sequence: Synthetic oligonucleotide
aggacacacuucugggcuu

SEQ ID NO: 2609473 - RNA, 19 nt, Artificial Sequence
  Description of Artificial Sequence: Synthetic oligonucleotide
gguacauaucucagguaga

SEQ ID NO: 2609474 - RNA, 19 nt, Artificial Sequence
  Description of Artificial Sequence: Synthetic oligonucleotide
ccaggcauuaauaccucca

SEQ ID NO: 2609475 - RNA, 19 nt, Artificial Sequence
  Description of Artificial Sequence: Synthetic oligonucleotide
gugagguucaugaagccuu

SEQ ID NO: 2609476 - RNA, 19 nt, Artificial Sequence
  Description of Artificial Sequence: Synthetic oligonucleotide
gagcccuuuccaugcccac

SEQ ID NO: 2609477 - RNA, 19 nt, Artificial Sequence
  Description of Artificial Sequence: Synthetic oligonucleotide
cgccgaugcauucucacag

SEQ ID NO: 2609478 - RNA, 19 nt, Artificial Sequence
  Description of Artificial Sequence: Synthetic oligonucleotide
cacaguaaacagcuacccu

SEQ ID NO: 2609479 - RNA, 19 nt, Artificial Sequence
  Description of Artificial Sequence: Synthetic oligonucleotide
aacagcuacccuggacgua

SEQ ID NO: 2609480 - RNA, 19 nt, Artificial Sequence
  Description of Artificial Sequence: Synthetic oligonucleotide
ucaugaagccuuggccuuu

SEQ ID NO: 2609481 - RNA, 19 nt, Artificial Sequence
  Description of Artificial Sequence: Synthetic oligonucleotide
ugcaaaagaccaggaccuu

SEQ ID NO: 2609482 - RNA, 19 nt, Artificial Sequence
  Description of Artificial Sequence: Synthetic oligonucleotide
guccuuggcaaauuugcuu

SEQ ID NO: 2609483 - RNA, 19 nt, Artificial Sequence
  Description of Artificial Sequence: Synthetic oligonucleotide
uggugcccuucugacucag

SEQ ID NO: 2609484 - RNA, 19 nt, Artificial Sequence
  Description of Artificial Sequence: Synthetic oligonucleotide
caugaagccuuggccuuuc

SEQ ID NO: 2609485 - RNA, 19 nt, Artificial Sequence
  Description of Artificial Sequence: Synthetic oligonucleotide
acggaaaauguuggucaaa

SEQ ID NO: 2609486 - RNA, 19 nt, Artificial Sequence
  Description of Artificial Sequence: Synthetic oligonucleotide
ggagcuggguaaagccacg

SEQ ID NO: 2609487 - RNA, 19 nt, Artificial Sequence
  Description of Artificial Sequence: Synthetic oligonucleotide
gcaaaagaccaggaccuuc

SEQ ID NO: 2609488 - RNA, 19 nt, Artificial Sequence
  Description of Artificial Sequence: Synthetic oligonucleotide
uucugggcuuccagugcua

SEQ ID NO: 2609489 - RNA, 19 nt, Artificial Sequence
  Description of Artificial Sequence: Synthetic oligonucleotide
ggcaaauuugcuuguccgu

SEQ ID NO: 2609490 - RNA, 19 nt, Artificial Sequence
  Description of Artificial Sequence: Synthetic oligonucleotide
gccacggaaaauguugguc

SEQ ID NO: 2609491 - RNA, 19 nt, Artificial Sequence
  Description of Artificial Sequence: Synthetic oligonucleotide
cagagucuggagcugggua

SEQ ID NO: 2609492 - RNA, 19 nt, Artificial Sequence
  Description of Artificial Sequence: Synthetic oligonucleotide
ugccgccgaugcauucuca

SEQ ID NO: 2609493 - RNA, 19 nt, Artificial Sequence
  Description of Artificial Sequence: Synthetic oligonucleotide
gagucuggagcuggguaaa

SEQ ID NO: 2609494 - RNA, 19 nt, Artificial Sequence
  Description of Artificial Sequence: Synthetic oligonucleotide
ggugacaucuugugguagu

SEQ ID NO: 2609495 - RNA, 19 nt, Artificial Sequence
  Description of Artificial Sequence: Synthetic oligonucleotide
ggagauggcuagcguggug

SEQ ID NO: 2609496 - RNA, 19 nt, Artificial Sequence
  Description of Artificial Sequence: Synthetic oligonucleotide
ggaccuucaggugcacaag

SEQ ID NO: 2609497 - RNA, 19 nt, Artificial Sequence
  Description of Artificial Sequence: Synthetic oligonucleotide
gacacacuucugggcuucc

SEQ ID NO: 2609498 - RNA, 19 nt, Artificial Sequence
  Description of Artificial Sequence: Synthetic oligonucleotide
ggacguauuuugcacgccu

SEQ ID NO: 2609499 - RNA, 19 nt, Artificial Sequence
  Description of Artificial Sequence: Synthetic oligonucleotide
cuucugggcuuccagugcu

SEQ ID NO: 2609500 - RNA, 19 nt, Artificial Sequence
  Description of Artificial Sequence: Synthetic oligonucleotide
gcccacaaccaggagcagg

SEQ ID NO: 2609501 - RNA, 19 nt, Artificial Sequence
  Description of Artificial Sequence: Synthetic oligonucleotide
cccaggcauuaauaccucc

SEQ ID NO: 2609502 - RNA, 19 nt, Artificial Sequence
  Description of Artificial Sequence: Synthetic oligonucleotide
guagagccagagcccuuuc

SEQ ID NO: 2609503 - RNA, 19 nt, Artificial Sequence
  Description of Artificial Sequence: Synthetic oligonucleotide
gguggaucccagaauccca

SEQ ID NO: 2609504 - RNA, 19 nt, Artificial Sequence
  Description of Artificial Sequence: Synthetic oligonucleotide
ggagaucuagccccaagau

SEQ ID NO: 2609505 - RNA, 19 nt, Artificial Sequence
  Description of Artificial Sequence: Synthetic oligonucleotide
caggugacaucuuguggua

SEQ ID NO: 2609506 - RNA, 19 nt, Artificial Sequence
  Description of Artificial Sequence: Synthetic oligonucleotide
uuucggcgcugaguucccc

SEQ ID NO: 2609507 - RNA, 19 nt, Artificial Sequence
  Description of Artificial Sequence: Synthetic oligonucleotide
cguauuuugcacgccuccc

SEQ ID NO: 2609508 - RNA, 19 nt, Artificial Sequence
  Description of Artificial Sequence: Synthetic oligonucleotide
ucuggagaucuagccccaa

SEQ ID NO: 2609509 - RNA, 19 nt, Artificial Sequence
  Description of Artificial Sequence: Synthetic oligonucleotide
gcagugaaaaggagcccug

SEQ ID NO: 2609510 - RNA, 19 nt, Artificial Sequence
  Description of Artificial Sequence: Synthetic oligonucleotide
acuuuggaccaggauccuu

SEQ ID NO: 2609511 - RNA, 19 nt, Artificial Sequence
  Description of Artificial Sequence: Synthetic oligonucleotide
cgugaaagagguaauacuu

SEQ ID NO: 2609512 - RNA, 19 nt, Artificial Sequence
  Description of Artificial Sequence: Synthetic oligonucleotide
cccaaaguagaauggagau

SEQ ID NO: 2609513 - RNA, 19 nt, Artificial Sequence
  Description of Artificial Sequence: Synthetic oligonucleotide
gggcuuccagugcuauugc

SEQ ID NO: 2609514 - RNA, 19 nt, Artificial Sequence
  Description of Artificial Sequence: Synthetic oligonucleotide
gugacaucuugugguagua

SEQ ID NO: 2609515 - RNA, 19 nt, Artificial Sequence
  Description of Artificial Sequence: Synthetic oligonucleotide
gagccagagcccuuuccau

SEQ ID NO: 2609516 - RNA, 19 nt, Artificial Sequence
  Description of Artificial Sequence: Synthetic oligonucleotide
agaagcccugugagguuca

SEQ ID NO: 2609517 - RNA, 19 nt, Artificial Sequence
  Description of Artificial Sequence: Synthetic oligonucleotide
gccgccgaugcauucucac

SEQ ID NO: 2609518 - RNA, 19 nt, Artificial Sequence
  Description of Artificial Sequence: Synthetic oligonucleotide
guccgugaaagagguaaua

SEQ ID NO: 2609519 - RNA, 19 nt, Artificial Sequence
  Description of Artificial Sequence: Synthetic oligonucleotide
gcuagcgugguggauccca

SEQ ID NO: 2609520 - RNA, 19 nt, Artificial Sequence
  Description of Artificial Sequence: Synthetic oligonucleotide
uagccccaagauggugccc

SEQ ID NO: 2609521 - RNA, 19 nt, Artificial Sequence
  Description of Artificial Sequence: Synthetic oligonucleotide
cucauacacuuguauccau

SEQ ID NO: 2609522 - RNA, 19 nt, Artificial Sequence
  Description of Artificial Sequence: Synthetic oligonucleotide
gcuuguccgugaaagaggu

SEQ ID NO: 2609523 - RNA, 19 nt, Artificial Sequence
  Description of Artificial Sequence: Synthetic oligonucleotide
cagcaucgggcuugcauua

SEQ ID NO: 2609524 - RNA, 19 nt, Artificial Sequence
  Description of Artificial Sequence: Synthetic oligonucleotide
gcauugcaaaagaccagga

SEQ ID NO: 2609525 - RNA, 19 nt, Artificial Sequence
  Description of Artificial Sequence: Synthetic oligonucleotide
ccgugaaagagguaauacu

SEQ ID NO: 2609526 - RNA, 19 nt, Artificial Sequence
  Description of Artificial Sequence: Synthetic oligonucleotide
ucccggacaguggguacau

SEQ ID NO: 2609527 - RNA, 19 nt, Artificial Sequence
  Description of Artificial Sequence: Synthetic oligonucleotide
gcccuuuccaugcccacaa

SEQ ID NO: 2609528 - RNA, 19 nt, Artificial Sequence
  Description of Artificial Sequence: Synthetic oligonucleotide
gaucuagccccaagauggu

SEQ ID NO: 2609529 - RNA, 19 nt, Artificial Sequence
  Description of Artificial Sequence: Synthetic oligonucleotide
gaacaguucuggagaucua

SEQ ID NO: 2609530 - RNA, 19 nt, Artificial Sequence
  Description of Artificial Sequence: Synthetic oligonucleotide
ggucuaugauaagagcagu

SEQ ID NO: 2609531 - RNA, 19 nt, Artificial Sequence
  Description of Artificial Sequence: Synthetic oligonucleotide
gcagcaucgggcuugcauu

SEQ ID NO: 2609532 - RNA, 19 nt, Artificial Sequence
  Description of Artificial Sequence: Synthetic oligonucleotide
ugcccacaaccaggagcag

SEQ ID NO: 2609533 - RNA, 19 nt, Artificial Sequence
  Description of Artificial Sequence: Synthetic oligonucleotide
ggugcacaagauccauucu

SEQ ID NO: 2609534 - RNA, 19 nt, Artificial Sequence
  Description of Artificial Sequence: Synthetic oligonucleotide
agcaucgggcuugcauuau

SEQ ID NO: 2609535 - RNA, 19 nt, Artificial Sequence
  Description of Artificial Sequence: Synthetic oligonucleotide
ggccuuucggcgcugaguu

SEQ ID NO: 2609536 - RNA, 19 nt, Artificial Sequence
  Description of Artificial Sequence: Synthetic oligonucleotide
ggacacacuucugggcuuc

SEQ ID NO: 2609537 - RNA, 19 nt, Artificial Sequence
  Description of Artificial Sequence: Synthetic oligonucleotide
cggacaguggguacauauc

SEQ ID NO: 2609538 - RNA, 19 nt, Artificial Sequence
  Description of Artificial Sequence: Synthetic oligonucleotide
cagguagagccagagcccu

SEQ ID NO: 2609539 - RNA, 19 nt, Artificial Sequence
  Description of Artificial Sequence: Synthetic oligonucleotide
cucccggacaguggguaca

SEQ ID NO: 2609540 - RNA, 19 nt, Artificial Sequence
  Description of Artificial Sequence: Synthetic oligonucleotide
ggcagcaucgggcuugcau

SEQ ID NO: 2609541 - RNA, 19 nt, Artificial Sequence
  Description of Artificial Sequence: Synthetic oligonucleotide
ggcuugcauuauugccgcc

SEQ ID NO: 2609542 - RNA, 19 nt, Artificial Sequence
  Description of Artificial Sequence: Synthetic oligonucleotide
gugcuauugcacagguccu

SEQ ID NO: 2609543 - RNA, 19 nt, Artificial Sequence
  Description of Artificial Sequence: Synthetic oligonucleotide
cuuguccgugaaagaggua

SEQ ID NO: 2609544 - RNA, 19 nt, Artificial Sequence
  Description of Artificial Sequence: Synthetic oligonucleotide
ggugcccuucugacucagg

SEQ ID NO: 2609545 - RNA, 19 nt, Artificial Sequence
  Description of Artificial Sequence: Synthetic oligonucleotide
gauuugcuugaaggucuau

SEQ ID NO: 2609546 - RNA, 19 nt, Artificial Sequence
  Description of Artificial Sequence: Synthetic oligonucleotide
ccuucugacucaggcagca

SEQ ID NO: 2609547 - RNA, 19 nt, Artificial Sequence
  Description of Artificial Sequence: Synthetic oligonucleotide
gggaacaguucuggagauc

SEQ ID NO: 2609548 - RNA, 19 nt, Artificial Sequence
  Description of Artificial Sequence: Synthetic oligonucleotide
gauggcuagcgugguggau

SEQ ID NO: 2609549 - RNA, 19 nt, Artificial Sequence
  Description of Artificial Sequence: Synthetic oligonucleotide
gcacgccucccggacagug

SEQ ID NO: 2609550 - RNA, 19 nt, Artificial Sequence
  Description of Artificial Sequence: Synthetic oligonucleotide
ggauuugcuugaaggucua

SEQ ID NO: 2609551 - RNA, 19 nt, Artificial Sequence
  Description of Artificial Sequence: Synthetic oligonucleotide
cuuuuguccuuggcaaauu

SEQ ID NO: 2609552 - RNA, 19 nt, Artificial Sequence
  Description of Artificial Sequence: Synthetic oligonucleotide
cuuggccuuucggcgcuga

SEQ ID NO: 2609553 - RNA, 19 nt, Artificial Sequence
  Description of Artificial Sequence: Synthetic oligonucleotide
cgaugcauucucacaguaa

SEQ ID NO: 2609554 - RNA, 19 nt, Artificial Sequence
  Description of Artificial Sequence: Synthetic oligonucleotide
ccucccggacaguggguac

SEQ ID NO: 2609555 - RNA, 19 nt, Artificial Sequence
  Description of Artificial Sequence: Synthetic oligonucleotide
ccggacaguggguacauau

SEQ ID NO: 2609556 - RNA, 19 nt, Artificial Sequence
  Description of Artificial Sequence: Synthetic oligonucleotide
gccgaugcauucucacagu

SEQ ID NO: 2609557 - RNA, 19 nt, Artificial Sequence
  Description of Artificial Sequence: Synthetic oligonucleotide
ccgaugcauucucacagua

SEQ ID NO: 2609558 - RNA, 19 nt, Artificial Sequence
  Description of Artificial Sequence: Synthetic oligonucleotide
cgcugaguuccccaaagua

SEQ ID NO: 2609559 - RNA, 19 nt, Artificial Sequence
  Description of Artificial Sequence: Synthetic oligonucleotide
ugcacgccucccggacagu

SEQ ID NO: 2609560 - RNA, 19 nt, Artificial Sequence
  Description of Artificial Sequence: Synthetic oligonucleotide
caggugcacaagauccauu

SEQ ID NO: 2609561 - RNA, 19 nt, Artificial Sequence
  Description of Artificial Sequence: Synthetic oligonucleotide
ccagugcuauugcacaggu

SEQ ID NO: 2609562 - RNA, 19 nt, Artificial Sequence
  Description of Artificial Sequence: Synthetic oligonucleotide
cacagguccuuuuguccuu

SEQ ID NO: 2609563 - RNA, 19 nt, Artificial Sequence
  Description of Artificial Sequence: Synthetic oligonucleotide
ccgccgaugcauucucaca

SEQ ID NO: 2609564 - RNA, 19 nt, Artificial Sequence
  Description of Artificial Sequence: Synthetic oligonucleotide
ggguaaagccacggaaaau

SEQ ID NO: 2609565 - RNA, 19 nt, Artificial Sequence
  Description of Artificial Sequence: Synthetic oligonucleotide
ccugccucauacacuugua

SEQ ID NO: 2609566 - RNA, 19 nt, Artificial Sequence
  Description of Artificial Sequence: Synthetic oligonucleotide
gccuuucggcgcugaguuc

SEQ ID NO: 2609567 - RNA, 19 nt, Artificial Sequence
  Description of Artificial Sequence: Synthetic oligonucleotide
ccuuggcaaauuugcuugu

SEQ ID NO: 2609568 - RNA, 19 nt, Artificial Sequence
  Description of Artificial Sequence: Synthetic oligonucleotide
gcccugugagguucaugaa

SEQ ID NO: 2609569 - RNA, 19 nt, Artificial Sequence
  Description of Artificial Sequence: Synthetic oligonucleotide
gcuauugcacagguccuuu

SEQ ID NO: 2609570 - RNA, 19 nt, Artificial Sequence
  Description of Artificial Sequence: Synthetic oligonucleotide
ccuuuuguccuuggcaaau

SEQ ID NO: 2609571 - RNA, 19 nt, Artificial Sequence
  Description of Artificial Sequence: Synthetic oligonucleotide
gaagcccugugagguucau

SEQ ID NO: 2609572 - RNA, 19 nt, Artificial Sequence
  Description of Artificial Sequence: Synthetic oligonucleotide
gcgugguggaucccagaau

SEQ ID NO: 2609573 - RNA, 19 nt, Artificial Sequence
  Description of Artificial Sequence: Synthetic oligonucleotide
gccucccggacagugggua

SEQ ID NO: 2609574 - RNA, 19 nt, Artificial Sequence
  Description of Artificial Sequence: Synthetic oligonucleotide
gccuuggccuuucggcgcu

SEQ ID NO: 2609575 - RNA, 19 nt, Artificial Sequence
  Description of Artificial Sequence: Synthetic oligonucleotide
cugggcuuccagugcuauu

SEQ ID NO: 2609576 - RNA, 19 nt, Artificial Sequence
  Description of Artificial Sequence: Synthetic oligonucleotide
gcaucgggcuugcauuauu

SEQ ID NO: 2609577 - RNA, 19 nt, Artificial Sequence
  Description of Artificial Sequence: Synthetic oligonucleotide
ggcuagcgugguggauccc

SEQ ID NO: 2609578 - RNA, 19 nt, Artificial Sequence
  Description of Artificial Sequence: Synthetic oligonucleotide
cucaggcagcaucgggcuu

SEQ ID NO: 2609579 - RNA, 19 nt, Artificial Sequence
  Description of Artificial Sequence: Synthetic oligonucleotide
gccccaagauggugcccuu

SEQ ID NO: 2609580 - RNA, 19 nt, Artificial Sequence
  Description of Artificial Sequence: Synthetic oligonucleotide
cccggacaguggguacaua

SEQ ID NO: 2609581 - RNA, 19 nt, Artificial Sequence
  Description of Artificial Sequence: Synthetic oligonucleotide
uuuauuguaauaaagauuu

SEQ ID NO: 2609582 - RNA, 19 nt, Artificial Sequence
  Description of Artificial Sequence: Synthetic oligonucleotide
aacuugguagcuuugagac

SEQ ID NO: 2609583 - RNA, 19 nt, Artificial Sequence
  Description of Artificial Sequence: Synthetic oligonucleotide
aacaaaagcgcuaaggggc

SEQ ID NO: 2609584 - RNA, 19 nt, Artificial Sequence
  Description of Artificial Sequence: Synthetic oligonucleotide
uuuccauacacacagauaa

SEQ ID NO: 2609585 - RNA, 19 nt, Artificial Sequence
  Description of Artificial Sequence: Synthetic oligonucleotide
aaaaggcuuaagcacgugc

SEQ ID NO: 2609586 - RNA, 19 nt, Artificial Sequence
  Description of Artificial Sequence: Synthetic oligonucleotide
aaaacauucaaguaacaaa

SEQ ID NO: 2609587 - RNA, 19 nt, Artificial Sequence
  Description of Artificial Sequence: Synthetic oligonucleotide
guaauaaagauuuucucag

SEQ ID NO: 2609588 - RNA, 19 nt, Artificial Sequence
  Description of Artificial Sequence: Synthetic oligonucleotide
augaauacagucaucaagc

SEQ ID NO: 2609589 - RNA, 19 nt, Artificial Sequence
  Description of Artificial Sequence: Synthetic oligonucleotide
guaacaaaagcgcuaaggg

SEQ ID NO: 2609590 - RNA, 19 nt, Artificial Sequence
  Description of Artificial Sequence: Synthetic oligonucleotide
ugaagauuuaucuaggaaa

SEQ ID NO: 2609591 - RNA, 19 nt, Artificial Sequence
  Description of Artificial Sequence: Synthetic oligonucleotide
uuauugaucaggaauggca

SEQ ID NO: 2609592 - RNA, 19 nt, Artificial Sequence
  Description of Artificial Sequence: Synthetic oligonucleotide
cauuugaagauuuaucuag

SEQ ID NO: 2609593 - RNA, 19 nt, Artificial Sequence
  Description of Artificial Sequence: Synthetic oligonucleotide
gaaauuuauuguaauaaag

SEQ ID NO: 2609594 - RNA, 19 nt, Artificial Sequence
  Description of Artificial Sequence: Synthetic oligonucleotide
uuuauugaaauuuauugua

SEQ ID NO: 2609595 - RNA, 19 nt, Artificial Sequence
  Description of Artificial Sequence: Synthetic oligonucleotide
auucaaguaacaaaagcgc

SEQ ID NO: 2609596 - RNA, 19 nt, Artificial Sequence
  Description of Artificial Sequence: Synthetic oligonucleotide
ugagaaagcaucugaagag

SEQ ID NO: 2609597 - RNA, 19 nt, Artificial Sequence
  Description of Artificial Sequence: Synthetic oligonucleotide
uccauuugaagauuuaucu

SEQ ID NO: 2609598 - RNA, 19 nt, Artificial Sequence
  Description of Artificial Sequence: Synthetic oligonucleotide
uaacaaaagcgcuaagggg

SEQ ID NO: 2609599 - RNA, 19 nt, Artificial Sequence
  Description of Artificial Sequence: Synthetic oligonucleotide
cuuauuaacuguuggagug

SEQ ID NO: 2609600 - RNA, 19 nt, Artificial Sequence
  Description of Artificial Sequence: Synthetic oligonucleotide
  modified_base (4)..(4): a, c, u, g, unknown or other
aacnggcucagcuaaaaca

SEQ ID NO: 2609601 - RNA, 19 nt, Artificial Sequence
  Description of Artificial Sequence: Synthetic oligonucleotide
uaaagauuuucucaguggu

SEQ ID NO: 2609602 - RNA, 19 nt, Artificial Sequence
  Description of Artificial Sequence: Synthetic oligonucleotide
uuuacaguucacagguugg

SEQ ID NO: 2609603 - RNA, 19 nt, Artificial Sequence
  Description of Artificial Sequence: Synthetic oligonucleotide
gaagauuuaucuaggaaag

SEQ ID NO: 2609604 - RNA, 19 nt, Artificial Sequence
  Description of Artificial Sequence: Synthetic oligonucleotide
auagcuuauuaacuguugg

SEQ ID NO: 2609605 - RNA, 19 nt, Artificial Sequence
  Description of Artificial Sequence: Synthetic oligonucleotide
acagucaucaagccagucc

SEQ ID NO: 2609606 - RNA, 19 nt, Artificial Sequence
  Description of Artificial Sequence: Synthetic oligonucleotide
aaacauucaaguaacaaaa

SEQ ID NO: 2609607 - RNA, 19 nt, Artificial Sequence
  Description of Artificial Sequence: Synthetic oligonucleotide
acaacauuagcacagucca

SEQ ID NO: 2609608 - RNA, 19 nt, Artificial Sequence
  Description of Artificial Sequence: Synthetic oligonucleotide
acuugaaugucauucagca

SEQ ID NO: 2609609 - RNA, 19 nt, Artificial Sequence
  Description of Artificial Sequence: Synthetic oligonucleotide
uuuauuuaugucaaauuuu

SEQ ID NO: 2609610 - RNA, 19 nt, Artificial Sequence
  Description of Artificial Sequence: Synthetic oligonucleotide
auugcacaaacuugguagc

SEQ ID NO: 2609611 - RNA, 19 nt, Artificial Sequence
  Description of Artificial Sequence: Synthetic oligonucleotide
uucagcauuauugaucagg

SEQ ID NO: 2609612 - RNA, 19 nt, Artificial Sequence
  Description of Artificial Sequence: Synthetic oligonucleotide
uucucaguggucuagaaaa

SEQ ID NO: 2609613 - RNA, 19 nt, Artificial Sequence
  Description of Artificial Sequence: Synthetic oligonucleotide
acuuauugcacaaacuugg

SEQ ID NO: 2609614 - RNA, 19 nt, Artificial Sequence
  Description of Artificial Sequence: Synthetic oligonucleotide
aguaacaaaagcgcuaagg

SEQ ID NO: 2609615 - RNA, 19 nt, Artificial Sequence
  Description of Artificial Sequence: Synthetic oligonucleotide
ugagacacaacauuagcac

SEQ ID NO: 2609616 - RNA, 19 nt, Artificial Sequence
  Description of Artificial Sequence: Synthetic oligonucleotide
aaagcaucugaagagaggu

SEQ ID NO: 2609617 - RNA, 19 nt, Artificial Sequence
  Description of Artificial Sequence: Synthetic oligonucleotide
agauuuaucuaggaaaguc

SEQ ID NO: 2609618 - RNA, 19 nt, Artificial Sequence
  Description of Artificial Sequence: Synthetic oligonucleotide
auuuacaguucacagguug

SEQ ID NO: 2609619 - RNA, 19 nt, Artificial Sequence
  Description of Artificial Sequence: Synthetic oligonucleotide
uuauugaaauuuauuguaa

SEQ ID NO: 2609620 - RNA, 19 nt, Artificial Sequence
  Description of Artificial Sequence: Synthetic oligonucleotide
uacaguaguagcuccauca

SEQ ID NO: 2609621 - RNA, 19 nt, Artificial Sequence
  Description of Artificial Sequence: Synthetic oligonucleotide
uuaagcacgugcuuccggg

SEQ ID NO: 2609622 - RNA, 19 nt, Artificial Sequence
  Description of Artificial Sequence: Synthetic oligonucleotide
aagaccucaccacaaaggu

SEQ ID NO: 2609623 - RNA, 19 nt, Artificial Sequence
  Description of Artificial Sequence: Synthetic oligonucleotide
auugagaaagcaucugaag

SEQ ID NO: 2609624 - RNA, 19 nt, Artificial Sequence
  Description of Artificial Sequence: Synthetic oligonucleotide
  modified_base (5)..(5): a, c, u, g, unknown or other
aaacnggcucagcuaaaac

SEQ ID NO: 2609625 - RNA, 19 nt, Artificial Sequence
  Description of Artificial Sequence: Synthetic oligonucleotide
uuaucuaggaaagucaguc

SEQ ID NO: 2609626 - RNA, 19 nt, Artificial Sequence
  Description of Artificial Sequence: Synthetic oligonucleotide
cagauaagaccuuagugag

SEQ ID NO: 2609627 - RNA, 19 nt, Artificial Sequence
  Description of Artificial Sequence: Synthetic oligonucleotide
aagguugcacuauugagaa

SEQ ID NO: 2609628 - RNA, 19 nt, Artificial Sequence
  Description of Artificial Sequence: Synthetic oligonucleotide
ucauucagcauuauugauc

SEQ ID NO: 2609629 - RNA, 19 nt, Artificial Sequence
  Description of Artificial Sequence: Synthetic oligonucleotide
ucaguggucuagaaaauga

SEQ ID NO: 2609630 - RNA, 19 nt, Artificial Sequence
  Description of Artificial Sequence: Synthetic oligonucleotide
uucaaguaacaaaagcgcu

SEQ ID NO: 2609631 - RNA, 19 nt, Artificial Sequence
  Description of Artificial Sequence: Synthetic oligonucleotide
aaacuugguagcuuugaga

SEQ ID NO: 2609632 - RNA, 19 nt, Artificial Sequence
  Description of Artificial Sequence: Synthetic oligonucleotide
gaggucauagcuuauuaac

SEQ ID NO: 2609633 - RNA, 19 nt, Artificial Sequence
  Description of Artificial Sequence: Synthetic oligonucleotide
uauuguaauaaagauuuuc

SEQ ID NO: 2609634 - RNA, 19 nt, Artificial Sequence
  Description of Artificial Sequence: Synthetic oligonucleotide
cacaacauuagcacagucc

SEQ ID NO: 2609635 - RNA, 19 nt, Artificial Sequence
  Description of Artificial Sequence: Synthetic oligonucleotide
ugucauucagcauuauuga

SEQ ID NO: 2609636 - RNA, 19 nt, Artificial Sequence
  Description of Artificial Sequence: Synthetic oligonucleotide
aaagguugcacuauugaga

SEQ ID NO: 2609637 - RNA, 19 nt, Artificial Sequence
  Description of Artificial Sequence: Synthetic oligonucleotide
auuguaauaaagauuuucu

SEQ ID NO: 2609638 - RNA, 19 nt, Artificial Sequence
  Description of Artificial Sequence: Synthetic oligonucleotide
uaugucaaauuuuauugaa

SEQ ID NO: 2609639 - RNA, 19 nt, Artificial Sequence
  Description of Artificial Sequence: Synthetic oligonucleotide
augucauucagcauuauug

SEQ ID NO: 2609640 - RNA, 19 nt, Artificial Sequence
  Description of Artificial Sequence: Synthetic oligonucleotide
uauugagaaagcaucugaa

SEQ ID NO: 2609641 - RNA, 19 nt, Artificial Sequence
  Description of Artificial Sequence: Synthetic oligonucleotide
auggcaucccuucucuucc

SEQ ID NO: 2609642 - RNA, 19 nt, Artificial Sequence
  Description of Artificial Sequence: Synthetic oligonucleotide
gaagaccucaccacaaagg

SEQ ID NO: 2609643 - RNA, 19 nt, Artificial Sequence
  Description of Artificial Sequence: Synthetic oligonucleotide
ugaacuugaaugucauuca

SEQ ID NO: 2609644 - RNA, 19 nt, Artificial Sequence
  Description of Artificial Sequence: Synthetic oligonucleotide
uauugaucaggaauggcau

SEQ ID NO: 2609645 - RNA, 19 nt, Artificial Sequence
  Description of Artificial Sequence: Synthetic oligonucleotide
uuugaagauuuaucuagga

SEQ ID NO: 2609646 - RNA, 19 nt, Artificial Sequence
  Description of Artificial Sequence: Synthetic oligonucleotide
uuguaauaaagauuuucuc

SEQ ID NO: 2609647 - RNA, 19 nt, Artificial Sequence
  Description of Artificial Sequence: Synthetic oligonucleotide
caaagguugcacuauugag

SEQ ID NO: 2609648 - RNA, 19 nt, Artificial Sequence
  Description of Artificial Sequence: Synthetic oligonucleotide
uugaagauuuaucuaggaa

SEQ ID NO: 2609649 - RNA, 19 nt, Artificial Sequence
  Description of Artificial Sequence: Synthetic oligonucleotide
aauggcugagacuccaggu

SEQ ID NO: 2609650 - RNA, 19 nt, Artificial Sequence
  Description of Artificial Sequence: Synthetic oligonucleotide
aagcacgugcuuccgggcc

SEQ ID NO: 2609651 - RNA, 19 nt, Artificial Sequence
  Description of Artificial Sequence: Synthetic oligonucleotide
guuaguucacgcauuacag

SEQ ID NO: 2609652 - RNA, 19 nt, Artificial Sequence
  Description of Artificial Sequence: Synthetic oligonucleotide
cuuugagacacaacauuag

SEQ ID NO: 2609653 - RNA, 19 nt, Artificial Sequence
  Description of Artificial Sequence: Synthetic oligonucleotide
agacucuccauggucaugc

SEQ ID NO: 2609654 - RNA, 19 nt, Artificial Sequence
  Description of Artificial Sequence: Synthetic oligonucleotide
agcuuauuaacuguuggag

SEQ ID NO: 2609655 - RNA, 19 nt, Artificial Sequence
  Description of Artificial Sequence: Synthetic oligonucleotide
cuugguagcuuugagacac

SEQ ID NO: 2609656 - RNA, 19 nt, Artificial Sequence
  Description of Artificial Sequence: Synthetic oligonucleotide
cauucagcauuauugauca

SEQ ID NO: 2609657 - RNA, 19 nt, Artificial Sequence
  Description of Artificial Sequence: Synthetic oligonucleotide
ugcacuauugagaaagcau

SEQ ID NO: 2609658 - RNA, 19 nt, Artificial Sequence
  Description of Artificial Sequence: Synthetic oligonucleotide
ucaaguaacaaaagcgcua

SEQ ID NO: 2609659 - RNA, 19 nt, Artificial Sequence
  Description of Artificial Sequence: Synthetic oligonucleotide
uaaggggccacgagcaagg

SEQ ID NO: 2609660 - RNA, 19 nt, Artificial Sequence
  Description of Artificial Sequence: Synthetic oligonucleotide
guauccuuuccauacacac

SEQ ID NO: 2609661 - RNA, 19 nt, Artificial Sequence
  Description of Artificial Sequence: Synthetic oligonucleotide
auuuaucuaggaaagucag

SEQ ID NO: 2609662 - RNA, 19 nt, Artificial Sequence
  Description of Artificial Sequence: Synthetic oligonucleotide
cagucaucaagccaguccc

SEQ ID NO: 2609663 - RNA, 19 nt, Artificial Sequence
  Description of Artificial Sequence: Synthetic oligonucleotide
aaugggcagcccuaccagg

SEQ ID NO: 2609664 - RNA, 19 nt, Artificial Sequence
  Description of Artificial Sequence: Synthetic oligonucleotide
gaacuugaaugucauucag

SEQ ID NO: 2609665 - RNA, 19 nt, Artificial Sequence
  Description of Artificial Sequence: Synthetic oligonucleotide
ugaauacagucaucaagcc

SEQ ID NO: 2609666 - RNA, 19 nt, Artificial Sequence
  Description of Artificial Sequence: Synthetic oligonucleotide
auugaaauuuauuguaaua

SEQ ID NO: 2609667 - RNA, 19 nt, Artificial Sequence
  Description of Artificial Sequence: Synthetic oligonucleotide
cacagauaagaccuuagug

SEQ ID NO: 2609668 - RNA, 19 nt, Artificial Sequence
  Description of Artificial Sequence: Synthetic oligonucleotide
gguugcacuauugagaaag

SEQ ID NO: 2609669 - RNA, 19 nt, Artificial Sequence
  Description of Artificial Sequence: Synthetic oligonucleotide
ucacgcauuacaguaguag

SEQ ID NO: 2609670 - RNA, 19 nt, Artificial Sequence
  Description of Artificial Sequence: Synthetic oligonucleotide
auuugaagauuuaucuagg

SEQ ID NO: 2609671 - RNA, 19 nt, Artificial Sequence
  Description of Artificial Sequence: Synthetic oligonucleotide
cuucucuuccacuuauugc

SEQ ID NO: 2609672 - RNA, 19 nt, Artificial Sequence
  Description of Artificial Sequence: Synthetic oligonucleotide
caucaagccagucccacgg

SEQ ID NO: 2609673 - RNA, 19 nt, Artificial Sequence
  Description of Artificial Sequence: Synthetic oligonucleotide
agcaaggucaggccugccc

SEQ ID NO: 2609674 - RNA, 19 nt, Artificial Sequence
  Description of Artificial Sequence: Synthetic oligonucleotide
aggaugaaaggcuggcuuc

SEQ ID NO: 2609675 - RNA, 19 nt, Artificial Sequence
  Description of Artificial Sequence: Synthetic oligonucleotide
uccauacacacagauaaga

SEQ ID NO: 2609676 - RNA, 19 nt, Artificial Sequence
  Description of Artificial Sequence: Synthetic oligonucleotide
accaugaauacagucauca

SEQ ID NO: 2609677 - RNA, 19 nt, Artificial Sequence
  Description of Artificial Sequence: Synthetic oligonucleotide
uuccacuuauugcacaaac

SEQ ID NO: 2609678 - RNA, 19 nt, Artificial Sequence
  Description of Artificial Sequence: Synthetic oligonucleotide
acaaagguugcacuauuga

SEQ ID NO: 2609679 - RNA, 19 nt, Artificial Sequence
  Description of Artificial Sequence: Synthetic oligonucleotide
cacgcauuacaguaguagc

SEQ ID NO: 2609680 - RNA, 19 nt, Artificial Sequence
  Description of Artificial Sequence: Synthetic oligonucleotide
uuuaucuaggaaagucagu

SEQ ID NO: 2609681 - RNA, 19 nt, Artificial Sequence
  Description of Artificial Sequence: Synthetic oligonucleotide
gaaagcaucugaagagagg

SEQ ID NO: 2609682 - RNA, 19 nt, Artificial Sequence
  Description of Artificial Sequence: Synthetic oligonucleotide
aguggucuagaaaaugaac

SEQ ID NO: 2609683 - RNA, 19 nt, Artificial Sequence
  Description of Artificial Sequence: Synthetic oligonucleotide
aaaggcuuaagcacgugcu

SEQ ID NO: 2609684 - RNA, 19 nt, Artificial Sequence
  Description of Artificial Sequence: Synthetic oligonucleotide
cacuuauugcacaaacuug

SEQ ID NO: 2609685 - RNA, 19 nt, Artificial Sequence
  Description of Artificial Sequence: Synthetic oligonucleotide
agaagaccucaccacaaag

SEQ ID NO: 2609686 - RNA, 19 nt, Artificial Sequence
  Description of Artificial Sequence: Synthetic oligonucleotide
uaguucacgcauuacagua

SEQ ID NO: 2609687 - RNA, 19 nt, Artificial Sequence
  Description of Artificial Sequence: Synthetic oligonucleotide
cuauuuacaguucacaggu

SEQ ID NO: 2609688 - RNA, 19 nt, Artificial Sequence
  Description of Artificial Sequence: Synthetic oligonucleotide
cagcccaccaugaauacag

SEQ ID NO: 2609689 - RNA, 19 nt, Artificial Sequence
  Description of Artificial Sequence: Synthetic oligonucleotide
uauccuuuccauacacaca

SEQ ID NO: 2609690 - RNA, 19 nt, Artificial Sequence
  Description of Artificial Sequence: Synthetic oligonucleotide
uuagugagcccugccaagg

SEQ ID NO: 2609691 - RNA, 19 nt, Artificial Sequence
  Description of Artificial Sequence: Synthetic oligonucleotide
ucugaagagaggucauagc

SEQ ID NO: 2609692 - RNA, 19 nt, Artificial Sequence
  Description of Artificial Sequence: Synthetic oligonucleotide
uagcuuauuaacuguugga

SEQ ID NO: 2609693 - RNA, 19 nt, Artificial Sequence
  Description of Artificial Sequence: Synthetic oligonucleotide
cagucaaagacucuccaug

SEQ ID NO: 2609694 - RNA, 19 nt, Artificial Sequence
  Description of Artificial Sequence: Synthetic oligonucleotide
uuaguucacgcauuacagu

SEQ ID NO: 2609695 - RNA, 19 nt, Artificial Sequence
  Description of Artificial Sequence: Synthetic oligonucleotide
aacauuagcacaguccauu

SEQ ID NO: 2609696 - RNA, 19 nt, Artificial Sequence
  Description of Artificial Sequence: Synthetic oligonucleotide
uuaacuguuggaguguauc

SEQ ID NO: 2609697 - RNA, 19 nt, Artificial Sequence
  Description of Artificial Sequence: Synthetic oligonucleotide
auggucaugccucagccca

SEQ ID NO: 2609698 - RNA, 19 nt, Artificial Sequence
  Description of Artificial Sequence: Synthetic oligonucleotide
gaauacagucaucaagcca

SEQ ID NO: 2609699 - RNA, 19 nt, Artificial Sequence
  Description of Artificial Sequence: Synthetic oligonucleotide
uccacuuauugcacaaacu

SEQ ID NO: 2609700 - RNA, 19 nt, Artificial Sequence
  Description of Artificial Sequence: Synthetic oligonucleotide
ucuagaaaaugaacuugaa

SEQ ID NO: 2609701 - RNA, 19 nt, Artificial Sequence
  Description of Artificial Sequence: Synthetic oligonucleotide
cauagcuuauuaacuguug

SEQ ID NO: 2609702 - RNA, 19 nt, Artificial Sequence
  Description of Artificial Sequence: Synthetic oligonucleotide
cuuccuacucaccagaaga

SEQ ID NO: 2609703 - RNA, 19 nt, Artificial Sequence
  Description of Artificial Sequence: Synthetic oligonucleotide
ggucauagcuuauuaacug

SEQ ID NO: 2609704 - RNA, 19 nt, Artificial Sequence
  Description of Artificial Sequence: Synthetic oligonucleotide
gaagagaggucauagcuua

SEQ ID NO: 2609705 - RNA, 19 nt, Artificial Sequence
  Description of Artificial Sequence: Synthetic oligonucleotide
uuggaguguauccuuucca

SEQ ID NO: 2609706 - RNA, 19 nt, Artificial Sequence
  Description of Artificial Sequence: Synthetic oligonucleotide
agacacaacauuagcacag

SEQ ID NO: 2609707 - RNA, 19 nt, Artificial Sequence
  Description of Artificial Sequence: Synthetic oligonucleotide
aggaauggcaucccuucuc

SEQ ID NO: 2609708 - RNA, 19 nt, Artificial Sequence
  Description of Artificial Sequence: Synthetic oligonucleotide
acaaaagcgcuaaggggcc

SEQ ID NO: 2609709 - RNA, 19 nt, Artificial Sequence
  Description of Artificial Sequence: Synthetic oligonucleotide
ucaggaauggcaucccuuc

SEQ ID NO: 2609710 - RNA, 19 nt, Artificial Sequence
  Description of Artificial Sequence: Synthetic oligonucleotide
uguauccuuuccauacaca

SEQ ID NO: 2609711 - RNA, 19 nt, Artificial Sequence
  Description of Artificial Sequence: Synthetic oligonucleotide
aggaaagucaguccuugcu

SEQ ID NO: 2609712 - RNA, 19 nt, Artificial Sequence
  Description of Artificial Sequence: Synthetic oligonucleotide
ugaagagaggucauagcuu

SEQ ID NO: 2609713 - RNA, 19 nt, Artificial Sequence
  Description of Artificial Sequence: Synthetic oligonucleotide
uuccauacacacagauaag

SEQ ID NO: 2609714 - RNA, 19 nt, Artificial Sequence
  Description of Artificial Sequence: Synthetic oligonucleotide
ucaucaagccagucccacg

SEQ ID NO: 2609715 - RNA, 19 nt, Artificial Sequence
  Description of Artificial Sequence: Synthetic oligonucleotide
cuaugugguaguuuuaaaa

SEQ ID NO: 2609716 - RNA, 19 nt, Artificial Sequence
  Description of Artificial Sequence: Synthetic oligonucleotide
ucauagcuuauuaacuguu

SEQ ID NO: 2609717 - RNA, 19 nt, Artificial Sequence
  Description of Artificial Sequence: Synthetic oligonucleotide
aaaagcgcuaaggggccac

SEQ ID NO: 2609718 - RNA, 19 nt, Artificial Sequence
  Description of Artificial Sequence: Synthetic oligonucleotide
aguaguagcuccaucaaaa

SEQ ID NO: 2609719 - RNA, 19 nt, Artificial Sequence
  Description of Artificial Sequence: Synthetic oligonucleotide
uuccuacucaccagaagac

SEQ ID NO: 2609720 - RNA, 19 nt, Artificial Sequence
  Description of Artificial Sequence: Synthetic oligonucleotide
aucugaagagaggucauag

SEQ ID NO: 2609721 - RNA, 19 nt, Artificial Sequence
  Description of Artificial Sequence: Synthetic oligonucleotide
cucuccauggucaugccuc

SEQ ID NO: 2609722 - RNA, 19 nt, Artificial Sequence
  Description of Artificial Sequence: Synthetic oligonucleotide
gauuuucucaguggucuag

SEQ ID NO: 2609723 - RNA, 19 nt, Artificial Sequence
  Description of Artificial Sequence: Synthetic oligonucleotide
aaguaacaaaagcgcuaag

SEQ ID NO: 2609724 - RNA, 19 nt, Artificial Sequence
  Description of Artificial Sequence: Synthetic oligonucleotide
aacuguuggaguguauccu

SEQ ID NO: 2609725 - RNA, 19 nt, Artificial Sequence
  Description of Artificial Sequence: Synthetic oligonucleotide
agauaagaccuuagugagc

SEQ ID NO: 2609726 - RNA, 19 nt, Artificial Sequence
  Description of Artificial Sequence: Synthetic oligonucleotide
uggucuagaaaaugaacuu

SEQ ID NO: 2609727 - RNA, 19 nt, Artificial Sequence
  Description of Artificial Sequence: Synthetic oligonucleotide
uuucucaguggucuagaaa

SEQ ID NO: 2609728 - RNA, 19 nt, Artificial Sequence
  Description of Artificial Sequence: Synthetic oligonucleotide
cuauugagaaagcaucuga

SEQ ID NO: 2609729 - RNA, 19 nt, Artificial Sequence
  Description of Artificial Sequence: Synthetic oligonucleotide
gagacacaacauuagcaca

SEQ ID NO: 2609730 - RNA, 19 nt, Artificial Sequence
  Description of Artificial Sequence: Synthetic oligonucleotide
uuauuaacuguuggagugu

SEQ ID NO: 2609731 - RNA, 19 nt, Artificial Sequence
  Description of Artificial Sequence: Synthetic oligonucleotide
caaacuugguagcuuugag

SEQ ID NO: 2609732 - RNA, 19 nt, Artificial Sequence
  Description of Artificial Sequence: Synthetic oligonucleotide
acacaacauuagcacaguc

SEQ ID NO: 2609733 - RNA, 19 nt, Artificial Sequence
  Description of Artificial Sequence: Synthetic oligonucleotide
aagauuuaucuaggaaagu

SEQ ID NO: 2609734 - RNA, 19 nt, Artificial Sequence
  Description of Artificial Sequence: Synthetic oligonucleotide
agucccacgggcucuaugu

SEQ ID NO: 2609735 - RNA, 19 nt, Artificial Sequence
  Description of Artificial Sequence: Synthetic oligonucleotide
caguucacagguugguuag

SEQ ID NO: 2609736 - RNA, 19 nt, Artificial Sequence
  Description of Artificial Sequence: Synthetic oligonucleotide
auaagaccuuagugagccc

SEQ ID NO: 2609737 - RNA, 19 nt, Artificial Sequence
  Description of Artificial Sequence: Synthetic oligonucleotide
acugccugcaaugggcagc

SEQ ID NO: 2609738 - RNA, 19 nt, Artificial Sequence
  Description of Artificial Sequence: Synthetic oligonucleotide
  modified_base (6)..(6): a, c, u, g, unknown or other
aaaacnggcucagcuaaaa

SEQ ID NO: 2609739 - RNA, 19 nt, Artificial Sequence
  Description of Artificial Sequence: Synthetic oligonucleotide
guuggaguguauccuuucc

SEQ ID NO: 2609740 - RNA, 19 nt, Artificial Sequence
  Description of Artificial Sequence: Synthetic oligonucleotide
ucccacgggcucuaugugg

SEQ ID NO: 2609741 - RNA, 19 nt, Artificial Sequence
  Description of Artificial Sequence: Synthetic oligonucleotide
agcuuugagacacaacauu

SEQ ID NO: 2609742 - RNA, 19 nt, Artificial Sequence
  Description of Artificial Sequence: Synthetic oligonucleotide
gccuauuuacaguucacag

SEQ ID NO: 2609743 - RNA, 19 nt, Artificial Sequence
  Description of Artificial Sequence: Synthetic oligonucleotide
uagugagcccugccaaggg

SEQ ID NO: 2609744 - RNA, 19 nt, Artificial Sequence
  Description of Artificial Sequence: Synthetic oligonucleotide
gguuaguucacgcauuaca

SEQ ID NO: 2609745 - RNA, 19 nt, Artificial Sequence
  Description of Artificial Sequence: Synthetic oligonucleotide
cuuccgggccuauuuacag

SEQ ID NO: 2609746 - RNA, 19 nt, Artificial Sequence
  Description of Artificial Sequence: Synthetic oligonucleotide
cuuaagcacgugcuuccgg

SEQ ID NO: 2609747 - RNA, 19 nt, Artificial Sequence
  Description of Artificial Sequence: Synthetic oligonucleotide
uggaguguauccuuuccau

SEQ ID NO: 2609748 - RNA, 19 nt, Artificial Sequence
  Description of Artificial Sequence: Synthetic oligonucleotide
cuuagugagcccugccaag

SEQ ID NO: 2609749 - RNA, 19 nt, Artificial Sequence
  Description of Artificial Sequence: Synthetic oligonucleotide
guuacugccugcuccccag

SEQ ID NO: 2609750 - RNA, 19 nt, Artificial Sequence
  Description of Artificial Sequence: Synthetic oligonucleotide
caugccucagcccaccaug

SEQ ID NO: 2609751 - RNA, 19 nt, Artificial Sequence
  Description of Artificial Sequence: Synthetic oligonucleotide
cucaccagaagaccucacc

SEQ ID NO: 2609752 - RNA, 19 nt, Artificial Sequence
  Description of Artificial Sequence: Synthetic oligonucleotide
gucuagaaaaugaacuuga

SEQ ID NO: 2609753 - RNA, 19 nt, Artificial Sequence
  Description of Artificial Sequence: Synthetic oligonucleotide
gacuccagguuacugccug

SEQ ID NO: 2609754 - RNA, 19 nt, Artificial Sequence
  Description of Artificial Sequence: Synthetic oligonucleotide
caguccuugcuucaauggc

SEQ ID NO: 2609755 - RNA, 19 nt, Artificial Sequence
  Description of Artificial Sequence: Synthetic oligonucleotide
ucuaugugguaguuuuaaa

SEQ ID NO: 2609756 - RNA, 19 nt, Artificial Sequence
  Description of Artificial Sequence: Synthetic oligonucleotide
aguguauccuuuccauaca

SEQ ID NO: 2609757 - RNA, 19 nt, Artificial Sequence
  Description of Artificial Sequence: Synthetic oligonucleotide
ucaccacaaagguugcacu

SEQ ID NO: 2609758 - RNA, 19 nt, Artificial Sequence
  Description of Artificial Sequence: Synthetic oligonucleotide
cacaaagguugcacuauug

SEQ ID NO: 2609759 - RNA, 19 nt, Artificial Sequence
  Description of Artificial Sequence: Synthetic oligonucleotide
agaggucauagcuuauuaa

SEQ ID NO: 2609760 - RNA, 19 nt, Artificial Sequence
  Description of Artificial Sequence: Synthetic oligonucleotide
uugguuaguucacgcauua

SEQ ID NO: 2609761 - RNA, 19 nt, Artificial Sequence
  Description of Artificial Sequence: Synthetic oligonucleotide
uagcuuugagacacaacau

SEQ ID NO: 2609762 - RNA, 19 nt, Artificial Sequence
  Description of Artificial Sequence: Synthetic oligonucleotide
uugcuucaauggcugagac

SEQ ID NO: 2609763 - RNA, 19 nt, Artificial Sequence
  Description of Artificial Sequence: Synthetic oligonucleotide
  modified_base (3)..(3): a, c, u, g, unknown or other
acnggcucagcuaaaacau

SEQ ID NO: 2609764 - RNA, 19 nt, Artificial Sequence
  Description of Artificial Sequence: Synthetic oligonucleotide
uccuacucaccagaagacc

SEQ ID NO: 2609765 - RNA, 19 nt, Artificial Sequence
  Description of Artificial Sequence: Synthetic oligonucleotide
ggccugaccagucaaagac

SEQ ID NO: 2609766 - RNA, 19 nt, Artificial Sequence
  Description of Artificial Sequence: Synthetic oligonucleotide
cuaggaaagucaguccuug

SEQ ID NO: 2609767 - RNA, 19 nt, Artificial Sequence
  Description of Artificial Sequence: Synthetic oligonucleotide
ucuaggaaagucaguccuu

SEQ ID NO: 2609768 - RNA, 19 nt, Artificial Sequence
  Description of Artificial Sequence: Synthetic oligonucleotide
uuauuguaauaaagauuuu

SEQ ID NO: 2609769 - RNA, 19 nt, Artificial Sequence
  Description of Artificial Sequence: Synthetic oligonucleotide
aggucauagcuuauuaacu

SEQ ID NO: 2609770 - RNA, 19 nt, Artificial Sequence
  Description of Artificial Sequence: Synthetic oligonucleotide
acagguugguuaguucacg

SEQ ID NO: 2609771 - RNA, 19 nt, Artificial Sequence
  Description of Artificial Sequence: Synthetic oligonucleotide
uggcuuccuacucaccaga

SEQ ID NO: 2609772 - RNA, 19 nt, Artificial Sequence
  Description of Artificial Sequence: Synthetic oligonucleotide
uugcacuauugagaaagca

SEQ ID NO: 2609773 - RNA, 19 nt, Artificial Sequence
  Description of Artificial Sequence: Synthetic oligonucleotide
gucaguccuugcuucaaug

SEQ ID NO: 2609774 - RNA, 19 nt, Artificial Sequence
  Description of Artificial Sequence: Synthetic oligonucleotide
uuacaguucacagguuggu

SEQ ID NO: 2609775 - RNA, 19 nt, Artificial Sequence
  Description of Artificial Sequence: Synthetic oligonucleotide
uuuucucaguggucuagaa

SEQ ID NO: 2609776 - RNA, 19 nt, Artificial Sequence
  Description of Artificial Sequence: Synthetic oligonucleotide
ggucuagaaaaugaacuug

SEQ ID NO: 2609777 - RNA, 19 nt, Artificial Sequence
  Description of Artificial Sequence: Synthetic oligonucleotide
guguauccuuuccauacac

SEQ ID NO: 2609778 - RNA, 19 nt, Artificial Sequence
  Description of Artificial Sequence: Synthetic oligonucleotide
accagucaaagacucucca

SEQ ID NO: 2609779 - RNA, 19 nt, Artificial Sequence
  Description of Artificial Sequence: Synthetic oligonucleotide
cugaagagaggucauagcu

SEQ ID NO: 2609780 - RNA, 19 nt, Artificial Sequence
  Description of Artificial Sequence: Synthetic oligonucleotide
acaguaguagcuccaucaa

SEQ ID NO: 2609781 - RNA, 19 nt, Artificial Sequence
  Description of Artificial Sequence: Synthetic oligonucleotide
cugcuccccaggaugaaag

SEQ ID NO: 2609782 - RNA, 19 nt, Artificial Sequence
  Description of Artificial Sequence: Synthetic oligonucleotide
ugcuccccaggaugaaagg

SEQ ID NO: 2609783 - RNA, 19 nt, Artificial Sequence
  Description of Artificial Sequence: Synthetic oligonucleotide
cuaaaacauucaaguaaca

SEQ ID NO: 2609784 - RNA, 19 nt, Artificial Sequence
  Description of Artificial Sequence: Synthetic oligonucleotide
aguucacgcauuacaguag

SEQ ID NO: 2609785 - RNA, 19 nt, Artificial Sequence
  Description of Artificial Sequence: Synthetic oligonucleotide
uuacaguaguagcuccauc

SEQ ID NO: 2609786 - RNA, 19 nt, Artificial Sequence
  Description of Artificial Sequence: Synthetic oligonucleotide
cauuagcacaguccauuug

SEQ ID NO: 2609787 - RNA, 19 nt, Artificial Sequence
  Description of Artificial Sequence: Synthetic oligonucleotide
caaugggcagcccuaccag

SEQ ID NO: 2609788 - RNA, 19 nt, Artificial Sequence
  Description of Artificial Sequence: Synthetic oligonucleotide
cauggucaugccucagccc

SEQ ID NO: 2609789 - RNA, 19 nt, Artificial Sequence
  Description of Artificial Sequence: Synthetic oligonucleotide
uggcugagacuccagguua

SEQ ID NO: 2609790 - RNA, 19 nt, Artificial Sequence
  Description of Artificial Sequence: Synthetic oligonucleotide
uucacagguugguuaguuc

SEQ ID NO: 2609791 - RNA, 19 nt, Artificial Sequence
  Description of Artificial Sequence: Synthetic oligonucleotide
agguugguuaguucacgca

SEQ ID NO: 2609792 - RNA, 19 nt, Artificial Sequence
  Description of Artificial Sequence: Synthetic oligonucleotide
aaagcgcuaaggggccacg

SEQ ID NO: 2609793 - RNA, 19 nt, Artificial Sequence
  Description of Artificial Sequence: Synthetic oligonucleotide
aguccauuugaagauuuau

SEQ ID NO: 2609794 - RNA, 19 nt, Artificial Sequence
  Description of Artificial Sequence: Synthetic oligonucleotide
agaccuuagugagcccugc

SEQ ID NO: 2609795 - RNA, 19 nt, Artificial Sequence
  Description of Artificial Sequence: Synthetic oligonucleotide
cucaguggucuagaaaaug

SEQ ID NO: 2609796 - RNA, 19 nt, Artificial Sequence
  Description of Artificial Sequence: Synthetic oligonucleotide
guccauuugaagauuuauc

SEQ ID NO: 2609797 - RNA, 19 nt, Artificial Sequence
  Description of Artificial Sequence: Synthetic oligonucleotide
cacagguugguuaguucac

SEQ ID NO: 2609798 - RNA, 19 nt, Artificial Sequence
  Description of Artificial Sequence: Synthetic oligonucleotide
acgcauuacaguaguagcu

SEQ ID NO: 2609799 - RNA, 19 nt, Artificial Sequence
  Description of Artificial Sequence: Synthetic oligonucleotide
acuugguagcuuugagaca

SEQ ID NO: 2609800 - RNA, 19 nt, Artificial Sequence
  Description of Artificial Sequence: Synthetic oligonucleotide
aguccuugcuucaauggcu

SEQ ID NO: 2609801 - RNA, 19 nt, Artificial Sequence
  Description of Artificial Sequence: Synthetic oligonucleotide
uuacugccugcuccccagg

SEQ ID NO: 2609802 - RNA, 19 nt, Artificial Sequence
  Description of Artificial Sequence: Synthetic oligonucleotide
cuaaggggccacgagcaag

SEQ ID NO: 2609803 - RNA, 19 nt, Artificial Sequence
  Description of Artificial Sequence: Synthetic oligonucleotide
cuacucaccagaagaccuc

SEQ ID NO: 2609804 - RNA, 19 nt, Artificial Sequence
  Description of Artificial Sequence: Synthetic oligonucleotide
caaguaacaaaagcgcuaa

SEQ ID NO: 2609805 - RNA, 19 nt, Artificial Sequence
  Description of Artificial Sequence: Synthetic oligonucleotide
gagaggucauagcuuauua

SEQ ID NO: 2609806 - RNA, 19 nt, Artificial Sequence
  Description of Artificial Sequence: Synthetic oligonucleotide
acauuagcacaguccauuu

SEQ ID NO: 2609807 - RNA, 19 nt, Artificial Sequence
  Description of Artificial Sequence: Synthetic oligonucleotide
uccgggccuauuuacaguu

SEQ ID NO: 2609808 - RNA, 19 nt, Artificial Sequence
  Description of Artificial Sequence: Synthetic oligonucleotide
ugcuuccgggccuauuuac

SEQ ID NO: 2609809 - RNA, 19 nt, Artificial Sequence
  Description of Artificial Sequence: Synthetic oligonucleotide
ugaucaggaauggcauccc

SEQ ID NO: 2609810 - RNA, 19 nt, Artificial Sequence
  Description of Artificial Sequence: Synthetic oligonucleotide
agcgcuaaggggccacgag

SEQ ID NO: 2609811 - RNA, 19 nt, Artificial Sequence
  Description of Artificial Sequence: Synthetic oligonucleotide
ucuccauggucaugccuca

SEQ ID NO: 2609812 - RNA, 19 nt, Artificial Sequence
  Description of Artificial Sequence: Synthetic oligonucleotide
auggcugagacuccagguu

SEQ ID NO: 2609813 - RNA, 19 nt, Artificial Sequence
  Description of Artificial Sequence: Synthetic oligonucleotide
ugcaaugggcagcccuacc

SEQ ID NO: 2609814 - RNA, 19 nt, Artificial Sequence
  Description of Artificial Sequence: Synthetic oligonucleotide
gcauuacaguaguagcucc

SEQ ID NO: 2609815 - RNA, 19 nt, Artificial Sequence
  Description of Artificial Sequence: Synthetic oligonucleotide
cacaaacuugguagcuuug

SEQ ID NO: 2609816 - RNA, 19 nt, Artificial Sequence
  Description of Artificial Sequence: Synthetic oligonucleotide
uacucaccagaagaccuca

SEQ ID NO: 2609817 - RNA, 19 nt, Artificial Sequence
  Description of Artificial Sequence: Synthetic oligonucleotide
gcacuauugagaaagcauc

SEQ ID NO: 2609818 - RNA, 19 nt, Artificial Sequence
  Description of Artificial Sequence: Synthetic oligonucleotide
uauuuacaguucacagguu

SEQ ID NO: 2609819 - RNA, 19 nt, Artificial Sequence
  Description of Artificial Sequence: Synthetic oligonucleotide
aagaccuuagugagcccug

SEQ ID NO: 2609820 - RNA, 19 nt, Artificial Sequence
  Description of Artificial Sequence: Synthetic oligonucleotide
gaccagucaaagacucucc

SEQ ID NO: 2609821 - RNA, 19 nt, Artificial Sequence
  Description of Artificial Sequence: Synthetic oligonucleotide
ucuggggccugaccaguca

SEQ ID NO: 2609822 - RNA, 19 nt, Artificial Sequence
  Description of Artificial Sequence: Synthetic oligonucleotide
gucauagcuuauuaacugu

SEQ ID NO: 2609823 - RNA, 19 nt, Artificial Sequence
  Description of Artificial Sequence: Synthetic oligonucleotide
auuuucucaguggucuaga

SEQ ID NO: 2609824 - RNA, 19 nt, Artificial Sequence
  Description of Artificial Sequence: Synthetic oligonucleotide
ggcuuaagcacgugcuucc

SEQ ID NO: 2609825 - RNA, 19 nt, Artificial Sequence
  Description of Artificial Sequence: Synthetic oligonucleotide
ucccuucucuuccacuuau

SEQ ID NO: 2609826 - RNA, 19 nt, Artificial Sequence
  Description of Artificial Sequence: Synthetic oligonucleotide
cuagaaaaugaacuugaau

SEQ ID NO: 2609827 - RNA, 19 nt, Artificial Sequence
  Description of Artificial Sequence: Synthetic oligonucleotide
ccagguuacugccugcucc

SEQ ID NO: 2609828 - RNA, 19 nt, Artificial Sequence
  Description of Artificial Sequence: Synthetic oligonucleotide
gaccuuagugagcccugcc

SEQ ID NO: 2609829 - RNA, 19 nt, Artificial Sequence
  Description of Artificial Sequence: Synthetic oligonucleotide
cuuuccauacacacagaua

SEQ ID NO: 2609830 - RNA, 19 nt, Artificial Sequence
  Description of Artificial Sequence: Synthetic oligonucleotide
cugccugcuccccaggaug

SEQ ID NO: 2609831 - RNA, 19 nt, Artificial Sequence
  Description of Artificial Sequence: Synthetic oligonucleotide
guugcacuauugagaaagc

SEQ ID NO: 2609832 - RNA, 19 nt, Artificial Sequence
  Description of Artificial Sequence: Synthetic oligonucleotide
uacacacagauaagaccuu

SEQ ID NO: 2609833 - RNA, 19 nt, Artificial Sequence
  Description of Artificial Sequence: Synthetic oligonucleotide
auucagcauuauugaucag

SEQ ID NO: 2609834 - RNA, 19 nt, Artificial Sequence
  Description of Artificial Sequence: Synthetic oligonucleotide
uacugccugcuccccagga

SEQ ID NO: 2609835 - RNA, 19 nt, Artificial Sequence
  Description of Artificial Sequence: Synthetic oligonucleotide
cacuauugagaaagcaucu

SEQ ID NO: 2609836 - RNA, 19 nt, Artificial Sequence
  Description of Artificial Sequence: Synthetic oligonucleotide
ggggccacgagcaagguca

SEQ ID NO: 2609837 - RNA, 19 nt, Artificial Sequence
  Description of Artificial Sequence: Synthetic oligonucleotide
cucagcccaccaugaauac

SEQ ID NO: 2609838 - RNA, 19 nt, Artificial Sequence
  Description of Artificial Sequence: Synthetic oligonucleotide
guccuugcuucaauggcug

SEQ ID NO: 2609839 - RNA, 19 nt, Artificial Sequence
  Description of Artificial Sequence: Synthetic oligonucleotide
ugcacaaacuugguagcuu

SEQ ID NO: 2609840 - RNA, 19 nt, Artificial Sequence
  Description of Artificial Sequence: Synthetic oligonucleotide
ccugaccagucaaagacuc

SEQ ID NO: 2609841 - RNA, 19 nt, Artificial Sequence
  Description of Artificial Sequence: Synthetic oligonucleotide
cccaccaugaauacaguca

SEQ ID NO: 2609842 - RNA, 19 nt, Artificial Sequence
  Description of Artificial Sequence: Synthetic oligonucleotide
ucagcccaccaugaauaca

SEQ ID NO: 2609843 - RNA, 19 nt, Artificial Sequence
  Description of Artificial Sequence: Synthetic oligonucleotide
cuugcuucaauggcugaga

SEQ ID NO: 2609844 - RNA, 19 nt, Artificial Sequence
  Description of Artificial Sequence: Synthetic oligonucleotide
accacaaagguugcacuau

SEQ ID NO: 2609845 - RNA, 19 nt, Artificial Sequence
  Description of Artificial Sequence: Synthetic oligonucleotide
uucacgcauuacaguagua

SEQ ID NO: 2609846 - RNA, 19 nt, Artificial Sequence
  Description of Artificial Sequence: Synthetic oligonucleotide
gucaucaagccagucccac

SEQ ID NO: 2609847 - RNA, 19 nt, Artificial Sequence
  Description of Artificial Sequence: Synthetic oligonucleotide
cucuaugugguaguuuuaa

SEQ ID NO: 2609848 - RNA, 19 nt, Artificial Sequence
  Description of Artificial Sequence: Synthetic oligonucleotide
ggaugaaaggcuggcuucc

SEQ ID NO: 2609849 - RNA, 19 nt, Artificial Sequence
  Description of Artificial Sequence: Synthetic oligonucleotide
uugguagcuuugagacaca

SEQ ID NO: 2609850 - RNA, 19 nt, Artificial Sequence
  Description of Artificial Sequence: Synthetic oligonucleotide
caguggucuagaaaaugaa

SEQ ID NO: 2609851 - RNA, 19 nt, Artificial Sequence
  Description of Artificial Sequence: Synthetic oligonucleotide
uccagguuacugccugcuc

SEQ ID NO: 2609852 - RNA, 19 nt, Artificial Sequence
  Description of Artificial Sequence: Synthetic oligonucleotide
agguuacugccugcucccc

SEQ ID NO: 2609853 - RNA, 19 nt, Artificial Sequence
  Description of Artificial Sequence: Synthetic oligonucleotide
agucaguccuugcuucaau

SEQ ID NO: 2609854 - RNA, 19 nt, Artificial Sequence
  Description of Artificial Sequence: Synthetic oligonucleotide
cagcuaaaacauucaagua

SEQ ID NO: 2609855 - RNA, 19 nt, Artificial Sequence
  Description of Artificial Sequence: Synthetic oligonucleotide
agcacgugcuuccgggccu

SEQ ID NO: 2609856 - RNA, 19 nt, Artificial Sequence
  Description of Artificial Sequence: Synthetic oligonucleotide
gcuuauuaacuguuggagu

SEQ ID NO: 2609857 - RNA, 19 nt, Artificial Sequence
  Description of Artificial Sequence: Synthetic oligonucleotide
aagucaguccuugcuucaa

SEQ ID NO: 2609858 - RNA, 19 nt, Artificial Sequence
  Description of Artificial Sequence: Synthetic oligonucleotide
cuuauugcacaaacuuggu

SEQ ID NO: 2609859 - RNA, 19 nt, Artificial Sequence
  Description of Artificial Sequence: Synthetic oligonucleotide
gccacgagcaaggucaggc

SEQ ID NO: 2609860 - RNA, 19 nt, Artificial Sequence
  Description of Artificial Sequence: Synthetic oligonucleotide
guucacgcauuacaguagu

SEQ ID NO: 2609861 - RNA, 19 nt, Artificial Sequence
  Description of Artificial Sequence: Synthetic oligonucleotide
gacucuccauggucaugcc

SEQ ID NO: 2609862 - RNA, 19 nt, Artificial Sequence
  Description of Artificial Sequence: Synthetic oligonucleotide
uacaguucacagguugguu

SEQ ID NO: 2609863 - RNA, 19 nt, Artificial Sequence
  Description of Artificial Sequence: Synthetic oligonucleotide
cacgggcucuaugugguag

SEQ ID NO: 2609864 - RNA, 19 nt, Artificial Sequence
  Description of Artificial Sequence: Synthetic oligonucleotide
ugguagcuuugagacacaa

SEQ ID NO: 2609865 - RNA, 19 nt, Artificial Sequence
  Description of Artificial Sequence: Synthetic oligonucleotide
gcaaugggcagcccuacca

SEQ ID NO: 2609866 - RNA, 19 nt, Artificial Sequence
  Description of Artificial Sequence: Synthetic oligonucleotide
agagaggucauagcuuauu

SEQ ID NO: 2609867 - RNA, 19 nt, Artificial Sequence
  Description of Artificial Sequence: Synthetic oligonucleotide
ugagcccugccaagggcau

SEQ ID NO: 2609868 - RNA, 19 nt, Artificial Sequence
  Description of Artificial Sequence: Synthetic oligonucleotide
acgggcucuaugugguagu

SEQ ID NO: 2609869 - RNA, 19 nt, Artificial Sequence
  Description of Artificial Sequence: Synthetic oligonucleotide
ugguuaguucacgcauuac

SEQ ID NO: 2609870 - RNA, 19 nt, Artificial Sequence
  Description of Artificial Sequence: Synthetic oligonucleotide
acgagcaaggucaggccug

SEQ ID NO: 2609871 - RNA, 19 nt, Artificial Sequence
  Description of Artificial Sequence: Synthetic oligonucleotide
augaaaggcuggcuuccua

SEQ ID NO: 2609872 - RNA, 19 nt, Artificial Sequence
  Description of Artificial Sequence: Synthetic oligonucleotide
acaguccauuugaagauuu

SEQ ID NO: 2609873 - RNA, 19 nt, Artificial Sequence
  Description of Artificial Sequence: Synthetic oligonucleotide
caccaugaauacagucauc

SEQ ID NO: 2609874 - RNA, 19 nt, Artificial Sequence
  Description of Artificial Sequence: Synthetic oligonucleotide
aggucaggccugcccacug

SEQ ID NO: 2609875 - RNA, 19 nt, Artificial Sequence
  Description of Artificial Sequence: Synthetic oligonucleotide
acucaccagaagaccucac

SEQ ID NO: 2609876 - RNA, 19 nt, Artificial Sequence
  Description of Artificial Sequence: Synthetic oligonucleotide
acugccugcuccccaggau

SEQ ID NO: 2609877 - RNA, 19 nt, Artificial Sequence
  Description of Artificial Sequence: Synthetic oligonucleotide
gucauucagcauuauugau

SEQ ID NO: 2609878 - RNA, 19 nt, Artificial Sequence
  Description of Artificial Sequence: Synthetic oligonucleotide
acacacagauaagaccuua

SEQ ID NO: 2609879 - RNA, 19 nt, Artificial Sequence
  Description of Artificial Sequence: Synthetic oligonucleotide
gaucaggaauggcaucccu

SEQ ID NO: 2609880 - RNA, 19 nt, Artificial Sequence
  Description of Artificial Sequence: Synthetic oligonucleotide
gguugguuaguucacgcau

SEQ ID NO: 2609881 - RNA, 19 nt, Artificial Sequence
  Description of Artificial Sequence: Synthetic oligonucleotide
cacugccugcaaugggcag

SEQ ID NO: 2609882 - RNA, 19 nt, Artificial Sequence
  Description of Artificial Sequence: Synthetic oligonucleotide
uggggccugaccagucaaa

SEQ ID NO: 2609883 - RNA, 19 nt, Artificial Sequence
  Description of Artificial Sequence: Synthetic oligonucleotide
gcgcuaaggggccacgagc

SEQ ID NO: 2609884 - RNA, 19 nt, Artificial Sequence
  Description of Artificial Sequence: Synthetic oligonucleotide
agcccugccaagggcaucu

SEQ ID NO: 2609885 - RNA, 19 nt, Artificial Sequence
  Description of Artificial Sequence: Synthetic oligonucleotide
uggcaucccuucucuucca

SEQ ID NO: 2609886 - RNA, 19 nt, Artificial Sequence
  Description of Artificial Sequence: Synthetic oligonucleotide
uacagucaucaagccaguc

SEQ ID NO: 2609887 - RNA, 19 nt, Artificial Sequence
  Description of Artificial Sequence: Synthetic oligonucleotide
caguaguagcuccaucaaa

SEQ ID NO: 2609888 - RNA, 19 nt, Artificial Sequence
  Description of Artificial Sequence: Synthetic oligonucleotide
caccacaaagguugcacua

SEQ ID NO: 2609889 - RNA, 19 nt, Artificial Sequence
  Description of Artificial Sequence: Synthetic oligonucleotide
augggcagcccuaccagga

SEQ ID NO: 2609890 - RNA, 19 nt, Artificial Sequence
  Description of Artificial Sequence: Synthetic oligonucleotide
aucaggaauggcaucccuu

SEQ ID NO: 2609891 - RNA, 19 nt, Artificial Sequence
  Description of Artificial Sequence: Synthetic oligonucleotide
aagagaggucauagcuuau

SEQ ID NO: 2609892 - RNA, 19 nt, Artificial Sequence
  Description of Artificial Sequence: Synthetic oligonucleotide
gcaucuggggccugaccag

SEQ ID NO: 2609893 - RNA, 19 nt, Artificial Sequence
  Description of Artificial Sequence: Synthetic oligonucleotide
aagcgcuaaggggccacga

SEQ ID NO: 2609894 - RNA, 19 nt, Artificial Sequence
  Description of Artificial Sequence: Synthetic oligonucleotide
cuccccaggaugaaaggcu

SEQ ID NO: 2609895 - RNA, 19 nt, Artificial Sequence
  Description of Artificial Sequence: Synthetic oligonucleotide
gucccacgggcucuaugug

SEQ ID NO: 2609896 - RNA, 19 nt, Artificial Sequence
  Description of Artificial Sequence: Synthetic oligonucleotide
ugccucagcccaccaugaa

SEQ ID NO: 2609897 - RNA, 19 nt, Artificial Sequence
  Description of Artificial Sequence: Synthetic oligonucleotide
auuaacuguuggaguguau

SEQ ID NO: 2609898 - RNA, 19 nt, Artificial Sequence
  Description of Artificial Sequence: Synthetic oligonucleotide
gcuuaagcacgugcuuccg

SEQ ID NO: 2609899 - RNA, 19 nt, Artificial Sequence
  Description of Artificial Sequence: Synthetic oligonucleotide
ggccuauuuacaguucaca

SEQ ID NO: 2609900 - RNA, 19 nt, Artificial Sequence
  Description of Artificial Sequence: Synthetic oligonucleotide
ggcucuaugugguaguuuu

SEQ ID NO: 2609901 - RNA, 19 nt, Artificial Sequence
  Description of Artificial Sequence: Synthetic oligonucleotide
ccauuugaagauuuaucua

SEQ ID NO: 2609902 - RNA, 19 nt, Artificial Sequence
  Description of Artificial Sequence: Synthetic oligonucleotide
gcucagcuaaaacauucaa

SEQ ID NO: 2609903 - RNA, 19 nt, Artificial Sequence
  Description of Artificial Sequence: Synthetic oligonucleotide
aguucacagguugguuagu

SEQ ID NO: 2609904 - RNA, 19 nt, Artificial Sequence
  Description of Artificial Sequence: Synthetic oligonucleotide
ggaauggcaucccuucucu

SEQ ID NO: 2609905 - RNA, 19 nt, Artificial Sequence
  Description of Artificial Sequence: Synthetic oligonucleotide
auacagucaucaagccagu

SEQ ID NO: 2609906 - RNA, 19 nt, Artificial Sequence
  Description of Artificial Sequence: Synthetic oligonucleotide
aucccuucucuuccacuua

SEQ ID NO: 2609907 - RNA, 19 nt, Artificial Sequence
  Description of Artificial Sequence: Synthetic oligonucleotide
agucaucaagccaguccca

SEQ ID NO: 2609908 - RNA, 19 nt, Artificial Sequence
  Description of Artificial Sequence: Synthetic oligonucleotide
cuugaaugucauucagcau

SEQ ID NO: 2609909 - RNA, 19 nt, Artificial Sequence
  Description of Artificial Sequence: Synthetic oligonucleotide
gcuccccaggaugaaaggc

SEQ ID NO: 2609910 - RNA, 19 nt, Artificial Sequence
  Description of Artificial Sequence: Synthetic oligonucleotide
aucuggggccugaccaguc

SEQ ID NO: 2609911 - RNA, 19 nt, Artificial Sequence
  Description of Artificial Sequence: Synthetic oligonucleotide
gguagcuuugagacacaac

SEQ ID NO: 2609912 - RNA, 19 nt, Artificial Sequence
  Description of Artificial Sequence: Synthetic oligonucleotide
ggaguguauccuuuccaua

SEQ ID NO: 2609913 - RNA, 19 nt, Artificial Sequence
  Description of Artificial Sequence: Synthetic oligonucleotide
ccacgagcaaggucaggcc

SEQ ID NO: 2609914 - RNA, 19 nt, Artificial Sequence
  Description of Artificial Sequence: Synthetic oligonucleotide
caggaugaaaggcuggcuu

SEQ ID NO: 2609915 - RNA, 19 nt, Artificial Sequence
  Description of Artificial Sequence: Synthetic oligonucleotide
agaccucaccacaaagguu

SEQ ID NO: 2609916 - RNA, 19 nt, Artificial Sequence
  Description of Artificial Sequence: Synthetic oligonucleotide
ccuacucaccagaagaccu

SEQ ID NO: 2609917 - RNA, 19 nt, Artificial Sequence
  Description of Artificial Sequence: Synthetic oligonucleotide
agguugcacuauugagaaa

SEQ ID NO: 2609918 - RNA, 19 nt, Artificial Sequence
  Description of Artificial Sequence: Synthetic oligonucleotide
caucccuucucuuccacuu

SEQ ID NO: 2609919 - RNA, 19 nt, Artificial Sequence
  Description of Artificial Sequence: Synthetic oligonucleotide
ccucagcccaccaugaaua

SEQ ID NO: 2609920 - RNA, 19 nt, Artificial Sequence
  Description of Artificial Sequence: Synthetic oligonucleotide
ccacuuauugcacaaacuu

SEQ ID NO: 2609921 - RNA, 19 nt, Artificial Sequence
  Description of Artificial Sequence: Synthetic oligonucleotide
gaugaaaggcuggcuuccu

SEQ ID NO: 2609922 - RNA, 19 nt, Artificial Sequence
  Description of Artificial Sequence: Synthetic oligonucleotide
ggcucagcuaaaacauuca

SEQ ID NO: 2609923 - RNA, 19 nt, Artificial Sequence
  Description of Artificial Sequence: Synthetic oligonucleotide
gcccaccaugaauacaguc

SEQ ID NO: 2609924 - RNA, 19 nt, Artificial Sequence
  Description of Artificial Sequence: Synthetic oligonucleotide
cacgagcaaggucaggccu

SEQ ID NO: 2609925 - RNA, 19 nt, Artificial Sequence
  Description of Artificial Sequence: Synthetic oligonucleotide
caguccauuugaagauuua

SEQ ID NO: 2609926 - RNA, 19 nt, Artificial Sequence
  Description of Artificial Sequence: Synthetic oligonucleotide
ccccaggaugaaaggcugg

SEQ ID NO: 2609927 - RNA, 19 nt, Artificial Sequence
  Description of Artificial Sequence: Synthetic oligonucleotide
cagucccacgggcucuaug

SEQ ID NO: 2609928 - RNA, 19 nt, Artificial Sequence
  Description of Artificial Sequence: Synthetic oligonucleotide
agacuccagguuacugccu

SEQ ID NO: 2609929 - RNA, 19 nt, Artificial Sequence
  Description of Artificial Sequence: Synthetic oligonucleotide
ccuuagugagcccugccaa

SEQ ID NO: 2609930 - RNA, 19 nt, Artificial Sequence
  Description of Artificial Sequence: Synthetic oligonucleotide
ccagaagaccucaccacaa

SEQ ID NO: 2609931 - RNA, 19 nt, Artificial Sequence
  Description of Artificial Sequence: Synthetic oligonucleotide
guugguuaguucacgcauu

SEQ ID NO: 2609932 - RNA, 19 nt, Artificial Sequence
  Description of Artificial Sequence: Synthetic oligonucleotide
cuccauggucaugccucag

SEQ ID NO: 2609933 - RNA, 19 nt, Artificial Sequence
  Description of Artificial Sequence: Synthetic oligonucleotide
agccagucccacgggcucu

SEQ ID NO: 2609934 - RNA, 19 nt, Artificial Sequence
  Description of Artificial Sequence: Synthetic oligonucleotide
gggccugaccagucaaaga

SEQ ID NO: 2609935 - RNA, 19 nt, Artificial Sequence
  Description of Artificial Sequence: Synthetic oligonucleotide
gcacaaacuugguagcuuu

SEQ ID NO: 2609936 - RNA, 19 nt, Artificial Sequence
  Description of Artificial Sequence: Synthetic oligonucleotide
caacauuagcacaguccau

SEQ ID NO: 2609937 - RNA, 19 nt, Artificial Sequence
  Description of Artificial Sequence: Synthetic oligonucleotide
cugaccagucaaagacucu

SEQ ID NO: 2609938 - RNA, 19 nt, Artificial Sequence
  Description of Artificial Sequence: Synthetic oligonucleotide
gugcuuccgggccuauuua

SEQ ID NO: 2609939 - RNA, 19 nt, Artificial Sequence
  Description of Artificial Sequence: Synthetic oligonucleotide
gaauggcaucccuucucuu

SEQ ID NO: 2609940 - RNA, 19 nt, Artificial Sequence
  Description of Artificial Sequence: Synthetic oligonucleotide
caaaagcgcuaaggggcca

SEQ ID NO: 2609941 - RNA, 19 nt, Artificial Sequence
  Description of Artificial Sequence: Synthetic oligonucleotide
guucacagguugguuaguu

SEQ ID NO: 2609942 - RNA, 19 nt, Artificial Sequence
  Description of Artificial Sequence: Synthetic oligonucleotide
gggccuauuuacaguucac

SEQ ID NO: 2609943 - RNA, 19 nt, Artificial Sequence
  Description of Artificial Sequence: Synthetic oligonucleotide
ccaugaauacagucaucaa

SEQ ID NO: 2609944 - RNA, 19 nt, Artificial Sequence
  Description of Artificial Sequence: Synthetic oligonucleotide
cuggggccugaccagucaa

SEQ ID NO: 2609945 - RNA, 19 nt, Artificial Sequence
  Description of Artificial Sequence: Synthetic oligonucleotide
caggaauggcaucccuucu

SEQ ID NO: 2609946 - RNA, 19 nt, Artificial Sequence
  Description of Artificial Sequence: Synthetic oligonucleotide
gagcaaggucaggccugcc

SEQ ID NO: 2609947 - RNA, 19 nt, Artificial Sequence
  Description of Artificial Sequence: Synthetic oligonucleotide
cuguuggaguguauccuuu

SEQ ID NO: 2609948 - RNA, 19 nt, Artificial Sequence
  Description of Artificial Sequence: Synthetic oligonucleotide
gcuaaggggccacgagcaa

SEQ ID NO: 2609949 - RNA, 19 nt, Artificial Sequence
  Description of Artificial Sequence: Synthetic oligonucleotide
  modified_base (2)..(2): a, c, u, g, unknown or other
cnggcucagcuaaaacauu

SEQ ID NO: 2609950 - RNA, 19 nt, Artificial Sequence
  Description of Artificial Sequence: Synthetic oligonucleotide
gccugcaaugggcagcccu

SEQ ID NO: 2609951 - RNA, 19 nt, Artificial Sequence
  Description of Artificial Sequence: Synthetic oligonucleotide
cgggccuauuuacaguuca

SEQ ID NO: 2609952 - RNA, 19 nt, Artificial Sequence
  Description of Artificial Sequence: Synthetic oligonucleotide
gagcccugccaagggcauc

SEQ ID NO: 2609953 - RNA, 19 nt, Artificial Sequence
  Description of Artificial Sequence: Synthetic oligonucleotide
cuccagguuacugccugcu

SEQ ID NO: 2609954 - RNA, 19 nt, Artificial Sequence
  Description of Artificial Sequence: Synthetic oligonucleotide
cgagcaaggucaggccugc

SEQ ID NO: 2609955 - RNA, 19 nt, Artificial Sequence
  Description of Artificial Sequence: Synthetic oligonucleotide
gccucagcccaccaugaau

SEQ ID NO: 2609956 - RNA, 19 nt, Artificial Sequence
  Description of Artificial Sequence: Synthetic oligonucleotide
ggcuuccuacucaccagaa

SEQ ID NO: 2609957 - RNA, 19 nt, Artificial Sequence
  Description of Artificial Sequence: Synthetic oligonucleotide
ccagucaaagacucuccau

SEQ ID NO: 2609958 - RNA, 19 nt, Artificial Sequence
  Description of Artificial Sequence: Synthetic oligonucleotide
cacaguccauuugaagauu

SEQ ID NO: 2609959 - RNA, 19 nt, Artificial Sequence
  Description of Artificial Sequence: Synthetic oligonucleotide
ggccacgagcaaggucagg

SEQ ID NO: 2609960 - RNA, 19 nt, Artificial Sequence
  Description of Artificial Sequence: Synthetic oligonucleotide
ccgggccuauuuacaguuc

SEQ ID NO: 2609961 - RNA, 19 nt, Artificial Sequence
  Description of Artificial Sequence: Synthetic oligonucleotide
caucuggggccugaccagu

SEQ ID NO: 2609962 - RNA, 19 nt, Artificial Sequence
  Description of Artificial Sequence: Synthetic oligonucleotide
gggccacgagcaaggucag

SEQ ID NO: 2609963 - RNA, 19 nt, Artificial Sequence
  Description of Artificial Sequence: Synthetic oligonucleotide
gccugaccagucaaagacu

SEQ ID NO: 2609964 - RNA, 19 nt, Artificial Sequence
  Description of Artificial Sequence: Synthetic oligonucleotide
gcucuaugugguaguuuua

SEQ ID NO: 2609965 - RNA, 19 nt, Artificial Sequence
  Description of Artificial Sequence: Synthetic oligonucleotide
acgugcuuccgggccuauu

SEQ ID NO: 2609966 - RNA, 19 nt, Artificial Sequence
  Description of Artificial Sequence: Synthetic oligonucleotide
gcugagacuccagguuacu

SEQ ID NO: 2609967 - RNA, 19 nt, Artificial Sequence
  Description of Artificial Sequence: Synthetic oligonucleotide
ccacaaagguugcacuauu

SEQ ID NO: 2609968 - RNA, 19 nt, Artificial Sequence
  Description of Artificial Sequence: Synthetic oligonucleotide
cgugcuuccgggccuauuu

SEQ ID NO: 2609969 - RNA, 19 nt, Artificial Sequence
  Description of Artificial Sequence: Synthetic oligonucleotide
ccaagggcaucuggggccu

SEQ ID NO: 2609970 - RNA, 19 nt, Artificial Sequence
  Description of Artificial Sequence: Synthetic oligonucleotide
gggcucuaugugguaguuu

SEQ ID NO: 2609971 - RNA, 19 nt, Artificial Sequence
  Description of Artificial Sequence: Synthetic oligonucleotide
ccugcccacugccugcaau

SEQ ID NO: 2609972 - RNA, 19 nt, Artificial Sequence
  Description of Artificial Sequence: Synthetic oligonucleotide
gcacgugcuuccgggccua

SEQ ID NO: 2609973 - RNA, 19 nt, Artificial Sequence
  Description of Artificial Sequence: Synthetic oligonucleotide
ccacgggcucuauguggua

SEQ ID NO: 2609974 - RNA, 19 nt, Artificial Sequence
  Description of Artificial Sequence: Synthetic oligonucleotide
cacgugcuuccgggccuau

SEQ ID NO: 2609975 - RNA, 19 nt, Artificial Sequence
  Description of Artificial Sequence: Synthetic oligonucleotide
cgggcucuaugugguaguu

SEQ ID NO: 2609976 - RNA, 19 nt, Artificial Sequence
  Description of Artificial Sequence: Synthetic oligonucleotide
ccagucccacgggcucuau

SEQ ID NO: 2609977 - RNA, 19 nt, Artificial Sequence
  Description of Artificial Sequence: Synthetic oligonucleotide
  modified_base (1)..(1): a, c, u, g, unknown or other
nggcucagcuaaaacauuc

SEQ ID NO: 2609978 - RNA, 19 nt, Artificial Sequence
  Description of Artificial Sequence: Synthetic oligonucleotide
aaagcucugaaucagggcc

SEQ ID NO: 2609979 - RNA, 19 nt, Artificial Sequence
  Description of Artificial Sequence: Synthetic oligonucleotide
aagaugaaagcccugagcg

SEQ ID NO: 2609980 - RNA, 19 nt, Artificial Sequence
  Description of Artificial Sequence: Synthetic oligonucleotide
aaagaugaaagcccugagc

SEQ ID NO: 2609981 - RNA, 19 nt, Artificial Sequence
  Description of Artificial Sequence: Synthetic oligonucleotide
aauguguggguuuacaaag

SEQ ID NO: 2609982 - RNA, 19 nt, Artificial Sequence
  Description of Artificial Sequence: Synthetic oligonucleotide
uuuacaaaggcaagaacag

SEQ ID NO: 2609983 - RNA, 19 nt, Artificial Sequence
  Description of Artificial Sequence: Synthetic oligonucleotide
acugcuaaggcacugagag

SEQ ID NO: 2609984 - RNA, 19 nt, Artificial Sequence
  Description of Artificial Sequence: Synthetic oligonucleotide
gaugcuugcuuucagaacc

SEQ ID NO: 2609985 - RNA, 19 nt, Artificial Sequence
  Description of Artificial Sequence: Synthetic oligonucleotide
auugaucucgugcuguucc

SEQ ID NO: 2609986 - RNA, 19 nt, Artificial Sequence
  Description of Artificial Sequence: Synthetic oligonucleotide
agagguaugaauguguggg

SEQ ID NO: 2609987 - RNA, 19 nt, Artificial Sequence
  Description of Artificial Sequence: Synthetic oligonucleotide
auaaacaguccucauguuc

SEQ ID NO: 2609988 - RNA, 19 nt, Artificial Sequence
  Description of Artificial Sequence: Synthetic oligonucleotide
ugagaguacagcagcaagg

SEQ ID NO: 2609989 - RNA, 19 nt, Artificial Sequence
  Description of Artificial Sequence: Synthetic oligonucleotide
uucagaaccuguauaaaca

SEQ ID NO: 2609990 - RNA, 19 nt, Artificial Sequence
  Description of Artificial Sequence: Synthetic oligonucleotide
agguacaaccacuuuaugg

SEQ ID NO: 2609991 - RNA, 19 nt, Artificial Sequence
  Description of Artificial Sequence: Synthetic oligonucleotide
ucuaaucccaggcaaagcu

SEQ ID NO: 2609992 - RNA, 19 nt, Artificial Sequence
  Description of Artificial Sequence: Synthetic oligonucleotide
uuucacacugcuaaggcac

SEQ ID NO: 2609993 - RNA, 19 nt, Artificial Sequence
  Description of Artificial Sequence: Synthetic oligonucleotide
cauacugacagucagcuuc

SEQ ID NO: 2609994 - RNA, 19 nt, Artificial Sequence
  Description of Artificial Sequence: Synthetic oligonucleotide
uauggcagcauccagucac

SEQ ID NO: 2609995 - RNA, 19 nt, Artificial Sequence
  Description of Artificial Sequence: Synthetic oligonucleotide
uguggguuuacaaaggcaa

SEQ ID NO: 2609996 - RNA, 19 nt, Artificial Sequence
  Description of Artificial Sequence: Synthetic oligonucleotide
gguacaaccacuuuauggc

SEQ ID NO: 2609997 - RNA, 19 nt, Artificial Sequence
  Description of Artificial Sequence: Synthetic oligonucleotide
ugcacuaacaggaacuggu

SEQ ID NO: 2609998 - RNA, 19 nt, Artificial Sequence
  Description of Artificial Sequence: Synthetic oligonucleotide
uuucagaaccuguauaaac

SEQ ID NO: 2609999 - RNA, 19 nt, Artificial Sequence
  Description of Artificial Sequence: Synthetic oligonucleotide
cauguucccagguacaacc

SEQ ID NO: 2610000 - RNA, 19 nt, Artificial Sequence
  Description of Artificial Sequence: Synthetic oligonucleotide
cucaucagagcucagcucc

SEQ ID NO: 2610001 - RNA, 19 nt, Artificial Sequence
  Description of Artificial Sequence: Synthetic oligonucleotide
ucaaauuccucaucagagc

SEQ ID NO: 2610002 - RNA, 19 nt, Artificial Sequence
  Description of Artificial Sequence: Synthetic oligonucleotide
aaggcuuugauccgggccu

SEQ ID NO: 2610003 - RNA, 19 nt, Artificial Sequence
  Description of Artificial Sequence: Synthetic oligonucleotide
aaccuguauaaacaguccu

SEQ ID NO: 2610004 - RNA, 19 nt, Artificial Sequence
  Description of Artificial Sequence: Synthetic oligonucleotide
aucgaggcugggcacaucc

SEQ ID NO: 2610005 - RNA, 19 nt, Artificial Sequence
  Description of Artificial Sequence: Synthetic oligonucleotide
uugguuuccaucgaggcug

SEQ ID NO: 2610006 - RNA, 19 nt, Artificial Sequence
  Description of Artificial Sequence: Synthetic oligonucleotide
acuaacaggaacuggucug

SEQ ID NO: 2610007 - RNA, 19 nt, Artificial Sequence
  Description of Artificial Sequence: Synthetic oligonucleotide
ucauuucacacugcuaagg

SEQ ID NO: 2610008 - RNA, 19 nt, Artificial Sequence
  Description of Artificial Sequence: Synthetic oligonucleotide
agugaugcaauggaugagg

SEQ ID NO: 2610009 - RNA, 19 nt, Artificial Sequence
  Description of Artificial Sequence: Synthetic oligonucleotide
uuugauccgggccuggagc

SEQ ID NO: 2610010 - RNA, 19 nt, Artificial Sequence
  Description of Artificial Sequence: Synthetic oligonucleotide
uguugguuuccaucgaggc

SEQ ID NO: 2610011 - RNA, 19 nt, Artificial Sequence
  Description of Artificial Sequence: Synthetic oligonucleotide
accacuuuauggcagcauc

SEQ ID NO: 2610012 - RNA, 19 nt, Artificial Sequence
  Description of Artificial Sequence: Synthetic oligonucleotide
gauaggcuggucuuuggag

SEQ ID NO: 2610013 - RNA, 19 nt, Artificial Sequence
  Description of Artificial Sequence: Synthetic oligonucleotide
uuaccaaggcccaucgaag

SEQ ID NO: 2610014 - RNA, 19 nt, Artificial Sequence
  Description of Artificial Sequence: Synthetic oligonucleotide
ucagagaagccacaaggac

SEQ ID NO: 2610015 - RNA, 19 nt, Artificial Sequence
  Description of Artificial Sequence: Synthetic oligonucleotide
agcggaacuaguucccacc

SEQ ID NO: 2610016 - RNA, 19 nt, Artificial Sequence
  Description of Artificial Sequence: Synthetic oligonucleotide
aauuccucaucagagcuca

SEQ ID NO: 2610017 - RNA, 19 nt, Artificial Sequence
  Description of Artificial Sequence: Synthetic oligonucleotide
ugugaggauaggcuggucu

SEQ ID NO: 2610018 - RNA, 19 nt, Artificial Sequence
  Description of Artificial Sequence: Synthetic oligonucleotide
gaugaggggucguagacac

SEQ ID NO: 2610019 - RNA, 19 nt, Artificial Sequence
  Description of Artificial Sequence: Synthetic oligonucleotide
uguguggguuuacaaaggc

SEQ ID NO: 2610020 - RNA, 19 nt, Artificial Sequence
  Description of Artificial Sequence: Synthetic oligonucleotide
agagcaugcacuaacagga

SEQ ID NO: 2610021 - RNA, 19 nt, Artificial Sequence
  Description of Artificial Sequence: Synthetic oligonucleotide
cagagcaugcacuaacagg

SEQ ID NO: 2610022 - RNA, 19 nt, Artificial Sequence
  Description of Artificial Sequence: Synthetic oligonucleotide
agggcaagaagaaagauga

SEQ ID NO: 2610023 - RNA, 19 nt, Artificial Sequence
  Description of Artificial Sequence: Synthetic oligonucleotide
uuuauggcagcauccaguc

SEQ ID NO: 2610024 - RNA, 19 nt, Artificial Sequence
  Description of Artificial Sequence: Synthetic oligonucleotide
gacagucagcuucuaaucc

SEQ ID NO: 2610025 - RNA, 19 nt, Artificial Sequence
  Description of Artificial Sequence: Synthetic oligonucleotide
ugcucauugaucucgugcu

SEQ ID NO: 2610026 - RNA, 19 nt, Artificial Sequence
  Description of Artificial Sequence: Synthetic oligonucleotide
ucuguugguuuccaucgag

SEQ ID NO: 2610027 - RNA, 19 nt, Artificial Sequence
  Description of Artificial Sequence: Synthetic oligonucleotide
cauuucacacugcuaaggc

SEQ ID NO: 2610028 - RNA, 19 nt, Artificial Sequence
  Description of Artificial Sequence: Synthetic oligonucleotide
gaaagaugaaagcccugag

SEQ ID NO: 2610029 - RNA, 19 nt, Artificial Sequence
  Description of Artificial Sequence: Synthetic oligonucleotide
uaaucccaggcaaagcucu

SEQ ID NO: 2610030 - RNA, 19 nt, Artificial Sequence
  Description of Artificial Sequence: Synthetic oligonucleotide
aaagcagggaucuguuggu

SEQ ID NO: 2610031 - RNA, 19 nt, Artificial Sequence
  Description of Artificial Sequence: Synthetic oligonucleotide
ugcccagucacuagggaag

SEQ ID NO: 2610032 - RNA, 19 nt, Artificial Sequence
  Description of Artificial Sequence: Synthetic oligonucleotide
agaugcuugcuuucagaac

SEQ ID NO: 2610033 - RNA, 19 nt, Artificial Sequence
  Description of Artificial Sequence: Synthetic oligonucleotide
agaugaaagcccugagcgg

SEQ ID NO: 2610034 - RNA, 19 nt, Artificial Sequence
  Description of Artificial Sequence: Synthetic oligonucleotide
guagacacugucaaauucc

SEQ ID NO: 2610035 - RNA, 19 nt, Artificial Sequence
  Description of Artificial Sequence: Synthetic oligonucleotide
cagacugucgcucuccugc

SEQ ID NO: 2610036 - RNA, 19 nt, Artificial Sequence
  Description of Artificial Sequence: Synthetic oligonucleotide
ugaugcaauggaugagggg

SEQ ID NO: 2610037 - RNA, 19 nt, Artificial Sequence
  Description of Artificial Sequence: Synthetic oligonucleotide
uuuccaaggcuuugauccg

SEQ ID NO: 2610038 - RNA, 19 nt, Artificial Sequence
  Description of Artificial Sequence: Synthetic oligonucleotide
agcaugcacuaacaggaac

SEQ ID NO: 2610039 - RNA, 19 nt, Artificial Sequence
  Description of Artificial Sequence: Synthetic oligonucleotide
gagagguaugaaugugugg

SEQ ID NO: 2610040 - RNA, 19 nt, Artificial Sequence
  Description of Artificial Sequence: Synthetic oligonucleotide
aauggaugaggggucguag

SEQ ID NO: 2610041 - RNA, 19 nt, Artificial Sequence
  Description of Artificial Sequence: Synthetic oligonucleotide
gagaguacagcagcaaggc

SEQ ID NO: 2610042 - RNA, 19 nt, Artificial Sequence
  Description of Artificial Sequence: Synthetic oligonucleotide
ucuccgugagcagugaugc

SEQ ID NO: 2610043 - RNA, 19 nt, Artificial Sequence
  Description of Artificial Sequence: Synthetic oligonucleotide
aaauuccucaucagagcuc

SEQ ID NO: 2610044 - RNA, 19 nt, Artificial Sequence
  Description of Artificial Sequence: Synthetic oligonucleotide
ucuuuggagagguaugaau

SEQ ID NO: 2610045 - RNA, 19 nt, Artificial Sequence
  Description of Artificial Sequence: Synthetic oligonucleotide
gaugcaauggaugaggggu

SEQ ID NO: 2610046 - RNA, 19 nt, Artificial Sequence
  Description of Artificial Sequence: Synthetic oligonucleotide
ugagcgggaagcuuuucgc

SEQ ID NO: 2610047 - RNA, 19 nt, Artificial Sequence
  Description of Artificial Sequence: Synthetic oligonucleotide
aucauacugacagucagcu

SEQ ID NO: 2610048 - RNA, 19 nt, Artificial Sequence
  Description of Artificial Sequence: Synthetic oligonucleotide
uggcagagcagacugucgc

SEQ ID NO: 2610049 - RNA, 19 nt, Artificial Sequence
  Description of Artificial Sequence: Synthetic oligonucleotide
ugaauguguggguuuacaa

SEQ ID NO: 2610050 - RNA, 19 nt, Artificial Sequence
  Description of Artificial Sequence: Synthetic oligonucleotide
uagaugcuugcuuucagaa

SEQ ID NO: 2610051 - RNA, 19 nt, Artificial Sequence
  Description of Artificial Sequence: Synthetic oligonucleotide
ugaggggucguagacacug

SEQ ID NO: 2610052 - RNA, 19 nt, Artificial Sequence
  Description of Artificial Sequence: Synthetic oligonucleotide
caggcauccuuuuccaagg

SEQ ID NO: 2610053 - RNA, 19 nt, Artificial Sequence
  Description of Artificial Sequence: Synthetic oligonucleotide
agucacagagggcaagaag

SEQ ID NO: 2610054 - RNA, 19 nt, Artificial Sequence
  Description of Artificial Sequence: Synthetic oligonucleotide
agaaagaugaaagcccuga

SEQ ID NO: 2610055 - RNA, 19 nt, Artificial Sequence
  Description of Artificial Sequence: Synthetic oligonucleotide
uccucuuguuugaaggcug

SEQ ID NO: 2610056 - RNA, 19 nt, Artificial Sequence
  Description of Artificial Sequence: Synthetic oligonucleotide
gaugaaagcccugagcgga

SEQ ID NO: 2610057 - RNA, 19 nt, Artificial Sequence
  Description of Artificial Sequence: Synthetic oligonucleotide
aagcuuuucgccaggcauc

SEQ ID NO: 2610058 - RNA, 19 nt, Artificial Sequence
  Description of Artificial Sequence: Synthetic oligonucleotide
uagacacugucaaauuccu

SEQ ID NO: 2610059 - RNA, 19 nt, Artificial Sequence
  Description of Artificial Sequence: Synthetic oligonucleotide
uuacaaaggcaagaacagc

SEQ ID NO: 2610060 - RNA, 19 nt, Artificial Sequence
  Description of Artificial Sequence: Synthetic oligonucleotide
ugacagucagcuucuaauc

SEQ ID NO: 2610061 - RNA, 19 nt, Artificial Sequence
  Description of Artificial Sequence: Synthetic oligonucleotide
gagggcaagaagaaagaug

SEQ ID NO: 2610062 - RNA, 19 nt, Artificial Sequence
  Description of Artificial Sequence: Synthetic oligonucleotide
caucauacugacagucagc

SEQ ID NO: 2610063 - RNA, 19 nt, Artificial Sequence
  Description of Artificial Sequence: Synthetic oligonucleotide
acuagaugcuugcuuucag

SEQ ID NO: 2610064 - RNA, 19 nt, Artificial Sequence
  Description of Artificial Sequence: Synthetic oligonucleotide
cuguugguuuccaucgagg

SEQ ID NO: 2610065 - RNA, 19 nt, Artificial Sequence
  Description of Artificial Sequence: Synthetic oligonucleotide
gucacagagggcaagaaga

SEQ ID NO: 2610066 - RNA, 19 nt, Artificial Sequence
  Description of Artificial Sequence: Synthetic oligonucleotide
agcuuuucgccaggcaucc

SEQ ID NO: 2610067 - RNA, 19 nt, Artificial Sequence
  Description of Artificial Sequence: Synthetic oligonucleotide
ucgccaggcauccuuuucc

SEQ ID NO: 2610068 - RNA, 19 nt, Artificial Sequence
  Description of Artificial Sequence: Synthetic oligonucleotide
caaggcuuugauccgggcc

SEQ ID NO: 2610069 - RNA, 19 nt, Artificial Sequence
  Description of Artificial Sequence: Synthetic oligonucleotide
uggucuuuggagagguaug

SEQ ID NO: 2610070 - RNA, 19 nt, Artificial Sequence
  Description of Artificial Sequence: Synthetic oligonucleotide
cugagaguacagcagcaag

SEQ ID NO: 2610071 - RNA, 19 nt, Artificial Sequence
  Description of Artificial Sequence: Synthetic oligonucleotide
uuggcagagcagacugucg

SEQ ID NO: 2610072 - RNA, 19 nt, Artificial Sequence
  Description of Artificial Sequence: Synthetic oligonucleotide
aggcaagcagagcaugcac

SEQ ID NO: 2610073 - RNA, 19 nt, Artificial Sequence
  Description of Artificial Sequence: Synthetic oligonucleotide
gaaccuguauaaacagucc

SEQ ID NO: 2610074 - RNA, 19 nt, Artificial Sequence
  Description of Artificial Sequence: Synthetic oligonucleotide
gaucucgugcuguuccucc

SEQ ID NO: 2610075 - RNA, 19 nt, Artificial Sequence
  Description of Artificial Sequence: Synthetic oligonucleotide
aaucagggcccacuuccug

SEQ ID NO: 2610076 - RNA, 19 nt, Artificial Sequence
  Description of Artificial Sequence: Synthetic oligonucleotide
ggaacuaguucccaccacc

SEQ ID NO: 2610077 - RNA, 19 nt, Artificial Sequence
  Description of Artificial Sequence: Synthetic oligonucleotide
accuuaccaaggcccaucg

SEQ ID NO: 2610078 - RNA, 19 nt, Artificial Sequence
  Description of Artificial Sequence: Synthetic oligonucleotide
uggaugaggggucguagac

SEQ ID NO: 2610079 - RNA, 19 nt, Artificial Sequence
  Description of Artificial Sequence: Synthetic oligonucleotide
uccaaggcuuugauccggg

SEQ ID NO: 2610080 - RNA, 19 nt, Artificial Sequence
  Description of Artificial Sequence: Synthetic oligonucleotide
uggguuuacaaaggcaaga

SEQ ID NO: 2610081 - RNA, 19 nt, Artificial Sequence
  Description of Artificial Sequence: Synthetic oligonucleotide
ugcuuucagaaccuguaua

SEQ ID NO: 2610082 - RNA, 19 nt, Artificial Sequence
  Description of Artificial Sequence: Synthetic oligonucleotide
cuaguucccaccaccuuac

SEQ ID NO: 2610083 - RNA, 19 nt, Artificial Sequence
  Description of Artificial Sequence: Synthetic oligonucleotide
accuguauaaacaguccuc

SEQ ID NO: 2610084 - RNA, 19 nt, Artificial Sequence
  Description of Artificial Sequence: Synthetic oligonucleotide
agacugucgcucuccugcc

SEQ ID NO: 2610085 - RNA, 19 nt, Artificial Sequence
  Description of Artificial Sequence: Synthetic oligonucleotide
ugcaauggaugaggggucg

SEQ ID NO: 2610086 - RNA, 19 nt, Artificial Sequence
  Description of Artificial Sequence: Synthetic oligonucleotide
ucacuagggaaggaggaca

SEQ ID NO: 2610087 - RNA, 19 nt, Artificial Sequence
  Description of Artificial Sequence: Synthetic oligonucleotide
cuaacaggaacuggucugc

SEQ ID NO: 2610088 - RNA, 19 nt, Artificial Sequence
  Description of Artificial Sequence: Synthetic oligonucleotide
ucacagagggcaagaagaa

SEQ ID NO: 2610089 - RNA, 19 nt, Artificial Sequence
  Description of Artificial Sequence: Synthetic oligonucleotide
cucauuucacacugcuaag

SEQ ID NO: 2610090 - RNA, 19 nt, Artificial Sequence
  Description of Artificial Sequence: Synthetic oligonucleotide
gucagcuucuaaucccagg

SEQ ID NO: 2610091 - RNA, 19 nt, Artificial Sequence
  Description of Artificial Sequence: Synthetic oligonucleotide
cuuaccaaggcccaucgaa

SEQ ID NO: 2610092 - RNA, 19 nt, Artificial Sequence
  Description of Artificial Sequence: Synthetic oligonucleotide
cuucuaaucccaggcaaag

SEQ ID NO: 2610093 - RNA, 19 nt, Artificial Sequence
  Description of Artificial Sequence: Synthetic oligonucleotide
caaggcaagcagagcaugc

SEQ ID NO: 2610094 - RNA, 19 nt, Artificial Sequence
  Description of Artificial Sequence: Synthetic oligonucleotide
cugagcgggaagcuuuucg

SEQ ID NO: 2610095 - RNA, 19 nt, Artificial Sequence
  Description of Artificial Sequence: Synthetic oligonucleotide
aagcccgucuucccagggg

SEQ ID NO: 2610096 - RNA, 19 nt, Artificial Sequence
  Description of Artificial Sequence: Synthetic oligonucleotide
cacaaggacuagaugcuug

SEQ ID NO: 2610097 - RNA, 19 nt, Artificial Sequence
  Description of Artificial Sequence: Synthetic oligonucleotide
cuaaucccaggcaaagcuc

SEQ ID NO: 2610098 - RNA, 19 nt, Artificial Sequence
  Description of Artificial Sequence: Synthetic oligonucleotide
aaggcaagaacagcauccu

SEQ ID NO: 2610099 - RNA, 19 nt, Artificial Sequence
  Description of Artificial Sequence: Synthetic oligonucleotide
agcuucuaaucccaggcaa

SEQ ID NO: 2610100 - RNA, 19 nt, Artificial Sequence
  Description of Artificial Sequence: Synthetic oligonucleotide
auccucauuucacacugcu

SEQ ID NO: 2610101 - RNA, 19 nt, Artificial Sequence
  Description of Artificial Sequence: Synthetic oligonucleotide
aguacagcagcaaggcaag

SEQ ID NO: 2610102 - RNA, 19 nt, Artificial Sequence
  Description of Artificial Sequence: Synthetic oligonucleotide
agcagugaugcaauggaug

SEQ ID NO: 2610103 - RNA, 19 nt, Artificial Sequence
  Description of Artificial Sequence: Synthetic oligonucleotide
uuggagagguaugaaugug

SEQ ID NO: 2610104 - RNA, 19 nt, Artificial Sequence
  Description of Artificial Sequence: Synthetic oligonucleotide
cuuuuccaaggcuuugauc

SEQ ID NO: 2610105 - RNA, 19 nt, Artificial Sequence
  Description of Artificial Sequence: Synthetic oligonucleotide
guucccaccaccuuaccaa

SEQ ID NO: 2610106 - RNA, 19 nt, Artificial Sequence
  Description of Artificial Sequence: Synthetic oligonucleotide
ggcacauccggucagagaa

SEQ ID NO: 2610107 - RNA, 19 nt, Artificial Sequence
  Description of Artificial Sequence: Synthetic oligonucleotide
gagcgggaagcuuuucgcc

SEQ ID NO: 2610108 - RNA, 19 nt, Artificial Sequence
  Description of Artificial Sequence: Synthetic oligonucleotide
gaagcuuuucgccaggcau

SEQ ID NO: 2610109 - RNA, 19 nt, Artificial Sequence
  Description of Artificial Sequence: Synthetic oligonucleotide
aaggcaagcagagcaugca

SEQ ID NO: 2610110 - RNA, 19 nt, Artificial Sequence
  Description of Artificial Sequence: Synthetic oligonucleotide
gcauccucauuucacacug

SEQ ID NO: 2610111 - RNA, 19 nt, Artificial Sequence
  Description of Artificial Sequence: Synthetic oligonucleotide
gugaugcaauggaugaggg

SEQ ID NO: 2610112 - RNA, 19 nt, Artificial Sequence
  Description of Artificial Sequence: Synthetic oligonucleotide
uucuaaucccaggcaaagc

SEQ ID NO: 2610113 - RNA, 19 nt, Artificial Sequence
  Description of Artificial Sequence: Synthetic oligonucleotide
uucccaccaccuuaccaag

SEQ ID NO: 2610114 - RNA, 19 nt, Artificial Sequence
  Description of Artificial Sequence: Synthetic oligonucleotide
uugcuuucagaaccuguau

SEQ ID NO: 2610115 - RNA, 19 nt, Artificial Sequence
  Description of Artificial Sequence: Synthetic oligonucleotide
aagaaagaugaaagcccug

SEQ ID NO: 2610116 - RNA, 19 nt, Artificial Sequence
  Description of Artificial Sequence: Synthetic oligonucleotide
cagcaaggcaagcagagca

SEQ ID NO: 2610117 - RNA, 19 nt, Artificial Sequence
  Description of Artificial Sequence: Synthetic oligonucleotide
cugagcggaacuaguuccc

SEQ ID NO: 2610118 - RNA, 19 nt, Artificial Sequence
  Description of Artificial Sequence: Synthetic oligonucleotide
ucccaucauacugacaguc

SEQ ID NO: 2610119 - RNA, 19 nt, Artificial Sequence
  Description of Artificial Sequence: Synthetic oligonucleotide
uugauccgggccuggagcu

SEQ ID NO: 2610120 - RNA, 19 nt, Artificial Sequence
  Description of Artificial Sequence: Synthetic oligonucleotide
ugguuuccaucgaggcugg

SEQ ID NO: 2610121 - RNA, 19 nt, Artificial Sequence
  Description of Artificial Sequence: Synthetic oligonucleotide
aggauaggcuggucuuugg

SEQ ID NO: 2610122 - RNA, 19 nt, Artificial Sequence
  Description of Artificial Sequence: Synthetic oligonucleotide
ugaaggcugccucgguagc

SEQ ID NO: 2610123 - RNA, 19 nt, Artificial Sequence
  Description of Artificial Sequence: Synthetic oligonucleotide
ccugagcggaacuaguucc

SEQ ID NO: 2610124 - RNA, 19 nt, Artificial Sequence
  Description of Artificial Sequence: Synthetic oligonucleotide
uccgugagcagugaugcaa

SEQ ID NO: 2610125 - RNA, 19 nt, Artificial Sequence
  Description of Artificial Sequence: Synthetic oligonucleotide
caugcacuaacaggaacug

SEQ ID NO: 2610126 - RNA, 19 nt, Artificial Sequence
  Description of Artificial Sequence: Synthetic oligonucleotide
auguguggguuuacaaagg

SEQ ID NO: 2610127 - RNA, 19 nt, Artificial Sequence
  Description of Artificial Sequence: Synthetic oligonucleotide
ggaacuggucugcagguug

SEQ ID NO: 2610128 - RNA, 19 nt, Artificial Sequence
  Description of Artificial Sequence: Synthetic oligonucleotide
cuuugauccgggccuggag

SEQ ID NO: 2610129 - RNA, 19 nt, Artificial Sequence
  Description of Artificial Sequence: Synthetic oligonucleotide
caaauuccucaucagagcu

SEQ ID NO: 2610130 - RNA, 19 nt, Artificial Sequence
  Description of Artificial Sequence: Synthetic oligonucleotide
guacaaccacuuuauggca

SEQ ID NO: 2610131 - RNA, 19 nt, Artificial Sequence
  Description of Artificial Sequence: Synthetic oligonucleotide
aggggucguagacacuguc

SEQ ID NO: 2610132 - RNA, 19 nt, Artificial Sequence
  Description of Artificial Sequence: Synthetic oligonucleotide
cuagaugcuugcuuucaga

SEQ ID NO: 2610133 - RNA, 19 nt, Artificial Sequence
  Description of Artificial Sequence: Synthetic oligonucleotide
aggcaagaacagcauccuc

SEQ ID NO: 2610134 - RNA, 19 nt, Artificial Sequence
  Description of Artificial Sequence: Synthetic oligonucleotide
uuauggcagcauccaguca

SEQ ID NO: 2610135 - RNA, 19 nt, Artificial Sequence
  Description of Artificial Sequence: Synthetic oligonucleotide
ucuccugcccagucacuag

SEQ ID NO: 2610136 - RNA, 19 nt, Artificial Sequence
  Description of Artificial Sequence: Synthetic oligonucleotide
cuuuauggcagcauccagu

SEQ ID NO: 2610137 - RNA, 19 nt, Artificial Sequence
  Description of Artificial Sequence: Synthetic oligonucleotide
aucagggcccacuuccuga

SEQ ID NO: 2610138 - RNA, 19 nt, Artificial Sequence
  Description of Artificial Sequence: Synthetic oligonucleotide
uugcucuccgugagcagug

SEQ ID NO: 2610139 - RNA, 19 nt, Artificial Sequence
  Description of Artificial Sequence: Synthetic oligonucleotide
caggcaaagcucugaauca

SEQ ID NO: 2610140 - RNA, 19 nt, Artificial Sequence
  Description of Artificial Sequence: Synthetic oligonucleotide
auggaugaggggucguaga

SEQ ID NO: 2610141 - RNA, 19 nt, Artificial Sequence
  Description of Artificial Sequence: Synthetic oligonucleotide
gaagcccgucuucccaggg

SEQ ID NO: 2610142 - RNA, 19 nt, Artificial Sequence
  Description of Artificial Sequence: Synthetic oligonucleotide
cucuccgugagcagugaug

SEQ ID NO: 2610143 - RNA, 19 nt, Artificial Sequence
  Description of Artificial Sequence: Synthetic oligonucleotide
ucgaggcugggcacauccg

SEQ ID NO: 2610144 - RNA, 19 nt, Artificial Sequence
  Description of Artificial Sequence: Synthetic oligonucleotide
ucaucagagcucagcuccu

SEQ ID NO: 2610145 - RNA, 19 nt, Artificial Sequence
  Description of Artificial Sequence: Synthetic oligonucleotide
gcagugaugcaauggauga

SEQ ID NO: 2610146 - RNA, 19 nt, Artificial Sequence
  Description of Artificial Sequence: Synthetic oligonucleotide
agaguacagcagcaaggca

SEQ ID NO: 2610147 - RNA, 19 nt, Artificial Sequence
  Description of Artificial Sequence: Synthetic oligonucleotide
ucgguagcugagcgggaag

SEQ ID NO: 2610148 - RNA, 19 nt, Artificial Sequence
  Description of Artificial Sequence: Synthetic oligonucleotide
aagcccugagcggaacuag

SEQ ID NO: 2610149 - RNA, 19 nt, Artificial Sequence
  Description of Artificial Sequence: Synthetic oligonucleotide
ggaucuguugguuuccauc

SEQ ID NO: 2610150 - RNA, 19 nt, Artificial Sequence
  Description of Artificial Sequence: Synthetic oligonucleotide
guuuccaucgaggcugggc

SEQ ID NO: 2610151 - RNA, 19 nt, Artificial Sequence
  Description of Artificial Sequence: Synthetic oligonucleotide
agagcucagcuccucuugu

SEQ ID NO: 2610152 - RNA, 19 nt, Artificial Sequence
  Description of Artificial Sequence: Synthetic oligonucleotide
uuuucgccaggcauccuuu

SEQ ID NO: 2610153 - RNA, 19 nt, Artificial Sequence
  Description of Artificial Sequence: Synthetic oligonucleotide
gaacuggucugcagguugc

SEQ ID NO: 2610154 - RNA, 19 nt, Artificial Sequence
  Description of Artificial Sequence: Synthetic oligonucleotide
gaggauaggcuggucuuug

SEQ ID NO: 2610155 - RNA, 19 nt, Artificial Sequence
  Description of Artificial Sequence: Synthetic oligonucleotide
auccggucagagaagccac

SEQ ID NO: 2610156 - RNA, 19 nt, Artificial Sequence
  Description of Artificial Sequence: Synthetic oligonucleotide
uagcugagcgggaagcuuu

SEQ ID NO: 2610157 - RNA, 19 nt, Artificial Sequence
  Description of Artificial Sequence: Synthetic oligonucleotide
uugaucucgugcuguuccu

SEQ ID NO: 2610158 - RNA, 19 nt, Artificial Sequence
  Description of Artificial Sequence: Synthetic oligonucleotide
augcacuaacaggaacugg

SEQ ID NO: 2610159 - RNA, 19 nt, Artificial Sequence
  Description of Artificial Sequence: Synthetic oligonucleotide
augaauguguggguuuaca

SEQ ID NO: 2610160 - RNA, 19 nt, Artificial Sequence
  Description of Artificial Sequence: Synthetic oligonucleotide
agucacuagggaaggagga

SEQ ID NO: 2610161 - RNA, 19 nt, Artificial Sequence
  Description of Artificial Sequence: Synthetic oligonucleotide
gucugcagguugcucuccg

SEQ ID NO: 2610162 - RNA, 19 nt, Artificial Sequence
  Description of Artificial Sequence: Synthetic oligonucleotide
aggcugggcacauccgguc

SEQ ID NO: 2610163 - RNA, 19 nt, Artificial Sequence
  Description of Artificial Sequence: Synthetic oligonucleotide
gucagagaagccacaagga

SEQ ID NO: 2610164 - RNA, 19 nt, Artificial Sequence
  Description of Artificial Sequence: Synthetic oligonucleotide
augcaauggaugagggguc

SEQ ID NO: 2610165 - RNA, 19 nt, Artificial Sequence
  Description of Artificial Sequence: Synthetic oligonucleotide
cugccucgguagcugagcg

SEQ ID NO: 2610166 - RNA, 19 nt, Artificial Sequence
  Description of Artificial Sequence: Synthetic oligonucleotide
guggguuuacaaaggcaag

SEQ ID NO: 2610167 - RNA, 19 nt, Artificial Sequence
  Description of Artificial Sequence: Synthetic oligonucleotide
uccucauuucacacugcua

SEQ ID NO: 2610168 - RNA, 19 nt, Artificial Sequence
  Description of Artificial Sequence: Synthetic oligonucleotide
ugagaaaagcagggaucug

SEQ ID NO: 2610169 - RNA, 19 nt, Artificial Sequence
  Description of Artificial Sequence: Synthetic oligonucleotide
ucauugaucucgugcuguu

SEQ ID NO: 2610170 - RNA, 19 nt, Artificial Sequence
  Description of Artificial Sequence: Synthetic oligonucleotide
ugccucgguagcugagcgg

SEQ ID NO: 2610171 - RNA, 19 nt, Artificial Sequence
  Description of Artificial Sequence: Synthetic oligonucleotide
acugacagucagcuucuaa

SEQ ID NO: 2610172 - RNA, 19 nt, Artificial Sequence
  Description of Artificial Sequence: Synthetic oligonucleotide
ucauguucccagguacaac

SEQ ID NO: 2610173 - RNA, 19 nt, Artificial Sequence
  Description of Artificial Sequence: Synthetic oligonucleotide
ccucauuucacacugcuaa

SEQ ID NO: 2610174 - RNA, 19 nt, Artificial Sequence
  Description of Artificial Sequence: Synthetic oligonucleotide
ccaggcauccuuuuccaag

SEQ ID NO: 2610175 - RNA, 19 nt, Artificial Sequence
  Description of Artificial Sequence: Synthetic oligonucleotide
gacuagaugcuugcuuuca

SEQ ID NO: 2610176 - RNA, 19 nt, Artificial Sequence
  Description of Artificial Sequence: Synthetic oligonucleotide
uucgccaggcauccuuuuc

SEQ ID NO: 2610177 - RNA, 19 nt, Artificial Sequence
  Description of Artificial Sequence: Synthetic oligonucleotide
ucguagacacugucaaauu

SEQ ID NO: 2610178 - RNA, 19 nt, Artificial Sequence
  Description of Artificial Sequence: Synthetic oligonucleotide
uaugaauguguggguuuac

SEQ ID NO: 2610179 - RNA, 19 nt, Artificial Sequence
  Description of Artificial Sequence: Synthetic oligonucleotide
ggcacugagaguacagcag

SEQ ID NO: 2610180 - RNA, 19 nt, Artificial Sequence
  Description of Artificial Sequence: Synthetic oligonucleotide
cagagggcaagaagaaaga

SEQ ID NO: 2610181 - RNA, 19 nt, Artificial Sequence
  Description of Artificial Sequence: Synthetic oligonucleotide
ggcaagaagaaagaugaaa

SEQ ID NO: 2610182 - RNA, 19 nt, Artificial Sequence
  Description of Artificial Sequence: Synthetic oligonucleotide
guuggcagagcagacuguc

SEQ ID NO: 2610183 - RNA, 19 nt, Artificial Sequence
  Description of Artificial Sequence: Synthetic oligonucleotide
cauccucauuucacacugc

SEQ ID NO: 2610184 - RNA, 19 nt, Artificial Sequence
  Description of Artificial Sequence: Synthetic oligonucleotide
ucgugcuguuccuccagcu

SEQ ID NO: 2610185 - RNA, 19 nt, Artificial Sequence
  Description of Artificial Sequence: Synthetic oligonucleotide
aacaguccucauguuccca

SEQ ID NO: 2610186 - RNA, 19 nt, Artificial Sequence
  Description of Artificial Sequence: Synthetic oligonucleotide
aucuguugguuuccaucga

SEQ ID NO: 2610187 - RNA, 19 nt, Artificial Sequence
  Description of Artificial Sequence: Synthetic oligonucleotide
uucccaucauacugacagu

SEQ ID NO: 2610188 - RNA, 19 nt, Artificial Sequence
  Description of Artificial Sequence: Synthetic oligonucleotide
agguugcucuccgugagca

SEQ ID NO: 2610189 - RNA, 19 nt, Artificial Sequence
  Description of Artificial Sequence: Synthetic oligonucleotide
ugagcggaacuaguuccca

SEQ ID NO: 2610190 - RNA, 19 nt, Artificial Sequence
  Description of Artificial Sequence: Synthetic oligonucleotide
gagcggaacuaguucccac

SEQ ID NO: 2610191 - RNA, 19 nt, Artificial Sequence
  Description of Artificial Sequence: Synthetic oligonucleotide
uccggucagagaagccaca

SEQ ID NO: 2610192 - RNA, 19 nt, Artificial Sequence
  Description of Artificial Sequence: Synthetic oligonucleotide
agaagccacaaggacuaga

SEQ ID NO: 2610193 - RNA, 19 nt, Artificial Sequence
  Description of Artificial Sequence: Synthetic oligonucleotide
cauccggucagagaagcca

SEQ ID NO: 2610194 - RNA, 19 nt, Artificial Sequence
  Description of Artificial Sequence: Synthetic oligonucleotide
uccaucgaggcugggcaca

SEQ ID NO: 2610195 - RNA, 19 nt, Artificial Sequence
  Description of Artificial Sequence: Synthetic oligonucleotide
gaagccacaaggacuagau

SEQ ID NO: 2610196 - RNA, 19 nt, Artificial Sequence
  Description of Artificial Sequence: Synthetic oligonucleotide
agggcccacuuccugagaa

SEQ ID NO: 2610197 - RNA, 19 nt, Artificial Sequence
  Description of Artificial Sequence: Synthetic oligonucleotide
agcucagcuccucuuguuu

SEQ ID NO: 2610198 - RNA, 19 nt, Artificial Sequence
  Description of Artificial Sequence: Synthetic oligonucleotide
ggcaaagcucugaaucagg

SEQ ID NO: 2610199 - RNA, 19 nt, Artificial Sequence
  Description of Artificial Sequence: Synthetic oligonucleotide
aggacaggcugagggcccc

SEQ ID NO: 2610200 - RNA, 19 nt, Artificial Sequence
  Description of Artificial Sequence: Synthetic oligonucleotide
ucacacugcuaaggcacug

SEQ ID NO: 2610201 - RNA, 19 nt, Artificial Sequence
  Description of Artificial Sequence: Synthetic oligonucleotide
acugagaguacagcagcaa

SEQ ID NO: 2610202 - RNA, 19 nt, Artificial Sequence
  Description of Artificial Sequence: Synthetic oligonucleotide
aaccacuuuauggcagcau

SEQ ID NO: 2610203 - RNA, 19 nt, Artificial Sequence
  Description of Artificial Sequence: Synthetic oligonucleotide
agguaugaauguguggguu

SEQ ID NO: 2610204 - RNA, 19 nt, Artificial Sequence
  Description of Artificial Sequence: Synthetic oligonucleotide
gccucgguagcugagcggg

SEQ ID NO: 2610205 - RNA, 19 nt, Artificial Sequence
  Description of Artificial Sequence: Synthetic oligonucleotide
agcagggaucuguugguuu

SEQ ID NO: 2610206 - RNA, 19 nt, Artificial Sequence
  Description of Artificial Sequence: Synthetic oligonucleotide
gauccgggccuggagcugc

SEQ ID NO: 2610207 - RNA, 19 nt, Artificial Sequence
  Description of Artificial Sequence: Synthetic oligonucleotide
gucacuagggaaggaggac

SEQ ID NO: 2610208 - RNA, 19 nt, Artificial Sequence
  Description of Artificial Sequence: Synthetic oligonucleotide
cagugaugcaauggaugag

SEQ ID NO: 2610209 - RNA, 19 nt, Artificial Sequence
  Description of Artificial Sequence: Synthetic oligonucleotide
uuccaucgaggcugggcac

SEQ ID NO: 2610210 - RNA, 19 nt, Artificial Sequence
  Description of Artificial Sequence: Synthetic oligonucleotide
gucguagacacugucaaau

SEQ ID NO: 2610211 - RNA, 19 nt, Artificial Sequence
  Description of Artificial Sequence: Synthetic oligonucleotide
guugguuuccaucgaggcu

SEQ ID NO: 2610212 - RNA, 19 nt, Artificial Sequence
  Description of Artificial Sequence: Synthetic oligonucleotide
cucgugcuguuccuccagc

SEQ ID NO: 2610213 - RNA, 19 nt, Artificial Sequence
  Description of Artificial Sequence: Synthetic oligonucleotide
uaguucccaccaccuuacc

SEQ ID NO: 2610214 - RNA, 19 nt, Artificial Sequence
  Description of Artificial Sequence: Synthetic oligonucleotide
gcagguugcucuccgugag

SEQ ID NO: 2610215 - RNA, 19 nt, Artificial Sequence
  Description of Artificial Sequence: Synthetic oligonucleotide
cacugucaaauuccucauc

SEQ ID NO: 2610216 - RNA, 19 nt, Artificial Sequence
  Description of Artificial Sequence: Synthetic oligonucleotide
gagguaugaaugugugggu

SEQ ID NO: 2610217 - RNA, 19 nt, Artificial Sequence
  Description of Artificial Sequence: Synthetic oligonucleotide
cucuuguuugaaggcugcc

SEQ ID NO: 2610218 - RNA, 19 nt, Artificial Sequence
  Description of Artificial Sequence: Synthetic oligonucleotide
aucucgugcuguuccucca

SEQ ID NO: 2610219 - RNA, 19 nt, Artificial Sequence
  Description of Artificial Sequence: Synthetic oligonucleotide
ucgcucuccugcccaguca

SEQ ID NO: 2610220 - RNA, 19 nt, Artificial Sequence
  Description of Artificial Sequence: Synthetic oligonucleotide
cacuuuauggcagcaucca

SEQ ID NO: 2610221 - RNA, 19 nt, Artificial Sequence
  Description of Artificial Sequence: Synthetic oligonucleotide
cacugagaguacagcagca

SEQ ID NO: 2610222 - RNA, 19 nt, Artificial Sequence
  Description of Artificial Sequence: Synthetic oligonucleotide
cagguacaaccacuuuaug

SEQ ID NO: 2610223 - RNA, 19 nt, Artificial Sequence
  Description of Artificial Sequence: Synthetic oligonucleotide
cccugugaggauaggcugg

SEQ ID NO: 2610224 - RNA, 19 nt, Artificial Sequence
  Description of Artificial Sequence: Synthetic oligonucleotide
guaugaauguguggguuua

SEQ ID NO: 2610225 - RNA, 19 nt, Artificial Sequence
  Description of Artificial Sequence: Synthetic oligonucleotide
cuuucagaaccuguauaaa

SEQ ID NO: 2610226 - RNA, 19 nt, Artificial Sequence
  Description of Artificial Sequence: Synthetic oligonucleotide
cugagggccccugugagga

SEQ ID NO: 2610227 - RNA, 19 nt, Artificial Sequence
  Description of Artificial Sequence: Synthetic oligonucleotide
aacuggucugcagguugcu

SEQ ID NO: 2610228 - RNA, 19 nt, Artificial Sequence
  Description of Artificial Sequence: Synthetic oligonucleotide
gggucguagacacugucaa

SEQ ID NO: 2610229 - RNA, 19 nt, Artificial Sequence
  Description of Artificial Sequence: Synthetic oligonucleotide
gaacuaguucccaccaccu

SEQ ID NO: 2610230 - RNA, 19 nt, Artificial Sequence
  Description of Artificial Sequence: Synthetic oligonucleotide
gcagggaucuguugguuuc

SEQ ID NO: 2610231 - RNA, 19 nt, Artificial Sequence
  Description of Artificial Sequence: Synthetic oligonucleotide
ccuguauaaacaguccuca

SEQ ID NO: 2610232 - RNA, 19 nt, Artificial Sequence
  Description of Artificial Sequence: Synthetic oligonucleotide
cguagacacugucaaauuc

SEQ ID NO: 2610233 - RNA, 19 nt, Artificial Sequence
  Description of Artificial Sequence: Synthetic oligonucleotide
cauugaucucgugcuguuc

SEQ ID NO: 2610234 - RNA, 19 nt, Artificial Sequence
  Description of Artificial Sequence: Synthetic oligonucleotide
ggauaggcuggucuuugga

SEQ ID NO: 2610235 - RNA, 19 nt, Artificial Sequence
  Description of Artificial Sequence: Synthetic oligonucleotide
cacuaacaggaacuggucu

SEQ ID NO: 2610236 - RNA, 19 nt, Artificial Sequence
  Description of Artificial Sequence: Synthetic oligonucleotide
ggucuuuggagagguauga

SEQ ID NO: 2610237 - RNA, 19 nt, Artificial Sequence
  Description of Artificial Sequence: Synthetic oligonucleotide
cugcccagucacuagggaa

SEQ ID NO: 2610238 - RNA, 19 nt, Artificial Sequence
  Description of Artificial Sequence: Synthetic oligonucleotide
aggcccaucgaagcccguc

SEQ ID NO: 2610239 - RNA, 19 nt, Artificial Sequence
  Description of Artificial Sequence: Synthetic oligonucleotide
accaccuuaccaaggccca

SEQ ID NO: 2610240 - RNA, 19 nt, Artificial Sequence
  Description of Artificial Sequence: Synthetic oligonucleotide
cagcuucuaaucccaggca

SEQ ID NO: 2610241 - RNA, 19 nt, Artificial Sequence
  Description of Artificial Sequence: Synthetic oligonucleotide
gaaagcccugagcggaacu

SEQ ID NO: 2610242 - RNA, 19 nt, Artificial Sequence
  Description of Artificial Sequence: Synthetic oligonucleotide
gcucauugaucucgugcug

SEQ ID NO: 2610243 - RNA, 19 nt, Artificial Sequence
  Description of Artificial Sequence: Synthetic oligonucleotide
ccaucgaagcccgucuucc

SEQ ID NO: 2610244 - RNA, 19 nt, Artificial Sequence
  Description of Artificial Sequence: Synthetic oligonucleotide
cagaaccuguauaaacagu

SEQ ID NO: 2610245 - RNA, 19 nt, Artificial Sequence
  Description of Artificial Sequence: Synthetic oligonucleotide
uuucgccaggcauccuuuu

SEQ ID NO: 2610246 - RNA, 19 nt, Artificial Sequence
  Description of Artificial Sequence: Synthetic oligonucleotide
agcucugaaucagggccca

SEQ ID NO: 2610247 - RNA, 19 nt, Artificial Sequence
  Description of Artificial Sequence: Synthetic oligonucleotide
gcaagcagagcaugcacua

SEQ ID NO: 2610248 - RNA, 19 nt, Artificial Sequence
  Description of Artificial Sequence: Synthetic oligonucleotide
gcaaggcaagcagagcaug

SEQ ID NO: 2610249 - RNA, 19 nt, Artificial Sequence
  Description of Artificial Sequence: Synthetic oligonucleotide
caccuuaccaaggcccauc

SEQ ID NO: 2610250 - RNA, 19 nt, Artificial Sequence
  Description of Artificial Sequence: Synthetic oligonucleotide
ugauccgggccuggagcug

SEQ ID NO: 2610251 - RNA, 19 nt, Artificial Sequence
  Description of Artificial Sequence: Synthetic oligonucleotide
guugcucuccgugagcagu

SEQ ID NO: 2610252 - RNA, 19 nt, Artificial Sequence
  Description of Artificial Sequence: Synthetic oligonucleotide
cucauguucccagguacaa

SEQ ID NO: 2610253 - RNA, 19 nt, Artificial Sequence
  Description of Artificial Sequence: Synthetic oligonucleotide
ccccugugaggauaggcug

SEQ ID NO: 2610254 - RNA, 19 nt, Artificial Sequence
  Description of Artificial Sequence: Synthetic oligonucleotide
gcaugcacuaacaggaacu

SEQ ID NO: 2610255 - RNA, 19 nt, Artificial Sequence
  Description of Artificial Sequence: Synthetic oligonucleotide
gucgcucuccugcccaguc

SEQ ID NO: 2610256 - RNA, 19 nt, Artificial Sequence
  Description of Artificial Sequence: Synthetic oligonucleotide
cucauugaucucgugcugu

SEQ ID NO: 2610257 - RNA, 19 nt, Artificial Sequence
  Description of Artificial Sequence: Synthetic oligonucleotide
gguugcucuccgugagcag

SEQ ID NO: 2610258 - RNA, 19 nt, Artificial Sequence
  Description of Artificial Sequence: Synthetic oligonucleotide
agggaucuguugguuucca

SEQ ID NO: 2610259 - RNA, 19 nt, Artificial Sequence
  Description of Artificial Sequence: Synthetic oligonucleotide
gguaugaauguguggguuu

SEQ ID NO: 2610260 - RNA, 19 nt, Artificial Sequence
  Description of Artificial Sequence: Synthetic oligonucleotide
gcggaacuaguucccacca

SEQ ID NO: 2610261 - RNA, 19 nt, Artificial Sequence
  Description of Artificial Sequence: Synthetic oligonucleotide
cacacugcuaaggcacuga

SEQ ID NO: 2610262 - RNA, 19 nt, Artificial Sequence
  Description of Artificial Sequence: Synthetic oligonucleotide
caggaacuggucugcaggu

SEQ ID NO: 2610263 - RNA, 19 nt, Artificial Sequence
  Description of Artificial Sequence: Synthetic oligonucleotide
cgaggcugggcacauccgg

SEQ ID NO: 2610264 - RNA, 19 nt, Artificial Sequence
  Description of Artificial Sequence: Synthetic oligonucleotide
gagcaugcacuaacaggaa

SEQ ID NO: 2610265 - RNA, 19 nt, Artificial Sequence
  Description of Artificial Sequence: Synthetic oligonucleotide
ggaugaggggucguagaca

SEQ ID NO: 2610266 - RNA, 19 nt, Artificial Sequence
  Description of Artificial Sequence: Synthetic oligonucleotide
caucagagcucagcuccuc

SEQ ID NO: 2610267 - RNA, 19 nt, Artificial Sequence
  Description of Artificial Sequence: Synthetic oligonucleotide
cuuuucgccaggcauccuu

SEQ ID NO: 2610268 - RNA, 19 nt, Artificial Sequence
  Description of Artificial Sequence: Synthetic oligonucleotide
agggccccugugaggauag

SEQ ID NO: 2610269 - RNA, 19 nt, Artificial Sequence
  Description of Artificial Sequence: Synthetic oligonucleotide
cuggucuuuggagagguau

SEQ ID NO: 2610270 - RNA, 19 nt, Artificial Sequence
  Description of Artificial Sequence: Synthetic oligonucleotide
ggcagcauccagucacaga

SEQ ID NO: 2610271 - RNA, 19 nt, Artificial Sequence
  Description of Artificial Sequence: Synthetic oligonucleotide
gucuuuggagagguaugaa

SEQ ID NO: 2610272 - RNA, 19 nt, Artificial Sequence
  Description of Artificial Sequence: Synthetic oligonucleotide
gacaggcugagggccccug

SEQ ID NO: 2610273 - RNA, 19 nt, Artificial Sequence
  Description of Artificial Sequence: Synthetic oligonucleotide
gaaucagggcccacuuccu

SEQ ID NO: 2610274 - RNA, 19 nt, Artificial Sequence
  Description of Artificial Sequence: Synthetic oligonucleotide
gcacuaacaggaacugguc

SEQ ID NO: 2610275 - RNA, 19 nt, Artificial Sequence
  Description of Artificial Sequence: Synthetic oligonucleotide
gcccagucacuagggaagg

SEQ ID NO: 2610276 - RNA, 19 nt, Artificial Sequence
  Description of Artificial Sequence: Synthetic oligonucleotide
cccagguacaaccacuuua

SEQ ID NO: 2610277 - RNA, 19 nt, Artificial Sequence
  Description of Artificial Sequence: Synthetic oligonucleotide
ccaccaccuuaccaaggcc

SEQ ID NO: 2610278 - RNA, 19 nt, Artificial Sequence
  Description of Artificial Sequence: Synthetic oligonucleotide
cauccuuuuccaaggcuuu

SEQ ID NO: 2610279 - RNA, 19 nt, Artificial Sequence
  Description of Artificial Sequence: Synthetic oligonucleotide
augaaagcccugagcggaa

SEQ ID NO: 2610280 - RNA, 19 nt, Artificial Sequence
  Description of Artificial Sequence: Synthetic oligonucleotide
agcccugagcggaacuagu

SEQ ID NO: 2610281 - RNA, 19 nt, Artificial Sequence
  Description of Artificial Sequence: Synthetic oligonucleotide
gaaggcugccucgguagcu

SEQ ID NO: 2610282 - RNA, 19 nt, Artificial Sequence
  Description of Artificial Sequence: Synthetic oligonucleotide
gcuucuaaucccaggcaaa

SEQ ID NO: 2610283 - RNA, 19 nt, Artificial Sequence
  Description of Artificial Sequence: Synthetic oligonucleotide
ggggucguagacacuguca

SEQ ID NO: 2610284 - RNA, 19 nt, Artificial Sequence
  Description of Artificial Sequence: Synthetic oligonucleotide
ugucgcucuccugcccagu

SEQ ID NO: 2610285 - RNA, 19 nt, Artificial Sequence
  Description of Artificial Sequence: Synthetic oligonucleotide
ccagguacaaccacuuuau

SEQ ID NO: 2610286 - RNA, 19 nt, Artificial Sequence
  Description of Artificial Sequence: Synthetic oligonucleotide
cuccucuuguuugaaggcu

SEQ ID NO: 2610287 - RNA, 19 nt, Artificial Sequence
  Description of Artificial Sequence: Synthetic oligonucleotide
aggaacuggucugcagguu

SEQ ID NO: 2610288 - RNA, 19 nt, Artificial Sequence
  Description of Artificial Sequence: Synthetic oligonucleotide
ggucguagacacugucaaa

SEQ ID NO: 2610289 - RNA, 19 nt, Artificial Sequence
  Description of Artificial Sequence: Synthetic oligonucleotide
gggaagcuuuucgccaggc

SEQ ID NO: 2610290 - RNA, 19 nt, Artificial Sequence
  Description of Artificial Sequence: Synthetic oligonucleotide
caaccacuuuauggcagca

SEQ ID NO: 2610291 - RNA, 19 nt, Artificial Sequence
  Description of Artificial Sequence: Synthetic oligonucleotide
caagcagagcaugcacuaa

SEQ ID NO: 2610292 - RNA, 19 nt, Artificial Sequence
  Description of Artificial Sequence: Synthetic oligonucleotide
ccucauguucccagguaca

SEQ ID NO: 2610293 - RNA, 19 nt, Artificial Sequence
  Description of Artificial Sequence: Synthetic oligonucleotide
gcagacugucgcucuccug

SEQ ID NO: 2610294 - RNA, 19 nt, Artificial Sequence
  Description of Artificial Sequence: Synthetic oligonucleotide
cagagcagacugucgcucu

SEQ ID NO: 2610295 - RNA, 19 nt, Artificial Sequence
  Description of Artificial Sequence: Synthetic oligonucleotide
gaggcugggcacauccggu

SEQ ID NO: 2610296 - RNA, 19 nt, Artificial Sequence
  Description of Artificial Sequence: Synthetic oligonucleotide
caauggaugaggggucgua

SEQ ID NO: 2610297 - RNA, 19 nt, Artificial Sequence
  Description of Artificial Sequence: Synthetic oligonucleotide
cucgguagcugagcgggaa

SEQ ID NO: 2610298 - RNA, 19 nt, Artificial Sequence
  Description of Artificial Sequence: Synthetic oligonucleotide
ggcaagcagagcaugcacu

SEQ ID NO: 2610299 - RNA, 19 nt, Artificial Sequence
  Description of Artificial Sequence: Synthetic oligonucleotide
gcacauccggucagagaag

SEQ ID NO: 2610300 - RNA, 19 nt, Artificial Sequence
  Description of Artificial Sequence: Synthetic oligonucleotide
ugagggccccugugaggau

SEQ ID NO: 2610301 - RNA, 19 nt, Artificial Sequence
  Description of Artificial Sequence: Synthetic oligonucleotide
gggcacauccggucagaga

SEQ ID NO: 2610302 - RNA, 19 nt, Artificial Sequence
  Description of Artificial Sequence: Synthetic oligonucleotide
cuccgugagcagugaugca

SEQ ID NO: 2610303 - RNA, 19 nt, Artificial Sequence
  Description of Artificial Sequence: Synthetic oligonucleotide
ggcuuugauccgggccugg

SEQ ID NO: 2610304 - RNA, 19 nt, Artificial Sequence
  Description of Artificial Sequence: Synthetic oligonucleotide
gcauccuuuuccaaggcuu

SEQ ID NO: 2610305 - RNA, 19 nt, Artificial Sequence
  Description of Artificial Sequence: Synthetic oligonucleotide
uacugacagucagcuucua

SEQ ID NO: 2610306 - RNA, 19 nt, Artificial Sequence
  Description of Artificial Sequence: Synthetic oligonucleotide
cccaucgaagcccgucuuc

SEQ ID NO: 2610307 - RNA, 19 nt, Artificial Sequence
  Description of Artificial Sequence: Synthetic oligonucleotide
ggcagagcagacugucgcu

SEQ ID NO: 2610308 - RNA, 19 nt, Artificial Sequence
  Description of Artificial Sequence: Synthetic oligonucleotide
cgugcuguuccuccagcuc

SEQ ID NO: 2610309 - RNA, 19 nt, Artificial Sequence
  Description of Artificial Sequence: Synthetic oligonucleotide
cugugaggauaggcugguc

SEQ ID NO: 2610310 - RNA, 19 nt, Artificial Sequence
  Description of Artificial Sequence: Synthetic oligonucleotide
cugguuggcagagcagacu

SEQ ID NO: 2610311 - RNA, 19 nt, Artificial Sequence
  Description of Artificial Sequence: Synthetic oligonucleotide
augaggggucguagacacu

SEQ ID NO: 2610312 - RNA, 19 nt, Artificial Sequence
  Description of Artificial Sequence: Synthetic oligonucleotide
cgaagcccgucuucccagg

SEQ ID NO: 2610313 - RNA, 19 nt, Artificial Sequence
  Description of Artificial Sequence: Synthetic oligonucleotide
cgugagcagugaugcaaug

SEQ ID NO: 2610314 - RNA, 19 nt, Artificial Sequence
  Description of Artificial Sequence: Synthetic oligonucleotide
gccuggagcugcucauuga

SEQ ID NO: 2610315 - RNA, 19 nt, Artificial Sequence
  Description of Artificial Sequence: Synthetic oligonucleotide
agcugagcgggaagcuuuu

SEQ ID NO: 2610316 - RNA, 19 nt, Artificial Sequence
  Description of Artificial Sequence: Synthetic oligonucleotide
cggucagagaagccacaag

SEQ ID NO: 2610317 - RNA, 19 nt, Artificial Sequence
  Description of Artificial Sequence: Synthetic oligonucleotide
cgguagcugagcgggaagc

SEQ ID NO: 2610318 - RNA, 19 nt, Artificial Sequence
  Description of Artificial Sequence: Synthetic oligonucleotide
caaggacuagaugcuugcu

SEQ ID NO: 2610319 - RNA, 19 nt, Artificial Sequence
  Description of Artificial Sequence: Synthetic oligonucleotide
guagcugagcgggaagcuu

SEQ ID NO: 2610320 - RNA, 19 nt, Artificial Sequence
  Description of Artificial Sequence: Synthetic oligonucleotide
gcuugcuuucagaaccugu

SEQ ID NO: 2610321 - RNA, 19 nt, Artificial Sequence
  Description of Artificial Sequence: Synthetic oligonucleotide
gguuuccaucgaggcuggg

SEQ ID NO: 2610322 - RNA, 19 nt, Artificial Sequence
  Description of Artificial Sequence: Synthetic oligonucleotide
cugggcacauccggucaga

SEQ ID NO: 2610323 - RNA, 19 nt, Artificial Sequence
  Description of Artificial Sequence: Synthetic oligonucleotide
gguagcugagcgggaagcu

SEQ ID NO: 2610324 - RNA, 19 nt, Artificial Sequence
  Description of Artificial Sequence: Synthetic oligonucleotide
ggcccaucgaagcccgucu

SEQ ID NO: 2610325 - RNA, 19 nt, Artificial Sequence
  Description of Artificial Sequence: Synthetic oligonucleotide
ccagucacagagggcaaga

SEQ ID NO: 2610326 - RNA, 19 nt, Artificial Sequence
  Description of Artificial Sequence: Synthetic oligonucleotide
cggaacuaguucccaccac

SEQ ID NO: 2610327 - RNA, 19 nt, Artificial Sequence
  Description of Artificial Sequence: Synthetic oligonucleotide
gcuuugauccgggccugga

SEQ ID NO: 2610328 - RNA, 19 nt, Artificial Sequence
  Description of Artificial Sequence: Synthetic oligonucleotide
gaggggucguagacacugu

SEQ ID NO: 2610329 - RNA, 19 nt, Artificial Sequence
  Description of Artificial Sequence: Synthetic oligonucleotide
caucgaggcugggcacauc

SEQ ID NO: 2610330 - RNA, 19 nt, Artificial Sequence
  Description of Artificial Sequence: Synthetic oligonucleotide
ccuggagcugcucauugau

SEQ ID NO: 2610331 - RNA, 19 nt, Artificial Sequence
  Description of Artificial Sequence: Synthetic oligonucleotide
cagggcccacuuccugaga

SEQ ID NO: 2610332 - RNA, 19 nt, Artificial Sequence
  Description of Artificial Sequence: Synthetic oligonucleotide
ccuuaccaaggcccaucga

SEQ ID NO: 2610333 - RNA, 19 nt, Artificial Sequence
  Description of Artificial Sequence: Synthetic oligonucleotide
ccuuuuccaaggcuuugau

SEQ ID NO: 2610334 - RNA, 19 nt, Artificial Sequence
  Description of Artificial Sequence: Synthetic oligonucleotide
gggaucuguugguuuccau

SEQ ID NO: 2610335 - RNA, 19 nt, Artificial Sequence
  Description of Artificial Sequence: Synthetic oligonucleotide
gguuggcagagcagacugu

SEQ ID NO: 2610336 - RNA, 19 nt, Artificial Sequence
  Description of Artificial Sequence: Synthetic oligonucleotide
gcugagcgggaagcuuuuc

SEQ ID NO: 2610337 - RNA, 19 nt, Artificial Sequence
  Description of Artificial Sequence: Synthetic oligonucleotide
cgccaggcauccuuuucca

SEQ ID NO: 2610338 - RNA, 19 nt, Artificial Sequence
  Description of Artificial Sequence: Synthetic oligonucleotide
auccgggccuggagcugcu

SEQ ID NO: 2610339 - RNA, 19 nt, Artificial Sequence
  Description of Artificial Sequence: Synthetic oligonucleotide
ccggucagagaagccacaa

SEQ ID NO: 2610340 - RNA, 19 nt, Artificial Sequence
  Description of Artificial Sequence: Synthetic oligonucleotide
ccgugagcagugaugcaau

SEQ ID NO: 2610341 - RNA, 19 nt, Artificial Sequence
  Description of Artificial Sequence: Synthetic oligonucleotide
gcaauggaugaggggucgu

SEQ ID NO: 2610342 - RNA, 19 nt, Artificial Sequence
  Description of Artificial Sequence: Synthetic oligonucleotide
ccucgguagcugagcggga

SEQ ID NO: 2610343 - RNA, 19 nt, Artificial Sequence
  Description of Artificial Sequence: Synthetic oligonucleotide
gcucuccgugagcagugau

SEQ ID NO: 2610344 - RNA, 19 nt, Artificial Sequence
  Description of Artificial Sequence: Synthetic oligonucleotide
cccagucacuagggaagga

SEQ ID NO: 2610345 - RNA, 19 nt, Artificial Sequence
  Description of Artificial Sequence: Synthetic oligonucleotide
gcccugagcggaacuaguu

SEQ ID NO: 2610346 - RNA, 19 nt, Artificial Sequence
  Description of Artificial Sequence: Synthetic oligonucleotide
gcccaucgaagcccgucuu

SEQ ID NO: 2610347 - RNA, 19 nt, Artificial Sequence
  Description of Artificial Sequence: Synthetic oligonucleotide
gcuuuucgccaggcauccu

SEQ ID NO: 2610348 - RNA, 19 nt, Artificial Sequence
  Description of Artificial Sequence: Synthetic oligonucleotide
gcucuccugcccagucacu

SEQ ID NO: 2610349 - RNA, 19 nt, Artificial Sequence
  Description of Artificial Sequence: Synthetic oligonucleotide
ccaucgaggcugggcacau

SEQ ID NO: 2610350 - RNA, 19 nt, Artificial Sequence
  Description of Artificial Sequence: Synthetic oligonucleotide
ccaccuuaccaaggcccau

SEQ ID NO: 2610351 - RNA, 19 nt, Artificial Sequence
  Description of Artificial Sequence: Synthetic oligonucleotide
aauaauagugcauacggcc

SEQ ID NO: 2610352 - RNA, 19 nt, Artificial Sequence
  Description of Artificial Sequence: Synthetic oligonucleotide
aagacauugacacuaaggg

SEQ ID NO: 2610353 - RNA, 19 nt, Artificial Sequence
  Description of Artificial Sequence: Synthetic oligonucleotide
ucaauaauagugcauacgg

SEQ ID NO: 2610354 - RNA, 19 nt, Artificial Sequence
  Description of Artificial Sequence: Synthetic oligonucleotide
ucaugugucaauaauagug

SEQ ID NO: 2610355 - RNA, 19 nt, Artificial Sequence
  Description of Artificial Sequence: Synthetic oligonucleotide
aauagcuccauguccuucc

SEQ ID NO: 2610356 - RNA, 19 nt, Artificial Sequence
  Description of Artificial Sequence: Synthetic oligonucleotide
aguucgaaggcccuggggc

SEQ ID NO: 2610357 - RNA, 19 nt, Artificial Sequence
  Description of Artificial Sequence: Synthetic oligonucleotide
gacauugacacuaaggggc

SEQ ID NO: 2610358 - RNA, 19 nt, Artificial Sequence
  Description of Artificial Sequence: Synthetic oligonucleotide
ucaucuuccggcucuaggg

SEQ ID NO: 2610359 - RNA, 19 nt, Artificial Sequence
  Description of Artificial Sequence: Synthetic oligonucleotide
caugugucaauaauagugc

SEQ ID NO: 2610360 - RNA, 19 nt, Artificial Sequence
  Description of Artificial Sequence: Synthetic oligonucleotide
gaagacauugacacuaagg

SEQ ID NO: 2610361 - RNA, 19 nt, Artificial Sequence
  Description of Artificial Sequence: Synthetic oligonucleotide
agcagaccgaagcagacgc

SEQ ID NO: 2610362 - RNA, 19 nt, Artificial Sequence
  Description of Artificial Sequence: Synthetic oligonucleotide
acagugagugcuuagcagg

SEQ ID NO: 2610363 - RNA, 19 nt, Artificial Sequence
  Description of Artificial Sequence: Synthetic oligonucleotide
acgaaguagaggccgaagc

SEQ ID NO: 2610364 - RNA, 19 nt, Artificial Sequence
  Description of Artificial Sequence: Synthetic oligonucleotide
aacagugagugcuuagcag

SEQ ID NO: 2610365 - RNA, 19 nt, Artificial Sequence
  Description of Artificial Sequence: Synthetic oligonucleotide
auaauagugcauacggccc

SEQ ID NO: 2610366 - RNA, 19 nt, Artificial Sequence
  Description of Artificial Sequence: Synthetic oligonucleotide
aauagcaccaggagaauug

SEQ ID NO: 2610367 - RNA, 19 nt, Artificial Sequence
  Description of Artificial Sequence: Synthetic oligonucleotide
guucaugugucaauaauag

SEQ ID NO: 2610368 - RNA, 19 nt, Artificial Sequence
  Description of Artificial Sequence: Synthetic oligonucleotide
agcuccauguccuuccucg

SEQ ID NO: 2610369 - RNA, 19 nt, Artificial Sequence
  Description of Artificial Sequence: Synthetic oligonucleotide
ugugaagacauugacacua

SEQ ID NO: 2610370 - RNA, 19 nt, Artificial Sequence
  Description of Artificial Sequence: Synthetic oligonucleotide
ggagaauuggggcagaggc

SEQ ID NO: 2610371 - RNA, 19 nt, Artificial Sequence
  Description of Artificial Sequence: Synthetic oligonucleotide
caauaauagugcauacggc

SEQ ID NO: 2610372 - RNA, 19 nt, Artificial Sequence
  Description of Artificial Sequence: Synthetic oligonucleotide
gacacuaaggggcccgucg

SEQ ID NO: 2610373 - RNA, 19 nt, Artificial Sequence
  Description of Artificial Sequence: Synthetic oligonucleotide
augcugaugacuagcaggc

SEQ ID NO: 2610374 - RNA, 19 nt, Artificial Sequence
  Description of Artificial Sequence: Synthetic oligonucleotide
uccauguccuuccucgggg

SEQ ID NO: 2610375 - RNA, 19 nt, Artificial Sequence
  Description of Artificial Sequence: Synthetic oligonucleotide
caggcagugauccacacac

SEQ ID NO: 2610376 - RNA, 19 nt, Artificial Sequence
  Description of Artificial Sequence: Synthetic oligonucleotide
gucaauaauagugcauacg

SEQ ID NO: 2610377 - RNA, 19 nt, Artificial Sequence
  Description of Artificial Sequence: Synthetic oligonucleotide
uaauagugcauacggccca

SEQ ID NO: 2610378 - RNA, 19 nt, Artificial Sequence
  Description of Artificial Sequence: Synthetic oligonucleotide
ucggaugugugcauaggcc

SEQ ID NO: 2610379 - RNA, 19 nt, Artificial Sequence
  Description of Artificial Sequence: Synthetic oligonucleotide
cagugauccacacacgccc

SEQ ID NO: 2610380 - RNA, 19 nt, Artificial Sequence
  Description of Artificial Sequence: Synthetic oligonucleotide
ugcccagugcgccagaucu

SEQ ID NO: 2610381 - RNA, 19 nt, Artificial Sequence
  Description of Artificial Sequence: Synthetic oligonucleotide
ucuagggugcugcugcgag

SEQ ID NO: 2610382 - RNA, 19 nt, Artificial Sequence
  Description of Artificial Sequence: Synthetic oligonucleotide
agcucucgggguuagcucg

SEQ ID NO: 2610383 - RNA, 19 nt, Artificial Sequence
  Description of Artificial Sequence: Synthetic oligonucleotide
uagugcauacggcccagcg

SEQ ID NO: 2610384 - RNA, 19 nt, Artificial Sequence
  Description of Artificial Sequence: Synthetic oligonucleotide
ugugucaauaauagugcau

SEQ ID NO: 2610385 - RNA, 19 nt, Artificial Sequence
  Description of Artificial Sequence: Synthetic oligonucleotide
gauucgcucacgcuccucc

SEQ ID NO: 2610386 - RNA, 19 nt, Artificial Sequence
  Description of Artificial Sequence: Synthetic oligonucleotide
uugcugaauagcuccaugu

SEQ ID NO: 2610387 - RNA, 19 nt, Artificial Sequence
  Description of Artificial Sequence: Synthetic oligonucleotide
uccgcugaugugaagacau

SEQ ID NO: 2610388 - RNA, 19 nt, Artificial Sequence
  Description of Artificial Sequence: Synthetic oligonucleotide
ggcagaggcaguucgaagg

SEQ ID NO: 2610389 - RNA, 19 nt, Artificial Sequence
  Description of Artificial Sequence: Synthetic oligonucleotide
ugaagacauugacacuaag

SEQ ID NO: 2610390 - RNA, 19 nt, Artificial Sequence
  Description of Artificial Sequence: Synthetic oligonucleotide
ugucaauaauagugcauac

SEQ ID NO: 2610391 - RNA, 19 nt, Artificial Sequence
  Description of Artificial Sequence: Synthetic oligonucleotide
ucuuccgcugaugugaaga

SEQ ID NO: 2610392 - RNA, 19 nt, Artificial Sequence
  Description of Artificial Sequence: Synthetic oligonucleotide
ucgggguuagcucggaugu

SEQ ID NO: 2610393 - RNA, 19 nt, Artificial Sequence
  Description of Artificial Sequence: Synthetic oligonucleotide
uccacacacgcccaauagc

SEQ ID NO: 2610394 - RNA, 19 nt, Artificial Sequence
  Description of Artificial Sequence: Synthetic oligonucleotide
aagcucucgggguuagcuc

SEQ ID NO: 2610395 - RNA, 19 nt, Artificial Sequence
  Description of Artificial Sequence: Synthetic oligonucleotide
gugcauacggcccagcgug

SEQ ID NO: 2610396 - RNA, 19 nt, Artificial Sequence
  Description of Artificial Sequence: Synthetic oligonucleotide
cccagcacgaaguagaggc

SEQ ID NO: 2610397 - RNA, 19 nt, Artificial Sequence
  Description of Artificial Sequence: Synthetic oligonucleotide
agaggcaguucgaaggccc

SEQ ID NO: 2610398 - RNA, 19 nt, Artificial Sequence
  Description of Artificial Sequence: Synthetic oligonucleotide
agugcgccagaucucccgc

SEQ ID NO: 2610399 - RNA, 19 nt, Artificial Sequence
  Description of Artificial Sequence: Synthetic oligonucleotide
uuagcaggcagugauccac

SEQ ID NO: 2610400 - RNA, 19 nt, Artificial Sequence
  Description of Artificial Sequence: Synthetic oligonucleotide
uaggccgccaggcuguugc

SEQ ID NO: 2610401 - RNA, 19 nt, Artificial Sequence
  Description of Artificial Sequence: Synthetic oligonucleotide
gauugugccaguacccagc

SEQ ID NO: 2610402 - RNA, 19 nt, Artificial Sequence
  Description of Artificial Sequence: Synthetic oligonucleotide
auugacacuaaggggcccg

SEQ ID NO: 2610403 - RNA, 19 nt, Artificial Sequence
  Description of Artificial Sequence: Synthetic oligonucleotide
uucaugugucaauaauagu

SEQ ID NO: 2610404 - RNA, 19 nt, Artificial Sequence
  Description of Artificial Sequence: Synthetic oligonucleotide
uauccuuuucccacccaca

SEQ ID NO: 2610405 - RNA, 19 nt, Artificial Sequence
  Description of Artificial Sequence: Synthetic oligonucleotide
ugcugaauagcuccauguc

SEQ ID NO: 2610406 - RNA, 19 nt, Artificial Sequence
  Description of Artificial Sequence: Synthetic oligonucleotide
acacuaaggggcccgucgg

SEQ ID NO: 2610407 - RNA, 19 nt, Artificial Sequence
  Description of Artificial Sequence: Synthetic oligonucleotide
gaaggugggaccugguauc

SEQ ID NO: 2610408 - RNA, 19 nt, Artificial Sequence
  Description of Artificial Sequence: Synthetic oligonucleotide
gaacagugagugcuuagca

SEQ ID NO: 2610409 - RNA, 19 nt, Artificial Sequence
  Description of Artificial Sequence: Synthetic oligonucleotide
gcugaauagcuccaugucc

SEQ ID NO: 2610410 - RNA, 19 nt, Artificial Sequence
  Description of Artificial Sequence: Synthetic oligonucleotide
ucaucagggcccagccucg

SEQ ID NO: 2610411 - RNA, 19 nt, Artificial Sequence
  Description of Artificial Sequence: Synthetic oligonucleotide
augugucaauaauagugca

SEQ ID NO: 2610412 - RNA, 19 nt, Artificial Sequence
  Description of Artificial Sequence: Synthetic oligonucleotide
cucggaugugugcauaggc

SEQ ID NO: 2610413 - RNA, 19 nt, Artificial Sequence
  Description of Artificial Sequence: Synthetic oligonucleotide
aauagugcauacggcccag

SEQ ID NO: 2610414 - RNA, 19 nt, Artificial Sequence
  Description of Artificial Sequence: Synthetic oligonucleotide
auccacacacgcccaauag

SEQ ID NO: 2610415 - RNA, 19 nt, Artificial Sequence
  Description of Artificial Sequence: Synthetic oligonucleotide
gaccugguauccuuuuccc

SEQ ID NO: 2610416 - RNA, 19 nt, Artificial Sequence
  Description of Artificial Sequence: Synthetic oligonucleotide
gguccagggacgcagcucg

SEQ ID NO: 2610417 - RNA, 19 nt, Artificial Sequence
  Description of Artificial Sequence: Synthetic oligonucleotide
caggauucgcucacgcucc

SEQ ID NO: 2610418 - RNA, 19 nt, Artificial Sequence
  Description of Artificial Sequence: Synthetic oligonucleotide
acuaaggggcccgucgggc

SEQ ID NO: 2610419 - RNA, 19 nt, Artificial Sequence
  Description of Artificial Sequence: Synthetic oligonucleotide
cauccaugguccagggacg

SEQ ID NO: 2610420 - RNA, 19 nt, Artificial Sequence
  Description of Artificial Sequence: Synthetic oligonucleotide
uagaggccgaagcucucgg

SEQ ID NO: 2610421 - RNA, 19 nt, Artificial Sequence
  Description of Artificial Sequence: Synthetic oligonucleotide
agaugcugaugacuagcag

SEQ ID NO: 2610422 - RNA, 19 nt, Artificial Sequence
  Description of Artificial Sequence: Synthetic oligonucleotide
gaaguagaggccgaagcuc

SEQ ID NO: 2610423 - RNA, 19 nt, Artificial Sequence
  Description of Artificial Sequence: Synthetic oligonucleotide
guugcugaauagcuccaug

SEQ ID NO: 2610424 - RNA, 19 nt, Artificial Sequence
  Description of Artificial Sequence: Synthetic oligonucleotide
ugguauccuuuucccaccc

SEQ ID NO: 2610425 - RNA, 19 nt, Artificial Sequence
  Description of Artificial Sequence: Synthetic oligonucleotide
cagggucagcagcagaccg

SEQ ID NO: 2610426 - RNA, 19 nt, Artificial Sequence
  Description of Artificial Sequence: Synthetic oligonucleotide
cugguauccuuuucccacc

SEQ ID NO: 2610427 - RNA, 19 nt, Artificial Sequence
  Description of Artificial Sequence: Synthetic oligonucleotide
agugcauacggcccagcgu

SEQ ID NO: 2610428 - RNA, 19 nt, Artificial Sequence
  Description of Artificial Sequence: Synthetic oligonucleotide
gagcgugucaucagggccc

SEQ ID NO: 2610429 - RNA, 19 nt, Artificial Sequence
  Description of Artificial Sequence: Synthetic oligonucleotide
ugcccagugaacagugagu

SEQ ID NO: 2610430 - RNA, 19 nt, Artificial Sequence
  Description of Artificial Sequence: Synthetic oligonucleotide
gacuagcaggcacaggguc

SEQ ID NO: 2610431 - RNA, 19 nt, Artificial Sequence
  Description of Artificial Sequence: Synthetic oligonucleotide
caggcuguugcugaauagc

SEQ ID NO: 2610432 - RNA, 19 nt, Artificial Sequence
  Description of Artificial Sequence: Synthetic oligonucleotide
gacgcagcucgccugucag

SEQ ID NO: 2610433 - RNA, 19 nt, Artificial Sequence
  Description of Artificial Sequence: Synthetic oligonucleotide
cagaucucccgcaggauuc

SEQ ID NO: 2610434 - RNA, 19 nt, Artificial Sequence
  Description of Artificial Sequence: Synthetic oligonucleotide
ugagugcuuagcaggcagu

SEQ ID NO: 2610435 - RNA, 19 nt, Artificial Sequence
  Description of Artificial Sequence: Synthetic oligonucleotide
auugugccaguacccagca

SEQ ID NO: 2610436 - RNA, 19 nt, Artificial Sequence
  Description of Artificial Sequence: Synthetic oligonucleotide
ggcagugauccacacacgc

SEQ ID NO: 2610437 - RNA, 19 nt, Artificial Sequence
  Description of Artificial Sequence: Synthetic oligonucleotide
ugacuagcaggcacagggu

SEQ ID NO: 2610438 - RNA, 19 nt, Artificial Sequence
  Description of Artificial Sequence: Synthetic oligonucleotide
guuagcucggaugugugca

SEQ ID NO: 2610439 - RNA, 19 nt, Artificial Sequence
  Description of Artificial Sequence: Synthetic oligonucleotide
cucgggguuagcucggaug

SEQ ID NO: 2610440 - RNA, 19 nt, Artificial Sequence
  Description of Artificial Sequence: Synthetic oligonucleotide
cugaauagcuccauguccu

SEQ ID NO: 2610441 - RNA, 19 nt, Artificial Sequence
  Description of Artificial Sequence: Synthetic oligonucleotide
gugucaauaauagugcaua

SEQ ID NO: 2610442 - RNA, 19 nt, Artificial Sequence
  Description of Artificial Sequence: Synthetic oligonucleotide
ugcgccagaucucccgcag

SEQ ID NO: 2610443 - RNA, 19 nt, Artificial Sequence
  Description of Artificial Sequence: Synthetic oligonucleotide
ugugugcauaggccgccag

SEQ ID NO: 2610444 - RNA, 19 nt, Artificial Sequence
  Description of Artificial Sequence: Synthetic oligonucleotide
cagcacgaaguagaggccg

SEQ ID NO: 2610445 - RNA, 19 nt, Artificial Sequence
  Description of Artificial Sequence: Synthetic oligonucleotide
ucaugguguccucauccuc

SEQ ID NO: 2610446 - RNA, 19 nt, Artificial Sequence
  Description of Artificial Sequence: Synthetic oligonucleotide
aucuuccggcucuagggug

SEQ ID NO: 2610447 - RNA, 19 nt, Artificial Sequence
  Description of Artificial Sequence: Synthetic oligonucleotide
gaugugugcauaggccgcc

SEQ ID NO: 2610448 - RNA, 19 nt, Artificial Sequence
  Description of Artificial Sequence: Synthetic oligonucleotide
cucacgcuccuccagccgc

SEQ ID NO: 2610449 - RNA, 19 nt, Artificial Sequence
  Description of Artificial Sequence: Synthetic oligonucleotide
cuuccgcugaugugaagac

SEQ ID NO: 2610450 - RNA, 19 nt, Artificial Sequence
  Description of Artificial Sequence: Synthetic oligonucleotide
gugucaucagggcccagcc

SEQ ID NO: 2610451 - RNA, 19 nt, Artificial Sequence
  Description of Artificial Sequence: Synthetic oligonucleotide
ccugguauccuuuucccac

SEQ ID NO: 2610452 - RNA, 19 nt, Artificial Sequence
  Description of Artificial Sequence: Synthetic oligonucleotide
auccaugguccagggacgc

SEQ ID NO: 2610453 - RNA, 19 nt, Artificial Sequence
  Description of Artificial Sequence: Synthetic oligonucleotide
cagaccgaagcagacgccc

SEQ ID NO: 2610454 - RNA, 19 nt, Artificial Sequence
  Description of Artificial Sequence: Synthetic oligonucleotide
cuccauguccuuccucggg

SEQ ID NO: 2610455 - RNA, 19 nt, Artificial Sequence
  Description of Artificial Sequence: Synthetic oligonucleotide
aggagaauuggggcagagg

SEQ ID NO: 2610456 - RNA, 19 nt, Artificial Sequence
  Description of Artificial Sequence: Synthetic oligonucleotide
agaggccgaagcucucggg

SEQ ID NO: 2610457 - RNA, 19 nt, Artificial Sequence
  Description of Artificial Sequence: Synthetic oligonucleotide
gaugacuagcaggcacagg

SEQ ID NO: 2610458 - RNA, 19 nt, Artificial Sequence
  Description of Artificial Sequence: Synthetic oligonucleotide
augugaagacauugacacu

SEQ ID NO: 2610459 - RNA, 19 nt, Artificial Sequence
  Description of Artificial Sequence: Synthetic oligonucleotide
ggagcgugucaucagggcc

SEQ ID NO: 2610460 - RNA, 19 nt, Artificial Sequence
  Description of Artificial Sequence: Synthetic oligonucleotide
gcugaugacuagcaggcac

SEQ ID NO: 2610461 - RNA, 19 nt, Artificial Sequence
  Description of Artificial Sequence: Synthetic oligonucleotide
gugguuccgggcccgauug

SEQ ID NO: 2610462 - RNA, 19 nt, Artificial Sequence
  Description of Artificial Sequence: Synthetic oligonucleotide
cagugcgccagaucucccg

SEQ ID NO: 2610463 - RNA, 19 nt, Artificial Sequence
  Description of Artificial Sequence: Synthetic oligonucleotide
gaccgaagcagacgcccag

SEQ ID NO: 2610464 - RNA, 19 nt, Artificial Sequence
  Description of Artificial Sequence: Synthetic oligonucleotide
cuagcaggcacagggucag

SEQ ID NO: 2610465 - RNA, 19 nt, Artificial Sequence
  Description of Artificial Sequence: Synthetic oligonucleotide
gcaggauucgcucacgcuc

SEQ ID NO: 2610466 - RNA, 19 nt, Artificial Sequence
  Description of Artificial Sequence: Synthetic oligonucleotide
acccagcaggucuggcugc

SEQ ID NO: 2610467 - RNA, 19 nt, Artificial Sequence
  Description of Artificial Sequence: Synthetic oligonucleotide
ggcucuagggugcugcugc

SEQ ID NO: 2610468 - RNA, 19 nt, Artificial Sequence
  Description of Artificial Sequence: Synthetic oligonucleotide
cuagggugcugcugcgagg

SEQ ID NO: 2610469 - RNA, 19 nt, Artificial Sequence
  Description of Artificial Sequence: Synthetic oligonucleotide
uuccgggcccgauugugcc

SEQ ID NO: 2610470 - RNA, 19 nt, Artificial Sequence
  Description of Artificial Sequence: Synthetic oligonucleotide
gagaugcugaugacuagca

SEQ ID NO: 2610471 - RNA, 19 nt, Artificial Sequence
  Description of Artificial Sequence: Synthetic oligonucleotide
caugcugcgguucaugugu

SEQ ID NO: 2610472 - RNA, 19 nt, Artificial Sequence
  Description of Artificial Sequence: Synthetic oligonucleotide
ggagaugcugaugacuagc

SEQ ID NO: 2610473 - RNA, 19 nt, Artificial Sequence
  Description of Artificial Sequence: Synthetic oligonucleotide
ugcuuagcaggcagugauc

SEQ ID NO: 2610474 - RNA, 19 nt, Artificial Sequence
  Description of Artificial Sequence: Synthetic oligonucleotide
cagcucgccugucagcccg

SEQ ID NO: 2610475 - RNA, 19 nt, Artificial Sequence
  Description of Artificial Sequence: Synthetic oligonucleotide
gcaccaggagaauuggggc

SEQ ID NO: 2610476 - RNA, 19 nt, Artificial Sequence
  Description of Artificial Sequence: Synthetic oligonucleotide
gcuuagcaggcagugaucc

SEQ ID NO: 2610477 - RNA, 19 nt, Artificial Sequence
  Description of Artificial Sequence: Synthetic oligonucleotide
aguacccagcaggucuggc

SEQ ID NO: 2610478 - RNA, 19 nt, Artificial Sequence
  Description of Artificial Sequence: Synthetic oligonucleotide
ugcgguucaugugucaaua

SEQ ID NO: 2610479 - RNA, 19 nt, Artificial Sequence
  Description of Artificial Sequence: Synthetic oligonucleotide
accugguauccuuuuccca

SEQ ID NO: 2610480 - RNA, 19 nt, Artificial Sequence
  Description of Artificial Sequence: Synthetic oligonucleotide
gagaauuggggcagaggca

SEQ ID NO: 2610481 - RNA, 19 nt, Artificial Sequence
  Description of Artificial Sequence: Synthetic oligonucleotide
auagugcauacggcccagc

SEQ ID NO: 2610482 - RNA, 19 nt, Artificial Sequence
  Description of Artificial Sequence: Synthetic oligonucleotide
cccaauagcaccaggagaa

SEQ ID NO: 2610483 - RNA, 19 nt, Artificial Sequence
  Description of Artificial Sequence: Synthetic oligonucleotide
ucgggcucaguggacagcu

SEQ ID NO: 2610484 - RNA, 19 nt, Artificial Sequence
  Description of Artificial Sequence: Synthetic oligonucleotide
auacggcccagcgugcccg

SEQ ID NO: 2610485 - RNA, 19 nt, Artificial Sequence
  Description of Artificial Sequence: Synthetic oligonucleotide
uccggcucuagggugcugc

SEQ ID NO: 2610486 - RNA, 19 nt, Artificial Sequence
  Description of Artificial Sequence: Synthetic oligonucleotide
ugcauacggcccagcgugc

SEQ ID NO: 2610487 - RNA, 19 nt, Artificial Sequence
  Description of Artificial Sequence: Synthetic oligonucleotide
gaauagcuccauguccuuc

SEQ ID NO: 2610488 - RNA, 19 nt, Artificial Sequence
  Description of Artificial Sequence: Synthetic oligonucleotide
caugguccagggacgcagc

SEQ ID NO: 2610489 - RNA, 19 nt, Artificial Sequence
  Description of Artificial Sequence: Synthetic oligonucleotide
uuagcucggaugugugcau

SEQ ID NO: 2610490 - RNA, 19 nt, Artificial Sequence
  Description of Artificial Sequence: Synthetic oligonucleotide
acuagcaggcacaggguca

SEQ ID NO: 2610491 - RNA, 19 nt, Artificial Sequence
  Description of Artificial Sequence: Synthetic oligonucleotide
cacacacgcccaauagcac

SEQ ID NO: 2610492 - RNA, 19 nt, Artificial Sequence
  Description of Artificial Sequence: Synthetic oligonucleotide
ugggcucagucccgugucc

SEQ ID NO: 2610493 - RNA, 19 nt, Artificial Sequence
  Description of Artificial Sequence: Synthetic oligonucleotide
cacuaaggggcccgucggg

SEQ ID NO: 2610494 - RNA, 19 nt, Artificial Sequence
  Description of Artificial Sequence: Synthetic oligonucleotide
aagcagacgcccagcacga

SEQ ID NO: 2610495 - RNA, 19 nt, Artificial Sequence
  Description of Artificial Sequence: Synthetic oligonucleotide
ugaauagcuccauguccuu

SEQ ID NO: 2610496 - RNA, 19 nt, Artificial Sequence
  Description of Artificial Sequence: Synthetic oligonucleotide
auagcuccauguccuuccu

SEQ ID NO: 2610497 - RNA, 19 nt, Artificial Sequence
  Description of Artificial Sequence: Synthetic oligonucleotide
cuuccucggggcauccaug

SEQ ID NO: 2610498 - RNA, 19 nt, Artificial Sequence
  Description of Artificial Sequence: Synthetic oligonucleotide
gguuagcucggaugugugc

SEQ ID NO: 2610499 - RNA, 19 nt, Artificial Sequence
  Description of Artificial Sequence: Synthetic oligonucleotide
ugugguuccgggcccgauu

SEQ ID NO: 2610500 - RNA, 19 nt, Artificial Sequence
  Description of Artificial Sequence: Synthetic oligonucleotide
aggcuguugcugaauagcu

SEQ ID NO: 2610501 - RNA, 19 nt, Artificial Sequence
  Description of Artificial Sequence: Synthetic oligonucleotide
ucccguguccaugcugcgg

SEQ ID NO: 2610502 - RNA, 19 nt, Artificial Sequence
  Description of Artificial Sequence: Synthetic oligonucleotide
gguucaugugucaauaaua

SEQ ID NO: 2610503 - RNA, 19 nt, Artificial Sequence
  Description of Artificial Sequence: Synthetic oligonucleotide
cacacgcccaauagcacca

SEQ ID NO: 2610504 - RNA, 19 nt, Artificial Sequence
  Description of Artificial Sequence: Synthetic oligonucleotide
uugugccaguacccagcag

SEQ ID NO: 2610505 - RNA, 19 nt, Artificial Sequence
  Description of Artificial Sequence: Synthetic oligonucleotide
gauccacacacgcccaaua

SEQ ID NO: 2610506 - RNA, 19 nt, Artificial Sequence
  Description of Artificial Sequence: Synthetic oligonucleotide
uuccgcugaugugaagaca

SEQ ID NO: 2610507 - RNA, 19 nt, Artificial Sequence
  Description of Artificial Sequence: Synthetic oligonucleotide
uaaggggcccgucgggcuc

SEQ ID NO: 2610508 - RNA, 19 nt, Artificial Sequence
  Description of Artificial Sequence: Synthetic oligonucleotide
cagcagaccgaagcagacg

SEQ ID NO: 2610509 - RNA, 19 nt, Artificial Sequence
  Description of Artificial Sequence: Synthetic oligonucleotide
cauacggcccagcgugccc

SEQ ID NO: 2610510 - RNA, 19 nt, Artificial Sequence
  Description of Artificial Sequence: Synthetic oligonucleotide
gggcucaguggacagcucc

SEQ ID NO: 2610511 - RNA, 19 nt, Artificial Sequence
  Description of Artificial Sequence: Synthetic oligonucleotide
gagaaggugggaccuggua

SEQ ID NO: 2610512 - RNA, 19 nt, Artificial Sequence
  Description of Artificial Sequence: Synthetic oligonucleotide
auucgcucacgcuccucca

SEQ ID NO: 2610513 - RNA, 19 nt, Artificial Sequence
  Description of Artificial Sequence: Synthetic oligonucleotide
gaagcucucgggguuagcu

SEQ ID NO: 2610514 - RNA, 19 nt, Artificial Sequence
  Description of Artificial Sequence: Synthetic oligonucleotide
gcccagugaacagugagug

SEQ ID NO: 2610515 - RNA, 19 nt, Artificial Sequence
  Description of Artificial Sequence: Synthetic oligonucleotide
agugcuuagcaggcaguga

SEQ ID NO: 2610516 - RNA, 19 nt, Artificial Sequence
  Description of Artificial Sequence: Synthetic oligonucleotide
cacgaaguagaggccgaag

SEQ ID NO: 2610517 - RNA, 19 nt, Artificial Sequence
  Description of Artificial Sequence: Synthetic oligonucleotide
gcccgauugugccaguacc

SEQ ID NO: 2610518 - RNA, 19 nt, Artificial Sequence
  Description of Artificial Sequence: Synthetic oligonucleotide
cccgauugugccaguaccc

SEQ ID NO: 2610519 - RNA, 19 nt, Artificial Sequence
  Description of Artificial Sequence: Synthetic oligonucleotide
agccucgucaugguguccu

SEQ ID NO: 2610520 - RNA, 19 nt, Artificial Sequence
  Description of Artificial Sequence: Synthetic oligonucleotide
ggcaguucgaaggcccugg

SEQ ID NO: 2610521 - RNA, 19 nt, Artificial Sequence
  Description of Artificial Sequence: Synthetic oligonucleotide
aucagggcccagccucguc

SEQ ID NO: 2610522 - RNA, 19 nt, Artificial Sequence
  Description of Artificial Sequence: Synthetic oligonucleotide
ucgucaugguguccucauc

SEQ ID NO: 2610523 - RNA, 19 nt, Artificial Sequence
  Description of Artificial Sequence: Synthetic oligonucleotide
gugcuuagcaggcagugau

SEQ ID NO: 2610524 - RNA, 19 nt, Artificial Sequence
  Description of Artificial Sequence: Synthetic oligonucleotide
gcagcacugggcucagucc

SEQ ID NO: 2610525 - RNA, 19 nt, Artificial Sequence
  Description of Artificial Sequence: Synthetic oligonucleotide
gcugaugugaagacauuga

SEQ ID NO: 2610526 - RNA, 19 nt, Artificial Sequence
  Description of Artificial Sequence: Synthetic oligonucleotide
ugcugcgguucauguguca

SEQ ID NO: 2610527 - RNA, 19 nt, Artificial Sequence
  Description of Artificial Sequence: Synthetic oligonucleotide
gcgcaggagaugcugauga

SEQ ID NO: 2610528 - RNA, 19 nt, Artificial Sequence
  Description of Artificial Sequence: Synthetic oligonucleotide
cacgcccaauagcaccagg

SEQ ID NO: 2610529 - RNA, 19 nt, Artificial Sequence
  Description of Artificial Sequence: Synthetic oligonucleotide
uccagggacgcagcucgcc

SEQ ID NO: 2610530 - RNA, 19 nt, Artificial Sequence
  Description of Artificial Sequence: Synthetic oligonucleotide
acgcccaauagcaccagga

SEQ ID NO: 2610531 - RNA, 19 nt, Artificial Sequence
  Description of Artificial Sequence: Synthetic oligonucleotide
ggaugugugcauaggccgc

SEQ ID NO: 2610532 - RNA, 19 nt, Artificial Sequence
  Description of Artificial Sequence: Synthetic oligonucleotide
agugagugcuuagcaggca

SEQ ID NO: 2610533 - RNA, 19 nt, Artificial Sequence
  Description of Artificial Sequence: Synthetic oligonucleotide
cuuagcaggcagugaucca

SEQ ID NO: 2610534 - RNA, 19 nt, Artificial Sequence
  Description of Artificial Sequence: Synthetic oligonucleotide
agcacugggcucagucccg

SEQ ID NO: 2610535 - RNA, 19 nt, Artificial Sequence
  Description of Artificial Sequence: Synthetic oligonucleotide
agugauccacacacgccca

SEQ ID NO: 2610536 - RNA, 19 nt, Artificial Sequence
  Description of Artificial Sequence: Synthetic oligonucleotide
agugaacagugagugcuua

SEQ ID NO: 2610537 - RNA, 19 nt, Artificial Sequence
  Description of Artificial Sequence: Synthetic oligonucleotide
cuguugcugaauagcucca

SEQ ID NO: 2610538 - RNA, 19 nt, Artificial Sequence
  Description of Artificial Sequence: Synthetic oligonucleotide
ugcugaugacuagcaggca

SEQ ID NO: 2610539 - RNA, 19 nt, Artificial Sequence
  Description of Artificial Sequence: Synthetic oligonucleotide
gcugcugcgagggucccgg

SEQ ID NO: 2610540 - RNA, 19 nt, Artificial Sequence
  Description of Artificial Sequence: Synthetic oligonucleotide
ugauccacacacgcccaau

SEQ ID NO: 2610541 - RNA, 19 nt, Artificial Sequence
  Description of Artificial Sequence: Synthetic oligonucleotide
guuccgggcccgauugugc

SEQ ID NO: 2610542 - RNA, 19 nt, Artificial Sequence
  Description of Artificial Sequence: Synthetic oligonucleotide
cagggacgcagcucgccug

SEQ ID NO: 2610543 - RNA, 19 nt, Artificial Sequence
  Description of Artificial Sequence: Synthetic oligonucleotide
gcagugauccacacacgcc

SEQ ID NO: 2610544 - RNA, 19 nt, Artificial Sequence
  Description of Artificial Sequence: Synthetic oligonucleotide
accugcccagugaacagug

SEQ ID NO: 2610545 - RNA, 19 nt, Artificial Sequence
  Description of Artificial Sequence: Synthetic oligonucleotide
uugacacuaaggggcccgu

SEQ ID NO: 2610546 - RNA, 19 nt, Artificial Sequence
  Description of Artificial Sequence: Synthetic oligonucleotide
gcuccauguccuuccucgg

SEQ ID NO: 2610547 - RNA, 19 nt, Artificial Sequence
  Description of Artificial Sequence: Synthetic oligonucleotide
caggagaauuggggcagag

SEQ ID NO: 2610548 - RNA, 19 nt, Artificial Sequence
  Description of Artificial Sequence: Synthetic oligonucleotide
ggcccgucgggcucagugg

SEQ ID NO: 2610549 - RNA, 19 nt, Artificial Sequence
  Description of Artificial Sequence: Synthetic oligonucleotide
ugggaccugguauccuuuu

SEQ ID NO: 2610550 - RNA, 19 nt, Artificial Sequence
  Description of Artificial Sequence: Synthetic oligonucleotide
gccaguacccagcaggucu

SEQ ID NO: 2610551 - RNA, 19 nt, Artificial Sequence
  Description of Artificial Sequence: Synthetic oligonucleotide
uccucggggcauccauggu

SEQ ID NO: 2610552 - RNA, 19 nt, Artificial Sequence
  Description of Artificial Sequence: Synthetic oligonucleotide
aggcagugauccacacacg

SEQ ID NO: 2610553 - RNA, 19 nt, Artificial Sequence
  Description of Artificial Sequence: Synthetic oligonucleotide
gucccguguccaugcugcg

SEQ ID NO: 2610554 - RNA, 19 nt, Artificial Sequence
  Description of Artificial Sequence: Synthetic oligonucleotide
cagucccguguccaugcug

SEQ ID NO: 2610555 - RNA, 19 nt, Artificial Sequence
  Description of Artificial Sequence: Synthetic oligonucleotide
gucaugguguccucauccu

SEQ ID NO: 2610556 - RNA, 19 nt, Artificial Sequence
  Description of Artificial Sequence: Synthetic oligonucleotide
ccuuuucccacccacaccu

SEQ ID NO: 2610557 - RNA, 19 nt, Artificial Sequence
  Description of Artificial Sequence: Synthetic oligonucleotide
gcaguucgaaggcccuggg

SEQ ID NO: 2610558 - RNA, 19 nt, Artificial Sequence
  Description of Artificial Sequence: Synthetic oligonucleotide
gaucucccgcaggauucgc

SEQ ID NO: 2610559 - RNA, 19 nt, Artificial Sequence
  Description of Artificial Sequence: Synthetic oligonucleotide
uccgggcccgauugugcca

SEQ ID NO: 2610560 - RNA, 19 nt, Artificial Sequence
  Description of Artificial Sequence: Synthetic oligonucleotide
ucucgggguuagcucggau

SEQ ID NO: 2610561 - RNA, 19 nt, Artificial Sequence
  Description of Artificial Sequence: Synthetic oligonucleotide
guacccagcaggucuggcu

SEQ ID NO: 2610562 - RNA, 19 nt, Artificial Sequence
  Description of Artificial Sequence: Synthetic oligonucleotide
ccaggcuguugcugaauag

SEQ ID NO: 2610563 - RNA, 19 nt, Artificial Sequence
  Description of Artificial Sequence: Synthetic oligonucleotide
cagacgcccagcacgaagu

SEQ ID NO: 2610564 - RNA, 19 nt, Artificial Sequence
  Description of Artificial Sequence: Synthetic oligonucleotide
guccaugcugcgguucaug

SEQ ID NO: 2610565 - RNA, 19 nt, Artificial Sequence
  Description of Artificial Sequence: Synthetic oligonucleotide
cucuuccgcugaugugaag

SEQ ID NO: 2610566 - RNA, 19 nt, Artificial Sequence
  Description of Artificial Sequence: Synthetic oligonucleotide
caggucuggcugcccagug

SEQ ID NO: 2610567 - RNA, 19 nt, Artificial Sequence
  Description of Artificial Sequence: Synthetic oligonucleotide
cauguccuuccucggggca

SEQ ID NO: 2610568 - RNA, 19 nt, Artificial Sequence
  Description of Artificial Sequence: Synthetic oligonucleotide
ggggccgcgagcgaggcgc

SEQ ID NO: 2610569 - RNA, 19 nt, Artificial Sequence
  Description of Artificial Sequence: Synthetic oligonucleotide
ugcugcugcgagggucccg

SEQ ID NO: 2610570 - RNA, 19 nt, Artificial Sequence
  Description of Artificial Sequence: Synthetic oligonucleotide
augcugcgguucauguguc

SEQ ID NO: 2610571 - RNA, 19 nt, Artificial Sequence
  Description of Artificial Sequence: Synthetic oligonucleotide
gugaagacauugacacuaa

SEQ ID NO: 2610572 - RNA, 19 nt, Artificial Sequence
  Description of Artificial Sequence: Synthetic oligonucleotide
gcucuagggugcugcugcg

SEQ ID NO: 2610573 - RNA, 19 nt, Artificial Sequence
  Description of Artificial Sequence: Synthetic oligonucleotide
ugguuccgggcccgauugu

SEQ ID NO: 2610574 - RNA, 19 nt, Artificial Sequence
  Description of Artificial Sequence: Synthetic oligonucleotide
ggucccggcgcggagcagg

SEQ ID NO: 2610575 - RNA, 19 nt, Artificial Sequence
  Description of Artificial Sequence: Synthetic oligonucleotide
ugguccagggacgcagcuc

SEQ ID NO: 2610576 - RNA, 19 nt, Artificial Sequence
  Description of Artificial Sequence: Synthetic oligonucleotide
gggcccgucgggcucagug

SEQ ID NO: 2610577 - RNA, 19 nt, Artificial Sequence
  Description of Artificial Sequence: Synthetic oligonucleotide
ccauguccuuccucggggc

SEQ ID NO: 2610578 - RNA, 19 nt, Artificial Sequence
  Description of Artificial Sequence: Synthetic oligonucleotide
ccaguacccagcaggucug

SEQ ID NO: 2610579 - RNA, 19 nt, Artificial Sequence
  Description of Artificial Sequence: Synthetic oligonucleotide
auguccuuccucggggcau

SEQ ID NO: 2610580 - RNA, 19 nt, Artificial Sequence
  Description of Artificial Sequence: Synthetic oligonucleotide
agaccgaagcagacgccca

SEQ ID NO: 2610581 - RNA, 19 nt, Artificial Sequence
  Description of Artificial Sequence: Synthetic oligonucleotide
caucuuccggcucuagggu

SEQ ID NO: 2610582 - RNA, 19 nt, Artificial Sequence
  Description of Artificial Sequence: Synthetic oligonucleotide
caguacccagcaggucugg

SEQ ID NO: 2610583 - RNA, 19 nt, Artificial Sequence
  Description of Artificial Sequence: Synthetic oligonucleotide
gagcaggggcccggggccg

SEQ ID NO: 2610584 - RNA, 19 nt, Artificial Sequence
  Description of Artificial Sequence: Synthetic oligonucleotide
ccgggagcgugucaucagg

SEQ ID NO: 2610585 - RNA, 19 nt, Artificial Sequence
  Description of Artificial Sequence: Synthetic oligonucleotide
gcucggaugugugcauagg

SEQ ID NO: 2610586 - RNA, 19 nt, Artificial Sequence
  Description of Artificial Sequence: Synthetic oligonucleotide
aggcgcgcaggagaugcug

SEQ ID NO: 2610587 - RNA, 19 nt, Artificial Sequence
  Description of Artificial Sequence: Synthetic oligonucleotide
ugacacuaaggggcccguc

SEQ ID NO: 2610588 - RNA, 19 nt, Artificial Sequence
  Description of Artificial Sequence: Synthetic oligonucleotide
gguuccgggcccgauugug

SEQ ID NO: 2610589 - RNA, 19 nt, Artificial Sequence
  Description of Artificial Sequence: Synthetic oligonucleotide
ccagugaacagugagugcu

SEQ ID NO: 2610590 - RNA, 19 nt, Artificial Sequence
  Description of Artificial Sequence: Synthetic oligonucleotide
ccucggggcauccaugguc

SEQ ID NO: 2610591 - RNA, 19 nt, Artificial Sequence
  Description of Artificial Sequence: Synthetic oligonucleotide
aggcaguucgaaggcccug

SEQ ID NO: 2610592 - RNA, 19 nt, Artificial Sequence
  Description of Artificial Sequence: Synthetic oligonucleotide
agcgugucaucagggccca

SEQ ID NO: 2610593 - RNA, 19 nt, Artificial Sequence
  Description of Artificial Sequence: Synthetic oligonucleotide
cgauugugccaguacccag

SEQ ID NO: 2610594 - RNA, 19 nt, Artificial Sequence
  Description of Artificial Sequence: Synthetic oligonucleotide
agacgcccagcacgaagua

SEQ ID NO: 2610595 - RNA, 19 nt, Artificial Sequence
  Description of Artificial Sequence: Synthetic oligonucleotide
gugauccacacacgcccaa

SEQ ID NO: 2610596 - RNA, 19 nt, Artificial Sequence
  Description of Artificial Sequence: Synthetic oligonucleotide
acacgcccaauagcaccag

SEQ ID NO: 2610597 - RNA, 19 nt, Artificial Sequence
  Description of Artificial Sequence: Synthetic oligonucleotide
aucucccgcaggauucgcu

SEQ ID NO: 2610598 - RNA, 19 nt, Artificial Sequence
  Description of Artificial Sequence: Synthetic oligonucleotide
augugugcauaggccgcca

SEQ ID NO: 2610599 - RNA, 19 nt, Artificial Sequence
  Description of Artificial Sequence: Synthetic oligonucleotide
gguauccuuuucccaccca

SEQ ID NO: 2610600 - RNA, 19 nt, Artificial Sequence
  Description of Artificial Sequence: Synthetic oligonucleotide
ugccaguacccagcagguc

SEQ ID NO: 2610601 - RNA, 19 nt, Artificial Sequence
  Description of Artificial Sequence: Synthetic oligonucleotide
ggcccgauugugccaguac

SEQ ID NO: 2610602 - RNA, 19 nt, Artificial Sequence
  Description of Artificial Sequence: Synthetic oligonucleotide
agcgaggcgcgcaggagau

SEQ ID NO: 2610603 - RNA, 19 nt, Artificial Sequence
  Description of Artificial Sequence: Synthetic oligonucleotide
gcagcagaccgaagcagac

SEQ ID NO: 2610604 - RNA, 19 nt, Artificial Sequence
  Description of Artificial Sequence: Synthetic oligonucleotide
cgcccaauagcaccaggag

SEQ ID NO: 2610605 - RNA, 19 nt, Artificial Sequence
  Description of Artificial Sequence: Synthetic oligonucleotide
ggguuagcucggaugugug

SEQ ID NO: 2610606 - RNA, 19 nt, Artificial Sequence
  Description of Artificial Sequence: Synthetic oligonucleotide
gucgggcucaguggacagc

SEQ ID NO: 2610607 - RNA, 19 nt, Artificial Sequence
  Description of Artificial Sequence: Synthetic oligonucleotide
cuaaggggcccgucgggcu

SEQ ID NO: 2610608 - RNA, 19 nt, Artificial Sequence
  Description of Artificial Sequence: Synthetic oligonucleotide
cgggagcgugucaucaggg

SEQ ID NO: 2610609 - RNA, 19 nt, Artificial Sequence
  Description of Artificial Sequence: Synthetic oligonucleotide
ccagccucgucaugguguc

SEQ ID NO: 2610610 - RNA, 19 nt, Artificial Sequence
  Description of Artificial Sequence: Synthetic oligonucleotide
uccuggcccgggagcgugu

SEQ ID NO: 2610611 - RNA, 19 nt, Artificial Sequence
  Description of Artificial Sequence: Synthetic oligonucleotide
gccgccaggcuguugcuga

SEQ ID NO: 2610612 - RNA, 19 nt, Artificial Sequence
  Description of Artificial Sequence: Synthetic oligonucleotide
cgaggcgcgcaggagaugc

SEQ ID NO: 2610613 - RNA, 19 nt, Artificial Sequence
  Description of Artificial Sequence: Synthetic oligonucleotide
cugcccagugcgccagauc

SEQ ID NO: 2610614 - RNA, 19 nt, Artificial Sequence
  Description of Artificial Sequence: Synthetic oligonucleotide
ggcacagggucagcagcag

SEQ ID NO: 2610615 - RNA, 19 nt, Artificial Sequence
  Description of Artificial Sequence: Synthetic oligonucleotide
cgcagcucgccugucagcc

SEQ ID NO: 2610616 - RNA, 19 nt, Artificial Sequence
  Description of Artificial Sequence: Synthetic oligonucleotide
cucgucaugguguccucau

SEQ ID NO: 2610617 - RNA, 19 nt, Artificial Sequence
  Description of Artificial Sequence: Synthetic oligonucleotide
cacugggcucagucccgug

SEQ ID NO: 2610618 - RNA, 19 nt, Artificial Sequence
  Description of Artificial Sequence: Synthetic oligonucleotide
gugcgccagaucucccgca

SEQ ID NO: 2610619 - RNA, 19 nt, Artificial Sequence
  Description of Artificial Sequence: Synthetic oligonucleotide
gcucaguggacagcuccug

SEQ ID NO: 2610620 - RNA, 19 nt, Artificial Sequence
  Description of Artificial Sequence: Synthetic oligonucleotide
cuccuggcccgggagcgug

SEQ ID NO: 2610621 - RNA, 19 nt, Artificial Sequence
  Description of Artificial Sequence: Synthetic oligonucleotide
uccuuccucggggcaucca

SEQ ID NO: 2610622 - RNA, 19 nt, Artificial Sequence
  Description of Artificial Sequence: Synthetic oligonucleotide
uacggcccagcgugcccgu

SEQ ID NO: 2610623 - RNA, 19 nt, Artificial Sequence
  Description of Artificial Sequence: Synthetic oligonucleotide
gcucagucccguguccaug

SEQ ID NO: 2610624 - RNA, 19 nt, Artificial Sequence
  Description of Artificial Sequence: Synthetic oligonucleotide
ccgcaggauucgcucacgc

SEQ ID NO: 2610625 - RNA, 19 nt, Artificial Sequence
  Description of Artificial Sequence: Synthetic oligonucleotide
gcauacggcccagcgugcc

SEQ ID NO: 2610626 - RNA, 19 nt, Artificial Sequence
  Description of Artificial Sequence: Synthetic oligonucleotide
gcucucgggguuagcucgg

SEQ ID NO: 2610627 - RNA, 19 nt, Artificial Sequence
  Description of Artificial Sequence: Synthetic oligonucleotide
gaggcaguucgaaggcccu

SEQ ID NO: 2610628 - RNA, 19 nt, Artificial Sequence
  Description of Artificial Sequence: Synthetic oligonucleotide
gcccagcacgaaguagagg

SEQ ID NO: 2610629 - RNA, 19 nt, Artificial Sequence
  Description of Artificial Sequence: Synthetic oligonucleotide
ggcccagcgugcccguggc

SEQ ID NO: 2610630 - RNA, 19 nt, Artificial Sequence
  Description of Artificial Sequence: Synthetic oligonucleotide
gcgguucaugugucaauaa

SEQ ID NO: 2610631 - RNA, 19 nt, Artificial Sequence
  Description of Artificial Sequence: Synthetic oligonucleotide
gcagcucgccugucagccc

SEQ ID NO: 2610632 - RNA, 19 nt, Artificial Sequence
  Description of Artificial Sequence: Synthetic oligonucleotide
gugccaguacccagcaggu

SEQ ID NO: 2610633 - RNA, 19 nt, Artificial Sequence
  Description of Artificial Sequence: Synthetic oligonucleotide
ggacgcagcucgccuguca

SEQ ID NO: 2610634 - RNA, 19 nt, Artificial Sequence
  Description of Artificial Sequence: Synthetic oligonucleotide
gcagaccgaagcagacgcc

SEQ ID NO: 2610635 - RNA, 19 nt, Artificial Sequence
  Description of Artificial Sequence: Synthetic oligonucleotide
gggguuagcucggaugugu

SEQ ID NO: 2610636 - RNA, 19 nt, Artificial Sequence
  Description of Artificial Sequence: Synthetic oligonucleotide
cucuagggugcugcugcga

SEQ ID NO: 2610637 - RNA, 19 nt, Artificial Sequence
  Description of Artificial Sequence: Synthetic oligonucleotide
gcugcgguucaugugucaa

SEQ ID NO: 2610638 - RNA, 19 nt, Artificial Sequence
  Description of Artificial Sequence: Synthetic oligonucleotide
auaggccgccaggcuguug

SEQ ID NO: 2610639 - RNA, 19 nt, Artificial Sequence
  Description of Artificial Sequence: Synthetic oligonucleotide
gaauuggggcagaggcagu

SEQ ID NO: 2610640 - RNA, 19 nt, Artificial Sequence
  Description of Artificial Sequence: Synthetic oligonucleotide
cccagcgugcccguggcug

SEQ ID NO: 2610641 - RNA, 19 nt, Artificial Sequence
  Description of Artificial Sequence: Synthetic oligonucleotide
gccaggcuguugcugaaua

SEQ ID NO: 2610642 - RNA, 19 nt, Artificial Sequence
  Description of Artificial Sequence: Synthetic oligonucleotide
cugcugcgagggucccggc

SEQ ID NO: 2610643 - RNA, 19 nt, Artificial Sequence
  Description of Artificial Sequence: Synthetic oligonucleotide
cccgggagcgugucaucag

SEQ ID NO: 2610644 - RNA, 19 nt, Artificial Sequence
  Description of Artificial Sequence: Synthetic oligonucleotide
guccuuccucggggcaucc

SEQ ID NO: 2610645 - RNA, 19 nt, Artificial Sequence
  Description of Artificial Sequence: Synthetic oligonucleotide
gcccgucgggcucagugga

SEQ ID NO: 2610646 - RNA, 19 nt, Artificial Sequence
  Description of Artificial Sequence: Synthetic oligonucleotide
cugugcccgcuccagcucu

SEQ ID NO: 2610647 - RNA, 19 nt, Artificial Sequence
  Description of Artificial Sequence: Synthetic oligonucleotide
ccgauugugccaguaccca

SEQ ID NO: 2610648 - RNA, 19 nt, Artificial Sequence
  Description of Artificial Sequence: Synthetic oligonucleotide
cagccucgucauggugucc

SEQ ID NO: 2610649 - RNA, 19 nt, Artificial Sequence
  Description of Artificial Sequence: Synthetic oligonucleotide
cagugaacagugagugcuu

SEQ ID NO: 2610650 - RNA, 19 nt, Artificial Sequence
  Description of Artificial Sequence: Synthetic oligonucleotide
ggggcagaggcaguucgaa

SEQ ID NO: 2610651 - RNA, 19 nt, Artificial Sequence
  Description of Artificial Sequence: Synthetic oligonucleotide
ccgaagcagacgcccagca

SEQ ID NO: 2610652 - RNA, 19 nt, Artificial Sequence
  Description of Artificial Sequence: Synthetic oligonucleotide
ccguggcugugguuccggg

SEQ ID NO: 2610653 - RNA, 19 nt, Artificial Sequence
  Description of Artificial Sequence: Synthetic oligonucleotide
uuccggcucuagggugcug

SEQ ID NO: 2610654 - RNA, 19 nt, Artificial Sequence
  Description of Artificial Sequence: Synthetic oligonucleotide
cccagccucgucauggugu

SEQ ID NO: 2610655 - RNA, 19 nt, Artificial Sequence
  Description of Artificial Sequence: Synthetic oligonucleotide
gcgagcgaggcgcgcagga

SEQ ID NO: 2610656 - RNA, 19 nt, Artificial Sequence
  Description of Artificial Sequence: Synthetic oligonucleotide
cugcgguucaugugucaau

SEQ ID NO: 2610657 - RNA, 19 nt, Artificial Sequence
  Description of Artificial Sequence: Synthetic oligonucleotide
guccagggacgcagcucgc

SEQ ID NO: 2610658 - RNA, 19 nt, Artificial Sequence
  Description of Artificial Sequence: Synthetic oligonucleotide
gcccagccucgucauggug

SEQ ID NO: 2610659 - RNA, 19 nt, Artificial Sequence
  Description of Artificial Sequence: Synthetic oligonucleotide
cgcccagcacgaaguagag

SEQ ID NO: 2610660 - RNA, 19 nt, Artificial Sequence
  Description of Artificial Sequence: Synthetic oligonucleotide
ccgggcccgauugugccag

SEQ ID NO: 2610661 - RNA, 19 nt, Artificial Sequence
  Description of Artificial Sequence: Synthetic oligonucleotide
cgucgggcucaguggacag

SEQ ID NO: 2610662 - RNA, 19 nt, Artificial Sequence
  Description of Artificial Sequence: Synthetic oligonucleotide
gggcucagucccgugucca

SEQ ID NO: 2610663 - RNA, 19 nt, Artificial Sequence
  Description of Artificial Sequence: Synthetic oligonucleotide
gugcugcugcgaggguccc

SEQ ID NO: 2610664 - RNA, 19 nt, Artificial Sequence
  Description of Artificial Sequence: Synthetic oligonucleotide
cagcgugcccguggcugug

SEQ ID NO: 2610665 - RNA, 19 nt, Artificial Sequence
  Description of Artificial Sequence: Synthetic oligonucleotide
cccgcaggauucgcucacg

SEQ ID NO: 2610666 - RNA, 19 nt, Artificial Sequence
  Description of Artificial Sequence: Synthetic oligonucleotide
agcagacgcccagcacgaa

SEQ ID NO: 2610667 - RNA, 19 nt, Artificial Sequence
  Description of Artificial Sequence: Synthetic oligonucleotide
ggcucaguggacagcuccu

SEQ ID NO: 2610668 - RNA, 19 nt, Artificial Sequence
  Description of Artificial Sequence: Synthetic oligonucleotide
cccguguccaugcugcggu

SEQ ID NO: 2610669 - RNA, 19 nt, Artificial Sequence
  Description of Artificial Sequence: Synthetic oligonucleotide
cgccagaucucccgcagga

SEQ ID NO: 2610670 - RNA, 19 nt, Artificial Sequence
  Description of Artificial Sequence: Synthetic oligonucleotide
gcucuuccgcugaugugaa

SEQ ID NO: 2610671 - RNA, 19 nt, Artificial Sequence
  Description of Artificial Sequence: Synthetic oligonucleotide
cucucgggguuagcucgga

SEQ ID NO: 2610672 - RNA, 19 nt, Artificial Sequence
  Description of Artificial Sequence: Synthetic oligonucleotide
ccgaagcucucgggguuag

SEQ ID NO: 2610673 - RNA, 19 nt, Artificial Sequence
  Description of Artificial Sequence: Synthetic oligonucleotide
ccugcccagugaacaguga

SEQ ID NO: 2610674 - RNA, 19 nt, Artificial Sequence
  Description of Artificial Sequence: Synthetic oligonucleotide
cuggcccgggagcguguca

SEQ ID NO: 2610675 - RNA, 19 nt, Artificial Sequence
  Description of Artificial Sequence: Synthetic oligonucleotide
cccgucgggcucaguggac

SEQ ID NO: 2610676 - RNA, 19 nt, Artificial Sequence
  Description of Artificial Sequence: Synthetic oligonucleotide
ccagaucucccgcaggauu

SEQ ID NO: 2610677 - RNA, 19 nt, Artificial Sequence
  Description of Artificial Sequence: Synthetic oligonucleotide
ccgcugugcccgcuccagc

SEQ ID NO: 2610678 - RNA, 19 nt, Artificial Sequence
  Description of Artificial Sequence: Synthetic oligonucleotide
gcacgaaguagaggccgaa

SEQ ID NO: 2610679 - RNA, 19 nt, Artificial Sequence
  Description of Artificial Sequence: Synthetic oligonucleotide
gcccguggcugugguuccg

SEQ ID NO: 2610680 - RNA, 19 nt, Artificial Sequence
  Description of Artificial Sequence: Synthetic oligonucleotide
acggcccagcgugcccgug

SEQ ID NO: 2610681 - RNA, 19 nt, Artificial Sequence
  Description of Artificial Sequence: Synthetic oligonucleotide
gugcccgcuccagcucuuc

SEQ ID NO: 2610682 - RNA, 19 nt, Artificial Sequence
  Description of Artificial Sequence: Synthetic oligonucleotide
ccgcgagcgaggcgcgcag

SEQ ID NO: 2610683 - RNA, 19 nt, Artificial Sequence
  Description of Artificial Sequence: Synthetic oligonucleotide
ccucgucaugguguccuca

SEQ ID NO: 2610684 - RNA, 19 nt, Artificial Sequence
  Description of Artificial Sequence: Synthetic oligonucleotide
gaggcgcgcaggagaugcu

SEQ ID NO: 2610685 - RNA, 19 nt, Artificial Sequence
  Description of Artificial Sequence: Synthetic oligonucleotide
ccgucgggcucaguggaca

SEQ ID NO: 2610686 - RNA, 19 nt, Artificial Sequence
  Description of Artificial Sequence: Synthetic oligonucleotide
ccuuccucggggcauccau

SEQ ID NO: 2610687 - RNA, 19 nt, Artificial Sequence
  Description of Artificial Sequence: Synthetic oligonucleotide
gccgcgagcgaggcgcgca

SEQ ID NO: 2610688 - RNA, 19 nt, Artificial Sequence
  Description of Artificial Sequence: Synthetic oligonucleotide
ccagggacgcagcucgccu

SEQ ID NO: 2610689 - RNA, 19 nt, Artificial Sequence
  Description of Artificial Sequence: Synthetic oligonucleotide
gcccagugcgccagaucuc

SEQ ID NO: 2610690 - RNA, 19 nt, Artificial Sequence
  Description of Artificial Sequence: Synthetic oligonucleotide
gggccgcgagcgaggcgcg

SEQ ID NO: 2610691 - RNA, 19 nt, Artificial Sequence
  Description of Artificial Sequence: Synthetic oligonucleotide
aggggcccgucgggcucag

SEQ ID NO: 2610692 - RNA, 19 nt, Artificial Sequence
  Description of Artificial Sequence: Synthetic oligonucleotide
ccaggagaauuggggcaga

SEQ ID NO: 2610693 - RNA, 19 nt, Artificial Sequence
  Description of Artificial Sequence: Synthetic oligonucleotide
cgagggucccggcgcggag

SEQ ID NO: 2610694 - RNA, 19 nt, Artificial Sequence
  Description of Artificial Sequence: Synthetic oligonucleotide
gcaggucuggcugcccagu

SEQ ID NO: 2610695 - RNA, 19 nt, Artificial Sequence
  Description of Artificial Sequence: Synthetic oligonucleotide
caucagggcccagccucgu

SEQ ID NO: 2610696 - RNA, 19 nt, Artificial Sequence
  Description of Artificial Sequence: Synthetic oligonucleotide
cgaagcucucgggguuagc

SEQ ID NO: 2610697 - RNA, 19 nt, Artificial Sequence
  Description of Artificial Sequence: Synthetic oligonucleotide
gcugugguuccgggcccga

SEQ ID NO: 2610698 - RNA, 19 nt, Artificial Sequence
  Description of Artificial Sequence: Synthetic oligonucleotide
cgggguuagcucggaugug

SEQ ID NO: 2610699 - RNA, 19 nt, Artificial Sequence
  Description of Artificial Sequence: Synthetic oligonucleotide
gcgcgcaggagaugcugau

SEQ ID NO: 2610700 - RNA, 19 nt, Artificial Sequence
  Description of Artificial Sequence: Synthetic oligonucleotide
ccagcgugcccguggcugu

SEQ ID NO: 2610701 - RNA, 19 nt, Artificial Sequence
  Description of Artificial Sequence: Synthetic oligonucleotide
cgcaggauucgcucacgcu

SEQ ID NO: 2610702 - RNA, 19 nt, Artificial Sequence
  Description of Artificial Sequence: Synthetic oligonucleotide
ggcugcccagugcgccaga

SEQ ID NO: 2610703 - RNA, 19 nt, Artificial Sequence
  Description of Artificial Sequence: Synthetic oligonucleotide
cgcugugcccgcuccagcu

SEQ ID NO: 2610704 - RNA, 19 nt, Artificial Sequence
  Description of Artificial Sequence: Synthetic oligonucleotide
ccuggcccgggagcguguc

SEQ ID NO: 2610705 - RNA, 19 nt, Artificial Sequence
  Description of Artificial Sequence: Synthetic oligonucleotide
gggcccgauugugccagua

SEQ ID NO: 2610706 - RNA, 19 nt, Artificial Sequence
  Description of Artificial Sequence: Synthetic oligonucleotide
ggccgcgagcgaggcgcgc

SEQ ID NO: 2610707 - RNA, 19 nt, Artificial Sequence
  Description of Artificial Sequence: Synthetic oligonucleotide
gcacugggcucagucccgu

SEQ ID NO: 2610708 - RNA, 19 nt, Artificial Sequence
  Description of Artificial Sequence: Synthetic oligonucleotide
cgggcucaguggacagcuc

SEQ ID NO: 2610709 - RNA, 19 nt, Artificial Sequence
  Description of Artificial Sequence: Synthetic oligonucleotide
gcgugucaucagggcccag

SEQ ID NO: 2610710 - RNA, 19 nt, Artificial Sequence
  Description of Artificial Sequence: Synthetic oligonucleotide
gggucccggcgcggagcag

SEQ ID NO: 2610711 - RNA, 19 nt, Artificial Sequence
  Description of Artificial Sequence: Synthetic oligonucleotide
cugugguuccgggcccgau

SEQ ID NO: 2610712 - RNA, 19 nt, Artificial Sequence
  Description of Artificial Sequence: Synthetic oligonucleotide
gcgugcccguggcuguggu

SEQ ID NO: 2610713 - RNA, 19 nt, Artificial Sequence
  Description of Artificial Sequence: Synthetic oligonucleotide
gcugcccagugcgccagau

SEQ ID NO: 2610714 - RNA, 19 nt, Artificial Sequence
  Description of Artificial Sequence: Synthetic oligonucleotide
ccggcucuagggugcugcu

SEQ ID NO: 2610715 - RNA, 19 nt, Artificial Sequence
  Description of Artificial Sequence: Synthetic oligonucleotide
cauaggccgccaggcuguu

SEQ ID NO: 2610716 - RNA, 19 nt, Artificial Sequence
  Description of Artificial Sequence: Synthetic oligonucleotide
ccgcugaugugaagacauu

SEQ ID NO: 2610717 - RNA, 19 nt, Artificial Sequence
  Description of Artificial Sequence: Synthetic oligonucleotide
gcuccuggcccgggagcgu

SEQ ID NO: 2610718 - RNA, 19 nt, Artificial Sequence
  Description of Artificial Sequence: Synthetic oligonucleotide
gcccagcgugcccguggcu

SEQ ID NO: 2610719 - RNA, 19 nt, Artificial Sequence
  Description of Artificial Sequence: Synthetic oligonucleotide
cgugcccguggcugugguu

SEQ ID NO: 2610720 - RNA, 19 nt, Artificial Sequence
  Description of Artificial Sequence: Synthetic oligonucleotide
cgccaggcuguugcugaau

SEQ ID NO: 2610721 - RNA, 19 nt, Artificial Sequence
  Description of Artificial Sequence: Synthetic oligonucleotide
ggggcccgucgggcucagu

SEQ ID NO: 2610722 - RNA, 19 nt, Artificial Sequence
  Description of Artificial Sequence: Synthetic oligonucleotide
cgggcccgauugugccagu

SEQ ID NO: 2610723 - RNA, 19 nt, Artificial Sequence
  Description of Artificial Sequence: Synthetic oligonucleotide
uacaaaucaacacuggugg

SEQ ID NO: 2610724 - RNA, 19 nt, Artificial Sequence
  Description of Artificial Sequence: Synthetic oligonucleotide
uaaauuaaacuuuacacug

SEQ ID NO: 2610725 - RNA, 19 nt, Artificial Sequence
  Description of Artificial Sequence: Synthetic oligonucleotide
aacacacacagacacacac

SEQ ID NO: 2610726 - RNA, 19 nt, Artificial Sequence
  Description of Artificial Sequence: Synthetic oligonucleotide
uuaaucucuaaauuaaacu

SEQ ID NO: 2610727 - RNA, 19 nt, Artificial Sequence
  Description of Artificial Sequence: Synthetic oligonucleotide
uuaauuaaucucuaaauua

SEQ ID NO: 2610728 - RNA, 19 nt, Artificial Sequence
  Description of Artificial Sequence: Synthetic oligonucleotide
ucuaauuagaaccucugcu

SEQ ID NO: 2610729 - RNA, 19 nt, Artificial Sequence
  Description of Artificial Sequence: Synthetic oligonucleotide
aauuagaaccucugcuagc

SEQ ID NO: 2610730 - RNA, 19 nt, Artificial Sequence
  Description of Artificial Sequence: Synthetic oligonucleotide
uaauuaaucucuaaauuaa

SEQ ID NO: 2610731 - RNA, 19 nt, Artificial Sequence
  Description of Artificial Sequence: Synthetic oligonucleotide
gaugacuuuagguugcccg

SEQ ID NO: 2610732 - RNA, 19 nt, Artificial Sequence
  Description of Artificial Sequence: Synthetic oligonucleotide
agauuguacaaaucaacac

SEQ ID NO: 2610733 - RNA, 19 nt, Artificial Sequence
  Description of Artificial Sequence: Synthetic oligonucleotide
ugucauggaauuccaagcg

SEQ ID NO: 2610734 - RNA, 19 nt, Artificial Sequence
  Description of Artificial Sequence: Synthetic oligonucleotide
gaggauaagggcuuguggg

SEQ ID NO: 2610735 - RNA, 19 nt, Artificial Sequence
  Description of Artificial Sequence: Synthetic oligonucleotide
cacauagucacucucaagc

SEQ ID NO: 2610736 - RNA, 19 nt, Artificial Sequence
  Description of Artificial Sequence: Synthetic oligonucleotide
aauugggugcaucacacug

SEQ ID NO: 2610737 - RNA, 19 nt, Artificial Sequence
  Description of Artificial Sequence: Synthetic oligonucleotide
uaauuagaaccucugcuag

SEQ ID NO: 2610738 - RNA, 19 nt, Artificial Sequence
  Description of Artificial Sequence: Synthetic oligonucleotide
uauguccugaggauaaggg

SEQ ID NO: 2610739 - RNA, 19 nt, Artificial Sequence
  Description of Artificial Sequence: Synthetic oligonucleotide
agaguugggagauaagggg

SEQ ID NO: 2610740 - RNA, 19 nt, Artificial Sequence
  Description of Artificial Sequence: Synthetic oligonucleotide
aucucugucaaauugggug

SEQ ID NO: 2610741 - RNA, 19 nt, Artificial Sequence
  Description of Artificial Sequence: Synthetic oligonucleotide
cucucauggaucuauaggc

SEQ ID NO: 2610742 - RNA, 19 nt, Artificial Sequence
  Description of Artificial Sequence: Synthetic oligonucleotide
uacacacacacacagacac

SEQ ID NO: 2610743 - RNA, 19 nt, Artificial Sequence
  Description of Artificial Sequence: Synthetic oligonucleotide
uguggcuacacacacacac

SEQ ID NO: 2610744 - RNA, 19 nt, Artificial Sequence
  Description of Artificial Sequence: Synthetic oligonucleotide
auuaaucucuaaauuaaac

SEQ ID NO: 2610745 - RNA, 19 nt, Artificial Sequence
  Description of Artificial Sequence: Synthetic oligonucleotide
ucuuguuucucuaauuaga

SEQ ID NO: 2610746 - RNA, 19 nt, Artificial Sequence
  Description of Artificial Sequence: Synthetic oligonucleotide
uaaucucuaaauuaaacuu

SEQ ID NO: 2610747 - RNA, 19 nt, Artificial Sequence
  Description of Artificial Sequence: Synthetic oligonucleotide
auuaauuaaucucuaaauu

SEQ ID NO: 2610748 - RNA, 19 nt, Artificial Sequence
  Description of Artificial Sequence: Synthetic oligonucleotide
aauuccuauggguguagac

SEQ ID NO: 2610749 - RNA, 19 nt, Artificial Sequence
  Description of Artificial Sequence: Synthetic oligonucleotide
cacacagacacacacaccc

SEQ ID NO: 2610750 - RNA, 19 nt, Artificial Sequence
  Description of Artificial Sequence: Synthetic oligonucleotide
auuccuauggguguagacc

SEQ ID NO: 2610751 - RNA, 19 nt, Artificial Sequence
  Description of Artificial Sequence: Synthetic oligonucleotide
ugguggauaauaaaagugu

SEQ ID NO: 2610752 - RNA, 19 nt, Artificial Sequence
  Description of Artificial Sequence: Synthetic oligonucleotide
acauagucacucucaagcc

SEQ ID NO: 2610753 - RNA, 19 nt, Artificial Sequence
  Description of Artificial Sequence: Synthetic oligonucleotide
aauuaaacuuuacacugaa

SEQ ID NO: 2610754 - RNA, 19 nt, Artificial Sequence
  Description of Artificial Sequence: Synthetic oligonucleotide
uuuauugauugccagggaa

SEQ ID NO: 2610755 - RNA, 19 nt, Artificial Sequence
  Description of Artificial Sequence: Synthetic oligonucleotide
aagacuguauguccugagg

SEQ ID NO: 2610756 - RNA, 19 nt, Artificial Sequence
  Description of Artificial Sequence: Synthetic oligonucleotide
gauguaauuccuaugggug

SEQ ID NO: 2610757 - RNA, 19 nt, Artificial Sequence
  Description of Artificial Sequence: Synthetic oligonucleotide
uggauaauaaaagugugga

SEQ ID NO: 2610758 - RNA, 19 nt, Artificial Sequence
  Description of Artificial Sequence: Synthetic oligonucleotide
cauguuugcacucuggaac

SEQ ID NO: 2610759 - RNA, 19 nt, Artificial Sequence
  Description of Artificial Sequence: Synthetic oligonucleotide
uauaggcugauguaauucc

SEQ ID NO: 2610760 - RNA, 19 nt, Artificial Sequence
  Description of Artificial Sequence: Synthetic oligonucleotide
ugaggauaagggcuugugg

SEQ ID NO: 2610761 - RNA, 19 nt, Artificial Sequence
  Description of Artificial Sequence: Synthetic oligonucleotide
gcugauguaauuccuaugg

SEQ ID NO: 2610762 - RNA, 19 nt, Artificial Sequence
  Description of Artificial Sequence: Synthetic oligonucleotide
uggaauuccaagcgcaaag

SEQ ID NO: 2610763 - RNA, 19 nt, Artificial Sequence
  Description of Artificial Sequence: Synthetic oligonucleotide
auuccaagcgcaaagauug

SEQ ID NO: 2610764 - RNA, 19 nt, Artificial Sequence
  Description of Artificial Sequence: Synthetic oligonucleotide
aauaaaaguguggaugacu

SEQ ID NO: 2610765 - RNA, 19 nt, Artificial Sequence
  Description of Artificial Sequence: Synthetic oligonucleotide
uguccugaggauaagggcu

SEQ ID NO: 2610766 - RNA, 19 nt, Artificial Sequence
  Description of Artificial Sequence: Synthetic oligonucleotide
uggaucuauaggcugaugu

SEQ ID NO: 2610767 - RNA, 19 nt, Artificial Sequence
  Description of Artificial Sequence: Synthetic oligonucleotide
uguacaaaucaacacuggu

SEQ ID NO: 2610768 - RNA, 19 nt, Artificial Sequence
  Description of Artificial Sequence: Synthetic oligonucleotide
ugauguaauuccuaugggu

SEQ ID NO: 2610769 - RNA, 19 nt, Artificial Sequence
  Description of Artificial Sequence: Synthetic oligonucleotide
uugucauggaauuccaagc

SEQ ID NO: 2610770 - RNA, 19 nt, Artificial Sequence
  Description of Artificial Sequence: Synthetic oligonucleotide
ucaaauugggugcaucaca

SEQ ID NO: 2610771 - RNA, 19 nt, Artificial Sequence
  Description of Artificial Sequence: Synthetic oligonucleotide
uggguguagacccagggug

SEQ ID NO: 2610772 - RNA, 19 nt, Artificial Sequence
  Description of Artificial Sequence: Synthetic oligonucleotide
accagaaauuaauuaaucu

SEQ ID NO: 2610773 - RNA, 19 nt, Artificial Sequence
  Description of Artificial Sequence: Synthetic oligonucleotide
auguccugaggauaagggc

SEQ ID NO: 2610774 - RNA, 19 nt, Artificial Sequence
  Description of Artificial Sequence: Synthetic oligonucleotide
uauggguguagacccaggg

SEQ ID NO: 2610775 - RNA, 19 nt, Artificial Sequence
  Description of Artificial Sequence: Synthetic oligonucleotide
uuuacacugaauguucuug

SEQ ID NO: 2610776 - RNA, 19 nt, Artificial Sequence
  Description of Artificial Sequence: Synthetic oligonucleotide
uuccuauggguguagaccc

SEQ ID NO: 2610777 - RNA, 19 nt, Artificial Sequence
  Description of Artificial Sequence: Synthetic oligonucleotide
uuguacaaaucaacacugg

SEQ ID NO: 2610778 - RNA, 19 nt, Artificial Sequence
  Description of Artificial Sequence: Synthetic oligonucleotide
aaccagaaauuaauuaauc

SEQ ID NO: 2610779 - RNA, 19 nt, Artificial Sequence
  Description of Artificial Sequence: Synthetic oligonucleotide
acccucacaacacacacag

SEQ ID NO: 2610780 - RNA, 19 nt, Artificial Sequence
  Description of Artificial Sequence: Synthetic oligonucleotide
gauuguacaaaucaacacu

SEQ ID NO: 2610781 - RNA, 19 nt, Artificial Sequence
  Description of Artificial Sequence: Synthetic oligonucleotide
ucauggaauuccaagcgca

SEQ ID NO: 2610782 - RNA, 19 nt, Artificial Sequence
  Description of Artificial Sequence: Synthetic oligonucleotide
uugauugccagggaaauga

SEQ ID NO: 2610783 - RNA, 19 nt, Artificial Sequence
  Description of Artificial Sequence: Synthetic oligonucleotide
ccaucuuuaguauuggugg

SEQ ID NO: 2610784 - RNA, 19 nt, Artificial Sequence
  Description of Artificial Sequence: Synthetic oligonucleotide
auagucacucucaagcccc

SEQ ID NO: 2610785 - RNA, 19 nt, Artificial Sequence
  Description of Artificial Sequence: Synthetic oligonucleotide
ucucugucaaauugggugc

SEQ ID NO: 2610786 - RNA, 19 nt, Artificial Sequence
  Description of Artificial Sequence: Synthetic oligonucleotide
cugguggauaauaaaagug

SEQ ID NO: 2610787 - RNA, 19 nt, Artificial Sequence
  Description of Artificial Sequence: Synthetic oligonucleotide
auuguacaaaucaacacug

SEQ ID NO: 2610788 - RNA, 19 nt, Artificial Sequence
  Description of Artificial Sequence: Synthetic oligonucleotide
ucucuaauuagaaccucug

SEQ ID NO: 2610789 - RNA, 19 nt, Artificial Sequence
  Description of Artificial Sequence: Synthetic oligonucleotide
agcuuuauugauugccagg

SEQ ID NO: 2610790 - RNA, 19 nt, Artificial Sequence
  Description of Artificial Sequence: Synthetic oligonucleotide
uuauugauugccagggaaa

SEQ ID NO: 2610791 - RNA, 19 nt, Artificial Sequence
  Description of Artificial Sequence: Synthetic oligonucleotide
augacuuuagguugcccgg

SEQ ID NO: 2610792 - RNA, 19 nt, Artificial Sequence
  Description of Artificial Sequence: Synthetic oligonucleotide
ucacccaucuuuaguauug

SEQ ID NO: 2610793 - RNA, 19 nt, Artificial Sequence
  Description of Artificial Sequence: Synthetic oligonucleotide
gagaguugggagauaaggg

SEQ ID NO: 2610794 - RNA, 19 nt, Artificial Sequence
  Description of Artificial Sequence: Synthetic oligonucleotide
cagaucucugucaaauugg

SEQ ID NO: 2610795 - RNA, 19 nt, Artificial Sequence
  Description of Artificial Sequence: Synthetic oligonucleotide
aguucagucacccaucuuu

SEQ ID NO: 2610796 - RNA, 19 nt, Artificial Sequence
  Description of Artificial Sequence: Synthetic oligonucleotide
uggcuacacacacacacag

SEQ ID NO: 2610797 - RNA, 19 nt, Artificial Sequence
  Description of Artificial Sequence: Synthetic oligonucleotide
ugucaaauugggugcauca

SEQ ID NO: 2610798 - RNA, 19 nt, Artificial Sequence
  Description of Artificial Sequence: Synthetic oligonucleotide
gugacagggacucauggag

SEQ ID NO: 2610799 - RNA, 19 nt, Artificial Sequence
  Description of Artificial Sequence: Synthetic oligonucleotide
acugguggauaauaaaagu

SEQ ID NO: 2610800 - RNA, 19 nt, Artificial Sequence
  Description of Artificial Sequence: Synthetic oligonucleotide
cacagaugacuuuagguug

SEQ ID NO: 2610801 - RNA, 19 nt, Artificial Sequence
  Description of Artificial Sequence: Synthetic oligonucleotide
uucucuaauuagaaccucu

SEQ ID NO: 2610802 - RNA, 19 nt, Artificial Sequence
  Description of Artificial Sequence: Synthetic oligonucleotide
aggauaagggcuugugggg

SEQ ID NO: 2610803 - RNA, 19 nt, Artificial Sequence
  Description of Artificial Sequence: Synthetic oligonucleotide
cugcuuguugcaaagaguc

SEQ ID NO: 2610804 - RNA, 19 nt, Artificial Sequence
  Description of Artificial Sequence: Synthetic oligonucleotide
uuuaguauuggugggcucu

SEQ ID NO: 2610805 - RNA, 19 nt, Artificial Sequence
  Description of Artificial Sequence: Synthetic oligonucleotide
ugggccacuccacucaagg

SEQ ID NO: 2610806 - RNA, 19 nt, Artificial Sequence
  Description of Artificial Sequence: Synthetic oligonucleotide
uacauguuugcacucugga

SEQ ID NO: 2610807 - RNA, 19 nt, Artificial Sequence
  Description of Artificial Sequence: Synthetic oligonucleotide
ugacagggacucauggagg

SEQ ID NO: 2610808 - RNA, 19 nt, Artificial Sequence
  Description of Artificial Sequence: Synthetic oligonucleotide
aaauuaaacuuuacacuga

SEQ ID NO: 2610809 - RNA, 19 nt, Artificial Sequence
  Description of Artificial Sequence: Synthetic oligonucleotide
cacugguggauaauaaaag

SEQ ID NO: 2610810 - RNA, 19 nt, Artificial Sequence
  Description of Artificial Sequence: Synthetic oligonucleotide
ucauggaucuauaggcuga

SEQ ID NO: 2610811 - RNA, 19 nt, Artificial Sequence
  Description of Artificial Sequence: Synthetic oligonucleotide
guggauaauaaaagugugg

SEQ ID NO: 2610812 - RNA, 19 nt, Artificial Sequence
  Description of Artificial Sequence: Synthetic oligonucleotide
aucuuuaguauuggugggc

SEQ ID NO: 2610813 - RNA, 19 nt, Artificial Sequence
  Description of Artificial Sequence: Synthetic oligonucleotide
aacacugguggauaauaaa

SEQ ID NO: 2610814 - RNA, 19 nt, Artificial Sequence
  Description of Artificial Sequence: Synthetic oligonucleotide
cuuuagguugcccggacag

SEQ ID NO: 2610815 - RNA, 19 nt, Artificial Sequence
  Description of Artificial Sequence: Synthetic oligonucleotide
aaucucuaaauuaaacuuu

SEQ ID NO: 2610816 - RNA, 19 nt, Artificial Sequence
  Description of Artificial Sequence: Synthetic oligonucleotide
cauagucacucucaagccc

SEQ ID NO: 2610817 - RNA, 19 nt, Artificial Sequence
  Description of Artificial Sequence: Synthetic oligonucleotide
guacaaaucaacacuggug

SEQ ID NO: 2610818 - RNA, 19 nt, Artificial Sequence
  Description of Artificial Sequence: Synthetic oligonucleotide
agacuguauguccugagga

SEQ ID NO: 2610819 - RNA, 19 nt, Artificial Sequence
  Description of Artificial Sequence: Synthetic oligonucleotide
acagaugacuuuagguugc

SEQ ID NO: 2610820 - RNA, 19 nt, Artificial Sequence
  Description of Artificial Sequence: Synthetic oligonucleotide
uuacacugaauguucuugu

SEQ ID NO: 2610821 - RNA, 19 nt, Artificial Sequence
  Description of Artificial Sequence: Synthetic oligonucleotide
ucucauggaucuauaggcu

SEQ ID NO: 2610822 - RNA, 19 nt, Artificial Sequence
  Description of Artificial Sequence: Synthetic oligonucleotide
acaccuacauguuugcacu

SEQ ID NO: 2610823 - RNA, 19 nt, Artificial Sequence
  Description of Artificial Sequence: Synthetic oligonucleotide
cacacacagacacacacac

SEQ ID NO: 2610824 - RNA, 19 nt, Artificial Sequence
  Description of Artificial Sequence: Synthetic oligonucleotide
acucaaggagaguugggag

SEQ ID NO: 2610825 - RNA, 19 nt, Artificial Sequence
  Description of Artificial Sequence: Synthetic oligonucleotide
uagaaccucugcuagcagc

SEQ ID NO: 2610826 - RNA, 19 nt, Artificial Sequence
  Description of Artificial Sequence: Synthetic oligonucleotide
cuggcucgggauaagacag

SEQ ID NO: 2610827 - RNA, 19 nt, Artificial Sequence
  Description of Artificial Sequence: Synthetic oligonucleotide
ccagaaauuaauuaaucuc

SEQ ID NO: 2610828 - RNA, 19 nt, Artificial Sequence
  Description of Artificial Sequence: Synthetic oligonucleotide
cucuaauuagaaccucugc

SEQ ID NO: 2610829 - RNA, 19 nt, Artificial Sequence
  Description of Artificial Sequence: Synthetic oligonucleotide
auuagaaccucugcuagca

SEQ ID NO: 2610830 - RNA, 19 nt, Artificial Sequence
  Description of Artificial Sequence: Synthetic oligonucleotide
aauuaaucucuaaauuaaa

SEQ ID NO: 2610831 - RNA, 19 nt, Artificial Sequence
  Description of Artificial Sequence: Synthetic oligonucleotide
gacaggcacacacauaguc

SEQ ID NO: 2610832 - RNA, 19 nt, Artificial Sequence
  Description of Artificial Sequence: Synthetic oligonucleotide
auguaauuccuaugggugu

SEQ ID NO: 2610833 - RNA, 19 nt, Artificial Sequence
  Description of Artificial Sequence: Synthetic oligonucleotide
ucagucacccaucuuuagu

SEQ ID NO: 2610834 - RNA, 19 nt, Artificial Sequence
  Description of Artificial Sequence: Synthetic oligonucleotide
cacacacacagacacacac

SEQ ID NO: 2610835 - RNA, 19 nt, Artificial Sequence
  Description of Artificial Sequence: Synthetic oligonucleotide
gcuuuauugauugccaggg

SEQ ID NO: 2610836 - RNA, 19 nt, Artificial Sequence
  Description of Artificial Sequence: Synthetic oligonucleotide
uugcaaagagucccuggag

SEQ ID NO: 2610837 - RNA, 19 nt, Artificial Sequence
  Description of Artificial Sequence: Synthetic oligonucleotide
cacaccuacauguuugcac

SEQ ID NO: 2610838 - RNA, 19 nt, Artificial Sequence
  Description of Artificial Sequence: Synthetic oligonucleotide
cacucuggaacugucagag

SEQ ID NO: 2610839 - RNA, 19 nt, Artificial Sequence
  Description of Artificial Sequence: Synthetic oligonucleotide
cucgggauaagacagaucu

SEQ ID NO: 2610840 - RNA, 19 nt, Artificial Sequence
  Description of Artificial Sequence: Synthetic oligonucleotide
cuaauuagaaccucugcua

SEQ ID NO: 2610841 - RNA, 19 nt, Artificial Sequence
  Description of Artificial Sequence: Synthetic oligonucleotide
uuguuucucuaauuagaac

SEQ ID NO: 2610842 - RNA, 19 nt, Artificial Sequence
  Description of Artificial Sequence: Synthetic oligonucleotide
uugggugcaucacacugug

SEQ ID NO: 2610843 - RNA, 19 nt, Artificial Sequence
  Description of Artificial Sequence: Synthetic oligonucleotide
cuacauguuugcacucugg

SEQ ID NO: 2610844 - RNA, 19 nt, Artificial Sequence
  Description of Artificial Sequence: Synthetic oligonucleotide
cucauggaucuauaggcug

SEQ ID NO: 2610845 - RNA, 19 nt, Artificial Sequence
  Description of Artificial Sequence: Synthetic oligonucleotide
auugccagggaaaugaaaa

SEQ ID NO: 2610846 - RNA, 19 nt, Artificial Sequence
  Description of Artificial Sequence: Synthetic oligonucleotide
aaagagucccuggagugca

SEQ ID NO: 2610847 - RNA, 19 nt, Artificial Sequence
  Description of Artificial Sequence: Synthetic oligonucleotide
ucuuuaguauuggugggcu

SEQ ID NO: 2610848 - RNA, 19 nt, Artificial Sequence
  Description of Artificial Sequence: Synthetic oligonucleotide
aaauugggugcaucacacu

SEQ ID NO: 2610849 - RNA, 19 nt, Artificial Sequence
  Description of Artificial Sequence: Synthetic oligonucleotide
aagcgcaaagauuguacaa

SEQ ID NO: 2610850 - RNA, 19 nt, Artificial Sequence
  Description of Artificial Sequence: Synthetic oligonucleotide
agaucucugucaaauuggg

SEQ ID NO: 2610851 - RNA, 19 nt, Artificial Sequence
  Description of Artificial Sequence: Synthetic oligonucleotide
gcuacacacacacacagac

SEQ ID NO: 2610852 - RNA, 19 nt, Artificial Sequence
  Description of Artificial Sequence: Synthetic oligonucleotide
caaagauuguacaaaucaa

SEQ ID NO: 2610853 - RNA, 19 nt, Artificial Sequence
  Description of Artificial Sequence: Synthetic oligonucleotide
gagauaaggggcuuggccu

SEQ ID NO: 2610854 - RNA, 19 nt, Artificial Sequence
  Description of Artificial Sequence: Synthetic oligonucleotide
cagucacagagugacaggg

SEQ ID NO: 2610855 - RNA, 19 nt, Artificial Sequence
  Description of Artificial Sequence: Synthetic oligonucleotide
uccucucauggaucuauag

SEQ ID NO: 2610856 - RNA, 19 nt, Artificial Sequence
  Description of Artificial Sequence: Synthetic oligonucleotide
ccucacaacacacacagac

SEQ ID NO: 2610857 - RNA, 19 nt, Artificial Sequence
  Description of Artificial Sequence: Synthetic oligonucleotide
gucauggaauuccaagcgc

SEQ ID NO: 2610858 - RNA, 19 nt, Artificial Sequence
  Description of Artificial Sequence: Synthetic oligonucleotide
ugcuuguugcaaagagucc

SEQ ID NO: 2610859 - RNA, 19 nt, Artificial Sequence
  Description of Artificial Sequence: Synthetic oligonucleotide
ggagauaaggggcuuggcc

SEQ ID NO: 2610860 - RNA, 19 nt, Artificial Sequence
  Description of Artificial Sequence: Synthetic oligonucleotide
guugcaaagagucccugga

SEQ ID NO: 2610861 - RNA, 19 nt, Artificial Sequence
  Description of Artificial Sequence: Synthetic oligonucleotide
uuagaaccucugcuagcag

SEQ ID NO: 2610862 - RNA, 19 nt, Artificial Sequence
  Description of Artificial Sequence: Synthetic oligonucleotide
uuuagguugcccggacagg

SEQ ID NO: 2610863 - RNA, 19 nt, Artificial Sequence
  Description of Artificial Sequence: Synthetic oligonucleotide
gauaagggcuuguggggug

SEQ ID NO: 2610864 - RNA, 19 nt, Artificial Sequence
  Description of Artificial Sequence: Synthetic oligonucleotide
gggugcaucacacuguggc

SEQ ID NO: 2610865 - RNA, 19 nt, Artificial Sequence
  Description of Artificial Sequence: Synthetic oligonucleotide
auggaggguaccuggaaga

SEQ ID NO: 2610866 - RNA, 19 nt, Artificial Sequence
  Description of Artificial Sequence: Synthetic oligonucleotide
gaucuauaggcugauguaa

SEQ ID NO: 2610867 - RNA, 19 nt, Artificial Sequence
  Description of Artificial Sequence: Synthetic oligonucleotide
cacacacacacagacacac

SEQ ID NO: 2610868 - RNA, 19 nt, Artificial Sequence
  Description of Artificial Sequence: Synthetic oligonucleotide
cauggaggguaccuggaag

SEQ ID NO: 2610869 - RNA, 19 nt, Artificial Sequence
  Description of Artificial Sequence: Synthetic oligonucleotide
cuauaggcugauguaauuc

SEQ ID NO: 2610870 - RNA, 19 nt, Artificial Sequence
  Description of Artificial Sequence: Synthetic oligonucleotide
uauugauugccagggaaau

SEQ ID NO: 2610871 - RNA, 19 nt, Artificial Sequence
  Description of Artificial Sequence: Synthetic oligonucleotide
ucagauccucucauggauc

SEQ ID NO: 2610872 - RNA, 19 nt, Artificial Sequence
  Description of Artificial Sequence: Synthetic oligonucleotide
aaggagaguugggagauaa

SEQ ID NO: 2610873 - RNA, 19 nt, Artificial Sequence
  Description of Artificial Sequence: Synthetic oligonucleotide
aaccucugcuagcagcugu

SEQ ID NO: 2610874 - RNA, 19 nt, Artificial Sequence
  Description of Artificial Sequence: Synthetic oligonucleotide
uucagucacccaucuuuag

SEQ ID NO: 2610875 - RNA, 19 nt, Artificial Sequence
  Description of Artificial Sequence: Synthetic oligonucleotide
aacugucagagggugucag

SEQ ID NO: 2610876 - RNA, 19 nt, Artificial Sequence
  Description of Artificial Sequence: Synthetic oligonucleotide
guauguccugaggauaagg

SEQ ID NO: 2610877 - RNA, 19 nt, Artificial Sequence
  Description of Artificial Sequence: Synthetic oligonucleotide
uuuugucauggaauuccaa

SEQ ID NO: 2610878 - RNA, 19 nt, Artificial Sequence
  Description of Artificial Sequence: Synthetic oligonucleotide
agugacagggacucaugga

SEQ ID NO: 2610879 - RNA, 19 nt, Artificial Sequence
  Description of Artificial Sequence: Synthetic oligonucleotide
uugccagggaaaugaaaac

SEQ ID NO: 2610880 - RNA, 19 nt, Artificial Sequence
  Description of Artificial Sequence: Synthetic oligonucleotide
cuuggccugaacuggucag

SEQ ID NO: 2610881 - RNA, 19 nt, Artificial Sequence
  Description of Artificial Sequence: Synthetic oligonucleotide
acacauagucacucucaag

SEQ ID NO: 2610882 - RNA, 19 nt, Artificial Sequence
  Description of Artificial Sequence: Synthetic oligonucleotide
agguugcccggacaggcac

SEQ ID NO: 2610883 - RNA, 19 nt, Artificial Sequence
  Description of Artificial Sequence: Synthetic oligonucleotide
uuugcacucuggaacuguc

SEQ ID NO: 2610884 - RNA, 19 nt, Artificial Sequence
  Description of Artificial Sequence: Synthetic oligonucleotide
agacagaucucugucaaau

SEQ ID NO: 2610885 - RNA, 19 nt, Artificial Sequence
  Description of Artificial Sequence: Synthetic oligonucleotide
acaaaucaacacuggugga

SEQ ID NO: 2610886 - RNA, 19 nt, Artificial Sequence
  Description of Artificial Sequence: Synthetic oligonucleotide
uguagacccagggugggca

SEQ ID NO: 2610887 - RNA, 19 nt, Artificial Sequence
  Description of Artificial Sequence: Synthetic oligonucleotide
acugucagagggugucagg

SEQ ID NO: 2610888 - RNA, 19 nt, Artificial Sequence
  Description of Artificial Sequence: Synthetic oligonucleotide
cagcuuuauugauugccag

SEQ ID NO: 2610889 - RNA, 19 nt, Artificial Sequence
  Description of Artificial Sequence: Synthetic oligonucleotide
uggaagacuguauguccug

SEQ ID NO: 2610890 - RNA, 19 nt, Artificial Sequence
  Description of Artificial Sequence: Synthetic oligonucleotide
gaaaugaaaaccagaaauu

SEQ ID NO: 2610891 - RNA, 19 nt, Artificial Sequence
  Description of Artificial Sequence: Synthetic oligonucleotide
cucacaccuacauguuugc

SEQ ID NO: 2610892 - RNA, 19 nt, Artificial Sequence
  Description of Artificial Sequence: Synthetic oligonucleotide
ugcccggacaggcacacac

SEQ ID NO: 2610893 - RNA, 19 nt, Artificial Sequence
  Description of Artificial Sequence: Synthetic oligonucleotide
uggugcucugcucagcauc

SEQ ID NO: 2610894 - RNA, 19 nt, Artificial Sequence
  Description of Artificial Sequence: Synthetic oligonucleotide
ucuauaggcugauguaauu

SEQ ID NO: 2610895 - RNA, 19 nt, Artificial Sequence
  Description of Artificial Sequence: Synthetic oligonucleotide
acauguuugcacucuggaa

SEQ ID NO: 2610896 - RNA, 19 nt, Artificial Sequence
  Description of Artificial Sequence: Synthetic oligonucleotide
gguggauaauaaaagugug

SEQ ID NO: 2610897 - RNA, 19 nt, Artificial Sequence
  Description of Artificial Sequence: Synthetic oligonucleotide
ugucaggcacagaugacuu

SEQ ID NO: 2610898 - RNA, 19 nt, Artificial Sequence
  Description of Artificial Sequence: Synthetic oligonucleotide
uguaauuccuaugggugua

SEQ ID NO: 2610899 - RNA, 19 nt, Artificial Sequence
  Description of Artificial Sequence: Synthetic oligonucleotide
ugcaguucagucacccauc

SEQ ID NO: 2610900 - RNA, 19 nt, Artificial Sequence
  Description of Artificial Sequence: Synthetic oligonucleotide
gcuuguugcaaagaguccc

SEQ ID NO: 2610901 - RNA, 19 nt, Artificial Sequence
  Description of Artificial Sequence: Synthetic oligonucleotide
cacagagugacagggacuc

SEQ ID NO: 2610902 - RNA, 19 nt, Artificial Sequence
  Description of Artificial Sequence: Synthetic oligonucleotide
ucaggcacagaugacuuua

SEQ ID NO: 2610903 - RNA, 19 nt, Artificial Sequence
  Description of Artificial Sequence: Synthetic oligonucleotide
acacugguggauaauaaaa

SEQ ID NO: 2610904 - RNA, 19 nt, Artificial Sequence
  Description of Artificial Sequence: Synthetic oligonucleotide
cucaaggagaguugggaga

SEQ ID NO: 2610905 - RNA, 19 nt, Artificial Sequence
  Description of Artificial Sequence: Synthetic oligonucleotide
agaugacuuuagguugccc

SEQ ID NO: 2610906 - RNA, 19 nt, Artificial Sequence
  Description of Artificial Sequence: Synthetic oligonucleotide
uggucagucagauccucuc

SEQ ID NO: 2610907 - RNA, 19 nt, Artificial Sequence
  Description of Artificial Sequence: Synthetic oligonucleotide
ugucagagggugucaggca

SEQ ID NO: 2610908 - RNA, 19 nt, Artificial Sequence
  Description of Artificial Sequence: Synthetic oligonucleotide
caaagagucccuggagugc

SEQ ID NO: 2610909 - RNA, 19 nt, Artificial Sequence
  Description of Artificial Sequence: Synthetic oligonucleotide
uaggcugauguaauuccua

SEQ ID NO: 2610910 - RNA, 19 nt, Artificial Sequence
  Description of Artificial Sequence: Synthetic oligonucleotide
caagcgcaaagauuguaca

SEQ ID NO: 2610911 - RNA, 19 nt, Artificial Sequence
  Description of Artificial Sequence: Synthetic oligonucleotide
gcaaagagucccuggagug

SEQ ID NO: 2610912 - RNA, 19 nt, Artificial Sequence
  Description of Artificial Sequence: Synthetic oligonucleotide
uuaguauuggugggcucug

SEQ ID NO: 2610913 - RNA, 19 nt, Artificial Sequence
  Description of Artificial Sequence: Synthetic oligonucleotide
aucucuaaauuaaacuuua

SEQ ID NO: 2610914 - RNA, 19 nt, Artificial Sequence
  Description of Artificial Sequence: Synthetic oligonucleotide
auuggugggcucugggcca

SEQ ID NO: 2610915 - RNA, 19 nt, Artificial Sequence
  Description of Artificial Sequence: Synthetic oligonucleotide
ucauggaggguaccuggaa

SEQ ID NO: 2610916 - RNA, 19 nt, Artificial Sequence
  Description of Artificial Sequence: Synthetic oligonucleotide
ccucucauggaucuauagg

SEQ ID NO: 2610917 - RNA, 19 nt, Artificial Sequence
  Description of Artificial Sequence: Synthetic oligonucleotide
agcgcaaagauuguacaaa

SEQ ID NO: 2610918 - RNA, 19 nt, Artificial Sequence
  Description of Artificial Sequence: Synthetic oligonucleotide
ggcagcuuuauugauugcc

SEQ ID NO: 2610919 - RNA, 19 nt, Artificial Sequence
  Description of Artificial Sequence: Synthetic oligonucleotide
ggcagucacagagugacag

SEQ ID NO: 2610920 - RNA, 19 nt, Artificial Sequence
  Description of Artificial Sequence: Synthetic oligonucleotide
cucacaacacacacagaca

SEQ ID NO: 2610921 - RNA, 19 nt, Artificial Sequence
  Description of Artificial Sequence: Synthetic oligonucleotide
cuauggguguagacccagg

SEQ ID NO: 2610922 - RNA, 19 nt, Artificial Sequence
  Description of Artificial Sequence: Synthetic oligonucleotide
uuucucuaauuagaaccuc

SEQ ID NO: 2610923 - RNA, 19 nt, Artificial Sequence
  Description of Artificial Sequence: Synthetic oligonucleotide
cacacacauagucacucuc

SEQ ID NO: 2610924 - RNA, 19 nt, Artificial Sequence
  Description of Artificial Sequence: Synthetic oligonucleotide
uguauguccugaggauaag

SEQ ID NO: 2610925 - RNA, 19 nt, Artificial Sequence
  Description of Artificial Sequence: Synthetic oligonucleotide
acacacagacacacacacc

SEQ ID NO: 2610926 - RNA, 19 nt, Artificial Sequence
  Description of Artificial Sequence: Synthetic oligonucleotide
acucuggaacugucagagg

SEQ ID NO: 2610927 - RNA, 19 nt, Artificial Sequence
  Description of Artificial Sequence: Synthetic oligonucleotide
aggcugauguaauuccuau

SEQ ID NO: 2610928 - RNA, 19 nt, Artificial Sequence
  Description of Artificial Sequence: Synthetic oligonucleotide
gccugaacuggucagucag

SEQ ID NO: 2610929 - RNA, 19 nt, Artificial Sequence
  Description of Artificial Sequence: Synthetic oligonucleotide
ugauugccagggaaaugaa

SEQ ID NO: 2610930 - RNA, 19 nt, Artificial Sequence
  Description of Artificial Sequence: Synthetic oligonucleotide
gucccuggagugcaggccc

SEQ ID NO: 2610931 - RNA, 19 nt, Artificial Sequence
  Description of Artificial Sequence: Synthetic oligonucleotide
acuuuagguugcccggaca

SEQ ID NO: 2610932 - RNA, 19 nt, Artificial Sequence
  Description of Artificial Sequence: Synthetic oligonucleotide
uacacugaauguucuuguu

SEQ ID NO: 2610933 - RNA, 19 nt, Artificial Sequence
  Description of Artificial Sequence: Synthetic oligonucleotide
gacuuuagguugcccggac

SEQ ID NO: 2610934 - RNA, 19 nt, Artificial Sequence
  Description of Artificial Sequence: Synthetic oligonucleotide
cuuuaguauuggugggcuc

SEQ ID NO: 2610935 - RNA, 19 nt, Artificial Sequence
  Description of Artificial Sequence: Synthetic oligonucleotide
cuguauguccugaggauaa

SEQ ID NO: 2610936 - RNA, 19 nt, Artificial Sequence
  Description of Artificial Sequence: Synthetic oligonucleotide
guaauuccuauggguguag

SEQ ID NO: 2610937 - RNA, 19 nt, Artificial Sequence
  Description of Artificial Sequence: Synthetic oligonucleotide
ggugggcagucacagagug

SEQ ID NO: 2610938 - RNA, 19 nt, Artificial Sequence
  Description of Artificial Sequence: Synthetic oligonucleotide
uggauugcagcugcaguuc

SEQ ID NO: 2610939 - RNA, 19 nt, Artificial Sequence
  Description of Artificial Sequence: Synthetic oligonucleotide
agcaucugcuuguugcaaa

SEQ ID NO: 2610940 - RNA, 19 nt, Artificial Sequence
  Description of Artificial Sequence: Synthetic oligonucleotide
agucacccaucuuuaguau

SEQ ID NO: 2610941 - RNA, 19 nt, Artificial Sequence
  Description of Artificial Sequence: Synthetic oligonucleotide
ugacuuuagguugcccgga

SEQ ID NO: 2610942 - RNA, 19 nt, Artificial Sequence
  Description of Artificial Sequence: Synthetic oligonucleotide
gauugcagcugcaguucag

SEQ ID NO: 2610943 - RNA, 19 nt, Artificial Sequence
  Description of Artificial Sequence: Synthetic oligonucleotide
ccaagcgcaaagauuguac

SEQ ID NO: 2610944 - RNA, 19 nt, Artificial Sequence
  Description of Artificial Sequence: Synthetic oligonucleotide
gucaaauugggugcaucac

SEQ ID NO: 2610945 - RNA, 19 nt, Artificial Sequence
  Description of Artificial Sequence: Synthetic oligonucleotide
gacucauggaggguaccug

SEQ ID NO: 2610946 - RNA, 19 nt, Artificial Sequence
  Description of Artificial Sequence: Synthetic oligonucleotide
ugggugcaucacacugugg

SEQ ID NO: 2610947 - RNA, 19 nt, Artificial Sequence
  Description of Artificial Sequence: Synthetic oligonucleotide
ugaacuggucagucagauc

SEQ ID NO: 2610948 - RNA, 19 nt, Artificial Sequence
  Description of Artificial Sequence: Synthetic oligonucleotide
ccucacaccuacauguuug

SEQ ID NO: 2610949 - RNA, 19 nt, Artificial Sequence
  Description of Artificial Sequence: Synthetic oligonucleotide
acuggucagucagauccuc

SEQ ID NO: 2610950 - RNA, 19 nt, Artificial Sequence
  Description of Artificial Sequence: Synthetic oligonucleotide
uggaacugucagagggugu

SEQ ID NO: 2610951 - RNA, 19 nt, Artificial Sequence
  Description of Artificial Sequence: Synthetic oligonucleotide
uaauuccuauggguguaga

SEQ ID NO: 2610952 - RNA, 19 nt, Artificial Sequence
  Description of Artificial Sequence: Synthetic oligonucleotide
uccuauggguguagaccca

SEQ ID NO: 2610953 - RNA, 19 nt, Artificial Sequence
  Description of Artificial Sequence: Synthetic oligonucleotide
gggugucaggcacagauga

SEQ ID NO: 2610954 - RNA, 19 nt, Artificial Sequence
  Description of Artificial Sequence: Synthetic oligonucleotide
auugggugcaucacacugu

SEQ ID NO: 2610955 - RNA, 19 nt, Artificial Sequence
  Description of Artificial Sequence: Synthetic oligonucleotide
ucgggauaagacagaucuc

SEQ ID NO: 2610956 - RNA, 19 nt, Artificial Sequence
  Description of Artificial Sequence: Synthetic oligonucleotide
ggugcaucacacuguggcc

SEQ ID NO: 2610957 - RNA, 19 nt, Artificial Sequence
  Description of Artificial Sequence: Synthetic oligonucleotide
acccagggugggcagucac

SEQ ID NO: 2610958 - RNA, 19 nt, Artificial Sequence
  Description of Artificial Sequence: Synthetic oligonucleotide
acuguauguccugaggaua

SEQ ID NO: 2610959 - RNA, 19 nt, Artificial Sequence
  Description of Artificial Sequence: Synthetic oligonucleotide
uuccaagcgcaaagauugu

SEQ ID NO: 2610960 - RNA, 19 nt, Artificial Sequence
  Description of Artificial Sequence: Synthetic oligonucleotide
cuacacacacacacagaca

SEQ ID NO: 2610961 - RNA, 19 nt, Artificial Sequence
  Description of Artificial Sequence: Synthetic oligonucleotide
uuguugcaaagagucccug

SEQ ID NO: 2610962 - RNA, 19 nt, Artificial Sequence
  Description of Artificial Sequence: Synthetic oligonucleotide
aucuauaggcugauguaau

SEQ ID NO: 2610963 - RNA, 19 nt, Artificial Sequence
  Description of Artificial Sequence: Synthetic oligonucleotide
caggcacagaugacuuuag

SEQ ID NO: 2610964 - RNA, 19 nt, Artificial Sequence
  Description of Artificial Sequence: Synthetic oligonucleotide
cugaggauaagggcuugug

SEQ ID NO: 2610965 - RNA, 19 nt, Artificial Sequence
  Description of Artificial Sequence: Synthetic oligonucleotide
cacccaucuuuaguauugg

SEQ ID NO: 2610966 - RNA, 19 nt, Artificial Sequence
  Description of Artificial Sequence: Synthetic oligonucleotide
gcagucacagagugacagg

SEQ ID NO: 2610967 - RNA, 19 nt, Artificial Sequence
  Description of Artificial Sequence: Synthetic oligonucleotide
uggaggguaccuggaagac

SEQ ID NO: 2610968 - RNA, 19 nt, Artificial Sequence
  Description of Artificial Sequence: Synthetic oligonucleotide
acccaucuuuaguauuggu

SEQ ID NO: 2610969 - RNA, 19 nt, Artificial Sequence
  Description of Artificial Sequence: Synthetic oligonucleotide
cacucaaggagaguuggga

SEQ ID NO: 2610970 - RNA, 19 nt, Artificial Sequence
  Description of Artificial Sequence: Synthetic oligonucleotide
guagacccagggugggcag

SEQ ID NO: 2610971 - RNA, 19 nt, Artificial Sequence
  Description of Artificial Sequence: Synthetic oligonucleotide
gacuguauguccugaggau

SEQ ID NO: 2610972 - RNA, 19 nt, Artificial Sequence
  Description of Artificial Sequence: Synthetic oligonucleotide
accuacauguuugcacucu

SEQ ID NO: 2610973 - RNA, 19 nt, Artificial Sequence
  Description of Artificial Sequence: Synthetic oligonucleotide
aacuggucagucagauccu

SEQ ID NO: 2610974 - RNA, 19 nt, Artificial Sequence
  Description of Artificial Sequence: Synthetic oligonucleotide
caacacugguggauaauaa

SEQ ID NO: 2610975 - RNA, 19 nt, Artificial Sequence
  Description of Artificial Sequence: Synthetic oligonucleotide
ggcugauguaauuccuaug

SEQ ID NO: 2610976 - RNA, 19 nt, Artificial Sequence
  Description of Artificial Sequence: Synthetic oligonucleotide
ggcacagaugacuuuaggu

SEQ ID NO: 2610977 - RNA, 19 nt, Artificial Sequence
  Description of Artificial Sequence: Synthetic oligonucleotide
cauggaauuccaagcgcaa

SEQ ID NO: 2610978 - RNA, 19 nt, Artificial Sequence
  Description of Artificial Sequence: Synthetic oligonucleotide
gucagauccucucauggau

SEQ ID NO: 2610979 - RNA, 19 nt, Artificial Sequence
  Description of Artificial Sequence: Synthetic oligonucleotide
gauugccagggaaaugaaa

SEQ ID NO: 2610980 - RNA, 19 nt, Artificial Sequence
  Description of Artificial Sequence: Synthetic oligonucleotide
agggacucauggaggguac

SEQ ID NO: 2610981 - RNA, 19 nt, Artificial Sequence
  Description of Artificial Sequence: Synthetic oligonucleotide
ggaucuauaggcugaugua

SEQ ID NO: 2610982 - RNA, 19 nt, Artificial Sequence
  Description of Artificial Sequence: Synthetic oligonucleotide
ggguguagacccagggugg

SEQ ID NO: 2610983 - RNA, 19 nt, Artificial Sequence
  Description of Artificial Sequence: Synthetic oligonucleotide
cacacauagucacucucaa

SEQ ID NO: 2610984 - RNA, 19 nt, Artificial Sequence
  Description of Artificial Sequence: Synthetic oligonucleotide
uccaagcgcaaagauugua

SEQ ID NO: 2610985 - RNA, 19 nt, Artificial Sequence
  Description of Artificial Sequence: Synthetic oligonucleotide
uaagggcuugugggguggg

SEQ ID NO: 2610986 - RNA, 19 nt, Artificial Sequence
  Description of Artificial Sequence: Synthetic oligonucleotide
acacacacagacacacaca

SEQ ID NO: 2610987 - RNA, 19 nt, Artificial Sequence
  Description of Artificial Sequence: Synthetic oligonucleotide
ggauaagacagaucucugu

SEQ ID NO: 2610988 - RNA, 19 nt, Artificial Sequence
  Description of Artificial Sequence: Synthetic oligonucleotide
cacacccucacaacacaca

SEQ ID NO: 2610989 - RNA, 19 nt, Artificial Sequence
  Description of Artificial Sequence: Synthetic oligonucleotide
ggggcuuggccugaacugg

SEQ ID NO: 2610990 - RNA, 19 nt, Artificial Sequence
  Description of Artificial Sequence: Synthetic oligonucleotide
uggcucgggauaagacaga

SEQ ID NO: 2610991 - RNA, 19 nt, Artificial Sequence
  Description of Artificial Sequence: Synthetic oligonucleotide
uuggccugaacuggucagu

SEQ ID NO: 2610992 - RNA, 19 nt, Artificial Sequence
  Description of Artificial Sequence: Synthetic oligonucleotide
agagugacagggacucaug

SEQ ID NO: 2610993 - RNA, 19 nt, Artificial Sequence
  Description of Artificial Sequence: Synthetic oligonucleotide
agacccagggugggcaguc

SEQ ID NO: 2610994 - RNA, 19 nt, Artificial Sequence
  Description of Artificial Sequence: Synthetic oligonucleotide
cugucaaauugggugcauc

SEQ ID NO: 2610995 - RNA, 19 nt, Artificial Sequence
  Description of Artificial Sequence: Synthetic oligonucleotide
cuuguugcaaagagucccu

SEQ ID NO: 2610996 - RNA, 19 nt, Artificial Sequence
  Description of Artificial Sequence: Synthetic oligonucleotide
uaaggggcuuggccugaac

SEQ ID NO: 2610997 - RNA, 19 nt, Artificial Sequence
  Description of Artificial Sequence: Synthetic oligonucleotide
gguguagacccaggguggg

SEQ ID NO: 2610998 - RNA, 19 nt, Artificial Sequence
  Description of Artificial Sequence: Synthetic oligonucleotide
cagagggugucaggcacag

SEQ ID NO: 2610999 - RNA, 19 nt, Artificial Sequence
  Description of Artificial Sequence: Synthetic oligonucleotide
gcacagaugacuuuagguu

SEQ ID NO: 2611000 - RNA, 19 nt, Artificial Sequence
  Description of Artificial Sequence: Synthetic oligonucleotide
cacacacccucacaacaca

SEQ ID NO: 2611001 - RNA, 19 nt, Artificial Sequence
  Description of Artificial Sequence: Synthetic oligonucleotide
caccuacauguuugcacuc

SEQ ID NO: 2611002 - RNA, 19 nt, Artificial Sequence
  Description of Artificial Sequence: Synthetic oligonucleotide
aagagucccuggagugcag

SEQ ID NO: 2611003 - RNA, 19 nt, Artificial Sequence
  Description of Artificial Sequence: Synthetic oligonucleotide
gauaaggggcuuggccuga

SEQ ID NO: 2611004 - RNA, 19 nt, Artificial Sequence
  Description of Artificial Sequence: Synthetic oligonucleotide
ucugucaaauugggugcau

SEQ ID NO: 2611005 - RNA, 19 nt, Artificial Sequence
  Description of Artificial Sequence: Synthetic oligonucleotide
gagugcaggcccuccugga

SEQ ID NO: 2611006 - RNA, 19 nt, Artificial Sequence
  Description of Artificial Sequence: Synthetic oligonucleotide
uccugaggauaagggcuug

SEQ ID NO: 2611007 - RNA, 19 nt, Artificial Sequence
  Description of Artificial Sequence: Synthetic oligonucleotide
ccuccuggauugcagcugc

SEQ ID NO: 2611008 - RNA, 19 nt, Artificial Sequence
  Description of Artificial Sequence: Synthetic oligonucleotide
agucacagagugacaggga

SEQ ID NO: 2611009 - RNA, 19 nt, Artificial Sequence
  Description of Artificial Sequence: Synthetic oligonucleotide
uggccugaacuggucaguc

SEQ ID NO: 2611010 - RNA, 19 nt, Artificial Sequence
  Description of Artificial Sequence: Synthetic oligonucleotide
ggauaauaaaaguguggau

SEQ ID NO: 2611011 - RNA, 19 nt, Artificial Sequence
  Description of Artificial Sequence: Synthetic oligonucleotide
caaaucaacacugguggau

SEQ ID NO: 2611012 - RNA, 19 nt, Artificial Sequence
  Description of Artificial Sequence: Synthetic oligonucleotide
ggucagucagauccucuca

SEQ ID NO: 2611013 - RNA, 19 nt, Artificial Sequence
  Description of Artificial Sequence: Synthetic oligonucleotide
gugucaggcacagaugacu

SEQ ID NO: 2611014 - RNA, 19 nt, Artificial Sequence
  Description of Artificial Sequence: Synthetic oligonucleotide
caacacacacagacacaca

SEQ ID NO: 2611015 - RNA, 19 nt, Artificial Sequence
  Description of Artificial Sequence: Synthetic oligonucleotide
guggcuacacacacacaca

SEQ ID NO: 2611016 - RNA, 19 nt, Artificial Sequence
  Description of Artificial Sequence: Synthetic oligonucleotide
ccuacauguuugcacucug

SEQ ID NO: 2611017 - RNA, 19 nt, Artificial Sequence
  Description of Artificial Sequence: Synthetic oligonucleotide
accucugcuagcagcugug

SEQ ID NO: 2611018 - RNA, 19 nt, Artificial Sequence
  Description of Artificial Sequence: Synthetic oligonucleotide
cuggauugcagcugcaguu

SEQ ID NO: 2611019 - RNA, 19 nt, Artificial Sequence
  Description of Artificial Sequence: Synthetic oligonucleotide
gaacugucagaggguguca

SEQ ID NO: 2611020 - RNA, 19 nt, Artificial Sequence
  Description of Artificial Sequence: Synthetic oligonucleotide
guucagucacccaucuuua

SEQ ID NO: 2611021 - RNA, 19 nt, Artificial Sequence
  Description of Artificial Sequence: Synthetic oligonucleotide
ugcuagcagcuguggcuac

SEQ ID NO: 2611022 - RNA, 19 nt, Artificial Sequence
  Description of Artificial Sequence: Synthetic oligonucleotide
auggaucuauaggcugaug

SEQ ID NO: 2611023 - RNA, 19 nt, Artificial Sequence
  Description of Artificial Sequence: Synthetic oligonucleotide
ugggccuggcucgggauaa

SEQ ID NO: 2611024 - RNA, 19 nt, Artificial Sequence
  Description of Artificial Sequence: Synthetic oligonucleotide
ucccuggagugcaggcccu

SEQ ID NO: 2611025 - RNA, 19 nt, Artificial Sequence
  Description of Artificial Sequence: Synthetic oligonucleotide
gacagaucucugucaaauu

SEQ ID NO: 2611026 - RNA, 19 nt, Artificial Sequence
  Description of Artificial Sequence: Synthetic oligonucleotide
gucagucagauccucucau

SEQ ID NO: 2611027 - RNA, 19 nt, Artificial Sequence
  Description of Artificial Sequence: Synthetic oligonucleotide
acacacacacacagacaca

SEQ ID NO: 2611028 - RNA, 19 nt, Artificial Sequence
  Description of Artificial Sequence: Synthetic oligonucleotide
ccacucaaggagaguuggg

SEQ ID NO: 2611029 - RNA, 19 nt, Artificial Sequence
  Description of Artificial Sequence: Synthetic oligonucleotide
ccuggcucgggauaagaca

SEQ ID NO: 2611030 - RNA, 19 nt, Artificial Sequence
  Description of Artificial Sequence: Synthetic oligonucleotide
cugcaguucagucacccau

SEQ ID NO: 2611031 - RNA, 19 nt, Artificial Sequence
  Description of Artificial Sequence: Synthetic oligonucleotide
guugcccggacaggcacac

SEQ ID NO: 2611032 - RNA, 19 nt, Artificial Sequence
  Description of Artificial Sequence: Synthetic oligonucleotide
gaucucugucaaauugggu

SEQ ID NO: 2611033 - RNA, 19 nt, Artificial Sequence
  Description of Artificial Sequence: Synthetic oligonucleotide
cucugucaaauugggugca

SEQ ID NO: 2611034 - RNA, 19 nt, Artificial Sequence
  Description of Artificial Sequence: Synthetic oligonucleotide
cugggccacuccacucaag

SEQ ID NO: 2611035 - RNA, 19 nt, Artificial Sequence
  Description of Artificial Sequence: Synthetic oligonucleotide
gcuuggccugaacugguca

SEQ ID NO: 2611036 - RNA, 19 nt, Artificial Sequence
  Description of Artificial Sequence: Synthetic oligonucleotide
acacacacacagacacaca

SEQ ID NO: 2611037 - RNA, 19 nt, Artificial Sequence
  Description of Artificial Sequence: Synthetic oligonucleotide
gcagcuguggcuacacaca

SEQ ID NO: 2611038 - RNA, 19 nt, Artificial Sequence
  Description of Artificial Sequence: Synthetic oligonucleotide
cucuggugcucugcucagc

SEQ ID NO: 2611039 - RNA, 19 nt, Artificial Sequence
  Description of Artificial Sequence: Synthetic oligonucleotide
cgcaaagauuguacaaauc

SEQ ID NO: 2611040 - RNA, 19 nt, Artificial Sequence
  Description of Artificial Sequence: Synthetic oligonucleotide
ccuauggguguagacccag

SEQ ID NO: 2611041 - RNA, 19 nt, Artificial Sequence
  Description of Artificial Sequence: Synthetic oligonucleotide
guguagacccagggugggc

SEQ ID NO: 2611042 - RNA, 19 nt, Artificial Sequence
  Description of Artificial Sequence: Synthetic oligonucleotide
aggcccuccuggauugcag

SEQ ID NO: 2611043 - RNA, 19 nt, Artificial Sequence
  Description of Artificial Sequence: Synthetic oligonucleotide
acagagugacagggacuca

SEQ ID NO: 2611044 - RNA, 19 nt, Artificial Sequence
  Description of Artificial Sequence: Synthetic oligonucleotide
cugcuagcagcuguggcua

SEQ ID NO: 2611045 - RNA, 19 nt, Artificial Sequence
  Description of Artificial Sequence: Synthetic oligonucleotide
gucacccaucuuuaguauu

SEQ ID NO: 2611046 - RNA, 19 nt, Artificial Sequence
  Description of Artificial Sequence: Synthetic oligonucleotide
gcacucuggaacugucaga

SEQ ID NO: 2611047 - RNA, 19 nt, Artificial Sequence
  Description of Artificial Sequence: Synthetic oligonucleotide
ggugucaggcacagaugac

SEQ ID NO: 2611048 - RNA, 19 nt, Artificial Sequence
  Description of Artificial Sequence: Synthetic oligonucleotide
ggauaagggcuuguggggu

SEQ ID NO: 2611049 - RNA, 19 nt, Artificial Sequence
  Description of Artificial Sequence: Synthetic oligonucleotide
gcgcaaagauuguacaaau

SEQ ID NO: 2611050 - RNA, 19 nt, Artificial Sequence
  Description of Artificial Sequence: Synthetic oligonucleotide
cuggucagucagauccucu

SEQ ID NO: 2611051 - RNA, 19 nt, Artificial Sequence
  Description of Artificial Sequence: Synthetic oligonucleotide
ggccugaacuggucaguca

SEQ ID NO: 2611052 - RNA, 19 nt, Artificial Sequence
  Description of Artificial Sequence: Synthetic oligonucleotide
gcaguucagucacccaucu

SEQ ID NO: 2611053 - RNA, 19 nt, Artificial Sequence
  Description of Artificial Sequence: Synthetic oligonucleotide
ccucuggugcucugcucag

SEQ ID NO: 2611054 - RNA, 19 nt, Artificial Sequence
  Description of Artificial Sequence: Synthetic oligonucleotide
gggccacuccacucaagga

SEQ ID NO: 2611055 - RNA, 19 nt, Artificial Sequence
  Description of Artificial Sequence: Synthetic oligonucleotide
auaaggggcuuggccugaa

SEQ ID NO: 2611056 - RNA, 19 nt, Artificial Sequence
  Description of Artificial Sequence: Synthetic oligonucleotide
ggcuacacacacacacaga

SEQ ID NO: 2611057 - RNA, 19 nt, Artificial Sequence
  Description of Artificial Sequence: Synthetic oligonucleotide
cagagugacagggacucau

SEQ ID NO: 2611058 - RNA, 19 nt, Artificial Sequence
  Description of Artificial Sequence: Synthetic oligonucleotide
ccucugcuagcagcugugg

SEQ ID NO: 2611059 - RNA, 19 nt, Artificial Sequence
  Description of Artificial Sequence: Synthetic oligonucleotide
gggacucauggaggguacc

SEQ ID NO: 2611060 - RNA, 19 nt, Artificial Sequence
  Description of Artificial Sequence: Synthetic oligonucleotide
agauccucucauggaucua

SEQ ID NO: 2611061 - RNA, 19 nt, Artificial Sequence
  Description of Artificial Sequence: Synthetic oligonucleotide
ccugaacuggucagucaga

SEQ ID NO: 2611062 - RNA, 19 nt, Artificial Sequence
  Description of Artificial Sequence: Synthetic oligonucleotide
gguaccuggaagacuguau

SEQ ID NO: 2611063 - RNA, 19 nt, Artificial Sequence
  Description of Artificial Sequence: Synthetic oligonucleotide
cgggauaagacagaucucu

SEQ ID NO: 2611064 - RNA, 19 nt, Artificial Sequence
  Description of Artificial Sequence: Synthetic oligonucleotide
auccucucauggaucuaua

SEQ ID NO: 2611065 - RNA, 19 nt, Artificial Sequence
  Description of Artificial Sequence: Synthetic oligonucleotide
gccuggcucgggauaagac

SEQ ID NO: 2611066 - RNA, 19 nt, Artificial Sequence
  Description of Artificial Sequence: Synthetic oligonucleotide
cuccuggauugcagcugca

SEQ ID NO: 2611067 - RNA, 19 nt, Artificial Sequence
  Description of Artificial Sequence: Synthetic oligonucleotide
acccucacaccuacauguu

SEQ ID NO: 2611068 - RNA, 19 nt, Artificial Sequence
  Description of Artificial Sequence: Synthetic oligonucleotide
cauggaucuauaggcugau

SEQ ID NO: 2611069 - RNA, 19 nt, Artificial Sequence
  Description of Artificial Sequence: Synthetic oligonucleotide
ggacucauggaggguaccu

SEQ ID NO: 2611070 - RNA, 19 nt, Artificial Sequence
  Description of Artificial Sequence: Synthetic oligonucleotide
gucaggcacagaugacuuu

SEQ ID NO: 2611071 - RNA, 19 nt, Artificial Sequence
  Description of Artificial Sequence: Synthetic oligonucleotide
agagggugucaggcacaga

SEQ ID NO: 2611072 - RNA, 19 nt, Artificial Sequence
  Description of Artificial Sequence: Synthetic oligonucleotide
guccugaggauaagggcuu

SEQ ID NO: 2611073 - RNA, 19 nt, Artificial Sequence
  Description of Artificial Sequence: Synthetic oligonucleotide
gacccagggugggcaguca

SEQ ID NO: 2611074 - RNA, 19 nt, Artificial Sequence
  Description of Artificial Sequence: Synthetic oligonucleotide
ccuggauugcagcugcagu

SEQ ID NO: 2611075 - RNA, 19 nt, Artificial Sequence
  Description of Artificial Sequence: Synthetic oligonucleotide
cugggccuggcucgggaua

SEQ ID NO: 2611076 - RNA, 19 nt, Artificial Sequence
  Description of Artificial Sequence: Synthetic oligonucleotide
uugcccggacaggcacaca

SEQ ID NO: 2611077 - RNA, 19 nt, Artificial Sequence
  Description of Artificial Sequence: Synthetic oligonucleotide
acacacccucacaccuaca

SEQ ID NO: 2611078 - RNA, 19 nt, Artificial Sequence
  Description of Artificial Sequence: Synthetic oligonucleotide
ggcucugggccacuccacu

SEQ ID NO: 2611079 - RNA, 19 nt, Artificial Sequence
  Description of Artificial Sequence: Synthetic oligonucleotide
ggaggguaccuggaagacu

SEQ ID NO: 2611080 - RNA, 19 nt, Artificial Sequence
  Description of Artificial Sequence: Synthetic oligonucleotide
guugggagauaaggggcuu

SEQ ID NO: 2611081 - RNA, 19 nt, Artificial Sequence
  Description of Artificial Sequence: Synthetic oligonucleotide
gcucgggauaagacagauc

SEQ ID NO: 2611082 - RNA, 19 nt, Artificial Sequence
  Description of Artificial Sequence: Synthetic oligonucleotide
gguugcccggacaggcaca

SEQ ID NO: 2611083 - RNA, 19 nt, Artificial Sequence
  Description of Artificial Sequence: Synthetic oligonucleotide
ggcuuggccugaacugguc

SEQ ID NO: 2611084 - RNA, 19 nt, Artificial Sequence
  Description of Artificial Sequence: Synthetic oligonucleotide
cccagggugggcagucaca

SEQ ID NO: 2611085 - RNA, 19 nt, Artificial Sequence
  Description of Artificial Sequence: Synthetic oligonucleotide
ggcucgggauaagacagau

SEQ ID NO: 2611086 - RNA, 19 nt, Artificial Sequence
  Description of Artificial Sequence: Synthetic oligonucleotide
gcccuccuggauugcagcu

SEQ ID NO: 2611087 - RNA, 19 nt, Artificial Sequence
  Description of Artificial Sequence: Synthetic oligonucleotide
ccccucuggugcucugcuc

SEQ ID NO: 2611088 - RNA, 19 nt, Artificial Sequence
  Description of Artificial Sequence: Synthetic oligonucleotide
caucacacuguggccuuuu

SEQ ID NO: 2611089 - RNA, 19 nt, Artificial Sequence
  Description of Artificial Sequence: Synthetic oligonucleotide
gcccggacaggcacacaca

SEQ ID NO: 2611090 - RNA, 19 nt, Artificial Sequence
  Description of Artificial Sequence: Synthetic oligonucleotide
cccucacaacacacacaga

SEQ ID NO: 2611091 - RNA, 19 nt, Artificial Sequence
  Description of Artificial Sequence: Synthetic oligonucleotide
caguucagucacccaucuu

SEQ ID NO: 2611092 - RNA, 19 nt, Artificial Sequence
  Description of Artificial Sequence: Synthetic oligonucleotide
ggacaggcacacacauagu

SEQ ID NO: 2611093 - RNA, 19 nt, Artificial Sequence
  Description of Artificial Sequence: Synthetic oligonucleotide
gggccuggcucgggauaag

SEQ ID NO: 2611094 - RNA, 19 nt, Artificial Sequence
  Description of Artificial Sequence: Synthetic oligonucleotide
cccggacaggcacacacau

SEQ ID NO: 2611095 - RNA, 19 nt, Artificial Sequence
  Description of Artificial Sequence: Synthetic oligonucleotide
gggugggcagucacagagu

SEQ ID NO: 2611096 - RNA, 19 nt, Artificial Sequence
  Description of Artificial Sequence: Synthetic oligonucleotide
ccggacaggcacacacaua

SEQ ID NO: 2611097 - RNA, 19 nt, Artificial Sequence
  Description of Artificial Sequence: Synthetic oligonucleotide
ccugaggauaagggcuugu

SEQ ID NO: 2611098 - RNA, 19 nt, Artificial Sequence
  Description of Artificial Sequence: Synthetic oligonucleotide
gcaucacacuguggccuuu

SEQ ID NO: 2611099 - RNA, 19 nt, Artificial Sequence
  Description of Artificial Sequence: Synthetic oligonucleotide
auuaccauaaacuaauugg

SEQ ID NO: 2611100 - RNA, 19 nt, Artificial Sequence
  Description of Artificial Sequence: Synthetic oligonucleotide
gauuauuucaaauucaccc

SEQ ID NO: 2611101 - RNA, 19 nt, Artificial Sequence
  Description of Artificial Sequence: Synthetic oligonucleotide
uuaguaacgacucuuaaag

SEQ ID NO: 2611102 - RNA, 19 nt, Artificial Sequence
  Description of Artificial Sequence: Synthetic oligonucleotide
aauuuuauaguuucacgac

SEQ ID NO: 2611103 - RNA, 19 nt, Artificial Sequence
  Description of Artificial Sequence: Synthetic oligonucleotide
uuucauguaauuuaaacug

SEQ ID NO: 2611104 - RNA, 19 nt, Artificial Sequence
  Description of Artificial Sequence: Synthetic oligonucleotide
auuagugucagacuggaac

SEQ ID NO: 2611105 - RNA, 19 nt, Artificial Sequence
  Description of Artificial Sequence: Synthetic oligonucleotide
ucaguaauuucauagggcg

SEQ ID NO: 2611106 - RNA, 19 nt, Artificial Sequence
  Description of Artificial Sequence: Synthetic oligonucleotide
uaaacuaauuggcuuaacg

SEQ ID NO: 2611107 - RNA, 19 nt, Artificial Sequence
  Description of Artificial Sequence: Synthetic oligonucleotide
uuucaguaauuucauaggg

SEQ ID NO: 2611108 - RNA, 19 nt, Artificial Sequence
  Description of Artificial Sequence: Synthetic oligonucleotide
aauaucgggcaacauuacc

SEQ ID NO: 2611109 - RNA, 19 nt, Artificial Sequence
  Description of Artificial Sequence: Synthetic oligonucleotide
aacaauuuuauaguuucac

SEQ ID NO: 2611110 - RNA, 19 nt, Artificial Sequence
  Description of Artificial Sequence: Synthetic oligonucleotide
aaacuaauuggcuuaacga

SEQ ID NO: 2611111 - RNA, 19 nt, Artificial Sequence
  Description of Artificial Sequence: Synthetic oligonucleotide
uguuuauaggcuccuaagg

SEQ ID NO: 2611112 - RNA, 19 nt, Artificial Sequence
  Description of Artificial Sequence: Synthetic oligonucleotide
uuaccauaaacuaauuggc

SEQ ID NO: 2611113 - RNA, 19 nt, Artificial Sequence
  Description of Artificial Sequence: Synthetic oligonucleotide
uaucauuucaucauagaac

SEQ ID NO: 2611114 - RNA, 19 nt, Artificial Sequence
  Description of Artificial Sequence: Synthetic oligonucleotide
auugccauagcuuucaugu

SEQ ID NO: 2611115 - RNA, 19 nt, Artificial Sequence
  Description of Artificial Sequence: Synthetic oligonucleotide
uaaacaauuuuauaguuuc

SEQ ID NO: 2611116 - RNA, 19 nt, Artificial Sequence
  Description of Artificial Sequence: Synthetic oligonucleotide
aucauuucaucauagaacu

SEQ ID NO: 2611117 - RNA, 19 nt, Artificial Sequence
  Description of Artificial Sequence: Synthetic oligonucleotide
aauauuuugaugauuauuu

SEQ ID NO: 2611118 - RNA, 19 nt, Artificial Sequence
  Description of Artificial Sequence: Synthetic oligonucleotide
uucauguaauuuaaacugg

SEQ ID NO: 2611119 - RNA, 19 nt, Artificial Sequence
  Description of Artificial Sequence: Synthetic oligonucleotide
uaugucuuuugucugauca

SEQ ID NO: 2611120 - RNA, 19 nt, Artificial Sequence
  Description of Artificial Sequence: Synthetic oligonucleotide
uuaaacuggauuuucuuca

SEQ ID NO: 2611121 - RNA, 19 nt, Artificial Sequence
  Description of Artificial Sequence: Synthetic oligonucleotide
uucuguuucguguuuauag

SEQ ID NO: 2611122 - RNA, 19 nt, Artificial Sequence
  Description of Artificial Sequence: Synthetic oligonucleotide
aguaauuucauagggcggc

SEQ ID NO: 2611123 - RNA, 19 nt, Artificial Sequence
  Description of Artificial Sequence: Synthetic oligonucleotide
aacauauugucccagggaa

SEQ ID NO: 2611124 - RNA, 19 nt, Artificial Sequence
  Description of Artificial Sequence: Synthetic oligonucleotide
uccuguuucaguaauuuca

SEQ ID NO: 2611125 - RNA, 19 nt, Artificial Sequence
  Description of Artificial Sequence: Synthetic oligonucleotide
ugaaauaucauuucaucau

SEQ ID NO: 2611126 - RNA, 19 nt, Artificial Sequence
  Description of Artificial Sequence: Synthetic oligonucleotide
uguaugguuuuacauauac

SEQ ID NO: 2611127 - RNA, 19 nt, Artificial Sequence
  Description of Artificial Sequence: Synthetic oligonucleotide
cuaauuggcuuaacgaugg

SEQ ID NO: 2611128 - RNA, 19 nt, Artificial Sequence
  Description of Artificial Sequence: Synthetic oligonucleotide
agcucugcgauuucaaagc

SEQ ID NO: 2611129 - RNA, 19 nt, Artificial Sequence
  Description of Artificial Sequence: Synthetic oligonucleotide
aagugauacagagucaccg

SEQ ID NO: 2611130 - RNA, 19 nt, Artificial Sequence
  Description of Artificial Sequence: Synthetic oligonucleotide
aacuaauuggcuuaacgau

SEQ ID NO: 2611131 - RNA, 19 nt, Artificial Sequence
  Description of Artificial Sequence: Synthetic oligonucleotide
uuucaaauucaccccaucc

SEQ ID NO: 2611132 - RNA, 19 nt, Artificial Sequence
  Description of Artificial Sequence: Synthetic oligonucleotide
ucugcgauuucaaagcuug

SEQ ID NO: 2611133 - RNA, 19 nt, Artificial Sequence
  Description of Artificial Sequence: Synthetic oligonucleotide
aguaacgacucuuaaagga

SEQ ID NO: 2611134 - RNA, 19 nt, Artificial Sequence
  Description of Artificial Sequence: Synthetic oligonucleotide
ucuuaaaggauugccauag

SEQ ID NO: 2611135 - RNA, 19 nt, Artificial Sequence
  Description of Artificial Sequence: Synthetic oligonucleotide
uugcauuagugucagacug

SEQ ID NO: 2611136 - RNA, 19 nt, Artificial Sequence
  Description of Artificial Sequence: Synthetic oligonucleotide
ucuguuucguguuuauagg

SEQ ID NO: 2611137 - RNA, 19 nt, Artificial Sequence
  Description of Artificial Sequence: Synthetic oligonucleotide
aauuccgccauucucuuga

SEQ ID NO: 2611138 - RNA, 19 nt, Artificial Sequence
  Description of Artificial Sequence: Synthetic oligonucleotide
uuaaaggauugccauagcu

SEQ ID NO: 2611139 - RNA, 19 nt, Artificial Sequence
  Description of Artificial Sequence: Synthetic oligonucleotide
aauaucauuucaucauaga

SEQ ID NO: 2611140 - RNA, 19 nt, Artificial Sequence
  Description of Artificial Sequence: Synthetic oligonucleotide
uauaguuucacgacuugcu

SEQ ID NO: 2611141 - RNA, 19 nt, Artificial Sequence
  Description of Artificial Sequence: Synthetic oligonucleotide
uucaguaauuucauagggc

SEQ ID NO: 2611142 - RNA, 19 nt, Artificial Sequence
  Description of Artificial Sequence: Synthetic oligonucleotide
acaguuguugcaucauugc

SEQ ID NO: 2611143 - RNA, 19 nt, Artificial Sequence
  Description of Artificial Sequence: Synthetic oligonucleotide
uucauuagggucaaugaaa

SEQ ID NO: 2611144 - RNA, 19 nt, Artificial Sequence
  Description of Artificial Sequence: Synthetic oligonucleotide
caguaagugauacagaguc

SEQ ID NO: 2611145 - RNA, 19 nt, Artificial Sequence
  Description of Artificial Sequence: Synthetic oligonucleotide
aaaauaucgggcaacauua

SEQ ID NO: 2611146 - RNA, 19 nt, Artificial Sequence
  Description of Artificial Sequence: Synthetic oligonucleotide
aagcucugcgauuucaaag

SEQ ID NO: 2611147 - RNA, 19 nt, Artificial Sequence
  Description of Artificial Sequence: Synthetic oligonucleotide
aacauuaccauaaacuaau

SEQ ID NO: 2611148 - RNA, 19 nt, Artificial Sequence
  Description of Artificial Sequence: Synthetic oligonucleotide
gacgagauguuguuaacag

SEQ ID NO: 2611149 - RNA, 19 nt, Artificial Sequence
  Description of Artificial Sequence: Synthetic oligonucleotide
uuugaugauuauuucaaau

SEQ ID NO: 2611150 - RNA, 19 nt, Artificial Sequence
  Description of Artificial Sequence: Synthetic oligonucleotide
aaauaucauuucaucauag

SEQ ID NO: 2611151 - RNA, 19 nt, Artificial Sequence
  Description of Artificial Sequence: Synthetic oligonucleotide
aacgaugguaacucccuuc

SEQ ID NO: 2611152 - RNA, 19 nt, Artificial Sequence
  Description of Artificial Sequence: Synthetic oligonucleotide
cuugaaauaucauuucauc

SEQ ID NO: 2611153 - RNA, 19 nt, Artificial Sequence
  Description of Artificial Sequence: Synthetic oligonucleotide
uguuguuaacaguuguugc

SEQ ID NO: 2611154 - RNA, 19 nt, Artificial Sequence
  Description of Artificial Sequence: Synthetic oligonucleotide
augauuauuucaaauucac

SEQ ID NO: 2611155 - RNA, 19 nt, Artificial Sequence
  Description of Artificial Sequence: Synthetic oligonucleotide
auuuuauaguuucacgacu

SEQ ID NO: 2611156 - RNA, 19 nt, Artificial Sequence
  Description of Artificial Sequence: Synthetic oligonucleotide
caauuuuauaguuucacga

SEQ ID NO: 2611157 - RNA, 19 nt, Artificial Sequence
  Description of Artificial Sequence: Synthetic oligonucleotide
auaucauuucaucauagaa

SEQ ID NO: 2611158 - RNA, 19 nt, Artificial Sequence
  Description of Artificial Sequence: Synthetic oligonucleotide
ucuguaugguuuuacauau

SEQ ID NO: 2611159 - RNA, 19 nt, Artificial Sequence
  Description of Artificial Sequence: Synthetic oligonucleotide
ucucuugaacauauugucc

SEQ ID NO: 2611160 - RNA, 19 nt, Artificial Sequence
  Description of Artificial Sequence: Synthetic oligonucleotide
ucugguuuucacuucaagu

SEQ ID NO: 2611161 - RNA, 19 nt, Artificial Sequence
  Description of Artificial Sequence: Synthetic oligonucleotide
uuacauauacuguccacug

SEQ ID NO: 2611162 - RNA, 19 nt, Artificial Sequence
  Description of Artificial Sequence: Synthetic oligonucleotide
uuagugucagacuggaaca

SEQ ID NO: 2611163 - RNA, 19 nt, Artificial Sequence
  Description of Artificial Sequence: Synthetic oligonucleotide
ucauguaauuuaaacugga

SEQ ID NO: 2611164 - RNA, 19 nt, Artificial Sequence
  Description of Artificial Sequence: Synthetic oligonucleotide
ugcaaauucuguuucgugu

SEQ ID NO: 2611165 - RNA, 19 nt, Artificial Sequence
  Description of Artificial Sequence: Synthetic oligonucleotide
cuuaacgaugguaacuccc

SEQ ID NO: 2611166 - RNA, 19 nt, Artificial Sequence
  Description of Artificial Sequence: Synthetic oligonucleotide
uucaucauagaacucggaa

SEQ ID NO: 2611167 - RNA, 19 nt, Artificial Sequence
  Description of Artificial Sequence: Synthetic oligonucleotide
uuuacauauacuguccacu

SEQ ID NO: 2611168 - RNA, 19 nt, Artificial Sequence
  Description of Artificial Sequence: Synthetic oligonucleotide
ucuugaaauaucauuucau

SEQ ID NO: 2611169 - RNA, 19 nt, Artificial Sequence
  Description of Artificial Sequence: Synthetic oligonucleotide
uuagcugacgagauguugu

SEQ ID NO: 2611170 - RNA, 19 nt, Artificial Sequence
  Description of Artificial Sequence: Synthetic oligonucleotide
cacauaugcugacauaucc

SEQ ID NO: 2611171 - RNA, 19 nt, Artificial Sequence
  Description of Artificial Sequence: Synthetic oligonucleotide
uugaugauuauuucaaauu

SEQ ID NO: 2611172 - RNA, 19 nt, Artificial Sequence
  Description of Artificial Sequence: Synthetic oligonucleotide
ucauuagggucaaugaaaa

SEQ ID NO: 2611173 - RNA, 19 nt, Artificial Sequence
  Description of Artificial Sequence: Synthetic oligonucleotide
agugauacagagucaccgg

SEQ ID NO: 2611174 - RNA, 19 nt, Artificial Sequence
  Description of Artificial Sequence: Synthetic oligonucleotide
uucuucccaaaauaucggg

SEQ ID NO: 2611175 - RNA, 19 nt, Artificial Sequence
  Description of Artificial Sequence: Synthetic oligonucleotide
ugguuuuacauauacuguc

SEQ ID NO: 2611176 - RNA, 19 nt, Artificial Sequence
  Description of Artificial Sequence: Synthetic oligonucleotide
ugcauuagugucagacugg

SEQ ID NO: 2611177 - RNA, 19 nt, Artificial Sequence
  Description of Artificial Sequence: Synthetic oligonucleotide
uuaacgaugguaacucccu

SEQ ID NO: 2611178 - RNA, 19 nt, Artificial Sequence
  Description of Artificial Sequence: Synthetic oligonucleotide
acuugcuuuuaaucuuucc

SEQ ID NO: 2611179 - RNA, 19 nt, Artificial Sequence
  Description of Artificial Sequence: Synthetic oligonucleotide
uccgccauucucuugaaca

SEQ ID NO: 2611180 - RNA, 19 nt, Artificial Sequence
  Description of Artificial Sequence: Synthetic oligonucleotide
cauucucuugaacauauug

SEQ ID NO: 2611181 - RNA, 19 nt, Artificial Sequence
  Description of Artificial Sequence: Synthetic oligonucleotide
uuuccuuaagcucugcgau

SEQ ID NO: 2611182 - RNA, 19 nt, Artificial Sequence
  Description of Artificial Sequence: Synthetic oligonucleotide
aacagcuucaguaagugau

SEQ ID NO: 2611183 - RNA, 19 nt, Artificial Sequence
  Description of Artificial Sequence: Synthetic oligonucleotide
ucuucccaaaauaucgggc

SEQ ID NO: 2611184 - RNA, 19 nt, Artificial Sequence
  Description of Artificial Sequence: Synthetic oligonucleotide
acauauacuguccacuggu

SEQ ID NO: 2611185 - RNA, 19 nt, Artificial Sequence
  Description of Artificial Sequence: Synthetic oligonucleotide
guugcaucauugcuguugg

SEQ ID NO: 2611186 - RNA, 19 nt, Artificial Sequence
  Description of Artificial Sequence: Synthetic oligonucleotide
uuuauaguuucacgacuug

SEQ ID NO: 2611187 - RNA, 19 nt, Artificial Sequence
  Description of Artificial Sequence: Synthetic oligonucleotide
uugaacauauugucccagg

SEQ ID NO: 2611188 - RNA, 19 nt, Artificial Sequence
  Description of Artificial Sequence: Synthetic oligonucleotide
ucaccggucuuucauuagg

SEQ ID NO: 2611189 - RNA, 19 nt, Artificial Sequence
  Description of Artificial Sequence: Synthetic oligonucleotide
uaguaacgacucuuaaagg

SEQ ID NO: 2611190 - RNA, 19 nt, Artificial Sequence
  Description of Artificial Sequence: Synthetic oligonucleotide
uguuucguguuuauaggcu

SEQ ID NO: 2611191 - RNA, 19 nt, Artificial Sequence
  Description of Artificial Sequence: Synthetic oligonucleotide
aauuuaaacuggauuuucu

SEQ ID NO: 2611192 - RNA, 19 nt, Artificial Sequence
  Description of Artificial Sequence: Synthetic oligonucleotide
cauagggcggcuuaguaac

SEQ ID NO: 2611193 - RNA, 19 nt, Artificial Sequence
  Description of Artificial Sequence: Synthetic oligonucleotide
auguaauuuaaacuggauu

SEQ ID NO: 2611194 - RNA, 19 nt, Artificial Sequence
  Description of Artificial Sequence: Synthetic oligonucleotide
auucaccccauccuguuuc

SEQ ID NO: 2611195 - RNA, 19 nt, Artificial Sequence
  Description of Artificial Sequence: Synthetic oligonucleotide
cauugcauuagugucagac

SEQ ID NO: 2611196 - RNA, 19 nt, Artificial Sequence
  Description of Artificial Sequence: Synthetic oligonucleotide
uuauaggcuccuaagguua

SEQ ID NO: 2611197 - RNA, 19 nt, Artificial Sequence
  Description of Artificial Sequence: Synthetic oligonucleotide
uaccauaaacuaauuggcu

SEQ ID NO: 2611198 - RNA, 19 nt, Artificial Sequence
  Description of Artificial Sequence: Synthetic oligonucleotide
uucacauaugcugacauau

SEQ ID NO: 2611199 - RNA, 19 nt, Artificial Sequence
  Description of Artificial Sequence: Synthetic oligonucleotide
uguugcaucauugcuguug

SEQ ID NO: 2611200 - RNA, 19 nt, Artificial Sequence
  Description of Artificial Sequence: Synthetic oligonucleotide
cauuaccauaaacuaauug

SEQ ID NO: 2611201 - RNA, 19 nt, Artificial Sequence
  Description of Artificial Sequence: Synthetic oligonucleotide
uuuauaggcuccuaagguu

SEQ ID NO: 2611202 - RNA, 19 nt, Artificial Sequence
  Description of Artificial Sequence: Synthetic oligonucleotide
uucuguaugguuuuacaua

SEQ ID NO: 2611203 - RNA, 19 nt, Artificial Sequence
  Description of Artificial Sequence: Synthetic oligonucleotide
uuucguguuuauaggcucc

SEQ ID NO: 2611204 - RNA, 19 nt, Artificial Sequence
  Description of Artificial Sequence: Synthetic oligonucleotide
guuguuaacaguuguugca

SEQ ID NO: 2611205 - RNA, 19 nt, Artificial Sequence
  Description of Artificial Sequence: Synthetic oligonucleotide
ucauagaacucggaaacca

SEQ ID NO: 2611206 - RNA, 19 nt, Artificial Sequence
  Description of Artificial Sequence: Synthetic oligonucleotide
auuucaaauucaccccauc

SEQ ID NO: 2611207 - RNA, 19 nt, Artificial Sequence
  Description of Artificial Sequence: Synthetic oligonucleotide
cauaugcugacauauccuc

SEQ ID NO: 2611208 - RNA, 19 nt, Artificial Sequence
  Description of Artificial Sequence: Synthetic oligonucleotide
agugcuuauaugucuuuug

SEQ ID NO: 2611209 - RNA, 19 nt, Artificial Sequence
  Description of Artificial Sequence: Synthetic oligonucleotide
cuguuucguguuuauaggc

SEQ ID NO: 2611210 - RNA, 19 nt, Artificial Sequence
  Description of Artificial Sequence: Synthetic oligonucleotide
ucgggcaacauuaccauaa

SEQ ID NO: 2611211 - RNA, 19 nt, Artificial Sequence
  Description of Artificial Sequence: Synthetic oligonucleotide
auuucuguaugguuuuaca

SEQ ID NO: 2611212 - RNA, 19 nt, Artificial Sequence
  Description of Artificial Sequence: Synthetic oligonucleotide
acucuuaaaggauugccau

SEQ ID NO: 2611213 - RNA, 19 nt, Artificial Sequence
  Description of Artificial Sequence: Synthetic oligonucleotide
guaagugauacagagucac

SEQ ID NO: 2611214 - RNA, 19 nt, Artificial Sequence
  Description of Artificial Sequence: Synthetic oligonucleotide
guguuuauaggcuccuaag

SEQ ID NO: 2611215 - RNA, 19 nt, Artificial Sequence
  Description of Artificial Sequence: Synthetic oligonucleotide
auugcauuagugucagacu

SEQ ID NO: 2611216 - RNA, 19 nt, Artificial Sequence
  Description of Artificial Sequence: Synthetic oligonucleotide
aaauaucgggcaacauuac

SEQ ID NO: 2611217 - RNA, 19 nt, Artificial Sequence
  Description of Artificial Sequence: Synthetic oligonucleotide
aucauagaacucggaaacc

SEQ ID NO: 2611218 - RNA, 19 nt, Artificial Sequence
  Description of Artificial Sequence: Synthetic oligonucleotide
aauuucauagggcggcuua

SEQ ID NO: 2611219 - RNA, 19 nt, Artificial Sequence
  Description of Artificial Sequence: Synthetic oligonucleotide
ucaguaagugauacagagu

SEQ ID NO: 2611220 - RNA, 19 nt, Artificial Sequence
  Description of Artificial Sequence: Synthetic oligonucleotide
acuaauuggcuuaacgaug

SEQ ID NO: 2611221 - RNA, 19 nt, Artificial Sequence
  Description of Artificial Sequence: Synthetic oligonucleotide
auguuguuaacaguuguug

SEQ ID NO: 2611222 - RNA, 19 nt, Artificial Sequence
  Description of Artificial Sequence: Synthetic oligonucleotide
gcuucaguaagugauacag

SEQ ID NO: 2611223 - RNA, 19 nt, Artificial Sequence
  Description of Artificial Sequence: Synthetic oligonucleotide
cuuucauguaauuuaaacu

SEQ ID NO: 2611224 - RNA, 19 nt, Artificial Sequence
  Description of Artificial Sequence: Synthetic oligonucleotide
ugccauagcuuucauguaa

SEQ ID NO: 2611225 - RNA, 19 nt, Artificial Sequence
  Description of Artificial Sequence: Synthetic oligonucleotide
aaguucugcaaauucuguu

SEQ ID NO: 2611226 - RNA, 19 nt, Artificial Sequence
  Description of Artificial Sequence: Synthetic oligonucleotide
caguaauuucauagggcgg

SEQ ID NO: 2611227 - RNA, 19 nt, Artificial Sequence
  Description of Artificial Sequence: Synthetic oligonucleotide
uugcuuuuaaucuuuccuu

SEQ ID NO: 2611228 - RNA, 19 nt, Artificial Sequence
  Description of Artificial Sequence: Synthetic oligonucleotide
gacuggaacagcuucagua

SEQ ID NO: 2611229 - RNA, 19 nt, Artificial Sequence
  Description of Artificial Sequence: Synthetic oligonucleotide
ucagacuggaacagcuuca

SEQ ID NO: 2611230 - RNA, 19 nt, Artificial Sequence
  Description of Artificial Sequence: Synthetic oligonucleotide
uauaggcuccuaagguuag

SEQ ID NO: 2611231 - RNA, 19 nt, Artificial Sequence
  Description of Artificial Sequence: Synthetic oligonucleotide
uaagugauacagagucacc

SEQ ID NO: 2611232 - RNA, 19 nt, Artificial Sequence
  Description of Artificial Sequence: Synthetic oligonucleotide
aguuguugcaucauugcug

SEQ ID NO: 2611233 - RNA, 19 nt, Artificial Sequence
  Description of Artificial Sequence: Synthetic oligonucleotide
uaagguuagcugacgagau

SEQ ID NO: 2611234 - RNA, 19 nt, Artificial Sequence
  Description of Artificial Sequence: Synthetic oligonucleotide
uaugcugacauauccucau

SEQ ID NO: 2611235 - RNA, 19 nt, Artificial Sequence
  Description of Artificial Sequence: Synthetic oligonucleotide
uaaacuggauuuucuucac

SEQ ID NO: 2611236 - RNA, 19 nt, Artificial Sequence
  Description of Artificial Sequence: Synthetic oligonucleotide
ucuugaacauauuguccca

SEQ ID NO: 2611237 - RNA, 19 nt, Artificial Sequence
  Description of Artificial Sequence: Synthetic oligonucleotide
acuggaacagcuucaguaa

SEQ ID NO: 2611238 - RNA, 19 nt, Artificial Sequence
  Description of Artificial Sequence: Synthetic oligonucleotide
auuggcuuaacgaugguaa

SEQ ID NO: 2611239 - RNA, 19 nt, Artificial Sequence
  Description of Artificial Sequence: Synthetic oligonucleotide
auaucgggcaacauuacca

SEQ ID NO: 2611240 - RNA, 19 nt, Artificial Sequence
  Description of Artificial Sequence: Synthetic oligonucleotide
ugcuuuuaaucuuuccuua

SEQ ID NO: 2611241 - RNA, 19 nt, Artificial Sequence
  Description of Artificial Sequence: Synthetic oligonucleotide
ugggucuugaaauaucauu

SEQ ID NO: 2611242 - RNA, 19 nt, Artificial Sequence
  Description of Artificial Sequence: Synthetic oligonucleotide
cauagaacucggaaaccac

SEQ ID NO: 2611243 - RNA, 19 nt, Artificial Sequence
  Description of Artificial Sequence: Synthetic oligonucleotide
aagguuagcugacgagaug

SEQ ID NO: 2611244 - RNA, 19 nt, Artificial Sequence
  Description of Artificial Sequence: Synthetic oligonucleotide
uccuaagguuagcugacga

SEQ ID NO: 2611245 - RNA, 19 nt, Artificial Sequence
  Description of Artificial Sequence: Synthetic oligonucleotide
cuucccaaaauaucgggca

SEQ ID NO: 2611246 - RNA, 19 nt, Artificial Sequence
  Description of Artificial Sequence: Synthetic oligonucleotide
uggaacagcuucaguaagu

SEQ ID NO: 2611247 - RNA, 19 nt, Artificial Sequence
  Description of Artificial Sequence: Synthetic oligonucleotide
ugcaucauugcuguugggu

SEQ ID NO: 2611248 - RNA, 19 nt, Artificial Sequence
  Description of Artificial Sequence: Synthetic oligonucleotide
ugcuuauaugucuuuuguc

SEQ ID NO: 2611249 - RNA, 19 nt, Artificial Sequence
  Description of Artificial Sequence: Synthetic oligonucleotide
ugauacagagucaccgguc

SEQ ID NO: 2611250 - RNA, 19 nt, Artificial Sequence
  Description of Artificial Sequence: Synthetic oligonucleotide
ucacgacuugcuuuuaauc

SEQ ID NO: 2611251 - RNA, 19 nt, Artificial Sequence
  Description of Artificial Sequence: Synthetic oligonucleotide
gucuugaaauaucauuuca

SEQ ID NO: 2611252 - RNA, 19 nt, Artificial Sequence
  Description of Artificial Sequence: Synthetic oligonucleotide
aguuucacgacuugcuuuu

SEQ ID NO: 2611253 - RNA, 19 nt, Artificial Sequence
  Description of Artificial Sequence: Synthetic oligonucleotide
ucauagggcggcuuaguaa

SEQ ID NO: 2611254 - RNA, 19 nt, Artificial Sequence
  Description of Artificial Sequence: Synthetic oligonucleotide
guuuauaggcuccuaaggu

SEQ ID NO: 2611255 - RNA, 19 nt, Artificial Sequence
  Description of Artificial Sequence: Synthetic oligonucleotide
aaauucaccccauccuguu

SEQ ID NO: 2611256 - RNA, 19 nt, Artificial Sequence
  Description of Artificial Sequence: Synthetic oligonucleotide
acgaugguaacucccuuca

SEQ ID NO: 2611257 - RNA, 19 nt, Artificial Sequence
  Description of Artificial Sequence: Synthetic oligonucleotide
cuuaguaacgacucuuaaa

SEQ ID NO: 2611258 - RNA, 19 nt, Artificial Sequence
  Description of Artificial Sequence: Synthetic oligonucleotide
cuuuccuuaagcucugcga

SEQ ID NO: 2611259 - RNA, 19 nt, Artificial Sequence
  Description of Artificial Sequence: Synthetic oligonucleotide
agguuagcugacgagaugu

SEQ ID NO: 2611260 - RNA, 19 nt, Artificial Sequence
  Description of Artificial Sequence: Synthetic oligonucleotide
uuuucuuggcggcuucuaa

SEQ ID NO: 2611261 - RNA, 19 nt, Artificial Sequence
  Description of Artificial Sequence: Synthetic oligonucleotide
guuucguguuuauaggcuc

SEQ ID NO: 2611262 - RNA, 19 nt, Artificial Sequence
  Description of Artificial Sequence: Synthetic oligonucleotide
ugacgagauguuguuaaca

SEQ ID NO: 2611263 - RNA, 19 nt, Artificial Sequence
  Description of Artificial Sequence: Synthetic oligonucleotide
uguugggucuugaaauauc

SEQ ID NO: 2611264 - RNA, 19 nt, Artificial Sequence
  Description of Artificial Sequence: Synthetic oligonucleotide
gacucuuaaaggauugcca

SEQ ID NO: 2611265 - RNA, 19 nt, Artificial Sequence
  Description of Artificial Sequence: Synthetic oligonucleotide
cauauacuguccacuggug

SEQ ID NO: 2611266 - RNA, 19 nt, Artificial Sequence
  Description of Artificial Sequence: Synthetic oligonucleotide
uuguuaacaguuguugcau

SEQ ID NO: 2611267 - RNA, 19 nt, Artificial Sequence
  Description of Artificial Sequence: Synthetic oligonucleotide
uuucuucacauaugcugac

SEQ ID NO: 2611268 - RNA, 19 nt, Artificial Sequence
  Description of Artificial Sequence: Synthetic oligonucleotide
gagucaggcccaaauuccg

SEQ ID NO: 2611269 - RNA, 19 nt, Artificial Sequence
  Description of Artificial Sequence: Synthetic oligonucleotide
gaugguaacucccuucacu

SEQ ID NO: 2611270 - RNA, 19 nt, Artificial Sequence
  Description of Artificial Sequence: Synthetic oligonucleotide
auaaacuaauuggcuuaac

SEQ ID NO: 2611271 - RNA, 19 nt, Artificial Sequence
  Description of Artificial Sequence: Synthetic oligonucleotide
cuugcuuuuaaucuuuccu

SEQ ID NO: 2611272 - RNA, 19 nt, Artificial Sequence
  Description of Artificial Sequence: Synthetic oligonucleotide
uugcuguugggucuugaaa

SEQ ID NO: 2611273 - RNA, 19 nt, Artificial Sequence
  Description of Artificial Sequence: Synthetic oligonucleotide
agcauugcauuagugucag

SEQ ID NO: 2611274 - RNA, 19 nt, Artificial Sequence
  Description of Artificial Sequence: Synthetic oligonucleotide
ugcugacauauccucauuu

SEQ ID NO: 2611275 - RNA, 19 nt, Artificial Sequence
  Description of Artificial Sequence: Synthetic oligonucleotide
agagucaccggucuuucau

SEQ ID NO: 2611276 - RNA, 19 nt, Artificial Sequence
  Description of Artificial Sequence: Synthetic oligonucleotide
caacauuaccauaaacuaa

SEQ ID NO: 2611277 - RNA, 19 nt, Artificial Sequence
  Description of Artificial Sequence: Synthetic oligonucleotide
gcaacauuaccauaaacua

SEQ ID NO: 2611278 - RNA, 19 nt, Artificial Sequence
  Description of Artificial Sequence: Synthetic oligonucleotide
gacauauccucauuucugu

SEQ ID NO: 2611279 - RNA, 19 nt, Artificial Sequence
  Description of Artificial Sequence: Synthetic oligonucleotide
gcuuauaugucuuuugucu

SEQ ID NO: 2611280 - RNA, 19 nt, Artificial Sequence
  Description of Artificial Sequence: Synthetic oligonucleotide
uguuaacaguuguugcauc

SEQ ID NO: 2611281 - RNA, 19 nt, Artificial Sequence
  Description of Artificial Sequence: Synthetic oligonucleotide
ucacauaugcugacauauc

SEQ ID NO: 2611282 - RNA, 19 nt, Artificial Sequence
  Description of Artificial Sequence: Synthetic oligonucleotide
cuugaacauauugucccag

SEQ ID NO: 2611283 - RNA, 19 nt, Artificial Sequence
  Description of Artificial Sequence: Synthetic oligonucleotide
auaugucuuuugucugauc

SEQ ID NO: 2611284 - RNA, 19 nt, Artificial Sequence
  Description of Artificial Sequence: Synthetic oligonucleotide
aauuggcuuaacgauggua

SEQ ID NO: 2611285 - RNA, 19 nt, Artificial Sequence
  Description of Artificial Sequence: Synthetic oligonucleotide
caccggucuuucauuaggg

SEQ ID NO: 2611286 - RNA, 19 nt, Artificial Sequence
  Description of Artificial Sequence: Synthetic oligonucleotide
auaguuucacgacuugcuu

SEQ ID NO: 2611287 - RNA, 19 nt, Artificial Sequence
  Description of Artificial Sequence: Synthetic oligonucleotide
cuaagguuagcugacgaga

SEQ ID NO: 2611288 - RNA, 19 nt, Artificial Sequence
  Description of Artificial Sequence: Synthetic oligonucleotide
uucacgacuugcuuuuaau

SEQ ID NO: 2611289 - RNA, 19 nt, Artificial Sequence
  Description of Artificial Sequence: Synthetic oligonucleotide
uaguuucacgacuugcuuu

SEQ ID NO: 2611290 - RNA, 19 nt, Artificial Sequence
  Description of Artificial Sequence: Synthetic oligonucleotide
cuuaaaggauugccauagc

SEQ ID NO: 2611291 - RNA, 19 nt, Artificial Sequence
  Description of Artificial Sequence: Synthetic oligonucleotide
uucccaaaauaucgggcaa

SEQ ID NO: 2611292 - RNA, 19 nt, Artificial Sequence
  Description of Artificial Sequence: Synthetic oligonucleotide
acgacucuuaaaggauugc

SEQ ID NO: 2611293 - RNA, 19 nt, Artificial Sequence
  Description of Artificial Sequence: Synthetic oligonucleotide
guuguugcaucauugcugu

SEQ ID NO: 2611294 - RNA, 19 nt, Artificial Sequence
  Description of Artificial Sequence: Synthetic oligonucleotide
uagugucagacuggaacag

SEQ ID NO: 2611295 - RNA, 19 nt, Artificial Sequence
  Description of Artificial Sequence: Synthetic oligonucleotide
uuggcuuaacgaugguaac

SEQ ID NO: 2611296 - RNA, 19 nt, Artificial Sequence
  Description of Artificial Sequence: Synthetic oligonucleotide
uucauagggcggcuuagua

SEQ ID NO: 2611297 - RNA, 19 nt, Artificial Sequence
  Description of Artificial Sequence: Synthetic oligonucleotide
ucuucucuuuucuucccaa

SEQ ID NO: 2611298 - RNA, 19 nt, Artificial Sequence
  Description of Artificial Sequence: Synthetic oligonucleotide
ucauuucaucauagaacuc

SEQ ID NO: 2611299 - RNA, 19 nt, Artificial Sequence
  Description of Artificial Sequence: Synthetic oligonucleotide
guugggucuugaaauauca

SEQ ID NO: 2611300 - RNA, 19 nt, Artificial Sequence
  Description of Artificial Sequence: Synthetic oligonucleotide
aaucuuuccuuaagcucug

SEQ ID NO: 2611301 - RNA, 19 nt, Artificial Sequence
  Description of Artificial Sequence: Synthetic oligonucleotide
acgagauguuguuaacagu

SEQ ID NO: 2611302 - RNA, 19 nt, Artificial Sequence
  Description of Artificial Sequence: Synthetic oligonucleotide
aaauucuguuucguguuua

SEQ ID NO: 2611303 - RNA, 19 nt, Artificial Sequence
  Description of Artificial Sequence: Synthetic oligonucleotide
uuuuccccagcauugcauu

SEQ ID NO: 2611304 - RNA, 19 nt, Artificial Sequence
  Description of Artificial Sequence: Synthetic oligonucleotide
cugcaaauucuguuucgug

SEQ ID NO: 2611305 - RNA, 19 nt, Artificial Sequence
  Description of Artificial Sequence: Synthetic oligonucleotide
acgacuugcuuuuaaucuu

SEQ ID NO: 2611306 - RNA, 19 nt, Artificial Sequence
  Description of Artificial Sequence: Synthetic oligonucleotide
uggcuuaacgaugguaacu

SEQ ID NO: 2611307 - RNA, 19 nt, Artificial Sequence
  Description of Artificial Sequence: Synthetic oligonucleotide
uauaugucuuuugucugau

SEQ ID NO: 2611308 - RNA, 19 nt, Artificial Sequence
  Description of Artificial Sequence: Synthetic oligonucleotide
guuagcugacgagauguug

SEQ ID NO: 2611309 - RNA, 19 nt, Artificial Sequence
  Description of Artificial Sequence: Synthetic oligonucleotide
aauucaccccauccuguuu

SEQ ID NO: 2611310 - RNA, 19 nt, Artificial Sequence
  Description of Artificial Sequence: Synthetic oligonucleotide
ucuuuugucugaucaucuu

SEQ ID NO: 2611311 - RNA, 19 nt, Artificial Sequence
  Description of Artificial Sequence: Synthetic oligonucleotide
  modified_base (16)..(16): a, c, u, g, unknown or other
acucggaaaccaccgnuuu

SEQ ID NO: 2611312 - RNA, 19 nt, Artificial Sequence
  Description of Artificial Sequence: Synthetic oligonucleotide
acauaugcugacauauccu

SEQ ID NO: 2611313 - RNA, 19 nt, Artificial Sequence
  Description of Artificial Sequence: Synthetic oligonucleotide
agucaggcccaaauuccgc

SEQ ID NO: 2611314 - RNA, 19 nt, Artificial Sequence
  Description of Artificial Sequence: Synthetic oligonucleotide
uucuuggcggcuucuaauu

SEQ ID NO: 2611315 - RNA, 19 nt, Artificial Sequence
  Description of Artificial Sequence: Synthetic oligonucleotide
uuccccagcauugcauuag

SEQ ID NO: 2611316 - RNA, 19 nt, Artificial Sequence
  Description of Artificial Sequence: Synthetic oligonucleotide
cucugguuuucacuucaag

SEQ ID NO: 2611317 - RNA, 19 nt, Artificial Sequence
  Description of Artificial Sequence: Synthetic oligonucleotide
uccucauuucuguaugguu

SEQ ID NO: 2611318 - RNA, 19 nt, Artificial Sequence
  Description of Artificial Sequence: Synthetic oligonucleotide
cacgacuugcuuuuaaucu

SEQ ID NO: 2611319 - RNA, 19 nt, Artificial Sequence
  Description of Artificial Sequence: Synthetic oligonucleotide
cauuucuguaugguuuuac

SEQ ID NO: 2611320 - RNA, 19 nt, Artificial Sequence
  Description of Artificial Sequence: Synthetic oligonucleotide
agggcggcuuaguaacgac

SEQ ID NO: 2611321 - RNA, 19 nt, Artificial Sequence
  Description of Artificial Sequence: Synthetic oligonucleotide
acauauugucccagggaag

SEQ ID NO: 2611322 - RNA, 19 nt, Artificial Sequence
  Description of Artificial Sequence: Synthetic oligonucleotide
uccuuaagcucugcgauuu

SEQ ID NO: 2611323 - RNA, 19 nt, Artificial Sequence
  Description of Artificial Sequence: Synthetic oligonucleotide
uucacucucccgccggagu

SEQ ID NO: 2611324 - RNA, 19 nt, Artificial Sequence
  Description of Artificial Sequence: Synthetic oligonucleotide
uucuucacauaugcugaca

SEQ ID NO: 2611325 - RNA, 19 nt, Artificial Sequence
  Description of Artificial Sequence: Synthetic oligonucleotide
auugcuguugggucuugaa

SEQ ID NO: 2611326 - RNA, 19 nt, Artificial Sequence
  Description of Artificial Sequence: Synthetic oligonucleotide
uugggucuugaaauaucau

SEQ ID NO: 2611327 - RNA, 19 nt, Artificial Sequence
  Description of Artificial Sequence: Synthetic oligonucleotide
auaggcuccuaagguuagc

SEQ ID NO: 2611328 - RNA, 19 nt, Artificial Sequence
  Description of Artificial Sequence: Synthetic oligonucleotide
ucucccgccggagucaggc

SEQ ID NO: 2611329 - RNA, 19 nt, Artificial Sequence
  Description of Artificial Sequence: Synthetic oligonucleotide
aggauugccauagcuuuca

SEQ ID NO: 2611330 - RNA, 19 nt, Artificial Sequence
  Description of Artificial Sequence: Synthetic oligonucleotide
ggucuugaaauaucauuuc

SEQ ID NO: 2611331 - RNA, 19 nt, Artificial Sequence
  Description of Artificial Sequence: Synthetic oligonucleotide
uccacuggugggugugucc

SEQ ID NO: 2611332 - RNA, 19 nt, Artificial Sequence
  Description of Artificial Sequence: Synthetic oligonucleotide
ugguaacucccuucacucu

SEQ ID NO: 2611333 - RNA, 19 nt, Artificial Sequence
  Description of Artificial Sequence: Synthetic oligonucleotide
uaggcuccuaagguuagcu

SEQ ID NO: 2611334 - RNA, 19 nt, Artificial Sequence
  Description of Artificial Sequence: Synthetic oligonucleotide
gguaacucccuucacucuc

SEQ ID NO: 2611335 - RNA, 19 nt, Artificial Sequence
  Description of Artificial Sequence: Synthetic oligonucleotide
ucccaaaauaucgggcaac

SEQ ID NO: 2611336 - RNA, 19 nt, Artificial Sequence
  Description of Artificial Sequence: Synthetic oligonucleotide
ugcgauuucaaagcuuguu

SEQ ID NO: 2611337 - RNA, 19 nt, Artificial Sequence
  Description of Artificial Sequence: Synthetic oligonucleotide
ggcuccuaagguuagcuga

SEQ ID NO: 2611338 - RNA, 19 nt, Artificial Sequence
  Description of Artificial Sequence: Synthetic oligonucleotide
cuucaguaagugauacaga

SEQ ID NO: 2611339 - RNA, 19 nt, Artificial Sequence
  Description of Artificial Sequence: Synthetic oligonucleotide
acagagucaccggucuuuc

SEQ ID NO: 2611340 - RNA, 19 nt, Artificial Sequence
  Description of Artificial Sequence: Synthetic oligonucleotide
ucacucucccgccggaguc

SEQ ID NO: 2611341 - RNA, 19 nt, Artificial Sequence
  Description of Artificial Sequence: Synthetic oligonucleotide
aguaagugauacagaguca

SEQ ID NO: 2611342 - RNA, 19 nt, Artificial Sequence
  Description of Artificial Sequence: Synthetic oligonucleotide
ucccgccggagucaggccc

SEQ ID NO: 2611343 - RNA, 19 nt, Artificial Sequence
  Description of Artificial Sequence: Synthetic oligonucleotide
caaaauaucgggcaacauu

SEQ ID NO: 2611344 - RNA, 19 nt, Artificial Sequence
  Description of Artificial Sequence: Synthetic oligonucleotide
cagcauugcauuaguguca

SEQ ID NO: 2611345 - RNA, 19 nt, Artificial Sequence
  Description of Artificial Sequence: Synthetic oligonucleotide
uaauuggcuuaacgauggu

SEQ ID NO: 2611346 - RNA, 19 nt, Artificial Sequence
  Description of Artificial Sequence: Synthetic oligonucleotide
ggagucaggcccaaauucc

SEQ ID NO: 2611347 - RNA, 19 nt, Artificial Sequence
  Description of Artificial Sequence: Synthetic oligonucleotide
auaugcugacauauccuca

SEQ ID NO: 2611348 - RNA, 19 nt, Artificial Sequence
  Description of Artificial Sequence: Synthetic oligonucleotide
uuucauagggcggcuuagu

SEQ ID NO: 2611349 - RNA, 19 nt, Artificial Sequence
  Description of Artificial Sequence: Synthetic oligonucleotide
ucuuggcggcuucuaauuu

SEQ ID NO: 2611350 - RNA, 19 nt, Artificial Sequence
  Description of Artificial Sequence: Synthetic oligonucleotide
agcuucaguaagugauaca

SEQ ID NO: 2611351 - RNA, 19 nt, Artificial Sequence
  Description of Artificial Sequence: Synthetic oligonucleotide
cugacgagauguuguuaac

SEQ ID NO: 2611352 - RNA, 19 nt, Artificial Sequence
  Description of Artificial Sequence: Synthetic oligonucleotide
ccuaagguuagcugacgag

SEQ ID NO: 2611353 - RNA, 19 nt, Artificial Sequence
  Description of Artificial Sequence: Synthetic oligonucleotide
guaacucccuucacucucc

SEQ ID NO: 2611354 - RNA, 19 nt, Artificial Sequence
  Description of Artificial Sequence: Synthetic oligonucleotide
agucaccggucuuucauua

SEQ ID NO: 2611355 - RNA, 19 nt, Artificial Sequence
  Description of Artificial Sequence: Synthetic oligonucleotide
  modified_base (17)..(17): a, c, u, g, unknown or other
aacucggaaaccaccgnuu

SEQ ID NO: 2611356 - RNA, 19 nt, Artificial Sequence
  Description of Artificial Sequence: Synthetic oligonucleotide
accggucuuucauuagggu

SEQ ID NO: 2611357 - RNA, 19 nt, Artificial Sequence
  Description of Artificial Sequence: Synthetic oligonucleotide
gcugacauauccucauuuc

SEQ ID NO: 2611358 - RNA, 19 nt, Artificial Sequence
  Description of Artificial Sequence: Synthetic oligonucleotide
uucguguuuauaggcuccu

SEQ ID NO: 2611359 - RNA, 19 nt, Artificial Sequence
  Description of Artificial Sequence: Synthetic oligonucleotide
cagacuggaacagcuucag

SEQ ID NO: 2611360 - RNA, 19 nt, Artificial Sequence
  Description of Artificial Sequence: Synthetic oligonucleotide
aggcuccuaagguuagcug

SEQ ID NO: 2611361 - RNA, 19 nt, Artificial Sequence
  Description of Artificial Sequence: Synthetic oligonucleotide
cucccuucacucucccgcc

SEQ ID NO: 2611362 - RNA, 19 nt, Artificial Sequence
  Description of Artificial Sequence: Synthetic oligonucleotide
uaacgaugguaacucccuu

SEQ ID NO: 2611363 - RNA, 19 nt, Artificial Sequence
  Description of Artificial Sequence: Synthetic oligonucleotide
cuuaagcucugcgauuuca

SEQ ID NO: 2611364 - RNA, 19 nt, Artificial Sequence
  Description of Artificial Sequence: Synthetic oligonucleotide
gucaccggucuuucauuag

SEQ ID NO: 2611365 - RNA, 19 nt, Artificial Sequence
  Description of Artificial Sequence: Synthetic oligonucleotide
gugcuuauaugucuuuugu

SEQ ID NO: 2611366 - RNA, 19 nt, Artificial Sequence
  Description of Artificial Sequence: Synthetic oligonucleotide
uucaccccauccuguuuca

SEQ ID NO: 2611367 - RNA, 19 nt, Artificial Sequence
  Description of Artificial Sequence: Synthetic oligonucleotide
ggcuuaacgaugguaacuc

SEQ ID NO: 2611368 - RNA, 19 nt, Artificial Sequence
  Description of Artificial Sequence: Synthetic oligonucleotide
gcugacgagauguuguuaa

SEQ ID NO: 2611369 - RNA, 19 nt, Artificial Sequence
  Description of Artificial Sequence: Synthetic oligonucleotide
uccccagcauugcauuagu

SEQ ID NO: 2611370 - RNA, 19 nt, Artificial Sequence
  Description of Artificial Sequence: Synthetic oligonucleotide
cagcuucaguaagugauac

SEQ ID NO: 2611371 - RNA, 19 nt, Artificial Sequence
  Description of Artificial Sequence: Synthetic oligonucleotide
uuccuuaagcucugcgauu

SEQ ID NO: 2611372 - RNA, 19 nt, Artificial Sequence
  Description of Artificial Sequence: Synthetic oligonucleotide
auacuguccacuggugggu

SEQ ID NO: 2611373 - RNA, 19 nt, Artificial Sequence
  Description of Artificial Sequence: Synthetic oligonucleotide
ucucugguuuucacuucaa

SEQ ID NO: 2611374 - RNA, 19 nt, Artificial Sequence
  Description of Artificial Sequence: Synthetic oligonucleotide
  modified_base (18)..(18): a, c, u, g, unknown or other
gaacucggaaaccaccgnu

SEQ ID NO: 2611375 - RNA, 19 nt, Artificial Sequence
  Description of Artificial Sequence: Synthetic oligonucleotide
cugacauauccucauuucu

SEQ ID NO: 2611376 - RNA, 19 nt, Artificial Sequence
  Description of Artificial Sequence: Synthetic oligonucleotide
cauauccucauuucuguau

SEQ ID NO: 2611377 - RNA, 19 nt, Artificial Sequence
  Description of Artificial Sequence: Synthetic oligonucleotide
cauaaacuaauuggcuuaa

SEQ ID NO: 2611378 - RNA, 19 nt, Artificial Sequence
  Description of Artificial Sequence: Synthetic oligonucleotide
auccucauuucuguauggu

SEQ ID NO: 2611379 - RNA, 19 nt, Artificial Sequence
  Description of Artificial Sequence: Synthetic oligonucleotide
gugauacagagucaccggu

SEQ ID NO: 2611380 - RNA, 19 nt, Artificial Sequence
  Description of Artificial Sequence: Synthetic oligonucleotide
cuccuaagguuagcugacg

SEQ ID NO: 2611381 - RNA, 19 nt, Artificial Sequence
  Description of Artificial Sequence: Synthetic oligonucleotide
uagggcggcuuaguaacga

SEQ ID NO: 2611382 - RNA, 19 nt, Artificial Sequence
  Description of Artificial Sequence: Synthetic oligonucleotide
gcuuaacgaugguaacucc

SEQ ID NO: 2611383 - RNA, 19 nt, Artificial Sequence
  Description of Artificial Sequence: Synthetic oligonucleotide
uagcugacgagauguuguu

SEQ ID NO: 2611384 - RNA, 19 nt, Artificial Sequence
  Description of Artificial Sequence: Synthetic oligonucleotide
cucuuaaaggauugccaua

SEQ ID NO: 2611385 - RNA, 19 nt, Artificial Sequence
  Description of Artificial Sequence: Synthetic oligonucleotide
guaacgacucuuaaaggau

SEQ ID NO: 2611386 - RNA, 19 nt, Artificial Sequence
  Description of Artificial Sequence: Synthetic oligonucleotide
caaauucaccccauccugu

SEQ ID NO: 2611387 - RNA, 19 nt, Artificial Sequence
  Description of Artificial Sequence: Synthetic oligonucleotide
uugccauagcuuucaugua

SEQ ID NO: 2611388 - RNA, 19 nt, Artificial Sequence
  Description of Artificial Sequence: Synthetic oligonucleotide
auagggcggcuuaguaacg

SEQ ID NO: 2611389 - RNA, 19 nt, Artificial Sequence
  Description of Artificial Sequence: Synthetic oligonucleotide
uacuguccacuggugggug

SEQ ID NO: 2611390 - RNA, 19 nt, Artificial Sequence
  Description of Artificial Sequence: Synthetic oligonucleotide
gauguuguuaacaguuguu

SEQ ID NO: 2611391 - RNA, 19 nt, Artificial Sequence
  Description of Artificial Sequence: Synthetic oligonucleotide
ccauaaacuaauuggcuua

SEQ ID NO: 2611392 - RNA, 19 nt, Artificial Sequence
  Description of Artificial Sequence: Synthetic oligonucleotide
uuccgccauucucuugaac

SEQ ID NO: 2611393 - RNA, 19 nt, Artificial Sequence
  Description of Artificial Sequence: Synthetic oligonucleotide
ccggucuuucauuaggguc

SEQ ID NO: 2611394 - RNA, 19 nt, Artificial Sequence
  Description of Artificial Sequence: Synthetic oligonucleotide
caucauugcuguugggucu

SEQ ID NO: 2611395 - RNA, 19 nt, Artificial Sequence
  Description of Artificial Sequence: Synthetic oligonucleotide
ccaaauuccgccauucucu

SEQ ID NO: 2611396 - RNA, 19 nt, Artificial Sequence
  Description of Artificial Sequence: Synthetic oligonucleotide
cccaaauuccgccauucuc

SEQ ID NO: 2611397 - RNA, 19 nt, Artificial Sequence
  Description of Artificial Sequence: Synthetic oligonucleotide
gacuugcuuuuaaucuuuc

SEQ ID NO: 2611398 - RNA, 19 nt, Artificial Sequence
  Description of Artificial Sequence: Synthetic oligonucleotide
gguggguguguccaucuuc

SEQ ID NO: 2611399 - RNA, 19 nt, Artificial Sequence
  Description of Artificial Sequence: Synthetic oligonucleotide
acuguccacuggugggugu

SEQ ID NO: 2611400 - RNA, 19 nt, Artificial Sequence
  Description of Artificial Sequence: Synthetic oligonucleotide
gggcaacauuaccauaaac

SEQ ID NO: 2611401 - RNA, 19 nt, Artificial Sequence
  Description of Artificial Sequence: Synthetic oligonucleotide
acagcuucaguaagugaua

SEQ ID NO: 2611402 - RNA, 19 nt, Artificial Sequence
  Description of Artificial Sequence: Synthetic oligonucleotide
cggucuuucauuaggguca

SEQ ID NO: 2611403 - RNA, 19 nt, Artificial Sequence
  Description of Artificial Sequence: Synthetic oligonucleotide
caguuguugcaucauugcu

SEQ ID NO: 2611404 - RNA, 19 nt, Artificial Sequence
  Description of Artificial Sequence: Synthetic oligonucleotide
cauagcuuucauguaauuu

SEQ ID NO: 2611405 - RNA, 19 nt, Artificial Sequence
  Description of Artificial Sequence: Synthetic oligonucleotide
auucuguuucguguuuaua

SEQ ID NO: 2611406 - RNA, 19 nt, Artificial Sequence
  Description of Artificial Sequence: Synthetic oligonucleotide
aucgggcaacauuaccaua

SEQ ID NO: 2611407 - RNA, 19 nt, Artificial Sequence
  Description of Artificial Sequence: Synthetic oligonucleotide
ggcggcuuaguaacgacuc

SEQ ID NO: 2611408 - RNA, 19 nt, Artificial Sequence
  Description of Artificial Sequence: Synthetic oligonucleotide
cucauuucuguaugguuuu

SEQ ID NO: 2611409 - RNA, 19 nt, Artificial Sequence
  Description of Artificial Sequence: Synthetic oligonucleotide
gggucuugaaauaucauuu

SEQ ID NO: 2611410 - RNA, 19 nt, Artificial Sequence
  Description of Artificial Sequence: Synthetic oligonucleotide
gcuuaguaacgacucuuaa

SEQ ID NO: 2611411 - RNA, 19 nt, Artificial Sequence
  Description of Artificial Sequence: Synthetic oligonucleotide
augcugacauauccucauu

SEQ ID NO: 2611412 - RNA, 19 nt, Artificial Sequence
  Description of Artificial Sequence: Synthetic oligonucleotide
cgacucuuaaaggauugcc

SEQ ID NO: 2611413 - RNA, 19 nt, Artificial Sequence
  Description of Artificial Sequence: Synthetic oligonucleotide
acauuaccauaaacuaauu

SEQ ID NO: 2611414 - RNA, 19 nt, Artificial Sequence
  Description of Artificial Sequence: Synthetic oligonucleotide
guggguguguccaucuucu

SEQ ID NO: 2611415 - RNA, 19 nt, Artificial Sequence
  Description of Artificial Sequence: Synthetic oligonucleotide
auuccgccauucucuugaa

SEQ ID NO: 2611416 - RNA, 19 nt, Artificial Sequence
  Description of Artificial Sequence: Synthetic oligonucleotide
cggagucaggcccaaauuc

SEQ ID NO: 2611417 - RNA, 19 nt, Artificial Sequence
  Description of Artificial Sequence: Synthetic oligonucleotide
uguccacuggugggugugu

SEQ ID NO: 2611418 - RNA, 19 nt, Artificial Sequence
  Description of Artificial Sequence: Synthetic oligonucleotide
gcuguugggucuugaaaua

SEQ ID NO: 2611419 - RNA, 19 nt, Artificial Sequence
  Description of Artificial Sequence: Synthetic oligonucleotide
ugguggguguguccaucuu

SEQ ID NO: 2611420 - RNA, 19 nt, Artificial Sequence
  Description of Artificial Sequence: Synthetic oligonucleotide
acucucccgccggagucag

SEQ ID NO: 2611421 - RNA, 19 nt, Artificial Sequence
  Description of Artificial Sequence: Synthetic oligonucleotide
gcgauuucaaagcuuguuu

SEQ ID NO: 2611422 - RNA, 19 nt, Artificial Sequence
  Description of Artificial Sequence: Synthetic oligonucleotide
guaauuucauagggcggcu

SEQ ID NO: 2611423 - RNA, 19 nt, Artificial Sequence
  Description of Artificial Sequence: Synthetic oligonucleotide
ucguguuuauaggcuccua

SEQ ID NO: 2611424 - RNA, 19 nt, Artificial Sequence
  Description of Artificial Sequence: Synthetic oligonucleotide
cuuggcggcuucuaauuuu

SEQ ID NO: 2611425 - RNA, 19 nt, Artificial Sequence
  Description of Artificial Sequence: Synthetic oligonucleotide
cuguaugguuuuacauaua

SEQ ID NO: 2611426 - RNA, 19 nt, Artificial Sequence
  Description of Artificial Sequence: Synthetic oligonucleotide
ccucauuucuguaugguuu

SEQ ID NO: 2611427 - RNA, 19 nt, Artificial Sequence
  Description of Artificial Sequence: Synthetic oligonucleotide
cgagauguuguuaacaguu

SEQ ID NO: 2611428 - RNA, 19 nt, Artificial Sequence
  Description of Artificial Sequence: Synthetic oligonucleotide
caaauuccgccauucucuu

SEQ ID NO: 2611429 - RNA, 19 nt, Artificial Sequence
  Description of Artificial Sequence: Synthetic oligonucleotide
gagucaccggucuuucauu

SEQ ID NO: 2611430 - RNA, 19 nt, Artificial Sequence
  Description of Artificial Sequence: Synthetic oligonucleotide
uggguguguccaucuucuu

SEQ ID NO: 2611431 - RNA, 19 nt, Artificial Sequence
  Description of Artificial Sequence: Synthetic oligonucleotide
agcugacgagauguuguua

SEQ ID NO: 2611432 - RNA, 19 nt, Artificial Sequence
  Description of Artificial Sequence: Synthetic oligonucleotide
cucccgccggagucaggcc

SEQ ID NO: 2611433 - RNA, 19 nt, Artificial Sequence
  Description of Artificial Sequence: Synthetic oligonucleotide
cccuucacucucccgccgg

SEQ ID NO: 2611434 - RNA, 19 nt, Artificial Sequence
  Description of Artificial Sequence: Synthetic oligonucleotide
cagagucaccggucuuuca

SEQ ID NO: 2611435 - RNA, 19 nt, Artificial Sequence
  Description of Artificial Sequence: Synthetic oligonucleotide
uuguugcaucauugcuguu

SEQ ID NO: 2611436 - RNA, 19 nt, Artificial Sequence
  Description of Artificial Sequence: Synthetic oligonucleotide
cccaaaauaucgggcaaca

SEQ ID NO: 2611437 - RNA, 19 nt, Artificial Sequence
  Description of Artificial Sequence: Synthetic oligonucleotide
ggcccaaauuccgccauuc

SEQ ID NO: 2611438 - RNA, 19 nt, Artificial Sequence
  Description of Artificial Sequence: Synthetic oligonucleotide
cguguuuauaggcuccuaa

SEQ ID NO: 2611439 - RNA, 19 nt, Artificial Sequence
  Description of Artificial Sequence: Synthetic oligonucleotide
cauugcuguugggucuuga

SEQ ID NO: 2611440 - RNA, 19 nt, Artificial Sequence
  Description of Artificial Sequence: Synthetic oligonucleotide
gccauucucuugaacauau

SEQ ID NO: 2611441 - RNA, 19 nt, Artificial Sequence
  Description of Artificial Sequence: Synthetic oligonucleotide
cucucccgccggagucagg

SEQ ID NO: 2611442 - RNA, 19 nt, Artificial Sequence
  Description of Artificial Sequence: Synthetic oligonucleotide
cucugcgauuucaaagcuu

SEQ ID NO: 2611443 - RNA, 19 nt, Artificial Sequence
  Description of Artificial Sequence: Synthetic oligonucleotide
gcucugcgauuucaaagcu

SEQ ID NO: 2611444 - RNA, 19 nt, Artificial Sequence
  Description of Artificial Sequence: Synthetic oligonucleotide
guccacugguggguguguc

SEQ ID NO: 2611445 - RNA, 19 nt, Artificial Sequence
  Description of Artificial Sequence: Synthetic oligonucleotide
ggucuuucauuagggucaa

SEQ ID NO: 2611446 - RNA, 19 nt, Artificial Sequence
  Description of Artificial Sequence: Synthetic oligonucleotide
cugcgauuucaaagcuugu

SEQ ID NO: 2611447 - RNA, 19 nt, Artificial Sequence
  Description of Artificial Sequence: Synthetic oligonucleotide
cacucucccgccggaguca

SEQ ID NO: 2611448 - RNA, 19 nt, Artificial Sequence
  Description of Artificial Sequence: Synthetic oligonucleotide
  modified_base (15)..(15): a, c, u, g, unknown or other
cucggaaaccaccgnuuuu

SEQ ID NO: 2611449 - RNA, 19 nt, Artificial Sequence
  Description of Artificial Sequence: Synthetic oligonucleotide
cgaugguaacucccuucac

SEQ ID NO: 2611450 - RNA, 19 nt, Artificial Sequence
  Description of Artificial Sequence: Synthetic oligonucleotide
cagugcuuauaugucuuuu

SEQ ID NO: 2611451 - RNA, 19 nt, Artificial Sequence
  Description of Artificial Sequence: Synthetic oligonucleotide
gccggagucaggcccaaau

SEQ ID NO: 2611452 - RNA, 19 nt, Artificial Sequence
  Description of Artificial Sequence: Synthetic oligonucleotide
gcggcuuaguaacgacucu

SEQ ID NO: 2611453 - RNA, 19 nt, Artificial Sequence
  Description of Artificial Sequence: Synthetic oligonucleotide
gcccaaauuccgccauucu

SEQ ID NO: 2611454 - RNA, 19 nt, Artificial Sequence
  Description of Artificial Sequence: Synthetic oligonucleotide
gcauugcauuagugucaga

SEQ ID NO: 2611455 - RNA, 19 nt, Artificial Sequence
  Description of Artificial Sequence: Synthetic oligonucleotide
gccagugcuuauaugucuu

SEQ ID NO: 2611456 - RNA, 19 nt, Artificial Sequence
  Description of Artificial Sequence: Synthetic oligonucleotide
gggcggcuuaguaacgacu

SEQ ID NO: 2611457 - RNA, 19 nt, Artificial Sequence
  Description of Artificial Sequence: Synthetic oligonucleotide
cccauccuguuucaguaau

SEQ ID NO: 2611458 - RNA, 19 nt, Artificial Sequence
  Description of Artificial Sequence: Synthetic oligonucleotide
ccgccauucucuugaacau

SEQ ID NO: 2611459 - RNA, 19 nt, Artificial Sequence
  Description of Artificial Sequence: Synthetic oligonucleotide
ggauugccauagcuuucau

SEQ ID NO: 2611460 - RNA, 19 nt, Artificial Sequence
  Description of Artificial Sequence: Synthetic oligonucleotide
ccccauccuguuucaguaa

SEQ ID NO: 2611461 - RNA, 19 nt, Artificial Sequence
  Description of Artificial Sequence: Synthetic oligonucleotide
gguuagcugacgagauguu

SEQ ID NO: 2611462 - RNA, 19 nt, Artificial Sequence
  Description of Artificial Sequence: Synthetic oligonucleotide
cgacuugcuuuuaaucuuu

SEQ ID NO: 2611463 - RNA, 19 nt, Artificial Sequence
  Description of Artificial Sequence: Synthetic oligonucleotide
cccgccggagucaggccca

SEQ ID NO: 2611464 - RNA, 19 nt, Artificial Sequence
  Description of Artificial Sequence: Synthetic oligonucleotide
cacugguggguguguccau

SEQ ID NO: 2611465 - RNA, 19 nt, Artificial Sequence
  Description of Artificial Sequence: Synthetic oligonucleotide
ccauagcuuucauguaauu

SEQ ID NO: 2611466 - RNA, 19 nt, Artificial Sequence
  Description of Artificial Sequence: Synthetic oligonucleotide
ccaaaauaucgggcaacau

SEQ ID NO: 2611467 - RNA, 19 nt, Artificial Sequence
  Description of Artificial Sequence: Synthetic oligonucleotide
cgggcaacauuaccauaaa

SEQ ID NO: 2611468 - RNA, 19 nt, Artificial Sequence
  Description of Artificial Sequence: Synthetic oligonucleotide
ccauccuguuucaguaauu

SEQ ID NO: 2611469 - RNA, 19 nt, Artificial Sequence
  Description of Artificial Sequence: Synthetic oligonucleotide
ccagugcuuauaugucuuu

SEQ ID NO: 2611470 - RNA, 19 nt, Artificial Sequence
  Description of Artificial Sequence: Synthetic oligonucleotide
ccggagucaggcccaaauu

SEQ ID NO: 2611471 - RNA, 19 nt, Artificial Sequence
  Description of Artificial Sequence: Synthetic oligonucleotide
gucuuucauuagggucaau

SEQ ID NO: 2611472 - RNA, 19 nt, Artificial Sequence
  Description of Artificial Sequence: Synthetic oligonucleotide
cgccauucucuugaacaua

SEQ ID NO: 2611473 - RNA, 19 nt, Artificial Sequence
  Description of Artificial Sequence: Synthetic oligonucleotide
cggcuuaguaacgacucuu

SEQ ID NO: 2611474 - RNA, 19 nt, Artificial Sequence
  Description of Artificial Sequence: Synthetic oligonucleotide
ccgccggagucaggcccaa

SEQ ID NO: 2611475 - RNA, 19 nt, Artificial Sequence
  Description of Artificial Sequence: Synthetic oligonucleotide
cgccggagucaggcccaaa

SEQ ID NO: 2611476 - RNA, 19 nt, Artificial Sequence
  Description of Artificial Sequence: Synthetic oligonucleotide
aaaguuaccauccauccac

SEQ ID NO: 2611477 - RNA, 19 nt, Artificial Sequence
  Description of Artificial Sequence: Synthetic oligonucleotide
uaaaacuuaaugcagagca

SEQ ID NO: 2611478 - RNA, 19 nt, Artificial Sequence
  Description of Artificial Sequence: Synthetic oligonucleotide
aaaacuaaagaauagcagu

SEQ ID NO: 2611479 - RNA, 19 nt, Artificial Sequence
  Description of Artificial Sequence: Synthetic oligonucleotide
aaauguaguacauaaaacu

SEQ ID NO: 2611480 - RNA, 19 nt, Artificial Sequence
  Description of Artificial Sequence: Synthetic oligonucleotide
uaugaaauuaggaaaaugu

SEQ ID NO: 2611481 - RNA, 19 nt, Artificial Sequence
  Description of Artificial Sequence: Synthetic oligonucleotide
ugaaauuaggaaaauguag

SEQ ID NO: 2611482 - RNA, 19 nt, Artificial Sequence
  Description of Artificial Sequence: Synthetic oligonucleotide
aagaauagcagucauuucu

SEQ ID NO: 2611483 - RNA, 19 nt, Artificial Sequence
  Description of Artificial Sequence: Synthetic oligonucleotide
aauuguagaaucaaacaac

SEQ ID NO: 2611484 - RNA, 19 nt, Artificial Sequence
  Description of Artificial Sequence: Synthetic oligonucleotide
agcaauaaaaguuaccauc

SEQ ID NO: 2611485 - RNA, 19 nt, Artificial Sequence
  Description of Artificial Sequence: Synthetic oligonucleotide
uaaauaugaaauuaggaaa

SEQ ID NO: 2611486 - RNA, 19 nt, Artificial Sequence
  Description of Artificial Sequence: Synthetic oligonucleotide
uaguacauaaaacuuaaug

SEQ ID NO: 2611487 - RNA, 19 nt, Artificial Sequence
  Description of Artificial Sequence: Synthetic oligonucleotide
ucuaauguaaguuuucucu

SEQ ID NO: 2611488 - RNA, 19 nt, Artificial Sequence
  Description of Artificial Sequence: Synthetic oligonucleotide
aauuaggaaaauguaguac

SEQ ID NO: 2611489 - RNA, 19 nt, Artificial Sequence
  Description of Artificial Sequence: Synthetic oligonucleotide
augauuuguacuccaaugc

SEQ ID NO: 2611490 - RNA, 19 nt, Artificial Sequence
  Description of Artificial Sequence: Synthetic oligonucleotide
uuuucuauccuccaaaguc

SEQ ID NO: 2611491 - RNA, 19 nt, Artificial Sequence
  Description of Artificial Sequence: Synthetic oligonucleotide
aaaauguaguacauaaaac

SEQ ID NO: 2611492 - RNA, 19 nt, Artificial Sequence
  Description of Artificial Sequence: Synthetic oligonucleotide
ucuggaaucgcucuaaugu

SEQ ID NO: 2611493 - RNA, 19 nt, Artificial Sequence
  Description of Artificial Sequence: Synthetic oligonucleotide
aacaacuuucccuugagga

SEQ ID NO: 2611494 - RNA, 19 nt, Artificial Sequence
  Description of Artificial Sequence: Synthetic oligonucleotide
cuuugucagaacaauacgg

SEQ ID NO: 2611495 - RNA, 19 nt, Artificial Sequence
  Description of Artificial Sequence: Synthetic oligonucleotide
uaaugcagagcaauaaaag

SEQ ID NO: 2611496 - RNA, 19 nt, Artificial Sequence
  Description of Artificial Sequence: Synthetic oligonucleotide
auuaggaaaauguaguaca

SEQ ID NO: 2611497 - RNA, 19 nt, Artificial Sequence
  Description of Artificial Sequence: Synthetic oligonucleotide
uguagaaucaaacaacuuu

SEQ ID NO: 2611498 - RNA, 19 nt, Artificial Sequence
  Description of Artificial Sequence: Synthetic oligonucleotide
uuaccauccauccacagga

SEQ ID NO: 2611499 - RNA, 19 nt, Artificial Sequence
  Description of Artificial Sequence: Synthetic oligonucleotide
gaaaauguaguacauaaaa

SEQ ID NO: 2611500 - RNA, 19 nt, Artificial Sequence
  Description of Artificial Sequence: Synthetic oligonucleotide
uuucauaugauuuguacuc

SEQ ID NO: 2611501 - RNA, 19 nt, Artificial Sequence
  Description of Artificial Sequence: Synthetic oligonucleotide
agaaucaaacaacuuuccc

SEQ ID NO: 2611502 - RNA, 19 nt, Artificial Sequence
  Description of Artificial Sequence: Synthetic oligonucleotide
aaacuaaagaauagcaguc

SEQ ID NO: 2611503 - RNA, 19 nt, Artificial Sequence
  Description of Artificial Sequence: Synthetic oligonucleotide
uuuucauuucauaugauuu

SEQ ID NO: 2611504 - RNA, 19 nt, Artificial Sequence
  Description of Artificial Sequence: Synthetic oligonucleotide
uaugauuuguacuccaaug

SEQ ID NO: 2611505 - RNA, 19 nt, Artificial Sequence
  Description of Artificial Sequence: Synthetic oligonucleotide
uuucuauccuccaaagucc

SEQ ID NO: 2611506 - RNA, 19 nt, Artificial Sequence
  Description of Artificial Sequence: Synthetic oligonucleotide
uggacuucaaugaacaccu

SEQ ID NO: 2611507 - RNA, 19 nt, Artificial Sequence
  Description of Artificial Sequence: Synthetic oligonucleotide
caaaacuaaagaauagcag

SEQ ID NO: 2611508 - RNA, 19 nt, Artificial Sequence
  Description of Artificial Sequence: Synthetic oligonucleotide
ugucagaacaauacggacc

SEQ ID NO: 2611509 - RNA, 19 nt, Artificial Sequence
  Description of Artificial Sequence: Synthetic oligonucleotide
uuugcagcaucucucuugg

SEQ ID NO: 2611510 - RNA, 19 nt, Artificial Sequence
  Description of Artificial Sequence: Synthetic oligonucleotide
uuugucagaacaauacgga

SEQ ID NO: 2611511 - RNA, 19 nt, Artificial Sequence
  Description of Artificial Sequence: Synthetic oligonucleotide
uuucauuucauaugauuug

SEQ ID NO: 2611512 - RNA, 19 nt, Artificial Sequence
  Description of Artificial Sequence: Synthetic oligonucleotide
uuaaugcagagcaauaaaa

SEQ ID NO: 2611513 - RNA, 19 nt, Artificial Sequence
  Description of Artificial Sequence: Synthetic oligonucleotide
aaauaugaaauuaggaaaa

SEQ ID NO: 2611514 - RNA, 19 nt, Artificial Sequence
  Description of Artificial Sequence: Synthetic oligonucleotide
ucagauucuagaagggaag

SEQ ID NO: 2611515 - RNA, 19 nt, Artificial Sequence
  Description of Artificial Sequence: Synthetic oligonucleotide
aguucccugagauuucugc

SEQ ID NO: 2611516 - RNA, 19 nt, Artificial Sequence
  Description of Artificial Sequence: Synthetic oligonucleotide
auaaaaguuaccauccauc

SEQ ID NO: 2611517 - RNA, 19 nt, Artificial Sequence
  Description of Artificial Sequence: Synthetic oligonucleotide
ugcauauucagauucuaga

SEQ ID NO: 2611518 - RNA, 19 nt, Artificial Sequence
  Description of Artificial Sequence: Synthetic oligonucleotide
aaagaauagcagucauuuc

SEQ ID NO: 2611519 - RNA, 19 nt, Artificial Sequence
  Description of Artificial Sequence: Synthetic oligonucleotide
aaguuuucucugcauuugg

SEQ ID NO: 2611520 - RNA, 19 nt, Artificial Sequence
  Description of Artificial Sequence: Synthetic oligonucleotide
aggaaaauguaguacauaa

SEQ ID NO: 2611521 - RNA, 19 nt, Artificial Sequence
  Description of Artificial Sequence: Synthetic oligonucleotide
uacuccaaugcuuuuguag

SEQ ID NO: 2611522 - RNA, 19 nt, Artificial Sequence
  Description of Artificial Sequence: Synthetic oligonucleotide
auagcagucauuucucaag

SEQ ID NO: 2611523 - RNA, 19 nt, Artificial Sequence
  Description of Artificial Sequence: Synthetic oligonucleotide
aaacaacuuucccuugagg

SEQ ID NO: 2611524 - RNA, 19 nt, Artificial Sequence
  Description of Artificial Sequence: Synthetic oligonucleotide
uaaagaauagcagucauuu

SEQ ID NO: 2611525 - RNA, 19 nt, Artificial Sequence
  Description of Artificial Sequence: Synthetic oligonucleotide
uucaaugaacaccuccucc

SEQ ID NO: 2611526 - RNA, 19 nt, Artificial Sequence
  Description of Artificial Sequence: Synthetic oligonucleotide
uuuucuuucuggaaucgcu

SEQ ID NO: 2611527 - RNA, 19 nt, Artificial Sequence
  Description of Artificial Sequence: Synthetic oligonucleotide
ugagauuucugcuccacug

SEQ ID NO: 2611528 - RNA, 19 nt, Artificial Sequence
  Description of Artificial Sequence: Synthetic oligonucleotide
ucaagguuugagaagucug

SEQ ID NO: 2611529 - RNA, 19 nt, Artificial Sequence
  Description of Artificial Sequence: Synthetic oligonucleotide
aacaguuugcagcaucucu

SEQ ID NO: 2611530 - RNA, 19 nt, Artificial Sequence
  Description of Artificial Sequence: Synthetic oligonucleotide
uaauguaaguuuucucugc

SEQ ID NO: 2611531 - RNA, 19 nt, Artificial Sequence
  Description of Artificial Sequence: Synthetic oligonucleotide
auaaaacuuaaugcagagc

SEQ ID NO: 2611532 - RNA, 19 nt, Artificial Sequence
  Description of Artificial Sequence: Synthetic oligonucleotide
ugauuuguacuccaaugcu

SEQ ID NO: 2611533 - RNA, 19 nt, Artificial Sequence
  Description of Artificial Sequence: Synthetic oligonucleotide
uagcagucauuucucaagg

SEQ ID NO: 2611534 - RNA, 19 nt, Artificial Sequence
  Description of Artificial Sequence: Synthetic oligonucleotide
uagaaucaaacaacuuucc

SEQ ID NO: 2611535 - RNA, 19 nt, Artificial Sequence
  Description of Artificial Sequence: Synthetic oligonucleotide
uagaagggaaguccaacag

SEQ ID NO: 2611536 - RNA, 19 nt, Artificial Sequence
  Description of Artificial Sequence: Synthetic oligonucleotide
cuaauguaaguuuucucug

SEQ ID NO: 2611537 - RNA, 19 nt, Artificial Sequence
  Description of Artificial Sequence: Synthetic oligonucleotide
aauguaguacauaaaacuu

SEQ ID NO: 2611538 - RNA, 19 nt, Artificial Sequence
  Description of Artificial Sequence: Synthetic oligonucleotide
ugaagucaaaaccaggauu

SEQ ID NO: 2611539 - RNA, 19 nt, Artificial Sequence
  Description of Artificial Sequence: Synthetic oligonucleotide
cugcauuuggucuugcacc

SEQ ID NO: 2611540 - RNA, 19 nt, Artificial Sequence
  Description of Artificial Sequence: Synthetic oligonucleotide
accaggauuuucuuucugg

SEQ ID NO: 2611541 - RNA, 19 nt, Artificial Sequence
  Description of Artificial Sequence: Synthetic oligonucleotide
ucucucuuggucuuuguca

SEQ ID NO: 2611542 - RNA, 19 nt, Artificial Sequence
  Description of Artificial Sequence: Synthetic oligonucleotide
ucugcauuuggucuugcac

SEQ ID NO: 2611543 - RNA, 19 nt, Artificial Sequence
  Description of Artificial Sequence: Synthetic oligonucleotide
gacuucaaugaacaccucc

SEQ ID NO: 2611544 - RNA, 19 nt, Artificial Sequence
  Description of Artificial Sequence: Synthetic oligonucleotide
gaaucaaacaacuuucccu

SEQ ID NO: 2611545 - RNA, 19 nt, Artificial Sequence
  Description of Artificial Sequence: Synthetic oligonucleotide
gguuugagaagucuggucc

SEQ ID NO: 2611546 - RNA, 19 nt, Artificial Sequence
  Description of Artificial Sequence: Synthetic oligonucleotide
ugcagagcaauaaaaguua

SEQ ID NO: 2611547 - RNA, 19 nt, Artificial Sequence
  Description of Artificial Sequence: Synthetic oligonucleotide
ucaaacaacuuucccuuga

SEQ ID NO: 2611548 - RNA, 19 nt, Artificial Sequence
  Description of Artificial Sequence: Synthetic oligonucleotide
cuccacugaagucaaaacc

SEQ ID NO: 2611549 - RNA, 19 nt, Artificial Sequence
  Description of Artificial Sequence: Synthetic oligonucleotide
cuacguuccucaaacgggg

SEQ ID NO: 2611550 - RNA, 19 nt, Artificial Sequence
  Description of Artificial Sequence: Synthetic oligonucleotide
uuucccuugaggaucucgc

SEQ ID NO: 2611551 - RNA, 19 nt, Artificial Sequence
  Description of Artificial Sequence: Synthetic oligonucleotide
uggucuugcacccagggau

SEQ ID NO: 2611552 - RNA, 19 nt, Artificial Sequence
  Description of Artificial Sequence: Synthetic oligonucleotide
aggacagcugcucagcauc

SEQ ID NO: 2611553 - RNA, 19 nt, Artificial Sequence
  Description of Artificial Sequence: Synthetic oligonucleotide
gaaauuaggaaaauguagu

SEQ ID NO: 2611554 - RNA, 19 nt, Artificial Sequence
  Description of Artificial Sequence: Synthetic oligonucleotide
aaacuuaaugcagagcaau

SEQ ID NO: 2611555 - RNA, 19 nt, Artificial Sequence
  Description of Artificial Sequence: Synthetic oligonucleotide
acuccaaugcuuuuguagu

SEQ ID NO: 2611556 - RNA, 19 nt, Artificial Sequence
  Description of Artificial Sequence: Synthetic oligonucleotide
agaacaaaacuaaagaaua

SEQ ID NO: 2611557 - RNA, 19 nt, Artificial Sequence
  Description of Artificial Sequence: Synthetic oligonucleotide
uucucaagguuugagaagu

SEQ ID NO: 2611558 - RNA, 19 nt, Artificial Sequence
  Description of Artificial Sequence: Synthetic oligonucleotide
guagaaucaaacaacuuuc

SEQ ID NO: 2611559 - RNA, 19 nt, Artificial Sequence
  Description of Artificial Sequence: Synthetic oligonucleotide
cacggcuagagccacaugc

SEQ ID NO: 2611560 - RNA, 19 nt, Artificial Sequence
  Description of Artificial Sequence: Synthetic oligonucleotide
cacuacguuccucaaacgg

SEQ ID NO: 2611561 - RNA, 19 nt, Artificial Sequence
  Description of Artificial Sequence: Synthetic oligonucleotide
auuguagaaucaaacaacu

SEQ ID NO: 2611562 - RNA, 19 nt, Artificial Sequence
  Description of Artificial Sequence: Synthetic oligonucleotide
aucagcugcauauucagau

SEQ ID NO: 2611563 - RNA, 19 nt, Artificial Sequence
  Description of Artificial Sequence: Synthetic oligonucleotide
ugcauuuggucuugcaccc

SEQ ID NO: 2611564 - RNA, 19 nt, Artificial Sequence
  Description of Artificial Sequence: Synthetic oligonucleotide
agggaaguccaacaguuug

SEQ ID NO: 2611565 - RNA, 19 nt, Artificial Sequence
  Description of Artificial Sequence: Synthetic oligonucleotide
caauuguagaaucaaacaa

SEQ ID NO: 2611566 - RNA, 19 nt, Artificial Sequence
  Description of Artificial Sequence: Synthetic oligonucleotide
ucugcugggauccgcaaga

SEQ ID NO: 2611567 - RNA, 19 nt, Artificial Sequence
  Description of Artificial Sequence: Synthetic oligonucleotide
gucagaacaauacggacca

SEQ ID NO: 2611568 - RNA, 19 nt, Artificial Sequence
  Description of Artificial Sequence: Synthetic oligonucleotide
ugagaagucugguccaccc

SEQ ID NO: 2611569 - RNA, 19 nt, Artificial Sequence
  Description of Artificial Sequence: Synthetic oligonucleotide
aguccaacaguuugcagca

SEQ ID NO: 2611570 - RNA, 19 nt, Artificial Sequence
  Description of Artificial Sequence: Synthetic oligonucleotide
acauucuccagaugccacg

SEQ ID NO: 2611571 - RNA, 19 nt, Artificial Sequence
  Description of Artificial Sequence: Synthetic oligonucleotide
ucauaugauuuguacucca

SEQ ID NO: 2611572 - RNA, 19 nt, Artificial Sequence
  Description of Artificial Sequence: Synthetic oligonucleotide
aauaugaaauuaggaaaau

SEQ ID NO: 2611573 - RNA, 19 nt, Artificial Sequence
  Description of Artificial Sequence: Synthetic oligonucleotide
auuuucuuucuggaaucgc

SEQ ID NO: 2611574 - RNA, 19 nt, Artificial Sequence
  Description of Artificial Sequence: Synthetic oligonucleotide
cuggacuucaaugaacacc

SEQ ID NO: 2611575 - RNA, 19 nt, Artificial Sequence
  Description of Artificial Sequence: Synthetic oligonucleotide
aacggggcggacauucucc

SEQ ID NO: 2611576 - RNA, 19 nt, Artificial Sequence
  Description of Artificial Sequence: Synthetic oligonucleotide
gcaauaaaaguuaccaucc

SEQ ID NO: 2611577 - RNA, 19 nt, Artificial Sequence
  Description of Artificial Sequence: Synthetic oligonucleotide
aaacggggcggacauucuc

SEQ ID NO: 2611578 - RNA, 19 nt, Artificial Sequence
  Description of Artificial Sequence: Synthetic oligonucleotide
uucauaugauuuguacucc

SEQ ID NO: 2611579 - RNA, 19 nt, Artificial Sequence
  Description of Artificial Sequence: Synthetic oligonucleotide
acuaaagaauagcagucau

SEQ ID NO: 2611580 - RNA, 19 nt, Artificial Sequence
  Description of Artificial Sequence: Synthetic oligonucleotide
uaaguuuucucugcauuug

SEQ ID NO: 2611581 - RNA, 19 nt, Artificial Sequence
  Description of Artificial Sequence: Synthetic oligonucleotide
acggaccaggcucagagag

SEQ ID NO: 2611582 - RNA, 19 nt, Artificial Sequence
  Description of Artificial Sequence: Synthetic oligonucleotide
uugucagaacaauacggac

SEQ ID NO: 2611583 - RNA, 19 nt, Artificial Sequence
  Description of Artificial Sequence: Synthetic oligonucleotide
aaccaccccacuacguucc

SEQ ID NO: 2611584 - RNA, 19 nt, Artificial Sequence
  Description of Artificial Sequence: Synthetic oligonucleotide
guuugcagcaucucucuug

SEQ ID NO: 2611585 - RNA, 19 nt, Artificial Sequence
  Description of Artificial Sequence: Synthetic oligonucleotide
agguuugagaagucugguc

SEQ ID NO: 2611586 - RNA, 19 nt, Artificial Sequence
  Description of Artificial Sequence: Synthetic oligonucleotide
ucauuucucaagguuugag

SEQ ID NO: 2611587 - RNA, 19 nt, Artificial Sequence
  Description of Artificial Sequence: Synthetic oligonucleotide
cuuuguguaguucccugag

SEQ ID NO: 2611588 - RNA, 19 nt, Artificial Sequence
  Description of Artificial Sequence: Synthetic oligonucleotide
gucuuugucagaacaauac

SEQ ID NO: 2611589 - RNA, 19 nt, Artificial Sequence
  Description of Artificial Sequence: Synthetic oligonucleotide
aaaccaggauuuucuuucu

SEQ ID NO: 2611590 - RNA, 19 nt, Artificial Sequence
  Description of Artificial Sequence: Synthetic oligonucleotide
agaagggaaguccaacagu

SEQ ID NO: 2611591 - RNA, 19 nt, Artificial Sequence
  Description of Artificial Sequence: Synthetic oligonucleotide
agucaaaaccaggauuuuc

SEQ ID NO: 2611592 - RNA, 19 nt, Artificial Sequence
  Description of Artificial Sequence: Synthetic oligonucleotide
auaugauuuguacuccaau

SEQ ID NO: 2611593 - RNA, 19 nt, Artificial Sequence
  Description of Artificial Sequence: Synthetic oligonucleotide
ucagcaauuguagaaucaa

SEQ ID NO: 2611594 - RNA, 19 nt, Artificial Sequence
  Description of Artificial Sequence: Synthetic oligonucleotide
gguaccacuggccccaugg

SEQ ID NO: 2611595 - RNA, 19 nt, Artificial Sequence
  Description of Artificial Sequence: Synthetic oligonucleotide
uggaaucgcucuaauguaa

SEQ ID NO: 2611596 - RNA, 19 nt, Artificial Sequence
  Description of Artificial Sequence: Synthetic oligonucleotide
cacugaagucaaaaccagg

SEQ ID NO: 2611597 - RNA, 19 nt, Artificial Sequence
  Description of Artificial Sequence: Synthetic oligonucleotide
cagagcaauaaaaguuacc

SEQ ID NO: 2611598 - RNA, 19 nt, Artificial Sequence
  Description of Artificial Sequence: Synthetic oligonucleotide
aaucgcucuaauguaaguu

SEQ ID NO: 2611599 - RNA, 19 nt, Artificial Sequence
  Description of Artificial Sequence: Synthetic oligonucleotide
acaacuuucccuugaggau

SEQ ID NO: 2611600 - RNA, 19 nt, Artificial Sequence
  Description of Artificial Sequence: Synthetic oligonucleotide
ggauccgcaagacagaaca

SEQ ID NO: 2611601 - RNA, 19 nt, Artificial Sequence
  Description of Artificial Sequence: Synthetic oligonucleotide
ucuagaagggaaguccaac

SEQ ID NO: 2611602 - RNA, 19 nt, Artificial Sequence
  Description of Artificial Sequence: Synthetic oligonucleotide
agauucuagaagggaaguc

SEQ ID NO: 2611603 - RNA, 19 nt, Artificial Sequence
  Description of Artificial Sequence: Synthetic oligonucleotide
caaacaacuuucccuugag

SEQ ID NO: 2611604 - RNA, 19 nt, Artificial Sequence
  Description of Artificial Sequence: Synthetic oligonucleotide
cuuggucuuugucagaaca

SEQ ID NO: 2611605 - RNA, 19 nt, Artificial Sequence
  Description of Artificial Sequence: Synthetic oligonucleotide
uucuggaaucgcucuaaug

SEQ ID NO: 2611606 - RNA, 19 nt, Artificial Sequence
  Description of Artificial Sequence: Synthetic oligonucleotide
uucuccagaugccacgcac

SEQ ID NO: 2611607 - RNA, 19 nt, Artificial Sequence
  Description of Artificial Sequence: Synthetic oligonucleotide
gcaauuguagaaucaaaca

SEQ ID NO: 2611608 - RNA, 19 nt, Artificial Sequence
  Description of Artificial Sequence: Synthetic oligonucleotide
uucccuugaggaucucgcg

SEQ ID NO: 2611609 - RNA, 19 nt, Artificial Sequence
  Description of Artificial Sequence: Synthetic oligonucleotide
uuggucuuugucagaacaa

SEQ ID NO: 2611610 - RNA, 19 nt, Artificial Sequence
  Description of Artificial Sequence: Synthetic oligonucleotide
aucgcucuaauguaaguuu

SEQ ID NO: 2611611 - RNA, 19 nt, Artificial Sequence
  Description of Artificial Sequence: Synthetic oligonucleotide
cauuucucaagguuugaga

SEQ ID NO: 2611612 - RNA, 19 nt, Artificial Sequence
  Description of Artificial Sequence: Synthetic oligonucleotide
cucuaauguaaguuuucuc

SEQ ID NO: 2611613 - RNA, 19 nt, Artificial Sequence
  Description of Artificial Sequence: Synthetic oligonucleotide
aaccaggauuuucuuucug

SEQ ID NO: 2611614 - RNA, 19 nt, Artificial Sequence
  Description of Artificial Sequence: Synthetic oligonucleotide
ucaaacggggcggacauuc

SEQ ID NO: 2611615 - RNA, 19 nt, Artificial Sequence
  Description of Artificial Sequence: Synthetic oligonucleotide
cuagaagggaaguccaaca

SEQ ID NO: 2611616 - RNA, 19 nt, Artificial Sequence
  Description of Artificial Sequence: Synthetic oligonucleotide
aaaacuuaaugcagagcaa

SEQ ID NO: 2611617 - RNA, 19 nt, Artificial Sequence
  Description of Artificial Sequence: Synthetic oligonucleotide
ugcaggucgcacuggaugu

SEQ ID NO: 2611618 - RNA, 19 nt, Artificial Sequence
  Description of Artificial Sequence: Synthetic oligonucleotide
acguuccucaaacggggcg

SEQ ID NO: 2611619 - RNA, 19 nt, Artificial Sequence
  Description of Artificial Sequence: Synthetic oligonucleotide
aagguuugagaagucuggu

SEQ ID NO: 2611620 - RNA, 19 nt, Artificial Sequence
  Description of Artificial Sequence: Synthetic oligonucleotide
acuuaaugcagagcaauaa

SEQ ID NO: 2611621 - RNA, 19 nt, Artificial Sequence
  Description of Artificial Sequence: Synthetic oligonucleotide
uccacaggacagcugcuca

SEQ ID NO: 2611622 - RNA, 19 nt, Artificial Sequence
  Description of Artificial Sequence: Synthetic oligonucleotide
cuuaaugcagagcaauaaa

SEQ ID NO: 2611623 - RNA, 19 nt, Artificial Sequence
  Description of Artificial Sequence: Synthetic oligonucleotide
ugguccacccuuuguguag

SEQ ID NO: 2611624 - RNA, 19 nt, Artificial Sequence
  Description of Artificial Sequence: Synthetic oligonucleotide
gagauuucugcuccacuga

SEQ ID NO: 2611625 - RNA, 19 nt, Artificial Sequence
  Description of Artificial Sequence: Synthetic oligonucleotide
gaauagcagucauuucuca

SEQ ID NO: 2611626 - RNA, 19 nt, Artificial Sequence
  Description of Artificial Sequence: Synthetic oligonucleotide
caucagcaauuguagaauc

SEQ ID NO: 2611627 - RNA, 19 nt, Artificial Sequence
  Description of Artificial Sequence: Synthetic oligonucleotide
cauuuggucuugcacccag

SEQ ID NO: 2611628 - RNA, 19 nt, Artificial Sequence
  Description of Artificial Sequence: Synthetic oligonucleotide
aguuaccauccauccacag

SEQ ID NO: 2611629 - RNA, 19 nt, Artificial Sequence
  Description of Artificial Sequence: Synthetic oligonucleotide
augaaauuaggaaaaugua

SEQ ID NO: 2611630 - RNA, 19 nt, Artificial Sequence
  Description of Artificial Sequence: Synthetic oligonucleotide
agucauuucucaagguuug

SEQ ID NO: 2611631 - RNA, 19 nt, Artificial Sequence
  Description of Artificial Sequence: Synthetic oligonucleotide
aaacacaauuaaauaugaa

SEQ ID NO: 2611632 - RNA, 19 nt, Artificial Sequence
  Description of Artificial Sequence: Synthetic oligonucleotide
caaugaacaccuccuccag

SEQ ID NO: 2611633 - RNA, 19 nt, Artificial Sequence
  Description of Artificial Sequence: Synthetic oligonucleotide
aucaaacaacuuucccuug

SEQ ID NO: 2611634 - RNA, 19 nt, Artificial Sequence
  Description of Artificial Sequence: Synthetic oligonucleotide
cuauccuccaaaguccaug

SEQ ID NO: 2611635 - RNA, 19 nt, Artificial Sequence
  Description of Artificial Sequence: Synthetic oligonucleotide
uguaguucccugagauuuc

SEQ ID NO: 2611636 - RNA, 19 nt, Artificial Sequence
  Description of Artificial Sequence: Synthetic oligonucleotide
acggcuagagccacaugcc

SEQ ID NO: 2611637 - RNA, 19 nt, Artificial Sequence
  Description of Artificial Sequence: Synthetic oligonucleotide
aacaccuccuccagggucu

SEQ ID NO: 2611638 - RNA, 19 nt, Artificial Sequence
  Description of Artificial Sequence: Synthetic oligonucleotide
cuccagaugccacgcacgg

SEQ ID NO: 2611639 - RNA, 19 nt, Artificial Sequence
  Description of Artificial Sequence: Synthetic oligonucleotide
ucugcuccacugaagucaa

SEQ ID NO: 2611640 - RNA, 19 nt, Artificial Sequence
  Description of Artificial Sequence: Synthetic oligonucleotide
auguccugcgcgcgugugc

SEQ ID NO: 2611641 - RNA, 19 nt, Artificial Sequence
  Description of Artificial Sequence: Synthetic oligonucleotide
acggaaccaccccacuacg

SEQ ID NO: 2611642 - RNA, 19 nt, Artificial Sequence
  Description of Artificial Sequence: Synthetic oligonucleotide
cacggaaccaccccacuac

SEQ ID NO: 2611643 - RNA, 19 nt, Artificial Sequence
  Description of Artificial Sequence: Synthetic oligonucleotide
cacaugccggcucugcagg

SEQ ID NO: 2611644 - RNA, 19 nt, Artificial Sequence
  Description of Artificial Sequence: Synthetic oligonucleotide
gaacaccuccuccaggguc

SEQ ID NO: 2611645 - RNA, 19 nt, Artificial Sequence
  Description of Artificial Sequence: Synthetic oligonucleotide
caacuuucccuugaggauc

SEQ ID NO: 2611646 - RNA, 19 nt, Artificial Sequence
  Description of Artificial Sequence: Synthetic oligonucleotide
uuggucuugcacccaggga

SEQ ID NO: 2611647 - RNA, 19 nt, Artificial Sequence
  Description of Artificial Sequence: Synthetic oligonucleotide
auucuagaagggaagucca

SEQ ID NO: 2611648 - RNA, 19 nt, Artificial Sequence
  Description of Artificial Sequence: Synthetic oligonucleotide
uugaggaucucgcggccac

SEQ ID NO: 2611649 - RNA, 19 nt, Artificial Sequence
  Description of Artificial Sequence: Synthetic oligonucleotide
uccaaugcuuuuguaguaa

SEQ ID NO: 2611650 - RNA, 19 nt, Artificial Sequence
  Description of Artificial Sequence: Synthetic oligonucleotide
uucuagaagggaaguccaa

SEQ ID NO: 2611651 - RNA, 19 nt, Artificial Sequence
  Description of Artificial Sequence: Synthetic oligonucleotide
ggauuuucuuucuggaauc

SEQ ID NO: 2611652 - RNA, 19 nt, Artificial Sequence
  Description of Artificial Sequence: Synthetic oligonucleotide
agaagucugguccacccuu

SEQ ID NO: 2611653 - RNA, 19 nt, Artificial Sequence
  Description of Artificial Sequence: Synthetic oligonucleotide
cugcaggucgcacuggaug

SEQ ID NO: 2611654 - RNA, 19 nt, Artificial Sequence
  Description of Artificial Sequence: Synthetic oligonucleotide
ucgcucuaauguaaguuuu

SEQ ID NO: 2611655 - RNA, 19 nt, Artificial Sequence
  Description of Artificial Sequence: Synthetic oligonucleotide
gaaccaccccacuacguuc

SEQ ID NO: 2611656 - RNA, 19 nt, Artificial Sequence
  Description of Artificial Sequence: Synthetic oligonucleotide
ucgcacuggauguccugcg

SEQ ID NO: 2611657 - RNA, 19 nt, Artificial Sequence
  Description of Artificial Sequence: Synthetic oligonucleotide
aucugcugggauccgcaag

SEQ ID NO: 2611658 - RNA, 19 nt, Artificial Sequence
  Description of Artificial Sequence: Synthetic oligonucleotide
cuuucccuugaggaucucg

SEQ ID NO: 2611659 - RNA, 19 nt, Artificial Sequence
  Description of Artificial Sequence: Synthetic oligonucleotide
gcauauucagauucuagaa

SEQ ID NO: 2611660 - RNA, 19 nt, Artificial Sequence
  Description of Artificial Sequence: Synthetic oligonucleotide
aacuuaaugcagagcaaua

SEQ ID NO: 2611661 - RNA, 19 nt, Artificial Sequence
  Description of Artificial Sequence: Synthetic oligonucleotide
uacguuccucaaacggggc

SEQ ID NO: 2611662 - RNA, 19 nt, Artificial Sequence
  Description of Artificial Sequence: Synthetic oligonucleotide
ccauccauccacaggacag

SEQ ID NO: 2611663 - RNA, 19 nt, Artificial Sequence
  Description of Artificial Sequence: Synthetic oligonucleotide
agaacaauacggaccauuu

SEQ ID NO: 2611664 - RNA, 19 nt, Artificial Sequence
  Description of Artificial Sequence: Synthetic oligonucleotide
cauucuccagaugccacgc

SEQ ID NO: 2611665 - RNA, 19 nt, Artificial Sequence
  Description of Artificial Sequence: Synthetic oligonucleotide
aacuuucccuugaggaucu

SEQ ID NO: 2611666 - RNA, 19 nt, Artificial Sequence
  Description of Artificial Sequence: Synthetic oligonucleotide
ggcaccuggacuucaauga

SEQ ID NO: 2611667 - RNA, 19 nt, Artificial Sequence
  Description of Artificial Sequence: Synthetic oligonucleotide
ucagcugcauauucagauu

SEQ ID NO: 2611668 - RNA, 19 nt, Artificial Sequence
  Description of Artificial Sequence: Synthetic oligonucleotide
cacuggauguccugcgcgc

SEQ ID NO: 2611669 - RNA, 19 nt, Artificial Sequence
  Description of Artificial Sequence: Synthetic oligonucleotide
uggucuuugucagaacaau

SEQ ID NO: 2611670 - RNA, 19 nt, Artificial Sequence
  Description of Artificial Sequence: Synthetic oligonucleotide
cacaauuaaauaugaaauu

SEQ ID NO: 2611671 - RNA, 19 nt, Artificial Sequence
  Description of Artificial Sequence: Synthetic oligonucleotide
agcaucugcugggauccgc

SEQ ID NO: 2611672 - RNA, 19 nt, Artificial Sequence
  Description of Artificial Sequence: Synthetic oligonucleotide
agcagucauuucucaaggu

SEQ ID NO: 2611673 - RNA, 19 nt, Artificial Sequence
  Description of Artificial Sequence: Synthetic oligonucleotide
aucagcaauuguagaauca

SEQ ID NO: 2611674 - RNA, 19 nt, Artificial Sequence
  Description of Artificial Sequence: Synthetic oligonucleotide
gccacccacggcuagagcc

SEQ ID NO: 2611675 - RNA, 19 nt, Artificial Sequence
  Description of Artificial Sequence: Synthetic oligonucleotide
cuucaucagcaauuguaga

SEQ ID NO: 2611676 - RNA, 19 nt, Artificial Sequence
  Description of Artificial Sequence: Synthetic oligonucleotide
gaucucgcggccacccacg

SEQ ID NO: 2611677 - RNA, 19 nt, Artificial Sequence
  Description of Artificial Sequence: Synthetic oligonucleotide
caccuggacuucaaugaac

SEQ ID NO: 2611678 - RNA, 19 nt, Artificial Sequence
  Description of Artificial Sequence: Synthetic oligonucleotide
uuucuggaaucgcucuaau

SEQ ID NO: 2611679 - RNA, 19 nt, Artificial Sequence
  Description of Artificial Sequence: Synthetic oligonucleotide
cccacuacguuccucaaac

SEQ ID NO: 2611680 - RNA, 19 nt, Artificial Sequence
  Description of Artificial Sequence: Synthetic oligonucleotide
uguccugcgcgcgugugcc

SEQ ID NO: 2611681 - RNA, 19 nt, Artificial Sequence
  Description of Artificial Sequence: Synthetic oligonucleotide
ccacccuuuguguaguucc

SEQ ID NO: 2611682 - RNA, 19 nt, Artificial Sequence
  Description of Artificial Sequence: Synthetic oligonucleotide
cauaugauuuguacuccaa

SEQ ID NO: 2611683 - RNA, 19 nt, Artificial Sequence
  Description of Artificial Sequence: Synthetic oligonucleotide
ggucugguaccacuggccc

SEQ ID NO: 2611684 - RNA, 19 nt, Artificial Sequence
  Description of Artificial Sequence: Synthetic oligonucleotide
cuugcacccagggaucagc

SEQ ID NO: 2611685 - RNA, 19 nt, Artificial Sequence
  Description of Artificial Sequence: Synthetic oligonucleotide
cacccuuuguguaguuccc

SEQ ID NO: 2611686 - RNA, 19 nt, Artificial Sequence
  Description of Artificial Sequence: Synthetic oligonucleotide
uugagaagucugguccacc

SEQ ID NO: 2611687 - RNA, 19 nt, Artificial Sequence
  Description of Artificial Sequence: Synthetic oligonucleotide
uggcgucccgcacggaacc

SEQ ID NO: 2611688 - RNA, 19 nt, Artificial Sequence
  Description of Artificial Sequence: Synthetic oligonucleotide
uugcacccagggaucagcu

SEQ ID NO: 2611689 - RNA, 19 nt, Artificial Sequence
  Description of Artificial Sequence: Synthetic oligonucleotide
aaguuaccauccauccaca

SEQ ID NO: 2611690 - RNA, 19 nt, Artificial Sequence
  Description of Artificial Sequence: Synthetic oligonucleotide
gcuagagccacaugccggc

SEQ ID NO: 2611691 - RNA, 19 nt, Artificial Sequence
  Description of Artificial Sequence: Synthetic oligonucleotide
ggaccaggcucagagagag

SEQ ID NO: 2611692 - RNA, 19 nt, Artificial Sequence
  Description of Artificial Sequence: Synthetic oligonucleotide
ugcugggauccgcaagaca

SEQ ID NO: 2611693 - RNA, 19 nt, Artificial Sequence
  Description of Artificial Sequence: Synthetic oligonucleotide
ucucaagguuugagaaguc

SEQ ID NO: 2611694 - RNA, 19 nt, Artificial Sequence
  Description of Artificial Sequence: Synthetic oligonucleotide
ccagaugccacgcacggac

SEQ ID NO: 2611695 - RNA, 19 nt, Artificial Sequence
  Description of Artificial Sequence: Synthetic oligonucleotide
uccucaaacggggcggaca

SEQ ID NO: 2611696 - RNA, 19 nt, Artificial Sequence
  Description of Artificial Sequence: Synthetic oligonucleotide
gaagggaaguccaacaguu

SEQ ID NO: 2611697 - RNA, 19 nt, Artificial Sequence
  Description of Artificial Sequence: Synthetic oligonucleotide
ucuuggucuuugucagaac

SEQ ID NO: 2611698 - RNA, 19 nt, Artificial Sequence
  Description of Artificial Sequence: Synthetic oligonucleotide
ggaaucgcucuaauguaag

SEQ ID NO: 2611699 - RNA, 19 nt, Artificial Sequence
  Description of Artificial Sequence: Synthetic oligonucleotide
gagcaauaaaaguuaccau

SEQ ID NO: 2611700 - RNA, 19 nt, Artificial Sequence
  Description of Artificial Sequence: Synthetic oligonucleotide
uaguucccugagauuucug

SEQ ID NO: 2611701 - RNA, 19 nt, Artificial Sequence
  Description of Artificial Sequence: Synthetic oligonucleotide
gcacuggauguccugcgcg

SEQ ID NO: 2611702 - RNA, 19 nt, Artificial Sequence
  Description of Artificial Sequence: Synthetic oligonucleotide
ucuauccuccaaaguccau

SEQ ID NO: 2611703 - RNA, 19 nt, Artificial Sequence
  Description of Artificial Sequence: Synthetic oligonucleotide
cagggucugguaccacugg

SEQ ID NO: 2611704 - RNA, 19 nt, Artificial Sequence
  Description of Artificial Sequence: Synthetic oligonucleotide
auuuggucuugcacccagg

SEQ ID NO: 2611705 - RNA, 19 nt, Artificial Sequence
  Description of Artificial Sequence: Synthetic oligonucleotide
uagagccacaugccggcuc

SEQ ID NO: 2611706 - RNA, 19 nt, Artificial Sequence
  Description of Artificial Sequence: Synthetic oligonucleotide
ccauguuccuucaucagca

SEQ ID NO: 2611707 - RNA, 19 nt, Artificial Sequence
  Description of Artificial Sequence: Synthetic oligonucleotide
ugggauccgcaagacagaa

SEQ ID NO: 2611708 - RNA, 19 nt, Artificial Sequence
  Description of Artificial Sequence: Synthetic oligonucleotide
gucugguaccacuggcccc

SEQ ID NO: 2611709 - RNA, 19 nt, Artificial Sequence
  Description of Artificial Sequence: Synthetic oligonucleotide
uccugcgcgcgugugcccg

SEQ ID NO: 2611710 - RNA, 19 nt, Artificial Sequence
  Description of Artificial Sequence: Synthetic oligonucleotide
cuggaaucgcucuaaugua

SEQ ID NO: 2611711 - RNA, 19 nt, Artificial Sequence
  Description of Artificial Sequence: Synthetic oligonucleotide
agccacaugccggcucugc

SEQ ID NO: 2611712 - RNA, 19 nt, Artificial Sequence
  Description of Artificial Sequence: Synthetic oligonucleotide
acuggccccauggcguccc

SEQ ID NO: 2611713 - RNA, 19 nt, Artificial Sequence
  Description of Artificial Sequence: Synthetic oligonucleotide
ucccgcacggaaccacccc

SEQ ID NO: 2611714 - RNA, 19 nt, Artificial Sequence
  Description of Artificial Sequence: Synthetic oligonucleotide
gaaucgcucuaauguaagu

SEQ ID NO: 2611715 - RNA, 19 nt, Artificial Sequence
  Description of Artificial Sequence: Synthetic oligonucleotide
gggaaguccaacaguuugc

SEQ ID NO: 2611716 - RNA, 19 nt, Artificial Sequence
  Description of Artificial Sequence: Synthetic oligonucleotide
ugcacccagggaucagcug

SEQ ID NO: 2611717 - RNA, 19 nt, Artificial Sequence
  Description of Artificial Sequence: Synthetic oligonucleotide
caggauuuucuuucuggaa

SEQ ID NO: 2611718 - RNA, 19 nt, Artificial Sequence
  Description of Artificial Sequence: Synthetic oligonucleotide
caaaguccauguuccuuca

SEQ ID NO: 2611719 - RNA, 19 nt, Artificial Sequence
  Description of Artificial Sequence: Synthetic oligonucleotide
accacuggccccauggcgu

SEQ ID NO: 2611720 - RNA, 19 nt, Artificial Sequence
  Description of Artificial Sequence: Synthetic oligonucleotide
caccccacuacguuccuca

SEQ ID NO: 2611721 - RNA, 19 nt, Artificial Sequence
  Description of Artificial Sequence: Synthetic oligonucleotide
cagaugccacgcacggacc

SEQ ID NO: 2611722 - RNA, 19 nt, Artificial Sequence
  Description of Artificial Sequence: Synthetic oligonucleotide
auggcgucccgcacggaac

SEQ ID NO: 2611723 - RNA, 19 nt, Artificial Sequence
  Description of Artificial Sequence: Synthetic oligonucleotide
guaccacuggccccauggc

SEQ ID NO: 2611724 - RNA, 19 nt, Artificial Sequence
  Description of Artificial Sequence: Synthetic oligonucleotide
guguaguucccugagauuu

SEQ ID NO: 2611725 - RNA, 19 nt, Artificial Sequence
  Description of Artificial Sequence: Synthetic oligonucleotide
gucgcacuggauguccugc

SEQ ID NO: 2611726 - RNA, 19 nt, Artificial Sequence
  Description of Artificial Sequence: Synthetic oligonucleotide
aucucgcggccacccacgg

SEQ ID NO: 2611727 - RNA, 19 nt, Artificial Sequence
  Description of Artificial Sequence: Synthetic oligonucleotide
ugccacgcacggaccaggc

SEQ ID NO: 2611728 - RNA, 19 nt, Artificial Sequence
  Description of Artificial Sequence: Synthetic oligonucleotide
gggcaccuggacuucaaug

SEQ ID NO: 2611729 - RNA, 19 nt, Artificial Sequence
  Description of Artificial Sequence: Synthetic oligonucleotide
guucccugagauuucugcu

SEQ ID NO: 2611730 - RNA, 19 nt, Artificial Sequence
  Description of Artificial Sequence: Synthetic oligonucleotide
cagcaauuguagaaucaaa

SEQ ID NO: 2611731 - RNA, 19 nt, Artificial Sequence
  Description of Artificial Sequence: Synthetic oligonucleotide
auucuccagaugccacgca

SEQ ID NO: 2611732 - RNA, 19 nt, Artificial Sequence
  Description of Artificial Sequence: Synthetic oligonucleotide
uggauguccugcgcgcgug

SEQ ID NO: 2611733 - RNA, 19 nt, Artificial Sequence
  Description of Artificial Sequence: Synthetic oligonucleotide
ucuugcacccagggaucag

SEQ ID NO: 2611734 - RNA, 19 nt, Artificial Sequence
  Description of Artificial Sequence: Synthetic oligonucleotide
cuaaagaauagcagucauu

SEQ ID NO: 2611735 - RNA, 19 nt, Artificial Sequence
  Description of Artificial Sequence: Synthetic oligonucleotide
cuuucuggaaucgcucuaa

SEQ ID NO: 2611736 - RNA, 19 nt, Artificial Sequence
  Description of Artificial Sequence: Synthetic oligonucleotide
ccgcaagacagaacaaaac

SEQ ID NO: 2611737 - RNA, 19 nt, Artificial Sequence
  Description of Artificial Sequence: Synthetic oligonucleotide
ggaaguccaacaguuugca

SEQ ID NO: 2611738 - RNA, 19 nt, Artificial Sequence
  Description of Artificial Sequence: Synthetic oligonucleotide
ggaaaauguaguacauaaa

SEQ ID NO: 2611739 - RNA, 19 nt, Artificial Sequence
  Description of Artificial Sequence: Synthetic oligonucleotide
augccacgcacggaccagg

SEQ ID NO: 2611740 - RNA, 19 nt, Artificial Sequence
  Description of Artificial Sequence: Synthetic oligonucleotide
aagggaaguccaacaguuu

SEQ ID NO: 2611741 - RNA, 19 nt, Artificial Sequence
  Description of Artificial Sequence: Synthetic oligonucleotide
aguuugcagcaucucucuu

SEQ ID NO: 2611742 - RNA, 19 nt, Artificial Sequence
  Description of Artificial Sequence: Synthetic oligonucleotide
acggggcggacauucucca

SEQ ID NO: 2611743 - RNA, 19 nt, Artificial Sequence
  Description of Artificial Sequence: Synthetic oligonucleotide
gaacaauacggaccauuuu

SEQ ID NO: 2611744 - RNA, 19 nt, Artificial Sequence
  Description of Artificial Sequence: Synthetic oligonucleotide
gauguccugcgcgcgugug

SEQ ID NO: 2611745 - RNA, 19 nt, Artificial Sequence
  Description of Artificial Sequence: Synthetic oligonucleotide
gcagagcaauaaaaguuac

SEQ ID NO: 2611746 - RNA, 19 nt, Artificial Sequence
  Description of Artificial Sequence: Synthetic oligonucleotide
uccacccuuuguguaguuc

SEQ ID NO: 2611747 - RNA, 19 nt, Artificial Sequence
  Description of Artificial Sequence: Synthetic oligonucleotide
ucucgcggccacccacggc

SEQ ID NO: 2611748 - RNA, 19 nt, Artificial Sequence
  Description of Artificial Sequence: Synthetic oligonucleotide
ugaggaucucgcggccacc

SEQ ID NO: 2611749 - RNA, 19 nt, Artificial Sequence
  Description of Artificial Sequence: Synthetic oligonucleotide
cuccaaugcuuuuguagua

SEQ ID NO: 2611750 - RNA, 19 nt, Artificial Sequence
  Description of Artificial Sequence: Synthetic oligonucleotide
uccagaugccacgcacgga

SEQ ID NO: 2611751 - RNA, 19 nt, Artificial Sequence
  Description of Artificial Sequence: Synthetic oligonucleotide
caacaguuugcagcaucuc

SEQ ID NO: 2611752 - RNA, 19 nt, Artificial Sequence
  Description of Artificial Sequence: Synthetic oligonucleotide
cugggauccgcaagacaga

SEQ ID NO: 2611753 - RNA, 19 nt, Artificial Sequence
  Description of Artificial Sequence: Synthetic oligonucleotide
cauggcgucccgcacggaa

SEQ ID NO: 2611754 - RNA, 19 nt, Artificial Sequence
  Description of Artificial Sequence: Synthetic oligonucleotide
cugaagucaaaaccaggau

SEQ ID NO: 2611755 - RNA, 19 nt, Artificial Sequence
  Description of Artificial Sequence: Synthetic oligonucleotide
ccacaugccggcucugcag

SEQ ID NO: 2611756 - RNA, 19 nt, Artificial Sequence
  Description of Artificial Sequence: Synthetic oligonucleotide
gggucugguaccacuggcc

SEQ ID NO: 2611757 - RNA, 19 nt, Artificial Sequence
  Description of Artificial Sequence: Synthetic oligonucleotide
cacgcacggaccaggcuca

SEQ ID NO: 2611758 - RNA, 19 nt, Artificial Sequence
  Description of Artificial Sequence: Synthetic oligonucleotide
ggggcggacauucuccaga

SEQ ID NO: 2611759 - RNA, 19 nt, Artificial Sequence
  Description of Artificial Sequence: Synthetic oligonucleotide
ccacgcacggaccaggcuc

SEQ ID NO: 2611760 - RNA, 19 nt, Artificial Sequence
  Description of Artificial Sequence: Synthetic oligonucleotide
gucauuucucaagguuuga

SEQ ID NO: 2611761 - RNA, 19 nt, Artificial Sequence
  Description of Artificial Sequence: Synthetic oligonucleotide
ucucugcauuuggucuugc

SEQ ID NO: 2611762 - RNA, 19 nt, Artificial Sequence
  Description of Artificial Sequence: Synthetic oligonucleotide
cucgcggccacccacggcu

SEQ ID NO: 2611763 - RNA, 19 nt, Artificial Sequence
  Description of Artificial Sequence: Synthetic oligonucleotide
ccacuacguuccucaaacg

SEQ ID NO: 2611764 - RNA, 19 nt, Artificial Sequence
  Description of Artificial Sequence: Synthetic oligonucleotide
gauccgcaagacagaacaa

SEQ ID NO: 2611765 - RNA, 19 nt, Artificial Sequence
  Description of Artificial Sequence: Synthetic oligonucleotide
cucaagguuugagaagucu

SEQ ID NO: 2611766 - RNA, 19 nt, Artificial Sequence
  Description of Artificial Sequence: Synthetic oligonucleotide
cauguuccuucaucagcaa

SEQ ID NO: 2611767 - RNA, 19 nt, Artificial Sequence
  Description of Artificial Sequence: Synthetic oligonucleotide
ccagggucugguaccacug

SEQ ID NO: 2611768 - RNA, 19 nt, Artificial Sequence
  Description of Artificial Sequence: Synthetic oligonucleotide
cagauucuagaagggaagu

SEQ ID NO: 2611769 - RNA, 19 nt, Artificial Sequence
  Description of Artificial Sequence: Synthetic oligonucleotide
guaguucccugagauuucu

SEQ ID NO: 2611770 - RNA, 19 nt, Artificial Sequence
  Description of Artificial Sequence: Synthetic oligonucleotide
ucagaacaauacggaccau

SEQ ID NO: 2611771 - RNA, 19 nt, Artificial Sequence
  Description of Artificial Sequence: Synthetic oligonucleotide
ugguaccacuggccccaug

SEQ ID NO: 2611772 - RNA, 19 nt, Artificial Sequence
  Description of Artificial Sequence: Synthetic oligonucleotide
cacccagggaucagcugca

SEQ ID NO: 2611773 - RNA, 19 nt, Artificial Sequence
  Description of Artificial Sequence: Synthetic oligonucleotide
ccuuuguguaguucccuga

SEQ ID NO: 2611774 - RNA, 19 nt, Artificial Sequence
  Description of Artificial Sequence: Synthetic oligonucleotide
cugagauuucugcuccacu

SEQ ID NO: 2611775 - RNA, 19 nt, Artificial Sequence
  Description of Artificial Sequence: Synthetic oligonucleotide
cgcaagacagaacaaaacu

SEQ ID NO: 2611776 - RNA, 19 nt, Artificial Sequence
  Description of Artificial Sequence: Synthetic oligonucleotide
ggucuuugucagaacaaua

SEQ ID NO: 2611777 - RNA, 19 nt, Artificial Sequence
  Description of Artificial Sequence: Synthetic oligonucleotide
cccauggcgucccgcacgg

SEQ ID NO: 2611778 - RNA, 19 nt, Artificial Sequence
  Description of Artificial Sequence: Synthetic oligonucleotide
gucuugcacccagggauca

SEQ ID NO: 2611779 - RNA, 19 nt, Artificial Sequence
  Description of Artificial Sequence: Synthetic oligonucleotide
guuccucaaacggggcgga

SEQ ID NO: 2611780 - RNA, 19 nt, Artificial Sequence
  Description of Artificial Sequence: Synthetic oligonucleotide
caugccggcucugcagguc

SEQ ID NO: 2611781 - RNA, 19 nt, Artificial Sequence
  Description of Artificial Sequence: Synthetic oligonucleotide
ccagggaucagcugcauau

SEQ ID NO: 2611782 - RNA, 19 nt, Artificial Sequence
  Description of Artificial Sequence: Synthetic oligonucleotide
cugcugggauccgcaagac

SEQ ID NO: 2611783 - RNA, 19 nt, Artificial Sequence
  Description of Artificial Sequence: Synthetic oligonucleotide
uuccucaaacggggcggac

SEQ ID NO: 2611784 - RNA, 19 nt, Artificial Sequence
  Description of Artificial Sequence: Synthetic oligonucleotide
gcaccuggacuucaaugaa

SEQ ID NO: 2611785 - RNA, 19 nt, Artificial Sequence
  Description of Artificial Sequence: Synthetic oligonucleotide
ggucuugcacccagggauc

SEQ ID NO: 2611786 - RNA, 19 nt, Artificial Sequence
  Description of Artificial Sequence: Synthetic oligonucleotide
gucccgcacggaaccaccc

SEQ ID NO: 2611787 - RNA, 19 nt, Artificial Sequence
  Description of Artificial Sequence: Synthetic oligonucleotide
ccccauggcgucccgcacg

SEQ ID NO: 2611788 - RNA, 19 nt, Artificial Sequence
  Description of Artificial Sequence: Synthetic oligonucleotide
cgcucuaauguaaguuuuc

SEQ ID NO: 2611789 - RNA, 19 nt, Artificial Sequence
  Description of Artificial Sequence: Synthetic oligonucleotide
cggcuagagccacaugccg

SEQ ID NO: 2611790 - RNA, 19 nt, Artificial Sequence
  Description of Artificial Sequence: Synthetic oligonucleotide
accaccccacuacguuccu

SEQ ID NO: 2611791 - RNA, 19 nt, Artificial Sequence
  Description of Artificial Sequence: Synthetic oligonucleotide
cacggaccaggcucagaga

SEQ ID NO: 2611792 - RNA, 19 nt, Artificial Sequence
  Description of Artificial Sequence: Synthetic oligonucleotide
ccaaugcuuuuguaguaaa

SEQ ID NO: 2611793 - RNA, 19 nt, Artificial Sequence
  Description of Artificial Sequence: Synthetic oligonucleotide
ggaaccaccccacuacguu

SEQ ID NO: 2611794 - RNA, 19 nt, Artificial Sequence
  Description of Artificial Sequence: Synthetic oligonucleotide
accccacuacguuccucaa

SEQ ID NO: 2611795 - RNA, 19 nt, Artificial Sequence
  Description of Artificial Sequence: Synthetic oligonucleotide
gcugcauauucagauucua

SEQ ID NO: 2611796 - RNA, 19 nt, Artificial Sequence
  Description of Artificial Sequence: Synthetic oligonucleotide
cacccacggcuagagccac

SEQ ID NO: 2611797 - RNA, 19 nt, Artificial Sequence
  Description of Artificial Sequence: Synthetic oligonucleotide
cagcaucugcugggauccg

SEQ ID NO: 2611798 - RNA, 19 nt, Artificial Sequence
  Description of Artificial Sequence: Synthetic oligonucleotide
gaagucugguccacccuuu

SEQ ID NO: 2611799 - RNA, 19 nt, Artificial Sequence
  Description of Artificial Sequence: Synthetic oligonucleotide
gccacaugccggcucugca

SEQ ID NO: 2611800 - RNA, 19 nt, Artificial Sequence
  Description of Artificial Sequence: Synthetic oligonucleotide
caaacggggcggacauucu

SEQ ID NO: 2611801 - RNA, 19 nt, Artificial Sequence
  Description of Artificial Sequence: Synthetic oligonucleotide
ccacccacggcuagagcca

SEQ ID NO: 2611802 - RNA, 19 nt, Artificial Sequence
  Description of Artificial Sequence: Synthetic oligonucleotide
cacuggccccauggcgucc

SEQ ID NO: 2611803 - RNA, 19 nt, Artificial Sequence
  Description of Artificial Sequence: Synthetic oligonucleotide
gagccacaugccggcucug

SEQ ID NO: 2611804 - RNA, 19 nt, Artificial Sequence
  Description of Artificial Sequence: Synthetic oligonucleotide
cgcacuggauguccugcgc

SEQ ID NO: 2611805 - RNA, 19 nt, Artificial Sequence
  Description of Artificial Sequence: Synthetic oligonucleotide
cuggccccauggcgucccg

SEQ ID NO: 2611806 - RNA, 19 nt, Artificial Sequence
  Description of Artificial Sequence: Synthetic oligonucleotide
gcacggaaccaccccacua

SEQ ID NO: 2611807 - RNA, 19 nt, Artificial Sequence
  Description of Artificial Sequence: Synthetic oligonucleotide
gggauccgcaagacagaac

SEQ ID NO: 2611808 - RNA, 19 nt, Artificial Sequence
  Description of Artificial Sequence: Synthetic oligonucleotide
caggacagcugcucagcau

SEQ ID NO: 2611809 - RNA, 19 nt, Artificial Sequence
  Description of Artificial Sequence: Synthetic oligonucleotide
cgucccgcacggaaccacc

SEQ ID NO: 2611810 - RNA, 19 nt, Artificial Sequence
  Description of Artificial Sequence: Synthetic oligonucleotide
acgcacggaccaggcucag

SEQ ID NO: 2611811 - RNA, 19 nt, Artificial Sequence
  Description of Artificial Sequence: Synthetic oligonucleotide
ggccacccacggcuagagc

SEQ ID NO: 2611812 - RNA, 19 nt, Artificial Sequence
  Description of Artificial Sequence: Synthetic oligonucleotide
ggacuucaaugaacaccuc

SEQ ID NO: 2611813 - RNA, 19 nt, Artificial Sequence
  Description of Artificial Sequence: Synthetic oligonucleotide
gcauuuggucuugcaccca

SEQ ID NO: 2611814 - RNA, 19 nt, Artificial Sequence
  Description of Artificial Sequence: Synthetic oligonucleotide
cccgcacggaaccacccca

SEQ ID NO: 2611815 - RNA, 19 nt, Artificial Sequence
  Description of Artificial Sequence: Synthetic oligonucleotide
gggcggacauucuccagau

SEQ ID NO: 2611816 - RNA, 19 nt, Artificial Sequence
  Description of Artificial Sequence: Synthetic oligonucleotide
gcaggucgcacuggauguc

SEQ ID NO: 2611817 - RNA, 19 nt, Artificial Sequence
  Description of Artificial Sequence: Synthetic oligonucleotide
acccagggaucagcugcau

SEQ ID NO: 2611818 - RNA, 19 nt, Artificial Sequence
  Description of Artificial Sequence: Synthetic oligonucleotide
ccucaaacggggcggacau

SEQ ID NO: 2611819 - RNA, 19 nt, Artificial Sequence
  Description of Artificial Sequence: Synthetic oligonucleotide
ccugcgcgcgugugcccgg

SEQ ID NO: 2611820 - RNA, 19 nt, Artificial Sequence
  Description of Artificial Sequence: Synthetic oligonucleotide
gccccauggcgucccgcac

SEQ ID NO: 2611821 - RNA, 19 nt, Artificial Sequence
  Description of Artificial Sequence: Synthetic oligonucleotide
cuagagccacaugccggcu

SEQ ID NO: 2611822 - RNA, 19 nt, Artificial Sequence
  Description of Artificial Sequence: Synthetic oligonucleotide
gcgucccgcacggaaccac

SEQ ID NO: 2611823 - RNA, 19 nt, Artificial Sequence
  Description of Artificial Sequence: Synthetic oligonucleotide
acccacggcuagagccaca

SEQ ID NO: 2611824 - RNA, 19 nt, Artificial Sequence
  Description of Artificial Sequence: Synthetic oligonucleotide
ggauguccugcgcgcgugu

SEQ ID NO: 2611825 - RNA, 19 nt, Artificial Sequence
  Description of Artificial Sequence: Synthetic oligonucleotide
ccacggcuagagccacaug

SEQ ID NO: 2611826 - RNA, 19 nt, Artificial Sequence
  Description of Artificial Sequence: Synthetic oligonucleotide
ccccacuacguuccucaaa

SEQ ID NO: 2611827 - RNA, 19 nt, Artificial Sequence
  Description of Artificial Sequence: Synthetic oligonucleotide
cggggcggacauucuccag

SEQ ID NO: 2611828 - RNA, 19 nt, Artificial Sequence
  Description of Artificial Sequence: Synthetic oligonucleotide
ccggcucugcaggucgcac

SEQ ID NO: 2611829 - RNA, 19 nt, Artificial Sequence
  Description of Artificial Sequence: Synthetic oligonucleotide
ggggcaccuggacuucaau

SEQ ID NO: 2611830 - RNA, 19 nt, Artificial Sequence
  Description of Artificial Sequence: Synthetic oligonucleotide
ggcgucccgcacggaacca

SEQ ID NO: 2611831 - RNA, 19 nt, Artificial Sequence
  Description of Artificial Sequence: Synthetic oligonucleotide
guccacccuuuguguaguu

SEQ ID NO: 2611832 - RNA, 19 nt, Artificial Sequence
  Description of Artificial Sequence: Synthetic oligonucleotide
cggccacccacggcuagag

SEQ ID NO: 2611833 - RNA, 19 nt, Artificial Sequence
  Description of Artificial Sequence: Synthetic oligonucleotide
gccacgcacggaccaggcu

SEQ ID NO: 2611834 - RNA, 19 nt, Artificial Sequence
  Description of Artificial Sequence: Synthetic oligonucleotide
cccagggaucagcugcaua

SEQ ID NO: 2611835 - RNA, 19 nt, Artificial Sequence
  Description of Artificial Sequence: Synthetic oligonucleotide
ccaccccacuacguuccuc

SEQ ID NO: 2611836 - RNA, 19 nt, Artificial Sequence
  Description of Artificial Sequence: Synthetic oligonucleotide
gcggccacccacggcuaga

SEQ ID NO: 2611837 - RNA, 19 nt, Artificial Sequence
  Description of Artificial Sequence: Synthetic oligonucleotide
cgcggccacccacggcuag

SEQ ID NO: 2611838 - RNA, 19 nt, Artificial Sequence
  Description of Artificial Sequence: Synthetic oligonucleotide
cggaaccaccccacuacgu

SEQ ID NO: 2611839 - RNA, 19 nt, Artificial Sequence
  Description of Artificial Sequence: Synthetic oligonucleotide
cucaaacggggcggacauu

SEQ ID NO: 2611840 - RNA, 19 nt, Artificial Sequence
  Description of Artificial Sequence: Synthetic oligonucleotide
cccacggcuagagccacau

SEQ ID NO: 2611841 - RNA, 19 nt, Artificial Sequence
  Description of Artificial Sequence: Synthetic oligonucleotide
cgcacggaaccaccccacu

SEQ ID NO: 2611842 - RNA, 19 nt, Artificial Sequence
  Description of Artificial Sequence: Synthetic oligonucleotide
cugguaccacuggccccau

SEQ ID NO: 2611843 - RNA, 19 nt, Artificial Sequence
  Description of Artificial Sequence: Synthetic oligonucleotide
ccauggcgucccgcacgga

SEQ ID NO: 2611844 - RNA, 19 nt, Artificial Sequence
  Description of Artificial Sequence: Synthetic oligonucleotide
aauguaacaaaguagacuc

SEQ ID NO: 2611845 - RNA, 19 nt, Artificial Sequence
  Description of Artificial Sequence: Synthetic oligonucleotide
aauuauaugguguagugag

SEQ ID NO: 2611846 - RNA, 19 nt, Artificial Sequence
  Description of Artificial Sequence: Synthetic oligonucleotide
aauuagaaccauuuuaagg

SEQ ID NO: 2611847 - RNA, 19 nt, Artificial Sequence
  Description of Artificial Sequence: Synthetic oligonucleotide
auuacaaaagaguauaaac

SEQ ID NO: 2611848 - RNA, 19 nt, Artificial Sequence
  Description of Artificial Sequence: Synthetic oligonucleotide
aaaacacgcacacaaauac

SEQ ID NO: 2611849 - RNA, 19 nt, Artificial Sequence
  Description of Artificial Sequence: Synthetic oligonucleotide
aaaauuaugaaugcugccc

SEQ ID NO: 2611850 - RNA, 19 nt, Artificial Sequence
  Description of Artificial Sequence: Synthetic oligonucleotide
aauaagaaaagaccuguac

SEQ ID NO: 2611851 - RNA, 19 nt, Artificial Sequence
  Description of Artificial Sequence: Synthetic oligonucleotide
aaaugaaaauuaugaaugc

SEQ ID NO: 2611852 - RNA, 19 nt, Artificial Sequence
  Description of Artificial Sequence: Synthetic oligonucleotide
uuuuaagaaaacauuacag

SEQ ID NO: 2611853 - RNA, 19 nt, Artificial Sequence
  Description of Artificial Sequence: Synthetic oligonucleotide
auauacaaaacuugaaagc

SEQ ID NO: 2611854 - RNA, 19 nt, Artificial Sequence
  Description of Artificial Sequence: Synthetic oligonucleotide
uguccuaacaauaacauca

SEQ ID NO: 2611855 - RNA, 19 nt, Artificial Sequence
  Description of Artificial Sequence: Synthetic oligonucleotide
acaaauacaauucuguguc

SEQ ID NO: 2611856 - RNA, 19 nt, Artificial Sequence
  Description of Artificial Sequence: Synthetic oligonucleotide
uuauccugaaauuagaacc

SEQ ID NO: 2611857 - RNA, 19 nt, Artificial Sequence
  Description of Artificial Sequence: Synthetic oligonucleotide
aacauuacaguucaauauc

SEQ ID NO: 2611858 - RNA, 19 nt, Artificial Sequence
  Description of Artificial Sequence: Synthetic oligonucleotide
aaaaugaucauguccuaac

SEQ ID NO: 2611859 - RNA, 19 nt, Artificial Sequence
  Description of Artificial Sequence: Synthetic oligonucleotide
auuagaaccauuuuaaggu

SEQ ID NO: 2611860 - RNA, 19 nt, Artificial Sequence
  Description of Artificial Sequence: Synthetic oligonucleotide
cuaacaauaacaucaaaag

SEQ ID NO: 2611861 - RNA, 19 nt, Artificial Sequence
  Description of Artificial Sequence: Synthetic oligonucleotide
ugauucaucaccuuagcgg

SEQ ID NO: 2611862 - RNA, 19 nt, Artificial Sequence
  Description of Artificial Sequence: Synthetic oligonucleotide
uuauucagcagauugauca

SEQ ID NO: 2611863 - RNA, 19 nt, Artificial Sequence
  Description of Artificial Sequence: Synthetic oligonucleotide
uuaucaagacacaagacca

SEQ ID NO: 2611864 - RNA, 19 nt, Artificial Sequence
  Description of Artificial Sequence: Synthetic oligonucleotide
ugaaaauuaugaaugcugc

SEQ ID NO: 2611865 - RNA, 19 nt, Artificial Sequence
  Description of Artificial Sequence: Synthetic oligonucleotide
uacaaaacuugaaagcacg

SEQ ID NO: 2611866 - RNA, 19 nt, Artificial Sequence
  Description of Artificial Sequence: Synthetic oligonucleotide
aaaacuugaaagcacgcca

SEQ ID NO: 2611867 - RNA, 19 nt, Artificial Sequence
  Description of Artificial Sequence: Synthetic oligonucleotide
aagaccaucacaguauuac

SEQ ID NO: 2611868 - RNA, 19 nt, Artificial Sequence
  Description of Artificial Sequence: Synthetic oligonucleotide
ucucauacgaauccugugg

SEQ ID NO: 2611869 - RNA, 19 nt, Artificial Sequence
  Description of Artificial Sequence: Synthetic oligonucleotide
ucuaguuuuaagaaaacau

SEQ ID NO: 2611870 - RNA, 19 nt, Artificial Sequence
  Description of Artificial Sequence: Synthetic oligonucleotide
aaacauuacaguucaauau

SEQ ID NO: 2611871 - RNA, 19 nt, Artificial Sequence
  Description of Artificial Sequence: Synthetic oligonucleotide
ucauuuauccugaaauuag

SEQ ID NO: 2611872 - RNA, 19 nt, Artificial Sequence
  Description of Artificial Sequence: Synthetic oligonucleotide
aaaauaagaaaagaccugu

SEQ ID NO: 2611873 - RNA, 19 nt, Artificial Sequence
  Description of Artificial Sequence: Synthetic oligonucleotide
ugaaauuagaaccauuuua

SEQ ID NO: 2611874 - RNA, 19 nt, Artificial Sequence
  Description of Artificial Sequence: Synthetic oligonucleotide
caucaaaagucauuuaucc

SEQ ID NO: 2611875 - RNA, 19 nt, Artificial Sequence
  Description of Artificial Sequence: Synthetic oligonucleotide
uauacaaaacuugaaagca

SEQ ID NO: 2611876 - RNA, 19 nt, Artificial Sequence
  Description of Artificial Sequence: Synthetic oligonucleotide
ugcauauauacaaaacuug

SEQ ID NO: 2611877 - RNA, 19 nt, Artificial Sequence
  Description of Artificial Sequence: Synthetic oligonucleotide
aaauuagaaccauuuuaag

SEQ ID NO: 2611878 - RNA, 19 nt, Artificial Sequence
  Description of Artificial Sequence: Synthetic oligonucleotide
uucauuguaacgauuuccc

SEQ ID NO: 2611879 - RNA, 19 nt, Artificial Sequence
  Description of Artificial Sequence: Synthetic oligonucleotide
aacagguucaaagucacuc

SEQ ID NO: 2611880 - RNA, 19 nt, Artificial Sequence
  Description of Artificial Sequence: Synthetic oligonucleotide
agaguauaaacuuuccuug

SEQ ID NO: 2611881 - RNA, 19 nt, Artificial Sequence
  Description of Artificial Sequence: Synthetic oligonucleotide
uuuccuuggaccaaguaga

SEQ ID NO: 2611882 - RNA, 19 nt, Artificial Sequence
  Description of Artificial Sequence: Synthetic oligonucleotide
cuuaaucuuauucugcccc

SEQ ID NO: 2611883 - RNA, 19 nt, Artificial Sequence
  Description of Artificial Sequence: Synthetic oligonucleotide
uuuucugcaauuauauggu

SEQ ID NO: 2611884 - RNA, 19 nt, Artificial Sequence
  Description of Artificial Sequence: Synthetic oligonucleotide
aaaagaguauaaacuuucc

SEQ ID NO: 2611885 - RNA, 19 nt, Artificial Sequence
  Description of Artificial Sequence: Synthetic oligonucleotide
agaaaagaccuguacaaag

SEQ ID NO: 2611886 - RNA, 19 nt, Artificial Sequence
  Description of Artificial Sequence: Synthetic oligonucleotide
aaaacauuacaguucaaua

SEQ ID NO: 2611887 - RNA, 19 nt, Artificial Sequence
  Description of Artificial Sequence: Synthetic oligonucleotide
acugcauauauacaaaacu

SEQ ID NO: 2611888 - RNA, 19 nt, Artificial Sequence
  Description of Artificial Sequence: Synthetic oligonucleotide
uauucugccccaaaguuug

SEQ ID NO: 2611889 - RNA, 19 nt, Artificial Sequence
  Description of Artificial Sequence: Synthetic oligonucleotide
guaacgauuucccaauugg

SEQ ID NO: 2611890 - RNA, 19 nt, Artificial Sequence
  Description of Artificial Sequence: Synthetic oligonucleotide
aaagucacucagcagaggu

SEQ ID NO: 2611891 - RNA, 19 nt, Artificial Sequence
  Description of Artificial Sequence: Synthetic oligonucleotide
aaagaguauaaacuuuccu

SEQ ID NO: 2611892 - RNA, 19 nt, Artificial Sequence
  Description of Artificial Sequence: Synthetic oligonucleotide
aauccuguggaagaugaac

SEQ ID NO: 2611893 - RNA, 19 nt, Artificial Sequence
  Description of Artificial Sequence: Synthetic oligonucleotide
uucaauaucuauuccaaaa

SEQ ID NO: 2611894 - RNA, 19 nt, Artificial Sequence
  Description of Artificial Sequence: Synthetic oligonucleotide
aauaccugauuccacaaau

SEQ ID NO: 2611895 - RNA, 19 nt, Artificial Sequence
  Description of Artificial Sequence: Synthetic oligonucleotide
aaaagaccuguacaaagcu

SEQ ID NO: 2611896 - RNA, 19 nt, Artificial Sequence
  Description of Artificial Sequence: Synthetic oligonucleotide
aacacagguaguacaaagc

SEQ ID NO: 2611897 - RNA, 19 nt, Artificial Sequence
  Description of Artificial Sequence: Synthetic oligonucleotide
uaguuuuaagaaaacauua

SEQ ID NO: 2611898 - RNA, 19 nt, Artificial Sequence
  Description of Artificial Sequence: Synthetic oligonucleotide
caaagcaaaguuuaucaag

SEQ ID NO: 2611899 - RNA, 19 nt, Artificial Sequence
  Description of Artificial Sequence: Synthetic oligonucleotide
ugcaaauaacaaaauaaaa

SEQ ID NO: 2611900 - RNA, 19 nt, Artificial Sequence
  Description of Artificial Sequence: Synthetic oligonucleotide
ucauguccuaacaauaaca

SEQ ID NO: 2611901 - RNA, 19 nt, Artificial Sequence
  Description of Artificial Sequence: Synthetic oligonucleotide
aagcaaaguuuaucaagac

SEQ ID NO: 2611902 - RNA, 19 nt, Artificial Sequence
  Description of Artificial Sequence: Synthetic oligonucleotide
ucacaguauuacaaaagag

SEQ ID NO: 2611903 - RNA, 19 nt, Artificial Sequence
  Description of Artificial Sequence: Synthetic oligonucleotide
gacaauguaacaaaguaga

SEQ ID NO: 2611904 - RNA, 19 nt, Artificial Sequence
  Description of Artificial Sequence: Synthetic oligonucleotide
ugaguuuggcacuucauug

SEQ ID NO: 2611905 - RNA, 19 nt, Artificial Sequence
  Description of Artificial Sequence: Synthetic oligonucleotide
accuguacaaagcuggcac

SEQ ID NO: 2611906 - RNA, 19 nt, Artificial Sequence
  Description of Artificial Sequence: Synthetic oligonucleotide
acaauucugugucuacugc

SEQ ID NO: 2611907 - RNA, 19 nt, Artificial Sequence
  Description of Artificial Sequence: Synthetic oligonucleotide
uuuauccugaaauuagaac

SEQ ID NO: 2611908 - RNA, 19 nt, Artificial Sequence
  Description of Artificial Sequence: Synthetic oligonucleotide
ugcagaauggagaucuuag

SEQ ID NO: 2611909 - RNA, 19 nt, Artificial Sequence
  Description of Artificial Sequence: Synthetic oligonucleotide
acgauuucccaauuggcac

SEQ ID NO: 2611910 - RNA, 19 nt, Artificial Sequence
  Description of Artificial Sequence: Synthetic oligonucleotide
aaagcuggcacuuaaucuu

SEQ ID NO: 2611911 - RNA, 19 nt, Artificial Sequence
  Description of Artificial Sequence: Synthetic oligonucleotide
gaguauaaacuuuccuugg

SEQ ID NO: 2611912 - RNA, 19 nt, Artificial Sequence
  Description of Artificial Sequence: Synthetic oligonucleotide
uauccugaaauuagaacca

SEQ ID NO: 2611913 - RNA, 19 nt, Artificial Sequence
  Description of Artificial Sequence: Synthetic oligonucleotide
agaucuuaguucgugauuc

SEQ ID NO: 2611914 - RNA, 19 nt, Artificial Sequence
  Description of Artificial Sequence: Synthetic oligonucleotide
uccacaaauuuacaagcag

SEQ ID NO: 2611915 - RNA, 19 nt, Artificial Sequence
  Description of Artificial Sequence: Synthetic oligonucleotide
uacaguucaauaucuauuc

SEQ ID NO: 2611916 - RNA, 19 nt, Artificial Sequence
  Description of Artificial Sequence: Synthetic oligonucleotide
aacaaaguagacucuaguu

SEQ ID NO: 2611917 - RNA, 19 nt, Artificial Sequence
  Description of Artificial Sequence: Synthetic oligonucleotide
gaaaauuaugaaugcugcc

SEQ ID NO: 2611918 - RNA, 19 nt, Artificial Sequence
  Description of Artificial Sequence: Synthetic oligonucleotide
aauuuacaagcagacaaug

SEQ ID NO: 2611919 - RNA, 19 nt, Artificial Sequence
  Description of Artificial Sequence: Synthetic oligonucleotide
aaugaaaauuaugaaugcu

SEQ ID NO: 2611920 - RNA, 19 nt, Artificial Sequence
  Description of Artificial Sequence: Synthetic oligonucleotide
caaauuuacaagcagacaa

SEQ ID NO: 2611921 - RNA, 19 nt, Artificial Sequence
  Description of Artificial Sequence: Synthetic oligonucleotide
gugucuacugcauauauac

SEQ ID NO: 2611922 - RNA, 19 nt, Artificial Sequence
  Description of Artificial Sequence: Synthetic oligonucleotide
auaaacuuuccuuggacca

SEQ ID NO: 2611923 - RNA, 19 nt, Artificial Sequence
  Description of Artificial Sequence: Synthetic oligonucleotide
acaaagcuggcacuuaauc

SEQ ID NO: 2611924 - RNA, 19 nt, Artificial Sequence
  Description of Artificial Sequence: Synthetic oligonucleotide
cuuuccuuggaccaaguag

SEQ ID NO: 2611925 - RNA, 19 nt, Artificial Sequence
  Description of Artificial Sequence: Synthetic oligonucleotide
aaaugaucauguccuaaca

SEQ ID NO: 2611926 - RNA, 19 nt, Artificial Sequence
  Description of Artificial Sequence: Synthetic oligonucleotide
aucacaguauuacaaaaga

SEQ ID NO: 2611927 - RNA, 19 nt, Artificial Sequence
  Description of Artificial Sequence: Synthetic oligonucleotide
acaguucaauaucuauucc

SEQ ID NO: 2611928 - RNA, 19 nt, Artificial Sequence
  Description of Artificial Sequence: Synthetic oligonucleotide
cacaaauuuacaagcagac

SEQ ID NO: 2611929 - RNA, 19 nt, Artificial Sequence
  Description of Artificial Sequence: Synthetic oligonucleotide
gaacacagguaguacaaag

SEQ ID NO: 2611930 - RNA, 19 nt, Artificial Sequence
  Description of Artificial Sequence: Synthetic oligonucleotide
aucacaggcuacuugguuc

SEQ ID NO: 2611931 - RNA, 19 nt, Artificial Sequence
  Description of Artificial Sequence: Synthetic oligonucleotide
aaugaucauguccuaacaa

SEQ ID NO: 2611932 - RNA, 19 nt, Artificial Sequence
  Description of Artificial Sequence: Synthetic oligonucleotide
gauucaucaccuuagcgga

SEQ ID NO: 2611933 - RNA, 19 nt, Artificial Sequence
  Description of Artificial Sequence: Synthetic oligonucleotide
agucacucagcagaggugc

SEQ ID NO: 2611934 - RNA, 19 nt, Artificial Sequence
  Description of Artificial Sequence: Synthetic oligonucleotide
aagguguuuguacaaauuu

SEQ ID NO: 2611935 - RNA, 19 nt, Artificial Sequence
  Description of Artificial Sequence: Synthetic oligonucleotide
ucugucuccggccacagga

SEQ ID NO: 2611936 - RNA, 19 nt, Artificial Sequence
  Description of Artificial Sequence: Synthetic oligonucleotide
uuacaagcagacaauguaa

SEQ ID NO: 2611937 - RNA, 19 nt, Artificial Sequence
  Description of Artificial Sequence: Synthetic oligonucleotide
uugguucucauacgaaucc

SEQ ID NO: 2611938 - RNA, 19 nt, Artificial Sequence
  Description of Artificial Sequence: Synthetic oligonucleotide
uaugguguagugaguuugg

SEQ ID NO: 2611939 - RNA, 19 nt, Artificial Sequence
  Description of Artificial Sequence: Synthetic oligonucleotide
augaaaauuaugaaugcug

SEQ ID NO: 2611940 - RNA, 19 nt, Artificial Sequence
  Description of Artificial Sequence: Synthetic oligonucleotide
aguauuacaaaagaguaua

SEQ ID NO: 2611941 - RNA, 19 nt, Artificial Sequence
  Description of Artificial Sequence: Synthetic oligonucleotide
gaugaacagguucaaaguc

SEQ ID NO: 2611942 - RNA, 19 nt, Artificial Sequence
  Description of Artificial Sequence: Synthetic oligonucleotide
uuagaaccauuuuaaggug

SEQ ID NO: 2611943 - RNA, 19 nt, Artificial Sequence
  Description of Artificial Sequence: Synthetic oligonucleotide
uagacucuaguuuuaagaa

SEQ ID NO: 2611944 - RNA, 19 nt, Artificial Sequence
  Description of Artificial Sequence: Synthetic oligonucleotide
uguaacgauuucccaauug

SEQ ID NO: 2611945 - RNA, 19 nt, Artificial Sequence
  Description of Artificial Sequence: Synthetic oligonucleotide
ucgugauucaucaccuuag

SEQ ID NO: 2611946 - RNA, 19 nt, Artificial Sequence
  Description of Artificial Sequence: Synthetic oligonucleotide
gaaaagaccuguacaaagc

SEQ ID NO: 2611947 - RNA, 19 nt, Artificial Sequence
  Description of Artificial Sequence: Synthetic oligonucleotide
aaccauuuuaagguguuug

SEQ ID NO: 2611948 - RNA, 19 nt, Artificial Sequence
  Description of Artificial Sequence: Synthetic oligonucleotide
agacacaagaccaucacag

SEQ ID NO: 2611949 - RNA, 19 nt, Artificial Sequence
  Description of Artificial Sequence: Synthetic oligonucleotide
guagacucuaguuuuaaga

SEQ ID NO: 2611950 - RNA, 19 nt, Artificial Sequence
  Description of Artificial Sequence: Synthetic oligonucleotide
uaacgauuucccaauuggc

SEQ ID NO: 2611951 - RNA, 19 nt, Artificial Sequence
  Description of Artificial Sequence: Synthetic oligonucleotide
ucaccuuagcggaacacag

SEQ ID NO: 2611952 - RNA, 19 nt, Artificial Sequence
  Description of Artificial Sequence: Synthetic oligonucleotide
cuuaguucgugauucauca

SEQ ID NO: 2611953 - RNA, 19 nt, Artificial Sequence
  Description of Artificial Sequence: Synthetic oligonucleotide
caucacaguauuacaaaag

SEQ ID NO: 2611954 - RNA, 19 nt, Artificial Sequence
  Description of Artificial Sequence: Synthetic oligonucleotide
acaaaguagacucuaguuu

SEQ ID NO: 2611955 - RNA, 19 nt, Artificial Sequence
  Description of Artificial Sequence: Synthetic oligonucleotide
aaguuugacaaguccauuu

SEQ ID NO: 2611956 - RNA, 19 nt, Artificial Sequence
  Description of Artificial Sequence: Synthetic oligonucleotide
uucugcaauuauauggugu

SEQ ID NO: 2611957 - RNA, 19 nt, Artificial Sequence
  Description of Artificial Sequence: Synthetic oligonucleotide
uaacaaaguagacucuagu

SEQ ID NO: 2611958 - RNA, 19 nt, Artificial Sequence
  Description of Artificial Sequence: Synthetic oligonucleotide
ugaacagguucaaagucac

SEQ ID NO: 2611959 - RNA, 19 nt, Artificial Sequence
  Description of Artificial Sequence: Synthetic oligonucleotide
aaaguuuaucaagacacaa

SEQ ID NO: 2611960 - RNA, 19 nt, Artificial Sequence
  Description of Artificial Sequence: Synthetic oligonucleotide
acaauaacaucaaaaguca

SEQ ID NO: 2611961 - RNA, 19 nt, Artificial Sequence
  Description of Artificial Sequence: Synthetic oligonucleotide
uacaagcagacaauguaac

SEQ ID NO: 2611962 - RNA, 19 nt, Artificial Sequence
  Description of Artificial Sequence: Synthetic oligonucleotide
acacagguaguacaaagca

SEQ ID NO: 2611963 - RNA, 19 nt, Artificial Sequence
  Description of Artificial Sequence: Synthetic oligonucleotide
ucuacugcauauauacaaa

SEQ ID NO: 2611964 - RNA, 19 nt, Artificial Sequence
  Description of Artificial Sequence: Synthetic oligonucleotide
ugauuccacaaauuuacaa

SEQ ID NO: 2611965 - RNA, 19 nt, Artificial Sequence
  Description of Artificial Sequence: Synthetic oligonucleotide
ucugcaauuauauggugua

SEQ ID NO: 2611966 - RNA, 19 nt, Artificial Sequence
  Description of Artificial Sequence: Synthetic oligonucleotide
auuguaacgauuucccaau

SEQ ID NO: 2611967 - RNA, 19 nt, Artificial Sequence
  Description of Artificial Sequence: Synthetic oligonucleotide
aaacuugaaagcacgccag

SEQ ID NO: 2611968 - RNA, 19 nt, Artificial Sequence
  Description of Artificial Sequence: Synthetic oligonucleotide
auacaaaacuugaaagcac

SEQ ID NO: 2611969 - RNA, 19 nt, Artificial Sequence
  Description of Artificial Sequence: Synthetic oligonucleotide
ucccaauuggcacaguccu

SEQ ID NO: 2611970 - RNA, 19 nt, Artificial Sequence
  Description of Artificial Sequence: Synthetic oligonucleotide
acaucaaaagucauuuauc

SEQ ID NO: 2611971 - RNA, 19 nt, Artificial Sequence
  Description of Artificial Sequence: Synthetic oligonucleotide
uggcacuuaaucuuauucu

SEQ ID NO: 2611972 - RNA, 19 nt, Artificial Sequence
  Description of Artificial Sequence: Synthetic oligonucleotide
ugaucauguccuaacaaua

SEQ ID NO: 2611973 - RNA, 19 nt, Artificial Sequence
  Description of Artificial Sequence: Synthetic oligonucleotide
aucuuauucugccccaaag

SEQ ID NO: 2611974 - RNA, 19 nt, Artificial Sequence
  Description of Artificial Sequence: Synthetic oligonucleotide
uauuacaaaagaguauaaa

SEQ ID NO: 2611975 - RNA, 19 nt, Artificial Sequence
  Description of Artificial Sequence: Synthetic oligonucleotide
agacaauguaacaaaguag

SEQ ID NO: 2611976 - RNA, 19 nt, Artificial Sequence
  Description of Artificial Sequence: Synthetic oligonucleotide
gguguagugaguuuggcac

SEQ ID NO: 2611977 - RNA, 19 nt, Artificial Sequence
  Description of Artificial Sequence: Synthetic oligonucleotide
aacgauuucccaauuggca

SEQ ID NO: 2611978 - RNA, 19 nt, Artificial Sequence
  Description of Artificial Sequence: Synthetic oligonucleotide
aguauaaacuuuccuugga

SEQ ID NO: 2611979 - RNA, 19 nt, Artificial Sequence
  Description of Artificial Sequence: Synthetic oligonucleotide
uuaaucuuauucugcccca

SEQ ID NO: 2611980 - RNA, 19 nt, Artificial Sequence
  Description of Artificial Sequence: Synthetic oligonucleotide
augaucauguccuaacaau

SEQ ID NO: 2611981 - RNA, 19 nt, Artificial Sequence
  Description of Artificial Sequence: Synthetic oligonucleotide
auguccuaacaauaacauc

SEQ ID NO: 2611982 - RNA, 19 nt, Artificial Sequence
  Description of Artificial Sequence: Synthetic oligonucleotide
acaaauuugcaaauaacaa

SEQ ID NO: 2611983 - RNA, 19 nt, Artificial Sequence
  Description of Artificial Sequence: Synthetic oligonucleotide
uucccaauuggcacagucc

SEQ ID NO: 2611984 - RNA, 19 nt, Artificial Sequence
  Description of Artificial Sequence: Synthetic oligonucleotide
uuuuaagguguuuguacaa

SEQ ID NO: 2611985 - RNA, 19 nt, Artificial Sequence
  Description of Artificial Sequence: Synthetic oligonucleotide
uugaaagcacgccaguauc

SEQ ID NO: 2611986 - RNA, 19 nt, Artificial Sequence
  Description of Artificial Sequence: Synthetic oligonucleotide
acuucauuguaacgauuuc

SEQ ID NO: 2611987 - RNA, 19 nt, Artificial Sequence
  Description of Artificial Sequence: Synthetic oligonucleotide
gugauucaucaccuuagcg

SEQ ID NO: 2611988 - RNA, 19 nt, Artificial Sequence
  Description of Artificial Sequence: Synthetic oligonucleotide
acaaaacuugaaagcacgc

SEQ ID NO: 2611989 - RNA, 19 nt, Artificial Sequence
  Description of Artificial Sequence: Synthetic oligonucleotide
ucuuaguucgugauucauc

SEQ ID NO: 2611990 - RNA, 19 nt, Artificial Sequence
  Description of Artificial Sequence: Synthetic oligonucleotide
uagaaccauuuuaaggugu

SEQ ID NO: 2611991 - RNA, 19 nt, Artificial Sequence
  Description of Artificial Sequence: Synthetic oligonucleotide
ugaaagucuuuucugcaau

SEQ ID NO: 2611992 - RNA, 19 nt, Artificial Sequence
  Description of Artificial Sequence: Synthetic oligonucleotide
ugaaagcacgccaguaucu

SEQ ID NO: 2611993 - RNA, 19 nt, Artificial Sequence
  Description of Artificial Sequence: Synthetic oligonucleotide
ccugauuccacaaauuuac

SEQ ID NO: 2611994 - RNA, 19 nt, Artificial Sequence
  Description of Artificial Sequence: Synthetic oligonucleotide
aaauuuacaagcagacaau

SEQ ID NO: 2611995 - RNA, 19 nt, Artificial Sequence
  Description of Artificial Sequence: Synthetic oligonucleotide
cuugguucucauacgaauc

SEQ ID NO: 2611996 - RNA, 19 nt, Artificial Sequence
  Description of Artificial Sequence: Synthetic oligonucleotide
ugcaauuauaugguguagu

SEQ ID NO: 2611997 - RNA, 19 nt, Artificial Sequence
  Description of Artificial Sequence: Synthetic oligonucleotide
uuaagguguuuguacaaau

SEQ ID NO: 2611998 - RNA, 19 nt, Artificial Sequence
  Description of Artificial Sequence: Synthetic oligonucleotide
gucuacugcauauauacaa

SEQ ID NO: 2611999 - RNA, 19 nt, Artificial Sequence
  Description of Artificial Sequence: Synthetic oligonucleotide
cauacgaauccuguggaag

SEQ ID NO: 2612000 - RNA, 19 nt, Artificial Sequence
  Description of Artificial Sequence: Synthetic oligonucleotide
auacgaauccuguggaaga

SEQ ID NO: 2612001 - RNA, 19 nt, Artificial Sequence
  Description of Artificial Sequence: Synthetic oligonucleotide
uuauucugccccaaaguuu

SEQ ID NO: 2612002 - RNA, 19 nt, Artificial Sequence
  Description of Artificial Sequence: Synthetic oligonucleotide
aaauaccugauuccacaaa

SEQ ID NO: 2612003 - RNA, 19 nt, Artificial Sequence
  Description of Artificial Sequence: Synthetic oligonucleotide
acaguauuacaaaagagua

SEQ ID NO: 2612004 - RNA, 19 nt, Artificial Sequence
  Description of Artificial Sequence: Synthetic oligonucleotide
aguagacucuaguuuuaag

SEQ ID NO: 2612005 - RNA, 19 nt, Artificial Sequence
  Description of Artificial Sequence: Synthetic oligonucleotide
gacucuaguuuuaagaaaa

SEQ ID NO: 2612006 - RNA, 19 nt, Artificial Sequence
  Description of Artificial Sequence: Synthetic oligonucleotide
uggcacuucauuguaacga

SEQ ID NO: 2612007 - RNA, 19 nt, Artificial Sequence
  Description of Artificial Sequence: Synthetic oligonucleotide
aaacuuuccuuggaccaag

SEQ ID NO: 2612008 - RNA, 19 nt, Artificial Sequence
  Description of Artificial Sequence: Synthetic oligonucleotide
accuuagcggaacacaggu

SEQ ID NO: 2612009 - RNA, 19 nt, Artificial Sequence
  Description of Artificial Sequence: Synthetic oligonucleotide
auaugguguagugaguuug

SEQ ID NO: 2612010 - RNA, 19 nt, Artificial Sequence
  Description of Artificial Sequence: Synthetic oligonucleotide
uguaacaaaguagacucua

SEQ ID NO: 2612011 - RNA, 19 nt, Artificial Sequence
  Description of Artificial Sequence: Synthetic oligonucleotide
uuucccaauuggcacaguc

SEQ ID NO: 2612012 - RNA, 19 nt, Artificial Sequence
  Description of Artificial Sequence: Synthetic oligonucleotide
uaccugauuccacaaauuu

SEQ ID NO: 2612013 - RNA, 19 nt, Artificial Sequence
  Description of Artificial Sequence: Synthetic oligonucleotide
uuauaugguguagugaguu

SEQ ID NO: 2612014 - RNA, 19 nt, Artificial Sequence
  Description of Artificial Sequence: Synthetic oligonucleotide
ucauuguaacgauuuccca

SEQ ID NO: 2612015 - RNA, 19 nt, Artificial Sequence
  Description of Artificial Sequence: Synthetic oligonucleotide
uucucauacgaauccugug

SEQ ID NO: 2612016 - RNA, 19 nt, Artificial Sequence
  Description of Artificial Sequence: Synthetic oligonucleotide
cuggcacuuaaucuuauuc

SEQ ID NO: 2612017 - RNA, 19 nt, Artificial Sequence
  Description of Artificial Sequence: Synthetic oligonucleotide
uucgugauucaucaccuua

SEQ ID NO: 2612018 - RNA, 19 nt, Artificial Sequence
  Description of Artificial Sequence: Synthetic oligonucleotide
uauucagcagauugaucac

SEQ ID NO: 2612019 - RNA, 19 nt, Artificial Sequence
  Description of Artificial Sequence: Synthetic oligonucleotide
acgcacacaaauacaauuc

SEQ ID NO: 2612020 - RNA, 19 nt, Artificial Sequence
  Description of Artificial Sequence: Synthetic oligonucleotide
uuucugcaauuauauggug

SEQ ID NO: 2612021 - RNA, 19 nt, Artificial Sequence
  Description of Artificial Sequence: Synthetic oligonucleotide
agucauuuauccugaaauu

SEQ ID NO: 2612022 - RNA, 19 nt, Artificial Sequence
  Description of Artificial Sequence: Synthetic oligonucleotide
aacuugaaagcacgccagu

SEQ ID NO: 2612023 - RNA, 19 nt, Artificial Sequence
  Description of Artificial Sequence: Synthetic oligonucleotide
acaagcagacaauguaaca

SEQ ID NO: 2612024 - RNA, 19 nt, Artificial Sequence
  Description of Artificial Sequence: Synthetic oligonucleotide
cauuguaacgauuucccaa

SEQ ID NO: 2612025 - RNA, 19 nt, Artificial Sequence
  Description of Artificial Sequence: Synthetic oligonucleotide
aaagcacgccaguaucuga

SEQ ID NO: 2612026 - RNA, 19 nt, Artificial Sequence
  Description of Artificial Sequence: Synthetic oligonucleotide
uuuaagguguuuguacaaa

SEQ ID NO: 2612027 - RNA, 19 nt, Artificial Sequence
  Description of Artificial Sequence: Synthetic oligonucleotide
caaaagucauuuauccuga

SEQ ID NO: 2612028 - RNA, 19 nt, Artificial Sequence
  Description of Artificial Sequence: Synthetic oligonucleotide
ucagcagauugaucacagg

SEQ ID NO: 2612029 - RNA, 19 nt, Artificial Sequence
  Description of Artificial Sequence: Synthetic oligonucleotide
ugucuacugcauauauaca

SEQ ID NO: 2612030 - RNA, 19 nt, Artificial Sequence
  Description of Artificial Sequence: Synthetic oligonucleotide
uaagguguuuguacaaauu

SEQ ID NO: 2612031 - RNA, 19 nt, Artificial Sequence
  Description of Artificial Sequence: Synthetic oligonucleotide
uucugugucuacugcauau

SEQ ID NO: 2612032 - RNA, 19 nt, Artificial Sequence
  Description of Artificial Sequence: Synthetic oligonucleotide
gcaauuauaugguguagug

SEQ ID NO: 2612033 - RNA, 19 nt, Artificial Sequence
  Description of Artificial Sequence: Synthetic oligonucleotide
uaucaagacacaagaccau

SEQ ID NO: 2612034 - RNA, 19 nt, Artificial Sequence
  Description of Artificial Sequence: Synthetic oligonucleotide
ugguguagugaguuuggca

SEQ ID NO: 2612035 - RNA, 19 nt, Artificial Sequence
  Description of Artificial Sequence: Synthetic oligonucleotide
acagguaguacaaagcaaa

SEQ ID NO: 2612036 - RNA, 19 nt, Artificial Sequence
  Description of Artificial Sequence: Synthetic oligonucleotide
cagacaauguaacaaagua

SEQ ID NO: 2612037 - RNA, 19 nt, Artificial Sequence
  Description of Artificial Sequence: Synthetic oligonucleotide
cauuuauccugaaauuaga

SEQ ID NO: 2612038 - RNA, 19 nt, Artificial Sequence
  Description of Artificial Sequence: Synthetic oligonucleotide
ggcuacuugguucucauac

SEQ ID NO: 2612039 - RNA, 19 nt, Artificial Sequence
  Description of Artificial Sequence: Synthetic oligonucleotide
aguuugacaaguccauuuu

SEQ ID NO: 2612040 - RNA, 19 nt, Artificial Sequence
  Description of Artificial Sequence: Synthetic oligonucleotide
aauucugugucuacugcau

SEQ ID NO: 2612041 - RNA, 19 nt, Artificial Sequence
  Description of Artificial Sequence: Synthetic oligonucleotide
ucugccccaaaguuugaca

SEQ ID NO: 2612042 - RNA, 19 nt, Artificial Sequence
  Description of Artificial Sequence: Synthetic oligonucleotide
accaucacaguauuacaaa

SEQ ID NO: 2612043 - RNA, 19 nt, Artificial Sequence
  Description of Artificial Sequence: Synthetic oligonucleotide
guaacaaaguagacucuag

SEQ ID NO: 2612044 - RNA, 19 nt, Artificial Sequence
  Description of Artificial Sequence: Synthetic oligonucleotide
gaccaaguagauauuaaaa

SEQ ID NO: 2612045 - RNA, 19 nt, Artificial Sequence
  Description of Artificial Sequence: Synthetic oligonucleotide
aaucuuauucugccccaaa

SEQ ID NO: 2612046 - RNA, 19 nt, Artificial Sequence
  Description of Artificial Sequence: Synthetic oligonucleotide
uggagaucuuaguucguga

SEQ ID NO: 2612047 - RNA, 19 nt, Artificial Sequence
  Description of Artificial Sequence: Synthetic oligonucleotide
acgccaguaucugaaaguc

SEQ ID NO: 2612048 - RNA, 19 nt, Artificial Sequence
  Description of Artificial Sequence: Synthetic oligonucleotide
uggaccaaguagauauuaa

SEQ ID NO: 2612049 - RNA, 19 nt, Artificial Sequence
  Description of Artificial Sequence: Synthetic oligonucleotide
augaacagguucaaaguca

SEQ ID NO: 2612050 - RNA, 19 nt, Artificial Sequence
  Description of Artificial Sequence: Synthetic oligonucleotide
agacucuaguuuuaagaaa

SEQ ID NO: 2612051 - RNA, 19 nt, Artificial Sequence
  Description of Artificial Sequence: Synthetic oligonucleotide
acauuacaguucaauaucu

SEQ ID NO: 2612052 - RNA, 19 nt, Artificial Sequence
  Description of Artificial Sequence: Synthetic oligonucleotide
gauuucccaauuggcacag

SEQ ID NO: 2612053 - RNA, 19 nt, Artificial Sequence
  Description of Artificial Sequence: Synthetic oligonucleotide
uagugaguuuggcacuuca

SEQ ID NO: 2612054 - RNA, 19 nt, Artificial Sequence
  Description of Artificial Sequence: Synthetic oligonucleotide
ugugucuacugcauauaua

SEQ ID NO: 2612055 - RNA, 19 nt, Artificial Sequence
  Description of Artificial Sequence: Synthetic oligonucleotide
ccuaacaauaacaucaaaa

SEQ ID NO: 2612056 - RNA, 19 nt, Artificial Sequence
  Description of Artificial Sequence: Synthetic oligonucleotide
agguguuuguacaaauuug

SEQ ID NO: 2612057 - RNA, 19 nt, Artificial Sequence
  Description of Artificial Sequence: Synthetic oligonucleotide
gaaaacauuacaguucaau

SEQ ID NO: 2612058 - RNA, 19 nt, Artificial Sequence
  Description of Artificial Sequence: Synthetic oligonucleotide
auuuacaagcagacaaugu

SEQ ID NO: 2612059 - RNA, 19 nt, Artificial Sequence
  Description of Artificial Sequence: Synthetic oligonucleotide
gaaagcacgccaguaucug

SEQ ID NO: 2612060 - RNA, 19 nt, Artificial Sequence
  Description of Artificial Sequence: Synthetic oligonucleotide
agaccaucacaguauuaca

SEQ ID NO: 2612061 - RNA, 19 nt, Artificial Sequence
  Description of Artificial Sequence: Synthetic oligonucleotide
acucuaguuuuaagaaaac

SEQ ID NO: 2612062 - RNA, 19 nt, Artificial Sequence
  Description of Artificial Sequence: Synthetic oligonucleotide
agcagacaauguaacaaag

SEQ ID NO: 2612063 - RNA, 19 nt, Artificial Sequence
  Description of Artificial Sequence: Synthetic oligonucleotide
aaauaagaaaagaccugua

SEQ ID NO: 2612064 - RNA, 19 nt, Artificial Sequence
  Description of Artificial Sequence: Synthetic oligonucleotide
auuuauccugaaauuagaa

SEQ ID NO: 2612065 - RNA, 19 nt, Artificial Sequence
  Description of Artificial Sequence: Synthetic oligonucleotide
gaucauguccuaacaauaa

SEQ ID NO: 2612066 - RNA, 19 nt, Artificial Sequence
  Description of Artificial Sequence: Synthetic oligonucleotide
caaaguuuaucaagacaca

SEQ ID NO: 2612067 - RNA, 19 nt, Artificial Sequence
  Description of Artificial Sequence: Synthetic oligonucleotide
uuagcggaacacagguagu

SEQ ID NO: 2612068 - RNA, 19 nt, Artificial Sequence
  Description of Artificial Sequence: Synthetic oligonucleotide
agauugaucacaggcuacu

SEQ ID NO: 2612069 - RNA, 19 nt, Artificial Sequence
  Description of Artificial Sequence: Synthetic oligonucleotide
augguguagugaguuuggc

SEQ ID NO: 2612070 - RNA, 19 nt, Artificial Sequence
  Description of Artificial Sequence: Synthetic oligonucleotide
agcagauugaucacaggcu

SEQ ID NO: 2612071 - RNA, 19 nt, Artificial Sequence
  Description of Artificial Sequence: Synthetic oligonucleotide
guacaaagcaaaguuuauc

SEQ ID NO: 2612072 - RNA, 19 nt, Artificial Sequence
  Description of Artificial Sequence: Synthetic oligonucleotide
gcuacuugguucucauacg

SEQ ID NO: 2612073 - RNA, 19 nt, Artificial Sequence
  Description of Artificial Sequence: Synthetic oligonucleotide
acaaaagaguauaaacuuu

SEQ ID NO: 2612074 - RNA, 19 nt, Artificial Sequence
  Description of Artificial Sequence: Synthetic oligonucleotide
caagcagacaauguaacaa

SEQ ID NO: 2612075 - RNA, 19 nt, Artificial Sequence
  Description of Artificial Sequence: Synthetic oligonucleotide
gcauauauacaaaacuuga

SEQ ID NO: 2612076 - RNA, 19 nt, Artificial Sequence
  Description of Artificial Sequence: Synthetic oligonucleotide
ugccccaaaguuugacaag

SEQ ID NO: 2612077 - RNA, 19 nt, Artificial Sequence
  Description of Artificial Sequence: Synthetic oligonucleotide
ugaucacaggcuacuuggu

SEQ ID NO: 2612078 - RNA, 19 nt, Artificial Sequence
  Description of Artificial Sequence: Synthetic oligonucleotide
aguucgugauucaucaccu

SEQ ID NO: 2612079 - RNA, 19 nt, Artificial Sequence
  Description of Artificial Sequence: Synthetic oligonucleotide
cuacuugguucucauacga

SEQ ID NO: 2612080 - RNA, 19 nt, Artificial Sequence
  Description of Artificial Sequence: Synthetic oligonucleotide
uaaacuuuccuuggaccaa

SEQ ID NO: 2612081 - RNA, 19 nt, Artificial Sequence
  Description of Artificial Sequence: Synthetic oligonucleotide
gucauuuauccugaaauua

SEQ ID NO: 2612082 - RNA, 19 nt, Artificial Sequence
  Description of Artificial Sequence: Synthetic oligonucleotide
agcggaacacagguaguac

SEQ ID NO: 2612083 - RNA, 19 nt, Artificial Sequence
  Description of Artificial Sequence: Synthetic oligonucleotide
uacuugguucucauacgaa

SEQ ID NO: 2612084 - RNA, 19 nt, Artificial Sequence
  Description of Artificial Sequence: Synthetic oligonucleotide
uccuaacaauaacaucaaa

SEQ ID NO: 2612085 - RNA, 19 nt, Artificial Sequence
  Description of Artificial Sequence: Synthetic oligonucleotide
caccuuagcggaacacagg

SEQ ID NO: 2612086 - RNA, 19 nt, Artificial Sequence
  Description of Artificial Sequence: Synthetic oligonucleotide
uauaugguguagugaguuu

SEQ ID NO: 2612087 - RNA, 19 nt, Artificial Sequence
  Description of Artificial Sequence: Synthetic oligonucleotide
cagauugaucacaggcuac

SEQ ID NO: 2612088 - RNA, 19 nt, Artificial Sequence
  Description of Artificial Sequence: Synthetic oligonucleotide
aaaguuugacaaguccauu

SEQ ID NO: 2612089 - RNA, 19 nt, Artificial Sequence
  Description of Artificial Sequence: Synthetic oligonucleotide
uuaguucgugauucaucac

SEQ ID NO: 2612090 - RNA, 19 nt, Artificial Sequence
  Description of Artificial Sequence: Synthetic oligonucleotide
auccuguggaagaugaaca

SEQ ID NO: 2612091 - RNA, 19 nt, Artificial Sequence
  Description of Artificial Sequence: Synthetic oligonucleotide
uacaaagcuggcacuuaau

SEQ ID NO: 2612092 - RNA, 19 nt, Artificial Sequence
  Description of Artificial Sequence: Synthetic oligonucleotide
agguaguacaaagcaaagu

SEQ ID NO: 2612093 - RNA, 19 nt, Artificial Sequence
  Description of Artificial Sequence: Synthetic oligonucleotide
auggagaucuuaguucgug

SEQ ID NO: 2612094 - RNA, 19 nt, Artificial Sequence
  Description of Artificial Sequence: Synthetic oligonucleotide
ucauacgaauccuguggaa

SEQ ID NO: 2612095 - RNA, 19 nt, Artificial Sequence
  Description of Artificial Sequence: Synthetic oligonucleotide
cuacugcauauauacaaaa

SEQ ID NO: 2612096 - RNA, 19 nt, Artificial Sequence
  Description of Artificial Sequence: Synthetic oligonucleotide
aucaccuuagcggaacaca

SEQ ID NO: 2612097 - RNA, 19 nt, Artificial Sequence
  Description of Artificial Sequence: Synthetic oligonucleotide
aagucacucagcagaggug

SEQ ID NO: 2612098 - RNA, 19 nt, Artificial Sequence
  Description of Artificial Sequence: Synthetic oligonucleotide
uggcacaguccuuaucacu

SEQ ID NO: 2612099 - RNA, 19 nt, Artificial Sequence
  Description of Artificial Sequence: Synthetic oligonucleotide
ccaaaguuugacaagucca

SEQ ID NO: 2612100 - RNA, 19 nt, Artificial Sequence
  Description of Artificial Sequence: Synthetic oligonucleotide
agaccuguacaaagcuggc

SEQ ID NO: 2612101 - RNA, 19 nt, Artificial Sequence
  Description of Artificial Sequence: Synthetic oligonucleotide
aaguagacucuaguuuuaa

SEQ ID NO: 2612102 - RNA, 19 nt, Artificial Sequence
  Description of Artificial Sequence: Synthetic oligonucleotide
aguuuggcacuucauugua

SEQ ID NO: 2612103 - RNA, 19 nt, Artificial Sequence
  Description of Artificial Sequence: Synthetic oligonucleotide
gaucuuaguucgugauuca

SEQ ID NO: 2612104 - RNA, 19 nt, Artificial Sequence
  Description of Artificial Sequence: Synthetic oligonucleotide
caauuauaugguguaguga

SEQ ID NO: 2612105 - RNA, 19 nt, Artificial Sequence
  Description of Artificial Sequence: Synthetic oligonucleotide
cucauacgaauccugugga

SEQ ID NO: 2612106 - RNA, 19 nt, Artificial Sequence
  Description of Artificial Sequence: Synthetic oligonucleotide
gaguuuggcacuucauugu

SEQ ID NO: 2612107 - RNA, 19 nt, Artificial Sequence
  Description of Artificial Sequence: Synthetic oligonucleotide
cccaaaguuugacaagucc

SEQ ID NO: 2612108 - RNA, 19 nt, Artificial Sequence
  Description of Artificial Sequence: Synthetic oligonucleotide
ucuccggccacaggaaaug

SEQ ID NO: 2612109 - RNA, 19 nt, Artificial Sequence
  Description of Artificial Sequence: Synthetic oligonucleotide
caaagcuggcacuuaaucu

SEQ ID NO: 2612110 - RNA, 19 nt, Artificial Sequence
  Description of Artificial Sequence: Synthetic oligonucleotide
uuggaccaaguagauauua

SEQ ID NO: 2612111 - RNA, 19 nt, Artificial Sequence
  Description of Artificial Sequence: Synthetic oligonucleotide
cugcauauauacaaaacuu

SEQ ID NO: 2612112 - RNA, 19 nt, Artificial Sequence
  Description of Artificial Sequence: Synthetic oligonucleotide
aaaguagacucuaguuuua

SEQ ID NO: 2612113 - RNA, 19 nt, Artificial Sequence
  Description of Artificial Sequence: Synthetic oligonucleotide
auuauaugguguagugagu

SEQ ID NO: 2612114 - RNA, 19 nt, Artificial Sequence
  Description of Artificial Sequence: Synthetic oligonucleotide
uuggcacaguccuuaucac

SEQ ID NO: 2612115 - RNA, 19 nt, Artificial Sequence
  Description of Artificial Sequence: Synthetic oligonucleotide
ucacucagcagaggugcag

SEQ ID NO: 2612116 - RNA, 19 nt, Artificial Sequence
  Description of Artificial Sequence: Synthetic oligonucleotide
cauguccuaacaauaacau

SEQ ID NO: 2612117 - RNA, 19 nt, Artificial Sequence
  Description of Artificial Sequence: Synthetic oligonucleotide
guucaauaucuauuccaaa

SEQ ID NO: 2612118 - RNA, 19 nt, Artificial Sequence
  Description of Artificial Sequence: Synthetic oligonucleotide
aguacaaagcaaaguuuau

SEQ ID NO: 2612119 - RNA, 19 nt, Artificial Sequence
  Description of Artificial Sequence: Synthetic oligonucleotide
cugaaagucuuuucugcaa

SEQ ID NO: 2612120 - RNA, 19 nt, Artificial Sequence
  Description of Artificial Sequence: Synthetic oligonucleotide
caaauaccugauuccacaa

SEQ ID NO: 2612121 - RNA, 19 nt, Artificial Sequence
  Description of Artificial Sequence: Synthetic oligonucleotide
uuccuuggaccaaguagau

SEQ ID NO: 2612122 - RNA, 19 nt, Artificial Sequence
  Description of Artificial Sequence: Synthetic oligonucleotide
aagcacgccaguaucugaa

SEQ ID NO: 2612123 - RNA, 19 nt, Artificial Sequence
  Description of Artificial Sequence: Synthetic oligonucleotide
uguagugaguuuggcacuu

SEQ ID NO: 2612124 - RNA, 19 nt, Artificial Sequence
  Description of Artificial Sequence: Synthetic oligonucleotide
uaaucuuauucugccccaa

SEQ ID NO: 2612125 - RNA, 19 nt, Artificial Sequence
  Description of Artificial Sequence: Synthetic oligonucleotide
caaagucacucagcagagg

SEQ ID NO: 2612126 - RNA, 19 nt, Artificial Sequence
  Description of Artificial Sequence: Synthetic oligonucleotide
ugguucucauacgaauccu

SEQ ID NO: 2612127 - RNA, 19 nt, Artificial Sequence
  Description of Artificial Sequence: Synthetic oligonucleotide
ggaccaaguagauauuaaa

SEQ ID NO: 2612128 - RNA, 19 nt, Artificial Sequence
  Description of Artificial Sequence: Synthetic oligonucleotide
cugcaauuauaugguguag

SEQ ID NO: 2612129 - RNA, 19 nt, Artificial Sequence
  Description of Artificial Sequence: Synthetic oligonucleotide
cuuauucugccccaaaguu

SEQ ID NO: 2612130 - RNA, 19 nt, Artificial Sequence
  Description of Artificial Sequence: Synthetic oligonucleotide
caaaguuugacaaguccau

SEQ ID NO: 2612131 - RNA, 19 nt, Artificial Sequence
  Description of Artificial Sequence: Synthetic oligonucleotide
ccacaaauuuacaagcaga

SEQ ID NO: 2612132 - RNA, 19 nt, Artificial Sequence
  Description of Artificial Sequence: Synthetic oligonucleotide
ugucuccggccacaggaaa

SEQ ID NO: 2612133 - RNA, 19 nt, Artificial Sequence
  Description of Artificial Sequence: Synthetic oligonucleotide
cacagguaguacaaagcaa

SEQ ID NO: 2612134 - RNA, 19 nt, Artificial Sequence
  Description of Artificial Sequence: Synthetic oligonucleotide
gcacuuaaucuuauucugc

SEQ ID NO: 2612135 - RNA, 19 nt, Artificial Sequence
  Description of Artificial Sequence: Synthetic oligonucleotide
uguacaaagcuggcacuua

SEQ ID NO: 2612136 - RNA, 19 nt, Artificial Sequence
  Description of Artificial Sequence: Synthetic oligonucleotide
cugauuccacaaauuuaca

SEQ ID NO: 2612137 - RNA, 19 nt, Artificial Sequence
  Description of Artificial Sequence: Synthetic oligonucleotide
uuguaacgauuucccaauu

SEQ ID NO: 2612138 - RNA, 19 nt, Artificial Sequence
  Description of Artificial Sequence: Synthetic oligonucleotide
ucugugucuacugcauaua

SEQ ID NO: 2612139 - RNA, 19 nt, Artificial Sequence
  Description of Artificial Sequence: Synthetic oligonucleotide
cugccccaaaguuugacaa

SEQ ID NO: 2612140 - RNA, 19 nt, Artificial Sequence
  Description of Artificial Sequence: Synthetic oligonucleotide
cauuacaguucaauaucua

SEQ ID NO: 2612141 - RNA, 19 nt, Artificial Sequence
  Description of Artificial Sequence: Synthetic oligonucleotide
acuugaaagcacgccagua

SEQ ID NO: 2612142 - RNA, 19 nt, Artificial Sequence
  Description of Artificial Sequence: Synthetic oligonucleotide
ccuuggaccaaguagauau

SEQ ID NO: 2612143 - RNA, 19 nt, Artificial Sequence
  Description of Artificial Sequence: Synthetic oligonucleotide
auguaacaaaguagacucu

SEQ ID NO: 2612144 - RNA, 19 nt, Artificial Sequence
  Description of Artificial Sequence: Synthetic oligonucleotide
uagcggaacacagguagua

SEQ ID NO: 2612145 - RNA, 19 nt, Artificial Sequence
  Description of Artificial Sequence: Synthetic oligonucleotide
cacuucauuguaacgauuu

SEQ ID NO: 2612146 - RNA, 19 nt, Artificial Sequence
  Description of Artificial Sequence: Synthetic oligonucleotide
caguauuacaaaagaguau

SEQ ID NO: 2612147 - RNA, 19 nt, Artificial Sequence
  Description of Artificial Sequence: Synthetic oligonucleotide
agaaccauuuuaagguguu

SEQ ID NO: 2612148 - RNA, 19 nt, Artificial Sequence
  Description of Artificial Sequence: Synthetic oligonucleotide
acuuuccuuggaccaagua

SEQ ID NO: 2612149 - RNA, 19 nt, Artificial Sequence
  Description of Artificial Sequence: Synthetic oligonucleotide
accugauuccacaaauuua

SEQ ID NO: 2612150 - RNA, 19 nt, Artificial Sequence
  Description of Artificial Sequence: Synthetic oligonucleotide
uucugccccaaaguuugac

SEQ ID NO: 2612151 - RNA, 19 nt, Artificial Sequence
  Description of Artificial Sequence: Synthetic oligonucleotide
aucuuaguucgugauucau

SEQ ID NO: 2612152 - RNA, 19 nt, Artificial Sequence
  Description of Artificial Sequence: Synthetic oligonucleotide
cuugaaagcacgccaguau

SEQ ID NO: 2612153 - RNA, 19 nt, Artificial Sequence
  Description of Artificial Sequence: Synthetic oligonucleotide
gcagauugaucacaggcua

SEQ ID NO: 2612154 - RNA, 19 nt, Artificial Sequence
  Description of Artificial Sequence: Synthetic oligonucleotide
cagaauggagaucuuaguu

SEQ ID NO: 2612155 - RNA, 19 nt, Artificial Sequence
  Description of Artificial Sequence: Synthetic oligonucleotide
gaccuguacaaagcuggca

SEQ ID NO: 2612156 - RNA, 19 nt, Artificial Sequence
  Description of Artificial Sequence: Synthetic oligonucleotide
gcacgccaguaucugaaag

SEQ ID NO: 2612157 - RNA, 19 nt, Artificial Sequence
  Description of Artificial Sequence: Synthetic oligonucleotide
aagcuggcacuuaaucuua

SEQ ID NO: 2612158 - RNA, 19 nt, Artificial Sequence
  Description of Artificial Sequence: Synthetic oligonucleotide
aacuuuccuuggaccaagu

SEQ ID NO: 2612159 - RNA, 19 nt, Artificial Sequence
  Description of Artificial Sequence: Synthetic oligonucleotide
cacgcacacaaauacaauu

SEQ ID NO: 2612160 - RNA, 19 nt, Artificial Sequence
  Description of Artificial Sequence: Synthetic oligonucleotide
cacaggaaaugaaaauuau

SEQ ID NO: 2612161 - RNA, 19 nt, Artificial Sequence
  Description of Artificial Sequence: Synthetic oligonucleotide
agugaguuuggcacuucau

SEQ ID NO: 2612162 - RNA, 19 nt, Artificial Sequence
  Description of Artificial Sequence: Synthetic oligonucleotide
gagaucuuaguucgugauu

SEQ ID NO: 2612163 - RNA, 19 nt, Artificial Sequence
  Description of Artificial Sequence: Synthetic oligonucleotide
guccuaacaauaacaucaa

SEQ ID NO: 2612164 - RNA, 19 nt, Artificial Sequence
  Description of Artificial Sequence: Synthetic oligonucleotide
auaccugauuccacaaauu

SEQ ID NO: 2612165 - RNA, 19 nt, Artificial Sequence
  Description of Artificial Sequence: Synthetic oligonucleotide
guucucauacgaauccugu

SEQ ID NO: 2612166 - RNA, 19 nt, Artificial Sequence
  Description of Artificial Sequence: Synthetic oligonucleotide
gcggaacacagguaguaca

SEQ ID NO: 2612167 - RNA, 19 nt, Artificial Sequence
  Description of Artificial Sequence: Synthetic oligonucleotide
caaauacaauucugugucu

SEQ ID NO: 2612168 - RNA, 19 nt, Artificial Sequence
  Description of Artificial Sequence: Synthetic oligonucleotide
cacgccaguaucugaaagu

SEQ ID NO: 2612169 - RNA, 19 nt, Artificial Sequence
  Description of Artificial Sequence: Synthetic oligonucleotide
gaucacaggcuacuugguu

SEQ ID NO: 2612170 - RNA, 19 nt, Artificial Sequence
  Description of Artificial Sequence: Synthetic oligonucleotide
agcacgccaguaucugaaa

SEQ ID NO: 2612171 - RNA, 19 nt, Artificial Sequence
  Description of Artificial Sequence: Synthetic oligonucleotide
cugaaauuagaaccauuuu

SEQ ID NO: 2612172 - RNA, 19 nt, Artificial Sequence
  Description of Artificial Sequence: Synthetic oligonucleotide
guguagugaguuuggcacu

SEQ ID NO: 2612173 - RNA, 19 nt, Artificial Sequence
  Description of Artificial Sequence: Synthetic oligonucleotide
ccaucacaguauuacaaaa

SEQ ID NO: 2612174 - RNA, 19 nt, Artificial Sequence
  Description of Artificial Sequence: Synthetic oligonucleotide
cgugauucaucaccuuagc

SEQ ID NO: 2612175 - RNA, 19 nt, Artificial Sequence
  Description of Artificial Sequence: Synthetic oligonucleotide
uccuuggaccaaguagaua

SEQ ID NO: 2612176 - RNA, 19 nt, Artificial Sequence
  Description of Artificial Sequence: Synthetic oligonucleotide
ggagaucuuaguucgugau

SEQ ID NO: 2612177 - RNA, 19 nt, Artificial Sequence
  Description of Artificial Sequence: Synthetic oligonucleotide
gaauccuguggaagaugaa

SEQ ID NO: 2612178 - RNA, 19 nt, Artificial Sequence
  Description of Artificial Sequence: Synthetic oligonucleotide
cacucagcagaggugcaga

SEQ ID NO: 2612179 - RNA, 19 nt, Artificial Sequence
  Description of Artificial Sequence: Synthetic oligonucleotide
cugugucuacugcauauau

SEQ ID NO: 2612180 - RNA, 19 nt, Artificial Sequence
  Description of Artificial Sequence: Synthetic oligonucleotide
ggcacuucauuguaacgau

SEQ ID NO: 2612181 - RNA, 19 nt, Artificial Sequence
  Description of Artificial Sequence: Synthetic oligonucleotide
ggaagaugaacagguucaa

SEQ ID NO: 2612182 - RNA, 19 nt, Artificial Sequence
  Description of Artificial Sequence: Synthetic oligonucleotide
gcagacaauguaacaaagu

SEQ ID NO: 2612183 - RNA, 19 nt, Artificial Sequence
  Description of Artificial Sequence: Synthetic oligonucleotide
gauugaucacaggcuacuu

SEQ ID NO: 2612184 - RNA, 19 nt, Artificial Sequence
  Description of Artificial Sequence: Synthetic oligonucleotide
cugucuccggccacaggaa

SEQ ID NO: 2612185 - RNA, 19 nt, Artificial Sequence
  Description of Artificial Sequence: Synthetic oligonucleotide
guagugaguuuggcacuuc

SEQ ID NO: 2612186 - RNA, 19 nt, Artificial Sequence
  Description of Artificial Sequence: Synthetic oligonucleotide
aggcuacuugguucucaua

SEQ ID NO: 2612187 - RNA, 19 nt, Artificial Sequence
  Description of Artificial Sequence: Synthetic oligonucleotide
cgauuucccaauuggcaca

SEQ ID NO: 2612188 - RNA, 19 nt, Artificial Sequence
  Description of Artificial Sequence: Synthetic oligonucleotide
gccaguaucugaaagucuu

SEQ ID NO: 2612189 - RNA, 19 nt, Artificial Sequence
  Description of Artificial Sequence: Synthetic oligonucleotide
ggaacacagguaguacaaa

SEQ ID NO: 2612190 - RNA, 19 nt, Artificial Sequence
  Description of Artificial Sequence: Synthetic oligonucleotide
auuucccaauuggcacagu

SEQ ID NO: 2612191 - RNA, 19 nt, Artificial Sequence
  Description of Artificial Sequence: Synthetic oligonucleotide
gaacagguucaaagucacu

SEQ ID NO: 2612192 - RNA, 19 nt, Artificial Sequence
  Description of Artificial Sequence: Synthetic oligonucleotide
ccccaaauaccugauucca

SEQ ID NO: 2612193 - RNA, 19 nt, Artificial Sequence
  Description of Artificial Sequence: Synthetic oligonucleotide
gucacucagcagaggugca

SEQ ID NO: 2612194 - RNA, 19 nt, Artificial Sequence
  Description of Artificial Sequence: Synthetic oligonucleotide
gaaccauuuuaagguguuu

SEQ ID NO: 2612195 - RNA, 19 nt, Artificial Sequence
  Description of Artificial Sequence: Synthetic oligonucleotide
ccccaaaguuugacaaguc

SEQ ID NO: 2612196 - RNA, 19 nt, Artificial Sequence
  Description of Artificial Sequence: Synthetic oligonucleotide
auucugccccaaaguuuga

SEQ ID NO: 2612197 - RNA, 19 nt, Artificial Sequence
  Description of Artificial Sequence: Synthetic oligonucleotide
agcuggcacuuaaucuuau

SEQ ID NO: 2612198 - RNA, 19 nt, Artificial Sequence
  Description of Artificial Sequence: Synthetic oligonucleotide
cuguacaaagcuggcacuu

SEQ ID NO: 2612199 - RNA, 19 nt, Artificial Sequence
  Description of Artificial Sequence: Synthetic oligonucleotide
guucgugauucaucaccuu

SEQ ID NO: 2612200 - RNA, 19 nt, Artificial Sequence
  Description of Artificial Sequence: Synthetic oligonucleotide
cacaguccuuaucacuuuu

SEQ ID NO: 2612201 - RNA, 19 nt, Artificial Sequence
  Description of Artificial Sequence: Synthetic oligonucleotide
caauuggcacaguccuuau

SEQ ID NO: 2612202 - RNA, 19 nt, Artificial Sequence
  Description of Artificial Sequence: Synthetic oligonucleotide
cacaggcuacuugguucuc

SEQ ID NO: 2612203 - RNA, 19 nt, Artificial Sequence
  Description of Artificial Sequence: Synthetic oligonucleotide
ccuguacaaagcuggcacu

SEQ ID NO: 2612204 - RNA, 19 nt, Artificial Sequence
  Description of Artificial Sequence: Synthetic oligonucleotide
gucuccggccacaggaaau

SEQ ID NO: 2612205 - RNA, 19 nt, Artificial Sequence
  Description of Artificial Sequence: Synthetic oligonucleotide
ccuuagcggaacacaggua

SEQ ID NO: 2612206 - RNA, 19 nt, Artificial Sequence
  Description of Artificial Sequence: Synthetic oligonucleotide
gcuggcacuuaaucuuauu

SEQ ID NO: 2612207 - RNA, 19 nt, Artificial Sequence
  Description of Artificial Sequence: Synthetic oligonucleotide
gcacaguccuuaucacuuu

SEQ ID NO: 2612208 - RNA, 19 nt, Artificial Sequence
  Description of Artificial Sequence: Synthetic oligonucleotide
ccaguaucugaaagucuuu

SEQ ID NO: 2612209 - RNA, 19 nt, Artificial Sequence
  Description of Artificial Sequence: Synthetic oligonucleotide
gcacuucauuguaacgauu

SEQ ID NO: 2612210 - RNA, 19 nt, Artificial Sequence
  Description of Artificial Sequence: Synthetic oligonucleotide
cgccaguaucugaaagucu

SEQ ID NO: 2612211 - RNA, 19 nt, Artificial Sequence
  Description of Artificial Sequence: Synthetic oligonucleotide
cccaauuggcacaguccuu

SEQ ID NO: 2612212 - RNA, 19 nt, Artificial Sequence
  Description of Artificial Sequence: Synthetic oligonucleotide
ggugcagaauggagaucuu

SEQ ID NO: 2612213 - RNA, 19 nt, Artificial Sequence
  Description of Artificial Sequence: Synthetic oligonucleotide
uagaucaccaggaaugugg

SEQ ID NO: 2612214 - RNA, 19 nt, Artificial Sequence
  Description of Artificial Sequence: Synthetic oligonucleotide
ucaauugugggaaagguaa

SEQ ID NO: 2612215 - RNA, 19 nt, Artificial Sequence
  Description of Artificial Sequence: Synthetic oligonucleotide
aagcguucagcacaguggg

SEQ ID NO: 2612216 - RNA, 19 nt, Artificial Sequence
  Description of Artificial Sequence: Synthetic oligonucleotide
ugccuaauagcucaaaccu

SEQ ID NO: 2612217 - RNA, 19 nt, Artificial Sequence
  Description of Artificial Sequence: Synthetic oligonucleotide
aaugugucuccaccggccc

SEQ ID NO: 2612218 - RNA, 19 nt, Artificial Sequence
  Description of Artificial Sequence: Synthetic oligonucleotide
uaguaaagcguucagcaca

SEQ ID NO: 2612219 - RNA, 19 nt, Artificial Sequence
  Description of Artificial Sequence: Synthetic oligonucleotide
aagguaauuaguguaauau

SEQ ID NO: 2612220 - RNA, 19 nt, Artificial Sequence
  Description of Artificial Sequence: Synthetic oligonucleotide
auggagaugaugcccaugg

SEQ ID NO: 2612221 - RNA, 19 nt, Artificial Sequence
  Description of Artificial Sequence: Synthetic oligonucleotide
augguagugcccuaggagg

SEQ ID NO: 2612222 - RNA, 19 nt, Artificial Sequence
  Description of Artificial Sequence: Synthetic oligonucleotide
aaagcguucagcacagugg

SEQ ID NO: 2612223 - RNA, 19 nt, Artificial Sequence
  Description of Artificial Sequence: Synthetic oligonucleotide
uaauagcucaaaccuaccc

SEQ ID NO: 2612224 - RNA, 19 nt, Artificial Sequence
  Description of Artificial Sequence: Synthetic oligonucleotide
aaaagauuucaaaugauuu

SEQ ID NO: 2612225 - RNA, 19 nt, Artificial Sequence
  Description of Artificial Sequence: Synthetic oligonucleotide
auggacagucccuacagcg

SEQ ID NO: 2612226 - RNA, 19 nt, Artificial Sequence
  Description of Artificial Sequence: Synthetic oligonucleotide
gagauguagaccuggcagg

SEQ ID NO: 2612227 - RNA, 19 nt, Artificial Sequence
  Description of Artificial Sequence: Synthetic oligonucleotide
gaugcaaccaggaucuggg

SEQ ID NO: 2612228 - RNA, 19 nt, Artificial Sequence
  Description of Artificial Sequence: Synthetic oligonucleotide
uguggaaugugucuccacc

SEQ ID NO: 2612229 - RNA, 19 nt, Artificial Sequence
  Description of Artificial Sequence: Synthetic oligonucleotide
agugucggcaagcacaguc

SEQ ID NO: 2612230 - RNA, 19 nt, Artificial Sequence
  Description of Artificial Sequence: Synthetic oligonucleotide
uuuucaauugugggaaagg

SEQ ID NO: 2612231 - RNA, 19 nt, Artificial Sequence
  Description of Artificial Sequence: Synthetic oligonucleotide
uugccuaauagcucaaacc

SEQ ID NO: 2612232 - RNA, 19 nt, Artificial Sequence
  Description of Artificial Sequence: Synthetic oligonucleotide
gucaaugccaaauccacgc

SEQ ID NO: 2612233 - RNA, 19 nt, Artificial Sequence
  Description of Artificial Sequence: Synthetic oligonucleotide
uggacguacuccuugaugu

SEQ ID NO: 2612234 - RNA, 19 nt, Artificial Sequence
  Description of Artificial Sequence: Synthetic oligonucleotide
uacccuacaccuaacaccu

SEQ ID NO: 2612235 - RNA, 19 nt, Artificial Sequence
  Description of Artificial Sequence: Synthetic oligonucleotide
cuacccuacaccuaacacc

SEQ ID NO: 2612236 - RNA, 19 nt, Artificial Sequence
  Description of Artificial Sequence: Synthetic oligonucleotide
uaaagcguucagcacagug

SEQ ID NO: 2612237 - RNA, 19 nt, Artificial Sequence
  Description of Artificial Sequence: Synthetic oligonucleotide
ucaaaccuacccuacaccu

SEQ ID NO: 2612238 - RNA, 19 nt, Artificial Sequence
  Description of Artificial Sequence: Synthetic oligonucleotide
acaccuacugaacuugaac

SEQ ID NO: 2612239 - RNA, 19 nt, Artificial Sequence
  Description of Artificial Sequence: Synthetic oligonucleotide
gacguugggaaacauggcc

SEQ ID NO: 2612240 - RNA, 19 nt, Artificial Sequence
  Description of Artificial Sequence: Synthetic oligonucleotide
acggagaaagcccaguguc

SEQ ID NO: 2612241 - RNA, 19 nt, Artificial Sequence
  Description of Artificial Sequence: Synthetic oligonucleotide
cuugaugucaugguagugc

SEQ ID NO: 2612242 - RNA, 19 nt, Artificial Sequence
  Description of Artificial Sequence: Synthetic oligonucleotide
gagaugaugcccauggugc

SEQ ID NO: 2612243 - RNA, 19 nt, Artificial Sequence
  Description of Artificial Sequence: Synthetic oligonucleotide
aacuccagcucgcacagug

SEQ ID NO: 2612244 - RNA, 19 nt, Artificial Sequence
  Description of Artificial Sequence: Synthetic oligonucleotide
agcacagugggcuucucac

SEQ ID NO: 2612245 - RNA, 19 nt, Artificial Sequence
  Description of Artificial Sequence: Synthetic oligonucleotide
acaccuaacaccuacugaa

SEQ ID NO: 2612246 - RNA, 19 nt, Artificial Sequence
  Description of Artificial Sequence: Synthetic oligonucleotide
aaaccuacccuacaccuaa

SEQ ID NO: 2612247 - RNA, 19 nt, Artificial Sequence
  Description of Artificial Sequence: Synthetic oligonucleotide
uacagcgucgaccacgccc

SEQ ID NO: 2612248 - RNA, 19 nt, Artificial Sequence
  Description of Artificial Sequence: Synthetic oligonucleotide
aaagagcccacugaggcca

SEQ ID NO: 2612249 - RNA, 19 nt, Artificial Sequence
  Description of Artificial Sequence: Synthetic oligonucleotide
ggagauguagaccuggcag

SEQ ID NO: 2612250 - RNA, 19 nt, Artificial Sequence
  Description of Artificial Sequence: Synthetic oligonucleotide
ugcaaccaggaucugggag

SEQ ID NO: 2612251 - RNA, 19 nt, Artificial Sequence
  Description of Artificial Sequence: Synthetic oligonucleotide
ugaacugcgcccugggaag

SEQ ID NO: 2612252 - RNA, 19 nt, Artificial Sequence
  Description of Artificial Sequence: Synthetic oligonucleotide
cuacugaacuugaacugcg

SEQ ID NO: 2612253 - RNA, 19 nt, Artificial Sequence
  Description of Artificial Sequence: Synthetic oligonucleotide
ggaaagagcccacugaggc

SEQ ID NO: 2612254 - RNA, 19 nt, Artificial Sequence
  Description of Artificial Sequence: Synthetic oligonucleotide
aaugccaaauccacgcuug

SEQ ID NO: 2612255 - RNA, 19 nt, Artificial Sequence
  Description of Artificial Sequence: Synthetic oligonucleotide
ugaccauggccacauagac

SEQ ID NO: 2612256 - RNA, 19 nt, Artificial Sequence
  Description of Artificial Sequence: Synthetic oligonucleotide
acugugguggacguacucc

SEQ ID NO: 2612257 - RNA, 19 nt, Artificial Sequence
  Description of Artificial Sequence: Synthetic oligonucleotide
uugaacugcgcccugggaa

SEQ ID NO: 2612258 - RNA, 19 nt, Artificial Sequence
  Description of Artificial Sequence: Synthetic oligonucleotide
acauggacagucccuacag

SEQ ID NO: 2612259 - RNA, 19 nt, Artificial Sequence
  Description of Artificial Sequence: Synthetic oligonucleotide
uuucaauugugggaaaggu

SEQ ID NO: 2612260 - RNA, 19 nt, Artificial Sequence
  Description of Artificial Sequence: Synthetic oligonucleotide
aaagguaauuaguguaaua

SEQ ID NO: 2612261 - RNA, 19 nt, Artificial Sequence
  Description of Artificial Sequence: Synthetic oligonucleotide
aauccacgcuuggaguucc

SEQ ID NO: 2612262 - RNA, 19 nt, Artificial Sequence
  Description of Artificial Sequence: Synthetic oligonucleotide
caugguagugcccuaggag

SEQ ID NO: 2612263 - RNA, 19 nt, Artificial Sequence
  Description of Artificial Sequence: Synthetic oligonucleotide
ugggaaagguaauuagugu

SEQ ID NO: 2612264 - RNA, 19 nt, Artificial Sequence
  Description of Artificial Sequence: Synthetic oligonucleotide
agggcauaggggcaguagg

SEQ ID NO: 2612265 - RNA, 19 nt, Artificial Sequence
  Description of Artificial Sequence: Synthetic oligonucleotide
accuacugaacuugaacug

SEQ ID NO: 2612266 - RNA, 19 nt, Artificial Sequence
  Description of Artificial Sequence: Synthetic oligonucleotide
aggauggcgcagucaaugc

SEQ ID NO: 2612267 - RNA, 19 nt, Artificial Sequence
  Description of Artificial Sequence: Synthetic oligonucleotide
uacaccuaacaccuacuga

SEQ ID NO: 2612268 - RNA, 19 nt, Artificial Sequence
  Description of Artificial Sequence: Synthetic oligonucleotide
guggaaugugucuccaccg

SEQ ID NO: 2612269 - RNA, 19 nt, Artificial Sequence
  Description of Artificial Sequence: Synthetic oligonucleotide
aucaccaggaauguggcug

SEQ ID NO: 2612270 - RNA, 19 nt, Artificial Sequence
  Description of Artificial Sequence: Synthetic oligonucleotide
cagucaaugccaaauccac

SEQ ID NO: 2612271 - RNA, 19 nt, Artificial Sequence
  Description of Artificial Sequence: Synthetic oligonucleotide
aaauccacgcuuggaguuc

SEQ ID NO: 2612272 - RNA, 19 nt, Artificial Sequence
  Description of Artificial Sequence: Synthetic oligonucleotide
ucuccaccggccccgaggg

SEQ ID NO: 2612273 - RNA, 19 nt, Artificial Sequence
  Description of Artificial Sequence: Synthetic oligonucleotide
uucaauugugggaaaggua

SEQ ID NO: 2612274 - RNA, 19 nt, Artificial Sequence
  Description of Artificial Sequence: Synthetic oligonucleotide
uccacccucgccuucacca

SEQ ID NO: 2612275 - RNA, 19 nt, Artificial Sequence
  Description of Artificial Sequence: Synthetic oligonucleotide
cuuggaguucccuggacug

SEQ ID NO: 2612276 - RNA, 19 nt, Artificial Sequence
  Description of Artificial Sequence: Synthetic oligonucleotide
gaaagagcccacugaggcc

SEQ ID NO: 2612277 - RNA, 19 nt, Artificial Sequence
  Description of Artificial Sequence: Synthetic oligonucleotide
gugggaaagguaauuagug

SEQ ID NO: 2612278 - RNA, 19 nt, Artificial Sequence
  Description of Artificial Sequence: Synthetic oligonucleotide
gagaugcucauggagauga

SEQ ID NO: 2612279 - RNA, 19 nt, Artificial Sequence
  Description of Artificial Sequence: Synthetic oligonucleotide
agaucaccaggaauguggc

SEQ ID NO: 2612280 - RNA, 19 nt, Artificial Sequence
  Description of Artificial Sequence: Synthetic oligonucleotide
cucaaaccuacccuacacc

SEQ ID NO: 2612281 - RNA, 19 nt, Artificial Sequence
  Description of Artificial Sequence: Synthetic oligonucleotide
cacgcuuggaguucccugg

SEQ ID NO: 2612282 - RNA, 19 nt, Artificial Sequence
  Description of Artificial Sequence: Synthetic oligonucleotide
auagcucaaaccuacccua

SEQ ID NO: 2612283 - RNA, 19 nt, Artificial Sequence
  Description of Artificial Sequence: Synthetic oligonucleotide
ccuaauagcucaaaccuac

SEQ ID NO: 2612284 - RNA, 19 nt, Artificial Sequence
  Description of Artificial Sequence: Synthetic oligonucleotide
acagcgucgaccacgcccc

SEQ ID NO: 2612285 - RNA, 19 nt, Artificial Sequence
  Description of Artificial Sequence: Synthetic oligonucleotide
uccguaguaaagcguucag

SEQ ID NO: 2612286 - RNA, 19 nt, Artificial Sequence
  Description of Artificial Sequence: Synthetic oligonucleotide
cuaauagcucaaaccuacc

SEQ ID NO: 2612287 - RNA, 19 nt, Artificial Sequence
  Description of Artificial Sequence: Synthetic oligonucleotide
cacagugucggcaagcaca

SEQ ID NO: 2612288 - RNA, 19 nt, Artificial Sequence
  Description of Artificial Sequence: Synthetic oligonucleotide
uccagcucgcacagugucg

SEQ ID NO: 2612289 - RNA, 19 nt, Artificial Sequence
  Description of Artificial Sequence: Synthetic oligonucleotide
cuaacaccuacugaacuug

SEQ ID NO: 2612290 - RNA, 19 nt, Artificial Sequence
  Description of Artificial Sequence: Synthetic oligonucleotide
cacugaggccaccacaggg

SEQ ID NO: 2612291 - RNA, 19 nt, Artificial Sequence
  Description of Artificial Sequence: Synthetic oligonucleotide
guaguaaagcguucagcac

SEQ ID NO: 2612292 - RNA, 19 nt, Artificial Sequence
  Description of Artificial Sequence: Synthetic oligonucleotide
acuugaacugcgcccuggg

SEQ ID NO: 2612293 - RNA, 19 nt, Artificial Sequence
  Description of Artificial Sequence: Synthetic oligonucleotide
aguaaagcguucagcacag

SEQ ID NO: 2612294 - RNA, 19 nt, Artificial Sequence
  Description of Artificial Sequence: Synthetic oligonucleotide
ucaugguagugcccuagga

SEQ ID NO: 2612295 - RNA, 19 nt, Artificial Sequence
  Description of Artificial Sequence: Synthetic oligonucleotide
gggaaggaacuccagcucg

SEQ ID NO: 2612296 - RNA, 19 nt, Artificial Sequence
  Description of Artificial Sequence: Synthetic oligonucleotide
aacuugaacugcgcccugg

SEQ ID NO: 2612297 - RNA, 19 nt, Artificial Sequence
  Description of Artificial Sequence: Synthetic oligonucleotide
agguaauuaguguaauauu

SEQ ID NO: 2612298 - RNA, 19 nt, Artificial Sequence
  Description of Artificial Sequence: Synthetic oligonucleotide
ugucggcaagcacaguccc

SEQ ID NO: 2612299 - RNA, 19 nt, Artificial Sequence
  Description of Artificial Sequence: Synthetic oligonucleotide
accuaacaccuacugaacu

SEQ ID NO: 2612300 - RNA, 19 nt, Artificial Sequence
  Description of Artificial Sequence: Synthetic oligonucleotide
gaggauggcgcagucaaug

SEQ ID NO: 2612301 - RNA, 19 nt, Artificial Sequence
  Description of Artificial Sequence: Synthetic oligonucleotide
ggagaugaugcccauggug

SEQ ID NO: 2612302 - RNA, 19 nt, Artificial Sequence
  Description of Artificial Sequence: Synthetic oligonucleotide
aauugugggaaagguaauu

SEQ ID NO: 2612303 - RNA, 19 nt, Artificial Sequence
  Description of Artificial Sequence: Synthetic oligonucleotide
agaugcaaccaggaucugg

SEQ ID NO: 2612304 - RNA, 19 nt, Artificial Sequence
  Description of Artificial Sequence: Synthetic oligonucleotide
ugcucauggagaugaugcc

SEQ ID NO: 2612305 - RNA, 19 nt, Artificial Sequence
  Description of Artificial Sequence: Synthetic oligonucleotide
uacugaacuugaacugcgc

SEQ ID NO: 2612306 - RNA, 19 nt, Artificial Sequence
  Description of Artificial Sequence: Synthetic oligonucleotide
ugugucuccaccggccccg

SEQ ID NO: 2612307 - RNA, 19 nt, Artificial Sequence
  Description of Artificial Sequence: Synthetic oligonucleotide
ggguagaucaccaggaaug

SEQ ID NO: 2612308 - RNA, 19 nt, Artificial Sequence
  Description of Artificial Sequence: Synthetic oligonucleotide
cuacaccuaacaccuacug

SEQ ID NO: 2612309 - RNA, 19 nt, Artificial Sequence
  Description of Artificial Sequence: Synthetic oligonucleotide
uggacugugguggacguac

SEQ ID NO: 2612310 - RNA, 19 nt, Artificial Sequence
  Description of Artificial Sequence: Synthetic oligonucleotide
uggacagucccuacagcgu

SEQ ID NO: 2612311 - RNA, 19 nt, Artificial Sequence
  Description of Artificial Sequence: Synthetic oligonucleotide
gccaaauccacgcuuggag

SEQ ID NO: 2612312 - RNA, 19 nt, Artificial Sequence
  Description of Artificial Sequence: Synthetic oligonucleotide
cacauagacguugggaaac

SEQ ID NO: 2612313 - RNA, 19 nt, Artificial Sequence
  Description of Artificial Sequence: Synthetic oligonucleotide
uagaccuggcaggagagga

SEQ ID NO: 2612314 - RNA, 19 nt, Artificial Sequence
  Description of Artificial Sequence: Synthetic oligonucleotide
uccgguguggaaugugucu

SEQ ID NO: 2612315 - RNA, 19 nt, Artificial Sequence
  Description of Artificial Sequence: Synthetic oligonucleotide
ugaugucaugguagugccc

SEQ ID NO: 2612316 - RNA, 19 nt, Artificial Sequence
  Description of Artificial Sequence: Synthetic oligonucleotide
gaggccaccacagggauga

SEQ ID NO: 2612317 - RNA, 19 nt, Artificial Sequence
  Description of Artificial Sequence: Synthetic oligonucleotide
ugggagauguagaccuggc

SEQ ID NO: 2612318 - RNA, 19 nt, Artificial Sequence
  Description of Artificial Sequence: Synthetic oligonucleotide
uuccguaguaaagcguuca

SEQ ID NO: 2612319 - RNA, 19 nt, Artificial Sequence
  Description of Artificial Sequence: Synthetic oligonucleotide
gauggcgcagucaaugcca

SEQ ID NO: 2612320 - RNA, 19 nt, Artificial Sequence
  Description of Artificial Sequence: Synthetic oligonucleotide
ugucaugguagugcccuag

SEQ ID NO: 2612321 - RNA, 19 nt, Artificial Sequence
  Description of Artificial Sequence: Synthetic oligonucleotide
gacauggacagucccuaca

SEQ ID NO: 2612322 - RNA, 19 nt, Artificial Sequence
  Description of Artificial Sequence: Synthetic oligonucleotide
ucggcaagcacagucccca

SEQ ID NO: 2612323 - RNA, 19 nt, Artificial Sequence
  Description of Artificial Sequence: Synthetic oligonucleotide
gucaugguagugcccuagg

SEQ ID NO: 2612324 - RNA, 19 nt, Artificial Sequence
  Description of Artificial Sequence: Synthetic oligonucleotide
gaugucaugguagugcccu

SEQ ID NO: 2612325 - RNA, 19 nt, Artificial Sequence
  Description of Artificial Sequence: Synthetic oligonucleotide
augccaaauccacgcuugg

SEQ ID NO: 2612326 - RNA, 19 nt, Artificial Sequence
  Description of Artificial Sequence: Synthetic oligonucleotide
gcugauggugaccauggcc

SEQ ID NO: 2612327 - RNA, 19 nt, Artificial Sequence
  Description of Artificial Sequence: Synthetic oligonucleotide
ggaucugggagauguagac

SEQ ID NO: 2612328 - RNA, 19 nt, Artificial Sequence
  Description of Artificial Sequence: Synthetic oligonucleotide
ucaccaggaauguggcugu

SEQ ID NO: 2612329 - RNA, 19 nt, Artificial Sequence
  Description of Artificial Sequence: Synthetic oligonucleotide
agacguugggaaacauggc

SEQ ID NO: 2612330 - RNA, 19 nt, Artificial Sequence
  Description of Artificial Sequence: Synthetic oligonucleotide
auugugggaaagguaauua

SEQ ID NO: 2612331 - RNA, 19 nt, Artificial Sequence
  Description of Artificial Sequence: Synthetic oligonucleotide
guggacguacuccuugaug

SEQ ID NO: 2612332 - RNA, 19 nt, Artificial Sequence
  Description of Artificial Sequence: Synthetic oligonucleotide
uagcucaaaccuacccuac

SEQ ID NO: 2612333 - RNA, 19 nt, Artificial Sequence
  Description of Artificial Sequence: Synthetic oligonucleotide
auagacguugggaaacaug

SEQ ID NO: 2612334 - RNA, 19 nt, Artificial Sequence
  Description of Artificial Sequence: Synthetic oligonucleotide
ucaccagcgggcccugcag

SEQ ID NO: 2612335 - RNA, 19 nt, Artificial Sequence
  Description of Artificial Sequence: Synthetic oligonucleotide
aggaaagagcccacugagg

SEQ ID NO: 2612336 - RNA, 19 nt, Artificial Sequence
  Description of Artificial Sequence: Synthetic oligonucleotide
gucuccaccggccccgagg

SEQ ID NO: 2612337 - RNA, 19 nt, Artificial Sequence
  Description of Artificial Sequence: Synthetic oligonucleotide
acagugucggcaagcacag

SEQ ID NO: 2612338 - RNA, 19 nt, Artificial Sequence
  Description of Artificial Sequence: Synthetic oligonucleotide
caccuaacaccuacugaac

SEQ ID NO: 2612339 - RNA, 19 nt, Artificial Sequence
  Description of Artificial Sequence: Synthetic oligonucleotide
gaugaugcccauggugcug

SEQ ID NO: 2612340 - RNA, 19 nt, Artificial Sequence
  Description of Artificial Sequence: Synthetic oligonucleotide
gggaaagguaauuagugua

SEQ ID NO: 2612341 - RNA, 19 nt, Artificial Sequence
  Description of Artificial Sequence: Synthetic oligonucleotide
cauggccacauagacguug

SEQ ID NO: 2612342 - RNA, 19 nt, Artificial Sequence
  Description of Artificial Sequence: Synthetic oligonucleotide
cauggacagucccuacagc

SEQ ID NO: 2612343 - RNA, 19 nt, Artificial Sequence
  Description of Artificial Sequence: Synthetic oligonucleotide
caccuacugaacuugaacu

SEQ ID NO: 2612344 - RNA, 19 nt, Artificial Sequence
  Description of Artificial Sequence: Synthetic oligonucleotide
agauguagaccuggcagga

SEQ ID NO: 2612345 - RNA, 19 nt, Artificial Sequence
  Description of Artificial Sequence: Synthetic oligonucleotide
gacagucccuacagcgucg

SEQ ID NO: 2612346 - RNA, 19 nt, Artificial Sequence
  Description of Artificial Sequence: Synthetic oligonucleotide
uucaccagcgggcccugca

SEQ ID NO: 2612347 - RNA, 19 nt, Artificial Sequence
  Description of Artificial Sequence: Synthetic oligonucleotide
gugguggacguacuccuug

SEQ ID NO: 2612348 - RNA, 19 nt, Artificial Sequence
  Description of Artificial Sequence: Synthetic oligonucleotide
agcucaaaccuacccuaca

SEQ ID NO: 2612349 - RNA, 19 nt, Artificial Sequence
  Description of Artificial Sequence: Synthetic oligonucleotide
ugcgcccugggaaggaacu

SEQ ID NO: 2612350 - RNA, 19 nt, Artificial Sequence
  Description of Artificial Sequence: Synthetic oligonucleotide
caagggcagaugcaaccag

SEQ ID NO: 2612351 - RNA, 19 nt, Artificial Sequence
  Description of Artificial Sequence: Synthetic oligonucleotide
gauguagaccuggcaggag

SEQ ID NO: 2612352 - RNA, 19 nt, Artificial Sequence
  Description of Artificial Sequence: Synthetic oligonucleotide
ugguggacguacuccuuga

SEQ ID NO: 2612353 - RNA, 19 nt, Artificial Sequence
  Description of Artificial Sequence: Synthetic oligonucleotide
gguaauuaguguaauauuu

SEQ ID NO: 2612354 - RNA, 19 nt, Artificial Sequence
  Description of Artificial Sequence: Synthetic oligonucleotide
ggagaaagcccaguguccc

SEQ ID NO: 2612355 - RNA, 19 nt, Artificial Sequence
  Description of Artificial Sequence: Synthetic oligonucleotide
uggaguucccuggacugug

SEQ ID NO: 2612356 - RNA, 19 nt, Artificial Sequence
  Description of Artificial Sequence: Synthetic oligonucleotide
uaggggcaguaggagaugc

SEQ ID NO: 2612357 - RNA, 19 nt, Artificial Sequence
  Description of Artificial Sequence: Synthetic oligonucleotide
accuacccuacaccuaaca

SEQ ID NO: 2612358 - RNA, 19 nt, Artificial Sequence
  Description of Artificial Sequence: Synthetic oligonucleotide
auggccacauagacguugg

SEQ ID NO: 2612359 - RNA, 19 nt, Artificial Sequence
  Description of Artificial Sequence: Synthetic oligonucleotide
acguugggaaacauggcca

SEQ ID NO: 2612360 - RNA, 19 nt, Artificial Sequence
  Description of Artificial Sequence: Synthetic oligonucleotide
ugauggugaccauggccac

SEQ ID NO: 2612361 - RNA, 19 nt, Artificial Sequence
  Description of Artificial Sequence: Synthetic oligonucleotide
uguuccacccucgccuuca

SEQ ID NO: 2612362 - RNA, 19 nt, Artificial Sequence
  Description of Artificial Sequence: Synthetic oligonucleotide
gccacauagacguugggaa

SEQ ID NO: 2612363 - RNA, 19 nt, Artificial Sequence
  Description of Artificial Sequence: Synthetic oligonucleotide
ccuacugaacuugaacugc

SEQ ID NO: 2612364 - RNA, 19 nt, Artificial Sequence
  Description of Artificial Sequence: Synthetic oligonucleotide
ggaaugugucuccaccggc

SEQ ID NO: 2612365 - RNA, 19 nt, Artificial Sequence
  Description of Artificial Sequence: Synthetic oligonucleotide
gcaaccaggaucugggaga

SEQ ID NO: 2612366 - RNA, 19 nt, Artificial Sequence
  Description of Artificial Sequence: Synthetic oligonucleotide
ggaugacauggacaguccc

SEQ ID NO: 2612367 - RNA, 19 nt, Artificial Sequence
  Description of Artificial Sequence: Synthetic oligonucleotide
ugccuguuccacccucgcc

SEQ ID NO: 2612368 - RNA, 19 nt, Artificial Sequence
  Description of Artificial Sequence: Synthetic oligonucleotide
uggccacauagacguuggg

SEQ ID NO: 2612369 - RNA, 19 nt, Artificial Sequence
  Description of Artificial Sequence: Synthetic oligonucleotide
gagggcauaggggcaguag

SEQ ID NO: 2612370 - RNA, 19 nt, Artificial Sequence
  Description of Artificial Sequence: Synthetic oligonucleotide
cacaguccccaguccaccc

SEQ ID NO: 2612371 - RNA, 19 nt, Artificial Sequence
  Description of Artificial Sequence: Synthetic oligonucleotide
cucugacaccucaggguag

SEQ ID NO: 2612372 - RNA, 19 nt, Artificial Sequence
  Description of Artificial Sequence: Synthetic oligonucleotide
ugacauggacagucccuac

SEQ ID NO: 2612373 - RNA, 19 nt, Artificial Sequence
  Description of Artificial Sequence: Synthetic oligonucleotide
cuuccguaguaaagcguuc

SEQ ID NO: 2612374 - RNA, 19 nt, Artificial Sequence
  Description of Artificial Sequence: Synthetic oligonucleotide
ggaaagguaauuaguguaa

SEQ ID NO: 2612375 - RNA, 19 nt, Artificial Sequence
  Description of Artificial Sequence: Synthetic oligonucleotide
uuuugccuaauagcucaaa

SEQ ID NO: 2612376 - RNA, 19 nt, Artificial Sequence
  Description of Artificial Sequence: Synthetic oligonucleotide
gugucggcaagcacagucc

SEQ ID NO: 2612377 - RNA, 19 nt, Artificial Sequence
  Description of Artificial Sequence: Synthetic oligonucleotide
gaugacauggacagucccu

SEQ ID NO: 2612378 - RNA, 19 nt, Artificial Sequence
  Description of Artificial Sequence: Synthetic oligonucleotide
caggccuuucugcuccucc

SEQ ID NO: 2612379 - RNA, 19 nt, Artificial Sequence
  Description of Artificial Sequence: Synthetic oligonucleotide
guaauuaguguaauauuuu

SEQ ID NO: 2612380 - RNA, 19 nt, Artificial Sequence
  Description of Artificial Sequence: Synthetic oligonucleotide
acauagacguugggaaaca

SEQ ID NO: 2612381 - RNA, 19 nt, Artificial Sequence
  Description of Artificial Sequence: Synthetic oligonucleotide
caucacagcggugcccacg

SEQ ID NO: 2612382 - RNA, 19 nt, Artificial Sequence
  Description of Artificial Sequence: Synthetic oligonucleotide
cuccagcucgcacaguguc

SEQ ID NO: 2612383 - RNA, 19 nt, Artificial Sequence
  Description of Artificial Sequence: Synthetic oligonucleotide
ugccaaauccacgcuugga

SEQ ID NO: 2612384 - RNA, 19 nt, Artificial Sequence
  Description of Artificial Sequence: Synthetic oligonucleotide
aaccuacccuacaccuaac

SEQ ID NO: 2612385 - RNA, 19 nt, Artificial Sequence
  Description of Artificial Sequence: Synthetic oligonucleotide
ugcccuccgguguggaaug

SEQ ID NO: 2612386 - RNA, 19 nt, Artificial Sequence
  Description of Artificial Sequence: Synthetic oligonucleotide
gaacugcgcccugggaagg

SEQ ID NO: 2612387 - RNA, 19 nt, Artificial Sequence
  Description of Artificial Sequence: Synthetic oligonucleotide
guagaucaccaggaaugug

SEQ ID NO: 2612388 - RNA, 19 nt, Artificial Sequence
  Description of Artificial Sequence: Synthetic oligonucleotide
guagaccuggcaggagagg

SEQ ID NO: 2612389 - RNA, 19 nt, Artificial Sequence
  Description of Artificial Sequence: Synthetic oligonucleotide
gaacuugaacugcgcccug

SEQ ID NO: 2612390 - RNA, 19 nt, Artificial Sequence
  Description of Artificial Sequence: Synthetic oligonucleotide
augaugcccauggugcuga

SEQ ID NO: 2612391 - RNA, 19 nt, Artificial Sequence
  Description of Artificial Sequence: Synthetic oligonucleotide
cauaggggcaguaggagau

SEQ ID NO: 2612392 - RNA, 19 nt, Artificial Sequence
  Description of Artificial Sequence: Synthetic oligonucleotide
gugcccacggagaaagccc

SEQ ID NO: 2612393 - RNA, 19 nt, Artificial Sequence
  Description of Artificial Sequence: Synthetic oligonucleotide
gcucauggagaugaugccc

SEQ ID NO: 2612394 - RNA, 19 nt, Artificial Sequence
  Description of Artificial Sequence: Synthetic oligonucleotide
aggaucugggagauguaga

SEQ ID NO: 2612395 - RNA, 19 nt, Artificial Sequence
  Description of Artificial Sequence: Synthetic oligonucleotide
uccacccugcccuccggug

SEQ ID NO: 2612396 - RNA, 19 nt, Artificial Sequence
  Description of Artificial Sequence: Synthetic oligonucleotide
uuggaguucccuggacugu

SEQ ID NO: 2612397 - RNA, 19 nt, Artificial Sequence
  Description of Artificial Sequence: Synthetic oligonucleotide
uggccaucacagcggugcc

SEQ ID NO: 2612398 - RNA, 19 nt, Artificial Sequence
  Description of Artificial Sequence: Synthetic oligonucleotide
gaaagguaauuaguguaau

SEQ ID NO: 2612399 - RNA, 19 nt, Artificial Sequence
  Description of Artificial Sequence: Synthetic oligonucleotide
cagcgggcccugcagacag

SEQ ID NO: 2612400 - RNA, 19 nt, Artificial Sequence
  Description of Artificial Sequence: Synthetic oligonucleotide
cagacaggccuuucugcuc

SEQ ID NO: 2612401 - RNA, 19 nt, Artificial Sequence
  Description of Artificial Sequence: Synthetic oligonucleotide
ccugggaaggaacuccagc

SEQ ID NO: 2612402 - RNA, 19 nt, Artificial Sequence
  Description of Artificial Sequence: Synthetic oligonucleotide
ccuacagcgucgaccacgc

SEQ ID NO: 2612403 - RNA, 19 nt, Artificial Sequence
  Description of Artificial Sequence: Synthetic oligonucleotide
auggugaccauggccacau

SEQ ID NO: 2612404 - RNA, 19 nt, Artificial Sequence
  Description of Artificial Sequence: Synthetic oligonucleotide
cuaggagggcauaggggca

SEQ ID NO: 2612405 - RNA, 19 nt, Artificial Sequence
  Description of Artificial Sequence: Synthetic oligonucleotide
ccuacccuacaccuaacac

SEQ ID NO: 2612406 - RNA, 19 nt, Artificial Sequence
  Description of Artificial Sequence: Synthetic oligonucleotide
agcguucagcacagugggc

SEQ ID NO: 2612407 - RNA, 19 nt, Artificial Sequence
  Description of Artificial Sequence: Synthetic oligonucleotide
ggugcccacggagaaagcc

SEQ ID NO: 2612408 - RNA, 19 nt, Artificial Sequence
  Description of Artificial Sequence: Synthetic oligonucleotide
ugugguggacguacuccuu

SEQ ID NO: 2612409 - RNA, 19 nt, Artificial Sequence
  Description of Artificial Sequence: Synthetic oligonucleotide
ggcauaggggcaguaggag

SEQ ID NO: 2612410 - RNA, 19 nt, Artificial Sequence
  Description of Artificial Sequence: Synthetic oligonucleotide
ucgcacagugucggcaagc

SEQ ID NO: 2612411 - RNA, 19 nt, Artificial Sequence
  Description of Artificial Sequence: Synthetic oligonucleotide
gaaggaacuccagcucgca

SEQ ID NO: 2612412 - RNA, 19 nt, Artificial Sequence
  Description of Artificial Sequence: Synthetic oligonucleotide
ggacagucccuacagcguc

SEQ ID NO: 2612413 - RNA, 19 nt, Artificial Sequence
  Description of Artificial Sequence: Synthetic oligonucleotide
aguccacccugcccuccgg

SEQ ID NO: 2612414 - RNA, 19 nt, Artificial Sequence
  Description of Artificial Sequence: Synthetic oligonucleotide
uuccacccucgccuucacc

SEQ ID NO: 2612415 - RNA, 19 nt, Artificial Sequence
  Description of Artificial Sequence: Synthetic oligonucleotide
cuccgguguggaauguguc

SEQ ID NO: 2612416 - RNA, 19 nt, Artificial Sequence
  Description of Artificial Sequence: Synthetic oligonucleotide
cgcagucaaugccaaaucc

SEQ ID NO: 2612417 - RNA, 19 nt, Artificial Sequence
  Description of Artificial Sequence: Synthetic oligonucleotide
augcaaccaggaucuggga

SEQ ID NO: 2612418 - RNA, 19 nt, Artificial Sequence
  Description of Artificial Sequence: Synthetic oligonucleotide
cauggagaugaugcccaug

SEQ ID NO: 2612419 - RNA, 19 nt, Artificial Sequence
  Description of Artificial Sequence: Synthetic oligonucleotide
cccuacaccuaacaccuac

SEQ ID NO: 2612420 - RNA, 19 nt, Artificial Sequence
  Description of Artificial Sequence: Synthetic oligonucleotide
guguggaaugugucuccac

SEQ ID NO: 2612421 - RNA, 19 nt, Artificial Sequence
  Description of Artificial Sequence: Synthetic oligonucleotide
caguccacccugcccuccg

SEQ ID NO: 2612422 - RNA, 19 nt, Artificial Sequence
  Description of Artificial Sequence: Synthetic oligonucleotide
gauggugaccauggccaca

SEQ ID NO: 2612423 - RNA, 19 nt, Artificial Sequence
  Description of Artificial Sequence: Synthetic oligonucleotide
ccccuuccguaguaaagcg

SEQ ID NO: 2612424 - RNA, 19 nt, Artificial Sequence
  Description of Artificial Sequence: Synthetic oligonucleotide
accucaggguagaucacca

SEQ ID NO: 2612425 - RNA, 19 nt, Artificial Sequence
  Description of Artificial Sequence: Synthetic oligonucleotide
caaaccuacccuacaccua

SEQ ID NO: 2612426 - RNA, 19 nt, Artificial Sequence
  Description of Artificial Sequence: Synthetic oligonucleotide
acagcggugcccacggaga

SEQ ID NO: 2612427 - RNA, 19 nt, Artificial Sequence
  Description of Artificial Sequence: Synthetic oligonucleotide
ggaaggaacuccagcucgc

SEQ ID NO: 2612428 - RNA, 19 nt, Artificial Sequence
  Description of Artificial Sequence: Synthetic oligonucleotide
cugccuguuccacccucgc

SEQ ID NO: 2612429 - RNA, 19 nt, Artificial Sequence
  Description of Artificial Sequence: Synthetic oligonucleotide
agcucgcacagugucggca

SEQ ID NO: 2612430 - RNA, 19 nt, Artificial Sequence
  Description of Artificial Sequence: Synthetic oligonucleotide
gcauaggggcaguaggaga

SEQ ID NO: 2612431 - RNA, 19 nt, Artificial Sequence
  Description of Artificial Sequence: Synthetic oligonucleotide
acgcuuggaguucccugga

SEQ ID NO: 2612432 - RNA, 19 nt, Artificial Sequence
  Description of Artificial Sequence: Synthetic oligonucleotide
cuugaacugcgcccuggga

SEQ ID NO: 2612433 - RNA, 19 nt, Artificial Sequence
  Description of Artificial Sequence: Synthetic oligonucleotide
ccagcucgcacagugucgg

SEQ ID NO: 2612434 - RNA, 19 nt, Artificial Sequence
  Description of Artificial Sequence: Synthetic oligonucleotide
cacccucgccuucaccagc

SEQ ID NO: 2612435 - RNA, 19 nt, Artificial Sequence
  Description of Artificial Sequence: Synthetic oligonucleotide
caaauccacgcuuggaguu

SEQ ID NO: 2612436 - RNA, 19 nt, Artificial Sequence
  Description of Artificial Sequence: Synthetic oligonucleotide
accaggaauguggcuguca

SEQ ID NO: 2612437 - RNA, 19 nt, Artificial Sequence
  Description of Artificial Sequence: Synthetic oligonucleotide
gggaaacauggccaucaca

SEQ ID NO: 2612438 - RNA, 19 nt, Artificial Sequence
  Description of Artificial Sequence: Synthetic oligonucleotide
ucacugccuguuccacccu

SEQ ID NO: 2612439 - RNA, 19 nt, Artificial Sequence
  Description of Artificial Sequence: Synthetic oligonucleotide
uccacgcuuggaguucccu

SEQ ID NO: 2612440 - RNA, 19 nt, Artificial Sequence
  Description of Artificial Sequence: Synthetic oligonucleotide
aacugcgcccugggaagga

SEQ ID NO: 2612441 - RNA, 19 nt, Artificial Sequence
  Description of Artificial Sequence: Synthetic oligonucleotide
cccuacagcgucgaccacg

SEQ ID NO: 2612442 - RNA, 19 nt, Artificial Sequence
  Description of Artificial Sequence: Synthetic oligonucleotide
ccguaguaaagcguucagc

SEQ ID NO: 2612443 - RNA, 19 nt, Artificial Sequence
  Description of Artificial Sequence: Synthetic oligonucleotide
gcggugcccacggagaaag

SEQ ID NO: 2612444 - RNA, 19 nt, Artificial Sequence
  Description of Artificial Sequence: Synthetic oligonucleotide
ugcccauggugcugauggu

SEQ ID NO: 2612445 - RNA, 19 nt, Artificial Sequence
  Description of Artificial Sequence: Synthetic oligonucleotide
agagcccacugaggccacc

SEQ ID NO: 2612446 - RNA, 19 nt, Artificial Sequence
  Description of Artificial Sequence: Synthetic oligonucleotide
cugugguggacguacuccu

SEQ ID NO: 2612447 - RNA, 19 nt, Artificial Sequence
  Description of Artificial Sequence: Synthetic oligonucleotide
gggaugacauggacagucc

SEQ ID NO: 2612448 - RNA, 19 nt, Artificial Sequence
  Description of Artificial Sequence: Synthetic oligonucleotide
cggagaaagcccagugucc

SEQ ID NO: 2612449 - RNA, 19 nt, Artificial Sequence
  Description of Artificial Sequence: Synthetic oligonucleotide
gaucaccaggaauguggcu

SEQ ID NO: 2612450 - RNA, 19 nt, Artificial Sequence
  Description of Artificial Sequence: Synthetic oligonucleotide
cugucaggaagcccaggaa

SEQ ID NO: 2612451 - RNA, 19 nt, Artificial Sequence
  Description of Artificial Sequence: Synthetic oligonucleotide
guagugcccuaggagggca

SEQ ID NO: 2612452 - RNA, 19 nt, Artificial Sequence
  Description of Artificial Sequence: Synthetic oligonucleotide
acagucccuacagcgucga

SEQ ID NO: 2612453 - RNA, 19 nt, Artificial Sequence
  Description of Artificial Sequence: Synthetic oligonucleotide
guugggaaacauggccauc

SEQ ID NO: 2612454 - RNA, 19 nt, Artificial Sequence
  Description of Artificial Sequence: Synthetic oligonucleotide
gucggcaagcacagucccc

SEQ ID NO: 2612455 - RNA, 19 nt, Artificial Sequence
  Description of Artificial Sequence: Synthetic oligonucleotide
ggacguacuccuugauguc

SEQ ID NO: 2612456 - RNA, 19 nt, Artificial Sequence
  Description of Artificial Sequence: Synthetic oligonucleotide
ugucuccaccggccccgag

SEQ ID NO: 2612457 - RNA, 19 nt, Artificial Sequence
  Description of Artificial Sequence: Synthetic oligonucleotide
gguagugcccuaggagggc

SEQ ID NO: 2612458 - RNA, 19 nt, Artificial Sequence
  Description of Artificial Sequence: Synthetic oligonucleotide
ggcaggagaggauggcgca

SEQ ID NO: 2612459 - RNA, 19 nt, Artificial Sequence
  Description of Artificial Sequence: Synthetic oligonucleotide
cugcgcccugggaaggaac

SEQ ID NO: 2612460 - RNA, 19 nt, Artificial Sequence
  Description of Artificial Sequence: Synthetic oligonucleotide
uagugcccuaggagggcau

SEQ ID NO: 2612461 - RNA, 19 nt, Artificial Sequence
  Description of Artificial Sequence: Synthetic oligonucleotide
ggaguucccuggacugugg

SEQ ID NO: 2612462 - RNA, 19 nt, Artificial Sequence
  Description of Artificial Sequence: Synthetic oligonucleotide
ccacggagaaagcccagug

SEQ ID NO: 2612463 - RNA, 19 nt, Artificial Sequence
  Description of Artificial Sequence: Synthetic oligonucleotide
ggggcaguaggagaugcuc

SEQ ID NO: 2612464 - RNA, 19 nt, Artificial Sequence
  Description of Artificial Sequence: Synthetic oligonucleotide
caggguagaucaccaggaa

SEQ ID NO: 2612465 - RNA, 19 nt, Artificial Sequence
  Description of Artificial Sequence: Synthetic oligonucleotide
gcagacaggccuuucugcu

SEQ ID NO: 2612466 - RNA, 19 nt, Artificial Sequence
  Description of Artificial Sequence: Synthetic oligonucleotide
ggagaugcucauggagaug

SEQ ID NO: 2612467 - RNA, 19 nt, Artificial Sequence
  Description of Artificial Sequence: Synthetic oligonucleotide
auccacgcuuggaguuccc

SEQ ID NO: 2612468 - RNA, 19 nt, Artificial Sequence
  Description of Artificial Sequence: Synthetic oligonucleotide
cacggagaaagcccagugu

SEQ ID NO: 2612469 - RNA, 19 nt, Artificial Sequence
  Description of Artificial Sequence: Synthetic oligonucleotide
gaguucccuggacuguggu

SEQ ID NO: 2612470 - RNA, 19 nt, Artificial Sequence
  Description of Artificial Sequence: Synthetic oligonucleotide
caauugugggaaagguaau

SEQ ID NO: 2612471 - RNA, 19 nt, Artificial Sequence
  Description of Artificial Sequence: Synthetic oligonucleotide
ucacagcggugcccacgga

SEQ ID NO: 2612472 - RNA, 19 nt, Artificial Sequence
  Description of Artificial Sequence: Synthetic oligonucleotide
ccacgcuuggaguucccug

SEQ ID NO: 2612473 - RNA, 19 nt, Artificial Sequence
  Description of Artificial Sequence: Synthetic oligonucleotide
augucaugguagugcccua

SEQ ID NO: 2612474 - RNA, 19 nt, Artificial Sequence
  Description of Artificial Sequence: Synthetic oligonucleotide
cccuggacugugguggacg

SEQ ID NO: 2612475 - RNA, 19 nt, Artificial Sequence
  Description of Artificial Sequence: Synthetic oligonucleotide
gcgcagucaaugccaaauc

SEQ ID NO: 2612476 - RNA, 19 nt, Artificial Sequence
  Description of Artificial Sequence: Synthetic oligonucleotide
ccucgccuucaccagcggg

SEQ ID NO: 2612477 - RNA, 19 nt, Artificial Sequence
  Description of Artificial Sequence: Synthetic oligonucleotide
agaccuggcaggagaggau

SEQ ID NO: 2612478 - RNA, 19 nt, Artificial Sequence
  Description of Artificial Sequence: Synthetic oligonucleotide
gggcauaggggcaguagga

SEQ ID NO: 2612479 - RNA, 19 nt, Artificial Sequence
  Description of Artificial Sequence: Synthetic oligonucleotide
gggcaguaggagaugcuca

SEQ ID NO: 2612480 - RNA, 19 nt, Artificial Sequence
  Description of Artificial Sequence: Synthetic oligonucleotide
cagcucgcacagugucggc

SEQ ID NO: 2612481 - RNA, 19 nt, Artificial Sequence
  Description of Artificial Sequence: Synthetic oligonucleotide
gcaguaggagaugcucaug

SEQ ID NO: 2612482 - RNA, 19 nt, Artificial Sequence
  Description of Artificial Sequence: Synthetic oligonucleotide
ucccuacagcgucgaccac

SEQ ID NO: 2612483 - RNA, 19 nt, Artificial Sequence
  Description of Artificial Sequence: Synthetic oligonucleotide
ccucugacaccucagggua

SEQ ID NO: 2612484 - RNA, 19 nt, Artificial Sequence
  Description of Artificial Sequence: Synthetic oligonucleotide
cuacagcgucgaccacgcc

SEQ ID NO: 2612485 - RNA, 19 nt, Artificial Sequence
  Description of Artificial Sequence: Synthetic oligonucleotide
guuccacccucgccuucac

SEQ ID NO: 2612486 - RNA, 19 nt, Artificial Sequence
  Description of Artificial Sequence: Synthetic oligonucleotide
auggcgcagucaaugccaa

SEQ ID NO: 2612487 - RNA, 19 nt, Artificial Sequence
  Description of Artificial Sequence: Synthetic oligonucleotide
agugggcuucucacugccu

SEQ ID NO: 2612488 - RNA, 19 nt, Artificial Sequence
  Description of Artificial Sequence: Synthetic oligonucleotide
ccaaauccacgcuuggagu

SEQ ID NO: 2612489 - RNA, 19 nt, Artificial Sequence
  Description of Artificial Sequence: Synthetic oligonucleotide
uggcgcagucaaugccaaa

SEQ ID NO: 2612490 - RNA, 19 nt, Artificial Sequence
  Description of Artificial Sequence: Synthetic oligonucleotide
ccacauagacguugggaaa

SEQ ID NO: 2612491 - RNA, 19 nt, Artificial Sequence
  Description of Artificial Sequence: Synthetic oligonucleotide
ggcaguaggagaugcucau

SEQ ID NO: 2612492 - RNA, 19 nt, Artificial Sequence
  Description of Artificial Sequence: Synthetic oligonucleotide
gcguucagcacagugggcu

SEQ ID NO: 2612493 - RNA, 19 nt, Artificial Sequence
  Description of Artificial Sequence: Synthetic oligonucleotide
cuguuccacccucgccuuc

SEQ ID NO: 2612494 - RNA, 19 nt, Artificial Sequence
  Description of Artificial Sequence: Synthetic oligonucleotide
ccuugaugucaugguagug

SEQ ID NO: 2612495 - RNA, 19 nt, Artificial Sequence
  Description of Artificial Sequence: Synthetic oligonucleotide
agaggauggcgcagucaau

SEQ ID NO: 2612496 - RNA, 19 nt, Artificial Sequence
  Description of Artificial Sequence: Synthetic oligonucleotide
gcucgcacagugucggcaa

SEQ ID NO: 2612497 - RNA, 19 nt, Artificial Sequence
  Description of Artificial Sequence: Synthetic oligonucleotide
gcacagugucggcaagcac

SEQ ID NO: 2612498 - RNA, 19 nt, Artificial Sequence
  Description of Artificial Sequence: Synthetic oligonucleotide
ccuuccguaguaaagcguu

SEQ ID NO: 2612499 - RNA, 19 nt, Artificial Sequence
  Description of Artificial Sequence: Synthetic oligonucleotide
ccacccucgccuucaccag

SEQ ID NO: 2612500 - RNA, 19 nt, Artificial Sequence
  Description of Artificial Sequence: Synthetic oligonucleotide
gccuaauagcucaaaccua

SEQ ID NO: 2612501 - RNA, 19 nt, Artificial Sequence
  Description of Artificial Sequence: Synthetic oligonucleotide
ggagaggauggcgcaguca

SEQ ID NO: 2612502 - RNA, 19 nt, Artificial Sequence
  Description of Artificial Sequence: Synthetic oligonucleotide
ggcgcagucaaugccaaau

SEQ ID NO: 2612503 - RNA, 19 nt, Artificial Sequence
  Description of Artificial Sequence: Synthetic oligonucleotide
ccuaacaccuacugaacuu

SEQ ID NO: 2612504 - RNA, 19 nt, Artificial Sequence
  Description of Artificial Sequence: Synthetic oligonucleotide
acugcgcccugggaaggaa

SEQ ID NO: 2612505 - RNA, 19 nt, Artificial Sequence
  Description of Artificial Sequence: Synthetic oligonucleotide
caccagcgggcccugcaga

SEQ ID NO: 2612506 - RNA, 19 nt, Artificial Sequence
  Description of Artificial Sequence: Synthetic oligonucleotide
ccccaagggcagaugcaac

SEQ ID NO: 2612507 - RNA, 19 nt, Artificial Sequence
  Description of Artificial Sequence: Synthetic oligonucleotide
cccugggaaggaacuccag

SEQ ID NO: 2612508 - RNA, 19 nt, Artificial Sequence
  Description of Artificial Sequence: Synthetic oligonucleotide
cugaggccaccacagggau

SEQ ID NO: 2612509 - RNA, 19 nt, Artificial Sequence
  Description of Artificial Sequence: Synthetic oligonucleotide
cagucccuacagcgucgac

SEQ ID NO: 2612510 - RNA, 19 nt, Artificial Sequence
  Description of Artificial Sequence: Synthetic oligonucleotide
agcggugcccacggagaaa

SEQ ID NO: 2612511 - RNA, 19 nt, Artificial Sequence
  Description of Artificial Sequence: Synthetic oligonucleotide
cagcggugcccacggagaa

SEQ ID NO: 2612512 - RNA, 19 nt, Artificial Sequence
  Description of Artificial Sequence: Synthetic oligonucleotide
caaccaggaucugggagau

SEQ ID NO: 2612513 - RNA, 19 nt, Artificial Sequence
  Description of Artificial Sequence: Synthetic oligonucleotide
cauagacguugggaaacau

SEQ ID NO: 2612514 - RNA, 19 nt, Artificial Sequence
  Description of Artificial Sequence: Synthetic oligonucleotide
cgcccugggaaggaacucc

SEQ ID NO: 2612515 - RNA, 19 nt, Artificial Sequence
  Description of Artificial Sequence: Synthetic oligonucleotide
agcgggcccugcagacagg

SEQ ID NO: 2612516 - RNA, 19 nt, Artificial Sequence
  Description of Artificial Sequence: Synthetic oligonucleotide
ccuacaccuaacaccuacu

SEQ ID NO: 2612517 - RNA, 19 nt, Artificial Sequence
  Description of Artificial Sequence: Synthetic oligonucleotide
ggcaagcacaguccccagu

SEQ ID NO: 2612518 - RNA, 19 nt, Artificial Sequence
  Description of Artificial Sequence: Synthetic oligonucleotide
ccaccacagggaugacaug

SEQ ID NO: 2612519 - RNA, 19 nt, Artificial Sequence
  Description of Artificial Sequence: Synthetic oligonucleotide
gguggacguacuccuugau

SEQ ID NO: 2612520 - RNA, 19 nt, Artificial Sequence
  Description of Artificial Sequence: Synthetic oligonucleotide
guccacccugcccuccggu

SEQ ID NO: 2612521 - RNA, 19 nt, Artificial Sequence
  Description of Artificial Sequence: Synthetic oligonucleotide
ccuccgguguggaaugugu

SEQ ID NO: 2612522 - RNA, 19 nt, Artificial Sequence
  Description of Artificial Sequence: Synthetic oligonucleotide
guaaagcguucagcacagu

SEQ ID NO: 2612523 - RNA, 19 nt, Artificial Sequence
  Description of Artificial Sequence: Synthetic oligonucleotide
gggcagaugcaaccaggau

SEQ ID NO: 2612524 - RNA, 19 nt, Artificial Sequence
  Description of Artificial Sequence: Synthetic oligonucleotide
ccaucacagcggugcccac

SEQ ID NO: 2612525 - RNA, 19 nt, Artificial Sequence
  Description of Artificial Sequence: Synthetic oligonucleotide
cccucgccuucaccagcgg

SEQ ID NO: 2612526 - RNA, 19 nt, Artificial Sequence
  Description of Artificial Sequence: Synthetic oligonucleotide
cccuuccguaguaaagcgu

SEQ ID NO: 2612527 - RNA, 19 nt, Artificial Sequence
  Description of Artificial Sequence: Synthetic oligonucleotide
gaacuccagcucgcacagu

SEQ ID NO: 2612528 - RNA, 19 nt, Artificial Sequence
  Description of Artificial Sequence: Synthetic oligonucleotide
cccuccgguguggaaugug

SEQ ID NO: 2612529 - RNA, 19 nt, Artificial Sequence
  Description of Artificial Sequence: Synthetic oligonucleotide
cuggacugugguggacgua

SEQ ID NO: 2612530 - RNA, 19 nt, Artificial Sequence
  Description of Artificial Sequence: Synthetic oligonucleotide
cgcacagugucggcaagca

SEQ ID NO: 2612531 - RNA, 19 nt, Artificial Sequence
  Description of Artificial Sequence: Synthetic oligonucleotide
acccuacaccuaacaccua

SEQ ID NO: 2612532 - RNA, 19 nt, Artificial Sequence
  Description of Artificial Sequence: Synthetic oligonucleotide
gugucuccaccggccccga

SEQ ID NO: 2612533 - RNA, 19 nt, Artificial Sequence
  Description of Artificial Sequence: Synthetic oligonucleotide
cuccaccggccccgaggga

SEQ ID NO: 2612534 - RNA, 19 nt, Artificial Sequence
  Description of Artificial Sequence: Synthetic oligonucleotide
gcgcccugggaaggaacuc

SEQ ID NO: 2612535 - RNA, 19 nt, Artificial Sequence
  Description of Artificial Sequence: Synthetic oligonucleotide
ggagggcauaggggcagua

SEQ ID NO: 2612536 - RNA, 19 nt, Artificial Sequence
  Description of Artificial Sequence: Synthetic oligonucleotide
ggacugugguggacguacu

SEQ ID NO: 2612537 - RNA, 19 nt, Artificial Sequence
  Description of Artificial Sequence: Synthetic oligonucleotide
cggugcccacggagaaagc

SEQ ID NO: 2612538 - RNA, 19 nt, Artificial Sequence
  Description of Artificial Sequence: Synthetic oligonucleotide
cugacaccucaggguagau

SEQ ID NO: 2612539 - RNA, 19 nt, Artificial Sequence
  Description of Artificial Sequence: Synthetic oligonucleotide
ccagcgggcccugcagaca

SEQ ID NO: 2612540 - RNA, 19 nt, Artificial Sequence
  Description of Artificial Sequence: Synthetic oligonucleotide
gggcuucucacugccuguu

SEQ ID NO: 2612541 - RNA, 19 nt, Artificial Sequence
  Description of Artificial Sequence: Synthetic oligonucleotide
ccugcccuccgguguggaa

SEQ ID NO: 2612542 - RNA, 19 nt, Artificial Sequence
  Description of Artificial Sequence: Synthetic oligonucleotide
ggcccugcagacaggccuu

SEQ ID NO: 2612543 - RNA, 19 nt, Artificial Sequence
  Description of Artificial Sequence: Synthetic oligonucleotide
cagugucggcaagcacagu

SEQ ID NO: 2612544 - RNA, 19 nt, Artificial Sequence
  Description of Artificial Sequence: Synthetic oligonucleotide
cguucagcacagugggcuu

SEQ ID NO: 2612545 - RNA, 19 nt, Artificial Sequence
  Description of Artificial Sequence: Synthetic oligonucleotide
cccugcccuccggugugga

SEQ ID NO: 2612546 - RNA, 19 nt, Artificial Sequence
  Description of Artificial Sequence: Synthetic oligonucleotide
ccauggccacauagacguu

SEQ ID NO: 2612547 - RNA, 19 nt, Artificial Sequence
  Description of Artificial Sequence: Synthetic oligonucleotide
gcccuccgguguggaaugu

SEQ ID NO: 2612548 - RNA, 19 nt, Artificial Sequence
  Description of Artificial Sequence: Synthetic oligonucleotide
gcccugcagacaggccuuu

SEQ ID NO: 2612549 - RNA, 19 nt, Artificial Sequence
  Description of Artificial Sequence: Synthetic oligonucleotide
aaagucgauauucagcucc

SEQ ID NO: 2612550 - RNA, 19 nt, Artificial Sequence
  Description of Artificial Sequence: Synthetic oligonucleotide
uuugacugaagaaagaaug

SEQ ID NO: 2612551 - RNA, 19 nt, Artificial Sequence
  Description of Artificial Sequence: Synthetic oligonucleotide
augggaaacacuuuggccc

SEQ ID NO: 2612552 - RNA, 19 nt, Artificial Sequence
  Description of Artificial Sequence: Synthetic oligonucleotide
aaguagaugacacauauaa

SEQ ID NO: 2612553 - RNA, 19 nt, Artificial Sequence
  Description of Artificial Sequence: Synthetic oligonucleotide
aauucuaucucagauugac

SEQ ID NO: 2612554 - RNA, 19 nt, Artificial Sequence
  Description of Artificial Sequence: Synthetic oligonucleotide
auaagaauccaccauguuc

SEQ ID NO: 2612555 - RNA, 19 nt, Artificial Sequence
  Description of Artificial Sequence: Synthetic oligonucleotide
auuaaagauguccuuuggc

SEQ ID NO: 2612556 - RNA, 19 nt, Artificial Sequence
  Description of Artificial Sequence: Synthetic oligonucleotide
aaaucggacacugaauagc

SEQ ID NO: 2612557 - RNA, 19 nt, Artificial Sequence
  Description of Artificial Sequence: Synthetic oligonucleotide
uucuaucucagauugaccc

SEQ ID NO: 2612558 - RNA, 19 nt, Artificial Sequence
  Description of Artificial Sequence: Synthetic oligonucleotide
uacaauuuuaaccauugac

SEQ ID NO: 2612559 - RNA, 19 nt, Artificial Sequence
  Description of Artificial Sequence: Synthetic oligonucleotide
aaagaaugucccaaguugc

SEQ ID NO: 2612560 - RNA, 19 nt, Artificial Sequence
  Description of Artificial Sequence: Synthetic oligonucleotide
  modified_base (7)..(7): a, c, u, g, unknown or other
uaaaacnccagcauuuccu

SEQ ID NO: 2612561 - RNA, 19 nt, Artificial Sequence
  Description of Artificial Sequence: Synthetic oligonucleotide
cuuuagaagcuucaggugg

SEQ ID NO: 2612562 - RNA, 19 nt, Artificial Sequence
  Description of Artificial Sequence: Synthetic oligonucleotide
  modified_base (14)..(14): a, c, u, g, unknown or other
uugguuguaaaacnccagc

SEQ ID NO: 2612563 - RNA, 19 nt, Artificial Sequence
  Description of Artificial Sequence: Synthetic oligonucleotide
caaggcacuguccagaucg

SEQ ID NO: 2612564 - RNA, 19 nt, Artificial Sequence
  Description of Artificial Sequence: Synthetic oligonucleotide
uuaacaucagccgaauggg

SEQ ID NO: 2612565 - RNA, 19 nt, Artificial Sequence
  Description of Artificial Sequence: Synthetic oligonucleotide
ugagucaagugucacacgc

SEQ ID NO: 2612566 - RNA, 19 nt, Artificial Sequence
  Description of Artificial Sequence: Synthetic oligonucleotide
gaauauaaaagaugaguuc

SEQ ID NO: 2612567 - RNA, 19 nt, Artificial Sequence
  Description of Artificial Sequence: Synthetic oligonucleotide
cauauaagaauccaccaug

SEQ ID NO: 2612568 - RNA, 19 nt, Artificial Sequence
  Description of Artificial Sequence: Synthetic oligonucleotide
uguacugagacggaagggg

SEQ ID NO: 2612569 - RNA, 19 nt, Artificial Sequence
  Description of Artificial Sequence: Synthetic oligonucleotide
acuguagcaaaauucuauc

SEQ ID NO: 2612570 - RNA, 19 nt, Artificial Sequence
  Description of Artificial Sequence: Synthetic oligonucleotide
agaucguucauguacugag

SEQ ID NO: 2612571 - RNA, 19 nt, Artificial Sequence
  Description of Artificial Sequence: Synthetic oligonucleotide
  modified_base (6)..(6): a, c, u, g, unknown or other
aaaacnccagcauuuccug

SEQ ID NO: 2612572 - RNA, 19 nt, Artificial Sequence
  Description of Artificial Sequence: Synthetic oligonucleotide
uguagugacugguaaguag

SEQ ID NO: 2612573 - RNA, 19 nt, Artificial Sequence
  Description of Artificial Sequence: Synthetic oligonucleotide
uuccagaauauaaaagaug

SEQ ID NO: 2612574 - RNA, 19 nt, Artificial Sequence
  Description of Artificial Sequence: Synthetic oligonucleotide
gauuaaagauguccuuugg

SEQ ID NO: 2612575 - RNA, 19 nt, Artificial Sequence
  Description of Artificial Sequence: Synthetic oligonucleotide
caagucuuaacaucagccg

SEQ ID NO: 2612576 - RNA, 19 nt, Artificial Sequence
  Description of Artificial Sequence: Synthetic oligonucleotide
auugcucccugcuugauag

SEQ ID NO: 2612577 - RNA, 19 nt, Artificial Sequence
  Description of Artificial Sequence: Synthetic oligonucleotide
aaacuuugacugaagaaag

SEQ ID NO: 2612578 - RNA, 19 nt, Artificial Sequence
  Description of Artificial Sequence: Synthetic oligonucleotide
uucuuuacugcccaggaaa

SEQ ID NO: 2612579 - RNA, 19 nt, Artificial Sequence
  Description of Artificial Sequence: Synthetic oligonucleotide
aagucuuaacaucagccga

SEQ ID NO: 2612580 - RNA, 19 nt, Artificial Sequence
  Description of Artificial Sequence: Synthetic oligonucleotide
ucggacacugaauagcggg

SEQ ID NO: 2612581 - RNA, 19 nt, Artificial Sequence
  Description of Artificial Sequence: Synthetic oligonucleotide
uggaugacaggcaccaagg

SEQ ID NO: 2612582 - RNA, 19 nt, Artificial Sequence
  Description of Artificial Sequence: Synthetic oligonucleotide
ucgauauucagcuccaagu

SEQ ID NO: 2612583 - RNA, 19 nt, Artificial Sequence
  Description of Artificial Sequence: Synthetic oligonucleotide
  modified_base (10)..(10): a, c, u, g, unknown or other
uuguaaaacnccagcauuu

SEQ ID NO: 2612584 - RNA, 19 nt, Artificial Sequence
  Description of Artificial Sequence: Synthetic oligonucleotide
gaaacuuugacugaagaaa

SEQ ID NO: 2612585 - RNA, 19 nt, Artificial Sequence
  Description of Artificial Sequence: Synthetic oligonucleotide
ugcuugauagccaaccuga

SEQ ID NO: 2612586 - RNA, 19 nt, Artificial Sequence
  Description of Artificial Sequence: Synthetic oligonucleotide
ugauuaaagauguccuuug

SEQ ID NO: 2612587 - RNA, 19 nt, Artificial Sequence
  Description of Artificial Sequence: Synthetic oligonucleotide
aucguucauguacugagac

SEQ ID NO: 2612588 - RNA, 19 nt, Artificial Sequence
  Description of Artificial Sequence: Synthetic oligonucleotide
aaucggacacugaauagcg

SEQ ID NO: 2612589 - RNA, 19 nt, Artificial Sequence
  Description of Artificial Sequence: Synthetic oligonucleotide
gaagaaagaaugucccaag

SEQ ID NO: 2612590 - RNA, 19 nt, Artificial Sequence
  Description of Artificial Sequence: Synthetic oligonucleotide
uagaugacacauauaagaa

SEQ ID NO: 2612591 - RNA, 19 nt, Artificial Sequence
  Description of Artificial Sequence: Synthetic oligonucleotide
aagaaugucccaaguugcc

SEQ ID NO: 2612592 - RNA, 19 nt, Artificial Sequence
  Description of Artificial Sequence: Synthetic oligonucleotide
ugucuuagcgacaugcuuc

SEQ ID NO: 2612593 - RNA, 19 nt, Artificial Sequence
  Description of Artificial Sequence: Synthetic oligonucleotide
aagaaagaaugucccaagu

SEQ ID NO: 2612594 - RNA, 19 nt, Artificial Sequence
  Description of Artificial Sequence: Synthetic oligonucleotide
  modified_base (13)..(13): a, c, u, g, unknown or other
ugguuguaaaacnccagca

SEQ ID NO: 2612595 - RNA, 19 nt, Artificial Sequence
  Description of Artificial Sequence: Synthetic oligonucleotide
gaagcacuaggucuuguag

SEQ ID NO: 2612596 - RNA, 19 nt, Artificial Sequence
  Description of Artificial Sequence: Synthetic oligonucleotide
gugacugguaaguagauga

SEQ ID NO: 2612597 - RNA, 19 nt, Artificial Sequence
  Description of Artificial Sequence: Synthetic oligonucleotide
aaguuguacaaagugauua

SEQ ID NO: 2612598 - RNA, 19 nt, Artificial Sequence
  Description of Artificial Sequence: Synthetic oligonucleotide
auaaaagaugaguuccaug

SEQ ID NO: 2612599 - RNA, 19 nt, Artificial Sequence
  Description of Artificial Sequence: Synthetic oligonucleotide
caaguugcccacaacauuc

SEQ ID NO: 2612600 - RNA, 19 nt, Artificial Sequence
  Description of Artificial Sequence: Synthetic oligonucleotide
ugcgauguuuuccagaaua

SEQ ID NO: 2612601 - RNA, 19 nt, Artificial Sequence
  Description of Artificial Sequence: Synthetic oligonucleotide
uaugcgauguuuuccagaa

SEQ ID NO: 2612602 - RNA, 19 nt, Artificial Sequence
  Description of Artificial Sequence: Synthetic oligonucleotide
acagcaugcauucccuugg

SEQ ID NO: 2612603 - RNA, 19 nt, Artificial Sequence
  Description of Artificial Sequence: Synthetic oligonucleotide
acaauggcuuccgaaaucg

SEQ ID NO: 2612604 - RNA, 19 nt, Artificial Sequence
  Description of Artificial Sequence: Synthetic oligonucleotide
ucuuguagugacugguaag

SEQ ID NO: 2612605 - RNA, 19 nt, Artificial Sequence
  Description of Artificial Sequence: Synthetic oligonucleotide
guaaagucgauauucagcu

SEQ ID NO: 2612606 - RNA, 19 nt, Artificial Sequence
  Description of Artificial Sequence: Synthetic oligonucleotide
auaaaguuguacaaaguga

SEQ ID NO: 2612607 - RNA, 19 nt, Artificial Sequence
  Description of Artificial Sequence: Synthetic oligonucleotide
agcuccaagucuuaacauc

SEQ ID NO: 2612608 - RNA, 19 nt, Artificial Sequence
  Description of Artificial Sequence: Synthetic oligonucleotide
uaaagauguccuuuggcaa

SEQ ID NO: 2612609 - RNA, 19 nt, Artificial Sequence
  Description of Artificial Sequence: Synthetic oligonucleotide
agucaagugucacacgcag

SEQ ID NO: 2612610 - RNA, 19 nt, Artificial Sequence
  Description of Artificial Sequence: Synthetic oligonucleotide
aagcacuaggucuuguagu

SEQ ID NO: 2612611 - RNA, 19 nt, Artificial Sequence
  Description of Artificial Sequence: Synthetic oligonucleotide
uccgaaaucggacacugaa

SEQ ID NO: 2612612 - RNA, 19 nt, Artificial Sequence
  Description of Artificial Sequence: Synthetic oligonucleotide
aacauucccugccagugca

SEQ ID NO: 2612613 - RNA, 19 nt, Artificial Sequence
  Description of Artificial Sequence: Synthetic oligonucleotide
aaacaauggcuuccgaaau

SEQ ID NO: 2612614 - RNA, 19 nt, Artificial Sequence
  Description of Artificial Sequence: Synthetic oligonucleotide
aagaugaguuccaugacga

SEQ ID NO: 2612615 - RNA, 19 nt, Artificial Sequence
  Description of Artificial Sequence: Synthetic oligonucleotide
cuuagcgacaugcuucucc

SEQ ID NO: 2612616 - RNA, 19 nt, Artificial Sequence
  Description of Artificial Sequence: Synthetic oligonucleotide
augagaaucccaaacaggu

SEQ ID NO: 2612617 - RNA, 19 nt, Artificial Sequence
  Description of Artificial Sequence: Synthetic oligonucleotide
ugcaucccgauaaaguugu

SEQ ID NO: 2612618 - RNA, 19 nt, Artificial Sequence
  Description of Artificial Sequence: Synthetic oligonucleotide
uccuguucacauaauuuac

SEQ ID NO: 2612619 - RNA, 19 nt, Artificial Sequence
  Description of Artificial Sequence: Synthetic oligonucleotide
agaaugucccaaguugccc

SEQ ID NO: 2612620 - RNA, 19 nt, Artificial Sequence
  Description of Artificial Sequence: Synthetic oligonucleotide
acauauaagaauccaccau

SEQ ID NO: 2612621 - RNA, 19 nt, Artificial Sequence
  Description of Artificial Sequence: Synthetic oligonucleotide
uuccuguucacauaauuua

SEQ ID NO: 2612622 - RNA, 19 nt, Artificial Sequence
  Description of Artificial Sequence: Synthetic oligonucleotide
agauugacccacagcaugc

SEQ ID NO: 2612623 - RNA, 19 nt, Artificial Sequence
  Description of Artificial Sequence: Synthetic oligonucleotide
gacgacagggcccucacug

SEQ ID NO: 2612624 - RNA, 19 nt, Artificial Sequence
  Description of Artificial Sequence: Synthetic oligonucleotide
ucccauuucuggaugagaa

SEQ ID NO: 2612625 - RNA, 19 nt, Artificial Sequence
  Description of Artificial Sequence: Synthetic oligonucleotide
uuagcgacaugcuucucca

SEQ ID NO: 2612626 - RNA, 19 nt, Artificial Sequence
  Description of Artificial Sequence: Synthetic oligonucleotide
  modified_base (4)..(4): a, c, u, g, unknown or other
aacnccagcauuuccuguu

SEQ ID NO: 2612627 - RNA, 19 nt, Artificial Sequence
  Description of Artificial Sequence: Synthetic oligonucleotide
uccaagucuuaacaucagc

SEQ ID NO: 2612628 - RNA, 19 nt, Artificial Sequence
  Description of Artificial Sequence: Synthetic oligonucleotide
uuacaauuuuaaccauuga

SEQ ID NO: 2612629 - RNA, 19 nt, Artificial Sequence
  Description of Artificial Sequence: Synthetic oligonucleotide
ucuuuacugcccaggaaac

SEQ ID NO: 2612630 - RNA, 19 nt, Artificial Sequence
  Description of Artificial Sequence: Synthetic oligonucleotide
  modified_base (15)..(15): a, c, u, g, unknown or other
cuugguuguaaaacnccag

SEQ ID NO: 2612631 - RNA, 19 nt, Artificial Sequence
  Description of Artificial Sequence: Synthetic oligonucleotide
ucuaucucagauugaccca

SEQ ID NO: 2612632 - RNA, 19 nt, Artificial Sequence
  Description of Artificial Sequence: Synthetic oligonucleotide
  modified_base (8)..(8): a, c, u, g, unknown or other
guaaaacnccagcauuucc

SEQ ID NO: 2612633 - RNA, 19 nt, Artificial Sequence
  Description of Artificial Sequence: Synthetic oligonucleotide
ccaagucuuaacaucagcc

SEQ ID NO: 2612634 - RNA, 19 nt, Artificial Sequence
  Description of Artificial Sequence: Synthetic oligonucleotide
agaugacacauauaagaau

SEQ ID NO: 2612635 - RNA, 19 nt, Artificial Sequence
  Description of Artificial Sequence: Synthetic oligonucleotide
gguaaggugggguuggaag

SEQ ID NO: 2612636 - RNA, 19 nt, Artificial Sequence
  Description of Artificial Sequence: Synthetic oligonucleotide
uggcaagcacuuuucaucu

SEQ ID NO: 2612637 - RNA, 19 nt, Artificial Sequence
  Description of Artificial Sequence: Synthetic oligonucleotide
ugguaaguagaugacacau

SEQ ID NO: 2612638 - RNA, 19 nt, Artificial Sequence
  Description of Artificial Sequence: Synthetic oligonucleotide
agaaagaaugucccaaguu

SEQ ID NO: 2612639 - RNA, 19 nt, Artificial Sequence
  Description of Artificial Sequence: Synthetic oligonucleotide
aguuguacaaagugauuaa

SEQ ID NO: 2612640 - RNA, 19 nt, Artificial Sequence
  Description of Artificial Sequence: Synthetic oligonucleotide
agccaaccugaucugaguc

SEQ ID NO: 2612641 - RNA, 19 nt, Artificial Sequence
  Description of Artificial Sequence: Synthetic oligonucleotide
uuugucauuccauccuccu

SEQ ID NO: 2612642 - RNA, 19 nt, Artificial Sequence
  Description of Artificial Sequence: Synthetic oligonucleotide
gguaaagucgauauucagc

SEQ ID NO: 2612643 - RNA, 19 nt, Artificial Sequence
  Description of Artificial Sequence: Synthetic oligonucleotide
auucuaucucagauugacc

SEQ ID NO: 2612644 - RNA, 19 nt, Artificial Sequence
  Description of Artificial Sequence: Synthetic oligonucleotide
aaucccaaacagguaaggu

SEQ ID NO: 2612645 - RNA, 19 nt, Artificial Sequence
  Description of Artificial Sequence: Synthetic oligonucleotide
uguucacauaauuuacaau

SEQ ID NO: 2612646 - RNA, 19 nt, Artificial Sequence
  Description of Artificial Sequence: Synthetic oligonucleotide
  modified_base (5)..(5): a, c, u, g, unknown or other
aaacnccagcauuuccugu

SEQ ID NO: 2612647 - RNA, 19 nt, Artificial Sequence
  Description of Artificial Sequence: Synthetic oligonucleotide
cagauugacccacagcaug

SEQ ID NO: 2612648 - RNA, 19 nt, Artificial Sequence
  Description of Artificial Sequence: Synthetic oligonucleotide
uuuggcaagcacuuuucau

SEQ ID NO: 2612649 - RNA, 19 nt, Artificial Sequence
  Description of Artificial Sequence: Synthetic oligonucleotide
agaugaguuccaugacgac

SEQ ID NO: 2612650 - RNA, 19 nt, Artificial Sequence
  Description of Artificial Sequence: Synthetic oligonucleotide
gaugaguuccaugacgaca

SEQ ID NO: 2612651 - RNA, 19 nt, Artificial Sequence
  Description of Artificial Sequence: Synthetic oligonucleotide
cacauauaagaauccacca

SEQ ID NO: 2612652 - RNA, 19 nt, Artificial Sequence
  Description of Artificial Sequence: Synthetic oligonucleotide
ucuuaacaucagccgaaug

SEQ ID NO: 2612653 - RNA, 19 nt, Artificial Sequence
  Description of Artificial Sequence: Synthetic oligonucleotide
ggugggaugucuuagcgac

SEQ ID NO: 2612654 - RNA, 19 nt, Artificial Sequence
  Description of Artificial Sequence: Synthetic oligonucleotide
ugccagugcaucccgauaa

SEQ ID NO: 2612655 - RNA, 19 nt, Artificial Sequence
  Description of Artificial Sequence: Synthetic oligonucleotide
  modified_base (18)..(18): a, c, u, g, unknown or other
ucccuugguuguaaaacnc

SEQ ID NO: 2612656 - RNA, 19 nt, Artificial Sequence
  Description of Artificial Sequence: Synthetic oligonucleotide
aaccugaucugagucaagu

SEQ ID NO: 2612657 - RNA, 19 nt, Artificial Sequence
  Description of Artificial Sequence: Synthetic oligonucleotide
auauaagaauccaccaugu

SEQ ID NO: 2612658 - RNA, 19 nt, Artificial Sequence
  Description of Artificial Sequence: Synthetic oligonucleotide
gucgauauucagcuccaag

SEQ ID NO: 2612659 - RNA, 19 nt, Artificial Sequence
  Description of Artificial Sequence: Synthetic oligonucleotide
ugacugaagaaagaauguc

SEQ ID NO: 2612660 - RNA, 19 nt, Artificial Sequence
  Description of Artificial Sequence: Synthetic oligonucleotide
uguccuuuggcaagcacuu

SEQ ID NO: 2612661 - RNA, 19 nt, Artificial Sequence
  Description of Artificial Sequence: Synthetic oligonucleotide
  modified_base (9)..(9): a, c, u, g, unknown or other
uguaaaacnccagcauuuc

SEQ ID NO: 2612662 - RNA, 19 nt, Artificial Sequence
  Description of Artificial Sequence: Synthetic oligonucleotide
gcaagcacuuuucaucugg

SEQ ID NO: 2612663 - RNA, 19 nt, Artificial Sequence
  Description of Artificial Sequence: Synthetic oligonucleotide
guaaguagaugacacauau

SEQ ID NO: 2612664 - RNA, 19 nt, Artificial Sequence
  Description of Artificial Sequence: Synthetic oligonucleotide
acuuugacugaagaaagaa

SEQ ID NO: 2612665 - RNA, 19 nt, Artificial Sequence
  Description of Artificial Sequence: Synthetic oligonucleotide
ugacugguaaguagaugac

SEQ ID NO: 2612666 - RNA, 19 nt, Artificial Sequence
  Description of Artificial Sequence: Synthetic oligonucleotide
agucccaguuuugucauuc

SEQ ID NO: 2612667 - RNA, 19 nt, Artificial Sequence
  Description of Artificial Sequence: Synthetic oligonucleotide
ugggaaacacuuuggccca

SEQ ID NO: 2612668 - RNA, 19 nt, Artificial Sequence
  Description of Artificial Sequence: Synthetic oligonucleotide
uauaagaauccaccauguu

SEQ ID NO: 2612669 - RNA, 19 nt, Artificial Sequence
  Description of Artificial Sequence: Synthetic oligonucleotide
gacacugaauagcgggcag

SEQ ID NO: 2612670 - RNA, 19 nt, Artificial Sequence
  Description of Artificial Sequence: Synthetic oligonucleotide
ugaauagcgggcaggggua

SEQ ID NO: 2612671 - RNA, 19 nt, Artificial Sequence
  Description of Artificial Sequence: Synthetic oligonucleotide
uaggucuuguagugacugg

SEQ ID NO: 2612672 - RNA, 19 nt, Artificial Sequence
  Description of Artificial Sequence: Synthetic oligonucleotide
ugguagacacuguagcaaa

SEQ ID NO: 2612673 - RNA, 19 nt, Artificial Sequence
  Description of Artificial Sequence: Synthetic oligonucleotide
auauaaaagaugaguucca

SEQ ID NO: 2612674 - RNA, 19 nt, Artificial Sequence
  Description of Artificial Sequence: Synthetic oligonucleotide
ucaggugggaugucuuagc

SEQ ID NO: 2612675 - RNA, 19 nt, Artificial Sequence
  Description of Artificial Sequence: Synthetic oligonucleotide
cagaauauaaaagaugagu

SEQ ID NO: 2612676 - RNA, 19 nt, Artificial Sequence
  Description of Artificial Sequence: Synthetic oligonucleotide
  modified_base (3)..(3): a, c, u, g, unknown or other
acnccagcauuuccuguuc

SEQ ID NO: 2612677 - RNA, 19 nt, Artificial Sequence
  Description of Artificial Sequence: Synthetic oligonucleotide
uucagcuccaagucuuaac

SEQ ID NO: 2612678 - RNA, 19 nt, Artificial Sequence
  Description of Artificial Sequence: Synthetic oligonucleotide
caggugggaugucuuagcg

SEQ ID NO: 2612679 - RNA, 19 nt, Artificial Sequence
  Description of Artificial Sequence: Synthetic oligonucleotide
guagugacugguaaguaga

SEQ ID NO: 2612680 - RNA, 19 nt, Artificial Sequence
  Description of Artificial Sequence: Synthetic oligonucleotide
ucccaguuuugucauucca

SEQ ID NO: 2612681 - RNA, 19 nt, Artificial Sequence
  Description of Artificial Sequence: Synthetic oligonucleotide
uccuuuggcaagcacuuuu

SEQ ID NO: 2612682 - RNA, 19 nt, Artificial Sequence
  Description of Artificial Sequence: Synthetic oligonucleotide
cuaucucagauugacccac

SEQ ID NO: 2612683 - RNA, 19 nt, Artificial Sequence
  Description of Artificial Sequence: Synthetic oligonucleotide
acagguaaggugggguugg

SEQ ID NO: 2612684 - RNA, 19 nt, Artificial Sequence
  Description of Artificial Sequence: Synthetic oligonucleotide
cguucauguacugagacgg

SEQ ID NO: 2612685 - RNA, 19 nt, Artificial Sequence
  Description of Artificial Sequence: Synthetic oligonucleotide
cuugauagccaaccugauc

SEQ ID NO: 2612686 - RNA, 19 nt, Artificial Sequence
  Description of Artificial Sequence: Synthetic oligonucleotide
ugagaaucccaaacaggua

SEQ ID NO: 2612687 - RNA, 19 nt, Artificial Sequence
  Description of Artificial Sequence: Synthetic oligonucleotide
uaaguagaugacacauaua

SEQ ID NO: 2612688 - RNA, 19 nt, Artificial Sequence
  Description of Artificial Sequence: Synthetic oligonucleotide
auguacugagacggaaggg

SEQ ID NO: 2612689 - RNA, 19 nt, Artificial Sequence
  Description of Artificial Sequence: Synthetic oligonucleotide
cuuccgaaaucggacacug

SEQ ID NO: 2612690 - RNA, 19 nt, Artificial Sequence
  Description of Artificial Sequence: Synthetic oligonucleotide
cacugaguuggcaggcucc

SEQ ID NO: 2612691 - RNA, 19 nt, Artificial Sequence
  Description of Artificial Sequence: Synthetic oligonucleotide
accugaucugagucaagug

SEQ ID NO: 2612692 - RNA, 19 nt, Artificial Sequence
  Description of Artificial Sequence: Synthetic oligonucleotide
cugcuugauagccaaccug

SEQ ID NO: 2612693 - RNA, 19 nt, Artificial Sequence
  Description of Artificial Sequence: Synthetic oligonucleotide
cauuccauccuccuuuaga

SEQ ID NO: 2612694 - RNA, 19 nt, Artificial Sequence
  Description of Artificial Sequence: Synthetic oligonucleotide
agcgggcagggguaaaguc

SEQ ID NO: 2612695 - RNA, 19 nt, Artificial Sequence
  Description of Artificial Sequence: Synthetic oligonucleotide
auagccaaccugaucugag

SEQ ID NO: 2612696 - RNA, 19 nt, Artificial Sequence
  Description of Artificial Sequence: Synthetic oligonucleotide
ugcucccugcuugauagcc

SEQ ID NO: 2612697 - RNA, 19 nt, Artificial Sequence
  Description of Artificial Sequence: Synthetic oligonucleotide
  modified_base (11)..(11): a, c, u, g, unknown or other
guuguaaaacnccagcauu

SEQ ID NO: 2612698 - RNA, 19 nt, Artificial Sequence
  Description of Artificial Sequence: Synthetic oligonucleotide
uaaagucgauauucagcuc

SEQ ID NO: 2612699 - RNA, 19 nt, Artificial Sequence
  Description of Artificial Sequence: Synthetic oligonucleotide
uggcuuccgaaaucggaca

SEQ ID NO: 2612700 - RNA, 19 nt, Artificial Sequence
  Description of Artificial Sequence: Synthetic oligonucleotide
ucauuccauccuccuuuag

SEQ ID NO: 2612701 - RNA, 19 nt, Artificial Sequence
  Description of Artificial Sequence: Synthetic oligonucleotide
acacugaauagcgggcagg

SEQ ID NO: 2612702 - RNA, 19 nt, Artificial Sequence
  Description of Artificial Sequence: Synthetic oligonucleotide
aaauucuaucucagauuga

SEQ ID NO: 2612703 - RNA, 19 nt, Artificial Sequence
  Description of Artificial Sequence: Synthetic oligonucleotide
agcgacaugcuucuccaaa

SEQ ID NO: 2612704 - RNA, 19 nt, Artificial Sequence
  Description of Artificial Sequence: Synthetic oligonucleotide
aaaguuguacaaagugauu

SEQ ID NO: 2612705 - RNA, 19 nt, Artificial Sequence
  Description of Artificial Sequence: Synthetic oligonucleotide
ggaaacuuugacugaagaa

SEQ ID NO: 2612706 - RNA, 19 nt, Artificial Sequence
  Description of Artificial Sequence: Synthetic oligonucleotide
caauggcuuccgaaaucgg

SEQ ID NO: 2612707 - RNA, 19 nt, Artificial Sequence
  Description of Artificial Sequence: Synthetic oligonucleotide
auauucagcuccaagucuu

SEQ ID NO: 2612708 - RNA, 19 nt, Artificial Sequence
  Description of Artificial Sequence: Synthetic oligonucleotide
ggguaaagucgauauucag

SEQ ID NO: 2612709 - RNA, 19 nt, Artificial Sequence
  Description of Artificial Sequence: Synthetic oligonucleotide
uaucucagauugacccaca

SEQ ID NO: 2612710 - RNA, 19 nt, Artificial Sequence
  Description of Artificial Sequence: Synthetic oligonucleotide
ucacugaguuggcaggcuc

SEQ ID NO: 2612711 - RNA, 19 nt, Artificial Sequence
  Description of Artificial Sequence: Synthetic oligonucleotide
augucuuagcgacaugcuu

SEQ ID NO: 2612712 - RNA, 19 nt, Artificial Sequence
  Description of Artificial Sequence: Synthetic oligonucleotide
gaagcuucaggugggaugu

SEQ ID NO: 2612713 - RNA, 19 nt, Artificial Sequence
  Description of Artificial Sequence: Synthetic oligonucleotide
caacauucccugccagugc

SEQ ID NO: 2612714 - RNA, 19 nt, Artificial Sequence
  Description of Artificial Sequence: Synthetic oligonucleotide
cugagucaagugucacacg

SEQ ID NO: 2612715 - RNA, 19 nt, Artificial Sequence
  Description of Artificial Sequence: Synthetic oligonucleotide
ucagccgaaugggaaacac

SEQ ID NO: 2612716 - RNA, 19 nt, Artificial Sequence
  Description of Artificial Sequence: Synthetic oligonucleotide
uagugacugguaaguagau

SEQ ID NO: 2612717 - RNA, 19 nt, Artificial Sequence
  Description of Artificial Sequence: Synthetic oligonucleotide
cuccaagucuuaacaucag

SEQ ID NO: 2612718 - RNA, 19 nt, Artificial Sequence
  Description of Artificial Sequence: Synthetic oligonucleotide
cugcccaggaaacuuugac

SEQ ID NO: 2612719 - RNA, 19 nt, Artificial Sequence
  Description of Artificial Sequence: Synthetic oligonucleotide
augcuucuccaaacaaugg

SEQ ID NO: 2612720 - RNA, 19 nt, Artificial Sequence
  Description of Artificial Sequence: Synthetic oligonucleotide
gauguccuuuggcaagcac

SEQ ID NO: 2612721 - RNA, 19 nt, Artificial Sequence
  Description of Artificial Sequence: Synthetic oligonucleotide
ugggaugucuuagcgacau

SEQ ID NO: 2612722 - RNA, 19 nt, Artificial Sequence
  Description of Artificial Sequence: Synthetic oligonucleotide
agugacugguaaguagaug

SEQ ID NO: 2612723 - RNA, 19 nt, Artificial Sequence
  Description of Artificial Sequence: Synthetic oligonucleotide
aagucgauauucagcucca

SEQ ID NO: 2612724 - RNA, 19 nt, Artificial Sequence
  Description of Artificial Sequence: Synthetic oligonucleotide
guacugagacggaaggggc

SEQ ID NO: 2612725 - RNA, 19 nt, Artificial Sequence
  Description of Artificial Sequence: Synthetic oligonucleotide
uccaaacaauggcuuccga

SEQ ID NO: 2612726 - RNA, 19 nt, Artificial Sequence
  Description of Artificial Sequence: Synthetic oligonucleotide
uauucagcuccaagucuua

SEQ ID NO: 2612727 - RNA, 19 nt, Artificial Sequence
  Description of Artificial Sequence: Synthetic oligonucleotide
cacuuuucaucugguagac

SEQ ID NO: 2612728 - RNA, 19 nt, Artificial Sequence
  Description of Artificial Sequence: Synthetic oligonucleotide
cuaugcgauguuuuccaga

SEQ ID NO: 2612729 - RNA, 19 nt, Artificial Sequence
  Description of Artificial Sequence: Synthetic oligonucleotide
gguuggaagcacuaggucu

SEQ ID NO: 2612730 - RNA, 19 nt, Artificial Sequence
  Description of Artificial Sequence: Synthetic oligonucleotide
uagccaaccugaucugagu

SEQ ID NO: 2612731 - RNA, 19 nt, Artificial Sequence
  Description of Artificial Sequence: Synthetic oligonucleotide
ccgaaugggaaacacuuug

SEQ ID NO: 2612732 - RNA, 19 nt, Artificial Sequence
  Description of Artificial Sequence: Synthetic oligonucleotide
uugucauuccauccuccuu

SEQ ID NO: 2612733 - RNA, 19 nt, Artificial Sequence
  Description of Artificial Sequence: Synthetic oligonucleotide
agucuuaacaucagccgaa

SEQ ID NO: 2612734 - RNA, 19 nt, Artificial Sequence
  Description of Artificial Sequence: Synthetic oligonucleotide
gugcaucccgauaaaguug

SEQ ID NO: 2612735 - RNA, 19 nt, Artificial Sequence
  Description of Artificial Sequence: Synthetic oligonucleotide
aggugggaugucuuagcga

SEQ ID NO: 2612736 - RNA, 19 nt, Artificial Sequence
  Description of Artificial Sequence: Synthetic oligonucleotide
gauagccaaccugaucuga

SEQ ID NO: 2612737 - RNA, 19 nt, Artificial Sequence
  Description of Artificial Sequence: Synthetic oligonucleotide
acgcagucccaguuuuguc

SEQ ID NO: 2612738 - RNA, 19 nt, Artificial Sequence
  Description of Artificial Sequence: Synthetic oligonucleotide
uuagaagcuucagguggga

SEQ ID NO: 2612739 - RNA, 19 nt, Artificial Sequence
  Description of Artificial Sequence: Synthetic oligonucleotide
cugaauagcgggcaggggu

SEQ ID NO: 2612740 - RNA, 19 nt, Artificial Sequence
  Description of Artificial Sequence: Synthetic oligonucleotide
uucccauuucuggaugaga

SEQ ID NO: 2612741 - RNA, 19 nt, Artificial Sequence
  Description of Artificial Sequence: Synthetic oligonucleotide
agccgaaugggaaacacuu

SEQ ID NO: 2612742 - RNA, 19 nt, Artificial Sequence
  Description of Artificial Sequence: Synthetic oligonucleotide
acaugcuucuccaaacaau

SEQ ID NO: 2612743 - RNA, 19 nt, Artificial Sequence
  Description of Artificial Sequence: Synthetic oligonucleotide
auagcgggcagggguaaag

SEQ ID NO: 2612744 - RNA, 19 nt, Artificial Sequence
  Description of Artificial Sequence: Synthetic oligonucleotide
caugcauucccuugguugu

SEQ ID NO: 2612745 - RNA, 19 nt, Artificial Sequence
  Description of Artificial Sequence: Synthetic oligonucleotide
caucagccgaaugggaaac

SEQ ID NO: 2612746 - RNA, 19 nt, Artificial Sequence
  Description of Artificial Sequence: Synthetic oligonucleotide
gaucguucauguacugaga

SEQ ID NO: 2612747 - RNA, 19 nt, Artificial Sequence
  Description of Artificial Sequence: Synthetic oligonucleotide
cgaaugggaaacacuuugg

SEQ ID NO: 2612748 - RNA, 19 nt, Artificial Sequence
  Description of Artificial Sequence: Synthetic oligonucleotide
  modified_base (17)..(17): a, c, u, g, unknown or other
cccuugguuguaaaacncc

SEQ ID NO: 2612749 - RNA, 19 nt, Artificial Sequence
  Description of Artificial Sequence: Synthetic oligonucleotide
uuccgaaaucggacacuga

SEQ ID NO: 2612750 - RNA, 19 nt, Artificial Sequence
  Description of Artificial Sequence: Synthetic oligonucleotide
ugucacacgcagucccagu

SEQ ID NO: 2612751 - RNA, 19 nt, Artificial Sequence
  Description of Artificial Sequence: Synthetic oligonucleotide
cuuuggcaagcacuuuuca

SEQ ID NO: 2612752 - RNA, 19 nt, Artificial Sequence
  Description of Artificial Sequence: Synthetic oligonucleotide
cuguagcaaaauucuaucu

SEQ ID NO: 2612753 - RNA, 19 nt, Artificial Sequence
  Description of Artificial Sequence: Synthetic oligonucleotide
ucacacgcagucccaguuu

SEQ ID NO: 2612754 - RNA, 19 nt, Artificial Sequence
  Description of Artificial Sequence: Synthetic oligonucleotide
aucggacacugaauagcgg

SEQ ID NO: 2612755 - RNA, 19 nt, Artificial Sequence
  Description of Artificial Sequence: Synthetic oligonucleotide
acagggcccucacugaguu

SEQ ID NO: 2612756 - RNA, 19 nt, Artificial Sequence
  Description of Artificial Sequence: Synthetic oligonucleotide
cuuuggcccagggaguuuc

SEQ ID NO: 2612757 - RNA, 19 nt, Artificial Sequence
  Description of Artificial Sequence: Synthetic oligonucleotide
agggaguuucccauuucug

SEQ ID NO: 2612758 - RNA, 19 nt, Artificial Sequence
  Description of Artificial Sequence: Synthetic oligonucleotide
gcgggcagggguaaagucg

SEQ ID NO: 2612759 - RNA, 19 nt, Artificial Sequence
  Description of Artificial Sequence: Synthetic oligonucleotide
gucccaguuuugucauucc

SEQ ID NO: 2612760 - RNA, 19 nt, Artificial Sequence
  Description of Artificial Sequence: Synthetic oligonucleotide
  modified_base (12)..(12): a, c, u, g, unknown or other
gguuguaaaacnccagcau

SEQ ID NO: 2612761 - RNA, 19 nt, Artificial Sequence
  Description of Artificial Sequence: Synthetic oligonucleotide
guucuuuacugcccaggaa

SEQ ID NO: 2612762 - RNA, 19 nt, Artificial Sequence
  Description of Artificial Sequence: Synthetic oligonucleotide
acgacagggcccucacuga

SEQ ID NO: 2612763 - RNA, 19 nt, Artificial Sequence
  Description of Artificial Sequence: Synthetic oligonucleotide
cugguagacacuguagcaa

SEQ ID NO: 2612764 - RNA, 19 nt, Artificial Sequence
  Description of Artificial Sequence: Synthetic oligonucleotide
gagucaagugucacacgca

SEQ ID NO: 2612765 - RNA, 19 nt, Artificial Sequence
  Description of Artificial Sequence: Synthetic oligonucleotide
acugaguuggcaggcuccu

SEQ ID NO: 2612766 - RNA, 19 nt, Artificial Sequence
  Description of Artificial Sequence: Synthetic oligonucleotide
gucuuagcgacaugcuucu

SEQ ID NO: 2612767 - RNA, 19 nt, Artificial Sequence
  Description of Artificial Sequence: Synthetic oligonucleotide
ugcccacaacauucccugc

SEQ ID NO: 2612768 - RNA, 19 nt, Artificial Sequence
  Description of Artificial Sequence: Synthetic oligonucleotide
gaugucuuagcgacaugcu

SEQ ID NO: 2612769 - RNA, 19 nt, Artificial Sequence
  Description of Artificial Sequence: Synthetic oligonucleotide
ccuguucacauaauuuaca

SEQ ID NO: 2612770 - RNA, 19 nt, Artificial Sequence
  Description of Artificial Sequence: Synthetic oligonucleotide
ugcauucccuugguuguaa

SEQ ID NO: 2612771 - RNA, 19 nt, Artificial Sequence
  Description of Artificial Sequence: Synthetic oligonucleotide
gcccucacugaguuggcag

SEQ ID NO: 2612772 - RNA, 19 nt, Artificial Sequence
  Description of Artificial Sequence: Synthetic oligonucleotide
aggcaccaaggcacugucc

SEQ ID NO: 2612773 - RNA, 19 nt, Artificial Sequence
  Description of Artificial Sequence: Synthetic oligonucleotide
gugggguuggaagcacuag

SEQ ID NO: 2612774 - RNA, 19 nt, Artificial Sequence
  Description of Artificial Sequence: Synthetic oligonucleotide
cccucacugaguuggcagg

SEQ ID NO: 2612775 - RNA, 19 nt, Artificial Sequence
  Description of Artificial Sequence: Synthetic oligonucleotide
caggcaccaaggcacuguc

SEQ ID NO: 2612776 - RNA, 19 nt, Artificial Sequence
  Description of Artificial Sequence: Synthetic oligonucleotide
acuaggucuuguagugacu

SEQ ID NO: 2612777 - RNA, 19 nt, Artificial Sequence
  Description of Artificial Sequence: Synthetic oligonucleotide
uagaagcuucaggugggau

SEQ ID NO: 2612778 - RNA, 19 nt, Artificial Sequence
  Description of Artificial Sequence: Synthetic oligonucleotide
cauucccugccagugcauc

SEQ ID NO: 2612779 - RNA, 19 nt, Artificial Sequence
  Description of Artificial Sequence: Synthetic oligonucleotide
gugucacacgcagucccag

SEQ ID NO: 2612780 - RNA, 19 nt, Artificial Sequence
  Description of Artificial Sequence: Synthetic oligonucleotide
uuggcccagggaguuuccc

SEQ ID NO: 2612781 - RNA, 19 nt, Artificial Sequence
  Description of Artificial Sequence: Synthetic oligonucleotide
aauagcgggcagggguaaa

SEQ ID NO: 2612782 - RNA, 19 nt, Artificial Sequence
  Description of Artificial Sequence: Synthetic oligonucleotide
uggccauugcucccugcuu

SEQ ID NO: 2612783 - RNA, 19 nt, Artificial Sequence
  Description of Artificial Sequence: Synthetic oligonucleotide
ggguuggaagcacuagguc

SEQ ID NO: 2612784 - RNA, 19 nt, Artificial Sequence
  Description of Artificial Sequence: Synthetic oligonucleotide
agugucacacgcaguccca

SEQ ID NO: 2612785 - RNA, 19 nt, Artificial Sequence
  Description of Artificial Sequence: Synthetic oligonucleotide
cagcauuuccuguucacau

SEQ ID NO: 2612786 - RNA, 19 nt, Artificial Sequence
  Description of Artificial Sequence: Synthetic oligonucleotide
agcaugcauucccuugguu

SEQ ID NO: 2612787 - RNA, 19 nt, Artificial Sequence
  Description of Artificial Sequence: Synthetic oligonucleotide
ggcacuguccagaucguuc

SEQ ID NO: 2612788 - RNA, 19 nt, Artificial Sequence
  Description of Artificial Sequence: Synthetic oligonucleotide
gccaaccugaucugaguca

SEQ ID NO: 2612789 - RNA, 19 nt, Artificial Sequence
  Description of Artificial Sequence: Synthetic oligonucleotide
uagcgggcagggguaaagu

SEQ ID NO: 2612790 - RNA, 19 nt, Artificial Sequence
  Description of Artificial Sequence: Synthetic oligonucleotide
agaauccaccauguucuuu

SEQ ID NO: 2612791 - RNA, 19 nt, Artificial Sequence
  Description of Artificial Sequence: Synthetic oligonucleotide
cagaucguucauguacuga

SEQ ID NO: 2612792 - RNA, 19 nt, Artificial Sequence
  Description of Artificial Sequence: Synthetic oligonucleotide
gggguaaagucgauauuca

SEQ ID NO: 2612793 - RNA, 19 nt, Artificial Sequence
  Description of Artificial Sequence: Synthetic oligonucleotide
auucagcuccaagucuuaa

SEQ ID NO: 2612794 - RNA, 19 nt, Artificial Sequence
  Description of Artificial Sequence: Synthetic oligonucleotide
gcagggguaaagucgauau

SEQ ID NO: 2612795 - RNA, 19 nt, Artificial Sequence
  Description of Artificial Sequence: Synthetic oligonucleotide
cgaaaucggacacugaaua

SEQ ID NO: 2612796 - RNA, 19 nt, Artificial Sequence
  Description of Artificial Sequence: Synthetic oligonucleotide
acacuguagcaaaauucua

SEQ ID NO: 2612797 - RNA, 19 nt, Artificial Sequence
  Description of Artificial Sequence: Synthetic oligonucleotide
guagacacuguagcaaaau

SEQ ID NO: 2612798 - RNA, 19 nt, Artificial Sequence
  Description of Artificial Sequence: Synthetic oligonucleotide
guugcccacaacauucccu

SEQ ID NO: 2612799 - RNA, 19 nt, Artificial Sequence
  Description of Artificial Sequence: Synthetic oligonucleotide
ucccugcuugauagccaac

SEQ ID NO: 2612800 - RNA, 19 nt, Artificial Sequence
  Description of Artificial Sequence: Synthetic oligonucleotide
cagggaguuucccauuucu

SEQ ID NO: 2612801 - RNA, 19 nt, Artificial Sequence
  Description of Artificial Sequence: Synthetic oligonucleotide
aucagccgaaugggaaaca

SEQ ID NO: 2612802 - RNA, 19 nt, Artificial Sequence
  Description of Artificial Sequence: Synthetic oligonucleotide
ggcaagcacuuuucaucug

SEQ ID NO: 2612803 - RNA, 19 nt, Artificial Sequence
  Description of Artificial Sequence: Synthetic oligonucleotide
caugacgacagggcccuca

SEQ ID NO: 2612804 - RNA, 19 nt, Artificial Sequence
  Description of Artificial Sequence: Synthetic oligonucleotide
uagcgacaugcuucuccaa

SEQ ID NO: 2612805 - RNA, 19 nt, Artificial Sequence
  Description of Artificial Sequence: Synthetic oligonucleotide
ggacacugaauagcgggca

SEQ ID NO: 2612806 - RNA, 19 nt, Artificial Sequence
  Description of Artificial Sequence: Synthetic oligonucleotide
gguaaguagaugacacaua

SEQ ID NO: 2612807 - RNA, 19 nt, Artificial Sequence
  Description of Artificial Sequence: Synthetic oligonucleotide
gaauagcgggcagggguaa

SEQ ID NO: 2612808 - RNA, 19 nt, Artificial Sequence
  Description of Artificial Sequence: Synthetic oligonucleotide
cggacacugaauagcgggc

SEQ ID NO: 2612809 - RNA, 19 nt, Artificial Sequence
  Description of Artificial Sequence: Synthetic oligonucleotide
acugcccaggaaacuuuga

SEQ ID NO: 2612810 - RNA, 19 nt, Artificial Sequence
  Description of Artificial Sequence: Synthetic oligonucleotide
cauugcucccugcuugaua

SEQ ID NO: 2612811 - RNA, 19 nt, Artificial Sequence
  Description of Artificial Sequence: Synthetic oligonucleotide
gacccacagcaugcauucc

SEQ ID NO: 2612812 - RNA, 19 nt, Artificial Sequence
  Description of Artificial Sequence: Synthetic oligonucleotide
ccauggaugacaggcacca

SEQ ID NO: 2612813 - RNA, 19 nt, Artificial Sequence
  Description of Artificial Sequence: Synthetic oligonucleotide
  modified_base (2)..(2): a, c, u, g, unknown or other
cnccagcauuuccuguuca

SEQ ID NO: 2612814 - RNA, 19 nt, Artificial Sequence
  Description of Artificial Sequence: Synthetic oligonucleotide
ccagaucguucauguacug

SEQ ID NO: 2612815 - RNA, 19 nt, Artificial Sequence
  Description of Artificial Sequence: Synthetic oligonucleotide
agguaaggugggguuggaa

SEQ ID NO: 2612816 - RNA, 19 nt, Artificial Sequence
  Description of Artificial Sequence: Synthetic oligonucleotide
ucuuagcgacaugcuucuc

SEQ ID NO: 2612817 - RNA, 19 nt, Artificial Sequence
  Description of Artificial Sequence: Synthetic oligonucleotide
cuuuacugcccaggaaacu

SEQ ID NO: 2612818 - RNA, 19 nt, Artificial Sequence
  Description of Artificial Sequence: Synthetic oligonucleotide
gucacacgcagucccaguu

SEQ ID NO: 2612819 - RNA, 19 nt, Artificial Sequence
  Description of Artificial Sequence: Synthetic oligonucleotide
agucgauauucagcuccaa

SEQ ID NO: 2612820 - RNA, 19 nt, Artificial Sequence
  Description of Artificial Sequence: Synthetic oligonucleotide
gguagacacuguagcaaaa

SEQ ID NO: 2612821 - RNA, 19 nt, Artificial Sequence
  Description of Artificial Sequence: Synthetic oligonucleotide
cagccgaaugggaaacacu

SEQ ID NO: 2612822 - RNA, 19 nt, Artificial Sequence
  Description of Artificial Sequence: Synthetic oligonucleotide
cccgauaaaguuguacaaa

SEQ ID NO: 2612823 - RNA, 19 nt, Artificial Sequence
  Description of Artificial Sequence: Synthetic oligonucleotide
cagcuccaagucuuaacau

SEQ ID NO: 2612824 - RNA, 19 nt, Artificial Sequence
  Description of Artificial Sequence: Synthetic oligonucleotide
cagggcccucacugaguug

SEQ ID NO: 2612825 - RNA, 19 nt, Artificial Sequence
  Description of Artificial Sequence: Synthetic oligonucleotide
cacgcagucccaguuuugu

SEQ ID NO: 2612826 - RNA, 19 nt, Artificial Sequence
  Description of Artificial Sequence: Synthetic oligonucleotide
gucuuaacaucagccgaau

SEQ ID NO: 2612827 - RNA, 19 nt, Artificial Sequence
  Description of Artificial Sequence: Synthetic oligonucleotide
gucaagugucacacgcagu

SEQ ID NO: 2612828 - RNA, 19 nt, Artificial Sequence
  Description of Artificial Sequence: Synthetic oligonucleotide
ggucuuguagugacuggua

SEQ ID NO: 2612829 - RNA, 19 nt, Artificial Sequence
  Description of Artificial Sequence: Synthetic oligonucleotide
cauuuccuguucacauaau

SEQ ID NO: 2612830 - RNA, 19 nt, Artificial Sequence
  Description of Artificial Sequence: Synthetic oligonucleotide
cugccagugcaucccgaua

SEQ ID NO: 2612831 - RNA, 19 nt, Artificial Sequence
  Description of Artificial Sequence: Synthetic oligonucleotide
acuuuggcccagggaguuu

SEQ ID NO: 2612832 - RNA, 19 nt, Artificial Sequence
  Description of Artificial Sequence: Synthetic oligonucleotide
gcacuaggucuuguaguga

SEQ ID NO: 2612833 - RNA, 19 nt, Artificial Sequence
  Description of Artificial Sequence: Synthetic oligonucleotide
gcuggccauugcucccugc

SEQ ID NO: 2612834 - RNA, 19 nt, Artificial Sequence
  Description of Artificial Sequence: Synthetic oligonucleotide
ccagggaguuucccauuuc

SEQ ID NO: 2612835 - RNA, 19 nt, Artificial Sequence
  Description of Artificial Sequence: Synthetic oligonucleotide
ggugggguuggaagcacua

SEQ ID NO: 2612836 - RNA, 19 nt, Artificial Sequence
  Description of Artificial Sequence: Synthetic oligonucleotide
gccagugcaucccgauaaa

SEQ ID NO: 2612837 - RNA, 19 nt, Artificial Sequence
  Description of Artificial Sequence: Synthetic oligonucleotide
ggcagggguaaagucgaua

SEQ ID NO: 2612838 - RNA, 19 nt, Artificial Sequence
  Description of Artificial Sequence: Synthetic oligonucleotide
acggaaggggcuggccauu

SEQ ID NO: 2612839 - RNA, 19 nt, Artificial Sequence
  Description of Artificial Sequence: Synthetic oligonucleotide
cagcaugcauucccuuggu

SEQ ID NO: 2612840 - RNA, 19 nt, Artificial Sequence
  Description of Artificial Sequence: Synthetic oligonucleotide
ggcccagggaguuucccau

SEQ ID NO: 2612841 - RNA, 19 nt, Artificial Sequence
  Description of Artificial Sequence: Synthetic oligonucleotide
ccaaggcacuguccagauc

SEQ ID NO: 2612842 - RNA, 19 nt, Artificial Sequence
  Description of Artificial Sequence: Synthetic oligonucleotide
ccgaaaucggacacugaau

SEQ ID NO: 2612843 - RNA, 19 nt, Artificial Sequence
  Description of Artificial Sequence: Synthetic oligonucleotide
cagggguaaagucgauauu

SEQ ID NO: 2612844 - RNA, 19 nt, Artificial Sequence
  Description of Artificial Sequence: Synthetic oligonucleotide
gcuuccgaaaucggacacu

SEQ ID NO: 2612845 - RNA, 19 nt, Artificial Sequence
  Description of Artificial Sequence: Synthetic oligonucleotide
ggcccucacugaguuggca

SEQ ID NO: 2612846 - RNA, 19 nt, Artificial Sequence
  Description of Artificial Sequence: Synthetic oligonucleotide
gccgaaugggaaacacuuu

SEQ ID NO: 2612847 - RNA, 19 nt, Artificial Sequence
  Description of Artificial Sequence: Synthetic oligonucleotide
cccugccagugcaucccga

SEQ ID NO: 2612848 - RNA, 19 nt, Artificial Sequence
  Description of Artificial Sequence: Synthetic oligonucleotide
cagucccaguuuugucauu

SEQ ID NO: 2612849 - RNA, 19 nt, Artificial Sequence
  Description of Artificial Sequence: Synthetic oligonucleotide
cccagggaguuucccauuu

SEQ ID NO: 2612850 - RNA, 19 nt, Artificial Sequence
  Description of Artificial Sequence: Synthetic oligonucleotide
gcaucccgauaaaguugua

SEQ ID NO: 2612851 - RNA, 19 nt, Artificial Sequence
  Description of Artificial Sequence: Synthetic oligonucleotide
ccaugacgacagggcccuc

SEQ ID NO: 2612852 - RNA, 19 nt, Artificial Sequence
  Description of Artificial Sequence: Synthetic oligonucleotide
uugauaucaauaaaggcgg

SEQ ID NO: 2612853 - RNA, 19 nt, Artificial Sequence
  Description of Artificial Sequence: Synthetic oligonucleotide
uuaaugaucagcuuguaga

SEQ ID NO: 2612854 - RNA, 19 nt, Artificial Sequence
  Description of Artificial Sequence: Synthetic oligonucleotide
uuugaugagaugcaggagc

SEQ ID NO: 2612855 - RNA, 19 nt, Artificial Sequence
  Description of Artificial Sequence: Synthetic oligonucleotide
aagacacgugacuucaucc

SEQ ID NO: 2612856 - RNA, 19 nt, Artificial Sequence
  Description of Artificial Sequence: Synthetic oligonucleotide
gagaacaaaacacuggaag

SEQ ID NO: 2612857 - RNA, 19 nt, Artificial Sequence
  Description of Artificial Sequence: Synthetic oligonucleotide
aauauagccgucguagagc

SEQ ID NO: 2612858 - RNA, 19 nt, Artificial Sequence
  Description of Artificial Sequence: Synthetic oligonucleotide
ugggaagugacauagcagg

SEQ ID NO: 2612859 - RNA, 19 nt, Artificial Sequence
  Description of Artificial Sequence: Synthetic oligonucleotide
accaauugcauacugaacu

SEQ ID NO: 2612860 - RNA, 19 nt, Artificial Sequence
  Description of Artificial Sequence: Synthetic oligonucleotide
uguugauaucaauaaaggc

SEQ ID NO: 2612861 - RNA, 19 nt, Artificial Sequence
  Description of Artificial Sequence: Synthetic oligonucleotide
uguacauuuugcacaagag

SEQ ID NO: 2612862 - RNA, 19 nt, Artificial Sequence
  Description of Artificial Sequence: Synthetic oligonucleotide
ugugcagucucauucauca

SEQ ID NO: 2612863 - RNA, 19 nt, Artificial Sequence
  Description of Artificial Sequence: Synthetic oligonucleotide
uuugugggaagugacauag

SEQ ID NO: 2612864 - RNA, 19 nt, Artificial Sequence
  Description of Artificial Sequence: Synthetic oligonucleotide
uaauauagccgucguagag

SEQ ID NO: 2612865 - RNA, 19 nt, Artificial Sequence
  Description of Artificial Sequence: Synthetic oligonucleotide
gacauagcagguuucauac

SEQ ID NO: 2612866 - RNA, 19 nt, Artificial Sequence
  Description of Artificial Sequence: Synthetic oligonucleotide
uaucaauaaaggcggagug

SEQ ID NO: 2612867 - RNA, 19 nt, Artificial Sequence
  Description of Artificial Sequence: Synthetic oligonucleotide
aagguguugauaucaauaa

SEQ ID NO: 2612868 - RNA, 19 nt, Artificial Sequence
  Description of Artificial Sequence: Synthetic oligonucleotide
gaugcuaauauagccgucg

SEQ ID NO: 2612869 - RNA, 19 nt, Artificial Sequence
  Description of Artificial Sequence: Synthetic oligonucleotide
acauugucuggacaucugc

SEQ ID NO: 2612870 - RNA, 19 nt, Artificial Sequence
  Description of Artificial Sequence: Synthetic oligonucleotide
uugaucucguugaugaggc

SEQ ID NO: 2612871 - RNA, 19 nt, Artificial Sequence
  Description of Artificial Sequence: Synthetic oligonucleotide
uguagggugaaaagcaaga

SEQ ID NO: 2612872 - RNA, 19 nt, Artificial Sequence
  Description of Artificial Sequence: Synthetic oligonucleotide
ugagcgaccaauugcauac

SEQ ID NO: 2612873 - RNA, 19 nt, Artificial Sequence
  Description of Artificial Sequence: Synthetic oligonucleotide
cagaguucgaaucacuggg

SEQ ID NO: 2612874 - RNA, 19 nt, Artificial Sequence
  Description of Artificial Sequence: Synthetic oligonucleotide
uaucugagcgaccaauugc

SEQ ID NO: 2612875 - RNA, 19 nt, Artificial Sequence
  Description of Artificial Sequence: Synthetic oligonucleotide
ugcacgagaacaaaacacu

SEQ ID NO: 2612876 - RNA, 19 nt, Artificial Sequence
  Description of Artificial Sequence: Synthetic oligonucleotide
uugcacgagaacaaaacac

SEQ ID NO: 2612877 - RNA, 19 nt, Artificial Sequence
  Description of Artificial Sequence: Synthetic oligonucleotide
aaaggcggaguguaggaug

SEQ ID NO: 2612878 - RNA, 19 nt, Artificial Sequence
  Description of Artificial Sequence: Synthetic oligonucleotide
ugcagucucauucaucaug

SEQ ID NO: 2612879 - RNA, 19 nt, Artificial Sequence
  Description of Artificial Sequence: Synthetic oligonucleotide
uguucuguagggugaaaag

SEQ ID NO: 2612880 - RNA, 19 nt, Artificial Sequence
  Description of Artificial Sequence: Synthetic oligonucleotide
uccaucccuaguuugauga

SEQ ID NO: 2612881 - RNA, 19 nt, Artificial Sequence
  Description of Artificial Sequence: Synthetic oligonucleotide
auacucggaagccucgggc

SEQ ID NO: 2612882 - RNA, 19 nt, Artificial Sequence
  Description of Artificial Sequence: Synthetic oligonucleotide
gaguguaggaugcugaguc

SEQ ID NO: 2612883 - RNA, 19 nt, Artificial Sequence
  Description of Artificial Sequence: Synthetic oligonucleotide
aguucgaaucacugggugg

SEQ ID NO: 2612884 - RNA, 19 nt, Artificial Sequence
  Description of Artificial Sequence: Synthetic oligonucleotide
aacaaaacacuggaaggug

SEQ ID NO: 2612885 - RNA, 19 nt, Artificial Sequence
  Description of Artificial Sequence: Synthetic oligonucleotide
acgagaacaaaacacugga

SEQ ID NO: 2612886 - RNA, 19 nt, Artificial Sequence
  Description of Artificial Sequence: Synthetic oligonucleotide
ugcagugucaucguuuucc

SEQ ID NO: 2612887 - RNA, 19 nt, Artificial Sequence
  Description of Artificial Sequence: Synthetic oligonucleotide
auuggcgaugcuaauauag

SEQ ID NO: 2612888 - RNA, 19 nt, Artificial Sequence
  Description of Artificial Sequence: Synthetic oligonucleotide
cacgagaacaaaacacugg

SEQ ID NO: 2612889 - RNA, 19 nt, Artificial Sequence
  Description of Artificial Sequence: Synthetic oligonucleotide
aaucacugggugguucucc

SEQ ID NO: 2612890 - RNA, 19 nt, Artificial Sequence
  Description of Artificial Sequence: Synthetic oligonucleotide
uuuauggaagcgucagcag

SEQ ID NO: 2612891 - RNA, 19 nt, Artificial Sequence
  Description of Artificial Sequence: Synthetic oligonucleotide
caucaugaccucaaugggc

SEQ ID NO: 2612892 - RNA, 19 nt, Artificial Sequence
  Description of Artificial Sequence: Synthetic oligonucleotide
gauaucaauaaaggcggag

SEQ ID NO: 2612893 - RNA, 19 nt, Artificial Sequence
  Description of Artificial Sequence: Synthetic oligonucleotide
gaugagaugcaggagcugc

SEQ ID NO: 2612894 - RNA, 19 nt, Artificial Sequence
  Description of Artificial Sequence: Synthetic oligonucleotide
cuggacaucugcaucaaac

SEQ ID NO: 2612895 - RNA, 19 nt, Artificial Sequence
  Description of Artificial Sequence: Synthetic oligonucleotide
uguucuguugugcagucuc

SEQ ID NO: 2612896 - RNA, 19 nt, Artificial Sequence
  Description of Artificial Sequence: Synthetic oligonucleotide
agagcagcuggcuuaauga

SEQ ID NO: 2612897 - RNA, 19 nt, Artificial Sequence
  Description of Artificial Sequence: Synthetic oligonucleotide
gcuaauauagccgucguag

SEQ ID NO: 2612898 - RNA, 19 nt, Artificial Sequence
  Description of Artificial Sequence: Synthetic oligonucleotide
agcuuguagagcuguuggc

SEQ ID NO: 2612899 - RNA, 19 nt, Artificial Sequence
  Description of Artificial Sequence: Synthetic oligonucleotide
auugcacgagaacaaaaca

SEQ ID NO: 2612900 - RNA, 19 nt, Artificial Sequence
  Description of Artificial Sequence: Synthetic oligonucleotide
uuggcgaugcuaauauagc

SEQ ID NO: 2612901 - RNA, 19 nt, Artificial Sequence
  Description of Artificial Sequence: Synthetic oligonucleotide
ucugcuauagguggccacg

SEQ ID NO: 2612902 - RNA, 19 nt, Artificial Sequence
  Description of Artificial Sequence: Synthetic oligonucleotide
aaggcggaguguaggaugc

SEQ ID NO: 2612903 - RNA, 19 nt, Artificial Sequence
  Description of Artificial Sequence: Synthetic oligonucleotide
uugcauacugaacugcagu

SEQ ID NO: 2612904 - RNA, 19 nt, Artificial Sequence
  Description of Artificial Sequence: Synthetic oligonucleotide
uucauacucggaagccucg

SEQ ID NO: 2612905 - RNA, 19 nt, Artificial Sequence
  Description of Artificial Sequence: Synthetic oligonucleotide
uacucggaagccucgggcg

SEQ ID NO: 2612906 - RNA, 19 nt, Artificial Sequence
  Description of Artificial Sequence: Synthetic oligonucleotide
aaagcaagacacgugacuu

SEQ ID NO: 2612907 - RNA, 19 nt, Artificial Sequence
  Description of Artificial Sequence: Synthetic oligonucleotide
gauugcacgagaacaaaac

SEQ ID NO: 2612908 - RNA, 19 nt, Artificial Sequence
  Description of Artificial Sequence: Synthetic oligonucleotide
auauagccgucguagagca

SEQ ID NO: 2612909 - RNA, 19 nt, Artificial Sequence
  Description of Artificial Sequence: Synthetic oligonucleotide
uuucauacucggaagccuc

SEQ ID NO: 2612910 - RNA, 19 nt, Artificial Sequence
  Description of Artificial Sequence: Synthetic oligonucleotide
aauugcauacugaacugca

SEQ ID NO: 2612911 - RNA, 19 nt, Artificial Sequence
  Description of Artificial Sequence: Synthetic oligonucleotide
auaucaauaaaggcggagu

SEQ ID NO: 2612912 - RNA, 19 nt, Artificial Sequence
  Description of Artificial Sequence: Synthetic oligonucleotide
uccuucaagcccacuuugg

SEQ ID NO: 2612913 - RNA, 19 nt, Artificial Sequence
  Description of Artificial Sequence: Synthetic oligonucleotide
uggcgaugcuaauauagcc

SEQ ID NO: 2612914 - RNA, 19 nt, Artificial Sequence
  Description of Artificial Sequence: Synthetic oligonucleotide
accgacuggggcuugaucu

SEQ ID NO: 2612915 - RNA, 19 nt, Artificial Sequence
  Description of Artificial Sequence: Synthetic oligonucleotide
cuauagguggccacgcggc

SEQ ID NO: 2612916 - RNA, 19 nt, Artificial Sequence
  Description of Artificial Sequence: Synthetic oligonucleotide
uaucuuuauggaagcguca

SEQ ID NO: 2612917 - RNA, 19 nt, Artificial Sequence
  Description of Artificial Sequence: Synthetic oligonucleotide
gaagccucgggcgacauug

SEQ ID NO: 2612918 - RNA, 19 nt, Artificial Sequence
  Description of Artificial Sequence: Synthetic oligonucleotide
acauuuugcacaagaggac

SEQ ID NO: 2612919 - RNA, 19 nt, Artificial Sequence
  Description of Artificial Sequence: Synthetic oligonucleotide
uagcagguuucauacucgg

SEQ ID NO: 2612920 - RNA, 19 nt, Artificial Sequence
  Description of Artificial Sequence: Synthetic oligonucleotide
uagagcagcuggcuuaaug

SEQ ID NO: 2612921 - RNA, 19 nt, Artificial Sequence
  Description of Artificial Sequence: Synthetic oligonucleotide
aguaucuuuauggaagcgu

SEQ ID NO: 2612922 - RNA, 19 nt, Artificial Sequence
  Description of Artificial Sequence: Synthetic oligonucleotide
ucuuuauggaagcgucagc

SEQ ID NO: 2612923 - RNA, 19 nt, Artificial Sequence
  Description of Artificial Sequence: Synthetic oligonucleotide
ucggagggugcgcacaccg

SEQ ID NO: 2612924 - RNA, 19 nt, Artificial Sequence
  Description of Artificial Sequence: Synthetic oligonucleotide
agacccuguggcuauuaac

SEQ ID NO: 2612925 - RNA, 19 nt, Artificial Sequence
  Description of Artificial Sequence: Synthetic oligonucleotide
gugucaucguuuuccaucc

SEQ ID NO: 2612926 - RNA, 19 nt, Artificial Sequence
  Description of Artificial Sequence: Synthetic oligonucleotide
ugcugaguccuugagcccg

SEQ ID NO: 2612927 - RNA, 19 nt, Artificial Sequence
  Description of Artificial Sequence: Synthetic oligonucleotide
aaacacuggaagguguuga

SEQ ID NO: 2612928 - RNA, 19 nt, Artificial Sequence
  Description of Artificial Sequence: Synthetic oligonucleotide
ucguuuuccaucccuaguu

SEQ ID NO: 2612929 - RNA, 19 nt, Artificial Sequence
  Description of Artificial Sequence: Synthetic oligonucleotide
aucuuuauggaagcgucag

SEQ ID NO: 2612930 - RNA, 19 nt, Artificial Sequence
  Description of Artificial Sequence: Synthetic oligonucleotide
auaaaggcggaguguagga

SEQ ID NO: 2612931 - RNA, 19 nt, Artificial Sequence
  Description of Artificial Sequence: Synthetic oligonucleotide
ugacauagcagguuucaua

SEQ ID NO: 2612932 - RNA, 19 nt, Artificial Sequence
  Description of Artificial Sequence: Synthetic oligonucleotide
cacaagaggacaguuuccc

SEQ ID NO: 2612933 - RNA, 19 nt, Artificial Sequence
  Description of Artificial Sequence: Synthetic oligonucleotide
guuuuccaucccuaguuug

SEQ ID NO: 2612934 - RNA, 19 nt, Artificial Sequence
  Description of Artificial Sequence: Synthetic oligonucleotide
guaucugagcgaccaauug

SEQ ID NO: 2612935 - RNA, 19 nt, Artificial Sequence
  Description of Artificial Sequence: Synthetic oligonucleotide
cagguuucauacucggaag

SEQ ID NO: 2612936 - RNA, 19 nt, Artificial Sequence
  Description of Artificial Sequence: Synthetic oligonucleotide
agacacgugacuucaucca

SEQ ID NO: 2612937 - RNA, 19 nt, Artificial Sequence
  Description of Artificial Sequence: Synthetic oligonucleotide
augaccucaaugggcaugg

SEQ ID NO: 2612938 - RNA, 19 nt, Artificial Sequence
  Description of Artificial Sequence: Synthetic oligonucleotide
ugcuauagguggccacgcg

SEQ ID NO: 2612939 - RNA, 19 nt, Artificial Sequence
  Description of Artificial Sequence: Synthetic oligonucleotide
cuaguuugaugagaugcag

SEQ ID NO: 2612940 - RNA, 19 nt, Artificial Sequence
  Description of Artificial Sequence: Synthetic oligonucleotide
uccguguccaguaucuuua

SEQ ID NO: 2612941 - RNA, 19 nt, Artificial Sequence
  Description of Artificial Sequence: Synthetic oligonucleotide
caggaucuguucuguaggg

SEQ ID NO: 2612942 - RNA, 19 nt, Artificial Sequence
  Description of Artificial Sequence: Synthetic oligonucleotide
acaguuucccugacggccc

SEQ ID NO: 2612943 - RNA, 19 nt, Artificial Sequence
  Description of Artificial Sequence: Synthetic oligonucleotide
uguaucugagcgaccaauu

SEQ ID NO: 2612944 - RNA, 19 nt, Artificial Sequence
  Description of Artificial Sequence: Synthetic oligonucleotide
auagcagguuucauacucg

SEQ ID NO: 2612945 - RNA, 19 nt, Artificial Sequence
  Description of Artificial Sequence: Synthetic oligonucleotide
guaucuuuauggaagcguc

SEQ ID NO: 2612946 - RNA, 19 nt, Artificial Sequence
  Description of Artificial Sequence: Synthetic oligonucleotide
aucaaacuccaggucaauc

SEQ ID NO: 2612947 - RNA, 19 nt, Artificial Sequence
  Description of Artificial Sequence: Synthetic oligonucleotide
ccaucucugcuauaggugg

SEQ ID NO: 2612948 - RNA, 19 nt, Artificial Sequence
  Description of Artificial Sequence: Synthetic oligonucleotide
gaggacaguuucccugacg

SEQ ID NO: 2612949 - RNA, 19 nt, Artificial Sequence
  Description of Artificial Sequence: Synthetic oligonucleotide
caauugcauacugaacugc

SEQ ID NO: 2612950 - RNA, 19 nt, Artificial Sequence
  Description of Artificial Sequence: Synthetic oligonucleotide
uggaagcgucagcagaccc

SEQ ID NO: 2612951 - RNA, 19 nt, Artificial Sequence
  Description of Artificial Sequence: Synthetic oligonucleotide
agcuggcuuaaugaucagc

SEQ ID NO: 2612952 - RNA, 19 nt, Artificial Sequence
  Description of Artificial Sequence: Synthetic oligonucleotide
caauaaaggcggaguguag

SEQ ID NO: 2612953 - RNA, 19 nt, Artificial Sequence
  Description of Artificial Sequence: Synthetic oligonucleotide
gacacgugacuucauccac

SEQ ID NO: 2612954 - RNA, 19 nt, Artificial Sequence
  Description of Artificial Sequence: Synthetic oligonucleotide
aucaauaaaggcggagugu

SEQ ID NO: 2612955 - RNA, 19 nt, Artificial Sequence
  Description of Artificial Sequence: Synthetic oligonucleotide
gaucucguugaugaggcca

SEQ ID NO: 2612956 - RNA, 19 nt, Artificial Sequence
  Description of Artificial Sequence: Synthetic oligonucleotide
cauacagaguucgaaucac

SEQ ID NO: 2612957 - RNA, 19 nt, Artificial Sequence
  Description of Artificial Sequence: Synthetic oligonucleotide
caucguuuuccaucccuag

SEQ ID NO: 2612958 - RNA, 19 nt, Artificial Sequence
  Description of Artificial Sequence: Synthetic oligonucleotide
ucaucguuuuccaucccua

SEQ ID NO: 2612959 - RNA, 19 nt, Artificial Sequence
  Description of Artificial Sequence: Synthetic oligonucleotide
ucauacucggaagccucgg

SEQ ID NO: 2612960 - RNA, 19 nt, Artificial Sequence
  Description of Artificial Sequence: Synthetic oligonucleotide
gaagcgucagcagacccug

SEQ ID NO: 2612961 - RNA, 19 nt, Artificial Sequence
  Description of Artificial Sequence: Synthetic oligonucleotide
cuguacauuuugcacaaga

SEQ ID NO: 2612962 - RNA, 19 nt, Artificial Sequence
  Description of Artificial Sequence: Synthetic oligonucleotide
gcuauagguggccacgcgg

SEQ ID NO: 2612963 - RNA, 19 nt, Artificial Sequence
  Description of Artificial Sequence: Synthetic oligonucleotide
aucguuuuccaucccuagu

SEQ ID NO: 2612964 - RNA, 19 nt, Artificial Sequence
  Description of Artificial Sequence: Synthetic oligonucleotide
aucugagcgaccaauugca

SEQ ID NO: 2612965 - RNA, 19 nt, Artificial Sequence
  Description of Artificial Sequence: Synthetic oligonucleotide
cuauuaacugcccaucucu

SEQ ID NO: 2612966 - RNA, 19 nt, Artificial Sequence
  Description of Artificial Sequence: Synthetic oligonucleotide
cuaauauagccgucguaga

SEQ ID NO: 2612967 - RNA, 19 nt, Artificial Sequence
  Description of Artificial Sequence: Synthetic oligonucleotide
gcacuuuuggccaacauuc

SEQ ID NO: 2612968 - RNA, 19 nt, Artificial Sequence
  Description of Artificial Sequence: Synthetic oligonucleotide
cccuaguuugaugagaugc

SEQ ID NO: 2612969 - RNA, 19 nt, Artificial Sequence
  Description of Artificial Sequence: Synthetic oligonucleotide
ggugcaacuguaucugagc

SEQ ID NO: 2612970 - RNA, 19 nt, Artificial Sequence
  Description of Artificial Sequence: Synthetic oligonucleotide
uauagguggccacgcggca

SEQ ID NO: 2612971 - RNA, 19 nt, Artificial Sequence
  Description of Artificial Sequence: Synthetic oligonucleotide
cauacucggaagccucggg

SEQ ID NO: 2612972 - RNA, 19 nt, Artificial Sequence
  Description of Artificial Sequence: Synthetic oligonucleotide
auugcauacugaacugcag

SEQ ID NO: 2612973 - RNA, 19 nt, Artificial Sequence
  Description of Artificial Sequence: Synthetic oligonucleotide
acugcagugucaucguuuu

SEQ ID NO: 2612974 - RNA, 19 nt, Artificial Sequence
  Description of Artificial Sequence: Synthetic oligonucleotide
ugaguccuugagcccgagg

SEQ ID NO: 2612975 - RNA, 19 nt, Artificial Sequence
  Description of Artificial Sequence: Synthetic oligonucleotide
agcaagacacgugacuuca

SEQ ID NO: 2612976 - RNA, 19 nt, Artificial Sequence
  Description of Artificial Sequence: Synthetic oligonucleotide
cauuuugcacaagaggaca

SEQ ID NO: 2612977 - RNA, 19 nt, Artificial Sequence
  Description of Artificial Sequence: Synthetic oligonucleotide
ucguagagcagcuggcuua

SEQ ID NO: 2612978 - RNA, 19 nt, Artificial Sequence
  Description of Artificial Sequence: Synthetic oligonucleotide
auggaagcgucagcagacc

SEQ ID NO: 2612979 - RNA, 19 nt, Artificial Sequence
  Description of Artificial Sequence: Synthetic oligonucleotide
aacugcccaucucugcuau

SEQ ID NO: 2612980 - RNA, 19 nt, Artificial Sequence
  Description of Artificial Sequence: Synthetic oligonucleotide
uggucauacagaguucgaa

SEQ ID NO: 2612981 - RNA, 19 nt, Artificial Sequence
  Description of Artificial Sequence: Synthetic oligonucleotide
uggcgguccuucaagccca

SEQ ID NO: 2612982 - RNA, 19 nt, Artificial Sequence
  Description of Artificial Sequence: Synthetic oligonucleotide
agaggacaguuucccugac

SEQ ID NO: 2612983 - RNA, 19 nt, Artificial Sequence
  Description of Artificial Sequence: Synthetic oligonucleotide
acccuguggcuauuaacug

SEQ ID NO: 2612984 - RNA, 19 nt, Artificial Sequence
  Description of Artificial Sequence: Synthetic oligonucleotide
ugcuaauauagccgucgua

SEQ ID NO: 2612985 - RNA, 19 nt, Artificial Sequence
  Description of Artificial Sequence: Synthetic oligonucleotide
uaggaugcugaguccuuga

SEQ ID NO: 2612986 - RNA, 19 nt, Artificial Sequence
  Description of Artificial Sequence: Synthetic oligonucleotide
ugcgcacaccgacuggggc

SEQ ID NO: 2612987 - RNA, 19 nt, Artificial Sequence
  Description of Artificial Sequence: Synthetic oligonucleotide
agcgaccaauugcauacug

SEQ ID NO: 2612988 - RNA, 19 nt, Artificial Sequence
  Description of Artificial Sequence: Synthetic oligonucleotide
acacgugacuucauccacg

SEQ ID NO: 2612989 - RNA, 19 nt, Artificial Sequence
  Description of Artificial Sequence: Synthetic oligonucleotide
gcaacuguaucugagcgac

SEQ ID NO: 2612990 - RNA, 19 nt, Artificial Sequence
  Description of Artificial Sequence: Synthetic oligonucleotide
augcuaauauagccgucgu

SEQ ID NO: 2612991 - RNA, 19 nt, Artificial Sequence
  Description of Artificial Sequence: Synthetic oligonucleotide
ugagcccgaggccaggauc

SEQ ID NO: 2612992 - RNA, 19 nt, Artificial Sequence
  Description of Artificial Sequence: Synthetic oligonucleotide
uuccaucccuaguuugaug

SEQ ID NO: 2612993 - RNA, 19 nt, Artificial Sequence
  Description of Artificial Sequence: Synthetic oligonucleotide
gcggcaugggccuuugugg

SEQ ID NO: 2612994 - RNA, 19 nt, Artificial Sequence
  Description of Artificial Sequence: Synthetic oligonucleotide
guagggugaaaagcaagac

SEQ ID NO: 2612995 - RNA, 19 nt, Artificial Sequence
  Description of Artificial Sequence: Synthetic oligonucleotide
aaacuccaggucaaucccu

SEQ ID NO: 2612996 - RNA, 19 nt, Artificial Sequence
  Description of Artificial Sequence: Synthetic oligonucleotide
ugacggccccggaucaggg

SEQ ID NO: 2612997 - RNA, 19 nt, Artificial Sequence
  Description of Artificial Sequence: Synthetic oligonucleotide
cugcccaucucugcuauag

SEQ ID NO: 2612998 - RNA, 19 nt, Artificial Sequence
  Description of Artificial Sequence: Synthetic oligonucleotide
agcgucagcagacccugug

SEQ ID NO: 2612999 - RNA, 19 nt, Artificial Sequence
  Description of Artificial Sequence: Synthetic oligonucleotide
gccgucguagagcagcugg

SEQ ID NO: 2613000 - RNA, 19 nt, Artificial Sequence
  Description of Artificial Sequence: Synthetic oligonucleotide
gcagguuucauacucggaa

SEQ ID NO: 2613001 - RNA, 19 nt, Artificial Sequence
  Description of Artificial Sequence: Synthetic oligonucleotide
caguaucuuuauggaagcg

SEQ ID NO: 2613002 - RNA, 19 nt, Artificial Sequence
  Description of Artificial Sequence: Synthetic oligonucleotide
gaccaauugcauacugaac

SEQ ID NO: 2613003 - RNA, 19 nt, Artificial Sequence
  Description of Artificial Sequence: Synthetic oligonucleotide
gaccucaaugggcauggca

SEQ ID NO: 2613004 - RNA, 19 nt, Artificial Sequence
  Description of Artificial Sequence: Synthetic oligonucleotide
acauagcagguuucauacu

SEQ ID NO: 2613005 - RNA, 19 nt, Artificial Sequence
  Description of Artificial Sequence: Synthetic oligonucleotide
gacauugucuggacaucug

SEQ ID NO: 2613006 - RNA, 19 nt, Artificial Sequence
  Description of Artificial Sequence: Synthetic oligonucleotide
ccaauugcauacugaacug

SEQ ID NO: 2613007 - RNA, 19 nt, Artificial Sequence
  Description of Artificial Sequence: Synthetic oligonucleotide
gccaggaucuguucuguag

SEQ ID NO: 2613008 - RNA, 19 nt, Artificial Sequence
  Description of Artificial Sequence: Synthetic oligonucleotide
uauagccgucguagagcag

SEQ ID NO: 2613009 - RNA, 19 nt, Artificial Sequence
  Description of Artificial Sequence: Synthetic oligonucleotide
uggccacgcggcaugggcc

SEQ ID NO: 2613010 - RNA, 19 nt, Artificial Sequence
  Description of Artificial Sequence: Synthetic oligonucleotide
cacugggugguucuccaug

SEQ ID NO: 2613011 - RNA, 19 nt, Artificial Sequence
  Description of Artificial Sequence: Synthetic oligonucleotide
aggugcaacuguaucugag

SEQ ID NO: 2613012 - RNA, 19 nt, Artificial Sequence
  Description of Artificial Sequence: Synthetic oligonucleotide
ucucuccguguccaguauc

SEQ ID NO: 2613013 - RNA, 19 nt, Artificial Sequence
  Description of Artificial Sequence: Synthetic oligonucleotide
uguaggaugcugaguccuu

SEQ ID NO: 2613014 - RNA, 19 nt, Artificial Sequence
  Description of Artificial Sequence: Synthetic oligonucleotide
ucugagcgaccaauugcau

SEQ ID NO: 2613015 - RNA, 19 nt, Artificial Sequence
  Description of Artificial Sequence: Synthetic oligonucleotide
ugaucucguugaugaggcc

SEQ ID NO: 2613016 - RNA, 19 nt, Artificial Sequence
  Description of Artificial Sequence: Synthetic oligonucleotide
uuuccaucccuaguuugau

SEQ ID NO: 2613017 - RNA, 19 nt, Artificial Sequence
  Description of Artificial Sequence: Synthetic oligonucleotide
cacguggucauacagaguu

SEQ ID NO: 2613018 - RNA, 19 nt, Artificial Sequence
  Description of Artificial Sequence: Synthetic oligonucleotide
ucgggcgacauugucugga

SEQ ID NO: 2613019 - RNA, 19 nt, Artificial Sequence
  Description of Artificial Sequence: Synthetic oligonucleotide
uaaaggcggaguguaggau

SEQ ID NO: 2613020 - RNA, 19 nt, Artificial Sequence
  Description of Artificial Sequence: Synthetic oligonucleotide
ucccuaguuugaugagaug

SEQ ID NO: 2613021 - RNA, 19 nt, Artificial Sequence
  Description of Artificial Sequence: Synthetic oligonucleotide
ugagaugcaggagcugcuc

SEQ ID NO: 2613022 - RNA, 19 nt, Artificial Sequence
  Description of Artificial Sequence: Synthetic oligonucleotide
cucugcuauagguggccac

SEQ ID NO: 2613023 - RNA, 19 nt, Artificial Sequence
  Description of Artificial Sequence: Synthetic oligonucleotide
uggccaacauucucuccgu

SEQ ID NO: 2613024 - RNA, 19 nt, Artificial Sequence
  Description of Artificial Sequence: Synthetic oligonucleotide
guaggaugcugaguccuug

SEQ ID NO: 2613025 - RNA, 19 nt, Artificial Sequence
  Description of Artificial Sequence: Synthetic oligonucleotide
aucccuaguuugaugagau

SEQ ID NO: 2613026 - RNA, 19 nt, Artificial Sequence
  Description of Artificial Sequence: Synthetic oligonucleotide
aaugggcauggcacuuuug

SEQ ID NO: 2613027 - RNA, 19 nt, Artificial Sequence
  Description of Artificial Sequence: Synthetic oligonucleotide
ggugcgcacaccgacuggg

SEQ ID NO: 2613028 - RNA, 19 nt, Artificial Sequence
  Description of Artificial Sequence: Synthetic oligonucleotide
gcuauuaacugcccaucuc

SEQ ID NO: 2613029 - RNA, 19 nt, Artificial Sequence
  Description of Artificial Sequence: Synthetic oligonucleotide
guccaguaucuuuauggaa

SEQ ID NO: 2613030 - RNA, 19 nt, Artificial Sequence
  Description of Artificial Sequence: Synthetic oligonucleotide
ucgaaucacugggugguuc

SEQ ID NO: 2613031 - RNA, 19 nt, Artificial Sequence
  Description of Artificial Sequence: Synthetic oligonucleotide
gggugaaaagcaagacacg

SEQ ID NO: 2613032 - RNA, 19 nt, Artificial Sequence
  Description of Artificial Sequence: Synthetic oligonucleotide
ccaacauucucuccguguc

SEQ ID NO: 2613033 - RNA, 19 nt, Artificial Sequence
  Description of Artificial Sequence: Synthetic oligonucleotide
agaguucgaaucacugggu

SEQ ID NO: 2613034 - RNA, 19 nt, Artificial Sequence
  Description of Artificial Sequence: Synthetic oligonucleotide
ggugaaaagcaagacacgu

SEQ ID NO: 2613035 - RNA, 19 nt, Artificial Sequence
  Description of Artificial Sequence: Synthetic oligonucleotide
agccucgggcgacauuguc

SEQ ID NO: 2613036 - RNA, 19 nt, Artificial Sequence
  Description of Artificial Sequence: Synthetic oligonucleotide
uucuguugugcagucucau

SEQ ID NO: 2613037 - RNA, 19 nt, Artificial Sequence
  Description of Artificial Sequence: Synthetic oligonucleotide
cuguggcuauuaacugccc

SEQ ID NO: 2613038 - RNA, 19 nt, Artificial Sequence
  Description of Artificial Sequence: Synthetic oligonucleotide
guucgaaucacuggguggu

SEQ ID NO: 2613039 - RNA, 19 nt, Artificial Sequence
  Description of Artificial Sequence: Synthetic oligonucleotide
uucucuccguguccaguau

SEQ ID NO: 2613040 - RNA, 19 nt, Artificial Sequence
  Description of Artificial Sequence: Synthetic oligonucleotide
ucucugcuauagguggcca

SEQ ID NO: 2613041 - RNA, 19 nt, Artificial Sequence
  Description of Artificial Sequence: Synthetic oligonucleotide
uucccugacggccccggau

SEQ ID NO: 2613042 - RNA, 19 nt, Artificial Sequence
  Description of Artificial Sequence: Synthetic oligonucleotide
gcacgagaacaaaacacug

SEQ ID NO: 2613043 - RNA, 19 nt, Artificial Sequence
  Description of Artificial Sequence: Synthetic oligonucleotide
ugggccuuugugggaagug

SEQ ID NO: 2613044 - RNA, 19 nt, Artificial Sequence
  Description of Artificial Sequence: Synthetic oligonucleotide
cguggucauacagaguucg

SEQ ID NO: 2613045 - RNA, 19 nt, Artificial Sequence
  Description of Artificial Sequence: Synthetic oligonucleotide
cugcuauagguggccacgc

SEQ ID NO: 2613046 - RNA, 19 nt, Artificial Sequence
  Description of Artificial Sequence: Synthetic oligonucleotide
aggaucuguucuguagggu

SEQ ID NO: 2613047 - RNA, 19 nt, Artificial Sequence
  Description of Artificial Sequence: Synthetic oligonucleotide
ccuaguuugaugagaugca

SEQ ID NO: 2613048 - RNA, 19 nt, Artificial Sequence
  Description of Artificial Sequence: Synthetic oligonucleotide
aagcccacuuugguucugu

SEQ ID NO: 2613049 - RNA, 19 nt, Artificial Sequence
  Description of Artificial Sequence: Synthetic oligonucleotide
guuucccugacggccccgg

SEQ ID NO: 2613050 - RNA, 19 nt, Artificial Sequence
  Description of Artificial Sequence: Synthetic oligonucleotide
gcgucagcagacccugugg

SEQ ID NO: 2613051 - RNA, 19 nt, Artificial Sequence
  Description of Artificial Sequence: Synthetic oligonucleotide
cugacggccccggaucagg

SEQ ID NO: 2613052 - RNA, 19 nt, Artificial Sequence
  Description of Artificial Sequence: Synthetic oligonucleotide
acuguaucugagcgaccaa

SEQ ID NO: 2613053 - RNA, 19 nt, Artificial Sequence
  Description of Artificial Sequence: Synthetic oligonucleotide
guuucauacucggaagccu

SEQ ID NO: 2613054 - RNA, 19 nt, Artificial Sequence
  Description of Artificial Sequence: Synthetic oligonucleotide
aggccauuggcgaugcuaa

SEQ ID NO: 2613055 - RNA, 19 nt, Artificial Sequence
  Description of Artificial Sequence: Synthetic oligonucleotide
ccucgggcgacauugucug

SEQ ID NO: 2613056 - RNA, 19 nt, Artificial Sequence
  Description of Artificial Sequence: Synthetic oligonucleotide
ggagggugcgcacaccgac

SEQ ID NO: 2613057 - RNA, 19 nt, Artificial Sequence
  Description of Artificial Sequence: Synthetic oligonucleotide
gaucagcuuguagagcugu

SEQ ID NO: 2613058 - RNA, 19 nt, Artificial Sequence
  Description of Artificial Sequence: Synthetic oligonucleotide
ucaaugggcauggcacuuu

SEQ ID NO: 2613059 - RNA, 19 nt, Artificial Sequence
  Description of Artificial Sequence: Synthetic oligonucleotide
acguggucauacagaguuc

SEQ ID NO: 2613060 - RNA, 19 nt, Artificial Sequence
  Description of Artificial Sequence: Synthetic oligonucleotide
agcuguuggcgguccuuca

SEQ ID NO: 2613061 - RNA, 19 nt, Artificial Sequence
  Description of Artificial Sequence: Synthetic oligonucleotide
cugagcgaccaauugcaua

SEQ ID NO: 2613062 - RNA, 19 nt, Artificial Sequence
  Description of Artificial Sequence: Synthetic oligonucleotide
aucucguugaugaggccau

SEQ ID NO: 2613063 - RNA, 19 nt, Artificial Sequence
  Description of Artificial Sequence: Synthetic oligonucleotide
gcuggcuuaaugaucagcu

SEQ ID NO: 2613064 - RNA, 19 nt, Artificial Sequence
  Description of Artificial Sequence: Synthetic oligonucleotide
ggacaguuucccugacggc

SEQ ID NO: 2613065 - RNA, 19 nt, Artificial Sequence
  Description of Artificial Sequence: Synthetic oligonucleotide
ugcucggagggugcgcaca

SEQ ID NO: 2613066 - RNA, 19 nt, Artificial Sequence
  Description of Artificial Sequence: Synthetic oligonucleotide
cuuugugggaagugacaua

SEQ ID NO: 2613067 - RNA, 19 nt, Artificial Sequence
  Description of Artificial Sequence: Synthetic oligonucleotide
gcgaugcuaauauagccgu

SEQ ID NO: 2613068 - RNA, 19 nt, Artificial Sequence
  Description of Artificial Sequence: Synthetic oligonucleotide
gagcagcuggcuuaaugau

SEQ ID NO: 2613069 - RNA, 19 nt, Artificial Sequence
  Description of Artificial Sequence: Synthetic oligonucleotide
cucgggcgacauugucugg

SEQ ID NO: 2613070 - RNA, 19 nt, Artificial Sequence
  Description of Artificial Sequence: Synthetic oligonucleotide
agcagguuucauacucgga

SEQ ID NO: 2613071 - RNA, 19 nt, Artificial Sequence
  Description of Artificial Sequence: Synthetic oligonucleotide
caaaacacuggaagguguu

SEQ ID NO: 2613072 - RNA, 19 nt, Artificial Sequence
  Description of Artificial Sequence: Synthetic oligonucleotide
gagcugcucggagggugcg

SEQ ID NO: 2613073 - RNA, 19 nt, Artificial Sequence
  Description of Artificial Sequence: Synthetic oligonucleotide
ucacugggugguucuccau

SEQ ID NO: 2613074 - RNA, 19 nt, Artificial Sequence
  Description of Artificial Sequence: Synthetic oligonucleotide
ggcgacauugucuggacau

SEQ ID NO: 2613075 - RNA, 19 nt, Artificial Sequence
  Description of Artificial Sequence: Synthetic oligonucleotide
auagguggccacgcggcau

SEQ ID NO: 2613076 - RNA, 19 nt, Artificial Sequence
  Description of Artificial Sequence: Synthetic oligonucleotide
aguuucccugacggccccg

SEQ ID NO: 2613077 - RNA, 19 nt, Artificial Sequence
  Description of Artificial Sequence: Synthetic oligonucleotide
gugacuucauccacguggu

SEQ ID NO: 2613078 - RNA, 19 nt, Artificial Sequence
  Description of Artificial Sequence: Synthetic oligonucleotide
cauggcacuuuuggccaac

SEQ ID NO: 2613079 - RNA, 19 nt, Artificial Sequence
  Description of Artificial Sequence: Synthetic oligonucleotide
gaucagggucccggucucc

SEQ ID NO: 2613080 - RNA, 19 nt, Artificial Sequence
  Description of Artificial Sequence: Synthetic oligonucleotide
cuucaagcccacuuugguu

SEQ ID NO: 2613081 - RNA, 19 nt, Artificial Sequence
  Description of Artificial Sequence: Synthetic oligonucleotide
ggcuuaaugaucagcuugu

SEQ ID NO: 2613082 - RNA, 19 nt, Artificial Sequence
  Description of Artificial Sequence: Synthetic oligonucleotide
cacgugacuucauccacgu

SEQ ID NO: 2613083 - RNA, 19 nt, Artificial Sequence
  Description of Artificial Sequence: Synthetic oligonucleotide
gccaggugcaacuguaucu

SEQ ID NO: 2613084 - RNA, 19 nt, Artificial Sequence
  Description of Artificial Sequence: Synthetic oligonucleotide
ccaucccuaguuugaugag

SEQ ID NO: 2613085 - RNA, 19 nt, Artificial Sequence
  Description of Artificial Sequence: Synthetic oligonucleotide
ggcuauuaacugcccaucu

SEQ ID NO: 2613086 - RNA, 19 nt, Artificial Sequence
  Description of Artificial Sequence: Synthetic oligonucleotide
cgucagcagacccuguggc

SEQ ID NO: 2613087 - RNA, 19 nt, Artificial Sequence
  Description of Artificial Sequence: Synthetic oligonucleotide
caggugcaacuguaucuga

SEQ ID NO: 2613088 - RNA, 19 nt, Artificial Sequence
  Description of Artificial Sequence: Synthetic oligonucleotide
cggcaugggccuuuguggg

SEQ ID NO: 2613089 - RNA, 19 nt, Artificial Sequence
  Description of Artificial Sequence: Synthetic oligonucleotide
cucggaagccucgggcgac

SEQ ID NO: 2613090 - RNA, 19 nt, Artificial Sequence
  Description of Artificial Sequence: Synthetic oligonucleotide
guugugcagucucauucau

SEQ ID NO: 2613091 - RNA, 19 nt, Artificial Sequence
  Description of Artificial Sequence: Synthetic oligonucleotide
cacuuuuggccaacauucu

SEQ ID NO: 2613092 - RNA, 19 nt, Artificial Sequence
  Description of Artificial Sequence: Synthetic oligonucleotide
cgaccaauugcauacugaa

SEQ ID NO: 2613093 - RNA, 19 nt, Artificial Sequence
  Description of Artificial Sequence: Synthetic oligonucleotide
ccgucguagagcagcuggc

SEQ ID NO: 2613094 - RNA, 19 nt, Artificial Sequence
  Description of Artificial Sequence: Synthetic oligonucleotide
uucgaaucacugggugguu

SEQ ID NO: 2613095 - RNA, 19 nt, Artificial Sequence
  Description of Artificial Sequence: Synthetic oligonucleotide
ucggaagccucgggcgaca

SEQ ID NO: 2613096 - RNA, 19 nt, Artificial Sequence
  Description of Artificial Sequence: Synthetic oligonucleotide
ggggauugcacgagaacaa

SEQ ID NO: 2613097 - RNA, 19 nt, Artificial Sequence
  Description of Artificial Sequence: Synthetic oligonucleotide
cauuggcgaugcuaauaua

SEQ ID NO: 2613098 - RNA, 19 nt, Artificial Sequence
  Description of Artificial Sequence: Synthetic oligonucleotide
ucccugugccaggugcaac

SEQ ID NO: 2613099 - RNA, 19 nt, Artificial Sequence
  Description of Artificial Sequence: Synthetic oligonucleotide
ggcggaguguaggaugcug

SEQ ID NO: 2613100 - RNA, 19 nt, Artificial Sequence
  Description of Artificial Sequence: Synthetic oligonucleotide
ugaccucaaugggcauggc

SEQ ID NO: 2613101 - RNA, 19 nt, Artificial Sequence
  Description of Artificial Sequence: Synthetic oligonucleotide
caccgacuggggcuugauc

SEQ ID NO: 2613102 - RNA, 19 nt, Artificial Sequence
  Description of Artificial Sequence: Synthetic oligonucleotide
guggucauacagaguucga

SEQ ID NO: 2613103 - RNA, 19 nt, Artificial Sequence
  Description of Artificial Sequence: Synthetic oligonucleotide
augggccuuugugggaagu

SEQ ID NO: 2613104 - RNA, 19 nt, Artificial Sequence
  Description of Artificial Sequence: Synthetic oligonucleotide
ggaucagggucccggucuc

SEQ ID NO: 2613105 - RNA, 19 nt, Artificial Sequence
  Description of Artificial Sequence: Synthetic oligonucleotide
cggaguguaggaugcugag

SEQ ID NO: 2613106 - RNA, 19 nt, Artificial Sequence
  Description of Artificial Sequence: Synthetic oligonucleotide
gcgaccaauugcauacuga

SEQ ID NO: 2613107 - RNA, 19 nt, Artificial Sequence
  Description of Artificial Sequence: Synthetic oligonucleotide
ggccaacauucucuccgug

SEQ ID NO: 2613108 - RNA, 19 nt, Artificial Sequence
  Description of Artificial Sequence: Synthetic oligonucleotide
gggugcgcacaccgacugg

SEQ ID NO: 2613109 - RNA, 19 nt, Artificial Sequence
  Description of Artificial Sequence: Synthetic oligonucleotide
cuguaucugagcgaccaau

SEQ ID NO: 2613110 - RNA, 19 nt, Artificial Sequence
  Description of Artificial Sequence: Synthetic oligonucleotide
ucuccguguccaguaucuu

SEQ ID NO: 2613111 - RNA, 19 nt, Artificial Sequence
  Description of Artificial Sequence: Synthetic oligonucleotide
ggaagguguugauaucaau

SEQ ID NO: 2613112 - RNA, 19 nt, Artificial Sequence
  Description of Artificial Sequence: Synthetic oligonucleotide
cuugagcccgaggccagga

SEQ ID NO: 2613113 - RNA, 19 nt, Artificial Sequence
  Description of Artificial Sequence: Synthetic oligonucleotide
cauucaucaugaccucaau

SEQ ID NO: 2613114 - RNA, 19 nt, Artificial Sequence
  Description of Artificial Sequence: Synthetic oligonucleotide
cucggagggugcgcacacc

SEQ ID NO: 2613115 - RNA, 19 nt, Artificial Sequence
  Description of Artificial Sequence: Synthetic oligonucleotide
gggauugcacgagaacaaa

SEQ ID NO: 2613116 - RNA, 19 nt, Artificial Sequence
  Description of Artificial Sequence: Synthetic oligonucleotide
gucaaucccugugccaggu

SEQ ID NO: 2613117 - RNA, 19 nt, Artificial Sequence
  Description of Artificial Sequence: Synthetic oligonucleotide
ggcaugggccuuuguggga

SEQ ID NO: 2613118 - RNA, 19 nt, Artificial Sequence
  Description of Artificial Sequence: Synthetic oligonucleotide
cugcucggagggugcgcac

SEQ ID NO: 2613119 - RNA, 19 nt, Artificial Sequence
  Description of Artificial Sequence: Synthetic oligonucleotide
agcccacuuugguucugua

SEQ ID NO: 2613120 - RNA, 19 nt, Artificial Sequence
  Description of Artificial Sequence: Synthetic oligonucleotide
aucccugugccaggugcaa

SEQ ID NO: 2613121 - RNA, 19 nt, Artificial Sequence
  Description of Artificial Sequence: Synthetic oligonucleotide
aagcgucagcagacccugu

SEQ ID NO: 2613122 - RNA, 19 nt, Artificial Sequence
  Description of Artificial Sequence: Synthetic oligonucleotide
cugaguccuugagcccgag

SEQ ID NO: 2613123 - RNA, 19 nt, Artificial Sequence
  Description of Artificial Sequence: Synthetic oligonucleotide
ccgacuggggcuugaucuc

SEQ ID NO: 2613124 - RNA, 19 nt, Artificial Sequence
  Description of Artificial Sequence: Synthetic oligonucleotide
caagcccacuuugguucug

SEQ ID NO: 2613125 - RNA, 19 nt, Artificial Sequence
  Description of Artificial Sequence: Synthetic oligonucleotide
ccauuggcgaugcuaauau

SEQ ID NO: 2613126 - RNA, 19 nt, Artificial Sequence
  Description of Artificial Sequence: Synthetic oligonucleotide
cagacccuguggcuauuaa

SEQ ID NO: 2613127 - RNA, 19 nt, Artificial Sequence
  Description of Artificial Sequence: Synthetic oligonucleotide
cuccguguccaguaucuuu

SEQ ID NO: 2613128 - RNA, 19 nt, Artificial Sequence
  Description of Artificial Sequence: Synthetic oligonucleotide
cgcggcaugggccuuugug

SEQ ID NO: 2613129 - RNA, 19 nt, Artificial Sequence
  Description of Artificial Sequence: Synthetic oligonucleotide
acugcccaucucugcuaua

SEQ ID NO: 2613130 - RNA, 19 nt, Artificial Sequence
  Description of Artificial Sequence: Synthetic oligonucleotide
gguccuucaagcccacuuu

SEQ ID NO: 2613131 - RNA, 19 nt, Artificial Sequence
  Description of Artificial Sequence: Synthetic oligonucleotide
cuggcuuaaugaucagcuu

SEQ ID NO: 2613132 - RNA, 19 nt, Artificial Sequence
  Description of Artificial Sequence: Synthetic oligonucleotide
ccccggaucagggucccgg

SEQ ID NO: 2613133 - RNA, 19 nt, Artificial Sequence
  Description of Artificial Sequence: Synthetic oligonucleotide
gagggugcgcacaccgacu

SEQ ID NO: 2613134 - RNA, 19 nt, Artificial Sequence
  Description of Artificial Sequence: Synthetic oligonucleotide
gccauuggcgaugcuaaua

SEQ ID NO: 2613135 - RNA, 19 nt, Artificial Sequence
  Description of Artificial Sequence: Synthetic oligonucleotide
cgagaacaaaacacuggaa

SEQ ID NO: 2613136 - RNA, 19 nt, Artificial Sequence
  Description of Artificial Sequence: Synthetic oligonucleotide
gcaugggccuuugugggaa

SEQ ID NO: 2613137 - RNA, 19 nt, Artificial Sequence
  Description of Artificial Sequence: Synthetic oligonucleotide
gcgacauugucuggacauc

SEQ ID NO: 2613138 - RNA, 19 nt, Artificial Sequence
  Description of Artificial Sequence: Synthetic oligonucleotide
gugacauagcagguuucau

SEQ ID NO: 2613139 - RNA, 19 nt, Artificial Sequence
  Description of Artificial Sequence: Synthetic oligonucleotide
gggcgacauugucuggaca

SEQ ID NO: 2613140 - RNA, 19 nt, Artificial Sequence
  Description of Artificial Sequence: Synthetic oligonucleotide
agccgucguagagcagcug

SEQ ID NO: 2613141 - RNA, 19 nt, Artificial Sequence
  Description of Artificial Sequence: Synthetic oligonucleotide
gcugcucggagggugcgca

SEQ ID NO: 2613142 - RNA, 19 nt, Artificial Sequence
  Description of Artificial Sequence: Synthetic oligonucleotide
cgacuggggcuugaucucg

SEQ ID NO: 2613143 - RNA, 19 nt, Artificial Sequence
  Description of Artificial Sequence: Synthetic oligonucleotide
ggaguguaggaugcugagu

SEQ ID NO: 2613144 - RNA, 19 nt, Artificial Sequence
  Description of Artificial Sequence: Synthetic oligonucleotide
acaccgacuggggcuugau

SEQ ID NO: 2613145 - RNA, 19 nt, Artificial Sequence
  Description of Artificial Sequence: Synthetic oligonucleotide
gacggccccggaucagggu

SEQ ID NO: 2613146 - RNA, 19 nt, Artificial Sequence
  Description of Artificial Sequence: Synthetic oligonucleotide
caaugggcauggcacuuuu

SEQ ID NO: 2613147 - RNA, 19 nt, Artificial Sequence
  Description of Artificial Sequence: Synthetic oligonucleotide
gagcgaccaauugcauacu

SEQ ID NO: 2613148 - RNA, 19 nt, Artificial Sequence
  Description of Artificial Sequence: Synthetic oligonucleotide
gcuuaaugaucagcuugua

SEQ ID NO: 2613149 - RNA, 19 nt, Artificial Sequence
  Description of Artificial Sequence: Synthetic oligonucleotide
gcgcacaccgacuggggcu

SEQ ID NO: 2613150 - RNA, 19 nt, Artificial Sequence
  Description of Artificial Sequence: Synthetic oligonucleotide
gacuggggcuugaucucgu

SEQ ID NO: 2613151 - RNA, 19 nt, Artificial Sequence
  Description of Artificial Sequence: Synthetic oligonucleotide
cacgcggcaugggccuuug

SEQ ID NO: 2613152 - RNA, 19 nt, Artificial Sequence
  Description of Artificial Sequence: Synthetic oligonucleotide
cgggcgacauugucuggac

SEQ ID NO: 2613153 - RNA, 19 nt, Artificial Sequence
  Description of Artificial Sequence: Synthetic oligonucleotide
cagcagacccuguggcuau

SEQ ID NO: 2613154 - RNA, 19 nt, Artificial Sequence
  Description of Artificial Sequence: Synthetic oligonucleotide
ccggaucagggucccgguc

SEQ ID NO: 2613155 - RNA, 19 nt, Artificial Sequence
  Description of Artificial Sequence: Synthetic oligonucleotide
acgcggcaugggccuuugu

SEQ ID NO: 2613156 - RNA, 19 nt, Artificial Sequence
  Description of Artificial Sequence: Synthetic oligonucleotide
ggccacgcggcaugggccu

SEQ ID NO: 2613157 - RNA, 19 nt, Artificial Sequence
  Description of Artificial Sequence: Synthetic oligonucleotide
gcugaguccuugagcccga

SEQ ID NO: 2613158 - RNA, 19 nt, Artificial Sequence
  Description of Artificial Sequence: Synthetic oligonucleotide
agcagacccuguggcuauu

SEQ ID NO: 2613159 - RNA, 19 nt, Artificial Sequence
  Description of Artificial Sequence: Synthetic oligonucleotide
ccugacggccccggaucag

SEQ ID NO: 2613160 - RNA, 19 nt, Artificial Sequence
  Description of Artificial Sequence: Synthetic oligonucleotide
ggggcuugaucucguugau

SEQ ID NO: 2613161 - RNA, 19 nt, Artificial Sequence
  Description of Artificial Sequence: Synthetic oligonucleotide
gugccaggugcaacuguau

SEQ ID NO: 2613162 - RNA, 19 nt, Artificial Sequence
  Description of Artificial Sequence: Synthetic oligonucleotide
cccugacggccccggauca

SEQ ID NO: 2613163 - RNA, 19 nt, Artificial Sequence
  Description of Artificial Sequence: Synthetic oligonucleotide
cguagagcagcuggcuuaa

SEQ ID NO: 2613164 - RNA, 19 nt, Artificial Sequence
  Description of Artificial Sequence: Synthetic oligonucleotide
cgacauugucuggacaucu

SEQ ID NO: 2613165 - RNA, 19 nt, Artificial Sequence
  Description of Artificial Sequence: Synthetic oligonucleotide
ggcgguccuucaagcccac

SEQ ID NO: 2613166 - RNA, 19 nt, Artificial Sequence
  Description of Artificial Sequence: Synthetic oligonucleotide
ccacguggucauacagagu

SEQ ID NO: 2613167 - RNA, 19 nt, Artificial Sequence
  Description of Artificial Sequence: Synthetic oligonucleotide
cccgaggccaggaucuguu

SEQ ID NO: 2613168 - RNA, 19 nt, Artificial Sequence
  Description of Artificial Sequence: Synthetic oligonucleotide
cggagggugcgcacaccga

SEQ ID NO: 2613169 - RNA, 19 nt, Artificial Sequence
  Description of Artificial Sequence: Synthetic oligonucleotide
ggaagccucgggcgacauu

SEQ ID NO: 2613170 - RNA, 19 nt, Artificial Sequence
  Description of Artificial Sequence: Synthetic oligonucleotide
gccccggaucagggucccg

SEQ ID NO: 2613171 - RNA, 19 nt, Artificial Sequence
  Description of Artificial Sequence: Synthetic oligonucleotide
ccguguccaguaucuuuau

SEQ ID NO: 2613172 - RNA, 19 nt, Artificial Sequence
  Description of Artificial Sequence: Synthetic oligonucleotide
cccggaucagggucccggu

SEQ ID NO: 2613173 - RNA, 19 nt, Artificial Sequence
  Description of Artificial Sequence: Synthetic oligonucleotide
gcccgaggccaggaucugu

SEQ ID NO: 2613174 - RNA, 19 nt, Artificial Sequence
  Description of Artificial Sequence: Synthetic oligonucleotide
gcgguccuucaagcccacu

SEQ ID NO: 2613175 - RNA, 19 nt, Artificial Sequence
  Description of Artificial Sequence: Synthetic oligonucleotide
gccacgcggcaugggccuu

SEQ ID NO: 2613176 - RNA, 19 nt, Artificial Sequence
  Description of Artificial Sequence: Synthetic oligonucleotide
ccacgcggcaugggccuuu

SEQ ID NO: 2613177 - RNA, 19 nt, Artificial Sequence
  Description of Artificial Sequence: Synthetic oligonucleotide
cggaagccucgggcgacau

SEQ ID NO: 2613178 - RNA, 19 nt, Artificial Sequence
  Description of Artificial Sequence: Synthetic oligonucleotide
aaaagccagaacuaaauac

SEQ ID NO: 2613179 - RNA, 19 nt, Artificial Sequence
  Description of Artificial Sequence: Synthetic oligonucleotide
uuuaaucauauaaagauga

SEQ ID NO: 2613180 - RNA, 19 nt, Artificial Sequence
  Description of Artificial Sequence: Synthetic oligonucleotide
uaaaagacaaucuccaugg

SEQ ID NO: 2613181 - RNA, 19 nt, Artificial Sequence
  Description of Artificial Sequence: Synthetic oligonucleotide
aagaugacugauucgaccc

SEQ ID NO: 2613182 - RNA, 19 nt, Artificial Sequence
  Description of Artificial Sequence: Synthetic oligonucleotide
aauacauagccuuuauuuc

SEQ ID NO: 2613183 - RNA, 19 nt, Artificial Sequence
  Description of Artificial Sequence: Synthetic oligonucleotide
acauuuaccuuccucaucc

SEQ ID NO: 2613184 - RNA, 19 nt, Artificial Sequence
  Description of Artificial Sequence: Synthetic oligonucleotide
aaucauauaaagaugauga

SEQ ID NO: 2613185 - RNA, 19 nt, Artificial Sequence
  Description of Artificial Sequence: Synthetic oligonucleotide
uuagacauacaccauaucu

SEQ ID NO: 2613186 - RNA, 19 nt, Artificial Sequence
  Description of Artificial Sequence: Synthetic oligonucleotide
cauauaaagaugaugaauc

SEQ ID NO: 2613187 - RNA, 19 nt, Artificial Sequence
  Description of Artificial Sequence: Synthetic oligonucleotide
ugaugaaucaaguuuagca

SEQ ID NO: 2613188 - RNA, 19 nt, Artificial Sequence
  Description of Artificial Sequence: Synthetic oligonucleotide
aaagacaaucuccaugggg

SEQ ID NO: 2613189 - RNA, 19 nt, Artificial Sequence
  Description of Artificial Sequence: Synthetic oligonucleotide
uuuaguaaacuauacaaaa

SEQ ID NO: 2613190 - RNA, 19 nt, Artificial Sequence
  Description of Artificial Sequence: Synthetic oligonucleotide
caaacauguacauuuauag

SEQ ID NO: 2613191 - RNA, 19 nt, Artificial Sequence
  Description of Artificial Sequence: Synthetic oligonucleotide
aaaagguaaggagacaaac

SEQ ID NO: 2613192 - RNA, 19 nt, Artificial Sequence
  Description of Artificial Sequence: Synthetic oligonucleotide
uaaaacuauauuaauacuu

SEQ ID NO: 2613193 - RNA, 19 nt, Artificial Sequence
  Description of Artificial Sequence: Synthetic oligonucleotide
uguuauaaaagacaaucuc

SEQ ID NO: 2613194 - RNA, 19 nt, Artificial Sequence
  Description of Artificial Sequence: Synthetic oligonucleotide
ucuguuauaaaagacaauc

SEQ ID NO: 2613195 - RNA, 19 nt, Artificial Sequence
  Description of Artificial Sequence: Synthetic oligonucleotide
acuuuaguaaacuauacaa

SEQ ID NO: 2613196 - RNA, 19 nt, Artificial Sequence
  Description of Artificial Sequence: Synthetic oligonucleotide
aacugcaugucagucaugc

SEQ ID NO: 2613197 - RNA, 19 nt, Artificial Sequence
  Description of Artificial Sequence: Synthetic oligonucleotide
cagaacuaaauacauagcc

SEQ ID NO: 2613198 - RNA, 19 nt, Artificial Sequence
  Description of Artificial Sequence: Synthetic oligonucleotide
cuuguuuagacauacacca

SEQ ID NO: 2613199 - RNA, 19 nt, Artificial Sequence
  Description of Artificial Sequence: Synthetic oligonucleotide
augaaucaaguuuagcaac

SEQ ID NO: 2613200 - RNA, 19 nt, Artificial Sequence
  Description of Artificial Sequence: Synthetic oligonucleotide
aauuagaugagcuuccgua

SEQ ID NO: 2613201 - RNA, 19 nt, Artificial Sequence
  Description of Artificial Sequence: Synthetic oligonucleotide
auaaaagacaaucuccaug

SEQ ID NO: 2613202 - RNA, 19 nt, Artificial Sequence
  Description of Artificial Sequence: Synthetic oligonucleotide
acauuuauagaacugcaug

SEQ ID NO: 2613203 - RNA, 19 nt, Artificial Sequence
  Description of Artificial Sequence: Synthetic oligonucleotide
auguaaaccaucuuuccuc

SEQ ID NO: 2613204 - RNA, 19 nt, Artificial Sequence
  Description of Artificial Sequence: Synthetic oligonucleotide
aagaaaucuguuauaaaag

SEQ ID NO: 2613205 - RNA, 19 nt, Artificial Sequence
  Description of Artificial Sequence: Synthetic oligonucleotide
guuauaaaagacaaucucc

SEQ ID NO: 2613206 - RNA, 19 nt, Artificial Sequence
  Description of Artificial Sequence: Synthetic oligonucleotide
uguacauuuauagaacugc

SEQ ID NO: 2613207 - RNA, 19 nt, Artificial Sequence
  Description of Artificial Sequence: Synthetic oligonucleotide
aacuauauuaauacuuuag

SEQ ID NO: 2613208 - RNA, 19 nt, Artificial Sequence
  Description of Artificial Sequence: Synthetic oligonucleotide
acuauauuaauacuuuagu

SEQ ID NO: 2613209 - RNA, 19 nt, Artificial Sequence
  Description of Artificial Sequence: Synthetic oligonucleotide
uaaggagacaaacauguac

SEQ ID NO: 2613210 - RNA, 19 nt, Artificial Sequence
  Description of Artificial Sequence: Synthetic oligonucleotide
ugccagauccuguagaggg

SEQ ID NO: 2613211 - RNA, 19 nt, Artificial Sequence
  Description of Artificial Sequence: Synthetic oligonucleotide
auaaagaugaugaaucaag

SEQ ID NO: 2613212 - RNA, 19 nt, Artificial Sequence
  Description of Artificial Sequence: Synthetic oligonucleotide
ugaaucaaguuuagcaacc

SEQ ID NO: 2613213 - RNA, 19 nt, Artificial Sequence
  Description of Artificial Sequence: Synthetic oligonucleotide
uuuaccuuccucauccacc

SEQ ID NO: 2613214 - RNA, 19 nt, Artificial Sequence
  Description of Artificial Sequence: Synthetic oligonucleotide
aaacauguacauuuauaga

SEQ ID NO: 2613215 - RNA, 19 nt, Artificial Sequence
  Description of Artificial Sequence: Synthetic oligonucleotide
uuaaaacuauauuaauacu

SEQ ID NO: 2613216 - RNA, 19 nt, Artificial Sequence
  Description of Artificial Sequence: Synthetic oligonucleotide
uccuuguuuagacauacac

SEQ ID NO: 2613217 - RNA, 19 nt, Artificial Sequence
  Description of Artificial Sequence: Synthetic oligonucleotide
auuagaugagcuuccguag

SEQ ID NO: 2613218 - RNA, 19 nt, Artificial Sequence
  Description of Artificial Sequence: Synthetic oligonucleotide
aaagccagaacuaaauaca

SEQ ID NO: 2613219 - RNA, 19 nt, Artificial Sequence
  Description of Artificial Sequence: Synthetic oligonucleotide
uugaagaugacugauucga

SEQ ID NO: 2613220 - RNA, 19 nt, Artificial Sequence
  Description of Artificial Sequence: Synthetic oligonucleotide
uacuuuaguaaacuauaca

SEQ ID NO: 2613221 - RNA, 19 nt, Artificial Sequence
  Description of Artificial Sequence: Synthetic oligonucleotide
aagacaaucuccaugggga

SEQ ID NO: 2613222 - RNA, 19 nt, Artificial Sequence
  Description of Artificial Sequence: Synthetic oligonucleotide
gaugaaucaaguuuagcaa

SEQ ID NO: 2613223 - RNA, 19 nt, Artificial Sequence
  Description of Artificial Sequence: Synthetic oligonucleotide
acauacaccauaucuuguc

SEQ ID NO: 2613224 - RNA, 19 nt, Artificial Sequence
  Description of Artificial Sequence: Synthetic oligonucleotide
cuuagagcagacauuuacc

SEQ ID NO: 2613225 - RNA, 19 nt, Artificial Sequence
  Description of Artificial Sequence: Synthetic oligonucleotide
auacauagccuuuauuucu

SEQ ID NO: 2613226 - RNA, 19 nt, Artificial Sequence
  Description of Artificial Sequence: Synthetic oligonucleotide
auuuauagaacugcauguc

SEQ ID NO: 2613227 - RNA, 19 nt, Artificial Sequence
  Description of Artificial Sequence: Synthetic oligonucleotide
ugauucgacccauucuucg

SEQ ID NO: 2613228 - RNA, 19 nt, Artificial Sequence
  Description of Artificial Sequence: Synthetic oligonucleotide
aaagaugaugaaucaaguu

SEQ ID NO: 2613229 - RNA, 19 nt, Artificial Sequence
  Description of Artificial Sequence: Synthetic oligonucleotide
uguaaaccaucuuuccucc

SEQ ID NO: 2613230 - RNA, 19 nt, Artificial Sequence
  Description of Artificial Sequence: Synthetic oligonucleotide
aaucuguuauaaaagacaa

SEQ ID NO: 2613231 - RNA, 19 nt, Artificial Sequence
  Description of Artificial Sequence: Synthetic oligonucleotide
auauaaagaugaugaauca

SEQ ID NO: 2613232 - RNA, 19 nt, Artificial Sequence
  Description of Artificial Sequence: Synthetic oligonucleotide
aaggagacaaacauguaca

SEQ ID NO: 2613233 - RNA, 19 nt, Artificial Sequence
  Description of Artificial Sequence: Synthetic oligonucleotide
uucgagauguaaaccaucu

SEQ ID NO: 2613234 - RNA, 19 nt, Artificial Sequence
  Description of Artificial Sequence: Synthetic oligonucleotide
auuggaggagggcuggggc

SEQ ID NO: 2613235 - RNA, 19 nt, Artificial Sequence
  Description of Artificial Sequence: Synthetic oligonucleotide
cuaguugucugcuucuuag

SEQ ID NO: 2613236 - RNA, 19 nt, Artificial Sequence
  Description of Artificial Sequence: Synthetic oligonucleotide
accucauucaucugugagg

SEQ ID NO: 2613237 - RNA, 19 nt, Artificial Sequence
  Description of Artificial Sequence: Synthetic oligonucleotide
aauucugcuauuccccaga

SEQ ID NO: 2613238 - RNA, 19 nt, Artificial Sequence
  Description of Artificial Sequence: Synthetic oligonucleotide
uguuuagacauacaccaua

SEQ ID NO: 2613239 - RNA, 19 nt, Artificial Sequence
  Description of Artificial Sequence: Synthetic oligonucleotide
aaaccacaaauucugcuau

SEQ ID NO: 2613240 - RNA, 19 nt, Artificial Sequence
  Description of Artificial Sequence: Synthetic oligonucleotide
gaaaucuguuauaaaagac

SEQ ID NO: 2613241 - RNA, 19 nt, Artificial Sequence
  Description of Artificial Sequence: Synthetic oligonucleotide
uggaauuagaugagcuucc

SEQ ID NO: 2613242 - RNA, 19 nt, Artificial Sequence
  Description of Artificial Sequence: Synthetic oligonucleotide
ucauucaucugugaggaca

SEQ ID NO: 2613243 - RNA, 19 nt, Artificial Sequence
  Description of Artificial Sequence: Synthetic oligonucleotide
uguaugucuaguugucugc

SEQ ID NO: 2613244 - RNA, 19 nt, Artificial Sequence
  Description of Artificial Sequence: Synthetic oligonucleotide
uuagaugagcuuccguagc

SEQ ID NO: 2613245 - RNA, 19 nt, Artificial Sequence
  Description of Artificial Sequence: Synthetic oligonucleotide
ucuuccaucaucguaucug

SEQ ID NO: 2613246 - RNA, 19 nt, Artificial Sequence
  Description of Artificial Sequence: Synthetic oligonucleotide
aacacuuguccauucgaga

SEQ ID NO: 2613247 - RNA, 19 nt, Artificial Sequence
  Description of Artificial Sequence: Synthetic oligonucleotide
uacuuauuaaaacuauauu

SEQ ID NO: 2613248 - RNA, 19 nt, Artificial Sequence
  Description of Artificial Sequence: Synthetic oligonucleotide
ugcuucuuagagcagacau

SEQ ID NO: 2613249 - RNA, 19 nt, Artificial Sequence
  Description of Artificial Sequence: Synthetic oligonucleotide
aaauucugcuauuccccag

SEQ ID NO: 2613250 - RNA, 19 nt, Artificial Sequence
  Description of Artificial Sequence: Synthetic oligonucleotide
cuugaagaugacugauucg

SEQ ID NO: 2613251 - RNA, 19 nt, Artificial Sequence
  Description of Artificial Sequence: Synthetic oligonucleotide
auuuaccuuccucauccac

SEQ ID NO: 2613252 - RNA, 19 nt, Artificial Sequence
  Description of Artificial Sequence: Synthetic oligonucleotide
cauaucuuguccuacguga

SEQ ID NO: 2613253 - RNA, 19 nt, Artificial Sequence
  Description of Artificial Sequence: Synthetic oligonucleotide
aaagguaaggagacaaaca

SEQ ID NO: 2613254 - RNA, 19 nt, Artificial Sequence
  Description of Artificial Sequence: Synthetic oligonucleotide
ucaaguuuagcaaccuaaa

SEQ ID NO: 2613255 - RNA, 19 nt, Artificial Sequence
  Description of Artificial Sequence: Synthetic oligonucleotide
acauguguaugucuaguug

SEQ ID NO: 2613256 - RNA, 19 nt, Artificial Sequence
  Description of Artificial Sequence: Synthetic oligonucleotide
uucguggaggguuuccugg

SEQ ID NO: 2613257 - RNA, 19 nt, Artificial Sequence
  Description of Artificial Sequence: Synthetic oligonucleotide
auacuuuaguaaacuauac

SEQ ID NO: 2613258 - RNA, 19 nt, Artificial Sequence
  Description of Artificial Sequence: Synthetic oligonucleotide
uccauggggacugauuugg

SEQ ID NO: 2613259 - RNA, 19 nt, Artificial Sequence
  Description of Artificial Sequence: Synthetic oligonucleotide
gagacaaacauguacauuu

SEQ ID NO: 2613260 - RNA, 19 nt, Artificial Sequence
  Description of Artificial Sequence: Synthetic oligonucleotide
ugcucuucaucucuugaug

SEQ ID NO: 2613261 - RNA, 19 nt, Artificial Sequence
  Description of Artificial Sequence: Synthetic oligonucleotide
uccaacacuuguccauucg

SEQ ID NO: 2613262 - RNA, 19 nt, Artificial Sequence
  Description of Artificial Sequence: Synthetic oligonucleotide
acugauucgacccauucuu

SEQ ID NO: 2613263 - RNA, 19 nt, Artificial Sequence
  Description of Artificial Sequence: Synthetic oligonucleotide
uggcccucuuccaucaucg

SEQ ID NO: 2613264 - RNA, 19 nt, Artificial Sequence
  Description of Artificial Sequence: Synthetic oligonucleotide
uauaaagaugaugaaucaa

SEQ ID NO: 2613265 - RNA, 19 nt, Artificial Sequence
  Description of Artificial Sequence: Synthetic oligonucleotide
uuaccuuccucauccacca

SEQ ID NO: 2613266 - RNA, 19 nt, Artificial Sequence
  Description of Artificial Sequence: Synthetic oligonucleotide
auacuuauuaaaacuauau

SEQ ID NO: 2613267 - RNA, 19 nt, Artificial Sequence
  Description of Artificial Sequence: Synthetic oligonucleotide
auagccuuuauuucuucca

SEQ ID NO: 2613268 - RNA, 19 nt, Artificial Sequence
  Description of Artificial Sequence: Synthetic oligonucleotide
agaacuaaauacauagccu

SEQ ID NO: 2613269 - RNA, 19 nt, Artificial Sequence
  Description of Artificial Sequence: Synthetic oligonucleotide
uuauuucuuccagaucagg

SEQ ID NO: 2613270 - RNA, 19 nt, Artificial Sequence
  Description of Artificial Sequence: Synthetic oligonucleotide
ucuacacauguguaugucu

SEQ ID NO: 2613271 - RNA, 19 nt, Artificial Sequence
  Description of Artificial Sequence: Synthetic oligonucleotide
cauacaccauaucuugucc

SEQ ID NO: 2613272 - RNA, 19 nt, Artificial Sequence
  Description of Artificial Sequence: Synthetic oligonucleotide
uacauuuauagaacugcau

SEQ ID NO: 2613273 - RNA, 19 nt, Artificial Sequence
  Description of Artificial Sequence: Synthetic oligonucleotide
cagacauuuaccuuccuca

SEQ ID NO: 2613274 - RNA, 19 nt, Artificial Sequence
  Description of Artificial Sequence: Synthetic oligonucleotide
uccuguagagggaauuccc

SEQ ID NO: 2613275 - RNA, 19 nt, Artificial Sequence
  Description of Artificial Sequence: Synthetic oligonucleotide
cuuuaguaaacuauacaaa

SEQ ID NO: 2613276 - RNA, 19 nt, Artificial Sequence
  Description of Artificial Sequence: Synthetic oligonucleotide
acaguccuuguuuagacau

SEQ ID NO: 2613277 - RNA, 19 nt, Artificial Sequence
  Description of Artificial Sequence: Synthetic oligonucleotide
gaccucauucaucugugag

SEQ ID NO: 2613278 - RNA, 19 nt, Artificial Sequence
  Description of Artificial Sequence: Synthetic oligonucleotide
ucguaucuggaauuagaug

SEQ ID NO: 2613279 - RNA, 19 nt, Artificial Sequence
  Description of Artificial Sequence: Synthetic oligonucleotide
uguagagggaauucccaac

SEQ ID NO: 2613280 - RNA, 19 nt, Artificial Sequence
  Description of Artificial Sequence: Synthetic oligonucleotide
agacaaucuccauggggac

SEQ ID NO: 2613281 - RNA, 19 nt, Artificial Sequence
  Description of Artificial Sequence: Synthetic oligonucleotide
augaugaaucaaguuuagc

SEQ ID NO: 2613282 - RNA, 19 nt, Artificial Sequence
  Description of Artificial Sequence: Synthetic oligonucleotide
gagggaauucccaacauga

SEQ ID NO: 2613283 - RNA, 19 nt, Artificial Sequence
  Description of Artificial Sequence: Synthetic oligonucleotide
cauagccuuuauuucuucc

SEQ ID NO: 2613284 - RNA, 19 nt, Artificial Sequence
  Description of Artificial Sequence: Synthetic oligonucleotide
gaugaugaaucaaguuuag

SEQ ID NO: 2613285 - RNA, 19 nt, Artificial Sequence
  Description of Artificial Sequence: Synthetic oligonucleotide
auuucuuccagaucaggua

SEQ ID NO: 2613286 - RNA, 19 nt, Artificial Sequence
  Description of Artificial Sequence: Synthetic oligonucleotide
cuggaauuagaugagcuuc

SEQ ID NO: 2613287 - RNA, 19 nt, Artificial Sequence
  Description of Artificial Sequence: Synthetic oligonucleotide
uucgacccauucuucgugg

SEQ ID NO: 2613288 - RNA, 19 nt, Artificial Sequence
  Description of Artificial Sequence: Synthetic oligonucleotide
auggggacugauuugggcu

SEQ ID NO: 2613289 - RNA, 19 nt, Artificial Sequence
  Description of Artificial Sequence: Synthetic oligonucleotide
aaaccaucuuuccuccggu

SEQ ID NO: 2613290 - RNA, 19 nt, Artificial Sequence
  Description of Artificial Sequence: Synthetic oligonucleotide
caugccagauccuguagag

SEQ ID NO: 2613291 - RNA, 19 nt, Artificial Sequence
  Description of Artificial Sequence: Synthetic oligonucleotide
ucaugccagauccuguaga

SEQ ID NO: 2613292 - RNA, 19 nt, Artificial Sequence
  Description of Artificial Sequence: Synthetic oligonucleotide
gacccauucuucguggagg

SEQ ID NO: 2613293 - RNA, 19 nt, Artificial Sequence
  Description of Artificial Sequence: Synthetic oligonucleotide
uacacauguguaugucuag

SEQ ID NO: 2613294 - RNA, 19 nt, Artificial Sequence
  Description of Artificial Sequence: Synthetic oligonucleotide
cauucaucugugaggacac

SEQ ID NO: 2613295 - RNA, 19 nt, Artificial Sequence
  Description of Artificial Sequence: Synthetic oligonucleotide
ucuuuccuccgguugcccg

SEQ ID NO: 2613296 - RNA, 19 nt, Artificial Sequence
  Description of Artificial Sequence: Synthetic oligonucleotide
guguaugucuaguugucug

SEQ ID NO: 2613297 - RNA, 19 nt, Artificial Sequence
  Description of Artificial Sequence: Synthetic oligonucleotide
auccuguagagggaauucc

SEQ ID NO: 2613298 - RNA, 19 nt, Artificial Sequence
  Description of Artificial Sequence: Synthetic oligonucleotide
uauuccccagaagaaaucu

SEQ ID NO: 2613299 - RNA, 19 nt, Artificial Sequence
  Description of Artificial Sequence: Synthetic oligonucleotide
uccauucgagauguaaacc

SEQ ID NO: 2613300 - RNA, 19 nt, Artificial Sequence
  Description of Artificial Sequence: Synthetic oligonucleotide
aucauauaaagaugaugaa

SEQ ID NO: 2613301 - RNA, 19 nt, Artificial Sequence
  Description of Artificial Sequence: Synthetic oligonucleotide
ugaagaugacugauucgac

SEQ ID NO: 2613302 - RNA, 19 nt, Artificial Sequence
  Description of Artificial Sequence: Synthetic oligonucleotide
agagggaauucccaacaug

SEQ ID NO: 2613303 - RNA, 19 nt, Artificial Sequence
  Description of Artificial Sequence: Synthetic oligonucleotide
ugggcuguccaacacuugu

SEQ ID NO: 2613304 - RNA, 19 nt, Artificial Sequence
  Description of Artificial Sequence: Synthetic oligonucleotide
auacaccauaucuuguccu

SEQ ID NO: 2613305 - RNA, 19 nt, Artificial Sequence
  Description of Artificial Sequence: Synthetic oligonucleotide
aaucaaguuuagcaaccua

SEQ ID NO: 2613306 - RNA, 19 nt, Artificial Sequence
  Description of Artificial Sequence: Synthetic oligonucleotide
uuuagacauacaccauauc

SEQ ID NO: 2613307 - RNA, 19 nt, Artificial Sequence
  Description of Artificial Sequence: Synthetic oligonucleotide
ucuggaauuagaugagcuu

SEQ ID NO: 2613308 - RNA, 19 nt, Artificial Sequence
  Description of Artificial Sequence: Synthetic oligonucleotide
gauguaaaccaucuuuccu

SEQ ID NO: 2613309 - RNA, 19 nt, Artificial Sequence
  Description of Artificial Sequence: Synthetic oligonucleotide
ccuuguuuagacauacacc

SEQ ID NO: 2613310 - RNA, 19 nt, Artificial Sequence
  Description of Artificial Sequence: Synthetic oligonucleotide
cauuuauagaacugcaugu

SEQ ID NO: 2613311 - RNA, 19 nt, Artificial Sequence
  Description of Artificial Sequence: Synthetic oligonucleotide
acccauucuucguggaggg

SEQ ID NO: 2613312 - RNA, 19 nt, Artificial Sequence
  Description of Artificial Sequence: Synthetic oligonucleotide
agaugaugaaucaaguuua

SEQ ID NO: 2613313 - RNA, 19 nt, Artificial Sequence
  Description of Artificial Sequence: Synthetic oligonucleotide
aucaaguuuagcaaccuaa

SEQ ID NO: 2613314 - RNA, 19 nt, Artificial Sequence
  Description of Artificial Sequence: Synthetic oligonucleotide
guccauucgagauguaaac

SEQ ID NO: 2613315 - RNA, 19 nt, Artificial Sequence
  Description of Artificial Sequence: Synthetic oligonucleotide
ucugcuucuuagagcagac

SEQ ID NO: 2613316 - RNA, 19 nt, Artificial Sequence
  Description of Artificial Sequence: Synthetic oligonucleotide
cguaucuggaauuagauga

SEQ ID NO: 2613317 - RNA, 19 nt, Artificial Sequence
  Description of Artificial Sequence: Synthetic oligonucleotide
uuugggcuguccaacacuu

SEQ ID NO: 2613318 - RNA, 19 nt, Artificial Sequence
  Description of Artificial Sequence: Synthetic oligonucleotide
caccauaucuuguccuacg

SEQ ID NO: 2613319 - RNA, 19 nt, Artificial Sequence
  Description of Artificial Sequence: Synthetic oligonucleotide
ugauuugggcuguccaaca

SEQ ID NO: 2613320 - RNA, 19 nt, Artificial Sequence
  Description of Artificial Sequence: Synthetic oligonucleotide
auucgacccauucuucgug

SEQ ID NO: 2613321 - RNA, 19 nt, Artificial Sequence
  Description of Artificial Sequence: Synthetic oligonucleotide
guagagggaauucccaaca

SEQ ID NO: 2613322 - RNA, 19 nt, Artificial Sequence
  Description of Artificial Sequence: Synthetic oligonucleotide
cauggggacugauuugggc

SEQ ID NO: 2613323 - RNA, 19 nt, Artificial Sequence
  Description of Artificial Sequence: Synthetic oligonucleotide
acaaucuccauggggacug

SEQ ID NO: 2613324 - RNA, 19 nt, Artificial Sequence
  Description of Artificial Sequence: Synthetic oligonucleotide
auuugggcuguccaacacu

SEQ ID NO: 2613325 - RNA, 19 nt, Artificial Sequence
  Description of Artificial Sequence: Synthetic oligonucleotide
ugcugaagcagaguuuuga

SEQ ID NO: 2613326 - RNA, 19 nt, Artificial Sequence
  Description of Artificial Sequence: Synthetic oligonucleotide
ugacugauucgacccauuc

SEQ ID NO: 2613327 - RNA, 19 nt, Artificial Sequence
  Description of Artificial Sequence: Synthetic oligonucleotide
acauagccuuuauuucuuc

SEQ ID NO: 2613328 - RNA, 19 nt, Artificial Sequence
  Description of Artificial Sequence: Synthetic oligonucleotide
acuuguccauucgagaugu

SEQ ID NO: 2613329 - RNA, 19 nt, Artificial Sequence
  Description of Artificial Sequence: Synthetic oligonucleotide
uacauagccuuuauuucuu

SEQ ID NO: 2613330 - RNA, 19 nt, Artificial Sequence
  Description of Artificial Sequence: Synthetic oligonucleotide
uaucuggaauuagaugagc

SEQ ID NO: 2613331 - RNA, 19 nt, Artificial Sequence
  Description of Artificial Sequence: Synthetic oligonucleotide
guaucuggaauuagaugag

SEQ ID NO: 2613332 - RNA, 19 nt, Artificial Sequence
  Description of Artificial Sequence: Synthetic oligonucleotide
auucgagauguaaaccauc

SEQ ID NO: 2613333 - RNA, 19 nt, Artificial Sequence
  Description of Artificial Sequence: Synthetic oligonucleotide
aauucccaacaugaccuca

SEQ ID NO: 2613334 - RNA, 19 nt, Artificial Sequence
  Description of Artificial Sequence: Synthetic oligonucleotide
gauuugggcuguccaacac

SEQ ID NO: 2613335 - RNA, 19 nt, Artificial Sequence
  Description of Artificial Sequence: Synthetic oligonucleotide
aucuuguccuacgugagcu

SEQ ID NO: 2613336 - RNA, 19 nt, Artificial Sequence
  Description of Artificial Sequence: Synthetic oligonucleotide
acugauuugggcuguccaa

SEQ ID NO: 2613337 - RNA, 19 nt, Artificial Sequence
  Description of Artificial Sequence: Synthetic oligonucleotide
uggggacugauuugggcug

SEQ ID NO: 2613338 - RNA, 19 nt, Artificial Sequence
  Description of Artificial Sequence: Synthetic oligonucleotide
gacauuuaccuuccucauc

SEQ ID NO: 2613339 - RNA, 19 nt, Artificial Sequence
  Description of Artificial Sequence: Synthetic oligonucleotide
uucugcuauuccccagaag

SEQ ID NO: 2613340 - RNA, 19 nt, Artificial Sequence
  Description of Artificial Sequence: Synthetic oligonucleotide
agaacaguccuuguuuaga

SEQ ID NO: 2613341 - RNA, 19 nt, Artificial Sequence
  Description of Artificial Sequence: Synthetic oligonucleotide
acgugagcugcucuucauc

SEQ ID NO: 2613342 - RNA, 19 nt, Artificial Sequence
  Description of Artificial Sequence: Synthetic oligonucleotide
accauaucuuguccuacgu

SEQ ID NO: 2613343 - RNA, 19 nt, Artificial Sequence
  Description of Artificial Sequence: Synthetic oligonucleotide
agacauuuaccuuccucau

SEQ ID NO: 2613344 - RNA, 19 nt, Artificial Sequence
  Description of Artificial Sequence: Synthetic oligonucleotide
ucaucguaucuggaauuag

SEQ ID NO: 2613345 - RNA, 19 nt, Artificial Sequence
  Description of Artificial Sequence: Synthetic oligonucleotide
uguguaugucuaguugucu

SEQ ID NO: 2613346 - RNA, 19 nt, Artificial Sequence
  Description of Artificial Sequence: Synthetic oligonucleotide
gguaaggagacaaacaugu

SEQ ID NO: 2613347 - RNA, 19 nt, Artificial Sequence
  Description of Artificial Sequence: Synthetic oligonucleotide
auguguaugucuaguuguc

SEQ ID NO: 2613348 - RNA, 19 nt, Artificial Sequence
  Description of Artificial Sequence: Synthetic oligonucleotide
acuaaauacauagccuuua

SEQ ID NO: 2613349 - RNA, 19 nt, Artificial Sequence
  Description of Artificial Sequence: Synthetic oligonucleotide
auaucuuguccuacgugag

SEQ ID NO: 2613350 - RNA, 19 nt, Artificial Sequence
  Description of Artificial Sequence: Synthetic oligonucleotide
aagccagaacuaaauacau

SEQ ID NO: 2613351 - RNA, 19 nt, Artificial Sequence
  Description of Artificial Sequence: Synthetic oligonucleotide
ucuaguugucugcuucuua

SEQ ID NO: 2613352 - RNA, 19 nt, Artificial Sequence
  Description of Artificial Sequence: Synthetic oligonucleotide
caucguaucuggaauuaga

SEQ ID NO: 2613353 - RNA, 19 nt, Artificial Sequence
  Description of Artificial Sequence: Synthetic oligonucleotide
uacaccauaucuuguccua

SEQ ID NO: 2613354 - RNA, 19 nt, Artificial Sequence
  Description of Artificial Sequence: Synthetic oligonucleotide
cuauuccccagaagaaauc

SEQ ID NO: 2613355 - RNA, 19 nt, Artificial Sequence
  Description of Artificial Sequence: Synthetic oligonucleotide
cagaacaguccuuguuuag

SEQ ID NO: 2613356 - RNA, 19 nt, Artificial Sequence
  Description of Artificial Sequence: Synthetic oligonucleotide
uaguugucugcuucuuaga

SEQ ID NO: 2613357 - RNA, 19 nt, Artificial Sequence
  Description of Artificial Sequence: Synthetic oligonucleotide
aucugugaggacacagaac

SEQ ID NO: 2613358 - RNA, 19 nt, Artificial Sequence
  Description of Artificial Sequence: Synthetic oligonucleotide
acaaacauguacauuuaua

SEQ ID NO: 2613359 - RNA, 19 nt, Artificial Sequence
  Description of Artificial Sequence: Synthetic oligonucleotide
aucuggaauuagaugagcu

SEQ ID NO: 2613360 - RNA, 19 nt, Artificial Sequence
  Description of Artificial Sequence: Synthetic oligonucleotide
ucuugcugaagcagaguuu

SEQ ID NO: 2613361 - RNA, 19 nt, Artificial Sequence
  Description of Artificial Sequence: Synthetic oligonucleotide
agggaauucccaacaugac

SEQ ID NO: 2613362 - RNA, 19 nt, Artificial Sequence
  Description of Artificial Sequence: Synthetic oligonucleotide
cuuccuucuacacaugugu

SEQ ID NO: 2613363 - RNA, 19 nt, Artificial Sequence
  Description of Artificial Sequence: Synthetic oligonucleotide
uuguccauucgagauguaa

SEQ ID NO: 2613364 - RNA, 19 nt, Artificial Sequence
  Description of Artificial Sequence: Synthetic oligonucleotide
cauguacauuuauagaacu

SEQ ID NO: 2613365 - RNA, 19 nt, Artificial Sequence
  Description of Artificial Sequence: Synthetic oligonucleotide
cuguuauaaaagacaaucu

SEQ ID NO: 2613366 - RNA, 19 nt, Artificial Sequence
  Description of Artificial Sequence: Synthetic oligonucleotide
agaugacugauucgaccca

SEQ ID NO: 2613367 - RNA, 19 nt, Artificial Sequence
  Description of Artificial Sequence: Synthetic oligonucleotide
uuccuucuacacaugugua

SEQ ID NO: 2613368 - RNA, 19 nt, Artificial Sequence
  Description of Artificial Sequence: Synthetic oligonucleotide
cugauuugggcuguccaac

SEQ ID NO: 2613369 - RNA, 19 nt, Artificial Sequence
  Description of Artificial Sequence: Synthetic oligonucleotide
ugauggcuuccuucuacac

SEQ ID NO: 2613370 - RNA, 19 nt, Artificial Sequence
  Description of Artificial Sequence: Synthetic oligonucleotide
uggaggguuuccugguggc

SEQ ID NO: 2613371 - RNA, 19 nt, Artificial Sequence
  Description of Artificial Sequence: Synthetic oligonucleotide
aucguaucuggaauuagau

SEQ ID NO: 2613372 - RNA, 19 nt, Artificial Sequence
  Description of Artificial Sequence: Synthetic oligonucleotide
cacuuguccauucgagaug

SEQ ID NO: 2613373 - RNA, 19 nt, Artificial Sequence
  Description of Artificial Sequence: Synthetic oligonucleotide
gauccuguagagggaauuc

SEQ ID NO: 2613374 - RNA, 19 nt, Artificial Sequence
  Description of Artificial Sequence: Synthetic oligonucleotide
uucuacacauguguauguc

SEQ ID NO: 2613375 - RNA, 19 nt, Artificial Sequence
  Description of Artificial Sequence: Synthetic oligonucleotide
uuccguagcuucuucuuuu

SEQ ID NO: 2613376 - RNA, 19 nt, Artificial Sequence
  Description of Artificial Sequence: Synthetic oligonucleotide
gaauucccaacaugaccuc

SEQ ID NO: 2613377 - RNA, 19 nt, Artificial Sequence
  Description of Artificial Sequence: Synthetic oligonucleotide
ccagaacuaaauacauagc

SEQ ID NO: 2613378 - RNA, 19 nt, Artificial Sequence
  Description of Artificial Sequence: Synthetic oligonucleotide
ggaauuagaugagcuuccg

SEQ ID NO: 2613379 - RNA, 19 nt, Artificial Sequence
  Description of Artificial Sequence: Synthetic oligonucleotide
aaccacaaauucugcuauu

SEQ ID NO: 2613380 - RNA, 19 nt, Artificial Sequence
  Description of Artificial Sequence: Synthetic oligonucleotide
ucaucucuugauggcuucc

SEQ ID NO: 2613381 - RNA, 19 nt, Artificial Sequence
  Description of Artificial Sequence: Synthetic oligonucleotide
ggcuguccaacacuugucc

SEQ ID NO: 2613382 - RNA, 19 nt, Artificial Sequence
  Description of Artificial Sequence: Synthetic oligonucleotide
ggaauucccaacaugaccu

SEQ ID NO: 2613383 - RNA, 19 nt, Artificial Sequence
  Description of Artificial Sequence: Synthetic oligonucleotide
gagcagacauuuaccuucc

SEQ ID NO: 2613384 - RNA, 19 nt, Artificial Sequence
  Description of Artificial Sequence: Synthetic oligonucleotide
cugauucgacccauucuuc

SEQ ID NO: 2613385 - RNA, 19 nt, Artificial Sequence
  Description of Artificial Sequence: Synthetic oligonucleotide
acacauguguaugucuagu

SEQ ID NO: 2613386 - RNA, 19 nt, Artificial Sequence
  Description of Artificial Sequence: Synthetic oligonucleotide
cuucguggaggguuuccug

SEQ ID NO: 2613387 - RNA, 19 nt, Artificial Sequence
  Description of Artificial Sequence: Synthetic oligonucleotide
augaccucauucaucugug

SEQ ID NO: 2613388 - RNA, 19 nt, Artificial Sequence
  Description of Artificial Sequence: Synthetic oligonucleotide
ggguuuaaucauauaaaga

SEQ ID NO: 2613389 - RNA, 19 nt, Artificial Sequence
  Description of Artificial Sequence: Synthetic oligonucleotide
caugaccucauucaucugu

SEQ ID NO: 2613390 - RNA, 19 nt, Artificial Sequence
  Description of Artificial Sequence: Synthetic oligonucleotide
ugaccucauucaucuguga

SEQ ID NO: 2613391 - RNA, 19 nt, Artificial Sequence
  Description of Artificial Sequence: Synthetic oligonucleotide
cauuggaggagggcugggg

SEQ ID NO: 2613392 - RNA, 19 nt, Artificial Sequence
  Description of Artificial Sequence: Synthetic oligonucleotide
uugcugaagcagaguuuug

SEQ ID NO: 2613393 - RNA, 19 nt, Artificial Sequence
  Description of Artificial Sequence: Synthetic oligonucleotide
ucgagauguaaaccaucuu

SEQ ID NO: 2613394 - RNA, 19 nt, Artificial Sequence
  Description of Artificial Sequence: Synthetic oligonucleotide
uuguccuacgugagcugcu

SEQ ID NO: 2613395 - RNA, 19 nt, Artificial Sequence
  Description of Artificial Sequence: Synthetic oligonucleotide
gacugauucgacccauucu

SEQ ID NO: 2613396 - RNA, 19 nt, Artificial Sequence
  Description of Artificial Sequence: Synthetic oligonucleotide
gauucgacccauucuucgu

SEQ ID NO: 2613397 - RNA, 19 nt, Artificial Sequence
  Description of Artificial Sequence: Synthetic oligonucleotide
gaauuagaugagcuuccgu

SEQ ID NO: 2613398 - RNA, 19 nt, Artificial Sequence
  Description of Artificial Sequence: Synthetic oligonucleotide
uaugucuaguugucugcuu

SEQ ID NO: 2613399 - RNA, 19 nt, Artificial Sequence
  Description of Artificial Sequence: Synthetic oligonucleotide
ggacacagaacaguccuug

SEQ ID NO: 2613400 - RNA, 19 nt, Artificial Sequence
  Description of Artificial Sequence: Synthetic oligonucleotide
gacaaacauguacauuuau

SEQ ID NO: 2613401 - RNA, 19 nt, Artificial Sequence
  Description of Artificial Sequence: Synthetic oligonucleotide
auucugcuauuccccagaa

SEQ ID NO: 2613402 - RNA, 19 nt, Artificial Sequence
  Description of Artificial Sequence: Synthetic oligonucleotide
ucguggaggguuuccuggu

SEQ ID NO: 2613403 - RNA, 19 nt, Artificial Sequence
  Description of Artificial Sequence: Synthetic oligonucleotide
uucuuagagcagacauuua

SEQ ID NO: 2613404 - RNA, 19 nt, Artificial Sequence
  Description of Artificial Sequence: Synthetic oligonucleotide
aaccaucuuuccuccgguu

SEQ ID NO: 2613405 - RNA, 19 nt, Artificial Sequence
  Description of Artificial Sequence: Synthetic oligonucleotide
cuccauggggacugauuug

SEQ ID NO: 2613406 - RNA, 19 nt, Artificial Sequence
  Description of Artificial Sequence: Synthetic oligonucleotide
uucuucguggaggguuucc

SEQ ID NO: 2613407 - RNA, 19 nt, Artificial Sequence
  Description of Artificial Sequence: Synthetic oligonucleotide
aucaucguaucuggaauua

SEQ ID NO: 2613408 - RNA, 19 nt, Artificial Sequence
  Description of Artificial Sequence: Synthetic oligonucleotide
auuccccagaagaaaucug

SEQ ID NO: 2613409 - RNA, 19 nt, Artificial Sequence
  Description of Artificial Sequence: Synthetic oligonucleotide
cuguagagggaauucccaa

SEQ ID NO: 2613410 - RNA, 19 nt, Artificial Sequence
  Description of Artificial Sequence: Synthetic oligonucleotide
uccuacgugagcugcucuu

SEQ ID NO: 2613411 - RNA, 19 nt, Artificial Sequence
  Description of Artificial Sequence: Synthetic oligonucleotide
uguccaacacuuguccauu

SEQ ID NO: 2613412 - RNA, 19 nt, Artificial Sequence
  Description of Artificial Sequence: Synthetic oligonucleotide
ucgacccauucuucgugga

SEQ ID NO: 2613413 - RNA, 19 nt, Artificial Sequence
  Description of Artificial Sequence: Synthetic oligonucleotide
guuuagacauacaccauau

SEQ ID NO: 2613414 - RNA, 19 nt, Artificial Sequence
  Description of Artificial Sequence: Synthetic oligonucleotide
cuucuuagagcagacauuu

SEQ ID NO: 2613415 - RNA, 19 nt, Artificial Sequence
  Description of Artificial Sequence: Synthetic oligonucleotide
gaaucaaguuuagcaaccu

SEQ ID NO: 2613416 - RNA, 19 nt, Artificial Sequence
  Description of Artificial Sequence: Synthetic oligonucleotide
gcagacauuuaccuuccuc

SEQ ID NO: 2613417 - RNA, 19 nt, Artificial Sequence
  Description of Artificial Sequence: Synthetic oligonucleotide
aggguuuccugguggcccu

SEQ ID NO: 2613418 - RNA, 19 nt, Artificial Sequence
  Description of Artificial Sequence: Synthetic oligonucleotide
agauccuguagagggaauu

SEQ ID NO: 2613419 - RNA, 19 nt, Artificial Sequence
  Description of Artificial Sequence: Synthetic oligonucleotide
aucuguuauaaaagacaau

SEQ ID NO: 2613420 - RNA, 19 nt, Artificial Sequence
  Description of Artificial Sequence: Synthetic oligonucleotide
cugguggcccucuuccauc

SEQ ID NO: 2613421 - RNA, 19 nt, Artificial Sequence
  Description of Artificial Sequence: Synthetic oligonucleotide
uucccaacaugaccucauu

SEQ ID NO: 2613422 - RNA, 19 nt, Artificial Sequence
  Description of Artificial Sequence: Synthetic oligonucleotide
uguccuacgugagcugcuc

SEQ ID NO: 2613423 - RNA, 19 nt, Artificial Sequence
  Description of Artificial Sequence: Synthetic oligonucleotide
auucuucguggaggguuuc

SEQ ID NO: 2613424 - RNA, 19 nt, Artificial Sequence
  Description of Artificial Sequence: Synthetic oligonucleotide
ugagcuuccguagcuucuu

SEQ ID NO: 2613425 - RNA, 19 nt, Artificial Sequence
  Description of Artificial Sequence: Synthetic oligonucleotide
cucauucaucugugaggac

SEQ ID NO: 2613426 - RNA, 19 nt, Artificial Sequence
  Description of Artificial Sequence: Synthetic oligonucleotide
cuucuacacauguguaugu

SEQ ID NO: 2613427 - RNA, 19 nt, Artificial Sequence
  Description of Artificial Sequence: Synthetic oligonucleotide
cauucgagauguaaaccau

SEQ ID NO: 2613428 - RNA, 19 nt, Artificial Sequence
  Description of Artificial Sequence: Synthetic oligonucleotide
ccauaucuuguccuacgug

SEQ ID NO: 2613429 - RNA, 19 nt, Artificial Sequence
  Description of Artificial Sequence: Synthetic oligonucleotide
ccucauucaucugugagga

SEQ ID NO: 2613430 - RNA, 19 nt, Artificial Sequence
  Description of Artificial Sequence: Synthetic oligonucleotide
gacauacaccauaucuugu

SEQ ID NO: 2613431 - RNA, 19 nt, Artificial Sequence
  Description of Artificial Sequence: Synthetic oligonucleotide
gacacagaacaguccuugu

SEQ ID NO: 2613432 - RNA, 19 nt, Artificial Sequence
  Description of Artificial Sequence: Synthetic oligonucleotide
uggggccuugaagaugacu

SEQ ID NO: 2613433 - RNA, 19 nt, Artificial Sequence
  Description of Artificial Sequence: Synthetic oligonucleotide
cauuuaccuuccucaucca

SEQ ID NO: 2613434 - RNA, 19 nt, Artificial Sequence
  Description of Artificial Sequence: Synthetic oligonucleotide
guccaacacuuguccauuc

SEQ ID NO: 2613435 - RNA, 19 nt, Artificial Sequence
  Description of Artificial Sequence: Synthetic oligonucleotide
aaucuccauggggacugau

SEQ ID NO: 2613436 - RNA, 19 nt, Artificial Sequence
  Description of Artificial Sequence: Synthetic oligonucleotide
uuuccuccgguugcccgcu

SEQ ID NO: 2613437 - RNA, 19 nt, Artificial Sequence
  Description of Artificial Sequence: Synthetic oligonucleotide
agcagacauuuaccuuccu

SEQ ID NO: 2613438 - RNA, 19 nt, Artificial Sequence
  Description of Artificial Sequence: Synthetic oligonucleotide
guaugucuaguugucugcu

SEQ ID NO: 2613439 - RNA, 19 nt, Artificial Sequence
  Description of Artificial Sequence: Synthetic oligonucleotide
guggcccucuuccaucauc

SEQ ID NO: 2613440 - RNA, 19 nt, Artificial Sequence
  Description of Artificial Sequence: Synthetic oligonucleotide
gacaaucuccauggggacu

SEQ ID NO: 2613441 - RNA, 19 nt, Artificial Sequence
  Description of Artificial Sequence: Synthetic oligonucleotide
gagcuuccguagcuucuuc

SEQ ID NO: 2613442 - RNA, 19 nt, Artificial Sequence
  Description of Artificial Sequence: Synthetic oligonucleotide
gcuuccuucuacacaugug

SEQ ID NO: 2613443 - RNA, 19 nt, Artificial Sequence
  Description of Artificial Sequence: Synthetic oligonucleotide
uccuccgguugcccgcuuc

SEQ ID NO: 2613444 - RNA, 19 nt, Artificial Sequence
  Description of Artificial Sequence: Synthetic oligonucleotide
gcuguccaacacuugucca

SEQ ID NO: 2613445 - RNA, 19 nt, Artificial Sequence
  Description of Artificial Sequence: Synthetic oligonucleotide
cuguccaacacuuguccau

SEQ ID NO: 2613446 - RNA, 19 nt, Artificial Sequence
  Description of Artificial Sequence: Synthetic oligonucleotide
auucaucugugaggacaca

SEQ ID NO: 2613447 - RNA, 19 nt, Artificial Sequence
  Description of Artificial Sequence: Synthetic oligonucleotide
gaacugcaugucagucaug

SEQ ID NO: 2613448 - RNA, 19 nt, Artificial Sequence
  Description of Artificial Sequence: Synthetic oligonucleotide
accagccauuggaggaggg

SEQ ID NO: 2613449 - RNA, 19 nt, Artificial Sequence
  Description of Artificial Sequence: Synthetic oligonucleotide
caucaucguaucuggaauu

SEQ ID NO: 2613450 - RNA, 19 nt, Artificial Sequence
  Description of Artificial Sequence: Synthetic oligonucleotide
guaaggagacaaacaugua

SEQ ID NO: 2613451 - RNA, 19 nt, Artificial Sequence
  Description of Artificial Sequence: Synthetic oligonucleotide
ccauggggacugauuuggg

SEQ ID NO: 2613452 - RNA, 19 nt, Artificial Sequence
  Description of Artificial Sequence: Synthetic oligonucleotide
ccaacacuuguccauucga

SEQ ID NO: 2613453 - RNA, 19 nt, Artificial Sequence
  Description of Artificial Sequence: Synthetic oligonucleotide
cacauguguaugucuaguu

SEQ ID NO: 2613454 - RNA, 19 nt, Artificial Sequence
  Description of Artificial Sequence: Synthetic oligonucleotide
gggccuugaagaugacuga

SEQ ID NO: 2613455 - RNA, 19 nt, Artificial Sequence
  Description of Artificial Sequence: Synthetic oligonucleotide
ggacugauuugggcugucc

SEQ ID NO: 2613456 - RNA, 19 nt, Artificial Sequence
  Description of Artificial Sequence: Synthetic oligonucleotide
cauucuucguggaggguuu

SEQ ID NO: 2613457 - RNA, 19 nt, Artificial Sequence
  Description of Artificial Sequence: Synthetic oligonucleotide
ggaggguuuccugguggcc

SEQ ID NO: 2613458 - RNA, 19 nt, Artificial Sequence
  Description of Artificial Sequence: Synthetic oligonucleotide
gcuauuccccagaagaaau

SEQ ID NO: 2613459 - RNA, 19 nt, Artificial Sequence
  Description of Artificial Sequence: Synthetic oligonucleotide
cgagauguaaaccaucuuu

SEQ ID NO: 2613460 - RNA, 19 nt, Artificial Sequence
  Description of Artificial Sequence: Synthetic oligonucleotide
cugcuucuuagagcagaca

SEQ ID NO: 2613461 - RNA, 19 nt, Artificial Sequence
  Description of Artificial Sequence: Synthetic oligonucleotide
cuuccguagcuucuucuuu

SEQ ID NO: 2613462 - RNA, 19 nt, Artificial Sequence
  Description of Artificial Sequence: Synthetic oligonucleotide
ccuccgguugcccgcuucc

SEQ ID NO: 2613463 - RNA, 19 nt, Artificial Sequence
  Description of Artificial Sequence: Synthetic oligonucleotide
augacugauucgacccauu

SEQ ID NO: 2613464 - RNA, 19 nt, Artificial Sequence
  Description of Artificial Sequence: Synthetic oligonucleotide
ccuacgugagcugcucuuc

SEQ ID NO: 2613465 - RNA, 19 nt, Artificial Sequence
  Description of Artificial Sequence: Synthetic oligonucleotide
ccccagaagaaaucuguua

SEQ ID NO: 2613466 - RNA, 19 nt, Artificial Sequence
  Description of Artificial Sequence: Synthetic oligonucleotide
ccaucaucguaucuggaau

SEQ ID NO: 2613467 - RNA, 19 nt, Artificial Sequence
  Description of Artificial Sequence: Synthetic oligonucleotide
cgacccauucuucguggag

SEQ ID NO: 2613468 - RNA, 19 nt, Artificial Sequence
  Description of Artificial Sequence: Synthetic oligonucleotide
gggcuguccaacacuuguc

SEQ ID NO: 2613469 - RNA, 19 nt, Artificial Sequence
  Description of Artificial Sequence: Synthetic oligonucleotide
ccaacaugaccucauucau

SEQ ID NO: 2613470 - RNA, 19 nt, Artificial Sequence
  Description of Artificial Sequence: Synthetic oligonucleotide
guccuacgugagcugcucu

SEQ ID NO: 2613471 - RNA, 19 nt, Artificial Sequence
  Description of Artificial Sequence: Synthetic oligonucleotide
ggagacaaacauguacauu

SEQ ID NO: 2613472 - RNA, 19 nt, Artificial Sequence
  Description of Artificial Sequence: Synthetic oligonucleotide
ccagauccuguagagggaa

SEQ ID NO: 2613473 - RNA, 19 nt, Artificial Sequence
  Description of Artificial Sequence: Synthetic oligonucleotide
caucuugcugaagcagagu

SEQ ID NO: 2613474 - RNA, 19 nt, Artificial Sequence
  Description of Artificial Sequence: Synthetic oligonucleotide
gccagauccuguagaggga

SEQ ID NO: 2613475 - RNA, 19 nt, Artificial Sequence
  Description of Artificial Sequence: Synthetic oligonucleotide
cgugagcugcucuucaucu

SEQ ID NO: 2613476 - RNA, 19 nt, Artificial Sequence
  Description of Artificial Sequence: Synthetic oligonucleotide
aggagggcuggggccuuga

SEQ ID NO: 2613477 - RNA, 19 nt, Artificial Sequence
  Description of Artificial Sequence: Synthetic oligonucleotide
ccauuggaggagggcuggg

SEQ ID NO: 2613478 - RNA, 19 nt, Artificial Sequence
  Description of Artificial Sequence: Synthetic oligonucleotide
cguggaggguuuccuggug

SEQ ID NO: 2613479 - RNA, 19 nt, Artificial Sequence
  Description of Artificial Sequence: Synthetic oligonucleotide
caaucuccauggggacuga

SEQ ID NO: 2613480 - RNA, 19 nt, Artificial Sequence
  Description of Artificial Sequence: Synthetic oligonucleotide
ggccuugaagaugacugau

SEQ ID NO: 2613481 - RNA, 19 nt, Artificial Sequence
  Description of Artificial Sequence: Synthetic oligonucleotide
gucuaguugucugcuucuu

SEQ ID NO: 2613482 - RNA, 19 nt, Artificial Sequence
  Description of Artificial Sequence: Synthetic oligonucleotide
uuccuccgguugcccgcuu

SEQ ID NO: 2613483 - RNA, 19 nt, Artificial Sequence
  Description of Artificial Sequence: Synthetic oligonucleotide
ccauucuucguggaggguu

SEQ ID NO: 2613484 - RNA, 19 nt, Artificial Sequence
  Description of Artificial Sequence: Synthetic oligonucleotide
gagcugcucuucaucucuu

SEQ ID NO: 2613485 - RNA, 19 nt, Artificial Sequence
  Description of Artificial Sequence: Synthetic oligonucleotide
gggacugauuugggcuguc

SEQ ID NO: 2613486 - RNA, 19 nt, Artificial Sequence
  Description of Artificial Sequence: Synthetic oligonucleotide
gccuugaagaugacugauu

SEQ ID NO: 2613487 - RNA, 19 nt, Artificial Sequence
  Description of Artificial Sequence: Synthetic oligonucleotide
ggggacugauuugggcugu

SEQ ID NO: 2613488 - RNA, 19 nt, Artificial Sequence
  Description of Artificial Sequence: Synthetic oligonucleotide
gguuuccugguggcccucu

SEQ ID NO: 2613489 - RNA, 19 nt, Artificial Sequence
  Description of Artificial Sequence: Synthetic oligonucleotide
gggcuggggccuugaagau

SEQ ID NO: 2613490 - RNA, 19 nt, Artificial Sequence
  Description of Artificial Sequence: Synthetic oligonucleotide
gguggcccucuuccaucau

SEQ ID NO: 2613491 - RNA, 19 nt, Artificial Sequence
  Description of Artificial Sequence: Synthetic oligonucleotide
cccauucuucguggagggu

SEQ ID NO: 2613492 - RNA, 19 nt, Artificial Sequence
  Description of Artificial Sequence: Synthetic oligonucleotide
auuuuaaugacugauccac

SEQ ID NO: 2613493 - RNA, 19 nt, Artificial Sequence
  Description of Artificial Sequence: Synthetic oligonucleotide
uuuaccacaacggaggacg

SEQ ID NO: 2613494 - RNA, 19 nt, Artificial Sequence
  Description of Artificial Sequence: Synthetic oligonucleotide
agggucaacagacaaaggc

SEQ ID NO: 2613495 - RNA, 19 nt, Artificial Sequence
  Description of Artificial Sequence: Synthetic oligonucleotide
aacggaggacgcuagaggc

SEQ ID NO: 2613496 - RNA, 19 nt, Artificial Sequence
  Description of Artificial Sequence: Synthetic oligonucleotide
caagcuaugguacaugugg

SEQ ID NO: 2613497 - RNA, 19 nt, Artificial Sequence
  Description of Artificial Sequence: Synthetic oligonucleotide
uugaccuucagguacaagc

SEQ ID NO: 2613498 - RNA, 19 nt, Artificial Sequence
  Description of Artificial Sequence: Synthetic oligonucleotide
agaccugcgagccucagcc

SEQ ID NO: 2613499 - RNA, 19 nt, Artificial Sequence
  Description of Artificial Sequence: Synthetic oligonucleotide
uuuauuuuaaugacugauc

SEQ ID NO: 2613500 - RNA, 19 nt, Artificial Sequence
  Description of Artificial Sequence: Synthetic oligonucleotide
uuucccuaugcccauaugc

SEQ ID NO: 2613501 - RNA, 19 nt, Artificial Sequence
  Description of Artificial Sequence: Synthetic oligonucleotide
uuggacagagucuugauga

SEQ ID NO: 2613502 - RNA, 19 nt, Artificial Sequence
  Description of Artificial Sequence: Synthetic oligonucleotide
ugacugauccaccugaggc

SEQ ID NO: 2613503 - RNA, 19 nt, Artificial Sequence
  Description of Artificial Sequence: Synthetic oligonucleotide
gaagacauucccuuugacc

SEQ ID NO: 2613504 - RNA, 19 nt, Artificial Sequence
  Description of Artificial Sequence: Synthetic oligonucleotide
uuggcuauuucauuggucu

SEQ ID NO: 2613505 - RNA, 19 nt, Artificial Sequence
  Description of Artificial Sequence: Synthetic oligonucleotide
uguacagacacgagggaag

SEQ ID NO: 2613506 - RNA, 19 nt, Artificial Sequence
  Description of Artificial Sequence: Synthetic oligonucleotide
uugggguccaaccagaccu

SEQ ID NO: 2613507 - RNA, 19 nt, Artificial Sequence
  Description of Artificial Sequence: Synthetic oligonucleotide
uugaucagcuuccuuaucu

SEQ ID NO: 2613508 - RNA, 19 nt, Artificial Sequence
  Description of Artificial Sequence: Synthetic oligonucleotide
aagcuuuauuucuuggucu

SEQ ID NO: 2613509 - RNA, 19 nt, Artificial Sequence
  Description of Artificial Sequence: Synthetic oligonucleotide
ucagguacaagcuauggua

SEQ ID NO: 2613510 - RNA, 19 nt, Artificial Sequence
  Description of Artificial Sequence: Synthetic oligonucleotide
uuggucuuagaccugcgag

SEQ ID NO: 2613511 - RNA, 19 nt, Artificial Sequence
  Description of Artificial Sequence: Synthetic oligonucleotide
agccugagcauacucaugg

SEQ ID NO: 2613512 - RNA, 19 nt, Artificial Sequence
  Description of Artificial Sequence: Synthetic oligonucleotide
uaaugacugauccaccuga

SEQ ID NO: 2613513 - RNA, 19 nt, Artificial Sequence
  Description of Artificial Sequence: Synthetic oligonucleotide
uuauuucuuggucucuucc

SEQ ID NO: 2613514 - RNA, 19 nt, Artificial Sequence
  Description of Artificial Sequence: Synthetic oligonucleotide
uauuuuaaugacugaucca

SEQ ID NO: 2613515 - RNA, 19 nt, Artificial Sequence
  Description of Artificial Sequence: Synthetic oligonucleotide
uuuuaaugacugauccacc

SEQ ID NO: 2613516 - RNA, 19 nt, Artificial Sequence
  Description of Artificial Sequence: Synthetic oligonucleotide
ucuccugagaagucgacgc

SEQ ID NO: 2613517 - RNA, 19 nt, Artificial Sequence
  Description of Artificial Sequence: Synthetic oligonucleotide
gaagcuuuauuucuugguc

SEQ ID NO: 2613518 - RNA, 19 nt, Artificial Sequence
  Description of Artificial Sequence: Synthetic oligonucleotide
ggaaugaacagucacgggc

SEQ ID NO: 2613519 - RNA, 19 nt, Artificial Sequence
  Description of Artificial Sequence: Synthetic oligonucleotide
uucccuaugcccauaugcc

SEQ ID NO: 2613520 - RNA, 19 nt, Artificial Sequence
  Description of Artificial Sequence: Synthetic oligonucleotide
agcuuuauuucuuggucuc

SEQ ID NO: 2613521 - RNA, 19 nt, Artificial Sequence
  Description of Artificial Sequence: Synthetic oligonucleotide
uguagccugagcauacuca

SEQ ID NO: 2613522 - RNA, 19 nt, Artificial Sequence
  Description of Artificial Sequence: Synthetic oligonucleotide
ucauuggucucauuggggu

SEQ ID NO: 2613523 - RNA, 19 nt, Artificial Sequence
  Description of Artificial Sequence: Synthetic oligonucleotide
aagcuaugguacauguggc

SEQ ID NO: 2613524 - RNA, 19 nt, Artificial Sequence
  Description of Artificial Sequence: Synthetic oligonucleotide
gagaagucgacgcaggauc

SEQ ID NO: 2613525 - RNA, 19 nt, Artificial Sequence
  Description of Artificial Sequence: Synthetic oligonucleotide
uuggaggcgcuccucacgg

SEQ ID NO: 2613526 - RNA, 19 nt, Artificial Sequence
  Description of Artificial Sequence: Synthetic oligonucleotide
cuuccgucgagccaaagug

SEQ ID NO: 2613527 - RNA, 19 nt, Artificial Sequence
  Description of Artificial Sequence: Synthetic oligonucleotide
uaugccugcccuuccgucg

SEQ ID NO: 2613528 - RNA, 19 nt, Artificial Sequence
  Description of Artificial Sequence: Synthetic oligonucleotide
uggaugugcuccaugagaa

SEQ ID NO: 2613529 - RNA, 19 nt, Artificial Sequence
  Description of Artificial Sequence: Synthetic oligonucleotide
ugaccuucagguacaagcu

SEQ ID NO: 2613530 - RNA, 19 nt, Artificial Sequence
  Description of Artificial Sequence: Synthetic oligonucleotide
uuggauucccgguaucucc

SEQ ID NO: 2613531 - RNA, 19 nt, Artificial Sequence
  Description of Artificial Sequence: Synthetic oligonucleotide
uuccguuucccuaugccca

SEQ ID NO: 2613532 - RNA, 19 nt, Artificial Sequence
  Description of Artificial Sequence: Synthetic oligonucleotide
cugagcauacucauggcug

SEQ ID NO: 2613533 - RNA, 19 nt, Artificial Sequence
  Description of Artificial Sequence: Synthetic oligonucleotide
ugagcauacucauggcugc

SEQ ID NO: 2613534 - RNA, 19 nt, Artificial Sequence
  Description of Artificial Sequence: Synthetic oligonucleotide
agcuaugguacauguggcg

SEQ ID NO: 2613535 - RNA, 19 nt, Artificial Sequence
  Description of Artificial Sequence: Synthetic oligonucleotide
ucucauugggguccaacca

SEQ ID NO: 2613536 - RNA, 19 nt, Artificial Sequence
  Description of Artificial Sequence: Synthetic oligonucleotide
uuccuuaucugcugacggg

SEQ ID NO: 2613537 - RNA, 19 nt, Artificial Sequence
  Description of Artificial Sequence: Synthetic oligonucleotide
gacugauccaccugaggcc

SEQ ID NO: 2613538 - RNA, 19 nt, Artificial Sequence
  Description of Artificial Sequence: Synthetic oligonucleotide
cuuccguuucccuaugccc

SEQ ID NO: 2613539 - RNA, 19 nt, Artificial Sequence
  Description of Artificial Sequence: Synthetic oligonucleotide
uucagguacaagcuauggu

SEQ ID NO: 2613540 - RNA, 19 nt, Artificial Sequence
  Description of Artificial Sequence: Synthetic oligonucleotide
uacaagcuaugguacaugu

SEQ ID NO: 2613541 - RNA, 19 nt, Artificial Sequence
  Description of Artificial Sequence: Synthetic oligonucleotide
auacucauggcugcggacg

SEQ ID NO: 2613542 - RNA, 19 nt, Artificial Sequence
  Description of Artificial Sequence: Synthetic oligonucleotide
aacagucacgggcuuccgg

SEQ ID NO: 2613543 - RNA, 19 nt, Artificial Sequence
  Description of Artificial Sequence: Synthetic oligonucleotide
uggucuuagaccugcgagc

SEQ ID NO: 2613544 - RNA, 19 nt, Artificial Sequence
  Description of Artificial Sequence: Synthetic oligonucleotide
ucucgcauuggcaguaccc

SEQ ID NO: 2613545 - RNA, 19 nt, Artificial Sequence
  Description of Artificial Sequence: Synthetic oligonucleotide
ugaucagcuuccuuaucug

SEQ ID NO: 2613546 - RNA, 19 nt, Artificial Sequence
  Description of Artificial Sequence: Synthetic oligonucleotide
auuggcaguacccuuccgu

SEQ ID NO: 2613547 - RNA, 19 nt, Artificial Sequence
  Description of Artificial Sequence: Synthetic oligonucleotide
aagucgacgcaggauccgc

SEQ ID NO: 2613548 - RNA, 19 nt, Artificial Sequence
  Description of Artificial Sequence: Synthetic oligonucleotide
caaucuucuuggauucccg

SEQ ID NO: 2613549 - RNA, 19 nt, Artificial Sequence
  Description of Artificial Sequence: Synthetic oligonucleotide
augugcuccaugagaaucc

SEQ ID NO: 2613550 - RNA, 19 nt, Artificial Sequence
  Description of Artificial Sequence: Synthetic oligonucleotide
ggcauuggcuauuucauug

SEQ ID NO: 2613551 - RNA, 19 nt, Artificial Sequence
  Description of Artificial Sequence: Synthetic oligonucleotide
augagaauccgcuuauuuu

SEQ ID NO: 2613552 - RNA, 19 nt, Artificial Sequence
  Description of Artificial Sequence: Synthetic oligonucleotide
cagcccacuauguacagac

SEQ ID NO: 2613553 - RNA, 19 nt, Artificial Sequence
  Description of Artificial Sequence: Synthetic oligonucleotide
ugaacagucacgggcuucc

SEQ ID NO: 2613554 - RNA, 19 nt, Artificial Sequence
  Description of Artificial Sequence: Synthetic oligonucleotide
cucauugggguccaaccag

SEQ ID NO: 2613555 - RNA, 19 nt, Artificial Sequence
  Description of Artificial Sequence: Synthetic oligonucleotide
agaagucgacgcaggaucc

SEQ ID NO: 2613556 - RNA, 19 nt, Artificial Sequence
  Description of Artificial Sequence: Synthetic oligonucleotide
cuccuucuuggcuuggagg

SEQ ID NO: 2613557 - RNA, 19 nt, Artificial Sequence
  Description of Artificial Sequence: Synthetic oligonucleotide
gucucauugggguccaacc

SEQ ID NO: 2613558 - RNA, 19 nt, Artificial Sequence
  Description of Artificial Sequence: Synthetic oligonucleotide
guggcggucaaucuucuug

SEQ ID NO: 2613559 - RNA, 19 nt, Artificial Sequence
  Description of Artificial Sequence: Synthetic oligonucleotide
augacugauccaccugagg

SEQ ID NO: 2613560 - RNA, 19 nt, Artificial Sequence
  Description of Artificial Sequence: Synthetic oligonucleotide
ucuucuguagccugagcau

SEQ ID NO: 2613561 - RNA, 19 nt, Artificial Sequence
  Description of Artificial Sequence: Synthetic oligonucleotide
ggcauucucgcauuggcag

SEQ ID NO: 2613562 - RNA, 19 nt, Artificial Sequence
  Description of Artificial Sequence: Synthetic oligonucleotide
aacagacaaaggcuuguuu

SEQ ID NO: 2613563 - RNA, 19 nt, Artificial Sequence
  Description of Artificial Sequence: Synthetic oligonucleotide
gaugugcuccaugagaauc

SEQ ID NO: 2613564 - RNA, 19 nt, Artificial Sequence
  Description of Artificial Sequence: Synthetic oligonucleotide
uuuuccggcaucgggcccg

SEQ ID NO: 2613565 - RNA, 19 nt, Artificial Sequence
  Description of Artificial Sequence: Synthetic oligonucleotide
ucauugggguccaaccaga

SEQ ID NO: 2613566 - RNA, 19 nt, Artificial Sequence
  Description of Artificial Sequence: Synthetic oligonucleotide
cuuggacagagucuugaug

SEQ ID NO: 2613567 - RNA, 19 nt, Artificial Sequence
  Description of Artificial Sequence: Synthetic oligonucleotide
cauguggcggucaaucuuc

SEQ ID NO: 2613568 - RNA, 19 nt, Artificial Sequence
  Description of Artificial Sequence: Synthetic oligonucleotide
uucuguagccugagcauac

SEQ ID NO: 2613569 - RNA, 19 nt, Artificial Sequence
  Description of Artificial Sequence: Synthetic oligonucleotide
aaugacugauccaccugag

SEQ ID NO: 2613570 - RNA, 19 nt, Artificial Sequence
  Description of Artificial Sequence: Synthetic oligonucleotide
caacggaggacgcuagagg

SEQ ID NO: 2613571 - RNA, 19 nt, Artificial Sequence
  Description of Artificial Sequence: Synthetic oligonucleotide
agaggcaagccucuucugu

SEQ ID NO: 2613572 - RNA, 19 nt, Artificial Sequence
  Description of Artificial Sequence: Synthetic oligonucleotide
gaucagcccaucuuugauc

SEQ ID NO: 2613573 - RNA, 19 nt, Artificial Sequence
  Description of Artificial Sequence: Synthetic oligonucleotide
acagucacgggcuuccgga

SEQ ID NO: 2613574 - RNA, 19 nt, Artificial Sequence
  Description of Artificial Sequence: Synthetic oligonucleotide
ugcuuccuuggucuuagac

SEQ ID NO: 2613575 - RNA, 19 nt, Artificial Sequence
  Description of Artificial Sequence: Synthetic oligonucleotide
gaugaucagcccaucuuug

SEQ ID NO: 2613576 - RNA, 19 nt, Artificial Sequence
  Description of Artificial Sequence: Synthetic oligonucleotide
ggcuuguuuuauuuuaaug

SEQ ID NO: 2613577 - RNA, 19 nt, Artificial Sequence
  Description of Artificial Sequence: Synthetic oligonucleotide
auaugccugcccuuccguc

SEQ ID NO: 2613578 - RNA, 19 nt, Artificial Sequence
  Description of Artificial Sequence: Synthetic oligonucleotide
gcuuccuuggucuuagacc

SEQ ID NO: 2613579 - RNA, 19 nt, Artificial Sequence
  Description of Artificial Sequence: Synthetic oligonucleotide
gguaucuccugagaagucg

SEQ ID NO: 2613580 - RNA, 19 nt, Artificial Sequence
  Description of Artificial Sequence: Synthetic oligonucleotide
ugaucagcccaucuuugau

SEQ ID NO: 2613581 - RNA, 19 nt, Artificial Sequence
  Description of Artificial Sequence: Synthetic oligonucleotide
auuggcuauuucauugguc

SEQ ID NO: 2613582 - RNA, 19 nt, Artificial Sequence
  Description of Artificial Sequence: Synthetic oligonucleotide
ugugcuccaugagaauccg

SEQ ID NO: 2613583 - RNA, 19 nt, Artificial Sequence
  Description of Artificial Sequence: Synthetic oligonucleotide
ugaagacauucccuuugac

SEQ ID NO: 2613584 - RNA, 19 nt, Artificial Sequence
  Description of Artificial Sequence: Synthetic oligonucleotide
ucaacagacaaaggcuugu

SEQ ID NO: 2613585 - RNA, 19 nt, Artificial Sequence
  Description of Artificial Sequence: Synthetic oligonucleotide
gacgcuagaggcaagccuc

SEQ ID NO: 2613586 - RNA, 19 nt, Artificial Sequence
  Description of Artificial Sequence: Synthetic oligonucleotide
ucuuagaccugcgagccuc

SEQ ID NO: 2613587 - RNA, 19 nt, Artificial Sequence
  Description of Artificial Sequence: Synthetic oligonucleotide
uccaugagaauccgcuuau

SEQ ID NO: 2613588 - RNA, 19 nt, Artificial Sequence
  Description of Artificial Sequence: Synthetic oligonucleotide
uccuuaucugcugacggga

SEQ ID NO: 2613589 - RNA, 19 nt, Artificial Sequence
  Description of Artificial Sequence: Synthetic oligonucleotide
caggcauucucgcauuggc

SEQ ID NO: 2613590 - RNA, 19 nt, Artificial Sequence
  Description of Artificial Sequence: Synthetic oligonucleotide
uggauucccgguaucuccu

SEQ ID NO: 2613591 - RNA, 19 nt, Artificial Sequence
  Description of Artificial Sequence: Synthetic oligonucleotide
uacucauggcugcggacgc

SEQ ID NO: 2613592 - RNA, 19 nt, Artificial Sequence
  Description of Artificial Sequence: Synthetic oligonucleotide
caggcagcccacuauguac

SEQ ID NO: 2613593 - RNA, 19 nt, Artificial Sequence
  Description of Artificial Sequence: Synthetic oligonucleotide
ucaggcauucucgcauugg

SEQ ID NO: 2613594 - RNA, 19 nt, Artificial Sequence
  Description of Artificial Sequence: Synthetic oligonucleotide
ucugcugacgggaguuggc

SEQ ID NO: 2613595 - RNA, 19 nt, Artificial Sequence
  Description of Artificial Sequence: Synthetic oligonucleotide
cuuggaggcgcuccucacg

SEQ ID NO: 2613596 - RNA, 19 nt, Artificial Sequence
  Description of Artificial Sequence: Synthetic oligonucleotide
gacagagucuugaugaucu

SEQ ID NO: 2613597 - RNA, 19 nt, Artificial Sequence
  Description of Artificial Sequence: Synthetic oligonucleotide
acaacggaggacgcuagag

SEQ ID NO: 2613598 - RNA, 19 nt, Artificial Sequence
  Description of Artificial Sequence: Synthetic oligonucleotide
agagucuugaugaucuccu

SEQ ID NO: 2613599 - RNA, 19 nt, Artificial Sequence
  Description of Artificial Sequence: Synthetic oligonucleotide
uacauguggcggucaaucu

SEQ ID NO: 2613600 - RNA, 19 nt, Artificial Sequence
  Description of Artificial Sequence: Synthetic oligonucleotide
ucccuaugcccauaugccu

SEQ ID NO: 2613601 - RNA, 19 nt, Artificial Sequence
  Description of Artificial Sequence: Synthetic oligonucleotide
auucccgguaucuccugag

SEQ ID NO: 2613602 - RNA, 19 nt, Artificial Sequence
  Description of Artificial Sequence: Synthetic oligonucleotide
uuccgucgagccaaagugu

SEQ ID NO: 2613603 - RNA, 19 nt, Artificial Sequence
  Description of Artificial Sequence: Synthetic oligonucleotide
augaucagcccaucuuuga

SEQ ID NO: 2613604 - RNA, 19 nt, Artificial Sequence
  Description of Artificial Sequence: Synthetic oligonucleotide
cagagucuugaugaucucc

SEQ ID NO: 2613605 - RNA, 19 nt, Artificial Sequence
  Description of Artificial Sequence: Synthetic oligonucleotide
uucuugcgggccuugucug

SEQ ID NO: 2613606 - RNA, 19 nt, Artificial Sequence
  Description of Artificial Sequence: Synthetic oligonucleotide
augcccauaugccugcccu

SEQ ID NO: 2613607 - RNA, 19 nt, Artificial Sequence
  Description of Artificial Sequence: Synthetic oligonucleotide
uuaccacaacggaggacgc

SEQ ID NO: 2613608 - RNA, 19 nt, Artificial Sequence
  Description of Artificial Sequence: Synthetic oligonucleotide
gaagucgacgcaggauccg

SEQ ID NO: 2613609 - RNA, 19 nt, Artificial Sequence
  Description of Artificial Sequence: Synthetic oligonucleotide
gggaagcuuuauuucuugg

SEQ ID NO: 2613610 - RNA, 19 nt, Artificial Sequence
  Description of Artificial Sequence: Synthetic oligonucleotide
gaaugaacagucacgggcu

SEQ ID NO: 2613611 - RNA, 19 nt, Artificial Sequence
  Description of Artificial Sequence: Synthetic oligonucleotide
aaggcuuguuuuauuuuaa

SEQ ID NO: 2613612 - RNA, 19 nt, Artificial Sequence
  Description of Artificial Sequence: Synthetic oligonucleotide
gcaggauccgcauccuucg

SEQ ID NO: 2613613 - RNA, 19 nt, Artificial Sequence
  Description of Artificial Sequence: Synthetic oligonucleotide
cuucuuggcuuggaggcgc

SEQ ID NO: 2613614 - RNA, 19 nt, Artificial Sequence
  Description of Artificial Sequence: Synthetic oligonucleotide
cauacucauggcugcggac

SEQ ID NO: 2613615 - RNA, 19 nt, Artificial Sequence
  Description of Artificial Sequence: Synthetic oligonucleotide
uucucgcauuggcaguacc

SEQ ID NO: 2613616 - RNA, 19 nt, Artificial Sequence
  Description of Artificial Sequence: Synthetic oligonucleotide
uuggcaguacccuuccguu

SEQ ID NO: 2613617 - RNA, 19 nt, Artificial Sequence
  Description of Artificial Sequence: Synthetic oligonucleotide
uuuuaccacaacggaggac

SEQ ID NO: 2613618 - RNA, 19 nt, Artificial Sequence
  Description of Artificial Sequence: Synthetic oligonucleotide
aggacgcuagaggcaagcc

SEQ ID NO: 2613619 - RNA, 19 nt, Artificial Sequence
  Description of Artificial Sequence: Synthetic oligonucleotide
ugagaagucgacgcaggau

SEQ ID NO: 2613620 - RNA, 19 nt, Artificial Sequence
  Description of Artificial Sequence: Synthetic oligonucleotide
acauguggcggucaaucuu

SEQ ID NO: 2613621 - RNA, 19 nt, Artificial Sequence
  Description of Artificial Sequence: Synthetic oligonucleotide
accugcgagccucagccug

SEQ ID NO: 2613622 - RNA, 19 nt, Artificial Sequence
  Description of Artificial Sequence: Synthetic oligonucleotide
uuccggaugaucagcccau

SEQ ID NO: 2613623 - RNA, 19 nt, Artificial Sequence
  Description of Artificial Sequence: Synthetic oligonucleotide
uccgucgagccaaaguguu

SEQ ID NO: 2613624 - RNA, 19 nt, Artificial Sequence
  Description of Artificial Sequence: Synthetic oligonucleotide
uagaccugcgagccucagc

SEQ ID NO: 2613625 - RNA, 19 nt, Artificial Sequence
  Description of Artificial Sequence: Synthetic oligonucleotide
ggucuuagaccugcgagcc

SEQ ID NO: 2613626 - RNA, 19 nt, Artificial Sequence
  Description of Artificial Sequence: Synthetic oligonucleotide
uagccugagcauacucaug

SEQ ID NO: 2613627 - RNA, 19 nt, Artificial Sequence
  Description of Artificial Sequence: Synthetic oligonucleotide
uacccuuccguuucccuau

SEQ ID NO: 2613628 - RNA, 19 nt, Artificial Sequence
  Description of Artificial Sequence: Synthetic oligonucleotide
uucccgguaucuccugaga

SEQ ID NO: 2613629 - RNA, 19 nt, Artificial Sequence
  Description of Artificial Sequence: Synthetic oligonucleotide
guacagacacgagggaagc

SEQ ID NO: 2613630 - RNA, 19 nt, Artificial Sequence
  Description of Artificial Sequence: Synthetic oligonucleotide
augaacagucacgggcuuc

SEQ ID NO: 2613631 - RNA, 19 nt, Artificial Sequence
  Description of Artificial Sequence: Synthetic oligonucleotide
aguacccuuccguuucccu

SEQ ID NO: 2613632 - RNA, 19 nt, Artificial Sequence
  Description of Artificial Sequence: Synthetic oligonucleotide
aggauccgcauccuucgca

SEQ ID NO: 2613633 - RNA, 19 nt, Artificial Sequence
  Description of Artificial Sequence: Synthetic oligonucleotide
aucugcugacgggaguugg

SEQ ID NO: 2613634 - RNA, 19 nt, Artificial Sequence
  Description of Artificial Sequence: Synthetic oligonucleotide
gagcauacucauggcugcg

SEQ ID NO: 2613635 - RNA, 19 nt, Artificial Sequence
  Description of Artificial Sequence: Synthetic oligonucleotide
uuugaccuucagguacaag

SEQ ID NO: 2613636 - RNA, 19 nt, Artificial Sequence
  Description of Artificial Sequence: Synthetic oligonucleotide
ccgggaaugaacagucacg

SEQ ID NO: 2613637 - RNA, 19 nt, Artificial Sequence
  Description of Artificial Sequence: Synthetic oligonucleotide
gacgggaguuggcauuggc

SEQ ID NO: 2613638 - RNA, 19 nt, Artificial Sequence
  Description of Artificial Sequence: Synthetic oligonucleotide
ucgcauccaggucaccuuc

SEQ ID NO: 2613639 - RNA, 19 nt, Artificial Sequence
  Description of Artificial Sequence: Synthetic oligonucleotide
cauugggguccaaccagac

SEQ ID NO: 2613640 - RNA, 19 nt, Artificial Sequence
  Description of Artificial Sequence: Synthetic oligonucleotide
aguuggcauuggcuauuuc

SEQ ID NO: 2613641 - RNA, 19 nt, Artificial Sequence
  Description of Artificial Sequence: Synthetic oligonucleotide
gggaaugaacagucacggg

SEQ ID NO: 2613642 - RNA, 19 nt, Artificial Sequence
  Description of Artificial Sequence: Synthetic oligonucleotide
gaggacgcuagaggcaagc

SEQ ID NO: 2613643 - RNA, 19 nt, Artificial Sequence
  Description of Artificial Sequence: Synthetic oligonucleotide
uagaggcaagccucuucug

SEQ ID NO: 2613644 - RNA, 19 nt, Artificial Sequence
  Description of Artificial Sequence: Synthetic oligonucleotide
ggaggcgcuccucacggcg

SEQ ID NO: 2613645 - RNA, 19 nt, Artificial Sequence
  Description of Artificial Sequence: Synthetic oligonucleotide
uggcuauuucauuggucuc

SEQ ID NO: 2613646 - RNA, 19 nt, Artificial Sequence
  Description of Artificial Sequence: Synthetic oligonucleotide
ugguacauguggcggucaa

SEQ ID NO: 2613647 - RNA, 19 nt, Artificial Sequence
  Description of Artificial Sequence: Synthetic oligonucleotide
ugcccuuccgucgagccaa

SEQ ID NO: 2613648 - RNA, 19 nt, Artificial Sequence
  Description of Artificial Sequence: Synthetic oligonucleotide
cagacaaaggcuuguuuua

SEQ ID NO: 2613649 - RNA, 19 nt, Artificial Sequence
  Description of Artificial Sequence: Synthetic oligonucleotide
gcccacuauguacagacac

SEQ ID NO: 2613650 - RNA, 19 nt, Artificial Sequence
  Description of Artificial Sequence: Synthetic oligonucleotide
gaggcaagccucuucugua

SEQ ID NO: 2613651 - RNA, 19 nt, Artificial Sequence
  Description of Artificial Sequence: Synthetic oligonucleotide
uucuuggauucccgguauc

SEQ ID NO: 2613652 - RNA, 19 nt, Artificial Sequence
  Description of Artificial Sequence: Synthetic oligonucleotide
gauucccgguaucuccuga

SEQ ID NO: 2613653 - RNA, 19 nt, Artificial Sequence
  Description of Artificial Sequence: Synthetic oligonucleotide
acgggcuuccggaugauca

SEQ ID NO: 2613654 - RNA, 19 nt, Artificial Sequence
  Description of Artificial Sequence: Synthetic oligonucleotide
cuuggauucccgguaucuc

SEQ ID NO: 2613655 - RNA, 19 nt, Artificial Sequence
  Description of Artificial Sequence: Synthetic oligonucleotide
uucgcauccaggucaccuu

SEQ ID NO: 2613656 - RNA, 19 nt, Artificial Sequence
  Description of Artificial Sequence: Synthetic oligonucleotide
accuucagguacaagcuau

SEQ ID NO: 2613657 - RNA, 19 nt, Artificial Sequence
  Description of Artificial Sequence: Synthetic oligonucleotide
cuagaggcaagccucuucu

SEQ ID NO: 2613658 - RNA, 19 nt, Artificial Sequence
  Description of Artificial Sequence: Synthetic oligonucleotide
uccggcaucgggcccggga

SEQ ID NO: 2613659 - RNA, 19 nt, Artificial Sequence
  Description of Artificial Sequence: Synthetic oligonucleotide
gcggacgcagcagagaaag

SEQ ID NO: 2613660 - RNA, 19 nt, Artificial Sequence
  Description of Artificial Sequence: Synthetic oligonucleotide
ucagccuggucagccagga

SEQ ID NO: 2613661 - RNA, 19 nt, Artificial Sequence
  Description of Artificial Sequence: Synthetic oligonucleotide
auucucgcauuggcaguac

SEQ ID NO: 2613662 - RNA, 19 nt, Artificial Sequence
  Description of Artificial Sequence: Synthetic oligonucleotide
ggucucuuccuccuuggac

SEQ ID NO: 2613663 - RNA, 19 nt, Artificial Sequence
  Description of Artificial Sequence: Synthetic oligonucleotide
aggucaccuucucaggcau

SEQ ID NO: 2613664 - RNA, 19 nt, Artificial Sequence
  Description of Artificial Sequence: Synthetic oligonucleotide
uaucugcugacgggaguug

SEQ ID NO: 2613665 - RNA, 19 nt, Artificial Sequence
  Description of Artificial Sequence: Synthetic oligonucleotide
ccuucucaggcauucucgc

SEQ ID NO: 2613666 - RNA, 19 nt, Artificial Sequence
  Description of Artificial Sequence: Synthetic oligonucleotide
gucaccuucucaggcauuc

SEQ ID NO: 2613667 - RNA, 19 nt, Artificial Sequence
  Description of Artificial Sequence: Synthetic oligonucleotide
ccucacggcgcuuucgugc

SEQ ID NO: 2613668 - RNA, 19 nt, Artificial Sequence
  Description of Artificial Sequence: Synthetic oligonucleotide
ugccuucagcuuguggaug

SEQ ID NO: 2613669 - RNA, 19 nt, Artificial Sequence
  Description of Artificial Sequence: Synthetic oligonucleotide
guaucuccugagaagucga

SEQ ID NO: 2613670 - RNA, 19 nt, Artificial Sequence
  Description of Artificial Sequence: Synthetic oligonucleotide
cuuggucuuagaccugcga

SEQ ID NO: 2613671 - RNA, 19 nt, Artificial Sequence
  Description of Artificial Sequence: Synthetic oligonucleotide
uggcauuggcuauuucauu

SEQ ID NO: 2613672 - RNA, 19 nt, Artificial Sequence
  Description of Artificial Sequence: Synthetic oligonucleotide
cauuggcaguacccuuccg

SEQ ID NO: 2613673 - RNA, 19 nt, Artificial Sequence
  Description of Artificial Sequence: Synthetic oligonucleotide
acaggcagcccacuaugua

SEQ ID NO: 2613674 - RNA, 19 nt, Artificial Sequence
  Description of Artificial Sequence: Synthetic oligonucleotide
gcaagccucuucuguagcc

SEQ ID NO: 2613675 - RNA, 19 nt, Artificial Sequence
  Description of Artificial Sequence: Synthetic oligonucleotide
ggaagcuuuauuucuuggu

SEQ ID NO: 2613676 - RNA, 19 nt, Artificial Sequence
  Description of Artificial Sequence: Synthetic oligonucleotide
ggcuauuucauuggucuca

SEQ ID NO: 2613677 - RNA, 19 nt, Artificial Sequence
  Description of Artificial Sequence: Synthetic oligonucleotide
cugacgggaguuggcauug

SEQ ID NO: 2613678 - RNA, 19 nt, Artificial Sequence
  Description of Artificial Sequence: Synthetic oligonucleotide
cgggaaugaacagucacgg

SEQ ID NO: 2613679 - RNA, 19 nt, Artificial Sequence
  Description of Artificial Sequence: Synthetic oligonucleotide
acggcgcuuucgugcuucc

SEQ ID NO: 2613680 - RNA, 19 nt, Artificial Sequence
  Description of Artificial Sequence: Synthetic oligonucleotide
uccucacggcgcuuucgug

SEQ ID NO: 2613681 - RNA, 19 nt, Artificial Sequence
  Description of Artificial Sequence: Synthetic oligonucleotide
gaacagucacgggcuuccg

SEQ ID NO: 2613682 - RNA, 19 nt, Artificial Sequence
  Description of Artificial Sequence: Synthetic oligonucleotide
ucgacgcaggauccgcauc

SEQ ID NO: 2613683 - RNA, 19 nt, Artificial Sequence
  Description of Artificial Sequence: Synthetic oligonucleotide
cuucucaggcauucucgca

SEQ ID NO: 2613684 - RNA, 19 nt, Artificial Sequence
  Description of Artificial Sequence: Synthetic oligonucleotide
guagccugagcauacucau

SEQ ID NO: 2613685 - RNA, 19 nt, Artificial Sequence
  Description of Artificial Sequence: Synthetic oligonucleotide
accacaacggaggacgcua

SEQ ID NO: 2613686 - RNA, 19 nt, Artificial Sequence
  Description of Artificial Sequence: Synthetic oligonucleotide
auggcugcggacgcagcag

SEQ ID NO: 2613687 - RNA, 19 nt, Artificial Sequence
  Description of Artificial Sequence: Synthetic oligonucleotide
acacgagggaagcuuuauu

SEQ ID NO: 2613688 - RNA, 19 nt, Artificial Sequence
  Description of Artificial Sequence: Synthetic oligonucleotide
uuagaccugcgagccucag

SEQ ID NO: 2613689 - RNA, 19 nt, Artificial Sequence
  Description of Artificial Sequence: Synthetic oligonucleotide
cucaggcauucucgcauug

SEQ ID NO: 2613690 - RNA, 19 nt, Artificial Sequence
  Description of Artificial Sequence: Synthetic oligonucleotide
uccguuucccuaugcccau

SEQ ID NO: 2613691 - RNA, 19 nt, Artificial Sequence
  Description of Artificial Sequence: Synthetic oligonucleotide
ugauccaccugaggccaca

SEQ ID NO: 2613692 - RNA, 19 nt, Artificial Sequence
  Description of Artificial Sequence: Synthetic oligonucleotide
uacagacacgagggaagcu

SEQ ID NO: 2613693 - RNA, 19 nt, Artificial Sequence
  Description of Artificial Sequence: Synthetic oligonucleotide
cuucuugcgggccuugucu

SEQ ID NO: 2613694 - RNA, 19 nt, Artificial Sequence
  Description of Artificial Sequence: Synthetic oligonucleotide
cccuaugcccauaugccug

SEQ ID NO: 2613695 - RNA, 19 nt, Artificial Sequence
  Description of Artificial Sequence: Synthetic oligonucleotide
ugcugacgggaguuggcau

SEQ ID NO: 2613696 - RNA, 19 nt, Artificial Sequence
  Description of Artificial Sequence: Synthetic oligonucleotide
gaccuucagguacaagcua

SEQ ID NO: 2613697 - RNA, 19 nt, Artificial Sequence
  Description of Artificial Sequence: Synthetic oligonucleotide
acgggaguuggcauuggcu

SEQ ID NO: 2613698 - RNA, 19 nt, Artificial Sequence
  Description of Artificial Sequence: Synthetic oligonucleotide
augccugcccuuccgucga

SEQ ID NO: 2613699 - RNA, 19 nt, Artificial Sequence
  Description of Artificial Sequence: Synthetic oligonucleotide
uucuuggcuuggaggcgcu

SEQ ID NO: 2613700 - RNA, 19 nt, Artificial Sequence
  Description of Artificial Sequence: Synthetic oligonucleotide
ccuaugcccauaugccugc

SEQ ID NO: 2613701 - RNA, 19 nt, Artificial Sequence
  Description of Artificial Sequence: Synthetic oligonucleotide
aggcagcccacuauguaca

SEQ ID NO: 2613702 - RNA, 19 nt, Artificial Sequence
  Description of Artificial Sequence: Synthetic oligonucleotide
guacccuuccguuucccua

SEQ ID NO: 2613703 - RNA, 19 nt, Artificial Sequence
  Description of Artificial Sequence: Synthetic oligonucleotide
caugagaauccgcuuauuu

SEQ ID NO: 2613704 - RNA, 19 nt, Artificial Sequence
  Description of Artificial Sequence: Synthetic oligonucleotide
aucgggcccgggaaugaac

SEQ ID NO: 2613705 - RNA, 19 nt, Artificial Sequence
  Description of Artificial Sequence: Synthetic oligonucleotide
gcauuggcaguacccuucc

SEQ ID NO: 2613706 - RNA, 19 nt, Artificial Sequence
  Description of Artificial Sequence: Synthetic oligonucleotide
agcccaucuuugaucagcu

SEQ ID NO: 2613707 - RNA, 19 nt, Artificial Sequence
  Description of Artificial Sequence: Synthetic oligonucleotide
cauucccuuugaccuucag

SEQ ID NO: 2613708 - RNA, 19 nt, Artificial Sequence
  Description of Artificial Sequence: Synthetic oligonucleotide
cuaugguacauguggcggu

SEQ ID NO: 2613709 - RNA, 19 nt, Artificial Sequence
  Description of Artificial Sequence: Synthetic oligonucleotide
uggcaguacccuuccguuu

SEQ ID NO: 2613710 - RNA, 19 nt, Artificial Sequence
  Description of Artificial Sequence: Synthetic oligonucleotide
ccuuaucugcugacgggag

SEQ ID NO: 2613711 - RNA, 19 nt, Artificial Sequence
  Description of Artificial Sequence: Synthetic oligonucleotide
gauccgcauccuucgcauc

SEQ ID NO: 2613712 - RNA, 19 nt, Artificial Sequence
  Description of Artificial Sequence: Synthetic oligonucleotide
ugcggacgcagcagagaaa

SEQ ID NO: 2613713 - RNA, 19 nt, Artificial Sequence
  Description of Artificial Sequence: Synthetic oligonucleotide
ugacgggaguuggcauugg

SEQ ID NO: 2613714 - RNA, 19 nt, Artificial Sequence
  Description of Artificial Sequence: Synthetic oligonucleotide
aggcauucucgcauuggca

SEQ ID NO: 2613715 - RNA, 19 nt, Artificial Sequence
  Description of Artificial Sequence: Synthetic oligonucleotide
ccauaugccugcccuuccg

SEQ ID NO: 2613716 - RNA, 19 nt, Artificial Sequence
  Description of Artificial Sequence: Synthetic oligonucleotide
uccgcauccuucgcaucca

SEQ ID NO: 2613717 - RNA, 19 nt, Artificial Sequence
  Description of Artificial Sequence: Synthetic oligonucleotide
ggcaagccucuucuguagc

SEQ ID NO: 2613718 - RNA, 19 nt, Artificial Sequence
  Description of Artificial Sequence: Synthetic oligonucleotide
gcgagccucagccugguca

SEQ ID NO: 2613719 - RNA, 19 nt, Artificial Sequence
  Description of Artificial Sequence: Synthetic oligonucleotide
cugcggacgcagcagagaa

SEQ ID NO: 2613720 - RNA, 19 nt, Artificial Sequence
  Description of Artificial Sequence: Synthetic oligonucleotide
uaccacaacggaggacgcu

SEQ ID NO: 2613721 - RNA, 19 nt, Artificial Sequence
  Description of Artificial Sequence: Synthetic oligonucleotide
caggauccgcauccuucgc

SEQ ID NO: 2613722 - RNA, 19 nt, Artificial Sequence
  Description of Artificial Sequence: Synthetic oligonucleotide
cccgggaaugaacagucac

SEQ ID NO: 2613723 - RNA, 19 nt, Artificial Sequence
  Description of Artificial Sequence: Synthetic oligonucleotide
ccuucagguacaagcuaug

SEQ ID NO: 2613724 - RNA, 19 nt, Artificial Sequence
  Description of Artificial Sequence: Synthetic oligonucleotide
cuuagaccugcgagccuca

SEQ ID NO: 2613725 - RNA, 19 nt, Artificial Sequence
  Description of Artificial Sequence: Synthetic oligonucleotide
gggucaacagacaaaggcu

SEQ ID NO: 2613726 - RNA, 19 nt, Artificial Sequence
  Description of Artificial Sequence: Synthetic oligonucleotide
gcuagaggcaagccucuuc

SEQ ID NO: 2613727 - RNA, 19 nt, Artificial Sequence
  Description of Artificial Sequence: Synthetic oligonucleotide
uuuccggcaucgggcccgg

SEQ ID NO: 2613728 - RNA, 19 nt, Artificial Sequence
  Description of Artificial Sequence: Synthetic oligonucleotide
ggaugaucagcccaucuuu

SEQ ID NO: 2613729 - RNA, 19 nt, Artificial Sequence
  Description of Artificial Sequence: Synthetic oligonucleotide
gcauacucauggcugcgga

SEQ ID NO: 2613730 - RNA, 19 nt, Artificial Sequence
  Description of Artificial Sequence: Synthetic oligonucleotide
ccacuauguacagacacga

SEQ ID NO: 2613731 - RNA, 19 nt, Artificial Sequence
  Description of Artificial Sequence: Synthetic oligonucleotide
ccugcgagccucagccugg

SEQ ID NO: 2613732 - RNA, 19 nt, Artificial Sequence
  Description of Artificial Sequence: Synthetic oligonucleotide
cgacgcaggauccgcaucc

SEQ ID NO: 2613733 - RNA, 19 nt, Artificial Sequence
  Description of Artificial Sequence: Synthetic oligonucleotide
cauuggcuauuucauuggu

SEQ ID NO: 2613734 - RNA, 19 nt, Artificial Sequence
  Description of Artificial Sequence: Synthetic oligonucleotide
cuaugcccauaugccugcc

SEQ ID NO: 2613735 - RNA, 19 nt, Artificial Sequence
  Description of Artificial Sequence: Synthetic oligonucleotide
ggcagcccacuauguacag

SEQ ID NO: 2613736 - RNA, 19 nt, Artificial Sequence
  Description of Artificial Sequence: Synthetic oligonucleotide
ccacaggcagcccacuaug

SEQ ID NO: 2613737 - RNA, 19 nt, Artificial Sequence
  Description of Artificial Sequence: Synthetic oligonucleotide
ugcccauaugccugcccuu

SEQ ID NO: 2613738 - RNA, 19 nt, Artificial Sequence
  Description of Artificial Sequence: Synthetic oligonucleotide
ccugcccuuccgucgagcc

SEQ ID NO: 2613739 - RNA, 19 nt, Artificial Sequence
  Description of Artificial Sequence: Synthetic oligonucleotide
acggaggacgcuagaggca

SEQ ID NO: 2613740 - RNA, 19 nt, Artificial Sequence
  Description of Artificial Sequence: Synthetic oligonucleotide
cugauccaccugaggccac

SEQ ID NO: 2613741 - RNA, 19 nt, Artificial Sequence
  Description of Artificial Sequence: Synthetic oligonucleotide
caggagcuucuugcgggcc

SEQ ID NO: 2613742 - RNA, 19 nt, Artificial Sequence
  Description of Artificial Sequence: Synthetic oligonucleotide
augguacauguggcgguca

SEQ ID NO: 2613743 - RNA, 19 nt, Artificial Sequence
  Description of Artificial Sequence: Synthetic oligonucleotide
cauucucgcauuggcagua

SEQ ID NO: 2613744 - RNA, 19 nt, Artificial Sequence
  Description of Artificial Sequence: Synthetic oligonucleotide
acccuuccguuucccuaug

SEQ ID NO: 2613745 - RNA, 19 nt, Artificial Sequence
  Description of Artificial Sequence: Synthetic oligonucleotide
ggauucccgguaucuccug

SEQ ID NO: 2613746 - RNA, 19 nt, Artificial Sequence
  Description of Artificial Sequence: Synthetic oligonucleotide
uguggcggucaaucuucuu

SEQ ID NO: 2613747 - RNA, 19 nt, Artificial Sequence
  Description of Artificial Sequence: Synthetic oligonucleotide
caguacccuuccguuuccc

SEQ ID NO: 2613748 - RNA, 19 nt, Artificial Sequence
  Description of Artificial Sequence: Synthetic oligonucleotide
gccugagcauacucauggc

SEQ ID NO: 2613749 - RNA, 19 nt, Artificial Sequence
  Description of Artificial Sequence: Synthetic oligonucleotide
cuucgcauccaggucaccu

SEQ ID NO: 2613750 - RNA, 19 nt, Artificial Sequence
  Description of Artificial Sequence: Synthetic oligonucleotide
cugcugacgggaguuggca

SEQ ID NO: 2613751 - RNA, 19 nt, Artificial Sequence
  Description of Artificial Sequence: Synthetic oligonucleotide
ccuucuuggcuuggaggcg

SEQ ID NO: 2613752 - RNA, 19 nt, Artificial Sequence
  Description of Artificial Sequence: Synthetic oligonucleotide
ccuuggucuuagaccugcg

SEQ ID NO: 2613753 - RNA, 19 nt, Artificial Sequence
  Description of Artificial Sequence: Synthetic oligonucleotide
cucgcauuggcaguacccu

SEQ ID NO: 2613754 - RNA, 19 nt, Artificial Sequence
  Description of Artificial Sequence: Synthetic oligonucleotide
ugccugcccuuccgucgag

SEQ ID NO: 2613755 - RNA, 19 nt, Artificial Sequence
  Description of Artificial Sequence: Synthetic oligonucleotide
cgagccucagccuggucag

SEQ ID NO: 2613756 - RNA, 19 nt, Artificial Sequence
  Description of Artificial Sequence: Synthetic oligonucleotide
gcaguacccuuccguuucc

SEQ ID NO: 2613757 - RNA, 19 nt, Artificial Sequence
  Description of Artificial Sequence: Synthetic oligonucleotide
cuucuuggauucccgguau

SEQ ID NO: 2613758 - RNA, 19 nt, Artificial Sequence
  Description of Artificial Sequence: Synthetic oligonucleotide
ggcccgggaaugaacaguc

SEQ ID NO: 2613759 - RNA, 19 nt, Artificial Sequence
  Description of Artificial Sequence: Synthetic oligonucleotide
cacggcgcuuucgugcuuc

SEQ ID NO: 2613760 - RNA, 19 nt, Artificial Sequence
  Description of Artificial Sequence: Synthetic oligonucleotide
ccacaacggaggacgcuag

SEQ ID NO: 2613761 - RNA, 19 nt, Artificial Sequence
  Description of Artificial Sequence: Synthetic oligonucleotide
cucacggcgcuuucgugcu

SEQ ID NO: 2613762 - RNA, 19 nt, Artificial Sequence
  Description of Artificial Sequence: Synthetic oligonucleotide
cgcaggauccgcauccuuc

SEQ ID NO: 2613763 - RNA, 19 nt, Artificial Sequence
  Description of Artificial Sequence: Synthetic oligonucleotide
ucgugcuuccuuggucuua

SEQ ID NO: 2613764 - RNA, 19 nt, Artificial Sequence
  Description of Artificial Sequence: Synthetic oligonucleotide
ggacgcuagaggcaagccu

SEQ ID NO: 2613765 - RNA, 19 nt, Artificial Sequence
  Description of Artificial Sequence: Synthetic oligonucleotide
cauaugccugcccuuccgu

SEQ ID NO: 2613766 - RNA, 19 nt, Artificial Sequence
  Description of Artificial Sequence: Synthetic oligonucleotide
cacaacggaggacgcuaga

SEQ ID NO: 2613767 - RNA, 19 nt, Artificial Sequence
  Description of Artificial Sequence: Synthetic oligonucleotide
uccggaugaucagcccauc

SEQ ID NO: 2613768 - RNA, 19 nt, Artificial Sequence
  Description of Artificial Sequence: Synthetic oligonucleotide
acgcuagaggcaagccucu

SEQ ID NO: 2613769 - RNA, 19 nt, Artificial Sequence
  Description of Artificial Sequence: Synthetic oligonucleotide
ggucaacagacaaaggcuu

SEQ ID NO: 2613770 - RNA, 19 nt, Artificial Sequence
  Description of Artificial Sequence: Synthetic oligonucleotide
gacacgagggaagcuuuau

SEQ ID NO: 2613771 - RNA, 19 nt, Artificial Sequence
  Description of Artificial Sequence: Synthetic oligonucleotide
ugcgggccuugucugccuu

SEQ ID NO: 2613772 - RNA, 19 nt, Artificial Sequence
  Description of Artificial Sequence: Synthetic oligonucleotide
auguggcggucaaucuucu

SEQ ID NO: 2613773 - RNA, 19 nt, Artificial Sequence
  Description of Artificial Sequence: Synthetic oligonucleotide
ugucugccuucagcuugug

SEQ ID NO: 2613774 - RNA, 19 nt, Artificial Sequence
  Description of Artificial Sequence: Synthetic oligonucleotide
ggcaucgggcccgggaaug

SEQ ID NO: 2613775 - RNA, 19 nt, Artificial Sequence
  Description of Artificial Sequence: Synthetic oligonucleotide
gcuuggaggcgcuccucac

SEQ ID NO: 2613776 - RNA, 19 nt, Artificial Sequence
  Description of Artificial Sequence: Synthetic oligonucleotide
gggcuuccggaugaucagc

SEQ ID NO: 2613777 - RNA, 19 nt, Artificial Sequence
  Description of Artificial Sequence: Synthetic oligonucleotide
gcuccucacggcgcuuucg

SEQ ID NO: 2613778 - RNA, 19 nt, Artificial Sequence
  Description of Artificial Sequence: Synthetic oligonucleotide
agcccacuauguacagaca

SEQ ID NO: 2613779 - RNA, 19 nt, Artificial Sequence
  Description of Artificial Sequence: Synthetic oligonucleotide
cgugcuuccuuggucuuag

SEQ ID NO: 2613780 - RNA, 19 nt, Artificial Sequence
  Description of Artificial Sequence: Synthetic oligonucleotide
ucuuggcuuggaggcgcuc

SEQ ID NO: 2613781 - RNA, 19 nt, Artificial Sequence
  Description of Artificial Sequence: Synthetic oligonucleotide
cagccuggucagccaggag

SEQ ID NO: 2613782 - RNA, 19 nt, Artificial Sequence
  Description of Artificial Sequence: Synthetic oligonucleotide
gccucuucuguagccugag

SEQ ID NO: 2613783 - RNA, 19 nt, Artificial Sequence
  Description of Artificial Sequence: Synthetic oligonucleotide
ggauccgcauccuucgcau

SEQ ID NO: 2613784 - RNA, 19 nt, Artificial Sequence
  Description of Artificial Sequence: Synthetic oligonucleotide
cacaggcagcccacuaugu

SEQ ID NO: 2613785 - RNA, 19 nt, Artificial Sequence
  Description of Artificial Sequence: Synthetic oligonucleotide
acgcaggauccgcauccuu

SEQ ID NO: 2613786 - RNA, 19 nt, Artificial Sequence
  Description of Artificial Sequence: Synthetic oligonucleotide
agacacgagggaagcuuua

SEQ ID NO: 2613787 - RNA, 19 nt, Artificial Sequence
  Description of Artificial Sequence: Synthetic oligonucleotide
ccugagcauacucauggcu

SEQ ID NO: 2613788 - RNA, 19 nt, Artificial Sequence
  Description of Artificial Sequence: Synthetic oligonucleotide
cugcccuuccgucgagcca

SEQ ID NO: 2613789 - RNA, 19 nt, Artificial Sequence
  Description of Artificial Sequence: Synthetic oligonucleotide
cgcuuucgugcuuccuugg

SEQ ID NO: 2613790 - RNA, 19 nt, Artificial Sequence
  Description of Artificial Sequence: Synthetic oligonucleotide
cgcauccuucgcauccagg

SEQ ID NO: 2613791 - RNA, 19 nt, Artificial Sequence
  Description of Artificial Sequence: Synthetic oligonucleotide
cuuugaccuucagguacaa

SEQ ID NO: 2613792 - RNA, 19 nt, Artificial Sequence
  Description of Artificial Sequence: Synthetic oligonucleotide
ugcgagccucagccugguc

SEQ ID NO: 2613793 - RNA, 19 nt, Artificial Sequence
  Description of Artificial Sequence: Synthetic oligonucleotide
cagacacgagggaagcuuu

SEQ ID NO: 2613794 - RNA, 19 nt, Artificial Sequence
  Description of Artificial Sequence: Synthetic oligonucleotide
uggcuuggaggcgcuccuc

SEQ ID NO: 2613795 - RNA, 19 nt, Artificial Sequence
  Description of Artificial Sequence: Synthetic oligonucleotide
cgagggaagcuuuauuucu

SEQ ID NO: 2613796 - RNA, 19 nt, Artificial Sequence
  Description of Artificial Sequence: Synthetic oligonucleotide
gcauucucgcauuggcagu

SEQ ID NO: 2613797 - RNA, 19 nt, Artificial Sequence
  Description of Artificial Sequence: Synthetic oligonucleotide
acauucccuuugaccuuca

SEQ ID NO: 2613798 - RNA, 19 nt, Artificial Sequence
  Description of Artificial Sequence: Synthetic oligonucleotide
gucgacgcaggauccgcau

SEQ ID NO: 2613799 - RNA, 19 nt, Artificial Sequence
  Description of Artificial Sequence: Synthetic oligonucleotide
gcccauaugccugcccuuc

SEQ ID NO: 2613800 - RNA, 19 nt, Artificial Sequence
  Description of Artificial Sequence: Synthetic oligonucleotide
cgggcuuccggaugaucag

SEQ ID NO: 2613801 - RNA, 19 nt, Artificial Sequence
  Description of Artificial Sequence: Synthetic oligonucleotide
gggaguuggcauuggcuau

SEQ ID NO: 2613802 - RNA, 19 nt, Artificial Sequence
  Description of Artificial Sequence: Synthetic oligonucleotide
ucacggcgcuuucgugcuu

SEQ ID NO: 2613803 - RNA, 19 nt, Artificial Sequence
  Description of Artificial Sequence: Synthetic oligonucleotide
cacgggcuuccggaugauc

SEQ ID NO: 2613804 - RNA, 19 nt, Artificial Sequence
  Description of Artificial Sequence: Synthetic oligonucleotide
gaccugcgagccucagccu

SEQ ID NO: 2613805 - RNA, 19 nt, Artificial Sequence
  Description of Artificial Sequence: Synthetic oligonucleotide
cccuuccguuucccuaugc

SEQ ID NO: 2613806 - RNA, 19 nt, Artificial Sequence
  Description of Artificial Sequence: Synthetic oligonucleotide
gcuuucgugcuuccuuggu

SEQ ID NO: 2613807 - RNA, 19 nt, Artificial Sequence
  Description of Artificial Sequence: Synthetic oligonucleotide
ggcgcuuucgugcuuccuu

SEQ ID NO: 2613808 - RNA, 19 nt, Artificial Sequence
  Description of Artificial Sequence: Synthetic oligonucleotide
ggaggacgcuagaggcaag

SEQ ID NO: 2613809 - RNA, 19 nt, Artificial Sequence
  Description of Artificial Sequence: Synthetic oligonucleotide
gacgcaggauccgcauccu

SEQ ID NO: 2613810 - RNA, 19 nt, Artificial Sequence
  Description of Artificial Sequence: Synthetic oligonucleotide
gaguuggcauuggcuauuu

SEQ ID NO: 2613811 - RNA, 19 nt, Artificial Sequence
  Description of Artificial Sequence: Synthetic oligonucleotide
ccgguaucuccugagaagu

SEQ ID NO: 2613812 - RNA, 19 nt, Artificial Sequence
  Description of Artificial Sequence: Synthetic oligonucleotide
ucacgggcuuccggaugau

SEQ ID NO: 2613813 - RNA, 19 nt, Artificial Sequence
  Description of Artificial Sequence: Synthetic oligonucleotide
ggaugugcuccaugagaau

SEQ ID NO: 2613814 - RNA, 19 nt, Artificial Sequence
  Description of Artificial Sequence: Synthetic oligonucleotide
gcugcggacgcagcagaga

SEQ ID NO: 2613815 - RNA, 19 nt, Artificial Sequence
  Description of Artificial Sequence: Synthetic oligonucleotide
gcugacgggaguuggcauu

SEQ ID NO: 2613816 - RNA, 19 nt, Artificial Sequence
  Description of Artificial Sequence: Synthetic oligonucleotide
cggucaaucuucuuggauu

SEQ ID NO: 2613817 - RNA, 19 nt, Artificial Sequence
  Description of Artificial Sequence: Synthetic oligonucleotide
cggacgcagcagagaaagg

SEQ ID NO: 2613818 - RNA, 19 nt, Artificial Sequence
  Description of Artificial Sequence: Synthetic oligonucleotide
caacagacaaaggcuuguu

SEQ ID NO: 2613819 - RNA, 19 nt, Artificial Sequence
  Description of Artificial Sequence: Synthetic oligonucleotide
ccuuccgucgagccaaagu

SEQ ID NO: 2613820 - RNA, 19 nt, Artificial Sequence
  Description of Artificial Sequence: Synthetic oligonucleotide
ccgcauccuucgcauccag

SEQ ID NO: 2613821 - RNA, 19 nt, Artificial Sequence
  Description of Artificial Sequence: Synthetic oligonucleotide
gggguccaaccagaccuuc

SEQ ID NO: 2613822 - RNA, 19 nt, Artificial Sequence
  Description of Artificial Sequence: Synthetic oligonucleotide
gcagcccacuauguacaga

SEQ ID NO: 2613823 - RNA, 19 nt, Artificial Sequence
  Description of Artificial Sequence: Synthetic oligonucleotide
uuccggcaucgggcccggg

SEQ ID NO: 2613824 - RNA, 19 nt, Artificial Sequence
  Description of Artificial Sequence: Synthetic oligonucleotide
caucgggcccgggaaugaa

SEQ ID NO: 2613825 - RNA, 19 nt, Artificial Sequence
  Description of Artificial Sequence: Synthetic oligonucleotide
gcuccaugagaauccgcuu

SEQ ID NO: 2613826 - RNA, 19 nt, Artificial Sequence
  Description of Artificial Sequence: Synthetic oligonucleotide
ggaguuggcauuggcuauu

SEQ ID NO: 2613827 - RNA, 19 nt, Artificial Sequence
  Description of Artificial Sequence: Synthetic oligonucleotide
gcaucgggcccgggaauga

SEQ ID NO: 2613828 - RNA, 19 nt, Artificial Sequence
  Description of Artificial Sequence: Synthetic oligonucleotide
cgggcccgggaaugaacag

SEQ ID NO: 2613829 - RNA, 19 nt, Artificial Sequence
  Description of Artificial Sequence: Synthetic oligonucleotide
gguacauguggcggucaau

SEQ ID NO: 2613830 - RNA, 19 nt, Artificial Sequence
  Description of Artificial Sequence: Synthetic oligonucleotide
ccuuggacagagucuugau

SEQ ID NO: 2613831 - RNA, 19 nt, Artificial Sequence
  Description of Artificial Sequence: Synthetic oligonucleotide
gggcccgggaaugaacagu

SEQ ID NO: 2613832 - RNA, 19 nt, Artificial Sequence
  Description of Artificial Sequence: Synthetic oligonucleotide
ggguccaaccagaccuucu

SEQ ID NO: 2613833 - RNA, 19 nt, Artificial Sequence
  Description of Artificial Sequence: Synthetic oligonucleotide
cggaggacgcuagaggcaa

SEQ ID NO: 2613834 - RNA, 19 nt, Artificial Sequence
  Description of Artificial Sequence: Synthetic oligonucleotide
ccggaugaucagcccaucu

SEQ ID NO: 2613835 - RNA, 19 nt, Artificial Sequence
  Description of Artificial Sequence: Synthetic oligonucleotide
ccuucgcauccaggucacc

SEQ ID NO: 2613836 - RNA, 19 nt, Artificial Sequence
  Description of Artificial Sequence: Synthetic oligonucleotide
cggaugaucagcccaucuu

SEQ ID NO: 2613837 - RNA, 19 nt, Artificial Sequence
  Description of Artificial Sequence: Synthetic oligonucleotide
cccuuccgucgagccaaag

SEQ ID NO: 2613838 - RNA, 19 nt, Artificial Sequence
  Description of Artificial Sequence: Synthetic oligonucleotide
cgucgagccaaaguguuuu

SEQ ID NO: 2613839 - RNA, 19 nt, Artificial Sequence
  Description of Artificial Sequence: Synthetic oligonucleotide
cugcgagccucagccuggu

SEQ ID NO: 2613840 - RNA, 19 nt, Artificial Sequence
  Description of Artificial Sequence: Synthetic oligonucleotide
cguuucccuaugcccauau

SEQ ID NO: 2613841 - RNA, 19 nt, Artificial Sequence
  Description of Artificial Sequence: Synthetic oligonucleotide
cgggccuugucugccuuca

SEQ ID NO: 2613842 - RNA, 19 nt, Artificial Sequence
  Description of Artificial Sequence: Synthetic oligonucleotide
gcccaucuuugaucagcuu

SEQ ID NO: 2613843 - RNA, 19 nt, Artificial Sequence
  Description of Artificial Sequence: Synthetic oligonucleotide
cgcuccucacggcgcuuuc

SEQ ID NO: 2613844 - RNA, 19 nt, Artificial Sequence
  Description of Artificial Sequence: Synthetic oligonucleotide
ccgucgagccaaaguguuu

SEQ ID NO: 2613845 - RNA, 19 nt, Artificial Sequence
  Description of Artificial Sequence: Synthetic oligonucleotide
ccaugagaauccgcuuauu

SEQ ID NO: 2613846 - RNA, 19 nt, Artificial Sequence
  Description of Artificial Sequence: Synthetic oligonucleotide
ccguuucccuaugcccaua

SEQ ID NO: 2613847 - RNA, 19 nt, Artificial Sequence
  Description of Artificial Sequence: Synthetic oligonucleotide
gcccuuccgucgagccaaa

SEQ ID NO: 2613848 - RNA, 19 nt, Artificial Sequence
  Description of Artificial Sequence: Synthetic oligonucleotide
gcgcuccucacggcgcuuu

SEQ ID NO: 2613849 - RNA, 19 nt, Artificial Sequence
  Description of Artificial Sequence: Synthetic oligonucleotide
ggcgcuccucacggcgcuu

SEQ ID NO: 2613850 - RNA, 19 nt, Artificial Sequence
  Description of Artificial Sequence: Synthetic oligonucleotide
cggcaucgggcccgggaau

SEQ ID NO: 2613851 - RNA, 19 nt, Artificial Sequence
  Description of Artificial Sequence: Synthetic oligonucleotide
cgcuagaggcaagccucuu

SEQ ID NO: 2613852 - RNA, 19 nt, Artificial Sequence
  Description of Artificial Sequence: Synthetic oligonucleotide
cggcgcuuucgugcuuccu

SEQ ID NO: 2613853 - RNA, 19 nt, Artificial Sequence
  Description of Artificial Sequence: Synthetic oligonucleotide
aaucuuugcacucgugcgg

SEQ ID NO: 2613854 - RNA, 19 nt, Artificial Sequence
  Description of Artificial Sequence: Synthetic oligonucleotide
uuguccauugagcaguggg

SEQ ID NO: 2613855 - RNA, 19 nt, Artificial Sequence
  Description of Artificial Sequence: Synthetic oligonucleotide
uuuguaaugccgccgcagg

SEQ ID NO: 2613856 - RNA, 19 nt, Artificial Sequence
  Description of Artificial Sequence: Synthetic oligonucleotide
uugagaguccgauuggagg

SEQ ID NO: 2613857 - RNA, 19 nt, Artificial Sequence
  Description of Artificial Sequence: Synthetic oligonucleotide
uuugcguuuguaaugccgc

SEQ ID NO: 2613858 - RNA, 19 nt, Artificial Sequence
  Description of Artificial Sequence: Synthetic oligonucleotide
gaugcuguggcguuccagg

SEQ ID NO: 2613859 - RNA, 19 nt, Artificial Sequence
  Description of Artificial Sequence: Synthetic oligonucleotide
uguccauugagcagugggg

SEQ ID NO: 2613860 - RNA, 19 nt, Artificial Sequence
  Description of Artificial Sequence: Synthetic oligonucleotide
ucgucgucaucccacagcg

SEQ ID NO: 2613861 - RNA, 19 nt, Artificial Sequence
  Description of Artificial Sequence: Synthetic oligonucleotide
caaucuuugcacucgugcg

SEQ ID NO: 2613862 - RNA, 19 nt, Artificial Sequence
  Description of Artificial Sequence: Synthetic oligonucleotide
agaaguguggagccccugc

SEQ ID NO: 2613863 - RNA, 19 nt, Artificial Sequence
  Description of Artificial Sequence: Synthetic oligonucleotide
uggaagaaggcggagcugg

SEQ ID NO: 2613864 - RNA, 19 nt, Artificial Sequence
  Description of Artificial Sequence: Synthetic oligonucleotide
cucauuugcaugcugcccc

SEQ ID NO: 2613865 - RNA, 19 nt, Artificial Sequence
  Description of Artificial Sequence: Synthetic oligonucleotide
ugagaguccgauuggaggu

SEQ ID NO: 2613866 - RNA, 19 nt, Artificial Sequence
  Description of Artificial Sequence: Synthetic oligonucleotide
auggauguugcagugccgc

SEQ ID NO: 2613867 - RNA, 19 nt, Artificial Sequence
  Description of Artificial Sequence: Synthetic oligonucleotide
uuggcuucggugaagcgca

SEQ ID NO: 2613868 - RNA, 19 nt, Artificial Sequence
  Description of Artificial Sequence: Synthetic oligonucleotide
uccuccccagacaaagugg

SEQ ID NO: 2613869 - RNA, 19 nt, Artificial Sequence
  Description of Artificial Sequence: Synthetic oligonucleotide
auuugcaugcugccccggc

SEQ ID NO: 2613870 - RNA, 19 nt, Artificial Sequence
  Description of Artificial Sequence: Synthetic oligonucleotide
accgcuugaaggucuugcc

SEQ ID NO: 2613871 - RNA, 19 nt, Artificial Sequence
  Description of Artificial Sequence: Synthetic oligonucleotide
agccggcucauuugcaugc

SEQ ID NO: 2613872 - RNA, 19 nt, Artificial Sequence
  Description of Artificial Sequence: Synthetic oligonucleotide
gucgucaucccacagcggc

SEQ ID NO: 2613873 - RNA, 19 nt, Artificial Sequence
  Description of Artificial Sequence: Synthetic oligonucleotide
agacaaaguggaagaaggc

SEQ ID NO: 2613874 - RNA, 19 nt, Artificial Sequence
  Description of Artificial Sequence: Synthetic oligonucleotide
aucuuugcacucgugcggc

SEQ ID NO: 2613875 - RNA, 19 nt, Artificial Sequence
  Description of Artificial Sequence: Synthetic oligonucleotide
ucauuugcaugcugccccg

SEQ ID NO: 2613876 - RNA, 19 nt, Artificial Sequence
  Description of Artificial Sequence: Synthetic oligonucleotide
guuugcguuuguaaugccg

SEQ ID NO: 2613877 - RNA, 19 nt, Artificial Sequence
  Description of Artificial Sequence: Synthetic oligonucleotide
aagcgcacccugcacgagg

SEQ ID NO: 2613878 - RNA, 19 nt, Artificial Sequence
  Description of Artificial Sequence: Synthetic oligonucleotide
gugaagcgcacccugcacg

SEQ ID NO: 2613879 - RNA, 19 nt, Artificial Sequence
  Description of Artificial Sequence: Synthetic oligonucleotide
ggacuugagaguccgauug

SEQ ID NO: 2613880 - RNA, 19 nt, Artificial Sequence
  Description of Artificial Sequence: Synthetic oligonucleotide
gaugcggugguggugcgcg

SEQ ID NO: 2613881 - RNA, 19 nt, Artificial Sequence
  Description of Artificial Sequence: Synthetic oligonucleotide
cuugagaguccgauuggag

SEQ ID NO: 2613882 - RNA, 19 nt, Artificial Sequence
  Description of Artificial Sequence: Synthetic oligonucleotide
agugcgagaugcuguggcg

SEQ ID NO: 2613883 - RNA, 19 nt, Artificial Sequence
  Description of Artificial Sequence: Synthetic oligonucleotide
uucggugaagcgcacccug

SEQ ID NO: 2613884 - RNA, 19 nt, Artificial Sequence
  Description of Artificial Sequence: Synthetic oligonucleotide
gauguugcagugccgccgc

SEQ ID NO: 2613885 - RNA, 19 nt, Artificial Sequence
  Description of Artificial Sequence: Synthetic oligonucleotide
gggagggaggacuugagag

SEQ ID NO: 2613886 - RNA, 19 nt, Artificial Sequence
  Description of Artificial Sequence: Synthetic oligonucleotide
ucuugccgcaaucuuugca

SEQ ID NO: 2613887 - RNA, 19 nt, Artificial Sequence
  Description of Artificial Sequence: Synthetic oligonucleotide
aggguguuggcuucgguga

SEQ ID NO: 2613888 - RNA, 19 nt, Artificial Sequence
  Description of Artificial Sequence: Synthetic oligonucleotide
ugcguuuguaaugccgccg

SEQ ID NO: 2613889 - RNA, 19 nt, Artificial Sequence
  Description of Artificial Sequence: Synthetic oligonucleotide
gagugcgagaugcuguggc

SEQ ID NO: 2613890 - RNA, 19 nt, Artificial Sequence
  Description of Artificial Sequence: Synthetic oligonucleotide
gguguuugcguuuguaaug

SEQ ID NO: 2613891 - RNA, 19 nt, Artificial Sequence
  Description of Artificial Sequence: Synthetic oligonucleotide
cacagcacgcaccggaagg

SEQ ID NO: 2613892 - RNA, 19 nt, Artificial Sequence
  Description of Artificial Sequence: Synthetic oligonucleotide
uccgauuggaggugguggc

SEQ ID NO: 2613893 - RNA, 19 nt, Artificial Sequence
  Description of Artificial Sequence: Synthetic oligonucleotide
guguuugcguuuguaaugc

SEQ ID NO: 2613894 - RNA, 19 nt, Artificial Sequence
  Description of Artificial Sequence: Synthetic oligonucleotide
aggucggagagguagggga

SEQ ID NO: 2613895 - RNA, 19 nt, Artificial Sequence
  Description of Artificial Sequence: Synthetic oligonucleotide
uccaggucggagagguagg

SEQ ID NO: 2613896 - RNA, 19 nt, Artificial Sequence
  Description of Artificial Sequence: Synthetic oligonucleotide
aggcacacggggcagaagu

SEQ ID NO: 2613897 - RNA, 19 nt, Artificial Sequence
  Description of Artificial Sequence: Synthetic oligonucleotide
guuggcuucggugaagcgc

SEQ ID NO: 2613898 - RNA, 19 nt, Artificial Sequence
  Description of Artificial Sequence: Synthetic oligonucleotide
gcuguggcguuccaggucg

SEQ ID NO: 2613899 - RNA, 19 nt, Artificial Sequence
  Description of Artificial Sequence: Synthetic oligonucleotide
uguaaugccgccgcagggu

SEQ ID NO: 2613900 - RNA, 19 nt, Artificial Sequence
  Description of Artificial Sequence: Synthetic oligonucleotide
uggugcgcgagcucgcccg

SEQ ID NO: 2613901 - RNA, 19 nt, Artificial Sequence
  Description of Artificial Sequence: Synthetic oligonucleotide
ugaagcgcacccugcacga

SEQ ID NO: 2613902 - RNA, 19 nt, Artificial Sequence
  Description of Artificial Sequence: Synthetic oligonucleotide
accagcuccggguguuugc

SEQ ID NO: 2613903 - RNA, 19 nt, Artificial Sequence
  Description of Artificial Sequence: Synthetic oligonucleotide
uuucgagggagggaggacu

SEQ ID NO: 2613904 - RNA, 19 nt, Artificial Sequence
  Description of Artificial Sequence: Synthetic oligonucleotide
acucgugcggcuugagcuc

SEQ ID NO: 2613905 - RNA, 19 nt, Artificial Sequence
  Description of Artificial Sequence: Synthetic oligonucleotide
guuuguaaugccgccgcag

SEQ ID NO: 2613906 - RNA, 19 nt, Artificial Sequence
  Description of Artificial Sequence: Synthetic oligonucleotide
cuuccugcacggaucuggg

SEQ ID NO: 2613907 - RNA, 19 nt, Artificial Sequence
  Description of Artificial Sequence: Synthetic oligonucleotide
guaggggaaggcucucagg

SEQ ID NO: 2613908 - RNA, 19 nt, Artificial Sequence
  Description of Artificial Sequence: Synthetic oligonucleotide
guccgauuggagguggugg

SEQ ID NO: 2613909 - RNA, 19 nt, Artificial Sequence
  Description of Artificial Sequence: Synthetic oligonucleotide
caggguguuggcuucggug

SEQ ID NO: 2613910 - RNA, 19 nt, Artificial Sequence
  Description of Artificial Sequence: Synthetic oligonucleotide
uguuggcuucggugaagcg

SEQ ID NO: 2613911 - RNA, 19 nt, Artificial Sequence
  Description of Artificial Sequence: Synthetic oligonucleotide
cauggauguugcagugccg

SEQ ID NO: 2613912 - RNA, 19 nt, Artificial Sequence
  Description of Artificial Sequence: Synthetic oligonucleotide
uugcguuuguaaugccgcc

SEQ ID NO: 2613913 - RNA, 19 nt, Artificial Sequence
  Description of Artificial Sequence: Synthetic oligonucleotide
ugcggcuugagcuccgagu

SEQ ID NO: 2613914 - RNA, 19 nt, Artificial Sequence
  Description of Artificial Sequence: Synthetic oligonucleotide
ggagcugcagucugggugc

SEQ ID NO: 2613915 - RNA, 19 nt, Artificial Sequence
  Description of Artificial Sequence: Synthetic oligonucleotide
uguuugcguuuguaaugcc

SEQ ID NO: 2613916 - RNA, 19 nt, Artificial Sequence
  Description of Artificial Sequence: Synthetic oligonucleotide
ugagcaguggggagcugca

SEQ ID NO: 2613917 - RNA, 19 nt, Artificial Sequence
  Description of Artificial Sequence: Synthetic oligonucleotide
aguggggagcugcagucug

SEQ ID NO: 2613918 - RNA, 19 nt, Artificial Sequence
  Description of Artificial Sequence: Synthetic oligonucleotide
gcauggauguugcagugcc

SEQ ID NO: 2613919 - RNA, 19 nt, Artificial Sequence
  Description of Artificial Sequence: Synthetic oligonucleotide
agaaggcggagcugggucu

SEQ ID NO: 2613920 - RNA, 19 nt, Artificial Sequence
  Description of Artificial Sequence: Synthetic oligonucleotide
guaaugccgccgcagggug

SEQ ID NO: 2613921 - RNA, 19 nt, Artificial Sequence
  Description of Artificial Sequence: Synthetic oligonucleotide
gagggaggacuugagaguc

SEQ ID NO: 2613922 - RNA, 19 nt, Artificial Sequence
  Description of Artificial Sequence: Synthetic oligonucleotide
uggcguuccaggucggaga

SEQ ID NO: 2613923 - RNA, 19 nt, Artificial Sequence
  Description of Artificial Sequence: Synthetic oligonucleotide
gugguggugcgcgagcucg

SEQ ID NO: 2613924 - RNA, 19 nt, Artificial Sequence
  Description of Artificial Sequence: Synthetic oligonucleotide
cuggagccggcucauuugc

SEQ ID NO: 2613925 - RNA, 19 nt, Artificial Sequence
  Description of Artificial Sequence: Synthetic oligonucleotide
ucggagagguaggggaagg

SEQ ID NO: 2613926 - RNA, 19 nt, Artificial Sequence
  Description of Artificial Sequence: Synthetic oligonucleotide
gaggaagccgggcccgagg

SEQ ID NO: 2613927 - RNA, 19 nt, Artificial Sequence
  Description of Artificial Sequence: Synthetic oligonucleotide
ugugucugcgcgcccgcgc

SEQ ID NO: 2613928 - RNA, 19 nt, Artificial Sequence
  Description of Artificial Sequence: Synthetic oligonucleotide
acagcacgcaccggaaggg

SEQ ID NO: 2613929 - RNA, 19 nt, Artificial Sequence
  Description of Artificial Sequence: Synthetic oligonucleotide
aucccacagcggcuggggc

SEQ ID NO: 2613930 - RNA, 19 nt, Artificial Sequence
  Description of Artificial Sequence: Synthetic oligonucleotide
ucccacagcggcuggggcc

SEQ ID NO: 2613931 - RNA, 19 nt, Artificial Sequence
  Description of Artificial Sequence: Synthetic oligonucleotide
cugguggccggccucggcg

SEQ ID NO: 2613932 - RNA, 19 nt, Artificial Sequence
  Description of Artificial Sequence: Synthetic oligonucleotide
gaccgcuugaaggucuugc

SEQ ID NO: 2613933 - RNA, 19 nt, Artificial Sequence
  Description of Artificial Sequence: Synthetic oligonucleotide
guggaugcggugguggugc

SEQ ID NO: 2613934 - RNA, 19 nt, Artificial Sequence
  Description of Artificial Sequence: Synthetic oligonucleotide
gucggccccgcuuucgagg

SEQ ID NO: 2613935 - RNA, 19 nt, Artificial Sequence
  Description of Artificial Sequence: Synthetic oligonucleotide
accggaagggccgcaggcc

SEQ ID NO: 2613936 - RNA, 19 nt, Artificial Sequence
  Description of Artificial Sequence: Synthetic oligonucleotide
agaguccgauuggaggugg

SEQ ID NO: 2613937 - RNA, 19 nt, Artificial Sequence
  Description of Artificial Sequence: Synthetic oligonucleotide
caacggggcuuccugcacg

SEQ ID NO: 2613938 - RNA, 19 nt, Artificial Sequence
  Description of Artificial Sequence: Synthetic oligonucleotide
acuugagaguccgauugga

SEQ ID NO: 2613939 - RNA, 19 nt, Artificial Sequence
  Description of Artificial Sequence: Synthetic oligonucleotide
uugcaugcugccccggcuc

SEQ ID NO: 2613940 - RNA, 19 nt, Artificial Sequence
  Description of Artificial Sequence: Synthetic oligonucleotide
uggggagcugcagucuggg

SEQ ID NO: 2613941 - RNA, 19 nt, Artificial Sequence
  Description of Artificial Sequence: Synthetic oligonucleotide
uguugcagugccgccgcag

SEQ ID NO: 2613942 - RNA, 19 nt, Artificial Sequence
  Description of Artificial Sequence: Synthetic oligonucleotide
gagccggcucauuugcaug

SEQ ID NO: 2613943 - RNA, 19 nt, Artificial Sequence
  Description of Artificial Sequence: Synthetic oligonucleotide
ggcucucaggcacacgggg

SEQ ID NO: 2613944 - RNA, 19 nt, Artificial Sequence
  Description of Artificial Sequence: Synthetic oligonucleotide
uuccugcacggaucugggg

SEQ ID NO: 2613945 - RNA, 19 nt, Artificial Sequence
  Description of Artificial Sequence: Synthetic oligonucleotide
cacacggggcagaagugug

SEQ ID NO: 2613946 - RNA, 19 nt, Artificial Sequence
  Description of Artificial Sequence: Synthetic oligonucleotide
gcugggguuguccauugag

SEQ ID NO: 2613947 - RNA, 19 nt, Artificial Sequence
  Description of Artificial Sequence: Synthetic oligonucleotide
uugccgcaaucuuugcacu

SEQ ID NO: 2613948 - RNA, 19 nt, Artificial Sequence
  Description of Artificial Sequence: Synthetic oligonucleotide
gaggggcacugguaggggc

SEQ ID NO: 2613949 - RNA, 19 nt, Artificial Sequence
  Description of Artificial Sequence: Synthetic oligonucleotide
gguaggggaaggcucucag

SEQ ID NO: 2613950 - RNA, 19 nt, Artificial Sequence
  Description of Artificial Sequence: Synthetic oligonucleotide
ugcacgaggggcacuggua

SEQ ID NO: 2613951 - RNA, 19 nt, Artificial Sequence
  Description of Artificial Sequence: Synthetic oligonucleotide
cugguaggggcgcucgccc

SEQ ID NO: 2613952 - RNA, 19 nt, Artificial Sequence
  Description of Artificial Sequence: Synthetic oligonucleotide
cuugagcuccgagugcgag

SEQ ID NO: 2613953 - RNA, 19 nt, Artificial Sequence
  Description of Artificial Sequence: Synthetic oligonucleotide
ugcuguggcguuccagguc

SEQ ID NO: 2613954 - RNA, 19 nt, Artificial Sequence
  Description of Artificial Sequence: Synthetic oligonucleotide
ugccaacggggcuuccugc

SEQ ID NO: 2613955 - RNA, 19 nt, Artificial Sequence
  Description of Artificial Sequence: Synthetic oligonucleotide
gagcucgcccgccucgcgg

SEQ ID NO: 2613956 - RNA, 19 nt, Artificial Sequence
  Description of Artificial Sequence: Synthetic oligonucleotide
ugcuggagccggcucauuu

SEQ ID NO: 2613957 - RNA, 19 nt, Artificial Sequence
  Description of Artificial Sequence: Synthetic oligonucleotide
ugcagugccgccgcaggug

SEQ ID NO: 2613958 - RNA, 19 nt, Artificial Sequence
  Description of Artificial Sequence: Synthetic oligonucleotide
ucaucccacagcggcuggg

SEQ ID NO: 2613959 - RNA, 19 nt, Artificial Sequence
  Description of Artificial Sequence: Synthetic oligonucleotide
cacgaggggcacugguagg

SEQ ID NO: 2613960 - RNA, 19 nt, Artificial Sequence
  Description of Artificial Sequence: Synthetic oligonucleotide
gcggcuugagcuccgagug

SEQ ID NO: 2613961 - RNA, 19 nt, Artificial Sequence
  Description of Artificial Sequence: Synthetic oligonucleotide
gagaguccgauuggaggug

SEQ ID NO: 2613962 - RNA, 19 nt, Artificial Sequence
  Description of Artificial Sequence: Synthetic oligonucleotide
ggcucauuugcaugcugcc

SEQ ID NO: 2613963 - RNA, 19 nt, Artificial Sequence
  Description of Artificial Sequence: Synthetic oligonucleotide
gcacgaggggcacugguag

SEQ ID NO: 2613964 - RNA, 19 nt, Artificial Sequence
  Description of Artificial Sequence: Synthetic oligonucleotide
uucgagggagggaggacuu

SEQ ID NO: 2613965 - RNA, 19 nt, Artificial Sequence
  Description of Artificial Sequence: Synthetic oligonucleotide
guccauugagcagugggga

SEQ ID NO: 2613966 - RNA, 19 nt, Artificial Sequence
  Description of Artificial Sequence: Synthetic oligonucleotide
gggguuguccauugagcag

SEQ ID NO: 2613967 - RNA, 19 nt, Artificial Sequence
  Description of Artificial Sequence: Synthetic oligonucleotide
gcucgcgugugucugcgcg

SEQ ID NO: 2613968 - RNA, 19 nt, Artificial Sequence
  Description of Artificial Sequence: Synthetic oligonucleotide
cacucgugcggcuugagcu

SEQ ID NO: 2613969 - RNA, 19 nt, Artificial Sequence
  Description of Artificial Sequence: Synthetic oligonucleotide
gcguuuguaaugccgccgc

SEQ ID NO: 2613970 - RNA, 19 nt, Artificial Sequence
  Description of Artificial Sequence: Synthetic oligonucleotide
agaugcuguggcguuccag

SEQ ID NO: 2613971 - RNA, 19 nt, Artificial Sequence
  Description of Artificial Sequence: Synthetic oligonucleotide
aggacuugagaguccgauu

SEQ ID NO: 2613972 - RNA, 19 nt, Artificial Sequence
  Description of Artificial Sequence: Synthetic oligonucleotide
cucucaggcacacggggca

SEQ ID NO: 2613973 - RNA, 19 nt, Artificial Sequence
  Description of Artificial Sequence: Synthetic oligonucleotide
gucugggugcuggagccgg

SEQ ID NO: 2613974 - RNA, 19 nt, Artificial Sequence
  Description of Artificial Sequence: Synthetic oligonucleotide
caccggaagggccgcaggc

SEQ ID NO: 2613975 - RNA, 19 nt, Artificial Sequence
  Description of Artificial Sequence: Synthetic oligonucleotide
gaacuggaggaagccgggc

SEQ ID NO: 2613976 - RNA, 19 nt, Artificial Sequence
  Description of Artificial Sequence: Synthetic oligonucleotide
ugccgcaaucuuugcacuc

SEQ ID NO: 2613977 - RNA, 19 nt, Artificial Sequence
  Description of Artificial Sequence: Synthetic oligonucleotide
aggccggcauggauguugc

SEQ ID NO: 2613978 - RNA, 19 nt, Artificial Sequence
  Description of Artificial Sequence: Synthetic oligonucleotide
uaaugccgccgcagggugu

SEQ ID NO: 2613979 - RNA, 19 nt, Artificial Sequence
  Description of Artificial Sequence: Synthetic oligonucleotide
agcgcacccugcacgaggg

SEQ ID NO: 2613980 - RNA, 19 nt, Artificial Sequence
  Description of Artificial Sequence: Synthetic oligonucleotide
gaaguguggagccccugcu

SEQ ID NO: 2613981 - RNA, 19 nt, Artificial Sequence
  Description of Artificial Sequence: Synthetic oligonucleotide
uggagccggcucauuugca

SEQ ID NO: 2613982 - RNA, 19 nt, Artificial Sequence
  Description of Artificial Sequence: Synthetic oligonucleotide
uugcagugccgccgcaggu

SEQ ID NO: 2613983 - RNA, 19 nt, Artificial Sequence
  Description of Artificial Sequence: Synthetic oligonucleotide
cucgcgugugucugcgcgc

SEQ ID NO: 2613984 - RNA, 19 nt, Artificial Sequence
  Description of Artificial Sequence: Synthetic oligonucleotide
ggaacuggaggaagccggg

SEQ ID NO: 2613985 - RNA, 19 nt, Artificial Sequence
  Description of Artificial Sequence: Synthetic oligonucleotide
uggaugcggugguggugcg

SEQ ID NO: 2613986 - RNA, 19 nt, Artificial Sequence
  Description of Artificial Sequence: Synthetic oligonucleotide
ugcgagaugcuguggcguu

SEQ ID NO: 2613987 - RNA, 19 nt, Artificial Sequence
  Description of Artificial Sequence: Synthetic oligonucleotide
gaaggcggagcugggucug

SEQ ID NO: 2613988 - RNA, 19 nt, Artificial Sequence
  Description of Artificial Sequence: Synthetic oligonucleotide
cugccaacggggcuuccug

SEQ ID NO: 2613989 - RNA, 19 nt, Artificial Sequence
  Description of Artificial Sequence: Synthetic oligonucleotide
gccgcagguggcuggaccg

SEQ ID NO: 2613990 - RNA, 19 nt, Artificial Sequence
  Description of Artificial Sequence: Synthetic oligonucleotide
gaaggcucucaggcacacg

SEQ ID NO: 2613991 - RNA, 19 nt, Artificial Sequence
  Description of Artificial Sequence: Synthetic oligonucleotide
gccgcaaucuuugcacucg

SEQ ID NO: 2613992 - RNA, 19 nt, Artificial Sequence
  Description of Artificial Sequence: Synthetic oligonucleotide
ggcagaaguguggagcccc

SEQ ID NO: 2613993 - RNA, 19 nt, Artificial Sequence
  Description of Artificial Sequence: Synthetic oligonucleotide
ucuuugcacucgugcggcu

SEQ ID NO: 2613994 - RNA, 19 nt, Artificial Sequence
  Description of Artificial Sequence: Synthetic oligonucleotide
ucgcccgccucgcggaagc

SEQ ID NO: 2613995 - RNA, 19 nt, Artificial Sequence
  Description of Artificial Sequence: Synthetic oligonucleotide
caggccggcauggauguug

SEQ ID NO: 2613996 - RNA, 19 nt, Artificial Sequence
  Description of Artificial Sequence: Synthetic oligonucleotide
gucggagagguaggggaag

SEQ ID NO: 2613997 - RNA, 19 nt, Artificial Sequence
  Description of Artificial Sequence: Synthetic oligonucleotide
ucugggugcuggagccggc

SEQ ID NO: 2613998 - RNA, 19 nt, Artificial Sequence
  Description of Artificial Sequence: Synthetic oligonucleotide
acgggcauccccaccagcu

SEQ ID NO: 2613999 - RNA, 19 nt, Artificial Sequence
  Description of Artificial Sequence: Synthetic oligonucleotide
ucgcgugugucugcgcgcc

SEQ ID NO: 2614000 - RNA, 19 nt, Artificial Sequence
  Description of Artificial Sequence: Synthetic oligonucleotide
gucaucccacagcggcugg

SEQ ID NO: 2614001 - RNA, 19 nt, Artificial Sequence
  Description of Artificial Sequence: Synthetic oligonucleotide
agcggcuggggccucgggu

SEQ ID NO: 2614002 - RNA, 19 nt, Artificial Sequence
  Description of Artificial Sequence: Synthetic oligonucleotide
gcagugccgccgcaggugg

SEQ ID NO: 2614003 - RNA, 19 nt, Artificial Sequence
  Description of Artificial Sequence: Synthetic oligonucleotide
uucuuccuccccagacaaa

SEQ ID NO: 2614004 - RNA, 19 nt, Artificial Sequence
  Description of Artificial Sequence: Synthetic oligonucleotide
ccgcuugaaggucuugccg

SEQ ID NO: 2614005 - RNA, 19 nt, Artificial Sequence
  Description of Artificial Sequence: Synthetic oligonucleotide
guuguccauugagcagugg

SEQ ID NO: 2614006 - RNA, 19 nt, Artificial Sequence
  Description of Artificial Sequence: Synthetic oligonucleotide
ucgugcggcuugagcuccg

SEQ ID NO: 2614007 - RNA, 19 nt, Artificial Sequence
  Description of Artificial Sequence: Synthetic oligonucleotide
ugcggugguggugcgcgag

SEQ ID NO: 2614008 - RNA, 19 nt, Artificial Sequence
  Description of Artificial Sequence: Synthetic oligonucleotide
caugcugccccggcucgcg

SEQ ID NO: 2614009 - RNA, 19 nt, Artificial Sequence
  Description of Artificial Sequence: Synthetic oligonucleotide
caggucggagagguagggg

SEQ ID NO: 2614010 - RNA, 19 nt, Artificial Sequence
  Description of Artificial Sequence: Synthetic oligonucleotide
gcuggagccggcucauuug

SEQ ID NO: 2614011 - RNA, 19 nt, Artificial Sequence
  Description of Artificial Sequence: Synthetic oligonucleotide
agcuccggguguuugcguu

SEQ ID NO: 2614012 - RNA, 19 nt, Artificial Sequence
  Description of Artificial Sequence: Synthetic oligonucleotide
cauuugcaugcugccccgg

SEQ ID NO: 2614013 - RNA, 19 nt, Artificial Sequence
  Description of Artificial Sequence: Synthetic oligonucleotide
ccauugagcaguggggagc

SEQ ID NO: 2614014 - RNA, 19 nt, Artificial Sequence
  Description of Artificial Sequence: Synthetic oligonucleotide
ugguggugcgcgagcucgc

SEQ ID NO: 2614015 - RNA, 19 nt, Artificial Sequence
  Description of Artificial Sequence: Synthetic oligonucleotide
gccggcauggauguugcag

SEQ ID NO: 2614016 - RNA, 19 nt, Artificial Sequence
  Description of Artificial Sequence: Synthetic oligonucleotide
ucgcccgaguggaugcggu

SEQ ID NO: 2614017 - RNA, 19 nt, Artificial Sequence
  Description of Artificial Sequence: Synthetic oligonucleotide
acggggcagaaguguggag

SEQ ID NO: 2614018 - RNA, 19 nt, Artificial Sequence
  Description of Artificial Sequence: Synthetic oligonucleotide
ugccgccgcaggguguugg

SEQ ID NO: 2614019 - RNA, 19 nt, Artificial Sequence
  Description of Artificial Sequence: Synthetic oligonucleotide
guggagccccugcugcugc

SEQ ID NO: 2614020 - RNA, 19 nt, Artificial Sequence
  Description of Artificial Sequence: Synthetic oligonucleotide
ugcgcgagcucgcccgccu

SEQ ID NO: 2614021 - RNA, 19 nt, Artificial Sequence
  Description of Artificial Sequence: Synthetic oligonucleotide
ugcugccccggcucgcgug

SEQ ID NO: 2614022 - RNA, 19 nt, Artificial Sequence
  Description of Artificial Sequence: Synthetic oligonucleotide
guggggagcugcagucugg

SEQ ID NO: 2614023 - RNA, 19 nt, Artificial Sequence
  Description of Artificial Sequence: Synthetic oligonucleotide
gaagcgcacccugcacgag

SEQ ID NO: 2614024 - RNA, 19 nt, Artificial Sequence
  Description of Artificial Sequence: Synthetic oligonucleotide
agggccgcaggccggcaug

SEQ ID NO: 2614025 - RNA, 19 nt, Artificial Sequence
  Description of Artificial Sequence: Synthetic oligonucleotide
ucaggcacacggggcagaa

SEQ ID NO: 2614026 - RNA, 19 nt, Artificial Sequence
  Description of Artificial Sequence: Synthetic oligonucleotide
cacaggcgcacgggcaucc

SEQ ID NO: 2614027 - RNA, 19 nt, Artificial Sequence
  Description of Artificial Sequence: Synthetic oligonucleotide
agcucgcccgccucgcgga

SEQ ID NO: 2614028 - RNA, 19 nt, Artificial Sequence
  Description of Artificial Sequence: Synthetic oligonucleotide
ucgagggagggaggacuug

SEQ ID NO: 2614029 - RNA, 19 nt, Artificial Sequence
  Description of Artificial Sequence: Synthetic oligonucleotide
caggcgcacgggcaucccc

SEQ ID NO: 2614030 - RNA, 19 nt, Artificial Sequence
  Description of Artificial Sequence: Synthetic oligonucleotide
acaggcgcacgggcauccc

SEQ ID NO: 2614031 - RNA, 19 nt, Artificial Sequence
  Description of Artificial Sequence: Synthetic oligonucleotide
uguggcguuccaggucgga

SEQ ID NO: 2614032 - RNA, 19 nt, Artificial Sequence
  Description of Artificial Sequence: Synthetic oligonucleotide
uggaccgcuugaaggucuu

SEQ ID NO: 2614033 - RNA, 19 nt, Artificial Sequence
  Description of Artificial Sequence: Synthetic oligonucleotide
cggcucauuugcaugcugc

SEQ ID NO: 2614034 - RNA, 19 nt, Artificial Sequence
  Description of Artificial Sequence: Synthetic oligonucleotide
agugccgccgcagguggcu

SEQ ID NO: 2614035 - RNA, 19 nt, Artificial Sequence
  Description of Artificial Sequence: Synthetic oligonucleotide
ccggaagggccgcaggccg

SEQ ID NO: 2614036 - RNA, 19 nt, Artificial Sequence
  Description of Artificial Sequence: Synthetic oligonucleotide
gucugggcugggguugucc

SEQ ID NO: 2614037 - RNA, 19 nt, Artificial Sequence
  Description of Artificial Sequence: Synthetic oligonucleotide
ggcauggauguugcagugc

SEQ ID NO: 2614038 - RNA, 19 nt, Artificial Sequence
  Description of Artificial Sequence: Synthetic oligonucleotide
gguguuggcuucggugaag

SEQ ID NO: 2614039 - RNA, 19 nt, Artificial Sequence
  Description of Artificial Sequence: Synthetic oligonucleotide
ccgcuuucgagggagggag

SEQ ID NO: 2614040 - RNA, 19 nt, Artificial Sequence
  Description of Artificial Sequence: Synthetic oligonucleotide
cucgcccgaguggaugcgg

SEQ ID NO: 2614041 - RNA, 19 nt, Artificial Sequence
  Description of Artificial Sequence: Synthetic oligonucleotide
ggagggaggacuugagagu

SEQ ID NO: 2614042 - RNA, 19 nt, Artificial Sequence
  Description of Artificial Sequence: Synthetic oligonucleotide
ugcacucgugcggcuugag

SEQ ID NO: 2614043 - RNA, 19 nt, Artificial Sequence
  Description of Artificial Sequence: Synthetic oligonucleotide
gcccgaguggaugcggugg

SEQ ID NO: 2614044 - RNA, 19 nt, Artificial Sequence
  Description of Artificial Sequence: Synthetic oligonucleotide
ggguguuugcguuuguaau

SEQ ID NO: 2614045 - RNA, 19 nt, Artificial Sequence
  Description of Artificial Sequence: Synthetic oligonucleotide
guggugcgcgagcucgccc

SEQ ID NO: 2614046 - RNA, 19 nt, Artificial Sequence
  Description of Artificial Sequence: Synthetic oligonucleotide
gaguggaugcggugguggu

SEQ ID NO: 2614047 - RNA, 19 nt, Artificial Sequence
  Description of Artificial Sequence: Synthetic oligonucleotide
cagcacgcaccggaagggc

SEQ ID NO: 2614048 - RNA, 19 nt, Artificial Sequence
  Description of Artificial Sequence: Synthetic oligonucleotide
gaagaaggcggagcugggu

SEQ ID NO: 2614049 - RNA, 19 nt, Artificial Sequence
  Description of Artificial Sequence: Synthetic oligonucleotide
gcacagcacgcaccggaag

SEQ ID NO: 2614050 - RNA, 19 nt, Artificial Sequence
  Description of Artificial Sequence: Synthetic oligonucleotide
cacugguaggggcgcucgc

SEQ ID NO: 2614051 - RNA, 19 nt, Artificial Sequence
  Description of Artificial Sequence: Synthetic oligonucleotide
agguaggggaaggcucuca

SEQ ID NO: 2614052 - RNA, 19 nt, Artificial Sequence
  Description of Artificial Sequence: Synthetic oligonucleotide
ccgagugcgagaugcugug

SEQ ID NO: 2614053 - RNA, 19 nt, Artificial Sequence
  Description of Artificial Sequence: Synthetic oligonucleotide
cuccggguguuugcguuug

SEQ ID NO: 2614054 - RNA, 19 nt, Artificial Sequence
  Description of Artificial Sequence: Synthetic oligonucleotide
ggguuguccauugagcagu

SEQ ID NO: 2614055 - RNA, 19 nt, Artificial Sequence
  Description of Artificial Sequence: Synthetic oligonucleotide
uccggguguuugcguuugu

SEQ ID NO: 2614056 - RNA, 19 nt, Artificial Sequence
  Description of Artificial Sequence: Synthetic oligonucleotide
uugcacucgugcggcuuga

SEQ ID NO: 2614057 - RNA, 19 nt, Artificial Sequence
  Description of Artificial Sequence: Synthetic oligonucleotide
gcacucgugcggcuugagc

SEQ ID NO: 2614058 - RNA, 19 nt, Artificial Sequence
  Description of Artificial Sequence: Synthetic oligonucleotide
ccagcuccggguguuugcg

SEQ ID NO: 2614059 - RNA, 19 nt, Artificial Sequence
  Description of Artificial Sequence: Synthetic oligonucleotide
gguuguccauugagcagug

SEQ ID NO: 2614060 - RNA, 19 nt, Artificial Sequence
  Description of Artificial Sequence: Synthetic oligonucleotide
gaagccgggcccgagguuu

SEQ ID NO: 2614061 - RNA, 19 nt, Artificial Sequence
  Description of Artificial Sequence: Synthetic oligonucleotide
cauugagcaguggggagcu

SEQ ID NO: 2614062 - RNA, 19 nt, Artificial Sequence
  Description of Artificial Sequence: Synthetic oligonucleotide
gugcggcuugagcuccgag

SEQ ID NO: 2614063 - RNA, 19 nt, Artificial Sequence
  Description of Artificial Sequence: Synthetic oligonucleotide
aggcggagcugggucuggg

SEQ ID NO: 2614064 - RNA, 19 nt, Artificial Sequence
  Description of Artificial Sequence: Synthetic oligonucleotide
gcucucaggcacacggggc

SEQ ID NO: 2614065 - RNA, 19 nt, Artificial Sequence
  Description of Artificial Sequence: Synthetic oligonucleotide
cacggggcagaagugugga

SEQ ID NO: 2614066 - RNA, 19 nt, Artificial Sequence
  Description of Artificial Sequence: Synthetic oligonucleotide
gugugucugcgcgcccgcg

SEQ ID NO: 2614067 - RNA, 19 nt, Artificial Sequence
  Description of Artificial Sequence: Synthetic oligonucleotide
cagaaguguggagccccug

SEQ ID NO: 2614068 - RNA, 19 nt, Artificial Sequence
  Description of Artificial Sequence: Synthetic oligonucleotide
aggcgcacgggcaucccca

SEQ ID NO: 2614069 - RNA, 19 nt, Artificial Sequence
  Description of Artificial Sequence: Synthetic oligonucleotide
gcaccggaagggccgcagg

SEQ ID NO: 2614070 - RNA, 19 nt, Artificial Sequence
  Description of Artificial Sequence: Synthetic oligonucleotide
ucggcggccccggggaacu

SEQ ID NO: 2614071 - RNA, 19 nt, Artificial Sequence
  Description of Artificial Sequence: Synthetic oligonucleotide
gcuuucgagggagggagga

SEQ ID NO: 2614072 - RNA, 19 nt, Artificial Sequence
  Description of Artificial Sequence: Synthetic oligonucleotide
uggcuucggugaagcgcac

SEQ ID NO: 2614073 - RNA, 19 nt, Artificial Sequence
  Description of Artificial Sequence: Synthetic oligonucleotide
ccgcaggccggcauggaug

SEQ ID NO: 2614074 - RNA, 19 nt, Artificial Sequence
  Description of Artificial Sequence: Synthetic oligonucleotide
ccaggucggagagguaggg

SEQ ID NO: 2614075 - RNA, 19 nt, Artificial Sequence
  Description of Artificial Sequence: Synthetic oligonucleotide
gagguaggggaaggcucuc

SEQ ID NO: 2614076 - RNA, 19 nt, Artificial Sequence
  Description of Artificial Sequence: Synthetic oligonucleotide
auguugcagugccgccgca

SEQ ID NO: 2614077 - RNA, 19 nt, Artificial Sequence
  Description of Artificial Sequence: Synthetic oligonucleotide
gcgugugucugcgcgcccg

SEQ ID NO: 2614078 - RNA, 19 nt, Artificial Sequence
  Description of Artificial Sequence: Synthetic oligonucleotide
cuggaccgcuugaaggucu

SEQ ID NO: 2614079 - RNA, 19 nt, Artificial Sequence
  Description of Artificial Sequence: Synthetic oligonucleotide
cccgccucgcggaagcggc

SEQ ID NO: 2614080 - RNA, 19 nt, Artificial Sequence
  Description of Artificial Sequence: Synthetic oligonucleotide
gccaacggggcuuccugca

SEQ ID NO: 2614081 - RNA, 19 nt, Artificial Sequence
  Description of Artificial Sequence: Synthetic oligonucleotide
gccccggggaacuggagga

SEQ ID NO: 2614082 - RNA, 19 nt, Artificial Sequence
  Description of Artificial Sequence: Synthetic oligonucleotide
ggccccgcuuucgagggag

SEQ ID NO: 2614083 - RNA, 19 nt, Artificial Sequence
  Description of Artificial Sequence: Synthetic oligonucleotide
cacgcaccggaagggccgc

SEQ ID NO: 2614084 - RNA, 19 nt, Artificial Sequence
  Description of Artificial Sequence: Synthetic oligonucleotide
ugccccggcucgcgugugu

SEQ ID NO: 2614085 - RNA, 19 nt, Artificial Sequence
  Description of Artificial Sequence: Synthetic oligonucleotide
cagugccgccgcagguggc

SEQ ID NO: 2614086 - RNA, 19 nt, Artificial Sequence
  Description of Artificial Sequence: Synthetic oligonucleotide
caccagcuccggguguuug

SEQ ID NO: 2614087 - RNA, 19 nt, Artificial Sequence
  Description of Artificial Sequence: Synthetic oligonucleotide
cuuccuccccagacaaagu

SEQ ID NO: 2614088 - RNA, 19 nt, Artificial Sequence
  Description of Artificial Sequence: Synthetic oligonucleotide
gugcgagaugcuguggcgu

SEQ ID NO: 2614089 - RNA, 19 nt, Artificial Sequence
  Description of Artificial Sequence: Synthetic oligonucleotide
cacccugcacgaggggcac

SEQ ID NO: 2614090 - RNA, 19 nt, Artificial Sequence
  Description of Artificial Sequence: Synthetic oligonucleotide
cgagaugcuguggcguucc

SEQ ID NO: 2614091 - RNA, 19 nt, Artificial Sequence
  Description of Artificial Sequence: Synthetic oligonucleotide
gguggugcgcgagcucgcc

SEQ ID NO: 2614092 - RNA, 19 nt, Artificial Sequence
  Description of Artificial Sequence: Synthetic oligonucleotide
ccaacggggcuuccugcac

SEQ ID NO: 2614093 - RNA, 19 nt, Artificial Sequence
  Description of Artificial Sequence: Synthetic oligonucleotide
ggugguggugcgcgagcuc

SEQ ID NO: 2614094 - RNA, 19 nt, Artificial Sequence
  Description of Artificial Sequence: Synthetic oligonucleotide
ggcuucggugaagcgcacc

SEQ ID NO: 2614095 - RNA, 19 nt, Artificial Sequence
  Description of Artificial Sequence: Synthetic oligonucleotide
ggugcgcgagcucgcccgc

SEQ ID NO: 2614096 - RNA, 19 nt, Artificial Sequence
  Description of Artificial Sequence: Synthetic oligonucleotide
cugcagucugggugcugga

SEQ ID NO: 2614097 - RNA, 19 nt, Artificial Sequence
  Description of Artificial Sequence: Synthetic oligonucleotide
ggguguuggcuucggugaa

SEQ ID NO: 2614098 - RNA, 19 nt, Artificial Sequence
  Description of Artificial Sequence: Synthetic oligonucleotide
ggaggaagccgggcccgag

SEQ ID NO: 2614099 - RNA, 19 nt, Artificial Sequence
  Description of Artificial Sequence: Synthetic oligonucleotide
gggcagaaguguggagccc

SEQ ID NO: 2614100 - RNA, 19 nt, Artificial Sequence
  Description of Artificial Sequence: Synthetic oligonucleotide
gcuggaccgcuugaagguc

SEQ ID NO: 2614101 - RNA, 19 nt, Artificial Sequence
  Description of Artificial Sequence: Synthetic oligonucleotide
gccgcaggguguuggcuuc

SEQ ID NO: 2614102 - RNA, 19 nt, Artificial Sequence
  Description of Artificial Sequence: Synthetic oligonucleotide
ggggcacugguaggggcgc

SEQ ID NO: 2614103 - RNA, 19 nt, Artificial Sequence
  Description of Artificial Sequence: Synthetic oligonucleotide
ggggucggccccgcuuucg

SEQ ID NO: 2614104 - RNA, 19 nt, Artificial Sequence
  Description of Artificial Sequence: Synthetic oligonucleotide
gcggugguggugcgcgagc

SEQ ID NO: 2614105 - RNA, 19 nt, Artificial Sequence
  Description of Artificial Sequence: Synthetic oligonucleotide
cucgcccgccucgcggaag

SEQ ID NO: 2614106 - RNA, 19 nt, Artificial Sequence
  Description of Artificial Sequence: Synthetic oligonucleotide
cucggcggccccggggaac

SEQ ID NO: 2614107 - RNA, 19 nt, Artificial Sequence
  Description of Artificial Sequence: Synthetic oligonucleotide
cagcggcuggggccucggg

SEQ ID NO: 2614108 - RNA, 19 nt, Artificial Sequence
  Description of Artificial Sequence: Synthetic oligonucleotide
gccucgcggaagcggcggg

SEQ ID NO: 2614109 - RNA, 19 nt, Artificial Sequence
  Description of Artificial Sequence: Synthetic oligonucleotide
ccggcauggauguugcagu

SEQ ID NO: 2614110 - RNA, 19 nt, Artificial Sequence
  Description of Artificial Sequence: Synthetic oligonucleotide
gcacccugcacgaggggca

SEQ ID NO: 2614111 - RNA, 19 nt, Artificial Sequence
  Description of Artificial Sequence: Synthetic oligonucleotide
gagcugggucugggcuggg

SEQ ID NO: 2614112 - RNA, 19 nt, Artificial Sequence
  Description of Artificial Sequence: Synthetic oligonucleotide
cgcacccugcacgaggggc

SEQ ID NO: 2614113 - RNA, 19 nt, Artificial Sequence
  Description of Artificial Sequence: Synthetic oligonucleotide
cugcugccaacggggcuuc

SEQ ID NO: 2614114 - RNA, 19 nt, Artificial Sequence
  Description of Artificial Sequence: Synthetic oligonucleotide
ggaugcggugguggugcgc

SEQ ID NO: 2614115 - RNA, 19 nt, Artificial Sequence
  Description of Artificial Sequence: Synthetic oligonucleotide
ggcggccccggggaacugg

SEQ ID NO: 2614116 - RNA, 19 nt, Artificial Sequence
  Description of Artificial Sequence: Synthetic oligonucleotide
cgcuuucgagggagggagg

SEQ ID NO: 2614117 - RNA, 19 nt, Artificial Sequence
  Description of Artificial Sequence: Synthetic oligonucleotide
gcuggggccucggguuugg

SEQ ID NO: 2614118 - RNA, 19 nt, Artificial Sequence
  Description of Artificial Sequence: Synthetic oligonucleotide
aagccgggcccgagguuuu

SEQ ID NO: 2614119 - RNA, 19 nt, Artificial Sequence
  Description of Artificial Sequence: Synthetic oligonucleotide
gguggccggccucggcggc

SEQ ID NO: 2614120 - RNA, 19 nt, Artificial Sequence
  Description of Artificial Sequence: Synthetic oligonucleotide
ccggcucauuugcaugcug

SEQ ID NO: 2614121 - RNA, 19 nt, Artificial Sequence
  Description of Artificial Sequence: Synthetic oligonucleotide
cgucaucccacagcggcug

SEQ ID NO: 2614122 - RNA, 19 nt, Artificial Sequence
  Description of Artificial Sequence: Synthetic oligonucleotide
cugcacgaggggcacuggu

SEQ ID NO: 2614123 - RNA, 19 nt, Artificial Sequence
  Description of Artificial Sequence: Synthetic oligonucleotide
gggaaggcucucaggcaca

SEQ ID NO: 2614124 - RNA, 19 nt, Artificial Sequence
  Description of Artificial Sequence: Synthetic oligonucleotide
cuggggccucggguuuggg

SEQ ID NO: 2614125 - RNA, 19 nt, Artificial Sequence
  Description of Artificial Sequence: Synthetic oligonucleotide
gggccgcaggccggcaugg

SEQ ID NO: 2614126 - RNA, 19 nt, Artificial Sequence
  Description of Artificial Sequence: Synthetic oligonucleotide
ugcugccaacggggcuucc

SEQ ID NO: 2614127 - RNA, 19 nt, Artificial Sequence
  Description of Artificial Sequence: Synthetic oligonucleotide
cgucgucaucccacagcgg

SEQ ID NO: 2614128 - RNA, 19 nt, Artificial Sequence
  Description of Artificial Sequence: Synthetic oligonucleotide
cgauuggaggugguggcuc

SEQ ID NO: 2614129 - RNA, 19 nt, Artificial Sequence
  Description of Artificial Sequence: Synthetic oligonucleotide
cggguguuugcguuuguaa

SEQ ID NO: 2614130 - RNA, 19 nt, Artificial Sequence
  Description of Artificial Sequence: Synthetic oligonucleotide
ccccgcuuucgagggaggg

SEQ ID NO: 2614131 - RNA, 19 nt, Artificial Sequence
  Description of Artificial Sequence: Synthetic oligonucleotide
ggcgcacgggcauccccac

SEQ ID NO: 2614132 - RNA, 19 nt, Artificial Sequence
  Description of Artificial Sequence: Synthetic oligonucleotide
gggucggccccgcuuucga

SEQ ID NO: 2614133 - RNA, 19 nt, Artificial Sequence
  Description of Artificial Sequence: Synthetic oligonucleotide
gccgccgcaggguguuggc

SEQ ID NO: 2614134 - RNA, 19 nt, Artificial Sequence
  Description of Artificial Sequence: Synthetic oligonucleotide
cgcacgggcauccccacca

SEQ ID NO: 2614135 - RNA, 19 nt, Artificial Sequence
  Description of Artificial Sequence: Synthetic oligonucleotide
cuucggugaagcgcacccu

SEQ ID NO: 2614136 - RNA, 19 nt, Artificial Sequence
  Description of Artificial Sequence: Synthetic oligonucleotide
ggcacagcacgcaccggaa

SEQ ID NO: 2614137 - RNA, 19 nt, Artificial Sequence
  Description of Artificial Sequence: Synthetic oligonucleotide
ggcacaggcgcacgggcau

SEQ ID NO: 2614138 - RNA, 19 nt, Artificial Sequence
  Description of Artificial Sequence: Synthetic oligonucleotide
gcccgccucgcggaagcgg

SEQ ID NO: 2614139 - RNA, 19 nt, Artificial Sequence
  Description of Artificial Sequence: Synthetic oligonucleotide
ggcucgcgugugucugcgc

SEQ ID NO: 2614140 - RNA, 19 nt, Artificial Sequence
  Description of Artificial Sequence: Synthetic oligonucleotide
ccugguggccggccucggc

SEQ ID NO: 2614141 - RNA, 19 nt, Artificial Sequence
  Description of Artificial Sequence: Synthetic oligonucleotide
cgagugcgagaugcugugg

SEQ ID NO: 2614142 - RNA, 19 nt, Artificial Sequence
  Description of Artificial Sequence: Synthetic oligonucleotide
gcgcacccugcacgagggg

SEQ ID NO: 2614143 - RNA, 19 nt, Artificial Sequence
  Description of Artificial Sequence: Synthetic oligonucleotide
ccucgcggaagcggcgggg

SEQ ID NO: 2614144 - RNA, 19 nt, Artificial Sequence
  Description of Artificial Sequence: Synthetic oligonucleotide
ggaccgcuugaaggucuug

SEQ ID NO: 2614145 - RNA, 19 nt, Artificial Sequence
  Description of Artificial Sequence: Synthetic oligonucleotide
cuuugcacucgugcggcuu

SEQ ID NO: 2614146 - RNA, 19 nt, Artificial Sequence
  Description of Artificial Sequence: Synthetic oligonucleotide
gugccgccgcagguggcug

SEQ ID NO: 2614147 - RNA, 19 nt, Artificial Sequence
  Description of Artificial Sequence: Synthetic oligonucleotide
gaguccgauuggagguggu

SEQ ID NO: 2614148 - RNA, 19 nt, Artificial Sequence
  Description of Artificial Sequence: Synthetic oligonucleotide
ggggcacagcacgcaccgg

SEQ ID NO: 2614149 - RNA, 19 nt, Artificial Sequence
  Description of Artificial Sequence: Synthetic oligonucleotide
cgcgagcucgcccgccucg

SEQ ID NO: 2614150 - RNA, 19 nt, Artificial Sequence
  Description of Artificial Sequence: Synthetic oligonucleotide
gugcgcgagcucgcccgcc

SEQ ID NO: 2614151 - RNA, 19 nt, Artificial Sequence
  Description of Artificial Sequence: Synthetic oligonucleotide
cggagagguaggggaaggc

SEQ ID NO: 2614152 - RNA, 19 nt, Artificial Sequence
  Description of Artificial Sequence: Synthetic oligonucleotide
cggcuugagcuccgagugc

SEQ ID NO: 2614153 - RNA, 19 nt, Artificial Sequence
  Description of Artificial Sequence: Synthetic oligonucleotide
ccggcucgcgugugucugc

SEQ ID NO: 2614154 - RNA, 19 nt, Artificial Sequence
  Description of Artificial Sequence: Synthetic oligonucleotide
gcgagaugcuguggcguuc

SEQ ID NO: 2614155 - RNA, 19 nt, Artificial Sequence
  Description of Artificial Sequence: Synthetic oligonucleotide
cgugugucugcgcgcccgc

SEQ ID NO: 2614156 - RNA, 19 nt, Artificial Sequence
  Description of Artificial Sequence: Synthetic oligonucleotide
cccggcucgcgugugucug

SEQ ID NO: 2614157 - RNA, 19 nt, Artificial Sequence
  Description of Artificial Sequence: Synthetic oligonucleotide
ggaggacuugagaguccga

SEQ ID NO: 2614158 - RNA, 19 nt, Artificial Sequence
  Description of Artificial Sequence: Synthetic oligonucleotide
cccagacaaaguggaagaa

SEQ ID NO: 2614159 - RNA, 19 nt, Artificial Sequence
  Description of Artificial Sequence: Synthetic oligonucleotide
ccgccucgcggaagcggcg

SEQ ID NO: 2614160 - RNA, 19 nt, Artificial Sequence
  Description of Artificial Sequence: Synthetic oligonucleotide
ggcuggggccucggguuug

SEQ ID NO: 2614161 - RNA, 19 nt, Artificial Sequence
  Description of Artificial Sequence: Synthetic oligonucleotide
gcgcacgggcauccccacc

SEQ ID NO: 2614162 - RNA, 19 nt, Artificial Sequence
  Description of Artificial Sequence: Synthetic oligonucleotide
acggggcuuccugcacgga

SEQ ID NO: 2614163 - RNA, 19 nt, Artificial Sequence
  Description of Artificial Sequence: Synthetic oligonucleotide
acccugcacgaggggcacu

SEQ ID NO: 2614164 - RNA, 19 nt, Artificial Sequence
  Description of Artificial Sequence: Synthetic oligonucleotide
cguuuguaaugccgccgca

SEQ ID NO: 2614165 - RNA, 19 nt, Artificial Sequence
  Description of Artificial Sequence: Synthetic oligonucleotide
gcuugagcuccgagugcga

SEQ ID NO: 2614166 - RNA, 19 nt, Artificial Sequence
  Description of Artificial Sequence: Synthetic oligonucleotide
cagcuccggguguuugcgu

SEQ ID NO: 2614167 - RNA, 19 nt, Artificial Sequence
  Description of Artificial Sequence: Synthetic oligonucleotide
gccccgcuuucgagggagg

SEQ ID NO: 2614168 - RNA, 19 nt, Artificial Sequence
  Description of Artificial Sequence: Synthetic oligonucleotide
augccgccgcaggguguug

SEQ ID NO: 2614169 - RNA, 19 nt, Artificial Sequence
  Description of Artificial Sequence: Synthetic oligonucleotide
ccgcaggguguuggcuucg

SEQ ID NO: 2614170 - RNA, 19 nt, Artificial Sequence
  Description of Artificial Sequence: Synthetic oligonucleotide
cugggugcuggagccggcu

SEQ ID NO: 2614171 - RNA, 19 nt, Artificial Sequence
  Description of Artificial Sequence: Synthetic oligonucleotide
cccgcuuucgagggaggga

SEQ ID NO: 2614172 - RNA, 19 nt, Artificial Sequence
  Description of Artificial Sequence: Synthetic oligonucleotide
cugccccggcucgcgugug

SEQ ID NO: 2614173 - RNA, 19 nt, Artificial Sequence
  Description of Artificial Sequence: Synthetic oligonucleotide
gcggcuggggccucggguu

SEQ ID NO: 2614174 - RNA, 19 nt, Artificial Sequence
  Description of Artificial Sequence: Synthetic oligonucleotide
gcagaaguguggagccccu

SEQ ID NO: 2614175 - RNA, 19 nt, Artificial Sequence
  Description of Artificial Sequence: Synthetic oligonucleotide
cggcucgcgugugucugcg

SEQ ID NO: 2614176 - RNA, 19 nt, Artificial Sequence
  Description of Artificial Sequence: Synthetic oligonucleotide
gcugccaacggggcuuccu

SEQ ID NO: 2614177 - RNA, 19 nt, Artificial Sequence
  Description of Artificial Sequence: Synthetic oligonucleotide
gcacaggcgcacgggcauc

SEQ ID NO: 2614178 - RNA, 19 nt, Artificial Sequence
  Description of Artificial Sequence: Synthetic oligonucleotide
gcugccccggcucgcgugu

SEQ ID NO: 2614179 - RNA, 19 nt, Artificial Sequence
  Description of Artificial Sequence: Synthetic oligonucleotide
cgcccgaguggaugcggug

SEQ ID NO: 2614180 - RNA, 19 nt, Artificial Sequence
  Description of Artificial Sequence: Synthetic oligonucleotide
ggccggcauggauguugca

SEQ ID NO: 2614181 - RNA, 19 nt, Artificial Sequence
  Description of Artificial Sequence: Synthetic oligonucleotide
cgcaccggaagggccgcag

SEQ ID NO: 2614182 - RNA, 19 nt, Artificial Sequence
  Description of Artificial Sequence: Synthetic oligonucleotide
ggggagcugcagucugggu

SEQ ID NO: 2614183 - RNA, 19 nt, Artificial Sequence
  Description of Artificial Sequence: Synthetic oligonucleotide
gccgcaggccggcauggau

SEQ ID NO: 2614184 - RNA, 19 nt, Artificial Sequence
  Description of Artificial Sequence: Synthetic oligonucleotide
cgcaggccggcauggaugu

SEQ ID NO: 2614185 - RNA, 19 nt, Artificial Sequence
  Description of Artificial Sequence: Synthetic oligonucleotide
gcuccggguguuugcguuu

SEQ ID NO: 2614186 - RNA, 19 nt, Artificial Sequence
  Description of Artificial Sequence: Synthetic oligonucleotide
gcgcgagcucgcccgccuc

SEQ ID NO: 2614187 - RNA, 19 nt, Artificial Sequence
  Description of Artificial Sequence: Synthetic oligonucleotide
ccgcaaucuuugcacucgu

SEQ ID NO: 2614188 - RNA, 19 nt, Artificial Sequence
  Description of Artificial Sequence: Synthetic oligonucleotide
gcggccccggggaacugga

SEQ ID NO: 2614189 - RNA, 19 nt, Artificial Sequence
  Description of Artificial Sequence: Synthetic oligonucleotide
gccccggcucgcguguguc

SEQ ID NO: 2614190 - RNA, 19 nt, Artificial Sequence
  Description of Artificial Sequence: Synthetic oligonucleotide
cccacagcggcuggggccu

SEQ ID NO: 2614191 - RNA, 19 nt, Artificial Sequence
  Description of Artificial Sequence: Synthetic oligonucleotide
ggaagccgggcccgagguu

SEQ ID NO: 2614192 - RNA, 19 nt, Artificial Sequence
  Description of Artificial Sequence: Synthetic oligonucleotide
ccggguguuugcguuugua

SEQ ID NO: 2614193 - RNA, 19 nt, Artificial Sequence
  Description of Artificial Sequence: Synthetic oligonucleotide
cgcgugugucugcgcgccc

SEQ ID NO: 2614194 - RNA, 19 nt, Artificial Sequence
  Description of Artificial Sequence: Synthetic oligonucleotide
gcuccgagugcgagaugcu

SEQ ID NO: 2614195 - RNA, 19 nt, Artificial Sequence
  Description of Artificial Sequence: Synthetic oligonucleotide
gccgccgcagguggcugga

SEQ ID NO: 2614196 - RNA, 19 nt, Artificial Sequence
  Description of Artificial Sequence: Synthetic oligonucleotide
ccgauuggaggugguggcu

SEQ ID NO: 2614197 - RNA, 19 nt, Artificial Sequence
  Description of Artificial Sequence: Synthetic oligonucleotide
gccggcucauuugcaugcu

SEQ ID NO: 2614198 - RNA, 19 nt, Artificial Sequence
  Description of Artificial Sequence: Synthetic oligonucleotide
gcucgcccgccucgcggaa

SEQ ID NO: 2614199 - RNA, 19 nt, Artificial Sequence
  Description of Artificial Sequence: Synthetic oligonucleotide
cggccccggggaacuggag

SEQ ID NO: 2614200 - RNA, 19 nt, Artificial Sequence
  Description of Artificial Sequence: Synthetic oligonucleotide
ggccgcaggccggcaugga

SEQ ID NO: 2614201 - RNA, 19 nt, Artificial Sequence
  Description of Artificial Sequence: Synthetic oligonucleotide
ccccggggaacuggaggaa

SEQ ID NO: 2614202 - RNA, 19 nt, Artificial Sequence
  Description of Artificial Sequence: Synthetic oligonucleotide
cgccgcaggguguuggcuu

SEQ ID NO: 2614203 - RNA, 19 nt, Artificial Sequence
  Description of Artificial Sequence: Synthetic oligonucleotide
cgcccgccucgcggaagcg

SEQ ID NO: 2614204 - RNA, 19 nt, Artificial Sequence
  Description of Artificial Sequence: Synthetic oligonucleotide
gugcuggagccggcucauu

SEQ ID NO: 2614205 - RNA, 19 nt, Artificial Sequence
  Description of Artificial Sequence: Synthetic oligonucleotide
ccccggcucgcgugugucu

SEQ ID NO: 2614206 - RNA, 19 nt, Artificial Sequence
  Description of Artificial Sequence: Synthetic oligonucleotide
ggcgcucgcccgaguggau

SEQ ID NO: 2614207 - RNA, 19 nt, Artificial Sequence
  Description of Artificial Sequence: Synthetic oligonucleotide
ccgccgcaggguguuggcu

SEQ ID NO: 2614208 - RNA, 19 nt, Artificial Sequence
  Description of Artificial Sequence: Synthetic oligonucleotide
cggccccgcuuucgaggga

SEQ ID NO: 2614209 - RNA, 19 nt, Artificial Sequence
  Description of Artificial Sequence: Synthetic oligonucleotide
gcaggccggcauggauguu

SEQ ID NO: 2614210 - RNA, 19 nt, Artificial Sequence
  Description of Artificial Sequence: Synthetic oligonucleotide
cggcggccccggggaacug

SEQ ID NO: 2614211 - RNA, 19 nt, Artificial Sequence
  Description of Artificial Sequence: Synthetic oligonucleotide
uaugcaacgaaacuaagag

SEQ ID NO: 2614212 - RNA, 19 nt, Artificial Sequence
  Description of Artificial Sequence: Synthetic oligonucleotide
uuaucuaaggcauccaugg

SEQ ID NO: 2614213 - RNA, 19 nt, Artificial Sequence
  Description of Artificial Sequence: Synthetic oligonucleotide
uauuuagguaccaagguag

SEQ ID NO: 2614214 - RNA, 19 nt, Artificial Sequence
  Description of Artificial Sequence: Synthetic oligonucleotide
gaaacuaagagaaaacccg

SEQ ID NO: 2614215 - RNA, 19 nt, Artificial Sequence
  Description of Artificial Sequence: Synthetic oligonucleotide
augauucuaaaguaggccc

SEQ ID NO: 2614216 - RNA, 19 nt, Artificial Sequence
  Description of Artificial Sequence: Synthetic oligonucleotide
aaaguuagaagcauguuuc

SEQ ID NO: 2614217 - RNA, 19 nt, Artificial Sequence
  Description of Artificial Sequence: Synthetic oligonucleotide
uaaagugauccacauaagg

SEQ ID NO: 2614218 - RNA, 19 nt, Artificial Sequence
  Description of Artificial Sequence: Synthetic oligonucleotide
cugaagaagccuuagagcg

SEQ ID NO: 2614219 - RNA, 19 nt, Artificial Sequence
  Description of Artificial Sequence: Synthetic oligonucleotide
auuacuuuuguuucuuagc

SEQ ID NO: 2614220 - RNA, 19 nt, Artificial Sequence
  Description of Artificial Sequence: Synthetic oligonucleotide
aguaauuuuacacuggaga

SEQ ID NO: 2614221 - RNA, 19 nt, Artificial Sequence
  Description of Artificial Sequence: Synthetic oligonucleotide
auuugugccagauaauucg

SEQ ID NO: 2614222 - RNA, 19 nt, Artificial Sequence
  Description of Artificial Sequence: Synthetic oligonucleotide
aacgcugagacucuucuac

SEQ ID NO: 2614223 - RNA, 19 nt, Artificial Sequence
  Description of Artificial Sequence: Synthetic oligonucleotide
uaaggcauugcgaagaacc

SEQ ID NO: 2614224 - RNA, 19 nt, Artificial Sequence
  Description of Artificial Sequence: Synthetic oligonucleotide
uugaauuugugccagauaa

SEQ ID NO: 2614225 - RNA, 19 nt, Artificial Sequence
  Description of Artificial Sequence: Synthetic oligonucleotide
cuguucuaaaguuagaagc

SEQ ID NO: 2614226 - RNA, 19 nt, Artificial Sequence
  Description of Artificial Sequence: Synthetic oligonucleotide
aauucguccgaagaugucc

SEQ ID NO: 2614227 - RNA, 19 nt, Artificial Sequence
  Description of Artificial Sequence: Synthetic oligonucleotide
ugcaacgaaacuaagagaa

SEQ ID NO: 2614228 - RNA, 19 nt, Artificial Sequence
  Description of Artificial Sequence: Synthetic oligonucleotide
aaagaugugacauguggug

SEQ ID NO: 2614229 - RNA, 19 nt, Artificial Sequence
  Description of Artificial Sequence: Synthetic oligonucleotide
ucuuucuugcuucaauucg

SEQ ID NO: 2614230 - RNA, 19 nt, Artificial Sequence
  Description of Artificial Sequence: Synthetic oligonucleotide
ucaagucucagucugauaa

SEQ ID NO: 2614231 - RNA, 19 nt, Artificial Sequence
  Description of Artificial Sequence: Synthetic oligonucleotide
uguucuaaaguuagaagca

SEQ ID NO: 2614232 - RNA, 19 nt, Artificial Sequence
  Description of Artificial Sequence: Synthetic oligonucleotide
ucuaaaguuagaagcaugu

SEQ ID NO: 2614233 - RNA, 19 nt, Artificial Sequence
  Description of Artificial Sequence: Synthetic oligonucleotide
uuuguuucuuagcugcugg

SEQ ID NO: 2614234 - RNA, 19 nt, Artificial Sequence
  Description of Artificial Sequence: Synthetic oligonucleotide
ucuugcuucaauucgagcu

SEQ ID NO: 2614235 - RNA, 19 nt, Artificial Sequence
  Description of Artificial Sequence: Synthetic oligonucleotide
auugcgaagaaccguuucc

SEQ ID NO: 2614236 - RNA, 19 nt, Artificial Sequence
  Description of Artificial Sequence: Synthetic oligonucleotide
uuacuuuuguuucuuagcu

SEQ ID NO: 2614237 - RNA, 19 nt, Artificial Sequence
  Description of Artificial Sequence: Synthetic oligonucleotide
uucaauucgagcuuguuuc

SEQ ID NO: 2614238 - RNA, 19 nt, Artificial Sequence
  Description of Artificial Sequence: Synthetic oligonucleotide
aacaaccuuuucuaaccgc

SEQ ID NO: 2614239 - RNA, 19 nt, Artificial Sequence
  Description of Artificial Sequence: Synthetic oligonucleotide
uauucuuaugcaacgaaac

SEQ ID NO: 2614240 - RNA, 19 nt, Artificial Sequence
  Description of Artificial Sequence: Synthetic oligonucleotide
ugaaguaauuuuacacugg

SEQ ID NO: 2614241 - RNA, 19 nt, Artificial Sequence
  Description of Artificial Sequence: Synthetic oligonucleotide
uuucuaaccgcucuggacu

SEQ ID NO: 2614242 - RNA, 19 nt, Artificial Sequence
  Description of Artificial Sequence: Synthetic oligonucleotide
uuugcuagggaacccacag

SEQ ID NO: 2614243 - RNA, 19 nt, Artificial Sequence
  Description of Artificial Sequence: Synthetic oligonucleotide
acgaaacuaagagaaaacc

SEQ ID NO: 2614244 - RNA, 19 nt, Artificial Sequence
  Description of Artificial Sequence: Synthetic oligonucleotide
aucaacaaccuuuucuaac

SEQ ID NO: 2614245 - RNA, 19 nt, Artificial Sequence
  Description of Artificial Sequence: Synthetic oligonucleotide
gacaacuuuaucuaaggca

SEQ ID NO: 2614246 - RNA, 19 nt, Artificial Sequence
  Description of Artificial Sequence: Synthetic oligonucleotide
auuuugaccuuuucuuccc

SEQ ID NO: 2614247 - RNA, 19 nt, Artificial Sequence
  Description of Artificial Sequence: Synthetic oligonucleotide
uuuaucuaaggcauccaug

SEQ ID NO: 2614248 - RNA, 19 nt, Artificial Sequence
  Description of Artificial Sequence: Synthetic oligonucleotide
uguuucucaagucucaguc

SEQ ID NO: 2614249 - RNA, 19 nt, Artificial Sequence
  Description of Artificial Sequence: Synthetic oligonucleotide
auccauggaaucaacaacc

SEQ ID NO: 2614250 - RNA, 19 nt, Artificial Sequence
  Description of Artificial Sequence: Synthetic oligonucleotide
aauuuuacacuggagaaaa

SEQ ID NO: 2614251 - RNA, 19 nt, Artificial Sequence
  Description of Artificial Sequence: Synthetic oligonucleotide
uaaaguuagaagcauguuu

SEQ ID NO: 2614252 - RNA, 19 nt, Artificial Sequence
  Description of Artificial Sequence: Synthetic oligonucleotide
ucugaagaagccuuagagc

SEQ ID NO: 2614253 - RNA, 19 nt, Artificial Sequence
  Description of Artificial Sequence: Synthetic oligonucleotide
ucuuaugcaacgaaacuaa

SEQ ID NO: 2614254 - RNA, 19 nt, Artificial Sequence
  Description of Artificial Sequence: Synthetic oligonucleotide
ucugauaaagugauccaca

SEQ ID NO: 2614255 - RNA, 19 nt, Artificial Sequence
  Description of Artificial Sequence: Synthetic oligonucleotide
uuucucaagucucagucug

SEQ ID NO: 2614256 - RNA, 19 nt, Artificial Sequence
  Description of Artificial Sequence: Synthetic oligonucleotide
aaacuaagagaaaacccgg

SEQ ID NO: 2614257 - RNA, 19 nt, Artificial Sequence
  Description of Artificial Sequence: Synthetic oligonucleotide
aacgaaacuaagagaaaac

SEQ ID NO: 2614258 - RNA, 19 nt, Artificial Sequence
  Description of Artificial Sequence: Synthetic oligonucleotide
aagccuuagagcgucuucc

SEQ ID NO: 2614259 - RNA, 19 nt, Artificial Sequence
  Description of Artificial Sequence: Synthetic oligonucleotide
ugcuagggaacccacagcc

SEQ ID NO: 2614260 - RNA, 19 nt, Artificial Sequence
  Description of Artificial Sequence: Synthetic oligonucleotide
uuaugcaacgaaacuaaga

SEQ ID NO: 2614261 - RNA, 19 nt, Artificial Sequence
  Description of Artificial Sequence: Synthetic oligonucleotide
uggacaacuuuaucuaagg

SEQ ID NO: 2614262 - RNA, 19 nt, Artificial Sequence
  Description of Artificial Sequence: Synthetic oligonucleotide
gugaaguaauuuuacacug

SEQ ID NO: 2614263 - RNA, 19 nt, Artificial Sequence
  Description of Artificial Sequence: Synthetic oligonucleotide
aguccuuuccuugacaacg

SEQ ID NO: 2614264 - RNA, 19 nt, Artificial Sequence
  Description of Artificial Sequence: Synthetic oligonucleotide
gauaauucguccgaagaug

SEQ ID NO: 2614265 - RNA, 19 nt, Artificial Sequence
  Description of Artificial Sequence: Synthetic oligonucleotide
uucagaaggacauaccaaa

SEQ ID NO: 2614266 - RNA, 19 nt, Artificial Sequence
  Description of Artificial Sequence: Synthetic oligonucleotide
aaccguuuccuguuguauc

SEQ ID NO: 2614267 - RNA, 19 nt, Artificial Sequence
  Description of Artificial Sequence: Synthetic oligonucleotide
aauuugugccagauaauuc

SEQ ID NO: 2614268 - RNA, 19 nt, Artificial Sequence
  Description of Artificial Sequence: Synthetic oligonucleotide
uagguaccaagguagaggc

SEQ ID NO: 2614269 - RNA, 19 nt, Artificial Sequence
  Description of Artificial Sequence: Synthetic oligonucleotide
aagcuccagauuuugaccu

SEQ ID NO: 2614270 - RNA, 19 nt, Artificial Sequence
  Description of Artificial Sequence: Synthetic oligonucleotide
cuaagagaaaacccggaag

SEQ ID NO: 2614271 - RNA, 19 nt, Artificial Sequence
  Description of Artificial Sequence: Synthetic oligonucleotide
uuauuuagguaccaaggua

SEQ ID NO: 2614272 - RNA, 19 nt, Artificial Sequence
  Description of Artificial Sequence: Synthetic oligonucleotide
uccaugaagcuccagauuu

SEQ ID NO: 2614273 - RNA, 19 nt, Artificial Sequence
  Description of Artificial Sequence: Synthetic oligonucleotide
aauucgagcuuguuucuca

SEQ ID NO: 2614274 - RNA, 19 nt, Artificial Sequence
  Description of Artificial Sequence: Synthetic oligonucleotide
ucuucuaguccuuuccuug

SEQ ID NO: 2614275 - RNA, 19 nt, Artificial Sequence
  Description of Artificial Sequence: Synthetic oligonucleotide
uuauguaagucuucauuac

SEQ ID NO: 2614276 - RNA, 19 nt, Artificial Sequence
  Description of Artificial Sequence: Synthetic oligonucleotide
ugugccagauaauucgucc

SEQ ID NO: 2614277 - RNA, 19 nt, Artificial Sequence
  Description of Artificial Sequence: Synthetic oligonucleotide
uucuaaaguuagaagcaug

SEQ ID NO: 2614278 - RNA, 19 nt, Artificial Sequence
  Description of Artificial Sequence: Synthetic oligonucleotide
gugugaaguaauuuuacac

SEQ ID NO: 2614279 - RNA, 19 nt, Artificial Sequence
  Description of Artificial Sequence: Synthetic oligonucleotide
ugaagcuccagauuuugac

SEQ ID NO: 2614280 - RNA, 19 nt, Artificial Sequence
  Description of Artificial Sequence: Synthetic oligonucleotide
gaaucaacaaccuuuucua

SEQ ID NO: 2614281 - RNA, 19 nt, Artificial Sequence
  Description of Artificial Sequence: Synthetic oligonucleotide
gaagcuccagauuuugacc

SEQ ID NO: 2614282 - RNA, 19 nt, Artificial Sequence
  Description of Artificial Sequence: Synthetic oligonucleotide
ucagaaggacauaccaaag

SEQ ID NO: 2614283 - RNA, 19 nt, Artificial Sequence
  Description of Artificial Sequence: Synthetic oligonucleotide
gaaguaauuuuacacugga

SEQ ID NO: 2614284 - RNA, 19 nt, Artificial Sequence
  Description of Artificial Sequence: Synthetic oligonucleotide
cagucugauaaagugaucc

SEQ ID NO: 2614285 - RNA, 19 nt, Artificial Sequence
  Description of Artificial Sequence: Synthetic oligonucleotide
ugagacucuucuacaaacc

SEQ ID NO: 2614286 - RNA, 19 nt, Artificial Sequence
  Description of Artificial Sequence: Synthetic oligonucleotide
caugauucuaaaguaggcc

SEQ ID NO: 2614287 - RNA, 19 nt, Artificial Sequence
  Description of Artificial Sequence: Synthetic oligonucleotide
uucaggaacgcugagacuc

SEQ ID NO: 2614288 - RNA, 19 nt, Artificial Sequence
  Description of Artificial Sequence: Synthetic oligonucleotide
ugauucuaaaguaggccca

SEQ ID NO: 2614289 - RNA, 19 nt, Artificial Sequence
  Description of Artificial Sequence: Synthetic oligonucleotide
cauaccaaaguuuauguaa

SEQ ID NO: 2614290 - RNA, 19 nt, Artificial Sequence
  Description of Artificial Sequence: Synthetic oligonucleotide
uguauucuuaugcaacgaa

SEQ ID NO: 2614291 - RNA, 19 nt, Artificial Sequence
  Description of Artificial Sequence: Synthetic oligonucleotide
aaaagaugugacauguggu

SEQ ID NO: 2614292 - RNA, 19 nt, Artificial Sequence
  Description of Artificial Sequence: Synthetic oligonucleotide
aaguuuauguaagucuuca

SEQ ID NO: 2614293 - RNA, 19 nt, Artificial Sequence
  Description of Artificial Sequence: Synthetic oligonucleotide
uuucuugcuucaauucgag

SEQ ID NO: 2614294 - RNA, 19 nt, Artificial Sequence
  Description of Artificial Sequence: Synthetic oligonucleotide
aaaguuuauguaagucuuc

SEQ ID NO: 2614295 - RNA, 19 nt, Artificial Sequence
  Description of Artificial Sequence: Synthetic oligonucleotide
gucucagucugauaaagug

SEQ ID NO: 2614296 - RNA, 19 nt, Artificial Sequence
  Description of Artificial Sequence: Synthetic oligonucleotide
uuucuuuccuucagaagga

SEQ ID NO: 2614297 - RNA, 19 nt, Artificial Sequence
  Description of Artificial Sequence: Synthetic oligonucleotide
gacucuucuacaaaccacc

SEQ ID NO: 2614298 - RNA, 19 nt, Artificial Sequence
  Description of Artificial Sequence: Synthetic oligonucleotide
ucuaaggcauccauggaau

SEQ ID NO: 2614299 - RNA, 19 nt, Artificial Sequence
  Description of Artificial Sequence: Synthetic oligonucleotide
uuuucuaaccgcucuggac

SEQ ID NO: 2614300 - RNA, 19 nt, Artificial Sequence
  Description of Artificial Sequence: Synthetic oligonucleotide
ucuuggacaacuuuaucua

SEQ ID NO: 2614301 - RNA, 19 nt, Artificial Sequence
  Description of Artificial Sequence: Synthetic oligonucleotide
ucuacaaaccacccacuac

SEQ ID NO: 2614302 - RNA, 19 nt, Artificial Sequence
  Description of Artificial Sequence: Synthetic oligonucleotide
auucuuaugcaacgaaacu

SEQ ID NO: 2614303 - RNA, 19 nt, Artificial Sequence
  Description of Artificial Sequence: Synthetic oligonucleotide
uguaucuuuuauuuaggua

SEQ ID NO: 2614304 - RNA, 19 nt, Artificial Sequence
  Description of Artificial Sequence: Synthetic oligonucleotide
gaacccacagccuucagga

SEQ ID NO: 2614305 - RNA, 19 nt, Artificial Sequence
  Description of Artificial Sequence: Synthetic oligonucleotide
aaaacccggaaggagcggg

SEQ ID NO: 2614306 - RNA, 19 nt, Artificial Sequence
  Description of Artificial Sequence: Synthetic oligonucleotide
agaagcauguuucuuuccu

SEQ ID NO: 2614307 - RNA, 19 nt, Artificial Sequence
  Description of Artificial Sequence: Synthetic oligonucleotide
ugaggauuugcuagggaac

SEQ ID NO: 2614308 - RNA, 19 nt, Artificial Sequence
  Description of Artificial Sequence: Synthetic oligonucleotide
gagaaaacccggaaggagc

SEQ ID NO: 2614309 - RNA, 19 nt, Artificial Sequence
  Description of Artificial Sequence: Synthetic oligonucleotide
acaacuuuaucuaaggcau

SEQ ID NO: 2614310 - RNA, 19 nt, Artificial Sequence
  Description of Artificial Sequence: Synthetic oligonucleotide
aaccuuuucuaaccgcucu

SEQ ID NO: 2614311 - RNA, 19 nt, Artificial Sequence
  Description of Artificial Sequence: Synthetic oligonucleotide
accaaaguuuauguaaguc

SEQ ID NO: 2614312 - RNA, 19 nt, Artificial Sequence
  Description of Artificial Sequence: Synthetic oligonucleotide
uuagaagcauguuucuuuc

SEQ ID NO: 2614313 - RNA, 19 nt, Artificial Sequence
  Description of Artificial Sequence: Synthetic oligonucleotide
agaaggacauaccaaaguu

SEQ ID NO: 2614314 - RNA, 19 nt, Artificial Sequence
  Description of Artificial Sequence: Synthetic oligonucleotide
aucucugucgcuuggccuc

SEQ ID NO: 2614315 - RNA, 19 nt, Artificial Sequence
  Description of Artificial Sequence: Synthetic oligonucleotide
guuucuuagcugcuggcag

SEQ ID NO: 2614316 - RNA, 19 nt, Artificial Sequence
  Description of Artificial Sequence: Synthetic oligonucleotide
agauaauucguccgaagau

SEQ ID NO: 2614317 - RNA, 19 nt, Artificial Sequence
  Description of Artificial Sequence: Synthetic oligonucleotide
aaguuagaagcauguuucu

SEQ ID NO: 2614318 - RNA, 19 nt, Artificial Sequence
  Description of Artificial Sequence: Synthetic oligonucleotide
cuacaaaccacccacuaca

SEQ ID NO: 2614319 - RNA, 19 nt, Artificial Sequence
  Description of Artificial Sequence: Synthetic oligonucleotide
cugagacucuucuacaaac

SEQ ID NO: 2614320 - RNA, 19 nt, Artificial Sequence
  Description of Artificial Sequence: Synthetic oligonucleotide
agcgucuucccucucuugg

SEQ ID NO: 2614321 - RNA, 19 nt, Artificial Sequence
  Description of Artificial Sequence: Synthetic oligonucleotide
aaucucugucgcuuggccu

SEQ ID NO: 2614322 - RNA, 19 nt, Artificial Sequence
  Description of Artificial Sequence: Synthetic oligonucleotide
uucuuaugcaacgaaacua

SEQ ID NO: 2614323 - RNA, 19 nt, Artificial Sequence
  Description of Artificial Sequence: Synthetic oligonucleotide
aaucaacaaccuuuucuaa

SEQ ID NO: 2614324 - RNA, 19 nt, Artificial Sequence
  Description of Artificial Sequence: Synthetic oligonucleotide
aaggcauugcgaagaaccg

SEQ ID NO: 2614325 - RNA, 19 nt, Artificial Sequence
  Description of Artificial Sequence: Synthetic oligonucleotide
cauccauggaaucaacaac

SEQ ID NO: 2614326 - RNA, 19 nt, Artificial Sequence
  Description of Artificial Sequence: Synthetic oligonucleotide
acugguagcagccaugauu

SEQ ID NO: 2614327 - RNA, 19 nt, Artificial Sequence
  Description of Artificial Sequence: Synthetic oligonucleotide
uggugugaaguaauuuuac

SEQ ID NO: 2614328 - RNA, 19 nt, Artificial Sequence
  Description of Artificial Sequence: Synthetic oligonucleotide
uuugugccagauaauucgu

SEQ ID NO: 2614329 - RNA, 19 nt, Artificial Sequence
  Description of Artificial Sequence: Synthetic oligonucleotide
aaguaauuuuacacuggag

SEQ ID NO: 2614330 - RNA, 19 nt, Artificial Sequence
  Description of Artificial Sequence: Synthetic oligonucleotide
aucuaaggcauccauggaa

SEQ ID NO: 2614331 - RNA, 19 nt, Artificial Sequence
  Description of Artificial Sequence: Synthetic oligonucleotide
aaggacauaccaaaguuua

SEQ ID NO: 2614332 - RNA, 19 nt, Artificial Sequence
  Description of Artificial Sequence: Synthetic oligonucleotide
ugugacaugugguguauuc

SEQ ID NO: 2614333 - RNA, 19 nt, Artificial Sequence
  Description of Artificial Sequence: Synthetic oligonucleotide
uaauuuuacacuggagaaa

SEQ ID NO: 2614334 - RNA, 19 nt, Artificial Sequence
  Description of Artificial Sequence: Synthetic oligonucleotide
acuaagagaaaacccggaa

SEQ ID NO: 2614335 - RNA, 19 nt, Artificial Sequence
  Description of Artificial Sequence: Synthetic oligonucleotide
uuuagguaccaagguagag

SEQ ID NO: 2614336 - RNA, 19 nt, Artificial Sequence
  Description of Artificial Sequence: Synthetic oligonucleotide
agaaaacccggaaggagcg

SEQ ID NO: 2614337 - RNA, 19 nt, Artificial Sequence
  Description of Artificial Sequence: Synthetic oligonucleotide
aagaugugacauguggugu

SEQ ID NO: 2614338 - RNA, 19 nt, Artificial Sequence
  Description of Artificial Sequence: Synthetic oligonucleotide
aaaccacccacuacacugg

SEQ ID NO: 2614339 - RNA, 19 nt, Artificial Sequence
  Description of Artificial Sequence: Synthetic oligonucleotide
gaggauuugcuagggaacc

SEQ ID NO: 2614340 - RNA, 19 nt, Artificial Sequence
  Description of Artificial Sequence: Synthetic oligonucleotide
uaaggcauccauggaauca

SEQ ID NO: 2614341 - RNA, 19 nt, Artificial Sequence
  Description of Artificial Sequence: Synthetic oligonucleotide
ucuuuccuucagaaggaca

SEQ ID NO: 2614342 - RNA, 19 nt, Artificial Sequence
  Description of Artificial Sequence: Synthetic oligonucleotide
acauaaggcauugcgaaga

SEQ ID NO: 2614343 - RNA, 19 nt, Artificial Sequence
  Description of Artificial Sequence: Synthetic oligonucleotide
auucguccgaagauguccc

SEQ ID NO: 2614344 - RNA, 19 nt, Artificial Sequence
  Description of Artificial Sequence: Synthetic oligonucleotide
agccuuagagcgucuuccc

SEQ ID NO: 2614345 - RNA, 19 nt, Artificial Sequence
  Description of Artificial Sequence: Synthetic oligonucleotide
ugaagaagccuuagagcgu

SEQ ID NO: 2614346 - RNA, 19 nt, Artificial Sequence
  Description of Artificial Sequence: Synthetic oligonucleotide
cacuacacugguagcagcc

SEQ ID NO: 2614347 - RNA, 19 nt, Artificial Sequence
  Description of Artificial Sequence: Synthetic oligonucleotide
ucuaguccuuuccuugaca

SEQ ID NO: 2614348 - RNA, 19 nt, Artificial Sequence
  Description of Artificial Sequence: Synthetic oligonucleotide
cuuaugcaacgaaacuaag

SEQ ID NO: 2614349 - RNA, 19 nt, Artificial Sequence
  Description of Artificial Sequence: Synthetic oligonucleotide
caacaaccuuuucuaaccg

SEQ ID NO: 2614350 - RNA, 19 nt, Artificial Sequence
  Description of Artificial Sequence: Synthetic oligonucleotide
gugccagauaauucguccg

SEQ ID NO: 2614351 - RNA, 19 nt, Artificial Sequence
  Description of Artificial Sequence: Synthetic oligonucleotide
uuuugaccuuuucuucccc

SEQ ID NO: 2614352 - RNA, 19 nt, Artificial Sequence
  Description of Artificial Sequence: Synthetic oligonucleotide
uuuuguuucuuagcugcug

SEQ ID NO: 2614353 - RNA, 19 nt, Artificial Sequence
  Description of Artificial Sequence: Synthetic oligonucleotide
gacauaccaaaguuuaugu

SEQ ID NO: 2614354 - RNA, 19 nt, Artificial Sequence
  Description of Artificial Sequence: Synthetic oligonucleotide
uccauggaaucaacaaccu

SEQ ID NO: 2614355 - RNA, 19 nt, Artificial Sequence
  Description of Artificial Sequence: Synthetic oligonucleotide
uccuguucuaaaguuagaa

SEQ ID NO: 2614356 - RNA, 19 nt, Artificial Sequence
  Description of Artificial Sequence: Synthetic oligonucleotide
agacucuucuacaaaccac

SEQ ID NO: 2614357 - RNA, 19 nt, Artificial Sequence
  Description of Artificial Sequence: Synthetic oligonucleotide
uugacaacguggugugaag

SEQ ID NO: 2614358 - RNA, 19 nt, Artificial Sequence
  Description of Artificial Sequence: Synthetic oligonucleotide
ugccagauaauucguccga

SEQ ID NO: 2614359 - RNA, 19 nt, Artificial Sequence
  Description of Artificial Sequence: Synthetic oligonucleotide
agucugauaaagugaucca

SEQ ID NO: 2614360 - RNA, 19 nt, Artificial Sequence
  Description of Artificial Sequence: Synthetic oligonucleotide
uguuucuuagcugcuggca

SEQ ID NO: 2614361 - RNA, 19 nt, Artificial Sequence
  Description of Artificial Sequence: Synthetic oligonucleotide
cgaaacuaagagaaaaccc

SEQ ID NO: 2614362 - RNA, 19 nt, Artificial Sequence
  Description of Artificial Sequence: Synthetic oligonucleotide
uucuugccccgucugaaga

SEQ ID NO: 2614363 - RNA, 19 nt, Artificial Sequence
  Description of Artificial Sequence: Synthetic oligonucleotide
cuuucuugcuucaauucga

SEQ ID NO: 2614364 - RNA, 19 nt, Artificial Sequence
  Description of Artificial Sequence: Synthetic oligonucleotide
accguuuccuguuguaucu

SEQ ID NO: 2614365 - RNA, 19 nt, Artificial Sequence
  Description of Artificial Sequence: Synthetic oligonucleotide
auaauucguccgaagaugu

SEQ ID NO: 2614366 - RNA, 19 nt, Artificial Sequence
  Description of Artificial Sequence: Synthetic oligonucleotide
aacuaagagaaaacccgga

SEQ ID NO: 2614367 - RNA, 19 nt, Artificial Sequence
  Description of Artificial Sequence: Synthetic oligonucleotide
aagaaccguuuccuguugu

SEQ ID NO: 2614368 - RNA, 19 nt, Artificial Sequence
  Description of Artificial Sequence: Synthetic oligonucleotide
gcauuggcaaucucugucg

SEQ ID NO: 2614369 - RNA, 19 nt, Artificial Sequence
  Description of Artificial Sequence: Synthetic oligonucleotide
ugauaaagugauccacaua

SEQ ID NO: 2614370 - RNA, 19 nt, Artificial Sequence
  Description of Artificial Sequence: Synthetic oligonucleotide
ugauccacauaaggcauug

SEQ ID NO: 2614371 - RNA, 19 nt, Artificial Sequence
  Description of Artificial Sequence: Synthetic oligonucleotide
uacacugguagcagccaug

SEQ ID NO: 2614372 - RNA, 19 nt, Artificial Sequence
  Description of Artificial Sequence: Synthetic oligonucleotide
cacauaaggcauugcgaag

SEQ ID NO: 2614373 - RNA, 19 nt, Artificial Sequence
  Description of Artificial Sequence: Synthetic oligonucleotide
acucuucuacaaaccaccc

SEQ ID NO: 2614374 - RNA, 19 nt, Artificial Sequence
  Description of Artificial Sequence: Synthetic oligonucleotide
augcaacgaaacuaagaga

SEQ ID NO: 2614375 - RNA, 19 nt, Artificial Sequence
  Description of Artificial Sequence: Synthetic oligonucleotide
agguagaggccacugcuug

SEQ ID NO: 2614376 - RNA, 19 nt, Artificial Sequence
  Description of Artificial Sequence: Synthetic oligonucleotide
ugacaugugguguauucuu

SEQ ID NO: 2614377 - RNA, 19 nt, Artificial Sequence
  Description of Artificial Sequence: Synthetic oligonucleotide
cagauaauucguccgaaga

SEQ ID NO: 2614378 - RNA, 19 nt, Artificial Sequence
  Description of Artificial Sequence: Synthetic oligonucleotide
uuccuucagaaggacauac

SEQ ID NO: 2614379 - RNA, 19 nt, Artificial Sequence
  Description of Artificial Sequence: Synthetic oligonucleotide
gaagaagccuuagagcguc

SEQ ID NO: 2614380 - RNA, 19 nt, Artificial Sequence
  Description of Artificial Sequence: Synthetic oligonucleotide
aggauuugcuagggaaccc

SEQ ID NO: 2614381 - RNA, 19 nt, Artificial Sequence
  Description of Artificial Sequence: Synthetic oligonucleotide
uagaagcauguuucuuucc

SEQ ID NO: 2614382 - RNA, 19 nt, Artificial Sequence
  Description of Artificial Sequence: Synthetic oligonucleotide
ucuuuuauuuagguaccaa

SEQ ID NO: 2614383 - RNA, 19 nt, Artificial Sequence
  Description of Artificial Sequence: Synthetic oligonucleotide
gaagaugucccuucuccaa

SEQ ID NO: 2614384 - RNA, 19 nt, Artificial Sequence
  Description of Artificial Sequence: Synthetic oligonucleotide
acaaccuuuucuaaccgcu

SEQ ID NO: 2614385 - RNA, 19 nt, Artificial Sequence
  Description of Artificial Sequence: Synthetic oligonucleotide
uuccuguuguaucuuuuau

SEQ ID NO: 2614386 - RNA, 19 nt, Artificial Sequence
  Description of Artificial Sequence: Synthetic oligonucleotide
uaccaaaguuuauguaagu

SEQ ID NO: 2614387 - RNA, 19 nt, Artificial Sequence
  Description of Artificial Sequence: Synthetic oligonucleotide
gaagaaccguuuccuguug

SEQ ID NO: 2614388 - RNA, 19 nt, Artificial Sequence
  Description of Artificial Sequence: Synthetic oligonucleotide
gauucuaaaguaggcccac

SEQ ID NO: 2614389 - RNA, 19 nt, Artificial Sequence
  Description of Artificial Sequence: Synthetic oligonucleotide
aaggcauccauggaaucaa

SEQ ID NO: 2614390 - RNA, 19 nt, Artificial Sequence
  Description of Artificial Sequence: Synthetic oligonucleotide
ugcuggcagguccaugaag

SEQ ID NO: 2614391 - RNA, 19 nt, Artificial Sequence
  Description of Artificial Sequence: Synthetic oligonucleotide
ucuccaagcaccaggccuu

SEQ ID NO: 2614392 - RNA, 19 nt, Artificial Sequence
  Description of Artificial Sequence: Synthetic oligonucleotide
ggaaucaacaaccuuuucu

SEQ ID NO: 2614393 - RNA, 19 nt, Artificial Sequence
  Description of Artificial Sequence: Synthetic oligonucleotide
caugugguguauucuuaug

SEQ ID NO: 2614394 - RNA, 19 nt, Artificial Sequence
  Description of Artificial Sequence: Synthetic oligonucleotide
agcagccaugauucuaaag

SEQ ID NO: 2614395 - RNA, 19 nt, Artificial Sequence
  Description of Artificial Sequence: Synthetic oligonucleotide
cugaggauuugcuagggaa

SEQ ID NO: 2614396 - RNA, 19 nt, Artificial Sequence
  Description of Artificial Sequence: Synthetic oligonucleotide
agcauguuucuuuccuuca

SEQ ID NO: 2614397 - RNA, 19 nt, Artificial Sequence
  Description of Artificial Sequence: Synthetic oligonucleotide
uuguuucucaagucucagu

SEQ ID NO: 2614398 - RNA, 19 nt, Artificial Sequence
  Description of Artificial Sequence: Synthetic oligonucleotide
uccuguuguaucuuuuauu

SEQ ID NO: 2614399 - RNA, 19 nt, Artificial Sequence
  Description of Artificial Sequence: Synthetic oligonucleotide
auaaagugauccacauaag

SEQ ID NO: 2614400 - RNA, 19 nt, Artificial Sequence
  Description of Artificial Sequence: Synthetic oligonucleotide
gucugauaaagugauccac

SEQ ID NO: 2614401 - RNA, 19 nt, Artificial Sequence
  Description of Artificial Sequence: Synthetic oligonucleotide
uucuaguccuuuccuugac

SEQ ID NO: 2614402 - RNA, 19 nt, Artificial Sequence
  Description of Artificial Sequence: Synthetic oligonucleotide
acaugugguguauucuuau

SEQ ID NO: 2614403 - RNA, 19 nt, Artificial Sequence
  Description of Artificial Sequence: Synthetic oligonucleotide
ggacauaccaaaguuuaug

SEQ ID NO: 2614404 - RNA, 19 nt, Artificial Sequence
  Description of Artificial Sequence: Synthetic oligonucleotide
acauaccaaaguuuaugua

SEQ ID NO: 2614405 - RNA, 19 nt, Artificial Sequence
  Description of Artificial Sequence: Synthetic oligonucleotide
aguuuauguaagucuucau

SEQ ID NO: 2614406 - RNA, 19 nt, Artificial Sequence
  Description of Artificial Sequence: Synthetic oligonucleotide
aaaauucuucuaguccuuu

SEQ ID NO: 2614407 - RNA, 19 nt, Artificial Sequence
  Description of Artificial Sequence: Synthetic oligonucleotide
uugcuagggaacccacagc

SEQ ID NO: 2614408 - RNA, 19 nt, Artificial Sequence
  Description of Artificial Sequence: Synthetic oligonucleotide
uucgagcuuguuucucaag

SEQ ID NO: 2614409 - RNA, 19 nt, Artificial Sequence
  Description of Artificial Sequence: Synthetic oligonucleotide
ucucuuggacaacuuuauc

SEQ ID NO: 2614410 - RNA, 19 nt, Artificial Sequence
  Description of Artificial Sequence: Synthetic oligonucleotide
auaaggcauugcgaagaac

SEQ ID NO: 2614411 - RNA, 19 nt, Artificial Sequence
  Description of Artificial Sequence: Synthetic oligonucleotide
aaccgcucuggacuuggca

SEQ ID NO: 2614412 - RNA, 19 nt, Artificial Sequence
  Description of Artificial Sequence: Synthetic oligonucleotide
cuggacuuggcauuggcaa

SEQ ID NO: 2614413 - RNA, 19 nt, Artificial Sequence
  Description of Artificial Sequence: Synthetic oligonucleotide
uugcgaagaaccguuuccu

SEQ ID NO: 2614414 - RNA, 19 nt, Artificial Sequence
  Description of Artificial Sequence: Synthetic oligonucleotide
uucauuacuuuuguuucuu

SEQ ID NO: 2614415 - RNA, 19 nt, Artificial Sequence
  Description of Artificial Sequence: Synthetic oligonucleotide
caugaagcuccagauuuug

SEQ ID NO: 2614416 - RNA, 19 nt, Artificial Sequence
  Description of Artificial Sequence: Synthetic oligonucleotide
caaaguuuauguaagucuu

SEQ ID NO: 2614417 - RNA, 19 nt, Artificial Sequence
  Description of Artificial Sequence: Synthetic oligonucleotide
agaugugacauguggugua

SEQ ID NO: 2614418 - RNA, 19 nt, Artificial Sequence
  Description of Artificial Sequence: Synthetic oligonucleotide
ggacaacuuuaucuaaggc

SEQ ID NO: 2614419 - RNA, 19 nt, Artificial Sequence
  Description of Artificial Sequence: Synthetic oligonucleotide
uccagauuuugaccuuuuc

SEQ ID NO: 2614420 - RNA, 19 nt, Artificial Sequence
  Description of Artificial Sequence: Synthetic oligonucleotide
caacgaaacuaagagaaaa

SEQ ID NO: 2614421 - RNA, 19 nt, Artificial Sequence
  Description of Artificial Sequence: Synthetic oligonucleotide
cuaguccuuuccuugacaa

SEQ ID NO: 2614422 - RNA, 19 nt, Artificial Sequence
  Description of Artificial Sequence: Synthetic oligonucleotide
gggccugaggauuugcuag

SEQ ID NO: 2614423 - RNA, 19 nt, Artificial Sequence
  Description of Artificial Sequence: Synthetic oligonucleotide
cuuuccuucagaaggacau

SEQ ID NO: 2614424 - RNA, 19 nt, Artificial Sequence
  Description of Artificial Sequence: Synthetic oligonucleotide
ccaugauucuaaaguaggc

SEQ ID NO: 2614425 - RNA, 19 nt, Artificial Sequence
  Description of Artificial Sequence: Synthetic oligonucleotide
gguaccaagguagaggcca

SEQ ID NO: 2614426 - RNA, 19 nt, Artificial Sequence
  Description of Artificial Sequence: Synthetic oligonucleotide
ucaggaacgcugagacucu

SEQ ID NO: 2614427 - RNA, 19 nt, Artificial Sequence
  Description of Artificial Sequence: Synthetic oligonucleotide
uugugccagauaauucguc

SEQ ID NO: 2614428 - RNA, 19 nt, Artificial Sequence
  Description of Artificial Sequence: Synthetic oligonucleotide
cuucagaaggacauaccaa

SEQ ID NO: 2614429 - RNA, 19 nt, Artificial Sequence
  Description of Artificial Sequence: Synthetic oligonucleotide
auuggcaaucucugucgcu

SEQ ID NO: 2614430 - RNA, 19 nt, Artificial Sequence
  Description of Artificial Sequence: Synthetic oligonucleotide
uaauucguccgaagauguc

SEQ ID NO: 2614431 - RNA, 19 nt, Artificial Sequence
  Description of Artificial Sequence: Synthetic oligonucleotide
ccuccuguucuaaaguuag

SEQ ID NO: 2614432 - RNA, 19 nt, Artificial Sequence
  Description of Artificial Sequence: Synthetic oligonucleotide
uccuuuccuugacaacgug

SEQ ID NO: 2614433 - RNA, 19 nt, Artificial Sequence
  Description of Artificial Sequence: Synthetic oligonucleotide
guauucuuaugcaacgaaa

SEQ ID NO: 2614434 - RNA, 19 nt, Artificial Sequence
  Description of Artificial Sequence: Synthetic oligonucleotide
uugcuucaauucgagcuug

SEQ ID NO: 2614435 - RNA, 19 nt, Artificial Sequence
  Description of Artificial Sequence: Synthetic oligonucleotide
uuggcaaucucugucgcuu

SEQ ID NO: 2614436 - RNA, 19 nt, Artificial Sequence
  Description of Artificial Sequence: Synthetic oligonucleotide
ggcagguccaugaagcucc

SEQ ID NO: 2614437 - RNA, 19 nt, Artificial Sequence
  Description of Artificial Sequence: Synthetic oligonucleotide
gaagccuuagagcgucuuc

SEQ ID NO: 2614438 - RNA, 19 nt, Artificial Sequence
  Description of Artificial Sequence: Synthetic oligonucleotide
cauugcgaagaaccguuuc

SEQ ID NO: 2614439 - RNA, 19 nt, Artificial Sequence
  Description of Artificial Sequence: Synthetic oligonucleotide
cuaaccgcucuggacuugg

SEQ ID NO: 2614440 - RNA, 19 nt, Artificial Sequence
  Description of Artificial Sequence: Synthetic oligonucleotide
ccacccacuacacugguag

SEQ ID NO: 2614441 - RNA, 19 nt, Artificial Sequence
  Description of Artificial Sequence: Synthetic oligonucleotide
ugccccgucugaagaagcc

SEQ ID NO: 2614442 - RNA, 19 nt, Artificial Sequence
  Description of Artificial Sequence: Synthetic oligonucleotide
ugacaacguggugugaagu

SEQ ID NO: 2614443 - RNA, 19 nt, Artificial Sequence
  Description of Artificial Sequence: Synthetic oligonucleotide
gagcuuguuucucaagucu

SEQ ID NO: 2614444 - RNA, 19 nt, Artificial Sequence
  Description of Artificial Sequence: Synthetic oligonucleotide
gaaaacccggaaggagcgg

SEQ ID NO: 2614445 - RNA, 19 nt, Artificial Sequence
  Description of Artificial Sequence: Synthetic oligonucleotide
gacaacguggugugaagua

SEQ ID NO: 2614446 - RNA, 19 nt, Artificial Sequence
  Description of Artificial Sequence: Synthetic oligonucleotide
ucauuacuuuuguuucuua

SEQ ID NO: 2614447 - RNA, 19 nt, Artificial Sequence
  Description of Artificial Sequence: Synthetic oligonucleotide
ucagucugauaaagugauc

SEQ ID NO: 2614448 - RNA, 19 nt, Artificial Sequence
  Description of Artificial Sequence: Synthetic oligonucleotide
cuaaggcauccauggaauc

SEQ ID NO: 2614449 - RNA, 19 nt, Artificial Sequence
  Description of Artificial Sequence: Synthetic oligonucleotide
gauuugcuagggaacccac

SEQ ID NO: 2614450 - RNA, 19 nt, Artificial Sequence
  Description of Artificial Sequence: Synthetic oligonucleotide
ccgaagaugucccuucucc

SEQ ID NO: 2614451 - RNA, 19 nt, Artificial Sequence
  Description of Artificial Sequence: Synthetic oligonucleotide
ggcauuggcaaucucuguc

SEQ ID NO: 2614452 - RNA, 19 nt, Artificial Sequence
  Description of Artificial Sequence: Synthetic oligonucleotide
agaggccacugcuugaauu

SEQ ID NO: 2614453 - RNA, 19 nt, Artificial Sequence
  Description of Artificial Sequence: Synthetic oligonucleotide
auuuagguaccaagguaga

SEQ ID NO: 2614454 - RNA, 19 nt, Artificial Sequence
  Description of Artificial Sequence: Synthetic oligonucleotide
uggaaucaacaaccuuuuc

SEQ ID NO: 2614455 - RNA, 19 nt, Artificial Sequence
  Description of Artificial Sequence: Synthetic oligonucleotide
uugccccgucugaagaagc

SEQ ID NO: 2614456 - RNA, 19 nt, Artificial Sequence
  Description of Artificial Sequence: Synthetic oligonucleotide
caacuuuaucuaaggcauc

SEQ ID NO: 2614457 - RNA, 19 nt, Artificial Sequence
  Description of Artificial Sequence: Synthetic oligonucleotide
cucagucugauaaagugau

SEQ ID NO: 2614458 - RNA, 19 nt, Artificial Sequence
  Description of Artificial Sequence: Synthetic oligonucleotide
uaguccuuuccuugacaac

SEQ ID NO: 2614459 - RNA, 19 nt, Artificial Sequence
  Description of Artificial Sequence: Synthetic oligonucleotide
ucucaagucucagucugau

SEQ ID NO: 2614460 - RNA, 19 nt, Artificial Sequence
  Description of Artificial Sequence: Synthetic oligonucleotide
caaccuuuucuaaccgcuc

SEQ ID NO: 2614461 - RNA, 19 nt, Artificial Sequence
  Description of Artificial Sequence: Synthetic oligonucleotide
gaugucccuucuccaagca

SEQ ID NO: 2614462 - RNA, 19 nt, Artificial Sequence
  Description of Artificial Sequence: Synthetic oligonucleotide
uagggaacccacagccuuc

SEQ ID NO: 2614463 - RNA, 19 nt, Artificial Sequence
  Description of Artificial Sequence: Synthetic oligonucleotide
cucuggacuuggcauuggc

SEQ ID NO: 2614464 - RNA, 19 nt, Artificial Sequence
  Description of Artificial Sequence: Synthetic oligonucleotide
cugcuugaauuugugccag

SEQ ID NO: 2614465 - RNA, 19 nt, Artificial Sequence
  Description of Artificial Sequence: Synthetic oligonucleotide
gugguguauucuuaugcaa

SEQ ID NO: 2614466 - RNA, 19 nt, Artificial Sequence
  Description of Artificial Sequence: Synthetic oligonucleotide
ucuugccccgucugaagaa

SEQ ID NO: 2614467 - RNA, 19 nt, Artificial Sequence
  Description of Artificial Sequence: Synthetic oligonucleotide
auucgagcuuguuucucaa

SEQ ID NO: 2614468 - RNA, 19 nt, Artificial Sequence
  Description of Artificial Sequence: Synthetic oligonucleotide
acaacguggugugaaguaa

SEQ ID NO: 2614469 - RNA, 19 nt, Artificial Sequence
  Description of Artificial Sequence: Synthetic oligonucleotide
guagcagccaugauucuaa

SEQ ID NO: 2614470 - RNA, 19 nt, Artificial Sequence
  Description of Artificial Sequence: Synthetic oligonucleotide
uucccucucuuggacaacu

SEQ ID NO: 2614471 - RNA, 19 nt, Artificial Sequence
  Description of Artificial Sequence: Synthetic oligonucleotide
ugcuucaauucgagcuugu

SEQ ID NO: 2614472 - RNA, 19 nt, Artificial Sequence
  Description of Artificial Sequence: Synthetic oligonucleotide
uggcaaucucugucgcuug

SEQ ID NO: 2614473 - RNA, 19 nt, Artificial Sequence
  Description of Artificial Sequence: Synthetic oligonucleotide
aguuagaagcauguuucuu

SEQ ID NO: 2614474 - RNA, 19 nt, Artificial Sequence
  Description of Artificial Sequence: Synthetic oligonucleotide
uccgaagaugucccuucuc

SEQ ID NO: 2614475 - RNA, 19 nt, Artificial Sequence
  Description of Artificial Sequence: Synthetic oligonucleotide
uucuaaccgcucuggacuu

SEQ ID NO: 2614476 - RNA, 19 nt, Artificial Sequence
  Description of Artificial Sequence: Synthetic oligonucleotide
gcauccauggaaucaacaa

SEQ ID NO: 2614477 - RNA, 19 nt, Artificial Sequence
  Description of Artificial Sequence: Synthetic oligonucleotide
acccacuacacugguagca

SEQ ID NO: 2614478 - RNA, 19 nt, Artificial Sequence
  Description of Artificial Sequence: Synthetic oligonucleotide
cuuuucuaaccgcucugga

SEQ ID NO: 2614479 - RNA, 19 nt, Artificial Sequence
  Description of Artificial Sequence: Synthetic oligonucleotide
accaagguagaggccacug

SEQ ID NO: 2614480 - RNA, 19 nt, Artificial Sequence
  Description of Artificial Sequence: Synthetic oligonucleotide
ccaaaguuuauguaagucu

SEQ ID NO: 2614481 - RNA, 19 nt, Artificial Sequence
  Description of Artificial Sequence: Synthetic oligonucleotide
ccuucagaaggacauacca

SEQ ID NO: 2614482 - RNA, 19 nt, Artificial Sequence
  Description of Artificial Sequence: Synthetic oligonucleotide
cuugccccgucugaagaag

SEQ ID NO: 2614483 - RNA, 19 nt, Artificial Sequence
  Description of Artificial Sequence: Synthetic oligonucleotide
ggccugaggauuugcuagg

SEQ ID NO: 2614484 - RNA, 19 nt, Artificial Sequence
  Description of Artificial Sequence: Synthetic oligonucleotide
auggaaucaacaaccuuuu

SEQ ID NO: 2614485 - RNA, 19 nt, Artificial Sequence
  Description of Artificial Sequence: Synthetic oligonucleotide
ccagauaauucguccgaag

SEQ ID NO: 2614486 - RNA, 19 nt, Artificial Sequence
  Description of Artificial Sequence: Synthetic oligonucleotide
cucuucuacaaaccaccca

SEQ ID NO: 2614487 - RNA, 19 nt, Artificial Sequence
  Description of Artificial Sequence: Synthetic oligonucleotide
agaaccguuuccuguugua

SEQ ID NO: 2614488 - RNA, 19 nt, Artificial Sequence
  Description of Artificial Sequence: Synthetic oligonucleotide
agucucagucugauaaagu

SEQ ID NO: 2614489 - RNA, 19 nt, Artificial Sequence
  Description of Artificial Sequence: Synthetic oligonucleotide
guuucucaagucucagucu

SEQ ID NO: 2614490 - RNA, 19 nt, Artificial Sequence
  Description of Artificial Sequence: Synthetic oligonucleotide
ugcuugaauuugugccaga

SEQ ID NO: 2614491 - RNA, 19 nt, Artificial Sequence
  Description of Artificial Sequence: Synthetic oligonucleotide
cagccaugauucuaaagua

SEQ ID NO: 2614492 - RNA, 19 nt, Artificial Sequence
  Description of Artificial Sequence: Synthetic oligonucleotide
guguauucuuaugcaacga

SEQ ID NO: 2614493 - RNA, 19 nt, Artificial Sequence
  Description of Artificial Sequence: Synthetic oligonucleotide
cuuuaucuaaggcauccau

SEQ ID NO: 2614494 - RNA, 19 nt, Artificial Sequence
  Description of Artificial Sequence: Synthetic oligonucleotide
cagaaggacauaccaaagu

SEQ ID NO: 2614495 - RNA, 19 nt, Artificial Sequence
  Description of Artificial Sequence: Synthetic oligonucleotide
ccuuagagcgucuucccuc

SEQ ID NO: 2614496 - RNA, 19 nt, Artificial Sequence
  Description of Artificial Sequence: Synthetic oligonucleotide
cuugaauuugugccagaua

SEQ ID NO: 2614497 - RNA, 19 nt, Artificial Sequence
  Description of Artificial Sequence: Synthetic oligonucleotide
gaaggacauaccaaaguuu

SEQ ID NO: 2614498 - RNA, 19 nt, Artificial Sequence
  Description of Artificial Sequence: Synthetic oligonucleotide
auuugcuagggaacccaca

SEQ ID NO: 2614499 - RNA, 19 nt, Artificial Sequence
  Description of Artificial Sequence: Synthetic oligonucleotide
gcugcuggcagguccauga

SEQ ID NO: 2614500 - RNA, 19 nt, Artificial Sequence
  Description of Artificial Sequence: Synthetic oligonucleotide
aacguggugugaaguaauu

SEQ ID NO: 2614501 - RNA, 19 nt, Artificial Sequence
  Description of Artificial Sequence: Synthetic oligonucleotide
aggcauugcgaagaaccgu

SEQ ID NO: 2614502 - RNA, 19 nt, Artificial Sequence
  Description of Artificial Sequence: Synthetic oligonucleotide
agagcgucuucccucucuu

SEQ ID NO: 2614503 - RNA, 19 nt, Artificial Sequence
  Description of Artificial Sequence: Synthetic oligonucleotide
caauucgagcuuguuucuc

SEQ ID NO: 2614504 - RNA, 19 nt, Artificial Sequence
  Description of Artificial Sequence: Synthetic oligonucleotide
cuuagagcgucuucccucu

SEQ ID NO: 2614505 - RNA, 19 nt, Artificial Sequence
  Description of Artificial Sequence: Synthetic oligonucleotide
cacccacuacacugguagc

SEQ ID NO: 2614506 - RNA, 19 nt, Artificial Sequence
  Description of Artificial Sequence: Synthetic oligonucleotide
uaaccgcucuggacuuggc

SEQ ID NO: 2614507 - RNA, 19 nt, Artificial Sequence
  Description of Artificial Sequence: Synthetic oligonucleotide
cauaaggcauugcgaagaa

SEQ ID NO: 2614508 - RNA, 19 nt, Artificial Sequence
  Description of Artificial Sequence: Synthetic oligonucleotide
ucuaaccgcucuggacuug

SEQ ID NO: 2614509 - RNA, 19 nt, Artificial Sequence
  Description of Artificial Sequence: Synthetic oligonucleotide
uucguccgaagaugucccu

SEQ ID NO: 2614510 - RNA, 19 nt, Artificial Sequence
  Description of Artificial Sequence: Synthetic oligonucleotide
gacaugugguguauucuua

SEQ ID NO: 2614511 - RNA, 19 nt, Artificial Sequence
  Description of Artificial Sequence: Synthetic oligonucleotide
caagucucagucugauaaa

SEQ ID NO: 2614512 - RNA, 19 nt, Artificial Sequence
  Description of Artificial Sequence: Synthetic oligonucleotide
cuguuguaucuuuuauuua

SEQ ID NO: 2614513 - RNA, 19 nt, Artificial Sequence
  Description of Artificial Sequence: Synthetic oligonucleotide
cuucaauucgagcuuguuu

SEQ ID NO: 2614514 - RNA, 19 nt, Artificial Sequence
  Description of Artificial Sequence: Synthetic oligonucleotide
uggcagguccaugaagcuc

SEQ ID NO: 2614515 - RNA, 19 nt, Artificial Sequence
  Description of Artificial Sequence: Synthetic oligonucleotide
gagcgucuucccucucuug

SEQ ID NO: 2614516 - RNA, 19 nt, Artificial Sequence
  Description of Artificial Sequence: Synthetic oligonucleotide
aggaacgcugagacucuuc

SEQ ID NO: 2614517 - RNA, 19 nt, Artificial Sequence
  Description of Artificial Sequence: Synthetic oligonucleotide
agcaccaggccuugcuuuu

SEQ ID NO: 2614518 - RNA, 19 nt, Artificial Sequence
  Description of Artificial Sequence: Synthetic oligonucleotide
augaagcuccagauuuuga

SEQ ID NO: 2614519 - RNA, 19 nt, Artificial Sequence
  Description of Artificial Sequence: Synthetic oligonucleotide
caauucuuugggucaucaa

SEQ ID NO: 2614520 - RNA, 19 nt, Artificial Sequence
  Description of Artificial Sequence: Synthetic oligonucleotide
ccaagguagaggccacugc

SEQ ID NO: 2614521 - RNA, 19 nt, Artificial Sequence
  Description of Artificial Sequence: Synthetic oligonucleotide
ccuguuguaucuuuuauuu

SEQ ID NO: 2614522 - RNA, 19 nt, Artificial Sequence
  Description of Artificial Sequence: Synthetic oligonucleotide
ggauuugcuagggaaccca

SEQ ID NO: 2614523 - RNA, 19 nt, Artificial Sequence
  Description of Artificial Sequence: Synthetic oligonucleotide
cucucuuggacaacuuuau

SEQ ID NO: 2614524 - RNA, 19 nt, Artificial Sequence
  Description of Artificial Sequence: Synthetic oligonucleotide
gaacgcugagacucuucua

SEQ ID NO: 2614525 - RNA, 19 nt, Artificial Sequence
  Description of Artificial Sequence: Synthetic oligonucleotide
ggaacgcugagacucuucu

SEQ ID NO: 2614526 - RNA, 19 nt, Artificial Sequence
  Description of Artificial Sequence: Synthetic oligonucleotide
aggacauaccaaaguuuau

SEQ ID NO: 2614527 - RNA, 19 nt, Artificial Sequence
  Description of Artificial Sequence: Synthetic oligonucleotide
agggaacccacagccuuca

SEQ ID NO: 2614528 - RNA, 19 nt, Artificial Sequence
  Description of Artificial Sequence: Synthetic oligonucleotide
agcuccagauuuugaccuu

SEQ ID NO: 2614529 - RNA, 19 nt, Artificial Sequence
  Description of Artificial Sequence: Synthetic oligonucleotide
acguggugugaaguaauuu

SEQ ID NO: 2614530 - RNA, 19 nt, Artificial Sequence
  Description of Artificial Sequence: Synthetic oligonucleotide
guaccaagguagaggccac

SEQ ID NO: 2614531 - RNA, 19 nt, Artificial Sequence
  Description of Artificial Sequence: Synthetic oligonucleotide
ccacuacacugguagcagc

SEQ ID NO: 2614532 - RNA, 19 nt, Artificial Sequence
  Description of Artificial Sequence: Synthetic oligonucleotide
cuccuguucuaaaguuaga

SEQ ID NO: 2614533 - RNA, 19 nt, Artificial Sequence
  Description of Artificial Sequence: Synthetic oligonucleotide
cuagggaacccacagccuu

SEQ ID NO: 2614534 - RNA, 19 nt, Artificial Sequence
  Description of Artificial Sequence: Synthetic oligonucleotide
gaaccguuuccuguuguau

SEQ ID NO: 2614535 - RNA, 19 nt, Artificial Sequence
  Description of Artificial Sequence: Synthetic oligonucleotide
gguccaugaagcuccagau

SEQ ID NO: 2614536 - RNA, 19 nt, Artificial Sequence
  Description of Artificial Sequence: Synthetic oligonucleotide
gugacaugugguguauucu

SEQ ID NO: 2614537 - RNA, 19 nt, Artificial Sequence
  Description of Artificial Sequence: Synthetic oligonucleotide
ucguccgaagaugucccuu

SEQ ID NO: 2614538 - RNA, 19 nt, Artificial Sequence
  Description of Artificial Sequence: Synthetic oligonucleotide
gaugugacaugugguguau

SEQ ID NO: 2614539 - RNA, 19 nt, Artificial Sequence
  Description of Artificial Sequence: Synthetic oligonucleotide
agaagccuuagagcgucuu

SEQ ID NO: 2614540 - RNA, 19 nt, Artificial Sequence
  Description of Artificial Sequence: Synthetic oligonucleotide
gccugaggauuugcuaggg

SEQ ID NO: 2614541 - RNA, 19 nt, Artificial Sequence
  Description of Artificial Sequence: Synthetic oligonucleotide
cccacuacacugguagcag

SEQ ID NO: 2614542 - RNA, 19 nt, Artificial Sequence
  Description of Artificial Sequence: Synthetic oligonucleotide
ccucucuuggacaacuuua

SEQ ID NO: 2614543 - RNA, 19 nt, Artificial Sequence
  Description of Artificial Sequence: Synthetic oligonucleotide
gcaaucucugucgcuuggc

SEQ ID NO: 2614544 - RNA, 19 nt, Artificial Sequence
  Description of Artificial Sequence: Synthetic oligonucleotide
cgagcuuguuucucaaguc

SEQ ID NO: 2614545 - RNA, 19 nt, Artificial Sequence
  Description of Artificial Sequence: Synthetic oligonucleotide
uccaagcaccaggccuugc

SEQ ID NO: 2614546 - RNA, 19 nt, Artificial Sequence
  Description of Artificial Sequence: Synthetic oligonucleotide
caacguggugugaaguaau

SEQ ID NO: 2614547 - RNA, 19 nt, Artificial Sequence
  Description of Artificial Sequence: Synthetic oligonucleotide
gguagcagccaugauucua

SEQ ID NO: 2614548 - RNA, 19 nt, Artificial Sequence
  Description of Artificial Sequence: Synthetic oligonucleotide
cucaagucucagucugaua

SEQ ID NO: 2614549 - RNA, 19 nt, Artificial Sequence
  Description of Artificial Sequence: Synthetic oligonucleotide
cuaaaguuagaagcauguu

SEQ ID NO: 2614550 - RNA, 19 nt, Artificial Sequence
  Description of Artificial Sequence: Synthetic oligonucleotide
cuucccucucuuggacaac

SEQ ID NO: 2614551 - RNA, 19 nt, Artificial Sequence
  Description of Artificial Sequence: Synthetic oligonucleotide
cuucaggaacgcugagacu

SEQ ID NO: 2614552 - RNA, 19 nt, Artificial Sequence
  Description of Artificial Sequence: Synthetic oligonucleotide
guccaugaagcuccagauu

SEQ ID NO: 2614553 - RNA, 19 nt, Artificial Sequence
  Description of Artificial Sequence: Synthetic oligonucleotide
gcaacgaaacuaagagaaa

SEQ ID NO: 2614554 - RNA, 19 nt, Artificial Sequence
  Description of Artificial Sequence: Synthetic oligonucleotide
gcgucuucccucucuugga

SEQ ID NO: 2614555 - RNA, 19 nt, Artificial Sequence
  Description of Artificial Sequence: Synthetic oligonucleotide
cuacacugguagcagccau

SEQ ID NO: 2614556 - RNA, 19 nt, Artificial Sequence
  Description of Artificial Sequence: Synthetic oligonucleotide
cguccgaagaugucccuuc

SEQ ID NO: 2614557 - RNA, 19 nt, Artificial Sequence
  Description of Artificial Sequence: Synthetic oligonucleotide
agcugcuggcagguccaug

SEQ ID NO: 2614558 - RNA, 19 nt, Artificial Sequence
  Description of Artificial Sequence: Synthetic oligonucleotide
cuggcagguccaugaagcu

SEQ ID NO: 2614559 - RNA, 19 nt, Artificial Sequence
  Description of Artificial Sequence: Synthetic oligonucleotide
augugacaugugguguauu

SEQ ID NO: 2614560 - RNA, 19 nt, Artificial Sequence
  Description of Artificial Sequence: Synthetic oligonucleotide
cgaagaugucccuucucca

SEQ ID NO: 2614561 - RNA, 19 nt, Artificial Sequence
  Description of Artificial Sequence: Synthetic oligonucleotide
ggggccugaggauuugcua

SEQ ID NO: 2614562 - RNA, 19 nt, Artificial Sequence
  Description of Artificial Sequence: Synthetic oligonucleotide
ccgucugaagaagccuuag

SEQ ID NO: 2614563 - RNA, 19 nt, Artificial Sequence
  Description of Artificial Sequence: Synthetic oligonucleotide
ggcauugcgaagaaccguu

SEQ ID NO: 2614564 - RNA, 19 nt, Artificial Sequence
  Description of Artificial Sequence: Synthetic oligonucleotide
cgucuucccucucuuggac

SEQ ID NO: 2614565 - RNA, 19 nt, Artificial Sequence
  Description of Artificial Sequence: Synthetic oligonucleotide
gcucuggacuuggcauugg

SEQ ID NO: 2614566 - RNA, 19 nt, Artificial Sequence
  Description of Artificial Sequence: Synthetic oligonucleotide
gcuugaauuugugccagau

SEQ ID NO: 2614567 - RNA, 19 nt, Artificial Sequence
  Description of Artificial Sequence: Synthetic oligonucleotide
gccagauaauucguccgaa

SEQ ID NO: 2614568 - RNA, 19 nt, Artificial Sequence
  Description of Artificial Sequence: Synthetic oligonucleotide
caagcaccaggccuugcuu

SEQ ID NO: 2614569 - RNA, 19 nt, Artificial Sequence
  Description of Artificial Sequence: Synthetic oligonucleotide
cugcuggcagguccaugaa

SEQ ID NO: 2614570 - RNA, 19 nt, Artificial Sequence
  Description of Artificial Sequence: Synthetic oligonucleotide
gccuccuguucuaaaguua

SEQ ID NO: 2614571 - RNA, 19 nt, Artificial Sequence
  Description of Artificial Sequence: Synthetic oligonucleotide
gccuuagagcgucuucccu

SEQ ID NO: 2614572 - RNA, 19 nt, Artificial Sequence
  Description of Artificial Sequence: Synthetic oligonucleotide
ggccuccuguucuaaaguu

SEQ ID NO: 2614573 - RNA, 19 nt, Artificial Sequence
  Description of Artificial Sequence: Synthetic oligonucleotide
gugauccacauaaggcauu

SEQ ID NO: 2614574 - RNA, 19 nt, Artificial Sequence
  Description of Artificial Sequence: Synthetic oligonucleotide
accacccacuacacuggua

SEQ ID NO: 2614575 - RNA, 19 nt, Artificial Sequence
  Description of Artificial Sequence: Synthetic oligonucleotide
cgcugagacucuucuacaa

SEQ ID NO: 2614576 - RNA, 19 nt, Artificial Sequence
  Description of Artificial Sequence: Synthetic oligonucleotide
ccaagcaccaggccuugcu

SEQ ID NO: 2614577 - RNA, 19 nt, Artificial Sequence
  Description of Artificial Sequence: Synthetic oligonucleotide
gcuagggaacccacagccu

SEQ ID NO: 2614578 - RNA, 19 nt, Artificial Sequence
  Description of Artificial Sequence: Synthetic oligonucleotide
cgcucuggacuuggcauug

SEQ ID NO: 2614579 - RNA, 19 nt, Artificial Sequence
  Description of Artificial Sequence: Synthetic oligonucleotide
cgaagaaccguuuccuguu

SEQ ID NO: 2614580 - RNA, 19 nt, Artificial Sequence
  Description of Artificial Sequence: Synthetic oligonucleotide
ggccacugcuugaauuugu

SEQ ID NO: 2614581 - RNA, 19 nt, Artificial Sequence
  Description of Artificial Sequence: Synthetic oligonucleotide
cccgucugaagaagccuua

SEQ ID NO: 2614582 - RNA, 19 nt, Artificial Sequence
  Description of Artificial Sequence: Synthetic oligonucleotide
cacagccuucaggaacgcu

SEQ ID NO: 2614583 - RNA, 19 nt, Artificial Sequence
  Description of Artificial Sequence: Synthetic oligonucleotide
gcuucaauucgagcuuguu

SEQ ID NO: 2614584 - RNA, 19 nt, Artificial Sequence
  Description of Artificial Sequence: Synthetic oligonucleotide
gcagguccaugaagcucca

SEQ ID NO: 2614585 - RNA, 19 nt, Artificial Sequence
  Description of Artificial Sequence: Synthetic oligonucleotide
cacugguagcagccaugau

SEQ ID NO: 2614586 - RNA, 19 nt, Artificial Sequence
  Description of Artificial Sequence: Synthetic oligonucleotide
gccccgucugaagaagccu

SEQ ID NO: 2614587 - RNA, 19 nt, Artificial Sequence
  Description of Artificial Sequence: Synthetic oligonucleotide
ccuugacaacgugguguga

SEQ ID NO: 2614588 - RNA, 19 nt, Artificial Sequence
  Description of Artificial Sequence: Synthetic oligonucleotide
ccccgucugaagaagccuu

SEQ ID NO: 2614589 - RNA, 19 nt, Artificial Sequence
  Description of Artificial Sequence: Synthetic oligonucleotide
gcauugcgaagaaccguuu

SEQ ID NO: 2614590 - RNA, 19 nt, Artificial Sequence
  Description of Artificial Sequence: Synthetic oligonucleotide
cguuuccuguuguaucuuu

SEQ ID NO: 2614591 - RNA, 19 nt, Artificial Sequence
  Description of Artificial Sequence: Synthetic oligonucleotide
caggaacgcugagacucuu

SEQ ID NO: 2614592 - RNA, 19 nt, Artificial Sequence
  Description of Artificial Sequence: Synthetic oligonucleotide
ccccaauucuuugggucau

SEQ ID NO: 2614593 - RNA, 19 nt, Artificial Sequence
  Description of Artificial Sequence: Synthetic oligonucleotide
cucugucgcuuggccuccu

SEQ ID NO: 2614594 - RNA, 19 nt, Artificial Sequence
  Description of Artificial Sequence: Synthetic oligonucleotide
ccguuuccuguuguaucuu

SEQ ID NO: 2614595 - RNA, 19 nt, Artificial Sequence
  Description of Artificial Sequence: Synthetic oligonucleotide
acagaagucccuuaaagcc

SEQ ID NO: 2614596 - RNA, 19 nt, Artificial Sequence
  Description of Artificial Sequence: Synthetic oligonucleotide
aacaggauccaacuggagc

SEQ ID NO: 2614597 - RNA, 19 nt, Artificial Sequence
  Description of Artificial Sequence: Synthetic oligonucleotide
uucaacaggauccaacugg

SEQ ID NO: 2614598 - RNA, 19 nt, Artificial Sequence
  Description of Artificial Sequence: Synthetic oligonucleotide
uaagaaacccucaugguug

SEQ ID NO: 2614599 - RNA, 19 nt, Artificial Sequence
  Description of Artificial Sequence: Synthetic oligonucleotide
uuucacaccauccccaagg

SEQ ID NO: 2614600 - RNA, 19 nt, Artificial Sequence
  Description of Artificial Sequence: Synthetic oligonucleotide
aaacagggaacucugaggu

SEQ ID NO: 2614601 - RNA, 19 nt, Artificial Sequence
  Description of Artificial Sequence: Synthetic oligonucleotide
aauagcuacagugcagacc

SEQ ID NO: 2614602 - RNA, 19 nt, Artificial Sequence
  Description of Artificial Sequence: Synthetic oligonucleotide
auagcuacagugcagacca

SEQ ID NO: 2614603 - RNA, 19 nt, Artificial Sequence
  Description of Artificial Sequence: Synthetic oligonucleotide
ucuagauuccuuaccuucg

SEQ ID NO: 2614604 - RNA, 19 nt, Artificial Sequence
  Description of Artificial Sequence: Synthetic oligonucleotide
gauuccuuaccuucgaagc

SEQ ID NO: 2614605 - RNA, 19 nt, Artificial Sequence
  Description of Artificial Sequence: Synthetic oligonucleotide
uaguguuccuuuaagaaac

SEQ ID NO: 2614606 - RNA, 19 nt, Artificial Sequence
  Description of Artificial Sequence: Synthetic oligonucleotide
aaaaucacuucucuuugcu

SEQ ID NO: 2614607 - RNA, 19 nt, Artificial Sequence
  Description of Artificial Sequence: Synthetic oligonucleotide
uuaaagccaggcuaaguag

SEQ ID NO: 2614608 - RNA, 19 nt, Artificial Sequence
  Description of Artificial Sequence: Synthetic oligonucleotide
cucuucaauagcuacagug

SEQ ID NO: 2614609 - RNA, 19 nt, Artificial Sequence
  Description of Artificial Sequence: Synthetic oligonucleotide
aagauggcagccgaucucc

SEQ ID NO: 2614610 - RNA, 19 nt, Artificial Sequence
  Description of Artificial Sequence: Synthetic oligonucleotide
ugugaggaccaaacuaugg

SEQ ID NO: 2614611 - RNA, 19 nt, Artificial Sequence
  Description of Artificial Sequence: Synthetic oligonucleotide
aaagauggcagccgaucuc

SEQ ID NO: 2614612 - RNA, 19 nt, Artificial Sequence
  Description of Artificial Sequence: Synthetic oligonucleotide
uacagugcagaccauugag

SEQ ID NO: 2614613 - RNA, 19 nt, Artificial Sequence
  Description of Artificial Sequence: Synthetic oligonucleotide
uuaccuucgaagcaguccu

SEQ ID NO: 2614614 - RNA, 19 nt, Artificial Sequence
  Description of Artificial Sequence: Synthetic oligonucleotide
augguugcauuacugcacc

SEQ ID NO: 2614615 - RNA, 19 nt, Artificial Sequence
  Description of Artificial Sequence: Synthetic oligonucleotide
cucaaggaaaccuccagcc

SEQ ID NO: 2614616 - RNA, 19 nt, Artificial Sequence
  Description of Artificial Sequence: Synthetic oligonucleotide
uguuccuuuaagaaacccu

SEQ ID NO: 2614617 - RNA, 19 nt, Artificial Sequence
  Description of Artificial Sequence: Synthetic oligonucleotide
uuaguguuccuuuaagaaa

SEQ ID NO: 2614618 - RNA, 19 nt, Artificial Sequence
  Description of Artificial Sequence: Synthetic oligonucleotide
uaggcugucuccaguaggg

SEQ ID NO: 2614619 - RNA, 19 nt, Artificial Sequence
  Description of Artificial Sequence: Synthetic oligonucleotide
uucaauagcuacagugcag

SEQ ID NO: 2614620 - RNA, 19 nt, Artificial Sequence
  Description of Artificial Sequence: Synthetic oligonucleotide
ugguugcggaacuucaugg

SEQ ID NO: 2614621 - RNA, 19 nt, Artificial Sequence
  Description of Artificial Sequence: Synthetic oligonucleotide
caaagcucuuugcagagcc

SEQ ID NO: 2614622 - RNA, 19 nt, Artificial Sequence
  Description of Artificial Sequence: Synthetic oligonucleotide
uaaguaggggagcagcagc

SEQ ID NO: 2614623 - RNA, 19 nt, Artificial Sequence
  Description of Artificial Sequence: Synthetic oligonucleotide
ucgaccucuguguagguag

SEQ ID NO: 2614624 - RNA, 19 nt, Artificial Sequence
  Description of Artificial Sequence: Synthetic oligonucleotide
gagggugagcucuagauuc

SEQ ID NO: 2614625 - RNA, 19 nt, Artificial Sequence
  Description of Artificial Sequence: Synthetic oligonucleotide
agauuccuuaccuucgaag

SEQ ID NO: 2614626 - RNA, 19 nt, Artificial Sequence
  Description of Artificial Sequence: Synthetic oligonucleotide
ucaacaggauccaacugga

SEQ ID NO: 2614627 - RNA, 19 nt, Artificial Sequence
  Description of Artificial Sequence: Synthetic oligonucleotide
ugcccuaccuucauggcag

SEQ ID NO: 2614628 - RNA, 19 nt, Artificial Sequence
  Description of Artificial Sequence: Synthetic oligonucleotide
ugguuugggcaccauaagc

SEQ ID NO: 2614629 - RNA, 19 nt, Artificial Sequence
  Description of Artificial Sequence: Synthetic oligonucleotide
ucaugguugcauuacugca

SEQ ID NO: 2614630 - RNA, 19 nt, Artificial Sequence
  Description of Artificial Sequence: Synthetic oligonucleotide
ucaauagcuacagugcaga

SEQ ID NO: 2614631 - RNA, 19 nt, Artificial Sequence
  Description of Artificial Sequence: Synthetic oligonucleotide
guuaguguuccuuuaagaa

SEQ ID NO: 2614632 - RNA, 19 nt, Artificial Sequence
  Description of Artificial Sequence: Synthetic oligonucleotide
cucaugguugcauuacugc

SEQ ID NO: 2614633 - RNA, 19 nt, Artificial Sequence
  Description of Artificial Sequence: Synthetic oligonucleotide
aaggaaaccuccagccacc

SEQ ID NO: 2614634 - RNA, 19 nt, Artificial Sequence
  Description of Artificial Sequence: Synthetic oligonucleotide
aaacuaugguuugggcacc

SEQ ID NO: 2614635 - RNA, 19 nt, Artificial Sequence
  Description of Artificial Sequence: Synthetic oligonucleotide
aagucccuuaaagccaggc

SEQ ID NO: 2614636 - RNA, 19 nt, Artificial Sequence
  Description of Artificial Sequence: Synthetic oligonucleotide
uguguagguagagugguug

SEQ ID NO: 2614637 - RNA, 19 nt, Artificial Sequence
  Description of Artificial Sequence: Synthetic oligonucleotide
agcucuagauuccuuaccu

SEQ ID NO: 2614638 - RNA, 19 nt, Artificial Sequence
  Description of Artificial Sequence: Synthetic oligonucleotide
cagugcagaccauugagag

SEQ ID NO: 2614639 - RNA, 19 nt, Artificial Sequence
  Description of Artificial Sequence: Synthetic oligonucleotide
ugugacuugcuuucacacc

SEQ ID NO: 2614640 - RNA, 19 nt, Artificial Sequence
  Description of Artificial Sequence: Synthetic oligonucleotide
auggcuagcucagaggagg

SEQ ID NO: 2614641 - RNA, 19 nt, Artificial Sequence
  Description of Artificial Sequence: Synthetic oligonucleotide
cucugcccuaccuucaugg

SEQ ID NO: 2614642 - RNA, 19 nt, Artificial Sequence
  Description of Artificial Sequence: Synthetic oligonucleotide
agggguaucucaaggaaac

SEQ ID NO: 2614643 - RNA, 19 nt, Artificial Sequence
  Description of Artificial Sequence: Synthetic oligonucleotide
cucuagauuccuuaccuuc

SEQ ID NO: 2614644 - RNA, 19 nt, Artificial Sequence
  Description of Artificial Sequence: Synthetic oligonucleotide
caaggaaaccuccagccac

SEQ ID NO: 2614645 - RNA, 19 nt, Artificial Sequence
  Description of Artificial Sequence: Synthetic oligonucleotide
agaaagauggcagccgauc

SEQ ID NO: 2614646 - RNA, 19 nt, Artificial Sequence
  Description of Artificial Sequence: Synthetic oligonucleotide
caugguugcauuacugcac

SEQ ID NO: 2614647 - RNA, 19 nt, Artificial Sequence
  Description of Artificial Sequence: Synthetic oligonucleotide
uugcuuucacaccaucccc

SEQ ID NO: 2614648 - RNA, 19 nt, Artificial Sequence
  Description of Artificial Sequence: Synthetic oligonucleotide
ucaaggaaaccuccagcca

SEQ ID NO: 2614649 - RNA, 19 nt, Artificial Sequence
  Description of Artificial Sequence: Synthetic oligonucleotide
aacucugagguuaguguuc

SEQ ID NO: 2614650 - RNA, 19 nt, Artificial Sequence
  Description of Artificial Sequence: Synthetic oligonucleotide
acucugagguuaguguucc

SEQ ID NO: 2614651 - RNA, 19 nt, Artificial Sequence
  Description of Artificial Sequence: Synthetic oligonucleotide
auuuggaggagggugagcu

SEQ ID NO: 2614652 - RNA, 19 nt, Artificial Sequence
  Description of Artificial Sequence: Synthetic oligonucleotide
aucucaaggaaaccuccag

SEQ ID NO: 2614653 - RNA, 19 nt, Artificial Sequence
  Description of Artificial Sequence: Synthetic oligonucleotide
ugcuuucacaccaucccca

SEQ ID NO: 2614654 - RNA, 19 nt, Artificial Sequence
  Description of Artificial Sequence: Synthetic oligonucleotide
uccucccauccaaacaggg

SEQ ID NO: 2614655 - RNA, 19 nt, Artificial Sequence
  Description of Artificial Sequence: Synthetic oligonucleotide
uuugggcaccauaagcugu

SEQ ID NO: 2614656 - RNA, 19 nt, Artificial Sequence
  Description of Artificial Sequence: Synthetic oligonucleotide
ugcggaacuucauggcugg

SEQ ID NO: 2614657 - RNA, 19 nt, Artificial Sequence
  Description of Artificial Sequence: Synthetic oligonucleotide
gugacuugcuuucacacca

SEQ ID NO: 2614658 - RNA, 19 nt, Artificial Sequence
  Description of Artificial Sequence: Synthetic oligonucleotide
aagcucuuugcagagccag

SEQ ID NO: 2614659 - RNA, 19 nt, Artificial Sequence
  Description of Artificial Sequence: Synthetic oligonucleotide
auggcagccgaucuccagg

SEQ ID NO: 2614660 - RNA, 19 nt, Artificial Sequence
  Description of Artificial Sequence: Synthetic oligonucleotide
cuuaccuucgaagcagucc

SEQ ID NO: 2614661 - RNA, 19 nt, Artificial Sequence
  Description of Artificial Sequence: Synthetic oligonucleotide
uugcggaacuucauggcug

SEQ ID NO: 2614662 - RNA, 19 nt, Artificial Sequence
  Description of Artificial Sequence: Synthetic oligonucleotide
uuccuuaccuucgaagcag

SEQ ID NO: 2614663 - RNA, 19 nt, Artificial Sequence
  Description of Artificial Sequence: Synthetic oligonucleotide
cuuauuuggaggaggguga

SEQ ID NO: 2614664 - RNA, 19 nt, Artificial Sequence
  Description of Artificial Sequence: Synthetic oligonucleotide
accauaagcuguugucuuc

SEQ ID NO: 2614665 - RNA, 19 nt, Artificial Sequence
  Description of Artificial Sequence: Synthetic oligonucleotide
gaccaaacuaugguuuggg

SEQ ID NO: 2614666 - RNA, 19 nt, Artificial Sequence
  Description of Artificial Sequence: Synthetic oligonucleotide
aaggggccuccucccaucc

SEQ ID NO: 2614667 - RNA, 19 nt, Artificial Sequence
  Description of Artificial Sequence: Synthetic oligonucleotide
auuccuuaccuucgaagca

SEQ ID NO: 2614668 - RNA, 19 nt, Artificial Sequence
  Description of Artificial Sequence: Synthetic oligonucleotide
uuugcagagccagaaagau

SEQ ID NO: 2614669 - RNA, 19 nt, Artificial Sequence
  Description of Artificial Sequence: Synthetic oligonucleotide
agguuaguguuccuuuaag

SEQ ID NO: 2614670 - RNA, 19 nt, Artificial Sequence
  Description of Artificial Sequence: Synthetic oligonucleotide
uguaggcugucuccaguag

SEQ ID NO: 2614671 - RNA, 19 nt, Artificial Sequence
  Description of Artificial Sequence: Synthetic oligonucleotide
ucagaggagggcaggaaaa

SEQ ID NO: 2614672 - RNA, 19 nt, Artificial Sequence
  Description of Artificial Sequence: Synthetic oligonucleotide
acacauggcuagcucagag

SEQ ID NO: 2614673 - RNA, 19 nt, Artificial Sequence
  Description of Artificial Sequence: Synthetic oligonucleotide
uccaacuggagcucccugc

SEQ ID NO: 2614674 - RNA, 19 nt, Artificial Sequence
  Description of Artificial Sequence: Synthetic oligonucleotide
ucggccuccaugaagcccu

SEQ ID NO: 2614675 - RNA, 19 nt, Artificial Sequence
  Description of Artificial Sequence: Synthetic oligonucleotide
cuguuuguaggcugucucc

SEQ ID NO: 2614676 - RNA, 19 nt, Artificial Sequence
  Description of Artificial Sequence: Synthetic oligonucleotide
cuucgaagcaguccugccc

SEQ ID NO: 2614677 - RNA, 19 nt, Artificial Sequence
  Description of Artificial Sequence: Synthetic oligonucleotide
guuccuuuaagaaacccuc

SEQ ID NO: 2614678 - RNA, 19 nt, Artificial Sequence
  Description of Artificial Sequence: Synthetic oligonucleotide
guaggcugucuccaguagg

SEQ ID NO: 2614679 - RNA, 19 nt, Artificial Sequence
  Description of Artificial Sequence: Synthetic oligonucleotide
cuuaaagccaggcuaagua

SEQ ID NO: 2614680 - RNA, 19 nt, Artificial Sequence
  Description of Artificial Sequence: Synthetic oligonucleotide
ugagcucuagauuccuuac

SEQ ID NO: 2614681 - RNA, 19 nt, Artificial Sequence
  Description of Artificial Sequence: Synthetic oligonucleotide
agccagaaagauggcagcc

SEQ ID NO: 2614682 - RNA, 19 nt, Artificial Sequence
  Description of Artificial Sequence: Synthetic oligonucleotide
uggggugugaggaccaaac

SEQ ID NO: 2614683 - RNA, 19 nt, Artificial Sequence
  Description of Artificial Sequence: Synthetic oligonucleotide
uguguuucaacaggaucca

SEQ ID NO: 2614684 - RNA, 19 nt, Artificial Sequence
  Description of Artificial Sequence: Synthetic oligonucleotide
ugaggaccaaacuaugguu

SEQ ID NO: 2614685 - RNA, 19 nt, Artificial Sequence
  Description of Artificial Sequence: Synthetic oligonucleotide
guuugggcaccauaagcug

SEQ ID NO: 2614686 - RNA, 19 nt, Artificial Sequence
  Description of Artificial Sequence: Synthetic oligonucleotide
uguuuguaggcugucucca

SEQ ID NO: 2614687 - RNA, 19 nt, Artificial Sequence
  Description of Artificial Sequence: Synthetic oligonucleotide
aggaccaaacuaugguuug

SEQ ID NO: 2614688 - RNA, 19 nt, Artificial Sequence
  Description of Artificial Sequence: Synthetic oligonucleotide
ucccuuaaagccaggcuaa

SEQ ID NO: 2614689 - RNA, 19 nt, Artificial Sequence
  Description of Artificial Sequence: Synthetic oligonucleotide
uuauuuggaggagggugag

SEQ ID NO: 2614690 - RNA, 19 nt, Artificial Sequence
  Description of Artificial Sequence: Synthetic oligonucleotide
guaucucaaggaaaccucc

SEQ ID NO: 2614691 - RNA, 19 nt, Artificial Sequence
  Description of Artificial Sequence: Synthetic oligonucleotide
uggccuggugcucucagca

SEQ ID NO: 2614692 - RNA, 19 nt, Artificial Sequence
  Description of Artificial Sequence: Synthetic oligonucleotide
aggucaaggucccucccuc

SEQ ID NO: 2614693 - RNA, 19 nt, Artificial Sequence
  Description of Artificial Sequence: Synthetic oligonucleotide
aguguuccuuuaagaaacc

SEQ ID NO: 2614694 - RNA, 19 nt, Artificial Sequence
  Description of Artificial Sequence: Synthetic oligonucleotide
auaagcuguugucuuccug

SEQ ID NO: 2614695 - RNA, 19 nt, Artificial Sequence
  Description of Artificial Sequence: Synthetic oligonucleotide
uucucuuugcugugacuug

SEQ ID NO: 2614696 - RNA, 19 nt, Artificial Sequence
  Description of Artificial Sequence: Synthetic oligonucleotide
gagcucuagauuccuuacc

SEQ ID NO: 2614697 - RNA, 19 nt, Artificial Sequence
  Description of Artificial Sequence: Synthetic oligonucleotide
uccaugaagcccuccuucu

SEQ ID NO: 2614698 - RNA, 19 nt, Artificial Sequence
  Description of Artificial Sequence: Synthetic oligonucleotide
uagguagagugguuggggu

SEQ ID NO: 2614699 - RNA, 19 nt, Artificial Sequence
  Description of Artificial Sequence: Synthetic oligonucleotide
accuucgaagcaguccugc

SEQ ID NO: 2614700 - RNA, 19 nt, Artificial Sequence
  Description of Artificial Sequence: Synthetic oligonucleotide
agaagucccuuaaagccag

SEQ ID NO: 2614701 - RNA, 19 nt, Artificial Sequence
  Description of Artificial Sequence: Synthetic oligonucleotide
augguuugggcaccauaag

SEQ ID NO: 2614702 - RNA, 19 nt, Artificial Sequence
  Description of Artificial Sequence: Synthetic oligonucleotide
aaaaggggccuccucccau

SEQ ID NO: 2614703 - RNA, 19 nt, Artificial Sequence
  Description of Artificial Sequence: Synthetic oligonucleotide
gguagagugguuggggugg

SEQ ID NO: 2614704 - RNA, 19 nt, Artificial Sequence
  Description of Artificial Sequence: Synthetic oligonucleotide
agucccuuaaagccaggcu

SEQ ID NO: 2614705 - RNA, 19 nt, Artificial Sequence
  Description of Artificial Sequence: Synthetic oligonucleotide
uggcuagcucagaggaggg

SEQ ID NO: 2614706 - RNA, 19 nt, Artificial Sequence
  Description of Artificial Sequence: Synthetic oligonucleotide
aaacccucaugguugcauu

SEQ ID NO: 2614707 - RNA, 19 nt, Artificial Sequence
  Description of Artificial Sequence: Synthetic oligonucleotide
gauggcagccgaucuccag

SEQ ID NO: 2614708 - RNA, 19 nt, Artificial Sequence
  Description of Artificial Sequence: Synthetic oligonucleotide
uugucuuccuggcccacac

SEQ ID NO: 2614709 - RNA, 19 nt, Artificial Sequence
  Description of Artificial Sequence: Synthetic oligonucleotide
guaggggagcagcagcucc

SEQ ID NO: 2614710 - RNA, 19 nt, Artificial Sequence
  Description of Artificial Sequence: Synthetic oligonucleotide
cagaagucccuuaaagcca

SEQ ID NO: 2614711 - RNA, 19 nt, Artificial Sequence
  Description of Artificial Sequence: Synthetic oligonucleotide
aguagggaggggcucuuca

SEQ ID NO: 2614712 - RNA, 19 nt, Artificial Sequence
  Description of Artificial Sequence: Synthetic oligonucleotide
guuuguaggcugucuccag

SEQ ID NO: 2614713 - RNA, 19 nt, Artificial Sequence
  Description of Artificial Sequence: Synthetic oligonucleotide
cuaaguaggggagcagcag

SEQ ID NO: 2614714 - RNA, 19 nt, Artificial Sequence
  Description of Artificial Sequence: Synthetic oligonucleotide
accauugagagaucccaaa

SEQ ID NO: 2614715 - RNA, 19 nt, Artificial Sequence
  Description of Artificial Sequence: Synthetic oligonucleotide
agugcagaccauugagaga

SEQ ID NO: 2614716 - RNA, 19 nt, Artificial Sequence
  Description of Artificial Sequence: Synthetic oligonucleotide
agguagagugguuggggug

SEQ ID NO: 2614717 - RNA, 19 nt, Artificial Sequence
  Description of Artificial Sequence: Synthetic oligonucleotide
uccaaacagggaacucuga

SEQ ID NO: 2614718 - RNA, 19 nt, Artificial Sequence
  Description of Artificial Sequence: Synthetic oligonucleotide
ucccauccaaacagggaac

SEQ ID NO: 2614719 - RNA, 19 nt, Artificial Sequence
  Description of Artificial Sequence: Synthetic oligonucleotide
cagaccauugagagauccc

SEQ ID NO: 2614720 - RNA, 19 nt, Artificial Sequence
  Description of Artificial Sequence: Synthetic oligonucleotide
aaguaggggagcagcagcu

SEQ ID NO: 2614721 - RNA, 19 nt, Artificial Sequence
  Description of Artificial Sequence: Synthetic oligonucleotide
aggauccaacuggagcucc

SEQ ID NO: 2614722 - RNA, 19 nt, Artificial Sequence
  Description of Artificial Sequence: Synthetic oligonucleotide
cauccccaaggucaguggc

SEQ ID NO: 2614723 - RNA, 19 nt, Artificial Sequence
  Description of Artificial Sequence: Synthetic oligonucleotide
augccagguuucucugccc

SEQ ID NO: 2614724 - RNA, 19 nt, Artificial Sequence
  Description of Artificial Sequence: Synthetic oligonucleotide
gugguugcggaacuucaug

SEQ ID NO: 2614725 - RNA, 19 nt, Artificial Sequence
  Description of Artificial Sequence: Synthetic oligonucleotide
ugagguuaguguuccuuua

SEQ ID NO: 2614726 - RNA, 19 nt, Artificial Sequence
  Description of Artificial Sequence: Synthetic oligonucleotide
gguuaguguuccuuuaaga

SEQ ID NO: 2614727 - RNA, 19 nt, Artificial Sequence
  Description of Artificial Sequence: Synthetic oligonucleotide
aucuccaggucaagguccc

SEQ ID NO: 2614728 - RNA, 19 nt, Artificial Sequence
  Description of Artificial Sequence: Synthetic oligonucleotide
cucccauccaaacagggaa

SEQ ID NO: 2614729 - RNA, 19 nt, Artificial Sequence
  Description of Artificial Sequence: Synthetic oligonucleotide
gaggcagggguaucucaag

SEQ ID NO: 2614730 - RNA, 19 nt, Artificial Sequence
  Description of Artificial Sequence: Synthetic oligonucleotide
ucugcccuaccuucauggc

SEQ ID NO: 2614731 - RNA, 19 nt, Artificial Sequence
  Description of Artificial Sequence: Synthetic oligonucleotide
uagauuccuuaccuucgaa

SEQ ID NO: 2614732 - RNA, 19 nt, Artificial Sequence
  Description of Artificial Sequence: Synthetic oligonucleotide
ugcugugacuugcuuucac

SEQ ID NO: 2614733 - RNA, 19 nt, Artificial Sequence
  Description of Artificial Sequence: Synthetic oligonucleotide
agagugguuggggugguug

SEQ ID NO: 2614734 - RNA, 19 nt, Artificial Sequence
  Description of Artificial Sequence: Synthetic oligonucleotide
acccucaugguugcauuac

SEQ ID NO: 2614735 - RNA, 19 nt, Artificial Sequence
  Description of Artificial Sequence: Synthetic oligonucleotide
gucuccaguagggaggggc

SEQ ID NO: 2614736 - RNA, 19 nt, Artificial Sequence
  Description of Artificial Sequence: Synthetic oligonucleotide
ucugagguuaguguuccuu

SEQ ID NO: 2614737 - RNA, 19 nt, Artificial Sequence
  Description of Artificial Sequence: Synthetic oligonucleotide
cauggcuagcucagaggag

SEQ ID NO: 2614738 - RNA, 19 nt, Artificial Sequence
  Description of Artificial Sequence: Synthetic oligonucleotide
ucccugcugaggcaggggu

SEQ ID NO: 2614739 - RNA, 19 nt, Artificial Sequence
  Description of Artificial Sequence: Synthetic oligonucleotide
agggacagaagucccuuaa

SEQ ID NO: 2614740 - RNA, 19 nt, Artificial Sequence
  Description of Artificial Sequence: Synthetic oligonucleotide
caauagcuacagugcagac

SEQ ID NO: 2614741 - RNA, 19 nt, Artificial Sequence
  Description of Artificial Sequence: Synthetic oligonucleotide
uccuuaccuucgaagcagu

SEQ ID NO: 2614742 - RNA, 19 nt, Artificial Sequence
  Description of Artificial Sequence: Synthetic oligonucleotide
gagguuaguguuccuuuaa

SEQ ID NO: 2614743 - RNA, 19 nt, Artificial Sequence
  Description of Artificial Sequence: Synthetic oligonucleotide
gcugucuccaguagggagg

SEQ ID NO: 2614744 - RNA, 19 nt, Artificial Sequence
  Description of Artificial Sequence: Synthetic oligonucleotide
cuggcccacacauggcuag

SEQ ID NO: 2614745 - RNA, 19 nt, Artificial Sequence
  Description of Artificial Sequence: Synthetic oligonucleotide
uagggaggggcucuucaau

SEQ ID NO: 2614746 - RNA, 19 nt, Artificial Sequence
  Description of Artificial Sequence: Synthetic oligonucleotide
aacccucaugguugcauua

SEQ ID NO: 2614747 - RNA, 19 nt, Artificial Sequence
  Description of Artificial Sequence: Synthetic oligonucleotide
ccuccucccauccaaacag

SEQ ID NO: 2614748 - RNA, 19 nt, Artificial Sequence
  Description of Artificial Sequence: Synthetic oligonucleotide
ccaaacuaugguuugggca

SEQ ID NO: 2614749 - RNA, 19 nt, Artificial Sequence
  Description of Artificial Sequence: Synthetic oligonucleotide
agguuucucugcccuaccu

SEQ ID NO: 2614750 - RNA, 19 nt, Artificial Sequence
  Description of Artificial Sequence: Synthetic oligonucleotide
gguugcggaacuucauggc

SEQ ID NO: 2614751 - RNA, 19 nt, Artificial Sequence
  Description of Artificial Sequence: Synthetic oligonucleotide
uugggcaccauaagcuguu

SEQ ID NO: 2614752 - RNA, 19 nt, Artificial Sequence
  Description of Artificial Sequence: Synthetic oligonucleotide
cugucuccaguagggaggg

SEQ ID NO: 2614753 - RNA, 19 nt, Artificial Sequence
  Description of Artificial Sequence: Synthetic oligonucleotide
ggcagcuguguuucaacag

SEQ ID NO: 2614754 - RNA, 19 nt, Artificial Sequence
  Description of Artificial Sequence: Synthetic oligonucleotide
gugaggaccaaacuauggu

SEQ ID NO: 2614755 - RNA, 19 nt, Artificial Sequence
  Description of Artificial Sequence: Synthetic oligonucleotide
ucucugcccuaccuucaug

SEQ ID NO: 2614756 - RNA, 19 nt, Artificial Sequence
  Description of Artificial Sequence: Synthetic oligonucleotide
guguuccuuuaagaaaccc

SEQ ID NO: 2614757 - RNA, 19 nt, Artificial Sequence
  Description of Artificial Sequence: Synthetic oligonucleotide
acuggagcucccugcugag

SEQ ID NO: 2614758 - RNA, 19 nt, Artificial Sequence
  Description of Artificial Sequence: Synthetic oligonucleotide
uauuuggaggagggugagc

SEQ ID NO: 2614759 - RNA, 19 nt, Artificial Sequence
  Description of Artificial Sequence: Synthetic oligonucleotide
gguaucucaaggaaaccuc

SEQ ID NO: 2614760 - RNA, 19 nt, Artificial Sequence
  Description of Artificial Sequence: Synthetic oligonucleotide
caacaggauccaacuggag

SEQ ID NO: 2614761 - RNA, 19 nt, Artificial Sequence
  Description of Artificial Sequence: Synthetic oligonucleotide
ggcugucuccaguagggag

SEQ ID NO: 2614762 - RNA, 19 nt, Artificial Sequence
  Description of Artificial Sequence: Synthetic oligonucleotide
caccacagggacagaaguc

SEQ ID NO: 2614763 - RNA, 19 nt, Artificial Sequence
  Description of Artificial Sequence: Synthetic oligonucleotide
cuuucacaccauccccaag

SEQ ID NO: 2614764 - RNA, 19 nt, Artificial Sequence
  Description of Artificial Sequence: Synthetic oligonucleotide
gugcagaccauugagagau

SEQ ID NO: 2614765 - RNA, 19 nt, Artificial Sequence
  Description of Artificial Sequence: Synthetic oligonucleotide
gaacucugagguuaguguu

SEQ ID NO: 2614766 - RNA, 19 nt, Artificial Sequence
  Description of Artificial Sequence: Synthetic oligonucleotide
uggcccgagggcucgaccu

SEQ ID NO: 2614767 - RNA, 19 nt, Artificial Sequence
  Description of Artificial Sequence: Synthetic oligonucleotide
aguaggggagcagcagcuc

SEQ ID NO: 2614768 - RNA, 19 nt, Artificial Sequence
  Description of Artificial Sequence: Synthetic oligonucleotide
cagggaacucugagguuag

SEQ ID NO: 2614769 - RNA, 19 nt, Artificial Sequence
  Description of Artificial Sequence: Synthetic oligonucleotide
ugguugcauuacugcaccc

SEQ ID NO: 2614770 - RNA, 19 nt, Artificial Sequence
  Description of Artificial Sequence: Synthetic oligonucleotide
gugagcucuagauuccuua

SEQ ID NO: 2614771 - RNA, 19 nt, Artificial Sequence
  Description of Artificial Sequence: Synthetic oligonucleotide
gggaggggcucuucaauag

SEQ ID NO: 2614772 - RNA, 19 nt, Artificial Sequence
  Description of Artificial Sequence: Synthetic oligonucleotide
aacuaugguuugggcacca

SEQ ID NO: 2614773 - RNA, 19 nt, Artificial Sequence
  Description of Artificial Sequence: Synthetic oligonucleotide
ggcucgaccucuguguagg

SEQ ID NO: 2614774 - RNA, 19 nt, Artificial Sequence
  Description of Artificial Sequence: Synthetic oligonucleotide
uaccuucgaagcaguccug

SEQ ID NO: 2614775 - RNA, 19 nt, Artificial Sequence
  Description of Artificial Sequence: Synthetic oligonucleotide
uggcagccgaucuccaggu

SEQ ID NO: 2614776 - RNA, 19 nt, Artificial Sequence
  Description of Artificial Sequence: Synthetic oligonucleotide
accuucauggcagcugugu

SEQ ID NO: 2614777 - RNA, 19 nt, Artificial Sequence
  Description of Artificial Sequence: Synthetic oligonucleotide
cacugcucggccuccauga

SEQ ID NO: 2614778 - RNA, 19 nt, Artificial Sequence
  Description of Artificial Sequence: Synthetic oligonucleotide
guugcggaacuucauggcu

SEQ ID NO: 2614779 - RNA, 19 nt, Artificial Sequence
  Description of Artificial Sequence: Synthetic oligonucleotide
auccaacuggagcucccug

SEQ ID NO: 2614780 - RNA, 19 nt, Artificial Sequence
  Description of Artificial Sequence: Synthetic oligonucleotide
ucacuucucuuugcuguga

SEQ ID NO: 2614781 - RNA, 19 nt, Artificial Sequence
  Description of Artificial Sequence: Synthetic oligonucleotide
uccaguagggaggggcucu

SEQ ID NO: 2614782 - RNA, 19 nt, Artificial Sequence
  Description of Artificial Sequence: Synthetic oligonucleotide
uucucugcccuaccuucau

SEQ ID NO: 2614783 - RNA, 19 nt, Artificial Sequence
  Description of Artificial Sequence: Synthetic oligonucleotide
ggaacucugagguuagugu

SEQ ID NO: 2614784 - RNA, 19 nt, Artificial Sequence
  Description of Artificial Sequence: Synthetic oligonucleotide
guuggggugguugcggaac

SEQ ID NO: 2614785 - RNA, 19 nt, Artificial Sequence
  Description of Artificial Sequence: Synthetic oligonucleotide
uuccuggcccacacauggc

SEQ ID NO: 2614786 - RNA, 19 nt, Artificial Sequence
  Description of Artificial Sequence: Synthetic oligonucleotide
uggugcucucagcacugcu

SEQ ID NO: 2614787 - RNA, 19 nt, Artificial Sequence
  Description of Artificial Sequence: Synthetic oligonucleotide
gugguuggggugguugcgg

SEQ ID NO: 2614788 - RNA, 19 nt, Artificial Sequence
  Description of Artificial Sequence: Synthetic oligonucleotide
cucagcacugcucggccuc

SEQ ID NO: 2614789 - RNA, 19 nt, Artificial Sequence
  Description of Artificial Sequence: Synthetic oligonucleotide
ugacuugcuuucacaccau

SEQ ID NO: 2614790 - RNA, 19 nt, Artificial Sequence
  Description of Artificial Sequence: Synthetic oligonucleotide
ugucuuccuggcccacaca

SEQ ID NO: 2614791 - RNA, 19 nt, Artificial Sequence
  Description of Artificial Sequence: Synthetic oligonucleotide
ggcuaaguaggggagcagc

SEQ ID NO: 2614792 - RNA, 19 nt, Artificial Sequence
  Description of Artificial Sequence: Synthetic oligonucleotide
ggaccaaacuaugguuugg

SEQ ID NO: 2614793 - RNA, 19 nt, Artificial Sequence
  Description of Artificial Sequence: Synthetic oligonucleotide
ggggcucuucaauagcuac

SEQ ID NO: 2614794 - RNA, 19 nt, Artificial Sequence
  Description of Artificial Sequence: Synthetic oligonucleotide
cagccaccuguuuguaggc

SEQ ID NO: 2614795 - RNA, 19 nt, Artificial Sequence
  Description of Artificial Sequence: Synthetic oligonucleotide
gagggcucgaccucugugu

SEQ ID NO: 2614796 - RNA, 19 nt, Artificial Sequence
  Description of Artificial Sequence: Synthetic oligonucleotide
cagcuguguuucaacagga

SEQ ID NO: 2614797 - RNA, 19 nt, Artificial Sequence
  Description of Artificial Sequence: Synthetic oligonucleotide
cuacagugcagaccauuga

SEQ ID NO: 2614798 - RNA, 19 nt, Artificial Sequence
  Description of Artificial Sequence: Synthetic oligonucleotide
gccagaaagauggcagccg

SEQ ID NO: 2614799 - RNA, 19 nt, Artificial Sequence
  Description of Artificial Sequence: Synthetic oligonucleotide
gcagaccauugagagaucc

SEQ ID NO: 2614800 - RNA, 19 nt, Artificial Sequence
  Description of Artificial Sequence: Synthetic oligonucleotide
cugcucggccuccaugaag

SEQ ID NO: 2614801 - RNA, 19 nt, Artificial Sequence
  Description of Artificial Sequence: Synthetic oligonucleotide
gaccucuguguagguagag

SEQ ID NO: 2614802 - RNA, 19 nt, Artificial Sequence
  Description of Artificial Sequence: Synthetic oligonucleotide
ccucaugguugcauuacug

SEQ ID NO: 2614803 - RNA, 19 nt, Artificial Sequence
  Description of Artificial Sequence: Synthetic oligonucleotide
ccauaagcuguugucuucc

SEQ ID NO: 2614804 - RNA, 19 nt, Artificial Sequence
  Description of Artificial Sequence: Synthetic oligonucleotide
gguuugggcaccauaagcu

SEQ ID NO: 2614805 - RNA, 19 nt, Artificial Sequence
  Description of Artificial Sequence: Synthetic oligonucleotide
gggaacucugagguuagug

SEQ ID NO: 2614806 - RNA, 19 nt, Artificial Sequence
  Description of Artificial Sequence: Synthetic oligonucleotide
gaagucccuuaaagccagg

SEQ ID NO: 2614807 - RNA, 19 nt, Artificial Sequence
  Description of Artificial Sequence: Synthetic oligonucleotide
cauccaaacagggaacucu

SEQ ID NO: 2614808 - RNA, 19 nt, Artificial Sequence
  Description of Artificial Sequence: Synthetic oligonucleotide
ccacacauggcuagcucag

SEQ ID NO: 2614809 - RNA, 19 nt, Artificial Sequence
  Description of Artificial Sequence: Synthetic oligonucleotide
gggugugaggaccaaacua

SEQ ID NO: 2614810 - RNA, 19 nt, Artificial Sequence
  Description of Artificial Sequence: Synthetic oligonucleotide
cucauggcccgagggcucg

SEQ ID NO: 2614811 - RNA, 19 nt, Artificial Sequence
  Description of Artificial Sequence: Synthetic oligonucleotide
cugcccuaccuucauggca

SEQ ID NO: 2614812 - RNA, 19 nt, Artificial Sequence
  Description of Artificial Sequence: Synthetic oligonucleotide
cucggccuccaugaagccc

SEQ ID NO: 2614813 - RNA, 19 nt, Artificial Sequence
  Description of Artificial Sequence: Synthetic oligonucleotide
ggcagggguaucucaagga

SEQ ID NO: 2614814 - RNA, 19 nt, Artificial Sequence
  Description of Artificial Sequence: Synthetic oligonucleotide
gcagccgaucuccagguca

SEQ ID NO: 2614815 - RNA, 19 nt, Artificial Sequence
  Description of Artificial Sequence: Synthetic oligonucleotide
cuaccuucauggcagcugu

SEQ ID NO: 2614816 - RNA, 19 nt, Artificial Sequence
  Description of Artificial Sequence: Synthetic oligonucleotide
ucagcacugcucggccucc

SEQ ID NO: 2614817 - RNA, 19 nt, Artificial Sequence
  Description of Artificial Sequence: Synthetic oligonucleotide
ucccucccaugccagguuu

SEQ ID NO: 2614818 - RNA, 19 nt, Artificial Sequence
  Description of Artificial Sequence: Synthetic oligonucleotide
guagggaggggcucuucaa

SEQ ID NO: 2614819 - RNA, 19 nt, Artificial Sequence
  Description of Artificial Sequence: Synthetic oligonucleotide
cuaugguuugggcaccaua

SEQ ID NO: 2614820 - RNA, 19 nt, Artificial Sequence
  Description of Artificial Sequence: Synthetic oligonucleotide
gcuagcucagaggagggca

SEQ ID NO: 2614821 - RNA, 19 nt, Artificial Sequence
  Description of Artificial Sequence: Synthetic oligonucleotide
caggcuaaguaggggagca

SEQ ID NO: 2614822 - RNA, 19 nt, Artificial Sequence
  Description of Artificial Sequence: Synthetic oligonucleotide
ggugugaggaccaaacuau

SEQ ID NO: 2614823 - RNA, 19 nt, Artificial Sequence
  Description of Artificial Sequence: Synthetic oligonucleotide
cugaggcagggguaucuca

SEQ ID NO: 2614824 - RNA, 19 nt, Artificial Sequence
  Description of Artificial Sequence: Synthetic oligonucleotide
ucauggcagcuguguuuca

SEQ ID NO: 2614825 - RNA, 19 nt, Artificial Sequence
  Description of Artificial Sequence: Synthetic oligonucleotide
gaggggcucuucaauagcu

SEQ ID NO: 2614826 - RNA, 19 nt, Artificial Sequence
  Description of Artificial Sequence: Synthetic oligonucleotide
acagggacagaagucccuu

SEQ ID NO: 2614827 - RNA, 19 nt, Artificial Sequence
  Description of Artificial Sequence: Synthetic oligonucleotide
cagagccagaaagauggca

SEQ ID NO: 2614828 - RNA, 19 nt, Artificial Sequence
  Description of Artificial Sequence: Synthetic oligonucleotide
agcuacagugcagaccauu

SEQ ID NO: 2614829 - RNA, 19 nt, Artificial Sequence
  Description of Artificial Sequence: Synthetic oligonucleotide
ggucaaggucccucccucc

SEQ ID NO: 2614830 - RNA, 19 nt, Artificial Sequence
  Description of Artificial Sequence: Synthetic oligonucleotide
gaaacccucaugguugcau

SEQ ID NO: 2614831 - RNA, 19 nt, Artificial Sequence
  Description of Artificial Sequence: Synthetic oligonucleotide
caacuggagcucccugcug

SEQ ID NO: 2614832 - RNA, 19 nt, Artificial Sequence
  Description of Artificial Sequence: Synthetic oligonucleotide
gccgaucuccaggucaagg

SEQ ID NO: 2614833 - RNA, 19 nt, Artificial Sequence
  Description of Artificial Sequence: Synthetic oligonucleotide
ugcagaccauugagagauc

SEQ ID NO: 2614834 - RNA, 19 nt, Artificial Sequence
  Description of Artificial Sequence: Synthetic oligonucleotide
uugcugugacuugcuuuca

SEQ ID NO: 2614835 - RNA, 19 nt, Artificial Sequence
  Description of Artificial Sequence: Synthetic oligonucleotide
uggaggagggugagcucua

SEQ ID NO: 2614836 - RNA, 19 nt, Artificial Sequence
  Description of Artificial Sequence: Synthetic oligonucleotide
aaaccuccagccaccuguu

SEQ ID NO: 2614837 - RNA, 19 nt, Artificial Sequence
  Description of Artificial Sequence: Synthetic oligonucleotide
agggcucgaccucugugua

SEQ ID NO: 2614838 - RNA, 19 nt, Artificial Sequence
  Description of Artificial Sequence: Synthetic oligonucleotide
aggcuaaguaggggagcag

SEQ ID NO: 2614839 - RNA, 19 nt, Artificial Sequence
  Description of Artificial Sequence: Synthetic oligonucleotide
uguugucuuccuggcccac

SEQ ID NO: 2614840 - RNA, 19 nt, Artificial Sequence
  Description of Artificial Sequence: Synthetic oligonucleotide
ggugcucucagcacugcuc

SEQ ID NO: 2614841 - RNA, 19 nt, Artificial Sequence
  Description of Artificial Sequence: Synthetic oligonucleotide
gcuaaguaggggagcagca

SEQ ID NO: 2614842 - RNA, 19 nt, Artificial Sequence
  Description of Artificial Sequence: Synthetic oligonucleotide
ccuaccuucauggcagcug

SEQ ID NO: 2614843 - RNA, 19 nt, Artificial Sequence
  Description of Artificial Sequence: Synthetic oligonucleotide
ugggcaccauaagcuguug

SEQ ID NO: 2614844 - RNA, 19 nt, Artificial Sequence
  Description of Artificial Sequence: Synthetic oligonucleotide
ggguaucucaaggaaaccu

SEQ ID NO: 2614845 - RNA, 19 nt, Artificial Sequence
  Description of Artificial Sequence: Synthetic oligonucleotide
cuucauggcagcuguguuu

SEQ ID NO: 2614846 - RNA, 19 nt, Artificial Sequence
  Description of Artificial Sequence: Synthetic oligonucleotide
ccagaaagauggcagccga

SEQ ID NO: 2614847 - RNA, 19 nt, Artificial Sequence
  Description of Artificial Sequence: Synthetic oligonucleotide
acugcucggccuccaugaa

SEQ ID NO: 2614848 - RNA, 19 nt, Artificial Sequence
  Description of Artificial Sequence: Synthetic oligonucleotide
cucuuugcagagccagaaa

SEQ ID NO: 2614849 - RNA, 19 nt, Artificial Sequence
  Description of Artificial Sequence: Synthetic oligonucleotide
gccaggcuaaguaggggag

SEQ ID NO: 2614850 - RNA, 19 nt, Artificial Sequence
  Description of Artificial Sequence: Synthetic oligonucleotide
caaggucaguggccuggug

SEQ ID NO: 2614851 - RNA, 19 nt, Artificial Sequence
  Description of Artificial Sequence: Synthetic oligonucleotide
ugucuccaguagggagggg

SEQ ID NO: 2614852 - RNA, 19 nt, Artificial Sequence
  Description of Artificial Sequence: Synthetic oligonucleotide
cugagguuaguguuccuuu

SEQ ID NO: 2614853 - RNA, 19 nt, Artificial Sequence
  Description of Artificial Sequence: Synthetic oligonucleotide
gcucucagcacugcucggc

SEQ ID NO: 2614854 - RNA, 19 nt, Artificial Sequence
  Description of Artificial Sequence: Synthetic oligonucleotide
cccacacauggcuagcuca

SEQ ID NO: 2614855 - RNA, 19 nt, Artificial Sequence
  Description of Artificial Sequence: Synthetic oligonucleotide
gggguaucucaaggaaacc

SEQ ID NO: 2614856 - RNA, 19 nt, Artificial Sequence
  Description of Artificial Sequence: Synthetic oligonucleotide
ccauugagagaucccaaaa

SEQ ID NO: 2614857 - RNA, 19 nt, Artificial Sequence
  Description of Artificial Sequence: Synthetic oligonucleotide
guugucuuccuggcccaca

SEQ ID NO: 2614858 - RNA, 19 nt, Artificial Sequence
  Description of Artificial Sequence: Synthetic oligonucleotide
ccaugccagguuucucugc

SEQ ID NO: 2614859 - RNA, 19 nt, Artificial Sequence
  Description of Artificial Sequence: Synthetic oligonucleotide
cuggugcucucagcacugc

SEQ ID NO: 2614860 - RNA, 19 nt, Artificial Sequence
  Description of Artificial Sequence: Synthetic oligonucleotide
gauccaacuggagcucccu

SEQ ID NO: 2614861 - RNA, 19 nt, Artificial Sequence
  Description of Artificial Sequence: Synthetic oligonucleotide
caccauaagcuguugucuu

SEQ ID NO: 2614862 - RNA, 19 nt, Artificial Sequence
  Description of Artificial Sequence: Synthetic oligonucleotide
agaaacccucaugguugca

SEQ ID NO: 2614863 - RNA, 19 nt, Artificial Sequence
  Description of Artificial Sequence: Synthetic oligonucleotide
gggacagaagucccuuaaa

SEQ ID NO: 2614864 - RNA, 19 nt, Artificial Sequence
  Description of Artificial Sequence: Synthetic oligonucleotide
ccagguuucucugcccuac

SEQ ID NO: 2614865 - RNA, 19 nt, Artificial Sequence
  Description of Artificial Sequence: Synthetic oligonucleotide
gggcucgaccucuguguag

SEQ ID NO: 2614866 - RNA, 19 nt, Artificial Sequence
  Description of Artificial Sequence: Synthetic oligonucleotide
ucuggggugugaggaccaa

SEQ ID NO: 2614867 - RNA, 19 nt, Artificial Sequence
  Description of Artificial Sequence: Synthetic oligonucleotide
cauaagcuguugucuuccu

SEQ ID NO: 2614868 - RNA, 19 nt, Artificial Sequence
  Description of Artificial Sequence: Synthetic oligonucleotide
cuccaguagggaggggcuc

SEQ ID NO: 2614869 - RNA, 19 nt, Artificial Sequence
  Description of Artificial Sequence: Synthetic oligonucleotide
ccaggcuaaguaggggagc

SEQ ID NO: 2614870 - RNA, 19 nt, Artificial Sequence
  Description of Artificial Sequence: Synthetic oligonucleotide
uagcuacagugcagaccau

SEQ ID NO: 2614871 - RNA, 19 nt, Artificial Sequence
  Description of Artificial Sequence: Synthetic oligonucleotide
ccaaagcucuuugcagagc

SEQ ID NO: 2614872 - RNA, 19 nt, Artificial Sequence
  Description of Artificial Sequence: Synthetic oligonucleotide
acuaugguuugggcaccau

SEQ ID NO: 2614873 - RNA, 19 nt, Artificial Sequence
  Description of Artificial Sequence: Synthetic oligonucleotide
gggcucuucaauagcuaca

SEQ ID NO: 2614874 - RNA, 19 nt, Artificial Sequence
  Description of Artificial Sequence: Synthetic oligonucleotide
cggaacuucauggcuggcc

SEQ ID NO: 2614875 - RNA, 19 nt, Artificial Sequence
  Description of Artificial Sequence: Synthetic oligonucleotide
cucuuugcugugacuugcu

SEQ ID NO: 2614876 - RNA, 19 nt, Artificial Sequence
  Description of Artificial Sequence: Synthetic oligonucleotide
agauggcagccgaucucca

SEQ ID NO: 2614877 - RNA, 19 nt, Artificial Sequence
  Description of Artificial Sequence: Synthetic oligonucleotide
ccuuaccuucgaagcaguc

SEQ ID NO: 2614878 - RNA, 19 nt, Artificial Sequence
  Description of Artificial Sequence: Synthetic oligonucleotide
ggccuccucccauccaaac

SEQ ID NO: 2614879 - RNA, 19 nt, Artificial Sequence
  Description of Artificial Sequence: Synthetic oligonucleotide
ccucccauccaaacaggga

SEQ ID NO: 2614880 - RNA, 19 nt, Artificial Sequence
  Description of Artificial Sequence: Synthetic oligonucleotide
ggcuagcucagaggagggc

SEQ ID NO: 2614881 - RNA, 19 nt, Artificial Sequence
  Description of Artificial Sequence: Synthetic oligonucleotide
aggggcucuucaauagcua

SEQ ID NO: 2614882 - RNA, 19 nt, Artificial Sequence
  Description of Artificial Sequence: Synthetic oligonucleotide
agccgaucuccaggucaag

SEQ ID NO: 2614883 - RNA, 19 nt, Artificial Sequence
  Description of Artificial Sequence: Synthetic oligonucleotide
ggaggagggugagcucuag

SEQ ID NO: 2614884 - RNA, 19 nt, Artificial Sequence
  Description of Artificial Sequence: Synthetic oligonucleotide
gggugguugcggaacuuca

SEQ ID NO: 2614885 - RNA, 19 nt, Artificial Sequence
  Description of Artificial Sequence: Synthetic oligonucleotide
ggggccuccucccauccaa

SEQ ID NO: 2614886 - RNA, 19 nt, Artificial Sequence
  Description of Artificial Sequence: Synthetic oligonucleotide
agggaacucugagguuagu

SEQ ID NO: 2614887 - RNA, 19 nt, Artificial Sequence
  Description of Artificial Sequence: Synthetic oligonucleotide
cacacauggcuagcucaga

SEQ ID NO: 2614888 - RNA, 19 nt, Artificial Sequence
  Description of Artificial Sequence: Synthetic oligonucleotide
caggucaaggucccucccu

SEQ ID NO: 2614889 - RNA, 19 nt, Artificial Sequence
  Description of Artificial Sequence: Synthetic oligonucleotide
cagaaagauggcagccgau

SEQ ID NO: 2614890 - RNA, 19 nt, Artificial Sequence
  Description of Artificial Sequence: Synthetic oligonucleotide
ggagggugagcucuagauu

SEQ ID NO: 2614891 - RNA, 19 nt, Artificial Sequence
  Description of Artificial Sequence: Synthetic oligonucleotide
cauggcccgagggcucgac

SEQ ID NO: 2614892 - RNA, 19 nt, Artificial Sequence
  Description of Artificial Sequence: Synthetic oligonucleotide
cccuuaaagccaggcuaag

SEQ ID NO: 2614893 - RNA, 19 nt, Artificial Sequence
  Description of Artificial Sequence: Synthetic oligonucleotide
ggggugugaggaccaaacu

SEQ ID NO: 2614894 - RNA, 19 nt, Artificial Sequence
  Description of Artificial Sequence: Synthetic oligonucleotide
gcccacacauggcuagcuc

SEQ ID NO: 2614895 - RNA, 19 nt, Artificial Sequence
  Description of Artificial Sequence: Synthetic oligonucleotide
caguagggaggggcucuuc

SEQ ID NO: 2614896 - RNA, 19 nt, Artificial Sequence
  Description of Artificial Sequence: Synthetic oligonucleotide
cucgaccucuguguaggua

SEQ ID NO: 2614897 - RNA, 19 nt, Artificial Sequence
  Description of Artificial Sequence: Synthetic oligonucleotide
cgagggcucgaccucugug

SEQ ID NO: 2614898 - RNA, 19 nt, Artificial Sequence
  Description of Artificial Sequence: Synthetic oligonucleotide
caaggucccucccucccau

SEQ ID NO: 2614899 - RNA, 19 nt, Artificial Sequence
  Description of Artificial Sequence: Synthetic oligonucleotide
gcccuaccuucauggcagc

SEQ ID NO: 2614900 - RNA, 19 nt, Artificial Sequence
  Description of Artificial Sequence: Synthetic oligonucleotide
cugcugaggcagggguauc

SEQ ID NO: 2614901 - RNA, 19 nt, Artificial Sequence
  Description of Artificial Sequence: Synthetic oligonucleotide
gggcaccauaagcuguugu

SEQ ID NO: 2614902 - RNA, 19 nt, Artificial Sequence
  Description of Artificial Sequence: Synthetic oligonucleotide
gcucuagauuccuuaccuu

SEQ ID NO: 2614903 - RNA, 19 nt, Artificial Sequence
  Description of Artificial Sequence: Synthetic oligonucleotide
cuggggugugaggaccaaa

SEQ ID NO: 2614904 - RNA, 19 nt, Artificial Sequence
  Description of Artificial Sequence: Synthetic oligonucleotide
cgaagcaguccugcccacc

SEQ ID NO: 2614905 - RNA, 19 nt, Artificial Sequence
  Description of Artificial Sequence: Synthetic oligonucleotide
ggcagccgaucuccagguc

SEQ ID NO: 2614906 - RNA, 19 nt, Artificial Sequence
  Description of Artificial Sequence: Synthetic oligonucleotide
ggcccgagggcucgaccuc

SEQ ID NO: 2614907 - RNA, 19 nt, Artificial Sequence
  Description of Artificial Sequence: Synthetic oligonucleotide
gcucuucaauagcuacagu

SEQ ID NO: 2614908 - RNA, 19 nt, Artificial Sequence
  Description of Artificial Sequence: Synthetic oligonucleotide
cucugagguuaguguuccu

SEQ ID NO: 2614909 - RNA, 19 nt, Artificial Sequence
  Description of Artificial Sequence: Synthetic oligonucleotide
ggugguugcggaacuucau

SEQ ID NO: 2614910 - RNA, 19 nt, Artificial Sequence
  Description of Artificial Sequence: Synthetic oligonucleotide
ccuuaaagccaggcuaagu

SEQ ID NO: 2614911 - RNA, 19 nt, Artificial Sequence
  Description of Artificial Sequence: Synthetic oligonucleotide
gccagguuucucugcccua

SEQ ID NO: 2614912 - RNA, 19 nt, Artificial Sequence
  Description of Artificial Sequence: Synthetic oligonucleotide
ugcccaccacagggacaga

SEQ ID NO: 2614913 - RNA, 19 nt, Artificial Sequence
  Description of Artificial Sequence: Synthetic oligonucleotide
gcggaacuucauggcuggc

SEQ ID NO: 2614914 - RNA, 19 nt, Artificial Sequence
  Description of Artificial Sequence: Synthetic oligonucleotide
cccauccaaacagggaacu

SEQ ID NO: 2614915 - RNA, 19 nt, Artificial Sequence
  Description of Artificial Sequence: Synthetic oligonucleotide
cgaccucuguguagguaga

SEQ ID NO: 2614916 - RNA, 19 nt, Artificial Sequence
  Description of Artificial Sequence: Synthetic oligonucleotide
ccccaaggucaguggccug

SEQ ID NO: 2614917 - RNA, 19 nt, Artificial Sequence
  Description of Artificial Sequence: Synthetic oligonucleotide
cuccagccaccuguuugua

SEQ ID NO: 2614918 - RNA, 19 nt, Artificial Sequence
  Description of Artificial Sequence: Synthetic oligonucleotide
cccucaugguugcauuacu

SEQ ID NO: 2614919 - RNA, 19 nt, Artificial Sequence
  Description of Artificial Sequence: Synthetic oligonucleotide
ggugagcucuagauuccuu

SEQ ID NO: 2614920 - RNA, 19 nt, Artificial Sequence
  Description of Artificial Sequence: Synthetic oligonucleotide
ccugcugaggcagggguau

SEQ ID NO: 2614921 - RNA, 19 nt, Artificial Sequence
  Description of Artificial Sequence: Synthetic oligonucleotide
gcucgaccucuguguaggu

SEQ ID NO: 2614922 - RNA, 19 nt, Artificial Sequence
  Description of Artificial Sequence: Synthetic oligonucleotide
ccucccaugccagguuucu

SEQ ID NO: 2614923 - RNA, 19 nt, Artificial Sequence
  Description of Artificial Sequence: Synthetic oligonucleotide
gcccgagggcucgaccucu

SEQ ID NO: 2614924 - RNA, 19 nt, Artificial Sequence
  Description of Artificial Sequence: Synthetic oligonucleotide
cccuaccuucauggcagcu

SEQ ID NO: 2614925 - RNA, 19 nt, Artificial Sequence
  Description of Artificial Sequence: Synthetic oligonucleotide
ccgagggcucgaccucugu

SEQ ID NO: 2614926 - RNA, 19 nt, Artificial Sequence
  Description of Artificial Sequence: Synthetic oligonucleotide
ccaguagggaggggcucuu

SEQ ID NO: 2614927 - RNA, 19 nt, Artificial Sequence
  Description of Artificial Sequence: Synthetic oligonucleotide
aauaccacaaaugaaagag

SEQ ID NO: 2614928 - RNA, 19 nt, Artificial Sequence
  Description of Artificial Sequence: Synthetic oligonucleotide
aagagcuucaucaaugucc

SEQ ID NO: 2614929 - RNA, 19 nt, Artificial Sequence
  Description of Artificial Sequence: Synthetic oligonucleotide
uaaauuuuaaggaauuucu

SEQ ID NO: 2614930 - RNA, 19 nt, Artificial Sequence
  Description of Artificial Sequence: Synthetic oligonucleotide
uuggcaauuuucuucaacg

SEQ ID NO: 2614931 - RNA, 19 nt, Artificial Sequence
  Description of Artificial Sequence: Synthetic oligonucleotide
accaucaccaucuuggacg

SEQ ID NO: 2614932 - RNA, 19 nt, Artificial Sequence
  Description of Artificial Sequence: Synthetic oligonucleotide
aacucaaccauccacuucu

SEQ ID NO: 2614933 - RNA, 19 nt, Artificial Sequence
  Description of Artificial Sequence: Synthetic oligonucleotide
ucaaacaacagacggacca

SEQ ID NO: 2614934 - RNA, 19 nt, Artificial Sequence
  Description of Artificial Sequence: Synthetic oligonucleotide
auuuuaaggaauuucuuca

SEQ ID NO: 2614935 - RNA, 19 nt, Artificial Sequence
  Description of Artificial Sequence: Synthetic oligonucleotide
ucagacuugacucugcggc

SEQ ID NO: 2614936 - RNA, 19 nt, Artificial Sequence
  Description of Artificial Sequence: Synthetic oligonucleotide
gcagaaaucacgcagaucc

SEQ ID NO: 2614937 - RNA, 19 nt, Artificial Sequence
  Description of Artificial Sequence: Synthetic oligonucleotide
aaaucacgcagauccaaac

SEQ ID NO: 2614938 - RNA, 19 nt, Artificial Sequence
  Description of Artificial Sequence: Synthetic oligonucleotide
aaaugaaagagcuggcaga

SEQ ID NO: 2614939 - RNA, 19 nt, Artificial Sequence
  Description of Artificial Sequence: Synthetic oligonucleotide
uucuucacauuuuauagac

SEQ ID NO: 2614940 - RNA, 19 nt, Artificial Sequence
  Description of Artificial Sequence: Synthetic oligonucleotide
uuuugcugucgguagaggg

SEQ ID NO: 2614941 - RNA, 19 nt, Artificial Sequence
  Description of Artificial Sequence: Synthetic oligonucleotide
accggaauagcccucaauc

SEQ ID NO: 2614942 - RNA, 19 nt, Artificial Sequence
  Description of Artificial Sequence: Synthetic oligonucleotide
uucgacugcagauagaauc

SEQ ID NO: 2614943 - RNA, 19 nt, Artificial Sequence
  Description of Artificial Sequence: Synthetic oligonucleotide
ucauugccaucaaagaugc

SEQ ID NO: 2614944 - RNA, 19 nt, Artificial Sequence
  Description of Artificial Sequence: Synthetic oligonucleotide
aggagcucagacuugacuc

SEQ ID NO: 2614945 - RNA, 19 nt, Artificial Sequence
  Description of Artificial Sequence: Synthetic oligonucleotide
gguagagggauguagaucc

SEQ ID NO: 2614946 - RNA, 19 nt, Artificial Sequence
  Description of Artificial Sequence: Synthetic oligonucleotide
uuggacagggcccugaucu

SEQ ID NO: 2614947 - RNA, 19 nt, Artificial Sequence
  Description of Artificial Sequence: Synthetic oligonucleotide
aaggaauuucuucacauuu

SEQ ID NO: 2614948 - RNA, 19 nt, Artificial Sequence
  Description of Artificial Sequence: Synthetic oligonucleotide
cacacguuaguuaugucgg

SEQ ID NO: 2614949 - RNA, 19 nt, Artificial Sequence
  Description of Artificial Sequence: Synthetic oligonucleotide
uuucuagucuccuucgaag

SEQ ID NO: 2614950 - RNA, 19 nt, Artificial Sequence
  Description of Artificial Sequence: Synthetic oligonucleotide
aacuucucagauucgccuc

SEQ ID NO: 2614951 - RNA, 19 nt, Artificial Sequence
  Description of Artificial Sequence: Synthetic oligonucleotide
aacgccagcucaaaguccc

SEQ ID NO: 2614952 - RNA, 19 nt, Artificial Sequence
  Description of Artificial Sequence: Synthetic oligonucleotide
aaccuagccauuucaaaca

SEQ ID NO: 2614953 - RNA, 19 nt, Artificial Sequence
  Description of Artificial Sequence: Synthetic oligonucleotide
aucacgcagauccaaacuc

SEQ ID NO: 2614954 - RNA, 19 nt, Artificial Sequence
  Description of Artificial Sequence: Synthetic oligonucleotide
gaaccuagccauuucaaac

SEQ ID NO: 2614955 - RNA, 19 nt, Artificial Sequence
  Description of Artificial Sequence: Synthetic oligonucleotide
ucuggugacaggcaucugc

SEQ ID NO: 2614956 - RNA, 19 nt, Artificial Sequence
  Description of Artificial Sequence: Synthetic oligonucleotide
ugaaagagcuggcagaaau

SEQ ID NO: 2614957 - RNA, 19 nt, Artificial Sequence
  Description of Artificial Sequence: Synthetic oligonucleotide
uuuucuaaggcuccuccga

SEQ ID NO: 2614958 - RNA, 19 nt, Artificial Sequence
  Description of Artificial Sequence: Synthetic oligonucleotide
uuaaggaauuucuucacau

SEQ ID NO: 2614959 - RNA, 19 nt, Artificial Sequence
  Description of Artificial Sequence: Synthetic oligonucleotide
caaaugaaagagcuggcag

SEQ ID NO: 2614960 - RNA, 19 nt, Artificial Sequence
  Description of Artificial Sequence: Synthetic oligonucleotide
ucguacuucuccaagucug

SEQ ID NO: 2614961 - RNA, 19 nt, Artificial Sequence
  Description of Artificial Sequence: Synthetic oligonucleotide
aaucacgcagauccaaacu

SEQ ID NO: 2614962 - RNA, 19 nt, Artificial Sequence
  Description of Artificial Sequence: Synthetic oligonucleotide
auuuucuaaggcuccuccg

SEQ ID NO: 2614963 - RNA, 19 nt, Artificial Sequence
  Description of Artificial Sequence: Synthetic oligonucleotide
ucucauugccaucaaagau

SEQ ID NO: 2614964 - RNA, 19 nt, Artificial Sequence
  Description of Artificial Sequence: Synthetic oligonucleotide
aucaaagaugcgucccugc

SEQ ID NO: 2614965 - RNA, 19 nt, Artificial Sequence
  Description of Artificial Sequence: Synthetic oligonucleotide
aaccauccacuucucguac

SEQ ID NO: 2614966 - RNA, 19 nt, Artificial Sequence
  Description of Artificial Sequence: Synthetic oligonucleotide
ucaaccauccacuucucgu

SEQ ID NO: 2614967 - RNA, 19 nt, Artificial Sequence
  Description of Artificial Sequence: Synthetic oligonucleotide
ugcagauagaaucuaucuc

SEQ ID NO: 2614968 - RNA, 19 nt, Artificial Sequence
  Description of Artificial Sequence: Synthetic oligonucleotide
agcaauguccuccaggcgu

SEQ ID NO: 2614969 - RNA, 19 nt, Artificial Sequence
  Description of Artificial Sequence: Synthetic oligonucleotide
uucaacgccagcucaaagu

SEQ ID NO: 2614970 - RNA, 19 nt, Artificial Sequence
  Description of Artificial Sequence: Synthetic oligonucleotide
uagcccucaaucuugucag

SEQ ID NO: 2614971 - RNA, 19 nt, Artificial Sequence
  Description of Artificial Sequence: Synthetic oligonucleotide
uuugcugucgguagaggga

SEQ ID NO: 2614972 - RNA, 19 nt, Artificial Sequence
  Description of Artificial Sequence: Synthetic oligonucleotide
ucgucauuuucuaaggcuc

SEQ ID NO: 2614973 - RNA, 19 nt, Artificial Sequence
  Description of Artificial Sequence: Synthetic oligonucleotide
ucaggauccagcuccaccu

SEQ ID NO: 2614974 - RNA, 19 nt, Artificial Sequence
  Description of Artificial Sequence: Synthetic oligonucleotide
agcuucaucaaugucccac

SEQ ID NO: 2614975 - RNA, 19 nt, Artificial Sequence
  Description of Artificial Sequence: Synthetic oligonucleotide
acguuaguuaugucggcac

SEQ ID NO: 2614976 - RNA, 19 nt, Artificial Sequence
  Description of Artificial Sequence: Synthetic oligonucleotide
ucgacugcagauagaaucu

SEQ ID NO: 2614977 - RNA, 19 nt, Artificial Sequence
  Description of Artificial Sequence: Synthetic oligonucleotide
aaacaacagacggaccaac

SEQ ID NO: 2614978 - RNA, 19 nt, Artificial Sequence
  Description of Artificial Sequence: Synthetic oligonucleotide
agacggaccaacuucucag

SEQ ID NO: 2614979 - RNA, 19 nt, Artificial Sequence
  Description of Artificial Sequence: Synthetic oligonucleotide
uccucuuuggacagggccc

SEQ ID NO: 2614980 - RNA, 19 nt, Artificial Sequence
  Description of Artificial Sequence: Synthetic oligonucleotide
aucgucauuuucuaaggcu

SEQ ID NO: 2614981 - RNA, 19 nt, Artificial Sequence
  Description of Artificial Sequence: Synthetic oligonucleotide
ucaacgccagcucaaaguc

SEQ ID NO: 2614982 - RNA, 19 nt, Artificial Sequence
  Description of Artificial Sequence: Synthetic oligonucleotide
aaugaaagagcuggcagaa

SEQ ID NO: 2614983 - RNA, 19 nt, Artificial Sequence
  Description of Artificial Sequence: Synthetic oligonucleotide
ugacuuggcaauuuucuuc

SEQ ID NO: 2614984 - RNA, 19 nt, Artificial Sequence
  Description of Artificial Sequence: Synthetic oligonucleotide
uacuucuccaagucugcgg

SEQ ID NO: 2614985 - RNA, 19 nt, Artificial Sequence
  Description of Artificial Sequence: Synthetic oligonucleotide
auuuucuucaacgccagcu

SEQ ID NO: 2614986 - RNA, 19 nt, Artificial Sequence
  Description of Artificial Sequence: Synthetic oligonucleotide
ucaaagaugcgucccugca

SEQ ID NO: 2614987 - RNA, 19 nt, Artificial Sequence
  Description of Artificial Sequence: Synthetic oligonucleotide
uuaguggcagccagaacca

SEQ ID NO: 2614988 - RNA, 19 nt, Artificial Sequence
  Description of Artificial Sequence: Synthetic oligonucleotide
gcacacguuaguuaugucg

SEQ ID NO: 2614989 - RNA, 19 nt, Artificial Sequence
  Description of Artificial Sequence: Synthetic oligonucleotide
agacguuccucuucgacug

SEQ ID NO: 2614990 - RNA, 19 nt, Artificial Sequence
  Description of Artificial Sequence: Synthetic oligonucleotide
uuuucuagucuccuucgaa

SEQ ID NO: 2614991 - RNA, 19 nt, Artificial Sequence
  Description of Artificial Sequence: Synthetic oligonucleotide
guuaguuaugucggcaccg

SEQ ID NO: 2614992 - RNA, 19 nt, Artificial Sequence
  Description of Artificial Sequence: Synthetic oligonucleotide
cucagauucgccucuguac

SEQ ID NO: 2614993 - RNA, 19 nt, Artificial Sequence
  Description of Artificial Sequence: Synthetic oligonucleotide
uucuagucuccuucgaaga

SEQ ID NO: 2614994 - RNA, 19 nt, Artificial Sequence
  Description of Artificial Sequence: Synthetic oligonucleotide
gcagauagaaucuaucuca

SEQ ID NO: 2614995 - RNA, 19 nt, Artificial Sequence
  Description of Artificial Sequence: Synthetic oligonucleotide
uuaguuaugucggcaccgg

SEQ ID NO: 2614996 - RNA, 19 nt, Artificial Sequence
  Description of Artificial Sequence: Synthetic oligonucleotide
uaugucggcaccggaauag

SEQ ID NO: 2614997 - RNA, 19 nt, Artificial Sequence
  Description of Artificial Sequence: Synthetic oligonucleotide
gacuccguccaucuggacc

SEQ ID NO: 2614998 - RNA, 19 nt, Artificial Sequence
  Description of Artificial Sequence: Synthetic oligonucleotide
ucuucgacugcagauagaa

SEQ ID NO: 2614999 - RNA, 19 nt, Artificial Sequence
  Description of Artificial Sequence: Synthetic oligonucleotide
agauagaaucuaucucauc

SEQ ID NO: 2615000 - RNA, 19 nt, Artificial Sequence
  Description of Artificial Sequence: Synthetic oligonucleotide
uagccauuucaaacaacag

SEQ ID NO: 2615001 - RNA, 19 nt, Artificial Sequence
  Description of Artificial Sequence: Synthetic oligonucleotide
gaucgucauuuucuaaggc

SEQ ID NO: 2615002 - RNA, 19 nt, Artificial Sequence
  Description of Artificial Sequence: Synthetic oligonucleotide
aaauuuuaaggaauuucuu

SEQ ID NO: 2615003 - RNA, 19 nt, Artificial Sequence
  Description of Artificial Sequence: Synthetic oligonucleotide
ucacgcagauccaaacuca

SEQ ID NO: 2615004 - RNA, 19 nt, Artificial Sequence
  Description of Artificial Sequence: Synthetic oligonucleotide
ucuaaggcuccuccgacuc

SEQ ID NO: 2615005 - RNA, 19 nt, Artificial Sequence
  Description of Artificial Sequence: Synthetic oligonucleotide
ucaaucuugucagcaaugu

SEQ ID NO: 2615006 - RNA, 19 nt, Artificial Sequence
  Description of Artificial Sequence: Synthetic oligonucleotide
uuucuaaggcuccuccgac

SEQ ID NO: 2615007 - RNA, 19 nt, Artificial Sequence
  Description of Artificial Sequence: Synthetic oligonucleotide
caauuuucuucaacgccag

SEQ ID NO: 2615008 - RNA, 19 nt, Artificial Sequence
  Description of Artificial Sequence: Synthetic oligonucleotide
acacguuaguuaugucggc

SEQ ID NO: 2615009 - RNA, 19 nt, Artificial Sequence
  Description of Artificial Sequence: Synthetic oligonucleotide
uucgccucuguacuuagaa

SEQ ID NO: 2615010 - RNA, 19 nt, Artificial Sequence
  Description of Artificial Sequence: Synthetic oligonucleotide
uccuccaggcguaugucag

SEQ ID NO: 2615011 - RNA, 19 nt, Artificial Sequence
  Description of Artificial Sequence: Synthetic oligonucleotide
uugccaucaaagaugcguc

SEQ ID NO: 2615012 - RNA, 19 nt, Artificial Sequence
  Description of Artificial Sequence: Synthetic oligonucleotide
aauagcccucaaucuuguc

SEQ ID NO: 2615013 - RNA, 19 nt, Artificial Sequence
  Description of Artificial Sequence: Synthetic oligonucleotide
uaaggcuccuccgacuccg

SEQ ID NO: 2615014 - RNA, 19 nt, Artificial Sequence
  Description of Artificial Sequence: Synthetic oligonucleotide
ucugcggcuugcuucaugu

SEQ ID NO: 2615015 - RNA, 19 nt, Artificial Sequence
  Description of Artificial Sequence: Synthetic oligonucleotide
caaugaagauugugguggg

SEQ ID NO: 2615016 - RNA, 19 nt, Artificial Sequence
  Description of Artificial Sequence: Synthetic oligonucleotide
ggaucgucauuuucuaagg

SEQ ID NO: 2615017 - RNA, 19 nt, Artificial Sequence
  Description of Artificial Sequence: Synthetic oligonucleotide
ugauucgccgucucauugc

SEQ ID NO: 2615018 - RNA, 19 nt, Artificial Sequence
  Description of Artificial Sequence: Synthetic oligonucleotide
caggcguaugucaggaucc

SEQ ID NO: 2615019 - RNA, 19 nt, Artificial Sequence
  Description of Artificial Sequence: Synthetic oligonucleotide
ucuccuucgaagagcuuca

SEQ ID NO: 2615020 - RNA, 19 nt, Artificial Sequence
  Description of Artificial Sequence: Synthetic oligonucleotide
aacagacggaccaacuucu

SEQ ID NO: 2615021 - RNA, 19 nt, Artificial Sequence
  Description of Artificial Sequence: Synthetic oligonucleotide
aagaugcgucccugcacac

SEQ ID NO: 2615022 - RNA, 19 nt, Artificial Sequence
  Description of Artificial Sequence: Synthetic oligonucleotide
ucagacguuccucuucgac

SEQ ID NO: 2615023 - RNA, 19 nt, Artificial Sequence
  Description of Artificial Sequence: Synthetic oligonucleotide
uucaaacaacagacggacc

SEQ ID NO: 2615024 - RNA, 19 nt, Artificial Sequence
  Description of Artificial Sequence: Synthetic oligonucleotide
ggaccaacuucucagauuc

SEQ ID NO: 2615025 - RNA, 19 nt, Artificial Sequence
  Description of Artificial Sequence: Synthetic oligonucleotide
acugcagauagaaucuauc

SEQ ID NO: 2615026 - RNA, 19 nt, Artificial Sequence
  Description of Artificial Sequence: Synthetic oligonucleotide
ugucgguagagggauguag

SEQ ID NO: 2615027 - RNA, 19 nt, Artificial Sequence
  Description of Artificial Sequence: Synthetic oligonucleotide
acucaggccgcugauucgc

SEQ ID NO: 2615028 - RNA, 19 nt, Artificial Sequence
  Description of Artificial Sequence: Synthetic oligonucleotide
gauucgccgucucauugcc

SEQ ID NO: 2615029 - RNA, 19 nt, Artificial Sequence
  Description of Artificial Sequence: Synthetic oligonucleotide
uagaaccuagccauuucaa

SEQ ID NO: 2615030 - RNA, 19 nt, Artificial Sequence
  Description of Artificial Sequence: Synthetic oligonucleotide
aagagcuggcagaaaucac

SEQ ID NO: 2615031 - RNA, 19 nt, Artificial Sequence
  Description of Artificial Sequence: Synthetic oligonucleotide
caacagacggaccaacuuc

SEQ ID NO: 2615032 - RNA, 19 nt, Artificial Sequence
  Description of Artificial Sequence: Synthetic oligonucleotide
ugcggcuugcuucauguuc

SEQ ID NO: 2615033 - RNA, 19 nt, Artificial Sequence
  Description of Artificial Sequence: Synthetic oligonucleotide
ucuucuggacucaggccgc

SEQ ID NO: 2615034 - RNA, 19 nt, Artificial Sequence
  Description of Artificial Sequence: Synthetic oligonucleotide
agaaccuagccauuucaaa

SEQ ID NO: 2615035 - RNA, 19 nt, Artificial Sequence
  Description of Artificial Sequence: Synthetic oligonucleotide
auccacuucucguacuucu

SEQ ID NO: 2615036 - RNA, 19 nt, Artificial Sequence
  Description of Artificial Sequence: Synthetic oligonucleotide
uaaggaauuucuucacauu

SEQ ID NO: 2615037 - RNA, 19 nt, Artificial Sequence
  Description of Artificial Sequence: Synthetic oligonucleotide
ucauguucgucagacguuc

SEQ ID NO: 2615038 - RNA, 19 nt, Artificial Sequence
  Description of Artificial Sequence: Synthetic oligonucleotide
cuagucuccuucgaagagc

SEQ ID NO: 2615039 - RNA, 19 nt, Artificial Sequence
  Description of Artificial Sequence: Synthetic oligonucleotide
ugacucugcggcuugcuuc

SEQ ID NO: 2615040 - RNA, 19 nt, Artificial Sequence
  Description of Artificial Sequence: Synthetic oligonucleotide
gauucgccucuguacuuag

SEQ ID NO: 2615041 - RNA, 19 nt, Artificial Sequence
  Description of Artificial Sequence: Synthetic oligonucleotide
caccaucuuggacggaucg

SEQ ID NO: 2615042 - RNA, 19 nt, Artificial Sequence
  Description of Artificial Sequence: Synthetic oligonucleotide
cuucucguacuucuccaag

SEQ ID NO: 2615043 - RNA, 19 nt, Artificial Sequence
  Description of Artificial Sequence: Synthetic oligonucleotide
ucaaugucccacgggaagu

SEQ ID NO: 2615044 - RNA, 19 nt, Artificial Sequence
  Description of Artificial Sequence: Synthetic oligonucleotide
agcuccaccuagcucagcu

SEQ ID NO: 2615045 - RNA, 19 nt, Artificial Sequence
  Description of Artificial Sequence: Synthetic oligonucleotide
ugccaucaaagaugcgucc

SEQ ID NO: 2615046 - RNA, 19 nt, Artificial Sequence
  Description of Artificial Sequence: Synthetic oligonucleotide
uucuucaacgccagcucaa

SEQ ID NO: 2615047 - RNA, 19 nt, Artificial Sequence
  Description of Artificial Sequence: Synthetic oligonucleotide
acaacagacggaccaacuu

SEQ ID NO: 2615048 - RNA, 19 nt, Artificial Sequence
  Description of Artificial Sequence: Synthetic oligonucleotide
ucgccucuguacuuagaag

SEQ ID NO: 2615049 - RNA, 19 nt, Artificial Sequence
  Description of Artificial Sequence: Synthetic oligonucleotide
cugauucgccgucucauug

SEQ ID NO: 2615050 - RNA, 19 nt, Artificial Sequence
  Description of Artificial Sequence: Synthetic oligonucleotide
aacaacagacggaccaacu

SEQ ID NO: 2615051 - RNA, 19 nt, Artificial Sequence
  Description of Artificial Sequence: Synthetic oligonucleotide
uucgccgucucauugccau

SEQ ID NO: 2615052 - RNA, 19 nt, Artificial Sequence
  Description of Artificial Sequence: Synthetic oligonucleotide
caaagaugcgucccugcac

SEQ ID NO: 2615053 - RNA, 19 nt, Artificial Sequence
  Description of Artificial Sequence: Synthetic oligonucleotide
gacucaggccgcugauucg

SEQ ID NO: 2615054 - RNA, 19 nt, Artificial Sequence
  Description of Artificial Sequence: Synthetic oligonucleotide
uuccucuucgacugcagau

SEQ ID NO: 2615055 - RNA, 19 nt, Artificial Sequence
  Description of Artificial Sequence: Synthetic oligonucleotide
ugucggcaccggaauagcc

SEQ ID NO: 2615056 - RNA, 19 nt, Artificial Sequence
  Description of Artificial Sequence: Synthetic oligonucleotide
acgggaaguuaguggcagc

SEQ ID NO: 2615057 - RNA, 19 nt, Artificial Sequence
  Description of Artificial Sequence: Synthetic oligonucleotide
cuucauguucgucagacgu

SEQ ID NO: 2615058 - RNA, 19 nt, Artificial Sequence
  Description of Artificial Sequence: Synthetic oligonucleotide
uucauguucgucagacguu

SEQ ID NO: 2615059 - RNA, 19 nt, Artificial Sequence
  Description of Artificial Sequence: Synthetic oligonucleotide
uucuaaggcuccuccgacu

SEQ ID NO: 2615060 - RNA, 19 nt, Artificial Sequence
  Description of Artificial Sequence: Synthetic oligonucleotide
ucucagauucgccucugua

SEQ ID NO: 2615061 - RNA, 19 nt, Artificial Sequence
  Description of Artificial Sequence: Synthetic oligonucleotide
auguccuccaggcguaugu

SEQ ID NO: 2615062 - RNA, 19 nt, Artificial Sequence
  Description of Artificial Sequence: Synthetic oligonucleotide
cucaaccauccacuucucg

SEQ ID NO: 2615063 - RNA, 19 nt, Artificial Sequence
  Description of Artificial Sequence: Synthetic oligonucleotide
gaaagagcuggcagaaauc

SEQ ID NO: 2615064 - RNA, 19 nt, Artificial Sequence
  Description of Artificial Sequence: Synthetic oligonucleotide
cauagaaccuagccauuuc

SEQ ID NO: 2615065 - RNA, 19 nt, Artificial Sequence
  Description of Artificial Sequence: Synthetic oligonucleotide
gcaauuuucuucaacgcca

SEQ ID NO: 2615066 - RNA, 19 nt, Artificial Sequence
  Description of Artificial Sequence: Synthetic oligonucleotide
uggacggaucgucauuuuc

SEQ ID NO: 2615067 - RNA, 19 nt, Artificial Sequence
  Description of Artificial Sequence: Synthetic oligonucleotide
ucggcaccggaauagcccu

SEQ ID NO: 2615068 - RNA, 19 nt, Artificial Sequence
  Description of Artificial Sequence: Synthetic oligonucleotide
ggaauagcccucaaucuug

SEQ ID NO: 2615069 - RNA, 19 nt, Artificial Sequence
  Description of Artificial Sequence: Synthetic oligonucleotide
ucaggccgcugauucgccg

SEQ ID NO: 2615070 - RNA, 19 nt, Artificial Sequence
  Description of Artificial Sequence: Synthetic oligonucleotide
cgcagauccaaacucaacc

SEQ ID NO: 2615071 - RNA, 19 nt, Artificial Sequence
  Description of Artificial Sequence: Synthetic oligonucleotide
aggauccagcuccaccuag

SEQ ID NO: 2615072 - RNA, 19 nt, Artificial Sequence
  Description of Artificial Sequence: Synthetic oligonucleotide
gacucugcggcuugcuuca

SEQ ID NO: 2615073 - RNA, 19 nt, Artificial Sequence
  Description of Artificial Sequence: Synthetic oligonucleotide
uaguuaugucggcaccgga

SEQ ID NO: 2615074 - RNA, 19 nt, Artificial Sequence
  Description of Artificial Sequence: Synthetic oligonucleotide
gucuccuucgaagagcuuc

SEQ ID NO: 2615075 - RNA, 19 nt, Artificial Sequence
  Description of Artificial Sequence: Synthetic oligonucleotide
cgucucauugccaucaaag

SEQ ID NO: 2615076 - RNA, 19 nt, Artificial Sequence
  Description of Artificial Sequence: Synthetic oligonucleotide
caacgccagcucaaagucc

SEQ ID NO: 2615077 - RNA, 19 nt, Artificial Sequence
  Description of Artificial Sequence: Synthetic oligonucleotide
cccacgggaaguuaguggc

SEQ ID NO: 2615078 - RNA, 19 nt, Artificial Sequence
  Description of Artificial Sequence: Synthetic oligonucleotide
agaaaucacgcagauccaa

SEQ ID NO: 2615079 - RNA, 19 nt, Artificial Sequence
  Description of Artificial Sequence: Synthetic oligonucleotide
auguucgucagacguuccu

SEQ ID NO: 2615080 - RNA, 19 nt, Artificial Sequence
  Description of Artificial Sequence: Synthetic oligonucleotide
ucugcggcagagacugacu

SEQ ID NO: 2615081 - RNA, 19 nt, Artificial Sequence
  Description of Artificial Sequence: Synthetic oligonucleotide
ucgguagagggauguagau

SEQ ID NO: 2615082 - RNA, 19 nt, Artificial Sequence
  Description of Artificial Sequence: Synthetic oligonucleotide
cuucaacgccagcucaaag

SEQ ID NO: 2615083 - RNA, 19 nt, Artificial Sequence
  Description of Artificial Sequence: Synthetic oligonucleotide
caaucuugucagcaauguc

SEQ ID NO: 2615084 - RNA, 19 nt, Artificial Sequence
  Description of Artificial Sequence: Synthetic oligonucleotide
uuaugucggcaccggaaua

SEQ ID NO: 2615085 - RNA, 19 nt, Artificial Sequence
  Description of Artificial Sequence: Synthetic oligonucleotide
ucgucagacguuccucuuc

SEQ ID NO: 2615086 - RNA, 19 nt, Artificial Sequence
  Description of Artificial Sequence: Synthetic oligonucleotide
ugcggcagagacugacuug

SEQ ID NO: 2615087 - RNA, 19 nt, Artificial Sequence
  Description of Artificial Sequence: Synthetic oligonucleotide
ugucccacgggaaguuagu

SEQ ID NO: 2615088 - RNA, 19 nt, Artificial Sequence
  Description of Artificial Sequence: Synthetic oligonucleotide
uguucgucagacguuccuc

SEQ ID NO: 2615089 - RNA, 19 nt, Artificial Sequence
  Description of Artificial Sequence: Synthetic oligonucleotide
uggcagaaaucacgcagau

SEQ ID NO: 2615090 - RNA, 19 nt, Artificial Sequence
  Description of Artificial Sequence: Synthetic oligonucleotide
augucggcaccggaauagc

SEQ ID NO: 2615091 - RNA, 19 nt, Artificial Sequence
  Description of Artificial Sequence: Synthetic oligonucleotide
accuagccauuucaaacaa

SEQ ID NO: 2615092 - RNA, 19 nt, Artificial Sequence
  Description of Artificial Sequence: Synthetic oligonucleotide
gaugcgucccugcacacgu

SEQ ID NO: 2615093 - RNA, 19 nt, Artificial Sequence
  Description of Artificial Sequence: Synthetic oligonucleotide
gaaaucacgcagauccaaa

SEQ ID NO: 2615094 - RNA, 19 nt, Artificial Sequence
  Description of Artificial Sequence: Synthetic oligonucleotide
aguuaugucggcaccggaa

SEQ ID NO: 2615095 - RNA, 19 nt, Artificial Sequence
  Description of Artificial Sequence: Synthetic oligonucleotide
uuuggacagggcccugauc

SEQ ID NO: 2615096 - RNA, 19 nt, Artificial Sequence
  Description of Artificial Sequence: Synthetic oligonucleotide
aucaccaucuuggacggau

SEQ ID NO: 2615097 - RNA, 19 nt, Artificial Sequence
  Description of Artificial Sequence: Synthetic oligonucleotide
uccuucgaagagcuucauc

SEQ ID NO: 2615098 - RNA, 19 nt, Artificial Sequence
  Description of Artificial Sequence: Synthetic oligonucleotide
cugcagauagaaucuaucu

SEQ ID NO: 2615099 - RNA, 19 nt, Artificial Sequence
  Description of Artificial Sequence: Synthetic oligonucleotide
cauguucgucagacguucc

SEQ ID NO: 2615100 - RNA, 19 nt, Artificial Sequence
  Description of Artificial Sequence: Synthetic oligonucleotide
ucuuggacggaucgucauu

SEQ ID NO: 2615101 - RNA, 19 nt, Artificial Sequence
  Description of Artificial Sequence: Synthetic oligonucleotide
cuggugacaggcaucugca

SEQ ID NO: 2615102 - RNA, 19 nt, Artificial Sequence
  Description of Artificial Sequence: Synthetic oligonucleotide
gcagauccaaacucaacca

SEQ ID NO: 2615103 - RNA, 19 nt, Artificial Sequence
  Description of Artificial Sequence: Synthetic oligonucleotide
gcggcagagacugacuugg

SEQ ID NO: 2615104 - RNA, 19 nt, Artificial Sequence
  Description of Artificial Sequence: Synthetic oligonucleotide
accacaaaugaaagagcug

SEQ ID NO: 2615105 - RNA, 19 nt, Artificial Sequence
  Description of Artificial Sequence: Synthetic oligonucleotide
cacgggaaguuaguggcag

SEQ ID NO: 2615106 - RNA, 19 nt, Artificial Sequence
  Description of Artificial Sequence: Synthetic oligonucleotide
aaguccccucuggugacag

SEQ ID NO: 2615107 - RNA, 19 nt, Artificial Sequence
  Description of Artificial Sequence: Synthetic oligonucleotide
gucggcaccggaauagccc

SEQ ID NO: 2615108 - RNA, 19 nt, Artificial Sequence
  Description of Artificial Sequence: Synthetic oligonucleotide
gacuugacucugcggcuug

SEQ ID NO: 2615109 - RNA, 19 nt, Artificial Sequence
  Description of Artificial Sequence: Synthetic oligonucleotide
agaugcgucccugcacacg

SEQ ID NO: 2615110 - RNA, 19 nt, Artificial Sequence
  Description of Artificial Sequence: Synthetic oligonucleotide
cggaucgucauuuucuaag

SEQ ID NO: 2615111 - RNA, 19 nt, Artificial Sequence
  Description of Artificial Sequence: Synthetic oligonucleotide
uccucuucgacugcagaua

SEQ ID NO: 2615112 - RNA, 19 nt, Artificial Sequence
  Description of Artificial Sequence: Synthetic oligonucleotide
gacggaccaacuucucaga

SEQ ID NO: 2615113 - RNA, 19 nt, Artificial Sequence
  Description of Artificial Sequence: Synthetic oligonucleotide
acuugacucugcggcuugc

SEQ ID NO: 2615114 - RNA, 19 nt, Artificial Sequence
  Description of Artificial Sequence: Synthetic oligonucleotide
uucucagauucgccucugu

SEQ ID NO: 2615115 - RNA, 19 nt, Artificial Sequence
  Description of Artificial Sequence: Synthetic oligonucleotide
uugcugucgguagagggau

SEQ ID NO: 2615116 - RNA, 19 nt, Artificial Sequence
  Description of Artificial Sequence: Synthetic oligonucleotide
gaaguuaguggcagccaga

SEQ ID NO: 2615117 - RNA, 19 nt, Artificial Sequence
  Description of Artificial Sequence: Synthetic oligonucleotide
caucaaagaugcgucccug

SEQ ID NO: 2615118 - RNA, 19 nt, Artificial Sequence
  Description of Artificial Sequence: Synthetic oligonucleotide
aucuuggacggaucgucau

SEQ ID NO: 2615119 - RNA, 19 nt, Artificial Sequence
  Description of Artificial Sequence: Synthetic oligonucleotide
ccaucaccaucuuggacgg

SEQ ID NO: 2615120 - RNA, 19 nt, Artificial Sequence
  Description of Artificial Sequence: Synthetic oligonucleotide
aauguccuccaggcguaug

SEQ ID NO: 2615121 - RNA, 19 nt, Artificial Sequence
  Description of Artificial Sequence: Synthetic oligonucleotide
cuaaggcuccuccgacucc

SEQ ID NO: 2615122 - RNA, 19 nt, Artificial Sequence
  Description of Artificial Sequence: Synthetic oligonucleotide
ucuuuggacagggcccuga

SEQ ID NO: 2615123 - RNA, 19 nt, Artificial Sequence
  Description of Artificial Sequence: Synthetic oligonucleotide
gacggaucgucauuuucua

SEQ ID NO: 2615124 - RNA, 19 nt, Artificial Sequence
  Description of Artificial Sequence: Synthetic oligonucleotide
gcagagacugacuuggcaa

SEQ ID NO: 2615125 - RNA, 19 nt, Artificial Sequence
  Description of Artificial Sequence: Synthetic oligonucleotide
ucuucaacgccagcucaaa

SEQ ID NO: 2615126 - RNA, 19 nt, Artificial Sequence
  Description of Artificial Sequence: Synthetic oligonucleotide
ucaccaucuuggacggauc

SEQ ID NO: 2615127 - RNA, 19 nt, Artificial Sequence
  Description of Artificial Sequence: Synthetic oligonucleotide
cagcaauguccuccaggcg

SEQ ID NO: 2615128 - RNA, 19 nt, Artificial Sequence
  Description of Artificial Sequence: Synthetic oligonucleotide
accaggagcucagacuuga

SEQ ID NO: 2615129 - RNA, 19 nt, Artificial Sequence
  Description of Artificial Sequence: Synthetic oligonucleotide
ccaagucugcggcagagac

SEQ ID NO: 2615130 - RNA, 19 nt, Artificial Sequence
  Description of Artificial Sequence: Synthetic oligonucleotide
acgcagauccaaacucaac

SEQ ID NO: 2615131 - RNA, 19 nt, Artificial Sequence
  Description of Artificial Sequence: Synthetic oligonucleotide
gaccaacuucucagauucg

SEQ ID NO: 2615132 - RNA, 19 nt, Artificial Sequence
  Description of Artificial Sequence: Synthetic oligonucleotide
ggacucaggccgcugauuc

SEQ ID NO: 2615133 - RNA, 19 nt, Artificial Sequence
  Description of Artificial Sequence: Synthetic oligonucleotide
augucccacgggaaguuag

SEQ ID NO: 2615134 - RNA, 19 nt, Artificial Sequence
  Description of Artificial Sequence: Synthetic oligonucleotide
uugacucugcggcuugcuu

SEQ ID NO: 2615135 - RNA, 19 nt, Artificial Sequence
  Description of Artificial Sequence: Synthetic oligonucleotide
cacuucucguacuucucca

SEQ ID NO: 2615136 - RNA, 19 nt, Artificial Sequence
  Description of Artificial Sequence: Synthetic oligonucleotide
caaccauccacuucucgua

SEQ ID NO: 2615137 - RNA, 19 nt, Artificial Sequence
  Description of Artificial Sequence: Synthetic oligonucleotide
guaugucaggauccagcuc

SEQ ID NO: 2615138 - RNA, 19 nt, Artificial Sequence
  Description of Artificial Sequence: Synthetic oligonucleotide
agacugacuuggcaauuuu

SEQ ID NO: 2615139 - RNA, 19 nt, Artificial Sequence
  Description of Artificial Sequence: Synthetic oligonucleotide
guuaugucggcaccggaau

SEQ ID NO: 2615140 - RNA, 19 nt, Artificial Sequence
  Description of Artificial Sequence: Synthetic oligonucleotide
acggaccaacuucucagau

SEQ ID NO: 2615141 - RNA, 19 nt, Artificial Sequence
  Description of Artificial Sequence: Synthetic oligonucleotide
caucuuggacggaucguca

SEQ ID NO: 2615142 - RNA, 19 nt, Artificial Sequence
  Description of Artificial Sequence: Synthetic oligonucleotide
gucgguagagggauguaga

SEQ ID NO: 2615143 - RNA, 19 nt, Artificial Sequence
  Description of Artificial Sequence: Synthetic oligonucleotide
ugcgucccugcacacguua

SEQ ID NO: 2615144 - RNA, 19 nt, Artificial Sequence
  Description of Artificial Sequence: Synthetic oligonucleotide
uccaccuagcucagcucuc

SEQ ID NO: 2615145 - RNA, 19 nt, Artificial Sequence
  Description of Artificial Sequence: Synthetic oligonucleotide
ucccugcacacguuaguua

SEQ ID NO: 2615146 - RNA, 19 nt, Artificial Sequence
  Description of Artificial Sequence: Synthetic oligonucleotide
gggcauagaaccuagccau

SEQ ID NO: 2615147 - RNA, 19 nt, Artificial Sequence
  Description of Artificial Sequence: Synthetic oligonucleotide
gacguuccucuucgacugc

SEQ ID NO: 2615148 - RNA, 19 nt, Artificial Sequence
  Description of Artificial Sequence: Synthetic oligonucleotide
cagaaaucacgcagaucca

SEQ ID NO: 2615149 - RNA, 19 nt, Artificial Sequence
  Description of Artificial Sequence: Synthetic oligonucleotide
ggcuccuccgacuccgucc

SEQ ID NO: 2615150 - RNA, 19 nt, Artificial Sequence
  Description of Artificial Sequence: Synthetic oligonucleotide
ccacuucucguacuucucc

SEQ ID NO: 2615151 - RNA, 19 nt, Artificial Sequence
  Description of Artificial Sequence: Synthetic oligonucleotide
ccucuucgacugcagauag

SEQ ID NO: 2615152 - RNA, 19 nt, Artificial Sequence
  Description of Artificial Sequence: Synthetic oligonucleotide
ucuugucagcaauguccuc

SEQ ID NO: 2615153 - RNA, 19 nt, Artificial Sequence
  Description of Artificial Sequence: Synthetic oligonucleotide
uccccucuggugacaggca

SEQ ID NO: 2615154 - RNA, 19 nt, Artificial Sequence
  Description of Artificial Sequence: Synthetic oligonucleotide
cagacguuccucuucgacu

SEQ ID NO: 2615155 - RNA, 19 nt, Artificial Sequence
  Description of Artificial Sequence: Synthetic oligonucleotide
aaugucccacgggaaguua

SEQ ID NO: 2615156 - RNA, 19 nt, Artificial Sequence
  Description of Artificial Sequence: Synthetic oligonucleotide
guucgucagacguuccucu

SEQ ID NO: 2615157 - RNA, 19 nt, Artificial Sequence
  Description of Artificial Sequence: Synthetic oligonucleotide
acggaucgucauuuucuaa

SEQ ID NO: 2615158 - RNA, 19 nt, Artificial Sequence
  Description of Artificial Sequence: Synthetic oligonucleotide
caucaaugucccacgggaa

SEQ ID NO: 2615159 - RNA, 19 nt, Artificial Sequence
  Description of Artificial Sequence: Synthetic oligonucleotide
cacguuaguuaugucggca

SEQ ID NO: 2615160 - RNA, 19 nt, Artificial Sequence
  Description of Artificial Sequence: Synthetic oligonucleotide
uucgucagacguuccucuu

SEQ ID NO: 2615161 - RNA, 19 nt, Artificial Sequence
  Description of Artificial Sequence: Synthetic oligonucleotide
gccaucaaagaugcguccc

SEQ ID NO: 2615162 - RNA, 19 nt, Artificial Sequence
  Description of Artificial Sequence: Synthetic oligonucleotide
cagcucaaaguccccucug

SEQ ID NO: 2615163 - RNA, 19 nt, Artificial Sequence
  Description of Artificial Sequence: Synthetic oligonucleotide
ugcacacguuaguuauguc

SEQ ID NO: 2615164 - RNA, 19 nt, Artificial Sequence
  Description of Artificial Sequence: Synthetic oligonucleotide
acagacggaccaacuucuc

SEQ ID NO: 2615165 - RNA, 19 nt, Artificial Sequence
  Description of Artificial Sequence: Synthetic oligonucleotide
agagggauguagauccuuu

SEQ ID NO: 2615166 - RNA, 19 nt, Artificial Sequence
  Description of Artificial Sequence: Synthetic oligonucleotide
gggcccugaucucuucugg

SEQ ID NO: 2615167 - RNA, 19 nt, Artificial Sequence
  Description of Artificial Sequence: Synthetic oligonucleotide
cucaggccgcugauucgcc

SEQ ID NO: 2615168 - RNA, 19 nt, Artificial Sequence
  Description of Artificial Sequence: Synthetic oligonucleotide
aggccgcugauucgccguc

SEQ ID NO: 2615169 - RNA, 19 nt, Artificial Sequence
  Description of Artificial Sequence: Synthetic oligonucleotide
ugcugucgguagagggaug

SEQ ID NO: 2615170 - RNA, 19 nt, Artificial Sequence
  Description of Artificial Sequence: Synthetic oligonucleotide
cgucagacguuccucuucg

SEQ ID NO: 2615171 - RNA, 19 nt, Artificial Sequence
  Description of Artificial Sequence: Synthetic oligonucleotide
agauucgccucuguacuua

SEQ ID NO: 2615172 - RNA, 19 nt, Artificial Sequence
  Description of Artificial Sequence: Synthetic oligonucleotide
aguccccucuggugacagg

SEQ ID NO: 2615173 - RNA, 19 nt, Artificial Sequence
  Description of Artificial Sequence: Synthetic oligonucleotide
ccaggcguaugucaggauc

SEQ ID NO: 2615174 - RNA, 19 nt, Artificial Sequence
  Description of Artificial Sequence: Synthetic oligonucleotide
uagagggauguagauccuu

SEQ ID NO: 2615175 - RNA, 19 nt, Artificial Sequence
  Description of Artificial Sequence: Synthetic oligonucleotide
acucaaccauccacuucuc

SEQ ID NO: 2615176 - RNA, 19 nt, Artificial Sequence
  Description of Artificial Sequence: Synthetic oligonucleotide
cacgcagauccaaacucaa

SEQ ID NO: 2615177 - RNA, 19 nt, Artificial Sequence
  Description of Artificial Sequence: Synthetic oligonucleotide
aggcuccuccgacuccguc

SEQ ID NO: 2615178 - RNA, 19 nt, Artificial Sequence
  Description of Artificial Sequence: Synthetic oligonucleotide
cagauagaaucuaucucau

SEQ ID NO: 2615179 - RNA, 19 nt, Artificial Sequence
  Description of Artificial Sequence: Synthetic oligonucleotide
uguccuccaggcguauguc

SEQ ID NO: 2615180 - RNA, 19 nt, Artificial Sequence
  Description of Artificial Sequence: Synthetic oligonucleotide
cguuaguuaugucggcacc

SEQ ID NO: 2615181 - RNA, 19 nt, Artificial Sequence
  Description of Artificial Sequence: Synthetic oligonucleotide
accuagcucagcucuccuu

SEQ ID NO: 2615182 - RNA, 19 nt, Artificial Sequence
  Description of Artificial Sequence: Synthetic oligonucleotide
gaauagcccucaaucuugu

SEQ ID NO: 2615183 - RNA, 19 nt, Artificial Sequence
  Description of Artificial Sequence: Synthetic oligonucleotide
agacuugacucugcggcuu

SEQ ID NO: 2615184 - RNA, 19 nt, Artificial Sequence
  Description of Artificial Sequence: Synthetic oligonucleotide
cuccaccuagcucagcucu

SEQ ID NO: 2615185 - RNA, 19 nt, Artificial Sequence
  Description of Artificial Sequence: Synthetic oligonucleotide
gcccugaucucuucuggac

SEQ ID NO: 2615186 - RNA, 19 nt, Artificial Sequence
  Description of Artificial Sequence: Synthetic oligonucleotide
ccuagccauuucaaacaac

SEQ ID NO: 2615187 - RNA, 19 nt, Artificial Sequence
  Description of Artificial Sequence: Synthetic oligonucleotide
ugacaggcaucugcagcuc

SEQ ID NO: 2615188 - RNA, 19 nt, Artificial Sequence
  Description of Artificial Sequence: Synthetic oligonucleotide
uccuccgacuccguccauc

SEQ ID NO: 2615189 - RNA, 19 nt, Artificial Sequence
  Description of Artificial Sequence: Synthetic oligonucleotide
acguuccucuucgacugca

SEQ ID NO: 2615190 - RNA, 19 nt, Artificial Sequence
  Description of Artificial Sequence: Synthetic oligonucleotide
cucugcggcuugcuucaug

SEQ ID NO: 2615191 - RNA, 19 nt, Artificial Sequence
  Description of Artificial Sequence: Synthetic oligonucleotide
uucuggacucaggccgcug

SEQ ID NO: 2615192 - RNA, 19 nt, Artificial Sequence
  Description of Artificial Sequence: Synthetic oligonucleotide
cucguacuucuccaagucu

SEQ ID NO: 2615193 - RNA, 19 nt, Artificial Sequence
  Description of Artificial Sequence: Synthetic oligonucleotide
augaaagagcuggcagaaa

SEQ ID NO: 2615194 - RNA, 19 nt, Artificial Sequence
  Description of Artificial Sequence: Synthetic oligonucleotide
cuccaggcguaugucagga

SEQ ID NO: 2615195 - RNA, 19 nt, Artificial Sequence
  Description of Artificial Sequence: Synthetic oligonucleotide
uccaggcguaugucaggau

SEQ ID NO: 2615196 - RNA, 19 nt, Artificial Sequence
  Description of Artificial Sequence: Synthetic oligonucleotide
aggcguaugucaggaucca

SEQ ID NO: 2615197 - RNA, 19 nt, Artificial Sequence
  Description of Artificial Sequence: Synthetic oligonucleotide
ggagcucagacuugacucu

SEQ ID NO: 2615198 - RNA, 19 nt, Artificial Sequence
  Description of Artificial Sequence: Synthetic oligonucleotide
ggacggaucgucauuuucu

SEQ ID NO: 2615199 - RNA, 19 nt, Artificial Sequence
  Description of Artificial Sequence: Synthetic oligonucleotide
acgccagcucaaagucccc

SEQ ID NO: 2615200 - RNA, 19 nt, Artificial Sequence
  Description of Artificial Sequence: Synthetic oligonucleotide
cucuucgacugcagauaga

SEQ ID NO: 2615201 - RNA, 19 nt, Artificial Sequence
  Description of Artificial Sequence: Synthetic oligonucleotide
gacugcagauagaaucuau

SEQ ID NO: 2615202 - RNA, 19 nt, Artificial Sequence
  Description of Artificial Sequence: Synthetic oligonucleotide
cugacuuggcaauuuucuu

SEQ ID NO: 2615203 - RNA, 19 nt, Artificial Sequence
  Description of Artificial Sequence: Synthetic oligonucleotide
cagacuugacucugcggcu

SEQ ID NO: 2615204 - RNA, 19 nt, Artificial Sequence
  Description of Artificial Sequence: Synthetic oligonucleotide
uggacucaggccgcugauu

SEQ ID NO: 2615205 - RNA, 19 nt, Artificial Sequence
  Description of Artificial Sequence: Synthetic oligonucleotide
gcuccuccgacuccgucca

SEQ ID NO: 2615206 - RNA, 19 nt, Artificial Sequence
  Description of Artificial Sequence: Synthetic oligonucleotide
cgggaaguuaguggcagcc

SEQ ID NO: 2615207 - RNA, 19 nt, Artificial Sequence
  Description of Artificial Sequence: Synthetic oligonucleotide
ccugcacacguuaguuaug

SEQ ID NO: 2615208 - RNA, 19 nt, Artificial Sequence
  Description of Artificial Sequence: Synthetic oligonucleotide
cuuggacggaucgucauuu

SEQ ID NO: 2615209 - RNA, 19 nt, Artificial Sequence
  Description of Artificial Sequence: Synthetic oligonucleotide
gucagacguuccucuucga

SEQ ID NO: 2615210 - RNA, 19 nt, Artificial Sequence
  Description of Artificial Sequence: Synthetic oligonucleotide
cugaucucuucuggacuca

SEQ ID NO: 2615211 - RNA, 19 nt, Artificial Sequence
  Description of Artificial Sequence: Synthetic oligonucleotide
ggcguaugucaggauccag

SEQ ID NO: 2615212 - RNA, 19 nt, Artificial Sequence
  Description of Artificial Sequence: Synthetic oligonucleotide
gccagcucaaaguccccuc

SEQ ID NO: 2615213 - RNA, 19 nt, Artificial Sequence
  Description of Artificial Sequence: Synthetic oligonucleotide
ucgccgucucauugccauc

SEQ ID NO: 2615214 - RNA, 19 nt, Artificial Sequence
  Description of Artificial Sequence: Synthetic oligonucleotide
auucgccucuguacuuaga

SEQ ID NO: 2615215 - RNA, 19 nt, Artificial Sequence
  Description of Artificial Sequence: Synthetic oligonucleotide
gggaaguuaguggcagcca

SEQ ID NO: 2615216 - RNA, 19 nt, Artificial Sequence
  Description of Artificial Sequence: Synthetic oligonucleotide
ggcagaaaucacgcagauc

SEQ ID NO: 2615217 - RNA, 19 nt, Artificial Sequence
  Description of Artificial Sequence: Synthetic oligonucleotide
ccaccuagcucagcucucc

SEQ ID NO: 2615218 - RNA, 19 nt, Artificial Sequence
  Description of Artificial Sequence: Synthetic oligonucleotide
cuccgacuccguccaucug

SEQ ID NO: 2615219 - RNA, 19 nt, Artificial Sequence
  Description of Artificial Sequence: Synthetic oligonucleotide
auucgccgucucauugcca

SEQ ID NO: 2615220 - RNA, 19 nt, Artificial Sequence
  Description of Artificial Sequence: Synthetic oligonucleotide
gcccucaaucuugucagca

SEQ ID NO: 2615221 - RNA, 19 nt, Artificial Sequence
  Description of Artificial Sequence: Synthetic oligonucleotide
aaggcuccuccgacuccgu

SEQ ID NO: 2615222 - RNA, 19 nt, Artificial Sequence
  Description of Artificial Sequence: Synthetic oligonucleotide
cguaugucaggauccagcu

SEQ ID NO: 2615223 - RNA, 19 nt, Artificial Sequence
  Description of Artificial Sequence: Synthetic oligonucleotide
ccggaauagcccucaaucu

SEQ ID NO: 2615224 - RNA, 19 nt, Artificial Sequence
  Description of Artificial Sequence: Synthetic oligonucleotide
cuucgacugcagauagaau

SEQ ID NO: 2615225 - RNA, 19 nt, Artificial Sequence
  Description of Artificial Sequence: Synthetic oligonucleotide
ggcaccggaauagcccuca

SEQ ID NO: 2615226 - RNA, 19 nt, Artificial Sequence
  Description of Artificial Sequence: Synthetic oligonucleotide
cucuuuggacagggcccug

SEQ ID NO: 2615227 - RNA, 19 nt, Artificial Sequence
  Description of Artificial Sequence: Synthetic oligonucleotide
ccguccaucuggaccagga

SEQ ID NO: 2615228 - RNA, 19 nt, Artificial Sequence
  Description of Artificial Sequence: Synthetic oligonucleotide
cuuuggacagggcccugau

SEQ ID NO: 2615229 - RNA, 19 nt, Artificial Sequence
  Description of Artificial Sequence: Synthetic oligonucleotide
caggauccagcuccaccua

SEQ ID NO: 2615230 - RNA, 19 nt, Artificial Sequence
  Description of Artificial Sequence: Synthetic oligonucleotide
cccucaaucuugucagcaa

SEQ ID NO: 2615231 - RNA, 19 nt, Artificial Sequence
  Description of Artificial Sequence: Synthetic oligonucleotide
guagagggauguagauccu

SEQ ID NO: 2615232 - RNA, 19 nt, Artificial Sequence
  Description of Artificial Sequence: Synthetic oligonucleotide
caggccgcugauucgccgu

SEQ ID NO: 2615233 - RNA, 19 nt, Artificial Sequence
  Description of Artificial Sequence: Synthetic oligonucleotide
gcugucgguagagggaugu

SEQ ID NO: 2615234 - RNA, 19 nt, Artificial Sequence
  Description of Artificial Sequence: Synthetic oligonucleotide
cucuggugacaggcaucug

SEQ ID NO: 2615235 - RNA, 19 nt, Artificial Sequence
  Description of Artificial Sequence: Synthetic oligonucleotide
gcgucccugcacacguuag

SEQ ID NO: 2615236 - RNA, 19 nt, Artificial Sequence
  Description of Artificial Sequence: Synthetic oligonucleotide
gucccugcacacguuaguu

SEQ ID NO: 2615237 - RNA, 19 nt, Artificial Sequence
  Description of Artificial Sequence: Synthetic oligonucleotide
cccugcacacguuaguuau

SEQ ID NO: 2615238 - RNA, 19 nt, Artificial Sequence
  Description of Artificial Sequence: Synthetic oligonucleotide
cuugacucugcggcuugcu

SEQ ID NO: 2615239 - RNA, 19 nt, Artificial Sequence
  Description of Artificial Sequence: Synthetic oligonucleotide
cgguagagggauguagauc

SEQ ID NO: 2615240 - RNA, 19 nt, Artificial Sequence
  Description of Artificial Sequence: Synthetic oligonucleotide
ccgacuccguccaucugga

SEQ ID NO: 2615241 - RNA, 19 nt, Artificial Sequence
  Description of Artificial Sequence: Synthetic oligonucleotide
cagauucgccucuguacuu

SEQ ID NO: 2615242 - RNA, 19 nt, Artificial Sequence
  Description of Artificial Sequence: Synthetic oligonucleotide
ccucaaucuugucagcaau

SEQ ID NO: 2615243 - RNA, 19 nt, Artificial Sequence
  Description of Artificial Sequence: Synthetic oligonucleotide
ccacgggaaguuaguggca

SEQ ID NO: 2615244 - RNA, 19 nt, Artificial Sequence
  Description of Artificial Sequence: Synthetic oligonucleotide
ccuagcucagcucuccuuu

SEQ ID NO: 2615245 - RNA, 19 nt, Artificial Sequence
  Description of Artificial Sequence: Synthetic oligonucleotide
gccgcugauucgccgucuc

SEQ ID NO: 2615246 - RNA, 19 nt, Artificial Sequence
  Description of Artificial Sequence: Synthetic oligonucleotide
ggacagggcccugaucucu

SEQ ID NO: 2615247 - RNA, 19 nt, Artificial Sequence
  Description of Artificial Sequence: Synthetic oligonucleotide
cccugaucucuucuggacu

SEQ ID NO: 2615248 - RNA, 19 nt, Artificial Sequence
  Description of Artificial Sequence: Synthetic oligonucleotide
caaugucccacgggaaguu

SEQ ID NO: 2615249 - RNA, 19 nt, Artificial Sequence
  Description of Artificial Sequence: Synthetic oligonucleotide
caccggaauagcccucaau

SEQ ID NO: 2615250 - RNA, 19 nt, Artificial Sequence
  Description of Artificial Sequence: Synthetic oligonucleotide
ccucuggugacaggcaucu

SEQ ID NO: 2615251 - RNA, 19 nt, Artificial Sequence
  Description of Artificial Sequence: Synthetic oligonucleotide
gcugauucgccgucucauu

SEQ ID NO: 2615252 - RNA, 19 nt, Artificial Sequence
  Description of Artificial Sequence: Synthetic oligonucleotide
cuggacucaggccgcugau

SEQ ID NO: 2615253 - RNA, 19 nt, Artificial Sequence
  Description of Artificial Sequence: Synthetic oligonucleotide
ccagcucaaaguccccucu

SEQ ID NO: 2615254 - RNA, 19 nt, Artificial Sequence
  Description of Artificial Sequence: Synthetic oligonucleotide
caccuagcucagcucuccu

SEQ ID NO: 2615255 - RNA, 19 nt, Artificial Sequence
  Description of Artificial Sequence: Synthetic oligonucleotide
agucuccuucgaagagcuu

SEQ ID NO: 2615256 - RNA, 19 nt, Artificial Sequence
  Description of Artificial Sequence: Synthetic oligonucleotide
ccuccgacuccguccaucu

SEQ ID NO: 2615257 - RNA, 19 nt, Artificial Sequence
  Description of Artificial Sequence: Synthetic oligonucleotide
cugucgguagagggaugua

SEQ ID NO: 2615258 - RNA, 19 nt, Artificial Sequence
  Description of Artificial Sequence: Synthetic oligonucleotide
agucugcggcagagacuga

SEQ ID NO: 2615259 - RNA, 19 nt, Artificial Sequence
  Description of Artificial Sequence: Synthetic oligonucleotide
caucaccaucuuggacgga

SEQ ID NO: 2615260 - RNA, 19 nt, Artificial Sequence
  Description of Artificial Sequence: Synthetic oligonucleotide
cggaauagcccucaaucuu

SEQ ID NO: 2615261 - RNA, 19 nt, Artificial Sequence
  Description of Artificial Sequence: Synthetic oligonucleotide
acucugcggcuugcuucau

SEQ ID NO: 2615262 - RNA, 19 nt, Artificial Sequence
  Description of Artificial Sequence: Synthetic oligonucleotide
cgccgucucauugccauca

SEQ ID NO: 2615263 - RNA, 19 nt, Artificial Sequence
  Description of Artificial Sequence: Synthetic oligonucleotide
gccgucucauugccaucaa

SEQ ID NO: 2615264 - RNA, 19 nt, Artificial Sequence
  Description of Artificial Sequence: Synthetic oligonucleotide
ccauccacuucucguacuu

SEQ ID NO: 2615265 - RNA, 19 nt, Artificial Sequence
  Description of Artificial Sequence: Synthetic oligonucleotide
ggcauagaaccuagccauu

SEQ ID NO: 2615266 - RNA, 19 nt, Artificial Sequence
  Description of Artificial Sequence: Synthetic oligonucleotide
augcgucccugcacacguu

SEQ ID NO: 2615267 - RNA, 19 nt, Artificial Sequence
  Description of Artificial Sequence: Synthetic oligonucleotide
gcaccggaauagcccucaa

SEQ ID NO: 2615268 - RNA, 19 nt, Artificial Sequence
  Description of Artificial Sequence: Synthetic oligonucleotide
ccgcugauucgccgucuca

SEQ ID NO: 2615269 - RNA, 19 nt, Artificial Sequence
  Description of Artificial Sequence: Synthetic oligonucleotide
cugcggcuugcuucauguu

SEQ ID NO: 2615270 - RNA, 19 nt, Artificial Sequence
  Description of Artificial Sequence: Synthetic oligonucleotide
cgacuccguccaucuggac

SEQ ID NO: 2615271 - RNA, 19 nt, Artificial Sequence
  Description of Artificial Sequence: Synthetic oligonucleotide
cuccuucgaagagcuucau

SEQ ID NO: 2615272 - RNA, 19 nt, Artificial Sequence
  Description of Artificial Sequence: Synthetic oligonucleotide
cggaccaacuucucagauu

SEQ ID NO: 2615273 - RNA, 19 nt, Artificial Sequence
  Description of Artificial Sequence: Synthetic oligonucleotide
cgacugcagauagaaucua

SEQ ID NO: 2615274 - RNA, 19 nt, Artificial Sequence
  Description of Artificial Sequence: Synthetic oligonucleotide
ccccucuggugacaggcau

SEQ ID NO: 2615275 - RNA, 19 nt, Artificial Sequence
  Description of Artificial Sequence: Synthetic oligonucleotide
cggcaccggaauagcccuc

SEQ ID NO: 2615276 - RNA, 19 nt, Artificial Sequence
  Description of Artificial Sequence: Synthetic oligonucleotide
cgucccugcacacguuagu

SEQ ID NO: 2615277 - RNA, 19 nt, Artificial Sequence
  Description of Artificial Sequence: Synthetic oligonucleotide
cgcugauucgccgucucau

SEQ ID NO: 2615278 - RNA, 19 nt, Artificial Sequence
  Description of Artificial Sequence: Synthetic oligonucleotide
ggccgcugauucgccgucu

SEQ ID NO: 2615279 - RNA, 19 nt, Artificial Sequence
  Description of Artificial Sequence: Synthetic oligonucleotide
cuccuccgacuccguccau

SEQ ID NO: 2615280 - RNA, 19 nt, Artificial Sequence
  Description of Artificial Sequence: Synthetic oligonucleotide
uguuuuauuagucaacugg

SEQ ID NO: 2615281 - RNA, 19 nt, Artificial Sequence
  Description of Artificial Sequence: Synthetic oligonucleotide
aauuuaauccucuuccucg

SEQ ID NO: 2615282 - RNA, 19 nt, Artificial Sequence
  Description of Artificial Sequence: Synthetic oligonucleotide
aaguccucaaucuucaggc

SEQ ID NO: 2615283 - RNA, 19 nt, Artificial Sequence
  Description of Artificial Sequence: Synthetic oligonucleotide
aaaucaauguguuucuggg

SEQ ID NO: 2615284 - RNA, 19 nt, Artificial Sequence
  Description of Artificial Sequence: Synthetic oligonucleotide
auugccuucgaaaagacgc

SEQ ID NO: 2615285 - RNA, 19 nt, Artificial Sequence
  Description of Artificial Sequence: Synthetic oligonucleotide
aacaagucgccucagcagg

SEQ ID NO: 2615286 - RNA, 19 nt, Artificial Sequence
  Description of Artificial Sequence: Synthetic oligonucleotide
aaugcgaacaagucgccuc

SEQ ID NO: 2615287 - RNA, 19 nt, Artificial Sequence
  Description of Artificial Sequence: Synthetic oligonucleotide
gaaaucaauguguuucugg

SEQ ID NO: 2615288 - RNA, 19 nt, Artificial Sequence
  Description of Artificial Sequence: Synthetic oligonucleotide
augguggcgacucagggcc

SEQ ID NO: 2615289 - RNA, 19 nt, Artificial Sequence
  Description of Artificial Sequence: Synthetic oligonucleotide
aagaccugggucugcagcc

SEQ ID NO: 2615290 - RNA, 19 nt, Artificial Sequence
  Description of Artificial Sequence: Synthetic oligonucleotide
ucaacuggaaaucuagaca

SEQ ID NO: 2615291 - RNA, 19 nt, Artificial Sequence
  Description of Artificial Sequence: Synthetic oligonucleotide
auguaauccagcuucaucu

SEQ ID NO: 2615292 - RNA, 19 nt, Artificial Sequence
  Description of Artificial Sequence: Synthetic oligonucleotide
uuauuagucaacuggaaau

SEQ ID NO: 2615293 - RNA, 19 nt, Artificial Sequence
  Description of Artificial Sequence: Synthetic oligonucleotide
aaucuagacaauucuccag

SEQ ID NO: 2615294 - RNA, 19 nt, Artificial Sequence
  Description of Artificial Sequence: Synthetic oligonucleotide
aucaauguguuucugggag

SEQ ID NO: 2615295 - RNA, 19 nt, Artificial Sequence
  Description of Artificial Sequence: Synthetic oligonucleotide
uucgaaaagacgccguggg

SEQ ID NO: 2615296 - RNA, 19 nt, Artificial Sequence
  Description of Artificial Sequence: Synthetic oligonucleotide
gaaaucuagacaauucucc

SEQ ID NO: 2615297 - RNA, 19 nt, Artificial Sequence
  Description of Artificial Sequence: Synthetic oligonucleotide
uagguuuugcgacaaaccc

SEQ ID NO: 2615298 - RNA, 19 nt, Artificial Sequence
  Description of Artificial Sequence: Synthetic oligonucleotide
aaaucuagacaauucucca

SEQ ID NO: 2615299 - RNA, 19 nt, Artificial Sequence
  Description of Artificial Sequence: Synthetic oligonucleotide
uuuauuagucaacuggaaa

SEQ ID NO: 2615300 - RNA, 19 nt, Artificial Sequence
  Description of Artificial Sequence: Synthetic oligonucleotide
ggaggcauuaauuuaaucc

SEQ ID NO: 2615301 - RNA, 19 nt, Artificial Sequence
  Description of Artificial Sequence: Synthetic oligonucleotide
uagacaauucuccagucca

SEQ ID NO: 2615302 - RNA, 19 nt, Artificial Sequence
  Description of Artificial Sequence: Synthetic oligonucleotide
uggaaaucuagacaauucu

SEQ ID NO: 2615303 - RNA, 19 nt, Artificial Sequence
  Description of Artificial Sequence: Synthetic oligonucleotide
aacuugacccuccacaccu

SEQ ID NO: 2615304 - RNA, 19 nt, Artificial Sequence
  Description of Artificial Sequence: Synthetic oligonucleotide
uagucaacuggaaaucuag

SEQ ID NO: 2615305 - RNA, 19 nt, Artificial Sequence
  Description of Artificial Sequence: Synthetic oligonucleotide
aaacccaacuucuggcaac

SEQ ID NO: 2615306 - RNA, 19 nt, Artificial Sequence
  Description of Artificial Sequence: Synthetic oligonucleotide
aauccagcuucaucuugcc

SEQ ID NO: 2615307 - RNA, 19 nt, Artificial Sequence
  Description of Artificial Sequence: Synthetic oligonucleotide
gugaauucuguuuuauuag

SEQ ID NO: 2615308 - RNA, 19 nt, Artificial Sequence
  Description of Artificial Sequence: Synthetic oligonucleotide
cuggcaaccggcauggugg

SEQ ID NO: 2615309 - RNA, 19 nt, Artificial Sequence
  Description of Artificial Sequence: Synthetic oligonucleotide
auagguuuugcgacaaacc

SEQ ID NO: 2615310 - RNA, 19 nt, Artificial Sequence
  Description of Artificial Sequence: Synthetic oligonucleotide
agcuuaaagaccugggucu

SEQ ID NO: 2615311 - RNA, 19 nt, Artificial Sequence
  Description of Artificial Sequence: Synthetic oligonucleotide
ucuguuuuauuagucaacu

SEQ ID NO: 2615312 - RNA, 19 nt, Artificial Sequence
  Description of Artificial Sequence: Synthetic oligonucleotide
uaauuuaauccucuuccuc

SEQ ID NO: 2615313 - RNA, 19 nt, Artificial Sequence
  Description of Artificial Sequence: Synthetic oligonucleotide
gacaaacccaacuucuggc

SEQ ID NO: 2615314 - RNA, 19 nt, Artificial Sequence
  Description of Artificial Sequence: Synthetic oligonucleotide
aaggacgggauguucacca

SEQ ID NO: 2615315 - RNA, 19 nt, Artificial Sequence
  Description of Artificial Sequence: Synthetic oligonucleotide
guaaacuugacccuccaca

SEQ ID NO: 2615316 - RNA, 19 nt, Artificial Sequence
  Description of Artificial Sequence: Synthetic oligonucleotide
gaaaagacgccgugggucc

SEQ ID NO: 2615317 - RNA, 19 nt, Artificial Sequence
  Description of Artificial Sequence: Synthetic oligonucleotide
uuuuauuagucaacuggaa

SEQ ID NO: 2615318 - RNA, 19 nt, Artificial Sequence
  Description of Artificial Sequence: Synthetic oligonucleotide
uuugcgacaaacccaacuu

SEQ ID NO: 2615319 - RNA, 19 nt, Artificial Sequence
  Description of Artificial Sequence: Synthetic oligonucleotide
ucguccagcaccccaaugc

SEQ ID NO: 2615320 - RNA, 19 nt, Artificial Sequence
  Description of Artificial Sequence: Synthetic oligonucleotide
aaucaauguguuucuggga

SEQ ID NO: 2615321 - RNA, 19 nt, Artificial Sequence
  Description of Artificial Sequence: Synthetic oligonucleotide
gaacaagucgccucagcag

SEQ ID NO: 2615322 - RNA, 19 nt, Artificial Sequence
  Description of Artificial Sequence: Synthetic oligonucleotide
aucuagacaauucuccagu

SEQ ID NO: 2615323 - RNA, 19 nt, Artificial Sequence
  Description of Artificial Sequence: Synthetic oligonucleotide
ucuucacgcggccugggcg

SEQ ID NO: 2615324 - RNA, 19 nt, Artificial Sequence
  Description of Artificial Sequence: Synthetic oligonucleotide
acaauucuccaguccaggg

SEQ ID NO: 2615325 - RNA, 19 nt, Artificial Sequence
  Description of Artificial Sequence: Synthetic oligonucleotide
uuggcauucuuccucuuca

SEQ ID NO: 2615326 - RNA, 19 nt, Artificial Sequence
  Description of Artificial Sequence: Synthetic oligonucleotide
guaaggagaacggagggag

SEQ ID NO: 2615327 - RNA, 19 nt, Artificial Sequence
  Description of Artificial Sequence: Synthetic oligonucleotide
aaugaaggacgggauguuc

SEQ ID NO: 2615328 - RNA, 19 nt, Artificial Sequence
  Description of Artificial Sequence: Synthetic oligonucleotide
gugacauagguuuugcgac

SEQ ID NO: 2615329 - RNA, 19 nt, Artificial Sequence
  Description of Artificial Sequence: Synthetic oligonucleotide
ugcgacaaacccaacuucu

SEQ ID NO: 2615330 - RNA, 19 nt, Artificial Sequence
  Description of Artificial Sequence: Synthetic oligonucleotide
gauggacuuggccaggccc

SEQ ID NO: 2615331 - RNA, 19 nt, Artificial Sequence
  Description of Artificial Sequence: Synthetic oligonucleotide
aacccaacuucuggcaacc

SEQ ID NO: 2615332 - RNA, 19 nt, Artificial Sequence
  Description of Artificial Sequence: Synthetic oligonucleotide
uucuguuuuauuagucaac

SEQ ID NO: 2615333 - RNA, 19 nt, Artificial Sequence
  Description of Artificial Sequence: Synthetic oligonucleotide
uuuucguccagggucagca

SEQ ID NO: 2615334 - RNA, 19 nt, Artificial Sequence
  Description of Artificial Sequence: Synthetic oligonucleotide
gaggcauuaauuuaauccu

SEQ ID NO: 2615335 - RNA, 19 nt, Artificial Sequence
  Description of Artificial Sequence: Synthetic oligonucleotide
gccaggguaaacuugaccc

SEQ ID NO: 2615336 - RNA, 19 nt, Artificial Sequence
  Description of Artificial Sequence: Synthetic oligonucleotide
gucaacuggaaaucuagac

SEQ ID NO: 2615337 - RNA, 19 nt, Artificial Sequence
  Description of Artificial Sequence: Synthetic oligonucleotide
aucgagacgcgacuucucg

SEQ ID NO: 2615338 - RNA, 19 nt, Artificial Sequence
  Description of Artificial Sequence: Synthetic oligonucleotide
uauuagucaacuggaaauc

SEQ ID NO: 2615339 - RNA, 19 nt, Artificial Sequence
  Description of Artificial Sequence: Synthetic oligonucleotide
caacuggaaaucuagacaa

SEQ ID NO: 2615340 - RNA, 19 nt, Artificial Sequence
  Description of Artificial Sequence: Synthetic oligonucleotide
ggagaaaucaauguguuuc

SEQ ID NO: 2615341 - RNA, 19 nt, Artificial Sequence
  Description of Artificial Sequence: Synthetic oligonucleotide
cuagacaauucuccagucc

SEQ ID NO: 2615342 - RNA, 19 nt, Artificial Sequence
  Description of Artificial Sequence: Synthetic oligonucleotide
uccaccaccguaaggagaa

SEQ ID NO: 2615343 - RNA, 19 nt, Artificial Sequence
  Description of Artificial Sequence: Synthetic oligonucleotide
auuuaauccucuuccucgu

SEQ ID NO: 2615344 - RNA, 19 nt, Artificial Sequence
  Description of Artificial Sequence: Synthetic oligonucleotide
cuggaaaucuagacaauuc

SEQ ID NO: 2615345 - RNA, 19 nt, Artificial Sequence
  Description of Artificial Sequence: Synthetic oligonucleotide
agacgcgacuucucgaagg

SEQ ID NO: 2615346 - RNA, 19 nt, Artificial Sequence
  Description of Artificial Sequence: Synthetic oligonucleotide
guauucuccuaucagcuuc

SEQ ID NO: 2615347 - RNA, 19 nt, Artificial Sequence
  Description of Artificial Sequence: Synthetic oligonucleotide
gacaauucuccaguccagg

SEQ ID NO: 2615348 - RNA, 19 nt, Artificial Sequence
  Description of Artificial Sequence: Synthetic oligonucleotide
uccuuuucguccaggguca

SEQ ID NO: 2615349 - RNA, 19 nt, Artificial Sequence
  Description of Artificial Sequence: Synthetic oligonucleotide
agaacggagggagaaauca

SEQ ID NO: 2615350 - RNA, 19 nt, Artificial Sequence
  Description of Artificial Sequence: Synthetic oligonucleotide
gacgcgacuucucgaaggg

SEQ ID NO: 2615351 - RNA, 19 nt, Artificial Sequence
  Description of Artificial Sequence: Synthetic oligonucleotide
ucuggcaaccggcauggug

SEQ ID NO: 2615352 - RNA, 19 nt, Artificial Sequence
  Description of Artificial Sequence: Synthetic oligonucleotide
cuugcccucguccagcacc

SEQ ID NO: 2615353 - RNA, 19 nt, Artificial Sequence
  Description of Artificial Sequence: Synthetic oligonucleotide
cacaccucgcgcuuguucc

SEQ ID NO: 2615354 - RNA, 19 nt, Artificial Sequence
  Description of Artificial Sequence: Synthetic oligonucleotide
cauagguuuugcgacaaac

SEQ ID NO: 2615355 - RNA, 19 nt, Artificial Sequence
  Description of Artificial Sequence: Synthetic oligonucleotide
uuagucaacuggaaaucua

SEQ ID NO: 2615356 - RNA, 19 nt, Artificial Sequence
  Description of Artificial Sequence: Synthetic oligonucleotide
uugccuucgaaaagacgcc

SEQ ID NO: 2615357 - RNA, 19 nt, Artificial Sequence
  Description of Artificial Sequence: Synthetic oligonucleotide
acaaacccaacuucuggca

SEQ ID NO: 2615358 - RNA, 19 nt, Artificial Sequence
  Description of Artificial Sequence: Synthetic oligonucleotide
acuucuggcaaccggcaug

SEQ ID NO: 2615359 - RNA, 19 nt, Artificial Sequence
  Description of Artificial Sequence: Synthetic oligonucleotide
cagcuuaaagaccuggguc

SEQ ID NO: 2615360 - RNA, 19 nt, Artificial Sequence
  Description of Artificial Sequence: Synthetic oligonucleotide
uccagggaggcauuaauuu

SEQ ID NO: 2615361 - RNA, 19 nt, Artificial Sequence
  Description of Artificial Sequence: Synthetic oligonucleotide
caccguaaggagaacggag

SEQ ID NO: 2615362 - RNA, 19 nt, Artificial Sequence
  Description of Artificial Sequence: Synthetic oligonucleotide
cuugcggacccugaugugg

SEQ ID NO: 2615363 - RNA, 19 nt, Artificial Sequence
  Description of Artificial Sequence: Synthetic oligonucleotide
uucguccagggucagcagc

SEQ ID NO: 2615364 - RNA, 19 nt, Artificial Sequence
  Description of Artificial Sequence: Synthetic oligonucleotide
auuagucaacuggaaaucu

SEQ ID NO: 2615365 - RNA, 19 nt, Artificial Sequence
  Description of Artificial Sequence: Synthetic oligonucleotide
uuaaagaccugggucugca

SEQ ID NO: 2615366 - RNA, 19 nt, Artificial Sequence
  Description of Artificial Sequence: Synthetic oligonucleotide
aggcggacaaugaaggacg

SEQ ID NO: 2615367 - RNA, 19 nt, Artificial Sequence
  Description of Artificial Sequence: Synthetic oligonucleotide
accguaaggagaacggagg

SEQ ID NO: 2615368 - RNA, 19 nt, Artificial Sequence
  Description of Artificial Sequence: Synthetic oligonucleotide
uccagcaccccaaugcgaa

SEQ ID NO: 2615369 - RNA, 19 nt, Artificial Sequence
  Description of Artificial Sequence: Synthetic oligonucleotide
ucuagacaauucuccaguc

SEQ ID NO: 2615370 - RNA, 19 nt, Artificial Sequence
  Description of Artificial Sequence: Synthetic oligonucleotide
guaauccagcuucaucuug

SEQ ID NO: 2615371 - RNA, 19 nt, Artificial Sequence
  Description of Artificial Sequence: Synthetic oligonucleotide
cuucgaaaagacgccgugg

SEQ ID NO: 2615372 - RNA, 19 nt, Artificial Sequence
  Description of Artificial Sequence: Synthetic oligonucleotide
cuucuggcaaccggcaugg

SEQ ID NO: 2615373 - RNA, 19 nt, Artificial Sequence
  Description of Artificial Sequence: Synthetic oligonucleotide
caugguggcgacucagggc

SEQ ID NO: 2615374 - RNA, 19 nt, Artificial Sequence
  Description of Artificial Sequence: Synthetic oligonucleotide
ucaauguguuucugggagu

SEQ ID NO: 2615375 - RNA, 19 nt, Artificial Sequence
  Description of Artificial Sequence: Synthetic oligonucleotide
uguuccggagcccguauuc

SEQ ID NO: 2615376 - RNA, 19 nt, Artificial Sequence
  Description of Artificial Sequence: Synthetic oligonucleotide
cuguuuuauuagucaacug

SEQ ID NO: 2615377 - RNA, 19 nt, Artificial Sequence
  Description of Artificial Sequence: Synthetic oligonucleotide
aggcauuaauuuaauccuc

SEQ ID NO: 2615378 - RNA, 19 nt, Artificial Sequence
  Description of Artificial Sequence: Synthetic oligonucleotide
aaggagaacggagggagaa

SEQ ID NO: 2615379 - RNA, 19 nt, Artificial Sequence
  Description of Artificial Sequence: Synthetic oligonucleotide
uugcgacaaacccaacuuc

SEQ ID NO: 2615380 - RNA, 19 nt, Artificial Sequence
  Description of Artificial Sequence: Synthetic oligonucleotide
ugccuucgaaaagacgccg

SEQ ID NO: 2615381 - RNA, 19 nt, Artificial Sequence
  Description of Artificial Sequence: Synthetic oligonucleotide
gguggauggacuuggccag

SEQ ID NO: 2615382 - RNA, 19 nt, Artificial Sequence
  Description of Artificial Sequence: Synthetic oligonucleotide
uccguggggugacauaggu

SEQ ID NO: 2615383 - RNA, 19 nt, Artificial Sequence
  Description of Artificial Sequence: Synthetic oligonucleotide
uguaauccagcuucaucuu

SEQ ID NO: 2615384 - RNA, 19 nt, Artificial Sequence
  Description of Artificial Sequence: Synthetic oligonucleotide
ucgcgcuuguuccggagcc

SEQ ID NO: 2615385 - RNA, 19 nt, Artificial Sequence
  Description of Artificial Sequence: Synthetic oligonucleotide
accaccguaaggagaacgg

SEQ ID NO: 2615386 - RNA, 19 nt, Artificial Sequence
  Description of Artificial Sequence: Synthetic oligonucleotide
aggguaaacuugacccucc

SEQ ID NO: 2615387 - RNA, 19 nt, Artificial Sequence
  Description of Artificial Sequence: Synthetic oligonucleotide
ucggaacucacgccggcga

SEQ ID NO: 2615388 - RNA, 19 nt, Artificial Sequence
  Description of Artificial Sequence: Synthetic oligonucleotide
ugggaguccaggcggacaa

SEQ ID NO: 2615389 - RNA, 19 nt, Artificial Sequence
  Description of Artificial Sequence: Synthetic oligonucleotide
uugcggacccugauguggc

SEQ ID NO: 2615390 - RNA, 19 nt, Artificial Sequence
  Description of Artificial Sequence: Synthetic oligonucleotide
ucgaaaagacgccgugggu

SEQ ID NO: 2615391 - RNA, 19 nt, Artificial Sequence
  Description of Artificial Sequence: Synthetic oligonucleotide
uaaagaccugggucugcag

SEQ ID NO: 2615392 - RNA, 19 nt, Artificial Sequence
  Description of Artificial Sequence: Synthetic oligonucleotide
uccugaucgagacgcgacu

SEQ ID NO: 2615393 - RNA, 19 nt, Artificial Sequence
  Description of Artificial Sequence: Synthetic oligonucleotide
ugggcguccaccaccguaa

SEQ ID NO: 2615394 - RNA, 19 nt, Artificial Sequence
  Description of Artificial Sequence: Synthetic oligonucleotide
ugaucgagacgcgacuucu

SEQ ID NO: 2615395 - RNA, 19 nt, Artificial Sequence
  Description of Artificial Sequence: Synthetic oligonucleotide
aagugugaauucuguuuua

SEQ ID NO: 2615396 - RNA, 19 nt, Artificial Sequence
  Description of Artificial Sequence: Synthetic oligonucleotide
acucgggcgugguggaugg

SEQ ID NO: 2615397 - RNA, 19 nt, Artificial Sequence
  Description of Artificial Sequence: Synthetic oligonucleotide
aacggagggagaaaucaau

SEQ ID NO: 2615398 - RNA, 19 nt, Artificial Sequence
  Description of Artificial Sequence: Synthetic oligonucleotide
acuggaaaucuagacaauu

SEQ ID NO: 2615399 - RNA, 19 nt, Artificial Sequence
  Description of Artificial Sequence: Synthetic oligonucleotide
augcgaacaagucgccuca

SEQ ID NO: 2615400 - RNA, 19 nt, Artificial Sequence
  Description of Artificial Sequence: Synthetic oligonucleotide
acgccguggguccuuuucg

SEQ ID NO: 2615401 - RNA, 19 nt, Artificial Sequence
  Description of Artificial Sequence: Synthetic oligonucleotide
gagggagaaaucaaugugu

SEQ ID NO: 2615402 - RNA, 19 nt, Artificial Sequence
  Description of Artificial Sequence: Synthetic oligonucleotide
ucgaagggccuccgugggg

SEQ ID NO: 2615403 - RNA, 19 nt, Artificial Sequence
  Description of Artificial Sequence: Synthetic oligonucleotide
uugcccucguccagcaccc

SEQ ID NO: 2615404 - RNA, 19 nt, Artificial Sequence
  Description of Artificial Sequence: Synthetic oligonucleotide
ggcauucuuccucuucacg

SEQ ID NO: 2615405 - RNA, 19 nt, Artificial Sequence
  Description of Artificial Sequence: Synthetic oligonucleotide
aacuucuggcaaccggcau

SEQ ID NO: 2615406 - RNA, 19 nt, Artificial Sequence
  Description of Artificial Sequence: Synthetic oligonucleotide
cucgucaucaccagcucca

SEQ ID NO: 2615407 - RNA, 19 nt, Artificial Sequence
  Description of Artificial Sequence: Synthetic oligonucleotide
ggaaaucuagacaauucuc

SEQ ID NO: 2615408 - RNA, 19 nt, Artificial Sequence
  Description of Artificial Sequence: Synthetic oligonucleotide
cccguauucuccuaucagc

SEQ ID NO: 2615409 - RNA, 19 nt, Artificial Sequence
  Description of Artificial Sequence: Synthetic oligonucleotide
agguuuugcgacaaaccca

SEQ ID NO: 2615410 - RNA, 19 nt, Artificial Sequence
  Description of Artificial Sequence: Synthetic oligonucleotide
caggcggacaaugaaggac

SEQ ID NO: 2615411 - RNA, 19 nt, Artificial Sequence
  Description of Artificial Sequence: Synthetic oligonucleotide
agugugaauucuguuuuau

SEQ ID NO: 2615412 - RNA, 19 nt, Artificial Sequence
  Description of Artificial Sequence: Synthetic oligonucleotide
cagggaggcauuaauuuaa

SEQ ID NO: 2615413 - RNA, 19 nt, Artificial Sequence
  Description of Artificial Sequence: Synthetic oligonucleotide
accccaaugcgaacaaguc

SEQ ID NO: 2615414 - RNA, 19 nt, Artificial Sequence
  Description of Artificial Sequence: Synthetic oligonucleotide
gagacgcgacuucucgaag

SEQ ID NO: 2615415 - RNA, 19 nt, Artificial Sequence
  Description of Artificial Sequence: Synthetic oligonucleotide
accggcaugguggcgacuc

SEQ ID NO: 2615416 - RNA, 19 nt, Artificial Sequence
  Description of Artificial Sequence: Synthetic oligonucleotide
cuccugaucgagacgcgac

SEQ ID NO: 2615417 - RNA, 19 nt, Artificial Sequence
  Description of Artificial Sequence: Synthetic oligonucleotide
uuucguccagggucagcag

SEQ ID NO: 2615418 - RNA, 19 nt, Artificial Sequence
  Description of Artificial Sequence: Synthetic oligonucleotide
cuuaaagaccugggucugc

SEQ ID NO: 2615419 - RNA, 19 nt, Artificial Sequence
  Description of Artificial Sequence: Synthetic oligonucleotide
agacaauucuccaguccag

SEQ ID NO: 2615420 - RNA, 19 nt, Artificial Sequence
  Description of Artificial Sequence: Synthetic oligonucleotide
caggcccagcuuaaagacc

SEQ ID NO: 2615421 - RNA, 19 nt, Artificial Sequence
  Description of Artificial Sequence: Synthetic oligonucleotide
acaccucgcgcuuguuccg

SEQ ID NO: 2615422 - RNA, 19 nt, Artificial Sequence
  Description of Artificial Sequence: Synthetic oligonucleotide
caccaccguaaggagaacg

SEQ ID NO: 2615423 - RNA, 19 nt, Artificial Sequence
  Description of Artificial Sequence: Synthetic oligonucleotide
aggcccagcuuaaagaccu

SEQ ID NO: 2615424 - RNA, 19 nt, Artificial Sequence
  Description of Artificial Sequence: Synthetic oligonucleotide
ucgagacgcgacuucucga

SEQ ID NO: 2615425 - RNA, 19 nt, Artificial Sequence
  Description of Artificial Sequence: Synthetic oligonucleotide
aguccaggcggacaaugaa

SEQ ID NO: 2615426 - RNA, 19 nt, Artificial Sequence
  Description of Artificial Sequence: Synthetic oligonucleotide
uggggugacauagguuuug

SEQ ID NO: 2615427 - RNA, 19 nt, Artificial Sequence
  Description of Artificial Sequence: Synthetic oligonucleotide
guccaggcggacaaugaag

SEQ ID NO: 2615428 - RNA, 19 nt, Artificial Sequence
  Description of Artificial Sequence: Synthetic oligonucleotide
acggagggagaaaucaaug

SEQ ID NO: 2615429 - RNA, 19 nt, Artificial Sequence
  Description of Artificial Sequence: Synthetic oligonucleotide
uucugggaguccaggcgga

SEQ ID NO: 2615430 - RNA, 19 nt, Artificial Sequence
  Description of Artificial Sequence: Synthetic oligonucleotide
agcccguauucuccuauca

SEQ ID NO: 2615431 - RNA, 19 nt, Artificial Sequence
  Description of Artificial Sequence: Synthetic oligonucleotide
cuggcggaugagcacucgg

SEQ ID NO: 2615432 - RNA, 19 nt, Artificial Sequence
  Description of Artificial Sequence: Synthetic oligonucleotide
ugagcacucgggcguggug

SEQ ID NO: 2615433 - RNA, 19 nt, Artificial Sequence
  Description of Artificial Sequence: Synthetic oligonucleotide
gcaugguggcgacucaggg

SEQ ID NO: 2615434 - RNA, 19 nt, Artificial Sequence
  Description of Artificial Sequence: Synthetic oligonucleotide
ccccaaugcgaacaagucg

SEQ ID NO: 2615435 - RNA, 19 nt, Artificial Sequence
  Description of Artificial Sequence: Synthetic oligonucleotide
acaagucgccucagcaggg

SEQ ID NO: 2615436 - RNA, 19 nt, Artificial Sequence
  Description of Artificial Sequence: Synthetic oligonucleotide
gguuuugcgacaaacccaa

SEQ ID NO: 2615437 - RNA, 19 nt, Artificial Sequence
  Description of Artificial Sequence: Synthetic oligonucleotide
uggcauucuuccucuucac

SEQ ID NO: 2615438 - RNA, 19 nt, Artificial Sequence
  Description of Artificial Sequence: Synthetic oligonucleotide
gcggaugagcacucgggcg

SEQ ID NO: 2615439 - RNA, 19 nt, Artificial Sequence
  Description of Artificial Sequence: Synthetic oligonucleotide
agucaacuggaaaucuaga

SEQ ID NO: 2615440 - RNA, 19 nt, Artificial Sequence
  Description of Artificial Sequence: Synthetic oligonucleotide
cagggcauugccuucgaaa

SEQ ID NO: 2615441 - RNA, 19 nt, Artificial Sequence
  Description of Artificial Sequence: Synthetic oligonucleotide
caggguaaacuugacccuc

SEQ ID NO: 2615442 - RNA, 19 nt, Artificial Sequence
  Description of Artificial Sequence: Synthetic oligonucleotide
gacuucucgaagggccucc

SEQ ID NO: 2615443 - RNA, 19 nt, Artificial Sequence
  Description of Artificial Sequence: Synthetic oligonucleotide
ucccgggcggccuugcgga

SEQ ID NO: 2615444 - RNA, 19 nt, Artificial Sequence
  Description of Artificial Sequence: Synthetic oligonucleotide
gggugacauagguuuugcg

SEQ ID NO: 2615445 - RNA, 19 nt, Artificial Sequence
  Description of Artificial Sequence: Synthetic oligonucleotide
ugcggacccugauguggcg

SEQ ID NO: 2615446 - RNA, 19 nt, Artificial Sequence
  Description of Artificial Sequence: Synthetic oligonucleotide
gacgccguggguccuuuuc

SEQ ID NO: 2615447 - RNA, 19 nt, Artificial Sequence
  Description of Artificial Sequence: Synthetic oligonucleotide
aacuggaaaucuagacaau

SEQ ID NO: 2615448 - RNA, 19 nt, Artificial Sequence
  Description of Artificial Sequence: Synthetic oligonucleotide
ggcauugccuucgaaaaga

SEQ ID NO: 2615449 - RNA, 19 nt, Artificial Sequence
  Description of Artificial Sequence: Synthetic oligonucleotide
ggccuugcggaucuuggcc

SEQ ID NO: 2615450 - RNA, 19 nt, Artificial Sequence
  Description of Artificial Sequence: Synthetic oligonucleotide
uggauggacuuggccaggc

SEQ ID NO: 2615451 - RNA, 19 nt, Artificial Sequence
  Description of Artificial Sequence: Synthetic oligonucleotide
ucaggcccaggauguaauc

SEQ ID NO: 2615452 - RNA, 19 nt, Artificial Sequence
  Description of Artificial Sequence: Synthetic oligonucleotide
caagugugaauucuguuuu

SEQ ID NO: 2615453 - RNA, 19 nt, Artificial Sequence
  Description of Artificial Sequence: Synthetic oligonucleotide
cccagcuuaaagaccuggg

SEQ ID NO: 2615454 - RNA, 19 nt, Artificial Sequence
  Description of Artificial Sequence: Synthetic oligonucleotide
agggagaaaucaauguguu

SEQ ID NO: 2615455 - RNA, 19 nt, Artificial Sequence
  Description of Artificial Sequence: Synthetic oligonucleotide
gacccuccacaccucgcgc

SEQ ID NO: 2615456 - RNA, 19 nt, Artificial Sequence
  Description of Artificial Sequence: Synthetic oligonucleotide
cugaucgagacgcgacuuc

SEQ ID NO: 2615457 - RNA, 19 nt, Artificial Sequence
  Description of Artificial Sequence: Synthetic oligonucleotide
aaaagacgccguggguccu

SEQ ID NO: 2615458 - RNA, 19 nt, Artificial Sequence
  Description of Artificial Sequence: Synthetic oligonucleotide
agaccugggucugcagccg

SEQ ID NO: 2615459 - RNA, 19 nt, Artificial Sequence
  Description of Artificial Sequence: Synthetic oligonucleotide
uggcaaccggcaugguggc

SEQ ID NO: 2615460 - RNA, 19 nt, Artificial Sequence
  Description of Artificial Sequence: Synthetic oligonucleotide
ccguaaggagaacggaggg

SEQ ID NO: 2615461 - RNA, 19 nt, Artificial Sequence
  Description of Artificial Sequence: Synthetic oligonucleotide
uuccggagcccguauucuc

SEQ ID NO: 2615462 - RNA, 19 nt, Artificial Sequence
  Description of Artificial Sequence: Synthetic oligonucleotide
cgacaaacccaacuucugg

SEQ ID NO: 2615463 - RNA, 19 nt, Artificial Sequence
  Description of Artificial Sequence: Synthetic oligonucleotide
gaugagcacucgggcgugg

SEQ ID NO: 2615464 - RNA, 19 nt, Artificial Sequence
  Description of Artificial Sequence: Synthetic oligonucleotide
ucgucaucaccagcuccag

SEQ ID NO: 2615465 - RNA, 19 nt, Artificial Sequence
  Description of Artificial Sequence: Synthetic oligonucleotide
acgcgacuucucgaagggc

SEQ ID NO: 2615466 - RNA, 19 nt, Artificial Sequence
  Description of Artificial Sequence: Synthetic oligonucleotide
acuucucgaagggccuccg

SEQ ID NO: 2615467 - RNA, 19 nt, Artificial Sequence
  Description of Artificial Sequence: Synthetic oligonucleotide
caaacccaacuucuggcaa

SEQ ID NO: 2615468 - RNA, 19 nt, Artificial Sequence
  Description of Artificial Sequence: Synthetic oligonucleotide
cccaacuucuggcaaccgg

SEQ ID NO: 2615469 - RNA, 19 nt, Artificial Sequence
  Description of Artificial Sequence: Synthetic oligonucleotide
cucggaacucacgccggcg

SEQ ID NO: 2615470 - RNA, 19 nt, Artificial Sequence
  Description of Artificial Sequence: Synthetic oligonucleotide
ggacgggauguucaccacc

SEQ ID NO: 2615471 - RNA, 19 nt, Artificial Sequence
  Description of Artificial Sequence: Synthetic oligonucleotide
cgcgacuucucgaagggcc

SEQ ID NO: 2615472 - RNA, 19 nt, Artificial Sequence
  Description of Artificial Sequence: Synthetic oligonucleotide
cugcuugcggacccugaug

SEQ ID NO: 2615473 - RNA, 19 nt, Artificial Sequence
  Description of Artificial Sequence: Synthetic oligonucleotide
ggccaggguaaacuugacc

SEQ ID NO: 2615474 - RNA, 19 nt, Artificial Sequence
  Description of Artificial Sequence: Synthetic oligonucleotide
cuccguggggugacauagg

SEQ ID NO: 2615475 - RNA, 19 nt, Artificial Sequence
  Description of Artificial Sequence: Synthetic oligonucleotide
cucuucacgcggccugggc

SEQ ID NO: 2615476 - RNA, 19 nt, Artificial Sequence
  Description of Artificial Sequence: Synthetic oligonucleotide
ugcagccgccucuccagga

SEQ ID NO: 2615477 - RNA, 19 nt, Artificial Sequence
  Description of Artificial Sequence: Synthetic oligonucleotide
ugcgaacaagucgccucag

SEQ ID NO: 2615478 - RNA, 19 nt, Artificial Sequence
  Description of Artificial Sequence: Synthetic oligonucleotide
cucccgggcggccuugcgg

SEQ ID NO: 2615479 - RNA, 19 nt, Artificial Sequence
  Description of Artificial Sequence: Synthetic oligonucleotide
gaacggagggagaaaucaa

SEQ ID NO: 2615480 - RNA, 19 nt, Artificial Sequence
  Description of Artificial Sequence: Synthetic oligonucleotide
gauguggcgcuggcggaug

SEQ ID NO: 2615481 - RNA, 19 nt, Artificial Sequence
  Description of Artificial Sequence: Synthetic oligonucleotide
acccuccacaccucgcgcu

SEQ ID NO: 2615482 - RNA, 19 nt, Artificial Sequence
  Description of Artificial Sequence: Synthetic oligonucleotide
ucgggcgugguggauggac

SEQ ID NO: 2615483 - RNA, 19 nt, Artificial Sequence
  Description of Artificial Sequence: Synthetic oligonucleotide
aggauguaauccagcuuca

SEQ ID NO: 2615484 - RNA, 19 nt, Artificial Sequence
  Description of Artificial Sequence: Synthetic oligonucleotide
gcccguauucuccuaucag

SEQ ID NO: 2615485 - RNA, 19 nt, Artificial Sequence
  Description of Artificial Sequence: Synthetic oligonucleotide
agcaccccaaugcgaacaa

SEQ ID NO: 2615486 - RNA, 19 nt, Artificial Sequence
  Description of Artificial Sequence: Synthetic oligonucleotide
ccguggguccuuuucgucc

SEQ ID NO: 2615487 - RNA, 19 nt, Artificial Sequence
  Description of Artificial Sequence: Synthetic oligonucleotide
caagucgccucagcagggc

SEQ ID NO: 2615488 - RNA, 19 nt, Artificial Sequence
  Description of Artificial Sequence: Synthetic oligonucleotide
gacgggauguucaccaccu

SEQ ID NO: 2615489 - RNA, 19 nt, Artificial Sequence
  Description of Artificial Sequence: Synthetic oligonucleotide
gcguccaccaccguaagga

SEQ ID NO: 2615490 - RNA, 19 nt, Artificial Sequence
  Description of Artificial Sequence: Synthetic oligonucleotide
cuuuucguccagggucagc

SEQ ID NO: 2615491 - RNA, 19 nt, Artificial Sequence
  Description of Artificial Sequence: Synthetic oligonucleotide
gagcccguauucuccuauc

SEQ ID NO: 2615492 - RNA, 19 nt, Artificial Sequence
  Description of Artificial Sequence: Synthetic oligonucleotide
agcacucgggcguggugga

SEQ ID NO: 2615493 - RNA, 19 nt, Artificial Sequence
  Description of Artificial Sequence: Synthetic oligonucleotide
ugauguggcgcuggcggau

SEQ ID NO: 2615494 - RNA, 19 nt, Artificial Sequence
  Description of Artificial Sequence: Synthetic oligonucleotide
uuguuccggagcccguauu

SEQ ID NO: 2615495 - RNA, 19 nt, Artificial Sequence
  Description of Artificial Sequence: Synthetic oligonucleotide
caccccaaugcgaacaagu

SEQ ID NO: 2615496 - RNA, 19 nt, Artificial Sequence
  Description of Artificial Sequence: Synthetic oligonucleotide
agcaccacccuggcccuuc

SEQ ID NO: 2615497 - RNA, 19 nt, Artificial Sequence
  Description of Artificial Sequence: Synthetic oligonucleotide
gaguccaggcggacaauga

SEQ ID NO: 2615498 - RNA, 19 nt, Artificial Sequence
  Description of Artificial Sequence: Synthetic oligonucleotide
uggccaggguaaacuugac

SEQ ID NO: 2615499 - RNA, 19 nt, Artificial Sequence
  Description of Artificial Sequence: Synthetic oligonucleotide
ccuucgaaaagacgccgug

SEQ ID NO: 2615500 - RNA, 19 nt, Artificial Sequence
  Description of Artificial Sequence: Synthetic oligonucleotide
auucuccuaucagcuucag

SEQ ID NO: 2615501 - RNA, 19 nt, Artificial Sequence
  Description of Artificial Sequence: Synthetic oligonucleotide
cuucagcuccugaucgaga

SEQ ID NO: 2615502 - RNA, 19 nt, Artificial Sequence
  Description of Artificial Sequence: Synthetic oligonucleotide
gaucgagacgcgacuucuc

SEQ ID NO: 2615503 - RNA, 19 nt, Artificial Sequence
  Description of Artificial Sequence: Synthetic oligonucleotide
cuaucagcuucagcuccug

SEQ ID NO: 2615504 - RNA, 19 nt, Artificial Sequence
  Description of Artificial Sequence: Synthetic oligonucleotide
uguggcgcuggcggaugag

SEQ ID NO: 2615505 - RNA, 19 nt, Artificial Sequence
  Description of Artificial Sequence: Synthetic oligonucleotide
gaagggccuccguggggug

SEQ ID NO: 2615506 - RNA, 19 nt, Artificial Sequence
  Description of Artificial Sequence: Synthetic oligonucleotide
ggccaggcccagcuuaaag

SEQ ID NO: 2615507 - RNA, 19 nt, Artificial Sequence
  Description of Artificial Sequence: Synthetic oligonucleotide
gccucagcagggcauugcc

SEQ ID NO: 2615508 - RNA, 19 nt, Artificial Sequence
  Description of Artificial Sequence: Synthetic oligonucleotide
ccaaugcgaacaagucgcc

SEQ ID NO: 2615509 - RNA, 19 nt, Artificial Sequence
  Description of Artificial Sequence: Synthetic oligonucleotide
cgaaaagacgccguggguc

SEQ ID NO: 2615510 - RNA, 19 nt, Artificial Sequence
  Description of Artificial Sequence: Synthetic oligonucleotide
ggcauuaauuuaauccucu

SEQ ID NO: 2615511 - RNA, 19 nt, Artificial Sequence
  Description of Artificial Sequence: Synthetic oligonucleotide
cucguccagcaccccaaug

SEQ ID NO: 2615512 - RNA, 19 nt, Artificial Sequence
  Description of Artificial Sequence: Synthetic oligonucleotide
ucuugcccucguccagcac

SEQ ID NO: 2615513 - RNA, 19 nt, Artificial Sequence
  Description of Artificial Sequence: Synthetic oligonucleotide
gggaggcauuaauuuaauc

SEQ ID NO: 2615514 - RNA, 19 nt, Artificial Sequence
  Description of Artificial Sequence: Synthetic oligonucleotide
acgggauguucaccaccug

SEQ ID NO: 2615515 - RNA, 19 nt, Artificial Sequence
  Description of Artificial Sequence: Synthetic oligonucleotide
ggaguccaggcggacaaug

SEQ ID NO: 2615516 - RNA, 19 nt, Artificial Sequence
  Description of Artificial Sequence: Synthetic oligonucleotide
agggccuccguggggugac

SEQ ID NO: 2615517 - RNA, 19 nt, Artificial Sequence
  Description of Artificial Sequence: Synthetic oligonucleotide
ggcaugguggcgacucagg

SEQ ID NO: 2615518 - RNA, 19 nt, Artificial Sequence
  Description of Artificial Sequence: Synthetic oligonucleotide
ugguggcgacucagggccc

SEQ ID NO: 2615519 - RNA, 19 nt, Artificial Sequence
  Description of Artificial Sequence: Synthetic oligonucleotide
gcgugguggauggacuugg

SEQ ID NO: 2615520 - RNA, 19 nt, Artificial Sequence
  Description of Artificial Sequence: Synthetic oligonucleotide
acccaacuucuggcaaccg

SEQ ID NO: 2615521 - RNA, 19 nt, Artificial Sequence
  Description of Artificial Sequence: Synthetic oligonucleotide
gcccagcuuaaagaccugg

SEQ ID NO: 2615522 - RNA, 19 nt, Artificial Sequence
  Description of Artificial Sequence: Synthetic oligonucleotide
cgggauguucaccaccugc

SEQ ID NO: 2615523 - RNA, 19 nt, Artificial Sequence
  Description of Artificial Sequence: Synthetic oligonucleotide
cacucgggcgugguggaug

SEQ ID NO: 2615524 - RNA, 19 nt, Artificial Sequence
  Description of Artificial Sequence: Synthetic oligonucleotide
cugauguggcgcuggcgga

SEQ ID NO: 2615525 - RNA, 19 nt, Artificial Sequence
  Description of Artificial Sequence: Synthetic oligonucleotide
aaagacgccguggguccuu

SEQ ID NO: 2615526 - RNA, 19 nt, Artificial Sequence
  Description of Artificial Sequence: Synthetic oligonucleotide
caaccggcaugguggcgac

SEQ ID NO: 2615527 - RNA, 19 nt, Artificial Sequence
  Description of Artificial Sequence: Synthetic oligonucleotide
ggcggacaaugaaggacgg

SEQ ID NO: 2615528 - RNA, 19 nt, Artificial Sequence
  Description of Artificial Sequence: Synthetic oligonucleotide
caccucgcgcuuguuccgg

SEQ ID NO: 2615529 - RNA, 19 nt, Artificial Sequence
  Description of Artificial Sequence: Synthetic oligonucleotide
ggcguccaccaccguaagg

SEQ ID NO: 2615530 - RNA, 19 nt, Artificial Sequence
  Description of Artificial Sequence: Synthetic oligonucleotide
gcgaacaagucgccucagc

SEQ ID NO: 2615531 - RNA, 19 nt, Artificial Sequence
  Description of Artificial Sequence: Synthetic oligonucleotide
gcgacaaacccaacuucug

SEQ ID NO: 2615532 - RNA, 19 nt, Artificial Sequence
  Description of Artificial Sequence: Synthetic oligonucleotide
cgaacaagucgccucagca

SEQ ID NO: 2615533 - RNA, 19 nt, Artificial Sequence
  Description of Artificial Sequence: Synthetic oligonucleotide
agggaggcauuaauuuaau

SEQ ID NO: 2615534 - RNA, 19 nt, Artificial Sequence
  Description of Artificial Sequence: Synthetic oligonucleotide
ggggugacauagguuuugc

SEQ ID NO: 2615535 - RNA, 19 nt, Artificial Sequence
  Description of Artificial Sequence: Synthetic oligonucleotide
agcagggcauugccuucga

SEQ ID NO: 2615536 - RNA, 19 nt, Artificial Sequence
  Description of Artificial Sequence: Synthetic oligonucleotide
gacucagggcccgccgcgc

SEQ ID NO: 2615537 - RNA, 19 nt, Artificial Sequence
  Description of Artificial Sequence: Synthetic oligonucleotide
cgccucggaacucacgccg

SEQ ID NO: 2615538 - RNA, 19 nt, Artificial Sequence
  Description of Artificial Sequence: Synthetic oligonucleotide
guccaccaccguaaggaga

SEQ ID NO: 2615539 - RNA, 19 nt, Artificial Sequence
  Description of Artificial Sequence: Synthetic oligonucleotide
ggccugggcguccaccacc

SEQ ID NO: 2615540 - RNA, 19 nt, Artificial Sequence
  Description of Artificial Sequence: Synthetic oligonucleotide
cagcaccccaaugcgaaca

SEQ ID NO: 2615541 - RNA, 19 nt, Artificial Sequence
  Description of Artificial Sequence: Synthetic oligonucleotide
cgcgccucggaacucacgc

SEQ ID NO: 2615542 - RNA, 19 nt, Artificial Sequence
  Description of Artificial Sequence: Synthetic oligonucleotide
gcaaccggcaugguggcga

SEQ ID NO: 2615543 - RNA, 19 nt, Artificial Sequence
  Description of Artificial Sequence: Synthetic oligonucleotide
gcgcuuguuccggagcccg

SEQ ID NO: 2615544 - RNA, 19 nt, Artificial Sequence
  Description of Artificial Sequence: Synthetic oligonucleotide
ccuugcggaucuuggccag

SEQ ID NO: 2615545 - RNA, 19 nt, Artificial Sequence
  Description of Artificial Sequence: Synthetic oligonucleotide
gguggcgacucagggcccg

SEQ ID NO: 2615546 - RNA, 19 nt, Artificial Sequence
  Description of Artificial Sequence: Synthetic oligonucleotide
cuucacgcggccugggcgu

SEQ ID NO: 2615547 - RNA, 19 nt, Artificial Sequence
  Description of Artificial Sequence: Synthetic oligonucleotide
gcauugccuucgaaaagac

SEQ ID NO: 2615548 - RNA, 19 nt, Artificial Sequence
  Description of Artificial Sequence: Synthetic oligonucleotide
ggguaaacuugacccucca

SEQ ID NO: 2615549 - RNA, 19 nt, Artificial Sequence
  Description of Artificial Sequence: Synthetic oligonucleotide
ccguauucuccuaucagcu

SEQ ID NO: 2615550 - RNA, 19 nt, Artificial Sequence
  Description of Artificial Sequence: Synthetic oligonucleotide
cuucaggcccaggauguaa

SEQ ID NO: 2615551 - RNA, 19 nt, Artificial Sequence
  Description of Artificial Sequence: Synthetic oligonucleotide
cggacaaugaaggacggga

SEQ ID NO: 2615552 - RNA, 19 nt, Artificial Sequence
  Description of Artificial Sequence: Synthetic oligonucleotide
augagcacucgggcguggu

SEQ ID NO: 2615553 - RNA, 19 nt, Artificial Sequence
  Description of Artificial Sequence: Synthetic oligonucleotide
agucgccucagcagggcau

SEQ ID NO: 2615554 - RNA, 19 nt, Artificial Sequence
  Description of Artificial Sequence: Synthetic oligonucleotide
guuuugcgacaaacccaac

SEQ ID NO: 2615555 - RNA, 19 nt, Artificial Sequence
  Description of Artificial Sequence: Synthetic oligonucleotide
gcggacaaugaaggacggg

SEQ ID NO: 2615556 - RNA, 19 nt, Artificial Sequence
  Description of Artificial Sequence: Synthetic oligonucleotide
aacucacgccggcgacaaa

SEQ ID NO: 2615557 - RNA, 19 nt, Artificial Sequence
  Description of Artificial Sequence: Synthetic oligonucleotide
accucgcgcuuguuccgga

SEQ ID NO: 2615558 - RNA, 19 nt, Artificial Sequence
  Description of Artificial Sequence: Synthetic oligonucleotide
gcggaucuuggccagggua

SEQ ID NO: 2615559 - RNA, 19 nt, Artificial Sequence
  Description of Artificial Sequence: Synthetic oligonucleotide
ccagggaggcauuaauuua

SEQ ID NO: 2615560 - RNA, 19 nt, Artificial Sequence
  Description of Artificial Sequence: Synthetic oligonucleotide
cugggcguccaccaccgua

SEQ ID NO: 2615561 - RNA, 19 nt, Artificial Sequence
  Description of Artificial Sequence: Synthetic oligonucleotide
guccagcaccccaaugcga

SEQ ID NO: 2615562 - RNA, 19 nt, Artificial Sequence
  Description of Artificial Sequence: Synthetic oligonucleotide
uggcgacucagggcccgcc

SEQ ID NO: 2615563 - RNA, 19 nt, Artificial Sequence
  Description of Artificial Sequence: Synthetic oligonucleotide
aagacgccguggguccuuu

SEQ ID NO: 2615564 - RNA, 19 nt, Artificial Sequence
  Description of Artificial Sequence: Synthetic oligonucleotide
gcuugcggacccugaugug

SEQ ID NO: 2615565 - RNA, 19 nt, Artificial Sequence
  Description of Artificial Sequence: Synthetic oligonucleotide
gcgacucagggcccgccgc

SEQ ID NO: 2615566 - RNA, 19 nt, Artificial Sequence
  Description of Artificial Sequence: Synthetic oligonucleotide
cguggggugacauagguuu

SEQ ID NO: 2615567 - RNA, 19 nt, Artificial Sequence
  Description of Artificial Sequence: Synthetic oligonucleotide
agccgccucuccaggaagu

SEQ ID NO: 2615568 - RNA, 19 nt, Artificial Sequence
  Description of Artificial Sequence: Synthetic oligonucleotide
gcauuaauuuaauccucuu

SEQ ID NO: 2615569 - RNA, 19 nt, Artificial Sequence
  Description of Artificial Sequence: Synthetic oligonucleotide
gccucggaacucacgccgg

SEQ ID NO: 2615570 - RNA, 19 nt, Artificial Sequence
  Description of Artificial Sequence: Synthetic oligonucleotide
ggcgugguggauggacuug

SEQ ID NO: 2615571 - RNA, 19 nt, Artificial Sequence
  Description of Artificial Sequence: Synthetic oligonucleotide
ggaacucacgccggcgaca

SEQ ID NO: 2615572 - RNA, 19 nt, Artificial Sequence
  Description of Artificial Sequence: Synthetic oligonucleotide
gguccuuuucguccagggu

SEQ ID NO: 2615573 - RNA, 19 nt, Artificial Sequence
  Description of Artificial Sequence: Synthetic oligonucleotide
ccagcuuaaagaccugggu

SEQ ID NO: 2615574 - RNA, 19 nt, Artificial Sequence
  Description of Artificial Sequence: Synthetic oligonucleotide
ccacaccucgcgcuuguuc

SEQ ID NO: 2615575 - RNA, 19 nt, Artificial Sequence
  Description of Artificial Sequence: Synthetic oligonucleotide
ccucggaacucacgccggc

SEQ ID NO: 2615576 - RNA, 19 nt, Artificial Sequence
  Description of Artificial Sequence: Synthetic oligonucleotide
gcgccucggaacucacgcc

SEQ ID NO: 2615577 - RNA, 19 nt, Artificial Sequence
  Description of Artificial Sequence: Synthetic oligonucleotide
caaugcgaacaagucgccu

SEQ ID NO: 2615578 - RNA, 19 nt, Artificial Sequence
  Description of Artificial Sequence: Synthetic oligonucleotide
aaccggcaugguggcgacu

SEQ ID NO: 2615579 - RNA, 19 nt, Artificial Sequence
  Description of Artificial Sequence: Synthetic oligonucleotide
ucacgcggccugggcgucc

SEQ ID NO: 2615580 - RNA, 19 nt, Artificial Sequence
  Description of Artificial Sequence: Synthetic oligonucleotide
uucacgcggccugggcguc

SEQ ID NO: 2615581 - RNA, 19 nt, Artificial Sequence
  Description of Artificial Sequence: Synthetic oligonucleotide
cggaucuuggccaggguaa

SEQ ID NO: 2615582 - RNA, 19 nt, Artificial Sequence
  Description of Artificial Sequence: Synthetic oligonucleotide
gggcguccaccaccguaag

SEQ ID NO: 2615583 - RNA, 19 nt, Artificial Sequence
  Description of Artificial Sequence: Synthetic oligonucleotide
gggagaaaucaauguguuu

SEQ ID NO: 2615584 - RNA, 19 nt, Artificial Sequence
  Description of Artificial Sequence: Synthetic oligonucleotide
gccguggguccuuuucguc

SEQ ID NO: 2615585 - RNA, 19 nt, Artificial Sequence
  Description of Artificial Sequence: Synthetic oligonucleotide
ggaucuuggccaggguaaa

SEQ ID NO: 2615586 - RNA, 19 nt, Artificial Sequence
  Description of Artificial Sequence: Synthetic oligonucleotide
cuuguuccggagcccguau

SEQ ID NO: 2615587 - RNA, 19 nt, Artificial Sequence
  Description of Artificial Sequence: Synthetic oligonucleotide
gcggacccugauguggcgc

SEQ ID NO: 2615588 - RNA, 19 nt, Artificial Sequence
  Description of Artificial Sequence: Synthetic oligonucleotide
gcuccugaucgagacgcga

SEQ ID NO: 2615589 - RNA, 19 nt, Artificial Sequence
  Description of Artificial Sequence: Synthetic oligonucleotide
ccagcaccccaaugcgaac

SEQ ID NO: 2615590 - RNA, 19 nt, Artificial Sequence
  Description of Artificial Sequence: Synthetic oligonucleotide
ggacaaugaaggacgggau

SEQ ID NO: 2615591 - RNA, 19 nt, Artificial Sequence
  Description of Artificial Sequence: Synthetic oligonucleotide
ggcaaccggcaugguggcg

SEQ ID NO: 2615592 - RNA, 19 nt, Artificial Sequence
  Description of Artificial Sequence: Synthetic oligonucleotide
ccucgcgcuuguuccggag

SEQ ID NO: 2615593 - RNA, 19 nt, Artificial Sequence
  Description of Artificial Sequence: Synthetic oligonucleotide
ccaggguaaacuugacccu

SEQ ID NO: 2615594 - RNA, 19 nt, Artificial Sequence
  Description of Artificial Sequence: Synthetic oligonucleotide
uucuggcaaccggcauggu

SEQ ID NO: 2615595 - RNA, 19 nt, Artificial Sequence
  Description of Artificial Sequence: Synthetic oligonucleotide
cgacucagggcccgccgcg

SEQ ID NO: 2615596 - RNA, 19 nt, Artificial Sequence
  Description of Artificial Sequence: Synthetic oligonucleotide
cgagacgcgacuucucgaa

SEQ ID NO: 2615597 - RNA, 19 nt, Artificial Sequence
  Description of Artificial Sequence: Synthetic oligonucleotide
ccaggcggacaaugaagga

SEQ ID NO: 2615598 - RNA, 19 nt, Artificial Sequence
  Description of Artificial Sequence: Synthetic oligonucleotide
ggagcccguauucuccuau

SEQ ID NO: 2615599 - RNA, 19 nt, Artificial Sequence
  Description of Artificial Sequence: Synthetic oligonucleotide
cccugauguggcgcuggcg

SEQ ID NO: 2615600 - RNA, 19 nt, Artificial Sequence
  Description of Artificial Sequence: Synthetic oligonucleotide
ggcggccuugcggaucuug

SEQ ID NO: 2615601 - RNA, 19 nt, Artificial Sequence
  Description of Artificial Sequence: Synthetic oligonucleotide
gcagccgccucuccaggaa

SEQ ID NO: 2615602 - RNA, 19 nt, Artificial Sequence
  Description of Artificial Sequence: Synthetic oligonucleotide
cguaaggagaacggaggga

SEQ ID NO: 2615603 - RNA, 19 nt, Artificial Sequence
  Description of Artificial Sequence: Synthetic oligonucleotide
guggcgacucagggcccgc

SEQ ID NO: 2615604 - RNA, 19 nt, Artificial Sequence
  Description of Artificial Sequence: Synthetic oligonucleotide
ccuaucagcuucagcuccu

SEQ ID NO: 2615605 - RNA, 19 nt, Artificial Sequence
  Description of Artificial Sequence: Synthetic oligonucleotide
caguccagggaggcauuaa

SEQ ID NO: 2615606 - RNA, 19 nt, Artificial Sequence
  Description of Artificial Sequence: Synthetic oligonucleotide
ccaccguaaggagaacgga

SEQ ID NO: 2615607 - RNA, 19 nt, Artificial Sequence
  Description of Artificial Sequence: Synthetic oligonucleotide
cuucucgaagggccuccgu

SEQ ID NO: 2615608 - RNA, 19 nt, Artificial Sequence
  Description of Artificial Sequence: Synthetic oligonucleotide
uccacaccucgcgcuuguu

SEQ ID NO: 2615609 - RNA, 19 nt, Artificial Sequence
  Description of Artificial Sequence: Synthetic oligonucleotide
gcucccgggcggccuugcg

SEQ ID NO: 2615610 - RNA, 19 nt, Artificial Sequence
  Description of Artificial Sequence: Synthetic oligonucleotide
ggacccugauguggcgcug

SEQ ID NO: 2615611 - RNA, 19 nt, Artificial Sequence
  Description of Artificial Sequence: Synthetic oligonucleotide
ccucuucacgcggccuggg

SEQ ID NO: 2615612 - RNA, 19 nt, Artificial Sequence
  Description of Artificial Sequence: Synthetic oligonucleotide
cggaacucacgccggcgac

SEQ ID NO: 2615613 - RNA, 19 nt, Artificial Sequence
  Description of Artificial Sequence: Synthetic oligonucleotide
ccuuuucguccagggucag

SEQ ID NO: 2615614 - RNA, 19 nt, Artificial Sequence
  Description of Artificial Sequence: Synthetic oligonucleotide
agacgccguggguccuuuu

SEQ ID NO: 2615615 - RNA, 19 nt, Artificial Sequence
  Description of Artificial Sequence: Synthetic oligonucleotide
cuccacaccucgcgcuugu

SEQ ID NO: 2615616 - RNA, 19 nt, Artificial Sequence
  Description of Artificial Sequence: Synthetic oligonucleotide
ccgcgccucggaacucacg

SEQ ID NO: 2615617 - RNA, 19 nt, Artificial Sequence
  Description of Artificial Sequence: Synthetic oligonucleotide
gcuuguuccggagcccgua

SEQ ID NO: 2615618 - RNA, 19 nt, Artificial Sequence
  Description of Artificial Sequence: Synthetic oligonucleotide
cccucguccagcaccccaa

SEQ ID NO: 2615619 - RNA, 19 nt, Artificial Sequence
  Description of Artificial Sequence: Synthetic oligonucleotide
gccuucgaaaagacgccgu

SEQ ID NO: 2615620 - RNA, 19 nt, Artificial Sequence
  Description of Artificial Sequence: Synthetic oligonucleotide
gcgacuucucgaagggccu

SEQ ID NO: 2615621 - RNA, 19 nt, Artificial Sequence
  Description of Artificial Sequence: Synthetic oligonucleotide
ccuccacaccucgcgcuug

SEQ ID NO: 2615622 - RNA, 19 nt, Artificial Sequence
  Description of Artificial Sequence: Synthetic oligonucleotide
cggcaugguggcgacucag

SEQ ID NO: 2615623 - RNA, 19 nt, Artificial Sequence
  Description of Artificial Sequence: Synthetic oligonucleotide
guggggugacauagguuuu

SEQ ID NO: 2615624 - RNA, 19 nt, Artificial Sequence
  Description of Artificial Sequence: Synthetic oligonucleotide
gccgccucuccaggaaguc

SEQ ID NO: 2615625 - RNA, 19 nt, Artificial Sequence
  Description of Artificial Sequence: Synthetic oligonucleotide
gucgccucagcagggcauu

SEQ ID NO: 2615626 - RNA, 19 nt, Artificial Sequence
  Description of Artificial Sequence: Synthetic oligonucleotide
cgccucagcagggcauugc

SEQ ID NO: 2615627 - RNA, 19 nt, Artificial Sequence
  Description of Artificial Sequence: Synthetic oligonucleotide
gcgcuggcggaugagcacu

SEQ ID NO: 2615628 - RNA, 19 nt, Artificial Sequence
  Description of Artificial Sequence: Synthetic oligonucleotide
gggcgugguggauggacuu

SEQ ID NO: 2615629 - RNA, 19 nt, Artificial Sequence
  Description of Artificial Sequence: Synthetic oligonucleotide
cagcucccgggcggccuug

SEQ ID NO: 2615630 - RNA, 19 nt, Artificial Sequence
  Description of Artificial Sequence: Synthetic oligonucleotide
gccuccguggggugacaua

SEQ ID NO: 2615631 - RNA, 19 nt, Artificial Sequence
  Description of Artificial Sequence: Synthetic oligonucleotide
cgcgcuuguuccggagccc

SEQ ID NO: 2615632 - RNA, 19 nt, Artificial Sequence
  Description of Artificial Sequence: Synthetic oligonucleotide
ccaccaccguaaggagaac

SEQ ID NO: 2615633 - RNA, 19 nt, Artificial Sequence
  Description of Artificial Sequence: Synthetic oligonucleotide
ccggagcccguauucuccu

SEQ ID NO: 2615634 - RNA, 19 nt, Artificial Sequence
  Description of Artificial Sequence: Synthetic oligonucleotide
ccugaucgagacgcgacuu

SEQ ID NO: 2615635 - RNA, 19 nt, Artificial Sequence
  Description of Artificial Sequence: Synthetic oligonucleotide
cgaagggccuccguggggu

SEQ ID NO: 2615636 - RNA, 19 nt, Artificial Sequence
  Description of Artificial Sequence: Synthetic oligonucleotide
cucgggcgugguggaugga

SEQ ID NO: 2615637 - RNA, 19 nt, Artificial Sequence
  Description of Artificial Sequence: Synthetic oligonucleotide
ccggcaugguggcgacuca

SEQ ID NO: 2615638 - RNA, 19 nt, Artificial Sequence
  Description of Artificial Sequence: Synthetic oligonucleotide
gccgcgccucggaacucac

SEQ ID NO: 2615639 - RNA, 19 nt, Artificial Sequence
  Description of Artificial Sequence: Synthetic oligonucleotide
ggcccgccgcgccucggaa

SEQ ID NO: 2615640 - RNA, 19 nt, Artificial Sequence
  Description of Artificial Sequence: Synthetic oligonucleotide
cgggcgugguggauggacu

SEQ ID NO: 2615641 - RNA, 19 nt, Artificial Sequence
  Description of Artificial Sequence: Synthetic oligonucleotide
ccguggggugacauagguu

SEQ ID NO: 2615642 - RNA, 19 nt, Artificial Sequence
  Description of Artificial Sequence: Synthetic oligonucleotide
cggccugggcguccaccac

SEQ ID NO: 2615643 - RNA, 19 nt, Artificial Sequence
  Description of Artificial Sequence: Synthetic oligonucleotide
cgccguggguccuuuucgu

SEQ ID NO: 2615644 - RNA, 19 nt, Artificial Sequence
  Description of Artificial Sequence: Synthetic oligonucleotide
ggccuccguggggugacau

SEQ ID NO: 2615645 - RNA, 19 nt, Artificial Sequence
  Description of Artificial Sequence: Synthetic oligonucleotide
cccuccacaccucgcgcuu

SEQ ID NO: 2615646 - RNA, 19 nt, Artificial Sequence
  Description of Artificial Sequence: Synthetic oligonucleotide
ccucguccagcaccccaau

SEQ ID NO: 2615647 - RNA, 19 nt, Artificial Sequence
  Description of Artificial Sequence: Synthetic oligonucleotide
ccuggcccuucuuggcauu

SEQ ID NO: 2615648 - RNA, 19 nt, Artificial Sequence
  Description of Artificial Sequence: Synthetic oligonucleotide
cgccgcgccucggaacuca

SEQ ID NO: 2615649 - RNA, 19 nt, Artificial Sequence
  Description of Artificial Sequence: Synthetic oligonucleotide
cggagcccguauucuccua

SEQ ID NO: 2615650 - RNA, 19 nt, Artificial Sequence
  Description of Artificial Sequence: Synthetic oligonucleotide
cgcuuguuccggagcccgu

SEQ ID NO: 2615651 - RNA, 19 nt, Artificial Sequence
  Description of Artificial Sequence: Synthetic oligonucleotide
gcacucgggcgugguggau

SEQ ID NO: 2615652 - RNA, 19 nt, Artificial Sequence
  Description of Artificial Sequence: Synthetic oligonucleotide
ccgccgcgccucggaacuc

SEQ ID NO: 2615653 - RNA, 19 nt, Artificial Sequence
  Description of Artificial Sequence: Synthetic oligonucleotide
ccugggcguccaccaccgu

SEQ ID NO: 2615654 - RNA, 19 nt, Artificial Sequence
  Description of Artificial Sequence: Synthetic oligonucleotide
cccgggcggccuugcggau

SEQ ID NO: 2615655 - RNA, 19 nt, Artificial Sequence
  Description of Artificial Sequence: Synthetic oligonucleotide
gggcggccuugcggaucuu

SEQ ID NO: 2615656 - RNA, 19 nt, Artificial Sequence
  Description of Artificial Sequence: Synthetic oligonucleotide
aguguuacaacuuuccuga

SEQ ID NO: 2615657 - RNA, 19 nt, Artificial Sequence
  Description of Artificial Sequence: Synthetic oligonucleotide
cuuaugaccacgguuaugc

SEQ ID NO: 2615658 - RNA, 19 nt, Artificial Sequence
  Description of Artificial Sequence: Synthetic oligonucleotide
agagaaaugucugucuccc

SEQ ID NO: 2615659 - RNA, 19 nt, Artificial Sequence
  Description of Artificial Sequence: Synthetic oligonucleotide
uacaguguuacaacuuucc

SEQ ID NO: 2615660 - RNA, 19 nt, Artificial Sequence
  Description of Artificial Sequence: Synthetic oligonucleotide
ugaugaaggagaguggcgg

SEQ ID NO: 2615661 - RNA, 19 nt, Artificial Sequence
  Description of Artificial Sequence: Synthetic oligonucleotide
uacaacuuuccugagcugg

SEQ ID NO: 2615662 - RNA, 19 nt, Artificial Sequence
  Description of Artificial Sequence: Synthetic oligonucleotide
agugcaacggugaugaagg

SEQ ID NO: 2615663 - RNA, 19 nt, Artificial Sequence
  Description of Artificial Sequence: Synthetic oligonucleotide
augaccacgguuaugcucc

SEQ ID NO: 2615664 - RNA, 19 nt, Artificial Sequence
  Description of Artificial Sequence: Synthetic oligonucleotide
uuaugcucccuccacgggg

SEQ ID NO: 2615665 - RNA, 19 nt, Artificial Sequence
  Description of Artificial Sequence: Synthetic oligonucleotide
uguuagccggucuaaaggc

SEQ ID NO: 2615666 - RNA, 19 nt, Artificial Sequence
  Description of Artificial Sequence: Synthetic oligonucleotide
ucguuucauagcuaaugcg

SEQ ID NO: 2615667 - RNA, 19 nt, Artificial Sequence
  Description of Artificial Sequence: Synthetic oligonucleotide
uguggaaggaggacacugg

SEQ ID NO: 2615668 - RNA, 19 nt, Artificial Sequence
  Description of Artificial Sequence: Synthetic oligonucleotide
aaggaggugccagcgaacc

SEQ ID NO: 2615669 - RNA, 19 nt, Artificial Sequence
  Description of Artificial Sequence: Synthetic oligonucleotide
uugcuuaugaccacgguua

SEQ ID NO: 2615670 - RNA, 19 nt, Artificial Sequence
  Description of Artificial Sequence: Synthetic oligonucleotide
aacuuuccugagcuggagg

SEQ ID NO: 2615671 - RNA, 19 nt, Artificial Sequence
  Description of Artificial Sequence: Synthetic oligonucleotide
uguuacaacuuuccugagc

SEQ ID NO: 2615672 - RNA, 19 nt, Artificial Sequence
  Description of Artificial Sequence: Synthetic oligonucleotide
agaaucggcuucuacaacu

SEQ ID NO: 2615673 - RNA, 19 nt, Artificial Sequence
  Description of Artificial Sequence: Synthetic oligonucleotide
aggcuuaugggauuccagg

SEQ ID NO: 2615674 - RNA, 19 nt, Artificial Sequence
  Description of Artificial Sequence: Synthetic oligonucleotide
ugagaaucggcuucuacaa

SEQ ID NO: 2615675 - RNA, 19 nt, Artificial Sequence
  Description of Artificial Sequence: Synthetic oligonucleotide
aagugggucaggcucaccu

SEQ ID NO: 2615676 - RNA, 19 nt, Artificial Sequence
  Description of Artificial Sequence: Synthetic oligonucleotide
cuguuagccggucuaaagg

SEQ ID NO: 2615677 - RNA, 19 nt, Artificial Sequence
  Description of Artificial Sequence: Synthetic oligonucleotide
ucauagcuaaugcggaucu

SEQ ID NO: 2615678 - RNA, 19 nt, Artificial Sequence
  Description of Artificial Sequence: Synthetic oligonucleotide
auuccagggguucgguucc

SEQ ID NO: 2615679 - RNA, 19 nt, Artificial Sequence
  Description of Artificial Sequence: Synthetic oligonucleotide
aagugggaggacuguuagc

SEQ ID NO: 2615680 - RNA, 19 nt, Artificial Sequence
  Description of Artificial Sequence: Synthetic oligonucleotide
cucguuucauagcuaaugc

SEQ ID NO: 2615681 - RNA, 19 nt, Artificial Sequence
  Description of Artificial Sequence: Synthetic oligonucleotide
uccuucguguggaaguggg

SEQ ID NO: 2615682 - RNA, 19 nt, Artificial Sequence
  Description of Artificial Sequence: Synthetic oligonucleotide
aaagaagggcgagagcaag

SEQ ID NO: 2615683 - RNA, 19 nt, Artificial Sequence
  Description of Artificial Sequence: Synthetic oligonucleotide
acggugaugaaggagagug

SEQ ID NO: 2615684 - RNA, 19 nt, Artificial Sequence
  Description of Artificial Sequence: Synthetic oligonucleotide
gcuaaugcggaucucaagc

SEQ ID NO: 2615685 - RNA, 19 nt, Artificial Sequence
  Description of Artificial Sequence: Synthetic oligonucleotide
uacgcucuccucuggaagg

SEQ ID NO: 2615686 - RNA, 19 nt, Artificial Sequence
  Description of Artificial Sequence: Synthetic oligonucleotide
uucuugcuuaugaccacgg

SEQ ID NO: 2615687 - RNA, 19 nt, Artificial Sequence
  Description of Artificial Sequence: Synthetic oligonucleotide
guuacaacuuuccugagcu

SEQ ID NO: 2615688 - RNA, 19 nt, Artificial Sequence
  Description of Artificial Sequence: Synthetic oligonucleotide
uuucuugcuuaugaccacg

SEQ ID NO: 2615689 - RNA, 19 nt, Artificial Sequence
  Description of Artificial Sequence: Synthetic oligonucleotide
gaaccugugauuggguggg

SEQ ID NO: 2615690 - RNA, 19 nt, Artificial Sequence
  Description of Artificial Sequence: Synthetic oligonucleotide
acuguuagccggucuaaag

SEQ ID NO: 2615691 - RNA, 19 nt, Artificial Sequence
  Description of Artificial Sequence: Synthetic oligonucleotide
caguguuacaacuuuccug

SEQ ID NO: 2615692 - RNA, 19 nt, Artificial Sequence
  Description of Artificial Sequence: Synthetic oligonucleotide
gucaggcucaccuuccugg

SEQ ID NO: 2615693 - RNA, 19 nt, Artificial Sequence
  Description of Artificial Sequence: Synthetic oligonucleotide
ucuacaacuucugucugug

SEQ ID NO: 2615694 - RNA, 19 nt, Artificial Sequence
  Description of Artificial Sequence: Synthetic oligonucleotide
aaggaggacacuggcuccc

SEQ ID NO: 2615695 - RNA, 19 nt, Artificial Sequence
  Description of Artificial Sequence: Synthetic oligonucleotide
aaucggcuucuacaacuuc

SEQ ID NO: 2615696 - RNA, 19 nt, Artificial Sequence
  Description of Artificial Sequence: Synthetic oligonucleotide
uaaccugagaaucggcuuc

SEQ ID NO: 2615697 - RNA, 19 nt, Artificial Sequence
  Description of Artificial Sequence: Synthetic oligonucleotide
gauuccagggguucgguuc

SEQ ID NO: 2615698 - RNA, 19 nt, Artificial Sequence
  Description of Artificial Sequence: Synthetic oligonucleotide
guccucaccaucuuugccc

SEQ ID NO: 2615699 - RNA, 19 nt, Artificial Sequence
  Description of Artificial Sequence: Synthetic oligonucleotide
cucauuuucuugcuuauga

SEQ ID NO: 2615700 - RNA, 19 nt, Artificial Sequence
  Description of Artificial Sequence: Synthetic oligonucleotide
guguauggggcccuggucc

SEQ ID NO: 2615701 - RNA, 19 nt, Artificial Sequence
  Description of Artificial Sequence: Synthetic oligonucleotide
cguuucauagcuaaugcgg

SEQ ID NO: 2615702 - RNA, 19 nt, Artificial Sequence
  Description of Artificial Sequence: Synthetic oligonucleotide
uaugaccacgguuaugcuc

SEQ ID NO: 2615703 - RNA, 19 nt, Artificial Sequence
  Description of Artificial Sequence: Synthetic oligonucleotide
gaugaaggagaguggcggc

SEQ ID NO: 2615704 - RNA, 19 nt, Artificial Sequence
  Description of Artificial Sequence: Synthetic oligonucleotide
cugagaaucggcuucuaca

SEQ ID NO: 2615705 - RNA, 19 nt, Artificial Sequence
  Description of Artificial Sequence: Synthetic oligonucleotide
auagcuaaugcggaucuca

SEQ ID NO: 2615706 - RNA, 19 nt, Artificial Sequence
  Description of Artificial Sequence: Synthetic oligonucleotide
agcggacugggccucuucc

SEQ ID NO: 2615707 - RNA, 19 nt, Artificial Sequence
  Description of Artificial Sequence: Synthetic oligonucleotide
acgguuaugcucccuccac

SEQ ID NO: 2615708 - RNA, 19 nt, Artificial Sequence
  Description of Artificial Sequence: Synthetic oligonucleotide
cugccuaaccugagaaucg

SEQ ID NO: 2615709 - RNA, 19 nt, Artificial Sequence
  Description of Artificial Sequence: Synthetic oligonucleotide
ucggcuucuacaacuucug

SEQ ID NO: 2615710 - RNA, 19 nt, Artificial Sequence
  Description of Artificial Sequence: Synthetic oligonucleotide
agcaagggcagagaaaugu

SEQ ID NO: 2615711 - RNA, 19 nt, Artificial Sequence
  Description of Artificial Sequence: Synthetic oligonucleotide
cuuccuggcggcauccucc

SEQ ID NO: 2615712 - RNA, 19 nt, Artificial Sequence
  Description of Artificial Sequence: Synthetic oligonucleotide
ggucuaaaggcuuauggga

SEQ ID NO: 2615713 - RNA, 19 nt, Artificial Sequence
  Description of Artificial Sequence: Synthetic oligonucleotide
gguuaugcucccuccacgg

SEQ ID NO: 2615714 - RNA, 19 nt, Artificial Sequence
  Description of Artificial Sequence: Synthetic oligonucleotide
acaguguuacaacuuuccu

SEQ ID NO: 2615715 - RNA, 19 nt, Artificial Sequence
  Description of Artificial Sequence: Synthetic oligonucleotide
uucguguggaaguggguca

SEQ ID NO: 2615716 - RNA, 19 nt, Artificial Sequence
  Description of Artificial Sequence: Synthetic oligonucleotide
guggaagugggucaggcuc

SEQ ID NO: 2615717 - RNA, 19 nt, Artificial Sequence
  Description of Artificial Sequence: Synthetic oligonucleotide
uuuucuugcuuaugaccac

SEQ ID NO: 2615718 - RNA, 19 nt, Artificial Sequence
  Description of Artificial Sequence: Synthetic oligonucleotide
caagugggaggacuguuag

SEQ ID NO: 2615719 - RNA, 19 nt, Artificial Sequence
  Description of Artificial Sequence: Synthetic oligonucleotide
ugugcuccaaggaggugcc

SEQ ID NO: 2615720 - RNA, 19 nt, Artificial Sequence
  Description of Artificial Sequence: Synthetic oligonucleotide
auguccuacgcucuccucu

SEQ ID NO: 2615721 - RNA, 19 nt, Artificial Sequence
  Description of Artificial Sequence: Synthetic oligonucleotide
cagcugugcuccaaggagg

SEQ ID NO: 2615722 - RNA, 19 nt, Artificial Sequence
  Description of Artificial Sequence: Synthetic oligonucleotide
ggcuuaugggauuccaggg

SEQ ID NO: 2615723 - RNA, 19 nt, Artificial Sequence
  Description of Artificial Sequence: Synthetic oligonucleotide
uggaagugggucaggcuca

SEQ ID NO: 2615724 - RNA, 19 nt, Artificial Sequence
  Description of Artificial Sequence: Synthetic oligonucleotide
uaugcucccuccacgggga

SEQ ID NO: 2615725 - RNA, 19 nt, Artificial Sequence
  Description of Artificial Sequence: Synthetic oligonucleotide
uucuacaacuucugucugu

SEQ ID NO: 2615726 - RNA, 19 nt, Artificial Sequence
  Description of Artificial Sequence: Synthetic oligonucleotide
gcuuaugggauuccagggg

SEQ ID NO: 2615727 - RNA, 19 nt, Artificial Sequence
  Description of Artificial Sequence: Synthetic oligonucleotide
uugcucauuuucuugcuua

SEQ ID NO: 2615728 - RNA, 19 nt, Artificial Sequence
  Description of Artificial Sequence: Synthetic oligonucleotide
uuucauagcuaaugcggau

SEQ ID NO: 2615729 - RNA, 19 nt, Artificial Sequence
  Description of Artificial Sequence: Synthetic oligonucleotide
guccuuguggcuguggucc

SEQ ID NO: 2615730 - RNA, 19 nt, Artificial Sequence
  Description of Artificial Sequence: Synthetic oligonucleotide
aggcuugguguguaugggg

SEQ ID NO: 2615731 - RNA, 19 nt, Artificial Sequence
  Description of Artificial Sequence: Synthetic oligonucleotide
uucauagcuaaugcggauc

SEQ ID NO: 2615732 - RNA, 19 nt, Artificial Sequence
  Description of Artificial Sequence: Synthetic oligonucleotide
aaaggcuuaugggauucca

SEQ ID NO: 2615733 - RNA, 19 nt, Artificial Sequence
  Description of Artificial Sequence: Synthetic oligonucleotide
ugccuaaccugagaaucgg

SEQ ID NO: 2615734 - RNA, 19 nt, Artificial Sequence
  Description of Artificial Sequence: Synthetic oligonucleotide
aaggcuuaugggauuccag

SEQ ID NO: 2615735 - RNA, 19 nt, Artificial Sequence
  Description of Artificial Sequence: Synthetic oligonucleotide
uccacggggaaagaagggc

SEQ ID NO: 2615736 - RNA, 19 nt, Artificial Sequence
  Description of Artificial Sequence: Synthetic oligonucleotide
auuggguggguccucucug

SEQ ID NO: 2615737 - RNA, 19 nt, Artificial Sequence
  Description of Artificial Sequence: Synthetic oligonucleotide
acaacuucugucuguggaa

SEQ ID NO: 2615738 - RNA, 19 nt, Artificial Sequence
  Description of Artificial Sequence: Synthetic oligonucleotide
agcuaaugcggaucucaag

SEQ ID NO: 2615739 - RNA, 19 nt, Artificial Sequence
  Description of Artificial Sequence: Synthetic oligonucleotide
uguccuacgcucuccucug

SEQ ID NO: 2615740 - RNA, 19 nt, Artificial Sequence
  Description of Artificial Sequence: Synthetic oligonucleotide
ucgcugaccugccuaaccu

SEQ ID NO: 2615741 - RNA, 19 nt, Artificial Sequence
  Description of Artificial Sequence: Synthetic oligonucleotide
ggaaggaggacacuggcuc

SEQ ID NO: 2615742 - RNA, 19 nt, Artificial Sequence
  Description of Artificial Sequence: Synthetic oligonucleotide
ucuaaaggcuuaugggauu

SEQ ID NO: 2615743 - RNA, 19 nt, Artificial Sequence
  Description of Artificial Sequence: Synthetic oligonucleotide
cacugccugcccuuggugg

SEQ ID NO: 2615744 - RNA, 19 nt, Artificial Sequence
  Description of Artificial Sequence: Synthetic oligonucleotide
gcauugcucauuuucuugc

SEQ ID NO: 2615745 - RNA, 19 nt, Artificial Sequence
  Description of Artificial Sequence: Synthetic oligonucleotide
guuaugcucccuccacggg

SEQ ID NO: 2615746 - RNA, 19 nt, Artificial Sequence
  Description of Artificial Sequence: Synthetic oligonucleotide
ucccuacaguguuacaacu

SEQ ID NO: 2615747 - RNA, 19 nt, Artificial Sequence
  Description of Artificial Sequence: Synthetic oligonucleotide
cucccuacaguguuacaac

SEQ ID NO: 2615748 - RNA, 19 nt, Artificial Sequence
  Description of Artificial Sequence: Synthetic oligonucleotide
ucgcugauguccuacgcuc

SEQ ID NO: 2615749 - RNA, 19 nt, Artificial Sequence
  Description of Artificial Sequence: Synthetic oligonucleotide
uuuccuucguguggaagug

SEQ ID NO: 2615750 - RNA, 19 nt, Artificial Sequence
  Description of Artificial Sequence: Synthetic oligonucleotide
ugauguccuacgcucuccu

SEQ ID NO: 2615751 - RNA, 19 nt, Artificial Sequence
  Description of Artificial Sequence: Synthetic oligonucleotide
uucgguuccagcugugcuc

SEQ ID NO: 2615752 - RNA, 19 nt, Artificial Sequence
  Description of Artificial Sequence: Synthetic oligonucleotide
ugucgcugauguccuacgc

SEQ ID NO: 2615753 - RNA, 19 nt, Artificial Sequence
  Description of Artificial Sequence: Synthetic oligonucleotide
cuuggugggcaucaugguc

SEQ ID NO: 2615754 - RNA, 19 nt, Artificial Sequence
  Description of Artificial Sequence: Synthetic oligonucleotide
guuucauagcuaaugcgga

SEQ ID NO: 2615755 - RNA, 19 nt, Artificial Sequence
  Description of Artificial Sequence: Synthetic oligonucleotide
cuacaguguuacaacuuuc

SEQ ID NO: 2615756 - RNA, 19 nt, Artificial Sequence
  Description of Artificial Sequence: Synthetic oligonucleotide
uuagccggucuaaaggcuu

SEQ ID NO: 2615757 - RNA, 19 nt, Artificial Sequence
  Description of Artificial Sequence: Synthetic oligonucleotide
ucuugcuuaugaccacggu

SEQ ID NO: 2615758 - RNA, 19 nt, Artificial Sequence
  Description of Artificial Sequence: Synthetic oligonucleotide
ugugucggagccacugccu

SEQ ID NO: 2615759 - RNA, 19 nt, Artificial Sequence
  Description of Artificial Sequence: Synthetic oligonucleotide
cuacgcucuccucuggaag

SEQ ID NO: 2615760 - RNA, 19 nt, Artificial Sequence
  Description of Artificial Sequence: Synthetic oligonucleotide
cuugguguguauggggccc

SEQ ID NO: 2615761 - RNA, 19 nt, Artificial Sequence
  Description of Artificial Sequence: Synthetic oligonucleotide
gguccugucgcugaugucc

SEQ ID NO: 2615762 - RNA, 19 nt, Artificial Sequence
  Description of Artificial Sequence: Synthetic oligonucleotide
uuacaacuuuccugagcug

SEQ ID NO: 2615763 - RNA, 19 nt, Artificial Sequence
  Description of Artificial Sequence: Synthetic oligonucleotide
cuaaaggcuuaugggauuc

SEQ ID NO: 2615764 - RNA, 19 nt, Artificial Sequence
  Description of Artificial Sequence: Synthetic oligonucleotide
agaagggcgagagcaagug

SEQ ID NO: 2615765 - RNA, 19 nt, Artificial Sequence
  Description of Artificial Sequence: Synthetic oligonucleotide
ugucucccaggcugugucg

SEQ ID NO: 2615766 - RNA, 19 nt, Artificial Sequence
  Description of Artificial Sequence: Synthetic oligonucleotide
cuucguguggaaguggguc

SEQ ID NO: 2615767 - RNA, 19 nt, Artificial Sequence
  Description of Artificial Sequence: Synthetic oligonucleotide
ucugccucuccuccucgcc

SEQ ID NO: 2615768 - RNA, 19 nt, Artificial Sequence
  Description of Artificial Sequence: Synthetic oligonucleotide
ucgguuccagcugugcucc

SEQ ID NO: 2615769 - RNA, 19 nt, Artificial Sequence
  Description of Artificial Sequence: Synthetic oligonucleotide
agggcagagaaaugucugu

SEQ ID NO: 2615770 - RNA, 19 nt, Artificial Sequence
  Description of Artificial Sequence: Synthetic oligonucleotide
cagugcaacggugaugaag

SEQ ID NO: 2615771 - RNA, 19 nt, Artificial Sequence
  Description of Artificial Sequence: Synthetic oligonucleotide
uagcuaaugcggaucucaa

SEQ ID NO: 2615772 - RNA, 19 nt, Artificial Sequence
  Description of Artificial Sequence: Synthetic oligonucleotide
cuacaacuucugucugugg

SEQ ID NO: 2615773 - RNA, 19 nt, Artificial Sequence
  Description of Artificial Sequence: Synthetic oligonucleotide
uguauggggcccugguccu

SEQ ID NO: 2615774 - RNA, 19 nt, Artificial Sequence
  Description of Artificial Sequence: Synthetic oligonucleotide
caacggugaugaaggagag

SEQ ID NO: 2615775 - RNA, 19 nt, Artificial Sequence
  Description of Artificial Sequence: Synthetic oligonucleotide
uuggccuagcccuggccag

SEQ ID NO: 2615776 - RNA, 19 nt, Artificial Sequence
  Description of Artificial Sequence: Synthetic oligonucleotide
uuccuggcggcauccuccg

SEQ ID NO: 2615777 - RNA, 19 nt, Artificial Sequence
  Description of Artificial Sequence: Synthetic oligonucleotide
ugaccugccuaaccugaga

SEQ ID NO: 2615778 - RNA, 19 nt, Artificial Sequence
  Description of Artificial Sequence: Synthetic oligonucleotide
ggcgagagcaagugggagg

SEQ ID NO: 2615779 - RNA, 19 nt, Artificial Sequence
  Description of Artificial Sequence: Synthetic oligonucleotide
gagaaucggcuucuacaac

SEQ ID NO: 2615780 - RNA, 19 nt, Artificial Sequence
  Description of Artificial Sequence: Synthetic oligonucleotide
ccggucuaaaggcuuaugg

SEQ ID NO: 2615781 - RNA, 19 nt, Artificial Sequence
  Description of Artificial Sequence: Synthetic oligonucleotide
cugugucggagccacugcc

SEQ ID NO: 2615782 - RNA, 19 nt, Artificial Sequence
  Description of Artificial Sequence: Synthetic oligonucleotide
cucucugccuccucguuuc

SEQ ID NO: 2615783 - RNA, 19 nt, Artificial Sequence
  Description of Artificial Sequence: Synthetic oligonucleotide
gcuucuacaacuucugucu

SEQ ID NO: 2615784 - RNA, 19 nt, Artificial Sequence
  Description of Artificial Sequence: Synthetic oligonucleotide
cugccuccucguuucauag

SEQ ID NO: 2615785 - RNA, 19 nt, Artificial Sequence
  Description of Artificial Sequence: Synthetic oligonucleotide
cuguggaaggaggacacug

SEQ ID NO: 2615786 - RNA, 19 nt, Artificial Sequence
  Description of Artificial Sequence: Synthetic oligonucleotide
uuggguggguccucucugc

SEQ ID NO: 2615787 - RNA, 19 nt, Artificial Sequence
  Description of Artificial Sequence: Synthetic oligonucleotide
cuggcucugggccuagccc

SEQ ID NO: 2615788 - RNA, 19 nt, Artificial Sequence
  Description of Artificial Sequence: Synthetic oligonucleotide
uuaugaccacgguuaugcu

SEQ ID NO: 2615789 - RNA, 19 nt, Artificial Sequence
  Description of Artificial Sequence: Synthetic oligonucleotide
aucggcuucuacaacuucu

SEQ ID NO: 2615790 - RNA, 19 nt, Artificial Sequence
  Description of Artificial Sequence: Synthetic oligonucleotide
cuagcccaggcauugcuca

SEQ ID NO: 2615791 - RNA, 19 nt, Artificial Sequence
  Description of Artificial Sequence: Synthetic oligonucleotide
aaccugagaaucggcuucu

SEQ ID NO: 2615792 - RNA, 19 nt, Artificial Sequence
  Description of Artificial Sequence: Synthetic oligonucleotide
ucgcccagugcaacgguga

SEQ ID NO: 2615793 - RNA, 19 nt, Artificial Sequence
  Description of Artificial Sequence: Synthetic oligonucleotide
agggguucgguuccagcug

SEQ ID NO: 2615794 - RNA, 19 nt, Artificial Sequence
  Description of Artificial Sequence: Synthetic oligonucleotide
ggcuucuacaacuucuguc

SEQ ID NO: 2615795 - RNA, 19 nt, Artificial Sequence
  Description of Artificial Sequence: Synthetic oligonucleotide
cugucgcugauguccuacg

SEQ ID NO: 2615796 - RNA, 19 nt, Artificial Sequence
  Description of Artificial Sequence: Synthetic oligonucleotide
gugggcaucaugguccuug

SEQ ID NO: 2615797 - RNA, 19 nt, Artificial Sequence
  Description of Artificial Sequence: Synthetic oligonucleotide
ugcuuaugaccacgguuau

SEQ ID NO: 2615798 - RNA, 19 nt, Artificial Sequence
  Description of Artificial Sequence: Synthetic oligonucleotide
aggacuguuagccggucua

SEQ ID NO: 2615799 - RNA, 19 nt, Artificial Sequence
  Description of Artificial Sequence: Synthetic oligonucleotide
uaaaggcuuaugggauucc

SEQ ID NO: 2615800 - RNA, 19 nt, Artificial Sequence
  Description of Artificial Sequence: Synthetic oligonucleotide
uccaaggaggugccagcga

SEQ ID NO: 2615801 - RNA, 19 nt, Artificial Sequence
  Description of Artificial Sequence: Synthetic oligonucleotide
aggcuggcaaccucgcuga

SEQ ID NO: 2615802 - RNA, 19 nt, Artificial Sequence
  Description of Artificial Sequence: Synthetic oligonucleotide
gaccugccuaaccugagaa

SEQ ID NO: 2615803 - RNA, 19 nt, Artificial Sequence
  Description of Artificial Sequence: Synthetic oligonucleotide
cuuuccuucguguggaagu

SEQ ID NO: 2615804 - RNA, 19 nt, Artificial Sequence
  Description of Artificial Sequence: Synthetic oligonucleotide
uccucgcccagugcaacgg

SEQ ID NO: 2615805 - RNA, 19 nt, Artificial Sequence
  Description of Artificial Sequence: Synthetic oligonucleotide
aagaagggcgagagcaagu

SEQ ID NO: 2615806 - RNA, 19 nt, Artificial Sequence
  Description of Artificial Sequence: Synthetic oligonucleotide
uuccuucguguggaagugg

SEQ ID NO: 2615807 - RNA, 19 nt, Artificial Sequence
  Description of Artificial Sequence: Synthetic oligonucleotide
cuagcccuggccaggcuug

SEQ ID NO: 2615808 - RNA, 19 nt, Artificial Sequence
  Description of Artificial Sequence: Synthetic oligonucleotide
ucugccuccucguuucaua

SEQ ID NO: 2615809 - RNA, 19 nt, Artificial Sequence
  Description of Artificial Sequence: Synthetic oligonucleotide
uccuacgcucuccucugga

SEQ ID NO: 2615810 - RNA, 19 nt, Artificial Sequence
  Description of Artificial Sequence: Synthetic oligonucleotide
cagcgaaccugugauuggg

SEQ ID NO: 2615811 - RNA, 19 nt, Artificial Sequence
  Description of Artificial Sequence: Synthetic oligonucleotide
gcaacggugaugaaggaga

SEQ ID NO: 2615812 - RNA, 19 nt, Artificial Sequence
  Description of Artificial Sequence: Synthetic oligonucleotide
aaccucgcugaccugccua

SEQ ID NO: 2615813 - RNA, 19 nt, Artificial Sequence
  Description of Artificial Sequence: Synthetic oligonucleotide
ggggaaagaagggcgagag

SEQ ID NO: 2615814 - RNA, 19 nt, Artificial Sequence
  Description of Artificial Sequence: Synthetic oligonucleotide
cggucuaaaggcuuauggg

SEQ ID NO: 2615815 - RNA, 19 nt, Artificial Sequence
  Description of Artificial Sequence: Synthetic oligonucleotide
uggguggguccucucugcc

SEQ ID NO: 2615816 - RNA, 19 nt, Artificial Sequence
  Description of Artificial Sequence: Synthetic oligonucleotide
ugucggagccacugccugc

SEQ ID NO: 2615817 - RNA, 19 nt, Artificial Sequence
  Description of Artificial Sequence: Synthetic oligonucleotide
cuuaugggauuccaggggu

SEQ ID NO: 2615818 - RNA, 19 nt, Artificial Sequence
  Description of Artificial Sequence: Synthetic oligonucleotide
ccagcugugcuccaaggag

SEQ ID NO: 2615819 - RNA, 19 nt, Artificial Sequence
  Description of Artificial Sequence: Synthetic oligonucleotide
ccacggggaaagaagggcg

SEQ ID NO: 2615820 - RNA, 19 nt, Artificial Sequence
  Description of Artificial Sequence: Synthetic oligonucleotide
aggagaguggcggcuggcg

SEQ ID NO: 2615821 - RNA, 19 nt, Artificial Sequence
  Description of Artificial Sequence: Synthetic oligonucleotide
acgcucuccucuggaaggc

SEQ ID NO: 2615822 - RNA, 19 nt, Artificial Sequence
  Description of Artificial Sequence: Synthetic oligonucleotide
guguuacaacuuuccugag

SEQ ID NO: 2615823 - RNA, 19 nt, Artificial Sequence
  Description of Artificial Sequence: Synthetic oligonucleotide
cugaccugccuaaccugag

SEQ ID NO: 2615824 - RNA, 19 nt, Artificial Sequence
  Description of Artificial Sequence: Synthetic oligonucleotide
aacggugaugaaggagagu

SEQ ID NO: 2615825 - RNA, 19 nt, Artificial Sequence
  Description of Artificial Sequence: Synthetic oligonucleotide
caaggaggugccagcgaac

SEQ ID NO: 2615826 - RNA, 19 nt, Artificial Sequence
  Description of Artificial Sequence: Synthetic oligonucleotide
gugucggagccacugccug

SEQ ID NO: 2615827 - RNA, 19 nt, Artificial Sequence
  Description of Artificial Sequence: Synthetic oligonucleotide
gaaagaagggcgagagcaa

SEQ ID NO: 2615828 - RNA, 19 nt, Artificial Sequence
  Description of Artificial Sequence: Synthetic oligonucleotide
ucaccaucuuugccccucu

SEQ ID NO: 2615829 - RNA, 19 nt, Artificial Sequence
  Description of Artificial Sequence: Synthetic oligonucleotide
cuccucguuucauagcuaa

SEQ ID NO: 2615830 - RNA, 19 nt, Artificial Sequence
  Description of Artificial Sequence: Synthetic oligonucleotide
cugauguccuacgcucucc

SEQ ID NO: 2615831 - RNA, 19 nt, Artificial Sequence
  Description of Artificial Sequence: Synthetic oligonucleotide
ugccuccucguuucauagc

SEQ ID NO: 2615832 - RNA, 19 nt, Artificial Sequence
  Description of Artificial Sequence: Synthetic oligonucleotide
aggcauugcucauuuucuu

SEQ ID NO: 2615833 - RNA, 19 nt, Artificial Sequence
  Description of Artificial Sequence: Synthetic oligonucleotide
cuccucgcccagugcaacg

SEQ ID NO: 2615834 - RNA, 19 nt, Artificial Sequence
  Description of Artificial Sequence: Synthetic oligonucleotide
gauuggguggguccucucu

SEQ ID NO: 2615835 - RNA, 19 nt, Artificial Sequence
  Description of Artificial Sequence: Synthetic oligonucleotide
cgaaccugugauugggugg

SEQ ID NO: 2615836 - RNA, 19 nt, Artificial Sequence
  Description of Artificial Sequence: Synthetic oligonucleotide
cucggguuggccuagcccu

SEQ ID NO: 2615837 - RNA, 19 nt, Artificial Sequence
  Description of Artificial Sequence: Synthetic oligonucleotide
gauguccuacgcucuccuc

SEQ ID NO: 2615838 - RNA, 19 nt, Artificial Sequence
  Description of Artificial Sequence: Synthetic oligonucleotide
ucggguuggccuagcccug

SEQ ID NO: 2615839 - RNA, 19 nt, Artificial Sequence
  Description of Artificial Sequence: Synthetic oligonucleotide
caacuuuccugagcuggag

SEQ ID NO: 2615840 - RNA, 19 nt, Artificial Sequence
  Description of Artificial Sequence: Synthetic oligonucleotide
ugggcaucaugguccuugu

SEQ ID NO: 2615841 - RNA, 19 nt, Artificial Sequence
  Description of Artificial Sequence: Synthetic oligonucleotide
uggccagcggacugggccu

SEQ ID NO: 2615842 - RNA, 19 nt, Artificial Sequence
  Description of Artificial Sequence: Synthetic oligonucleotide
cuggcaaccucgcugaccu

SEQ ID NO: 2615843 - RNA, 19 nt, Artificial Sequence
  Description of Artificial Sequence: Synthetic oligonucleotide
ccugccuaaccugagaauc

SEQ ID NO: 2615844 - RNA, 19 nt, Artificial Sequence
  Description of Artificial Sequence: Synthetic oligonucleotide
caggcugugucggagccac

SEQ ID NO: 2615845 - RNA, 19 nt, Artificial Sequence
  Description of Artificial Sequence: Synthetic oligonucleotide
ccucguuucauagcuaaug

SEQ ID NO: 2615846 - RNA, 19 nt, Artificial Sequence
  Description of Artificial Sequence: Synthetic oligonucleotide
cuugcuuaugaccacgguu

SEQ ID NO: 2615847 - RNA, 19 nt, Artificial Sequence
  Description of Artificial Sequence: Synthetic oligonucleotide
uccucguuucauagcuaau

SEQ ID NO: 2615848 - RNA, 19 nt, Artificial Sequence
  Description of Artificial Sequence: Synthetic oligonucleotide
caagggcagagaaaugucu

SEQ ID NO: 2615849 - RNA, 19 nt, Artificial Sequence
  Description of Artificial Sequence: Synthetic oligonucleotide
uuugccccucugccucucc

SEQ ID NO: 2615850 - RNA, 19 nt, Artificial Sequence
  Description of Artificial Sequence: Synthetic oligonucleotide
uccucggguuggccuagcc

SEQ ID NO: 2615851 - RNA, 19 nt, Artificial Sequence
  Description of Artificial Sequence: Synthetic oligonucleotide
gccagcgaaccugugauug

SEQ ID NO: 2615852 - RNA, 19 nt, Artificial Sequence
  Description of Artificial Sequence: Synthetic oligonucleotide
uauggggcccugguccuca

SEQ ID NO: 2615853 - RNA, 19 nt, Artificial Sequence
  Description of Artificial Sequence: Synthetic oligonucleotide
cucgcccagugcaacggug

SEQ ID NO: 2615854 - RNA, 19 nt, Artificial Sequence
  Description of Artificial Sequence: Synthetic oligonucleotide
aguggcggcuggcgguggg

SEQ ID NO: 2615855 - RNA, 19 nt, Artificial Sequence
  Description of Artificial Sequence: Synthetic oligonucleotide
uggugggcaucaugguccu

SEQ ID NO: 2615856 - RNA, 19 nt, Artificial Sequence
  Description of Artificial Sequence: Synthetic oligonucleotide
gucggagccacugccugcc

SEQ ID NO: 2615857 - RNA, 19 nt, Artificial Sequence
  Description of Artificial Sequence: Synthetic oligonucleotide
gcgaaccugugauugggug

SEQ ID NO: 2615858 - RNA, 19 nt, Artificial Sequence
  Description of Artificial Sequence: Synthetic oligonucleotide
gguccucaccaucuuugcc

SEQ ID NO: 2615859 - RNA, 19 nt, Artificial Sequence
  Description of Artificial Sequence: Synthetic oligonucleotide
uagccggucuaaaggcuua

SEQ ID NO: 2615860 - RNA, 19 nt, Artificial Sequence
  Description of Artificial Sequence: Synthetic oligonucleotide
accugccuaaccugagaau

SEQ ID NO: 2615861 - RNA, 19 nt, Artificial Sequence
  Description of Artificial Sequence: Synthetic oligonucleotide
gguggguccucucugccuc

SEQ ID NO: 2615862 - RNA, 19 nt, Artificial Sequence
  Description of Artificial Sequence: Synthetic oligonucleotide
agugggucaggcucaccuu

SEQ ID NO: 2615863 - RNA, 19 nt, Artificial Sequence
  Description of Artificial Sequence: Synthetic oligonucleotide
acggggaaagaagggcgag

SEQ ID NO: 2615864 - RNA, 19 nt, Artificial Sequence
  Description of Artificial Sequence: Synthetic oligonucleotide
ucuguggaaggaggacacu

SEQ ID NO: 2615865 - RNA, 19 nt, Artificial Sequence
  Description of Artificial Sequence: Synthetic oligonucleotide
gucuaaaggcuuaugggau

SEQ ID NO: 2615866 - RNA, 19 nt, Artificial Sequence
  Description of Artificial Sequence: Synthetic oligonucleotide
ugcuggccagcggacuggg

SEQ ID NO: 2615867 - RNA, 19 nt, Artificial Sequence
  Description of Artificial Sequence: Synthetic oligonucleotide
uggcucccuacaguguuac

SEQ ID NO: 2615868 - RNA, 19 nt, Artificial Sequence
  Description of Artificial Sequence: Synthetic oligonucleotide
ugggccucuuccuuuccuu

SEQ ID NO: 2615869 - RNA, 19 nt, Artificial Sequence
  Description of Artificial Sequence: Synthetic oligonucleotide
ggugccagcgaaccuguga

SEQ ID NO: 2615870 - RNA, 19 nt, Artificial Sequence
  Description of Artificial Sequence: Synthetic oligonucleotide
cacggggaaagaagggcga

SEQ ID NO: 2615871 - RNA, 19 nt, Artificial Sequence
  Description of Artificial Sequence: Synthetic oligonucleotide
agcugugcuccaaggaggu

SEQ ID NO: 2615872 - RNA, 19 nt, Artificial Sequence
  Description of Artificial Sequence: Synthetic oligonucleotide
cccuccacggggaaagaag

SEQ ID NO: 2615873 - RNA, 19 nt, Artificial Sequence
  Description of Artificial Sequence: Synthetic oligonucleotide
aggaggugccagcgaaccu

SEQ ID NO: 2615874 - RNA, 19 nt, Artificial Sequence
  Description of Artificial Sequence: Synthetic oligonucleotide
cuccuccucgcccagugca

SEQ ID NO: 2615875 - RNA, 19 nt, Artificial Sequence
  Description of Artificial Sequence: Synthetic oligonucleotide
uugccccucugccucuccu

SEQ ID NO: 2615876 - RNA, 19 nt, Artificial Sequence
  Description of Artificial Sequence: Synthetic oligonucleotide
ucucccaggcugugucgga

SEQ ID NO: 2615877 - RNA, 19 nt, Artificial Sequence
  Description of Artificial Sequence: Synthetic oligonucleotide
uccgugcugcuggccagcg

SEQ ID NO: 2615878 - RNA, 19 nt, Artificial Sequence
  Description of Artificial Sequence: Synthetic oligonucleotide
accucgcugaccugccuaa

SEQ ID NO: 2615879 - RNA, 19 nt, Artificial Sequence
  Description of Artificial Sequence: Synthetic oligonucleotide
ugaccacgguuaugcuccc

SEQ ID NO: 2615880 - RNA, 19 nt, Artificial Sequence
  Description of Artificial Sequence: Synthetic oligonucleotide
cuggaaggcuggcaaccuc

SEQ ID NO: 2615881 - RNA, 19 nt, Artificial Sequence
  Description of Artificial Sequence: Synthetic oligonucleotide
uccuuguggcugugguccu

SEQ ID NO: 2615882 - RNA, 19 nt, Artificial Sequence
  Description of Artificial Sequence: Synthetic oligonucleotide
guccuacgcucuccucugg

SEQ ID NO: 2615883 - RNA, 19 nt, Artificial Sequence
  Description of Artificial Sequence: Synthetic oligonucleotide
gggaaagaagggcgagagc

SEQ ID NO: 2615884 - RNA, 19 nt, Artificial Sequence
  Description of Artificial Sequence: Synthetic oligonucleotide
ccagcgaaccugugauugg

SEQ ID NO: 2615885 - RNA, 19 nt, Artificial Sequence
  Description of Artificial Sequence: Synthetic oligonucleotide
ugauuggguggguccucuc

SEQ ID NO: 2615886 - RNA, 19 nt, Artificial Sequence
  Description of Artificial Sequence: Synthetic oligonucleotide
uugguguguauggggcccu

SEQ ID NO: 2615887 - RNA, 19 nt, Artificial Sequence
  Description of Artificial Sequence: Synthetic oligonucleotide
cuaaccugagaaucggcuu

SEQ ID NO: 2615888 - RNA, 19 nt, Artificial Sequence
  Description of Artificial Sequence: Synthetic oligonucleotide
gucgcugauguccuacgcu

SEQ ID NO: 2615889 - RNA, 19 nt, Artificial Sequence
  Description of Artificial Sequence: Synthetic oligonucleotide
cacgguuaugcucccucca

SEQ ID NO: 2615890 - RNA, 19 nt, Artificial Sequence
  Description of Artificial Sequence: Synthetic oligonucleotide
guucgguuccagcugugcu

SEQ ID NO: 2615891 - RNA, 19 nt, Artificial Sequence
  Description of Artificial Sequence: Synthetic oligonucleotide
gcggugggcuuccuggcgg

SEQ ID NO: 2615892 - RNA, 19 nt, Artificial Sequence
  Description of Artificial Sequence: Synthetic oligonucleotide
gcucccuccacggggaaag

SEQ ID NO: 2615893 - RNA, 19 nt, Artificial Sequence
  Description of Artificial Sequence: Synthetic oligonucleotide
cauagcuaaugcggaucuc

SEQ ID NO: 2615894 - RNA, 19 nt, Artificial Sequence
  Description of Artificial Sequence: Synthetic oligonucleotide
ugggccuagcccaggcauu

SEQ ID NO: 2615895 - RNA, 19 nt, Artificial Sequence
  Description of Artificial Sequence: Synthetic oligonucleotide
gugguccugucgcugaugu

SEQ ID NO: 2615896 - RNA, 19 nt, Artificial Sequence
  Description of Artificial Sequence: Synthetic oligonucleotide
cauugcucauuuucuugcu

SEQ ID NO: 2615897 - RNA, 19 nt, Artificial Sequence
  Description of Artificial Sequence: Synthetic oligonucleotide
gcucccuacaguguuacaa

SEQ ID NO: 2615898 - RNA, 19 nt, Artificial Sequence
  Description of Artificial Sequence: Synthetic oligonucleotide
ggcagagaaaugucugucu

SEQ ID NO: 2615899 - RNA, 19 nt, Artificial Sequence
  Description of Artificial Sequence: Synthetic oligonucleotide
gacuguuagccggucuaaa

SEQ ID NO: 2615900 - RNA, 19 nt, Artificial Sequence
  Description of Artificial Sequence: Synthetic oligonucleotide
ccugagaaucggcuucuac

SEQ ID NO: 2615901 - RNA, 19 nt, Artificial Sequence
  Description of Artificial Sequence: Synthetic oligonucleotide
uccagggguucgguuccag

SEQ ID NO: 2615902 - RNA, 19 nt, Artificial Sequence
  Description of Artificial Sequence: Synthetic oligonucleotide
gugccagcgaaccugugau

SEQ ID NO: 2615903 - RNA, 19 nt, Artificial Sequence
  Description of Artificial Sequence: Synthetic oligonucleotide
ggcggugggcuuccuggcg

SEQ ID NO: 2615904 - RNA, 19 nt, Artificial Sequence
  Description of Artificial Sequence: Synthetic oligonucleotide
cucccaggcugugucggag

SEQ ID NO: 2615905 - RNA, 19 nt, Artificial Sequence
  Description of Artificial Sequence: Synthetic oligonucleotide
agcaagugggaggacuguu

SEQ ID NO: 2615906 - RNA, 19 nt, Artificial Sequence
  Description of Artificial Sequence: Synthetic oligonucleotide
ggcugugucggagccacug

SEQ ID NO: 2615907 - RNA, 19 nt, Artificial Sequence
  Description of Artificial Sequence: Synthetic oligonucleotide
uuucuggcucugggccuag

SEQ ID NO: 2615908 - RNA, 19 nt, Artificial Sequence
  Description of Artificial Sequence: Synthetic oligonucleotide
ggucaggcucaccuuccug

SEQ ID NO: 2615909 - RNA, 19 nt, Artificial Sequence
  Description of Artificial Sequence: Synthetic oligonucleotide
ugccccucugccucuccuc

SEQ ID NO: 2615910 - RNA, 19 nt, Artificial Sequence
  Description of Artificial Sequence: Synthetic oligonucleotide
gguuggccuagcccuggcc

SEQ ID NO: 2615911 - RNA, 19 nt, Artificial Sequence
  Description of Artificial Sequence: Synthetic oligonucleotide
ucggagccacugccugccc

SEQ ID NO: 2615912 - RNA, 19 nt, Artificial Sequence
  Description of Artificial Sequence: Synthetic oligonucleotide
guuagccggucuaaaggcu

SEQ ID NO: 2615913 - RNA, 19 nt, Artificial Sequence
  Description of Artificial Sequence: Synthetic oligonucleotide
gcggcauccuccgugcugc

SEQ ID NO: 2615914 - RNA, 19 nt, Artificial Sequence
  Description of Artificial Sequence: Synthetic oligonucleotide
gcgagagcaagugggagga

SEQ ID NO: 2615915 - RNA, 19 nt, Artificial Sequence
  Description of Artificial Sequence: Synthetic oligonucleotide
gguucgguuccagcugugc

SEQ ID NO: 2615916 - RNA, 19 nt, Artificial Sequence
  Description of Artificial Sequence: Synthetic oligonucleotide
ucccuccacggggaaagaa

SEQ ID NO: 2615917 - RNA, 19 nt, Artificial Sequence
  Description of Artificial Sequence: Synthetic oligonucleotide
gaagugggucaggcucacc

SEQ ID NO: 2615918 - RNA, 19 nt, Artificial Sequence
  Description of Artificial Sequence: Synthetic oligonucleotide
agggcgagagcaaguggga

SEQ ID NO: 2615919 - RNA, 19 nt, Artificial Sequence
  Description of Artificial Sequence: Synthetic oligonucleotide
agcgaaccugugauugggu

SEQ ID NO: 2615920 - RNA, 19 nt, Artificial Sequence
  Description of Artificial Sequence: Synthetic oligonucleotide
gccuccucguuucauagcu

SEQ ID NO: 2615921 - RNA, 19 nt, Artificial Sequence
  Description of Artificial Sequence: Synthetic oligonucleotide
gaggacuguuagccggucu

SEQ ID NO: 2615922 - RNA, 19 nt, Artificial Sequence
  Description of Artificial Sequence: Synthetic oligonucleotide
gggcagagaaaugucuguc

SEQ ID NO: 2615923 - RNA, 19 nt, Artificial Sequence
  Description of Artificial Sequence: Synthetic oligonucleotide
guuccucggguuggccuag

SEQ ID NO: 2615924 - RNA, 19 nt, Artificial Sequence
  Description of Artificial Sequence: Synthetic oligonucleotide
ccucggguuggccuagccc

SEQ ID NO: 2615925 - RNA, 19 nt, Artificial Sequence
  Description of Artificial Sequence: Synthetic oligonucleotide
ccuaaccugagaaucggcu

SEQ ID NO: 2615926 - RNA, 19 nt, Artificial Sequence
  Description of Artificial Sequence: Synthetic oligonucleotide
gcaagggcagagaaauguc

SEQ ID NO: 2615927 - RNA, 19 nt, Artificial Sequence
  Description of Artificial Sequence: Synthetic oligonucleotide
cgguuaugcucccuccacg

SEQ ID NO: 2615928 - RNA, 19 nt, Artificial Sequence
  Description of Artificial Sequence: Synthetic oligonucleotide
gcuuaugaccacgguuaug

SEQ ID NO: 2615929 - RNA, 19 nt, Artificial Sequence
  Description of Artificial Sequence: Synthetic oligonucleotide
ugguguguauggggcccug

SEQ ID NO: 2615930 - RNA, 19 nt, Artificial Sequence
  Description of Artificial Sequence: Synthetic oligonucleotide
ugccagcgaaccugugauu

SEQ ID NO: 2615931 - RNA, 19 nt, Artificial Sequence
  Description of Artificial Sequence: Synthetic oligonucleotide
aaccugugauugggugggu

SEQ ID NO: 2615932 - RNA, 19 nt, Artificial Sequence
  Description of Artificial Sequence: Synthetic oligonucleotide
gaaucggcuucuacaacuu

SEQ ID NO: 2615933 - RNA, 19 nt, Artificial Sequence
  Description of Artificial Sequence: Synthetic oligonucleotide
ugguccugucgcugauguc

SEQ ID NO: 2615934 - RNA, 19 nt, Artificial Sequence
  Description of Artificial Sequence: Synthetic oligonucleotide
gcugaccugccuaaccuga

SEQ ID NO: 2615935 - RNA, 19 nt, Artificial Sequence
  Description of Artificial Sequence: Synthetic oligonucleotide
ggaaggcuggcaaccucgc

SEQ ID NO: 2615936 - RNA, 19 nt, Artificial Sequence
  Description of Artificial Sequence: Synthetic oligonucleotide
gugcaacggugaugaagga

SEQ ID NO: 2615937 - RNA, 19 nt, Artificial Sequence
  Description of Artificial Sequence: Synthetic oligonucleotide
gcuggcaaccucgcugacc

SEQ ID NO: 2615938 - RNA, 19 nt, Artificial Sequence
  Description of Artificial Sequence: Synthetic oligonucleotide
caucaugguccuuguggcu

SEQ ID NO: 2615939 - RNA, 19 nt, Artificial Sequence
  Description of Artificial Sequence: Synthetic oligonucleotide
cugccugcccuuggugggc

SEQ ID NO: 2615940 - RNA, 19 nt, Artificial Sequence
  Description of Artificial Sequence: Synthetic oligonucleotide
caccaucuuugccccucug

SEQ ID NO: 2615941 - RNA, 19 nt, Artificial Sequence
  Description of Artificial Sequence: Synthetic oligonucleotide
gggcgagagcaagugggag

SEQ ID NO: 2615942 - RNA, 19 nt, Artificial Sequence
  Description of Artificial Sequence: Synthetic oligonucleotide
gccccucugccucuccucc

SEQ ID NO: 2615943 - RNA, 19 nt, Artificial Sequence
  Description of Artificial Sequence: Synthetic oligonucleotide
ccagggguucgguuccagc

SEQ ID NO: 2615944 - RNA, 19 nt, Artificial Sequence
  Description of Artificial Sequence: Synthetic oligonucleotide
cuccgugcugcuggccagc

SEQ ID NO: 2615945 - RNA, 19 nt, Artificial Sequence
  Description of Artificial Sequence: Synthetic oligonucleotide
ugccugcccuuggugggca

SEQ ID NO: 2615946 - RNA, 19 nt, Artificial Sequence
  Description of Artificial Sequence: Synthetic oligonucleotide
gaguggcggcuggcggugg

SEQ ID NO: 2615947 - RNA, 19 nt, Artificial Sequence
  Description of Artificial Sequence: Synthetic oligonucleotide
uggcggcauccuccgugcu

SEQ ID NO: 2615948 - RNA, 19 nt, Artificial Sequence
  Description of Artificial Sequence: Synthetic oligonucleotide
gggccuagcccaggcauug

SEQ ID NO: 2615949 - RNA, 19 nt, Artificial Sequence
  Description of Artificial Sequence: Synthetic oligonucleotide
gcccuggccaggcuuggug

SEQ ID NO: 2615950 - RNA, 19 nt, Artificial Sequence
  Description of Artificial Sequence: Synthetic oligonucleotide
uuccagggguucgguucca

SEQ ID NO: 2615951 - RNA, 19 nt, Artificial Sequence
  Description of Artificial Sequence: Synthetic oligonucleotide
gucugucucccaggcugug

SEQ ID NO: 2615952 - RNA, 19 nt, Artificial Sequence
  Description of Artificial Sequence: Synthetic oligonucleotide
ccuggccaggcuuggugug

SEQ ID NO: 2615953 - RNA, 19 nt, Artificial Sequence
  Description of Artificial Sequence: Synthetic oligonucleotide
uggccaggcuuggugugua

SEQ ID NO: 2615954 - RNA, 19 nt, Artificial Sequence
  Description of Artificial Sequence: Synthetic oligonucleotide
cugggccuagcccaggcau

SEQ ID NO: 2615955 - RNA, 19 nt, Artificial Sequence
  Description of Artificial Sequence: Synthetic oligonucleotide
gaggugccagcgaaccugu

SEQ ID NO: 2615956 - RNA, 19 nt, Artificial Sequence
  Description of Artificial Sequence: Synthetic oligonucleotide
gcccuuggugggcaucaug

SEQ ID NO: 2615957 - RNA, 19 nt, Artificial Sequence
  Description of Artificial Sequence: Synthetic oligonucleotide
ccuacaguguuacaacuuu

SEQ ID NO: 2615958 - RNA, 19 nt, Artificial Sequence
  Description of Artificial Sequence: Synthetic oligonucleotide
ccucugccucuccuccucg

SEQ ID NO: 2615959 - RNA, 19 nt, Artificial Sequence
  Description of Artificial Sequence: Synthetic oligonucleotide
gagcaagugggaggacugu

SEQ ID NO: 2615960 - RNA, 19 nt, Artificial Sequence
  Description of Artificial Sequence: Synthetic oligonucleotide
uuccucggguuggccuagc

SEQ ID NO: 2615961 - RNA, 19 nt, Artificial Sequence
  Description of Artificial Sequence: Synthetic oligonucleotide
agcccaggcauugcucauu

SEQ ID NO: 2615962 - RNA, 19 nt, Artificial Sequence
  Description of Artificial Sequence: Synthetic oligonucleotide
cuggcucccuacaguguua

SEQ ID NO: 2615963 - RNA, 19 nt, Artificial Sequence
  Description of Artificial Sequence: Synthetic oligonucleotide
agccggucuaaaggcuuau

SEQ ID NO: 2615964 - RNA, 19 nt, Artificial Sequence
  Description of Artificial Sequence: Synthetic oligonucleotide
gcaagugggaggacuguua

SEQ ID NO: 2615965 - RNA, 19 nt, Artificial Sequence
  Description of Artificial Sequence: Synthetic oligonucleotide
gugauuggguggguccucu

SEQ ID NO: 2615966 - RNA, 19 nt, Artificial Sequence
  Description of Artificial Sequence: Synthetic oligonucleotide
gcuggcggugggcuuccug

SEQ ID NO: 2615967 - RNA, 19 nt, Artificial Sequence
  Description of Artificial Sequence: Synthetic oligonucleotide
gggguucgguuccagcugu

SEQ ID NO: 2615968 - RNA, 19 nt, Artificial Sequence
  Description of Artificial Sequence: Synthetic oligonucleotide
ggacuguuagccggucuaa

SEQ ID NO: 2615969 - RNA, 19 nt, Artificial Sequence
  Description of Artificial Sequence: Synthetic oligonucleotide
ggguuggccuagcccuggc

SEQ ID NO: 2615970 - RNA, 19 nt, Artificial Sequence
  Description of Artificial Sequence: Synthetic oligonucleotide
cgcugaccugccuaaccug

SEQ ID NO: 2615971 - RNA, 19 nt, Artificial Sequence
  Description of Artificial Sequence: Synthetic oligonucleotide
guauggggcccugguccuc

SEQ ID NO: 2615972 - RNA, 19 nt, Artificial Sequence
  Description of Artificial Sequence: Synthetic oligonucleotide
ccuacgcucuccucuggaa

SEQ ID NO: 2615973 - RNA, 19 nt, Artificial Sequence
  Description of Artificial Sequence: Synthetic oligonucleotide
gccggucuaaaggcuuaug

SEQ ID NO: 2615974 - RNA, 19 nt, Artificial Sequence
  Description of Artificial Sequence: Synthetic oligonucleotide
gcccagugcaacggugaug

SEQ ID NO: 2615975 - RNA, 19 nt, Artificial Sequence
  Description of Artificial Sequence: Synthetic oligonucleotide
ccuggggccuggcuuucug

SEQ ID NO: 2615976 - RNA, 19 nt, Artificial Sequence
  Description of Artificial Sequence: Synthetic oligonucleotide
cccagcaagggcagagaaa

SEQ ID NO: 2615977 - RNA, 19 nt, Artificial Sequence
  Description of Artificial Sequence: Synthetic oligonucleotide
ggccuagcccuggccaggc

SEQ ID NO: 2615978 - RNA, 19 nt, Artificial Sequence
  Description of Artificial Sequence: Synthetic oligonucleotide
ggaggacuguuagccgguc

SEQ ID NO: 2615979 - RNA, 19 nt, Artificial Sequence
  Description of Artificial Sequence: Synthetic oligonucleotide
gguuccagcugugcuccaa

SEQ ID NO: 2615980 - RNA, 19 nt, Artificial Sequence
  Description of Artificial Sequence: Synthetic oligonucleotide
gccuagcccaggcauugcu

SEQ ID NO: 2615981 - RNA, 19 nt, Artificial Sequence
  Description of Artificial Sequence: Synthetic oligonucleotide
aggugccagcgaaccugug

SEQ ID NO: 2615982 - RNA, 19 nt, Artificial Sequence
  Description of Artificial Sequence: Synthetic oligonucleotide
ggguggguccucucugccu

SEQ ID NO: 2615983 - RNA, 19 nt, Artificial Sequence
  Description of Artificial Sequence: Synthetic oligonucleotide
ggcucccuacaguguuaca

SEQ ID NO: 2615984 - RNA, 19 nt, Artificial Sequence
  Description of Artificial Sequence: Synthetic oligonucleotide
ccuccucgcccagugcaac

SEQ ID NO: 2615985 - RNA, 19 nt, Artificial Sequence
  Description of Artificial Sequence: Synthetic oligonucleotide
cguguggaagugggucagg

SEQ ID NO: 2615986 - RNA, 19 nt, Artificial Sequence
  Description of Artificial Sequence: Synthetic oligonucleotide
ggguucgguuccagcugug

SEQ ID NO: 2615987 - RNA, 19 nt, Artificial Sequence
  Description of Artificial Sequence: Synthetic oligonucleotide
ggcuggcaaccucgcugac

SEQ ID NO: 2615988 - RNA, 19 nt, Artificial Sequence
  Description of Artificial Sequence: Synthetic oligonucleotide
gcggacugggccucuuccu

SEQ ID NO: 2615989 - RNA, 19 nt, Artificial Sequence
  Description of Artificial Sequence: Synthetic oligonucleotide
ccgugcugcuggccagcgg

SEQ ID NO: 2615990 - RNA, 19 nt, Artificial Sequence
  Description of Artificial Sequence: Synthetic oligonucleotide
gggaggacuguuagccggu

SEQ ID NO: 2615991 - RNA, 19 nt, Artificial Sequence
  Description of Artificial Sequence: Synthetic oligonucleotide
cggugggcuuccuggcggc

SEQ ID NO: 2615992 - RNA, 19 nt, Artificial Sequence
  Description of Artificial Sequence: Synthetic oligonucleotide
gggucaggcucaccuuccu

SEQ ID NO: 2615993 - RNA, 19 nt, Artificial Sequence
  Description of Artificial Sequence: Synthetic oligonucleotide
gcggcuggcggugggcuuc

SEQ ID NO: 2615994 - RNA, 19 nt, Artificial Sequence
  Description of Artificial Sequence: Synthetic oligonucleotide
gaccacgguuaugcucccu

SEQ ID NO: 2615995 - RNA, 19 nt, Artificial Sequence
  Description of Artificial Sequence: Synthetic oligonucleotide
cucccuccacggggaaaga

SEQ ID NO: 2615996 - RNA, 19 nt, Artificial Sequence
  Description of Artificial Sequence: Synthetic oligonucleotide
cugugguccugucgcugau

SEQ ID NO: 2615997 - RNA, 19 nt, Artificial Sequence
  Description of Artificial Sequence: Synthetic oligonucleotide
cggguuggccuagcccugg

SEQ ID NO: 2615998 - RNA, 19 nt, Artificial Sequence
  Description of Artificial Sequence: Synthetic oligonucleotide
gcccaggcauugcucauuu

SEQ ID NO: 2615999 - RNA, 19 nt, Artificial Sequence
  Description of Artificial Sequence: Synthetic oligonucleotide
ggugggcuuccuggcggca

SEQ ID NO: 2616000 - RNA, 19 nt, Artificial Sequence
  Description of Artificial Sequence: Synthetic oligonucleotide
ccuccucguuucauagcua

SEQ ID NO: 2616001 - RNA, 19 nt, Artificial Sequence
  Description of Artificial Sequence: Synthetic oligonucleotide
gugggcuuccuggcggcau

SEQ ID NO: 2616002 - RNA, 19 nt, Artificial Sequence
  Description of Artificial Sequence: Synthetic oligonucleotide
gggauuccagggguucggu

SEQ ID NO: 2616003 - RNA, 19 nt, Artificial Sequence
  Description of Artificial Sequence: Synthetic oligonucleotide
ccucgcugaccugccuaac

SEQ ID NO: 2616004 - RNA, 19 nt, Artificial Sequence
  Description of Artificial Sequence: Synthetic oligonucleotide
ccugcccuuggugggcauc

SEQ ID NO: 2616005 - RNA, 19 nt, Artificial Sequence
  Description of Artificial Sequence: Synthetic oligonucleotide
ccuucguguggaagugggu

SEQ ID NO: 2616006 - RNA, 19 nt, Artificial Sequence
  Description of Artificial Sequence: Synthetic oligonucleotide
ggccagcggacugggccuc

SEQ ID NO: 2616007 - RNA, 19 nt, Artificial Sequence
  Description of Artificial Sequence: Synthetic oligonucleotide
ccuagcccuggccaggcuu

SEQ ID NO: 2616008 - RNA, 19 nt, Artificial Sequence
  Description of Artificial Sequence: Synthetic oligonucleotide
cggggaaagaagggcgaga

SEQ ID NO: 2616009 - RNA, 19 nt, Artificial Sequence
  Description of Artificial Sequence: Synthetic oligonucleotide
cgcugauguccuacgcucu

SEQ ID NO: 2616010 - RNA, 19 nt, Artificial Sequence
  Description of Artificial Sequence: Synthetic oligonucleotide
ccaggcugugucggagcca

SEQ ID NO: 2616011 - RNA, 19 nt, Artificial Sequence
  Description of Artificial Sequence: Synthetic oligonucleotide
cgagagcaagugggaggac

SEQ ID NO: 2616012 - RNA, 19 nt, Artificial Sequence
  Description of Artificial Sequence: Synthetic oligonucleotide
gcucaccuuccuggggccu

SEQ ID NO: 2616013 - RNA, 19 nt, Artificial Sequence
  Description of Artificial Sequence: Synthetic oligonucleotide
ggccaggcuugguguguau

SEQ ID NO: 2616014 - RNA, 19 nt, Artificial Sequence
  Description of Artificial Sequence: Synthetic oligonucleotide
ccucgcccagugcaacggu

SEQ ID NO: 2616015 - RNA, 19 nt, Artificial Sequence
  Description of Artificial Sequence: Synthetic oligonucleotide
gccuagcccuggccaggcu

SEQ ID NO: 2616016 - RNA, 19 nt, Artificial Sequence
  Description of Artificial Sequence: Synthetic oligonucleotide
cggacugggccucuuccuu

SEQ ID NO: 2616017 - RNA, 19 nt, Artificial Sequence
  Description of Artificial Sequence: Synthetic oligonucleotide
ggcggcuggcggugggcuu

SEQ ID NO: 2616018 - RNA, 19 nt, Artificial Sequence
  Description of Artificial Sequence: Synthetic oligonucleotide
cggcuggcggugggcuucc

SEQ ID NO: 2616019 - RNA, 19 nt, Artificial Sequence
  Description of Artificial Sequence: Synthetic oligonucleotide
cgguuccagcugugcucca

SEQ ID NO: 2616020 - RNA, 19 nt, Artificial Sequence
  Description of Artificial Sequence: Synthetic oligonucleotide
cccaggcauugcucauuuu

SEQ ID NO: 2616021 - RNA, 19 nt, Artificial Sequence
  Description of Artificial Sequence: Synthetic oligonucleotide
gccagcggacugggccucu

SEQ ID NO: 2616022 - RNA, 19 nt, Artificial Sequence
  Description of Artificial Sequence: Synthetic oligonucleotide
gccugcccuuggugggcau

SEQ ID NO: 2616023 - RNA, 19 nt, Artificial Sequence
  Description of Artificial Sequence: Synthetic oligonucleotide
ggcuggcggugggcuuccu

SEQ ID NO: 2616024 - RNA, 19 nt, Artificial Sequence
  Description of Artificial Sequence: Synthetic oligonucleotide
aagaggaccacauacuucc

SEQ ID NO: 2616025 - RNA, 19 nt, Artificial Sequence
  Description of Artificial Sequence: Synthetic oligonucleotide
uccacauugggcuugaugg

SEQ ID NO: 2616026 - RNA, 19 nt, Artificial Sequence
  Description of Artificial Sequence: Synthetic oligonucleotide
auacugaaaagccuggacc

SEQ ID NO: 2616027 - RNA, 19 nt, Artificial Sequence
  Description of Artificial Sequence: Synthetic oligonucleotide
uguuugaucaucuuaguug

SEQ ID NO: 2616028 - RNA, 19 nt, Artificial Sequence
  Description of Artificial Sequence: Synthetic oligonucleotide
gauacaagaauucaggcuc

SEQ ID NO: 2616029 - RNA, 19 nt, Artificial Sequence
  Description of Artificial Sequence: Synthetic oligonucleotide
uuuucggaagucuucagcg

SEQ ID NO: 2616030 - RNA, 19 nt, Artificial Sequence
  Description of Artificial Sequence: Synthetic oligonucleotide
aggacauccagguaggggc

SEQ ID NO: 2616031 - RNA, 19 nt, Artificial Sequence
  Description of Artificial Sequence: Synthetic oligonucleotide
aauucaggcucacugaugu

SEQ ID NO: 2616032 - RNA, 19 nt, Artificial Sequence
  Description of Artificial Sequence: Synthetic oligonucleotide
uugcuaaaagcaaugaucu

SEQ ID NO: 2616033 - RNA, 19 nt, Artificial Sequence
  Description of Artificial Sequence: Synthetic oligonucleotide
aagucuucagcgugguugc

SEQ ID NO: 2616034 - RNA, 19 nt, Artificial Sequence
  Description of Artificial Sequence: Synthetic oligonucleotide
cuaaaagcaaugaucuccg

SEQ ID NO: 2616035 - RNA, 19 nt, Artificial Sequence
  Description of Artificial Sequence: Synthetic oligonucleotide
aucuguauacugaaaagcc

SEQ ID NO: 2616036 - RNA, 19 nt, Artificial Sequence
  Description of Artificial Sequence: Synthetic oligonucleotide
ucuguagucugaaagcuug

SEQ ID NO: 2616037 - RNA, 19 nt, Artificial Sequence
  Description of Artificial Sequence: Synthetic oligonucleotide
uguauacugaaaagccugg

SEQ ID NO: 2616038 - RNA, 19 nt, Artificial Sequence
  Description of Artificial Sequence: Synthetic oligonucleotide
agcuugacuuccuugaagg

SEQ ID NO: 2616039 - RNA, 19 nt, Artificial Sequence
  Description of Artificial Sequence: Synthetic oligonucleotide
uuuucaacacuccauaauu

SEQ ID NO: 2616040 - RNA, 19 nt, Artificial Sequence
  Description of Artificial Sequence: Synthetic oligonucleotide
agucacaucagcaagcagg

SEQ ID NO: 2616041 - RNA, 19 nt, Artificial Sequence
  Description of Artificial Sequence: Synthetic oligonucleotide
ucuuaguuguguuuggaga

SEQ ID NO: 2616042 - RNA, 19 nt, Artificial Sequence
  Description of Artificial Sequence: Synthetic oligonucleotide
ucaucuguauacugaaaag

SEQ ID NO: 2616043 - RNA, 19 nt, Artificial Sequence
  Description of Artificial Sequence: Synthetic oligonucleotide
uugauggugucacugccgg

SEQ ID NO: 2616044 - RNA, 19 nt, Artificial Sequence
  Description of Artificial Sequence: Synthetic oligonucleotide
aaaagccuggaccaggcga

SEQ ID NO: 2616045 - RNA, 19 nt, Artificial Sequence
  Description of Artificial Sequence: Synthetic oligonucleotide
ucuagucacaucagcaagc

SEQ ID NO: 2616046 - RNA, 19 nt, Artificial Sequence
  Description of Artificial Sequence: Synthetic oligonucleotide
auugacugugaucugacga

SEQ ID NO: 2616047 - RNA, 19 nt, Artificial Sequence
  Description of Artificial Sequence: Synthetic oligonucleotide
ucaucaguuuucaacacuc

SEQ ID NO: 2616048 - RNA, 19 nt, Artificial Sequence
  Description of Artificial Sequence: Synthetic oligonucleotide
aaaagaggaccacauacuu

SEQ ID NO: 2616049 - RNA, 19 nt, Artificial Sequence
  Description of Artificial Sequence: Synthetic oligonucleotide
uauacugaaaagccuggac

SEQ ID NO: 2616050 - RNA, 19 nt, Artificial Sequence
  Description of Artificial Sequence: Synthetic oligonucleotide
ucuguauacugaaaagccu

SEQ ID NO: 2616051 - RNA, 19 nt, Artificial Sequence
  Description of Artificial Sequence: Synthetic oligonucleotide
uguguuuggagaaguauuc

SEQ ID NO: 2616052 - RNA, 19 nt, Artificial Sequence
  Description of Artificial Sequence: Synthetic oligonucleotide
aagagccucauccacagau

SEQ ID NO: 2616053 - RNA, 19 nt, Artificial Sequence
  Description of Artificial Sequence: Synthetic oligonucleotide
cuguauacugaaaagccug

SEQ ID NO: 2616054 - RNA, 19 nt, Artificial Sequence
  Description of Artificial Sequence: Synthetic oligonucleotide
agaaguauucuuugcuguc

SEQ ID NO: 2616055 - RNA, 19 nt, Artificial Sequence
  Description of Artificial Sequence: Synthetic oligonucleotide
acgaaggauacccuuggcg

SEQ ID NO: 2616056 - RNA, 19 nt, Artificial Sequence
  Description of Artificial Sequence: Synthetic oligonucleotide
gaucugacgaaggauaccc

SEQ ID NO: 2616057 - RNA, 19 nt, Artificial Sequence
  Description of Artificial Sequence: Synthetic oligonucleotide
ucccucuguagucugaaag

SEQ ID NO: 2616058 - RNA, 19 nt, Artificial Sequence
  Description of Artificial Sequence: Synthetic oligonucleotide
guugcuaaaagcaaugauc

SEQ ID NO: 2616059 - RNA, 19 nt, Artificial Sequence
  Description of Artificial Sequence: Synthetic oligonucleotide
ugacgaaggauacccuugg

SEQ ID NO: 2616060 - RNA, 19 nt, Artificial Sequence
  Description of Artificial Sequence: Synthetic oligonucleotide
acuccgaggaccucgcagc

SEQ ID NO: 2616061 - RNA, 19 nt, Artificial Sequence
  Description of Artificial Sequence: Synthetic oligonucleotide
guauucuuugcugucaucc

SEQ ID NO: 2616062 - RNA, 19 nt, Artificial Sequence
  Description of Artificial Sequence: Synthetic oligonucleotide
uggagaaguauucuuugcu

SEQ ID NO: 2616063 - RNA, 19 nt, Artificial Sequence
  Description of Artificial Sequence: Synthetic oligonucleotide
guugauccacgccaggugg

SEQ ID NO: 2616064 - RNA, 19 nt, Artificial Sequence
  Description of Artificial Sequence: Synthetic oligonucleotide
caucuguauacugaaaagc

SEQ ID NO: 2616065 - RNA, 19 nt, Artificial Sequence
  Description of Artificial Sequence: Synthetic oligonucleotide
agcuucuagucacaucagc

SEQ ID NO: 2616066 - RNA, 19 nt, Artificial Sequence
  Description of Artificial Sequence: Synthetic oligonucleotide
ugaacugagaguccacaga

SEQ ID NO: 2616067 - RNA, 19 nt, Artificial Sequence
  Description of Artificial Sequence: Synthetic oligonucleotide
uuggcgucgaugauaaaga

SEQ ID NO: 2616068 - RNA, 19 nt, Artificial Sequence
  Description of Artificial Sequence: Synthetic oligonucleotide
ucaguuuucaacacuccau

SEQ ID NO: 2616069 - RNA, 19 nt, Artificial Sequence
  Description of Artificial Sequence: Synthetic oligonucleotide
aagcuugacuuccuugaag

SEQ ID NO: 2616070 - RNA, 19 nt, Artificial Sequence
  Description of Artificial Sequence: Synthetic oligonucleotide
uuucaacacuccauaauuc

SEQ ID NO: 2616071 - RNA, 19 nt, Artificial Sequence
  Description of Artificial Sequence: Synthetic oligonucleotide
ugaaaagccuggaccaggc

SEQ ID NO: 2616072 - RNA, 19 nt, Artificial Sequence
  Description of Artificial Sequence: Synthetic oligonucleotide
gacugcgugggcaagagcc

SEQ ID NO: 2616073 - RNA, 19 nt, Artificial Sequence
  Description of Artificial Sequence: Synthetic oligonucleotide
ucaucuuaguuguguuugg

SEQ ID NO: 2616074 - RNA, 19 nt, Artificial Sequence
  Description of Artificial Sequence: Synthetic oligonucleotide
cuuggcgucgaugauaaag

SEQ ID NO: 2616075 - RNA, 19 nt, Artificial Sequence
  Description of Artificial Sequence: Synthetic oligonucleotide
uuccgugggguguugaucc

SEQ ID NO: 2616076 - RNA, 19 nt, Artificial Sequence
  Description of Artificial Sequence: Synthetic oligonucleotide
aacacuccauaauucucug

SEQ ID NO: 2616077 - RNA, 19 nt, Artificial Sequence
  Description of Artificial Sequence: Synthetic oligonucleotide
gcuaaaagcaaugaucucc

SEQ ID NO: 2616078 - RNA, 19 nt, Artificial Sequence
  Description of Artificial Sequence: Synthetic oligonucleotide
aucaucuuaguuguguuug

SEQ ID NO: 2616079 - RNA, 19 nt, Artificial Sequence
  Description of Artificial Sequence: Synthetic oligonucleotide
agucugaaagcuugacuuc

SEQ ID NO: 2616080 - RNA, 19 nt, Artificial Sequence
  Description of Artificial Sequence: Synthetic oligonucleotide
aaggauacccuuggcgucg

SEQ ID NO: 2616081 - RNA, 19 nt, Artificial Sequence
  Description of Artificial Sequence: Synthetic oligonucleotide
cacuccauaauucucugac

SEQ ID NO: 2616082 - RNA, 19 nt, Artificial Sequence
  Description of Artificial Sequence: Synthetic oligonucleotide
uaaagaggccccuguaggc

SEQ ID NO: 2616083 - RNA, 19 nt, Artificial Sequence
  Description of Artificial Sequence: Synthetic oligonucleotide
agaguccacagacacuccg

SEQ ID NO: 2616084 - RNA, 19 nt, Artificial Sequence
  Description of Artificial Sequence: Synthetic oligonucleotide
uguugauccacgccaggug

SEQ ID NO: 2616085 - RNA, 19 nt, Artificial Sequence
  Description of Artificial Sequence: Synthetic oligonucleotide
ucagcgugguugcuaaaag

SEQ ID NO: 2616086 - RNA, 19 nt, Artificial Sequence
  Description of Artificial Sequence: Synthetic oligonucleotide
uugccggaggccaugacug

SEQ ID NO: 2616087 - RNA, 19 nt, Artificial Sequence
  Description of Artificial Sequence: Synthetic oligonucleotide
ucggaagucuucagcgugg

SEQ ID NO: 2616088 - RNA, 19 nt, Artificial Sequence
  Description of Artificial Sequence: Synthetic oligonucleotide
ucaacacuccauaauucuc

SEQ ID NO: 2616089 - RNA, 19 nt, Artificial Sequence
  Description of Artificial Sequence: Synthetic oligonucleotide
cauacuucccucuguaguc

SEQ ID NO: 2616090 - RNA, 19 nt, Artificial Sequence
  Description of Artificial Sequence: Synthetic oligonucleotide
auacccuuggcgucgauga

SEQ ID NO: 2616091 - RNA, 19 nt, Artificial Sequence
  Description of Artificial Sequence: Synthetic oligonucleotide
uuucuggaccagcacagga

SEQ ID NO: 2616092 - RNA, 19 nt, Artificial Sequence
  Description of Artificial Sequence: Synthetic oligonucleotide
aucaguuuucaacacucca

SEQ ID NO: 2616093 - RNA, 19 nt, Artificial Sequence
  Description of Artificial Sequence: Synthetic oligonucleotide
guaggcaaugcccucauca

SEQ ID NO: 2616094 - RNA, 19 nt, Artificial Sequence
  Description of Artificial Sequence: Synthetic oligonucleotide
uccaugcucaucuguauac

SEQ ID NO: 2616095 - RNA, 19 nt, Artificial Sequence
  Description of Artificial Sequence: Synthetic oligonucleotide
uugaucaucuuaguugugu

SEQ ID NO: 2616096 - RNA, 19 nt, Artificial Sequence
  Description of Artificial Sequence: Synthetic oligonucleotide
gauggugucacugccgggc

SEQ ID NO: 2616097 - RNA, 19 nt, Artificial Sequence
  Description of Artificial Sequence: Synthetic oligonucleotide
uugacugugaucugacgaa

SEQ ID NO: 2616098 - RNA, 19 nt, Artificial Sequence
  Description of Artificial Sequence: Synthetic oligonucleotide
gcgucgaugauaaagaggc

SEQ ID NO: 2616099 - RNA, 19 nt, Artificial Sequence
  Description of Artificial Sequence: Synthetic oligonucleotide
aaugcccucaucaguuuuc

SEQ ID NO: 2616100 - RNA, 19 nt, Artificial Sequence
  Description of Artificial Sequence: Synthetic oligonucleotide
ucauugacugugaucugac

SEQ ID NO: 2616101 - RNA, 19 nt, Artificial Sequence
  Description of Artificial Sequence: Synthetic oligonucleotide
gucacaucagcaagcaggg

SEQ ID NO: 2616102 - RNA, 19 nt, Artificial Sequence
  Description of Artificial Sequence: Synthetic oligonucleotide
cacagaucgucccacuggg

SEQ ID NO: 2616103 - RNA, 19 nt, Artificial Sequence
  Description of Artificial Sequence: Synthetic oligonucleotide
cuggaccaggcgaagagcc

SEQ ID NO: 2616104 - RNA, 19 nt, Artificial Sequence
  Description of Artificial Sequence: Synthetic oligonucleotide
guuugaucaucuuaguugu

SEQ ID NO: 2616105 - RNA, 19 nt, Artificial Sequence
  Description of Artificial Sequence: Synthetic oligonucleotide
agaauucaggcucacugau

SEQ ID NO: 2616106 - RNA, 19 nt, Artificial Sequence
  Description of Artificial Sequence: Synthetic oligonucleotide
uugauccacgccagguggg

SEQ ID NO: 2616107 - RNA, 19 nt, Artificial Sequence
  Description of Artificial Sequence: Synthetic oligonucleotide
uucuggaccagcacaggac

SEQ ID NO: 2616108 - RNA, 19 nt, Artificial Sequence
  Description of Artificial Sequence: Synthetic oligonucleotide
acugugaucugacgaagga

SEQ ID NO: 2616109 - RNA, 19 nt, Artificial Sequence
  Description of Artificial Sequence: Synthetic oligonucleotide
ugggaggucauugacugug

SEQ ID NO: 2616110 - RNA, 19 nt, Artificial Sequence
  Description of Artificial Sequence: Synthetic oligonucleotide
aaagcuugacuuccuugaa

SEQ ID NO: 2616111 - RNA, 19 nt, Artificial Sequence
  Description of Artificial Sequence: Synthetic oligonucleotide
ggagaaguauucuuugcug

SEQ ID NO: 2616112 - RNA, 19 nt, Artificial Sequence
  Description of Artificial Sequence: Synthetic oligonucleotide
gcacaggacauccagguag

SEQ ID NO: 2616113 - RNA, 19 nt, Artificial Sequence
  Description of Artificial Sequence: Synthetic oligonucleotide
acaagcuucuagucacauc

SEQ ID NO: 2616114 - RNA, 19 nt, Artificial Sequence
  Description of Artificial Sequence: Synthetic oligonucleotide
aguauucuuugcugucauc

SEQ ID NO: 2616115 - RNA, 19 nt, Artificial Sequence
  Description of Artificial Sequence: Synthetic oligonucleotide
auaauucucugacaagcuu

SEQ ID NO: 2616116 - RNA, 19 nt, Artificial Sequence
  Description of Artificial Sequence: Synthetic oligonucleotide
aagagccggacacgcgaac

SEQ ID NO: 2616117 - RNA, 19 nt, Artificial Sequence
  Description of Artificial Sequence: Synthetic oligonucleotide
gaaaagccuggaccaggcg

SEQ ID NO: 2616118 - RNA, 19 nt, Artificial Sequence
  Description of Artificial Sequence: Synthetic oligonucleotide
ccauaauucucugacaagc

SEQ ID NO: 2616119 - RNA, 19 nt, Artificial Sequence
  Description of Artificial Sequence: Synthetic oligonucleotide
aguccacagacacuccgag

SEQ ID NO: 2616120 - RNA, 19 nt, Artificial Sequence
  Description of Artificial Sequence: Synthetic oligonucleotide
cucaucuguauacugaaaa

SEQ ID NO: 2616121 - RNA, 19 nt, Artificial Sequence
  Description of Artificial Sequence: Synthetic oligonucleotide
caucaguuuucaacacucc

SEQ ID NO: 2616122 - RNA, 19 nt, Artificial Sequence
  Description of Artificial Sequence: Synthetic oligonucleotide
cacaggacauccagguagg

SEQ ID NO: 2616123 - RNA, 19 nt, Artificial Sequence
  Description of Artificial Sequence: Synthetic oligonucleotide
gugaacugagaguccacag

SEQ ID NO: 2616124 - RNA, 19 nt, Artificial Sequence
  Description of Artificial Sequence: Synthetic oligonucleotide
uccgaugugcgcguugccg

SEQ ID NO: 2616125 - RNA, 19 nt, Artificial Sequence
  Description of Artificial Sequence: Synthetic oligonucleotide
cugacgaaggauacccuug

SEQ ID NO: 2616126 - RNA, 19 nt, Artificial Sequence
  Description of Artificial Sequence: Synthetic oligonucleotide
ucuucagcgugguugcuaa

SEQ ID NO: 2616127 - RNA, 19 nt, Artificial Sequence
  Description of Artificial Sequence: Synthetic oligonucleotide
uucuccaugcucaucugua

SEQ ID NO: 2616128 - RNA, 19 nt, Artificial Sequence
  Description of Artificial Sequence: Synthetic oligonucleotide
gacugugaucugacgaagg

SEQ ID NO: 2616129 - RNA, 19 nt, Artificial Sequence
  Description of Artificial Sequence: Synthetic oligonucleotide
uccacagaucgucccacug

SEQ ID NO: 2616130 - RNA, 19 nt, Artificial Sequence
  Description of Artificial Sequence: Synthetic oligonucleotide
cauugacugugaucugacg

SEQ ID NO: 2616131 - RNA, 19 nt, Artificial Sequence
  Description of Artificial Sequence: Synthetic oligonucleotide
gagaaguauucuuugcugu

SEQ ID NO: 2616132 - RNA, 19 nt, Artificial Sequence
  Description of Artificial Sequence: Synthetic oligonucleotide
gaaggauacccuuggcguc

SEQ ID NO: 2616133 - RNA, 19 nt, Artificial Sequence
  Description of Artificial Sequence: Synthetic oligonucleotide
guaggggcgggauacaaga

SEQ ID NO: 2616134 - RNA, 19 nt, Artificial Sequence
  Description of Artificial Sequence: Synthetic oligonucleotide
uuucggaagucuucagcgu

SEQ ID NO: 2616135 - RNA, 19 nt, Artificial Sequence
  Description of Artificial Sequence: Synthetic oligonucleotide
auguuugaucaucuuaguu

SEQ ID NO: 2616136 - RNA, 19 nt, Artificial Sequence
  Description of Artificial Sequence: Synthetic oligonucleotide
aaagugaaguccagugggu

SEQ ID NO: 2616137 - RNA, 19 nt, Artificial Sequence
  Description of Artificial Sequence: Synthetic oligonucleotide
cuccauaauucucugacaa

SEQ ID NO: 2616138 - RNA, 19 nt, Artificial Sequence
  Description of Artificial Sequence: Synthetic oligonucleotide
uuuucuggaccagcacagg

SEQ ID NO: 2616139 - RNA, 19 nt, Artificial Sequence
  Description of Artificial Sequence: Synthetic oligonucleotide
ucugacgaaggauacccuu

SEQ ID NO: 2616140 - RNA, 19 nt, Artificial Sequence
  Description of Artificial Sequence: Synthetic oligonucleotide
caggugggugaacugagag

SEQ ID NO: 2616141 - RNA, 19 nt, Artificial Sequence
  Description of Artificial Sequence: Synthetic oligonucleotide
ugacugugaucugacgaag

SEQ ID NO: 2616142 - RNA, 19 nt, Artificial Sequence
  Description of Artificial Sequence: Synthetic oligonucleotide
uuuccgaugugcgcguugc

SEQ ID NO: 2616143 - RNA, 19 nt, Artificial Sequence
  Description of Artificial Sequence: Synthetic oligonucleotide
auccacauugggcuugaug

SEQ ID NO: 2616144 - RNA, 19 nt, Artificial Sequence
  Description of Artificial Sequence: Synthetic oligonucleotide
cugaaaagccuggaccagg

SEQ ID NO: 2616145 - RNA, 19 nt, Artificial Sequence
  Description of Artificial Sequence: Synthetic oligonucleotide
ugaucaucuuaguuguguu

SEQ ID NO: 2616146 - RNA, 19 nt, Artificial Sequence
  Description of Artificial Sequence: Synthetic oligonucleotide
uggcgucgaugauaaagag

SEQ ID NO: 2616147 - RNA, 19 nt, Artificial Sequence
  Description of Artificial Sequence: Synthetic oligonucleotide
ugggguguugauccacgcc

SEQ ID NO: 2616148 - RNA, 19 nt, Artificial Sequence
  Description of Artificial Sequence: Synthetic oligonucleotide
acuccauaauucucugaca

SEQ ID NO: 2616149 - RNA, 19 nt, Artificial Sequence
  Description of Artificial Sequence: Synthetic oligonucleotide
cagcgugguugcuaaaagc

SEQ ID NO: 2616150 - RNA, 19 nt, Artificial Sequence
  Description of Artificial Sequence: Synthetic oligonucleotide
cuugaaggcgccguccacc

SEQ ID NO: 2616151 - RNA, 19 nt, Artificial Sequence
  Description of Artificial Sequence: Synthetic oligonucleotide
agacacuccgaggaccucg

SEQ ID NO: 2616152 - RNA, 19 nt, Artificial Sequence
  Description of Artificial Sequence: Synthetic oligonucleotide
gugggcaagagccggacac

SEQ ID NO: 2616153 - RNA, 19 nt, Artificial Sequence
  Description of Artificial Sequence: Synthetic oligonucleotide
uccuugaaggcgccgucca

SEQ ID NO: 2616154 - RNA, 19 nt, Artificial Sequence
  Description of Artificial Sequence: Synthetic oligonucleotide
ucacugauguuugaucauc

SEQ ID NO: 2616155 - RNA, 19 nt, Artificial Sequence
  Description of Artificial Sequence: Synthetic oligonucleotide
cuucuagucacaucagcaa

SEQ ID NO: 2616156 - RNA, 19 nt, Artificial Sequence
  Description of Artificial Sequence: Synthetic oligonucleotide
ugggugaacugagagucca

SEQ ID NO: 2616157 - RNA, 19 nt, Artificial Sequence
  Description of Artificial Sequence: Synthetic oligonucleotide
aagccucccuccuuccgug

SEQ ID NO: 2616158 - RNA, 19 nt, Artificial Sequence
  Description of Artificial Sequence: Synthetic oligonucleotide
cacauacuucccucuguag

SEQ ID NO: 2616159 - RNA, 19 nt, Artificial Sequence
  Description of Artificial Sequence: Synthetic oligonucleotide
ugguugcuaaaagcaauga

SEQ ID NO: 2616160 - RNA, 19 nt, Artificial Sequence
  Description of Artificial Sequence: Synthetic oligonucleotide
cucgcagcccaguuuucgg

SEQ ID NO: 2616161 - RNA, 19 nt, Artificial Sequence
  Description of Artificial Sequence: Synthetic oligonucleotide
aaagccuggaccaggcgaa

SEQ ID NO: 2616162 - RNA, 19 nt, Artificial Sequence
  Description of Artificial Sequence: Synthetic oligonucleotide
uucagcgugguugcuaaaa

SEQ ID NO: 2616163 - RNA, 19 nt, Artificial Sequence
  Description of Artificial Sequence: Synthetic oligonucleotide
gauacccuuggcgucgaug

SEQ ID NO: 2616164 - RNA, 19 nt, Artificial Sequence
  Description of Artificial Sequence: Synthetic oligonucleotide
acugaaaagccuggaccag

SEQ ID NO: 2616165 - RNA, 19 nt, Artificial Sequence
  Description of Artificial Sequence: Synthetic oligonucleotide
agagccggacacgcgaacg

SEQ ID NO: 2616166 - RNA, 19 nt, Artificial Sequence
  Description of Artificial Sequence: Synthetic oligonucleotide
gcucacugauguuugauca

SEQ ID NO: 2616167 - RNA, 19 nt, Artificial Sequence
  Description of Artificial Sequence: Synthetic oligonucleotide
gacgaaggauacccuuggc

SEQ ID NO: 2616168 - RNA, 19 nt, Artificial Sequence
  Description of Artificial Sequence: Synthetic oligonucleotide
cacagacacuccgaggacc

SEQ ID NO: 2616169 - RNA, 19 nt, Artificial Sequence
  Description of Artificial Sequence: Synthetic oligonucleotide
aggugggugaacugagagu

SEQ ID NO: 2616170 - RNA, 19 nt, Artificial Sequence
  Description of Artificial Sequence: Synthetic oligonucleotide
ucuccaugcucaucuguau

SEQ ID NO: 2616171 - RNA, 19 nt, Artificial Sequence
  Description of Artificial Sequence: Synthetic oligonucleotide
ugggcaagagccggacacg

SEQ ID NO: 2616172 - RNA, 19 nt, Artificial Sequence
  Description of Artificial Sequence: Synthetic oligonucleotide
aggcaaugcccucaucagu

SEQ ID NO: 2616173 - RNA, 19 nt, Artificial Sequence
  Description of Artificial Sequence: Synthetic oligonucleotide
cacauugggcuugauggug

SEQ ID NO: 2616174 - RNA, 19 nt, Artificial Sequence
  Description of Artificial Sequence: Synthetic oligonucleotide
gucauugacugugaucuga

SEQ ID NO: 2616175 - RNA, 19 nt, Artificial Sequence
  Description of Artificial Sequence: Synthetic oligonucleotide
aagcuucuagucacaucag

SEQ ID NO: 2616176 - RNA, 19 nt, Artificial Sequence
  Description of Artificial Sequence: Synthetic oligonucleotide
guuuucaacacuccauaau

SEQ ID NO: 2616177 - RNA, 19 nt, Artificial Sequence
  Description of Artificial Sequence: Synthetic oligonucleotide
cacuccgaggaccucgcag

SEQ ID NO: 2616178 - RNA, 19 nt, Artificial Sequence
  Description of Artificial Sequence: Synthetic oligonucleotide
ugcgguggccgugaagucc

SEQ ID NO: 2616179 - RNA, 19 nt, Artificial Sequence
  Description of Artificial Sequence: Synthetic oligonucleotide
gcugucauccacauugggc

SEQ ID NO: 2616180 - RNA, 19 nt, Artificial Sequence
  Description of Artificial Sequence: Synthetic oligonucleotide
caacacuccauaauucucu

SEQ ID NO: 2616181 - RNA, 19 nt, Artificial Sequence
  Description of Artificial Sequence: Synthetic oligonucleotide
cauaauucucugacaagcu

SEQ ID NO: 2616182 - RNA, 19 nt, Artificial Sequence
  Description of Artificial Sequence: Synthetic oligonucleotide
gggguguugauccacgcca

SEQ ID NO: 2616183 - RNA, 19 nt, Artificial Sequence
  Description of Artificial Sequence: Synthetic oligonucleotide
cccucuguagucugaaagc

SEQ ID NO: 2616184 - RNA, 19 nt, Artificial Sequence
  Description of Artificial Sequence: Synthetic oligonucleotide
uuccuugaaggcgccgucc

SEQ ID NO: 2616185 - RNA, 19 nt, Artificial Sequence
  Description of Artificial Sequence: Synthetic oligonucleotide
ggcgucgaugauaaagagg

SEQ ID NO: 2616186 - RNA, 19 nt, Artificial Sequence
  Description of Artificial Sequence: Synthetic oligonucleotide
auacaagaauucaggcuca

SEQ ID NO: 2616187 - RNA, 19 nt, Artificial Sequence
  Description of Artificial Sequence: Synthetic oligonucleotide
acuuccuugaaggcgccgu

SEQ ID NO: 2616188 - RNA, 19 nt, Artificial Sequence
  Description of Artificial Sequence: Synthetic oligonucleotide
auccacgccagguggguga

SEQ ID NO: 2616189 - RNA, 19 nt, Artificial Sequence
  Description of Artificial Sequence: Synthetic oligonucleotide
ucgcagcccaguuuucgga

SEQ ID NO: 2616190 - RNA, 19 nt, Artificial Sequence
  Description of Artificial Sequence: Synthetic oligonucleotide
aggggcgggauacaagaau

SEQ ID NO: 2616191 - RNA, 19 nt, Artificial Sequence
  Description of Artificial Sequence: Synthetic oligonucleotide
acacuccauaauucucuga

SEQ ID NO: 2616192 - RNA, 19 nt, Artificial Sequence
  Description of Artificial Sequence: Synthetic oligonucleotide
ugcgcguugccggaggcca

SEQ ID NO: 2616193 - RNA, 19 nt, Artificial Sequence
  Description of Artificial Sequence: Synthetic oligonucleotide
ugugcgcguugccggaggc

SEQ ID NO: 2616194 - RNA, 19 nt, Artificial Sequence
  Description of Artificial Sequence: Synthetic oligonucleotide
agaggaccacauacuuccc

SEQ ID NO: 2616195 - RNA, 19 nt, Artificial Sequence
  Description of Artificial Sequence: Synthetic oligonucleotide
auacuucccucuguagucu

SEQ ID NO: 2616196 - RNA, 19 nt, Artificial Sequence
  Description of Artificial Sequence: Synthetic oligonucleotide
gacauccagguaggggcgg

SEQ ID NO: 2616197 - RNA, 19 nt, Artificial Sequence
  Description of Artificial Sequence: Synthetic oligonucleotide
ucacaucagcaagcagggg

SEQ ID NO: 2616198 - RNA, 19 nt, Artificial Sequence
  Description of Artificial Sequence: Synthetic oligonucleotide
augugcgcguugccggagg

SEQ ID NO: 2616199 - RNA, 19 nt, Artificial Sequence
  Description of Artificial Sequence: Synthetic oligonucleotide
augacugcgugggcaagag

SEQ ID NO: 2616200 - RNA, 19 nt, Artificial Sequence
  Description of Artificial Sequence: Synthetic oligonucleotide
acugcgugggcaagagccg

SEQ ID NO: 2616201 - RNA, 19 nt, Artificial Sequence
  Description of Artificial Sequence: Synthetic oligonucleotide
uggaccaggcgaagagccu

SEQ ID NO: 2616202 - RNA, 19 nt, Artificial Sequence
  Description of Artificial Sequence: Synthetic oligonucleotide
acacaaaagugaaguccag

SEQ ID NO: 2616203 - RNA, 19 nt, Artificial Sequence
  Description of Artificial Sequence: Synthetic oligonucleotide
uacaagaauucaggcucac

SEQ ID NO: 2616204 - RNA, 19 nt, Artificial Sequence
  Description of Artificial Sequence: Synthetic oligonucleotide
ggcgccguccaccacugcg

SEQ ID NO: 2616205 - RNA, 19 nt, Artificial Sequence
  Description of Artificial Sequence: Synthetic oligonucleotide
acagacacuccgaggaccu

SEQ ID NO: 2616206 - RNA, 19 nt, Artificial Sequence
  Description of Artificial Sequence: Synthetic oligonucleotide
cccucaucaguuuucaaca

SEQ ID NO: 2616207 - RNA, 19 nt, Artificial Sequence
  Description of Artificial Sequence: Synthetic oligonucleotide
ugacugcgugggcaagagc

SEQ ID NO: 2616208 - RNA, 19 nt, Artificial Sequence
  Description of Artificial Sequence: Synthetic oligonucleotide
ccacagaucgucccacugg

SEQ ID NO: 2616209 - RNA, 19 nt, Artificial Sequence
  Description of Artificial Sequence: Synthetic oligonucleotide
aaguccggggccggcuuuc

SEQ ID NO: 2616210 - RNA, 19 nt, Artificial Sequence
  Description of Artificial Sequence: Synthetic oligonucleotide
uccggggccggcuuuccga

SEQ ID NO: 2616211 - RNA, 19 nt, Artificial Sequence
  Description of Artificial Sequence: Synthetic oligonucleotide
guauacugaaaagccugga

SEQ ID NO: 2616212 - RNA, 19 nt, Artificial Sequence
  Description of Artificial Sequence: Synthetic oligonucleotide
cacugccgggcuuccagcc

SEQ ID NO: 2616213 - RNA, 19 nt, Artificial Sequence
  Description of Artificial Sequence: Synthetic oligonucleotide
acauugggcuugauggugu

SEQ ID NO: 2616214 - RNA, 19 nt, Artificial Sequence
  Description of Artificial Sequence: Synthetic oligonucleotide
aggccaugacugcgugggc

SEQ ID NO: 2616215 - RNA, 19 nt, Artificial Sequence
  Description of Artificial Sequence: Synthetic oligonucleotide
gguguugauccacgccagg

SEQ ID NO: 2616216 - RNA, 19 nt, Artificial Sequence
  Description of Artificial Sequence: Synthetic oligonucleotide
cuuuccgaugugcgcguug

SEQ ID NO: 2616217 - RNA, 19 nt, Artificial Sequence
  Description of Artificial Sequence: Synthetic oligonucleotide
caguuuucggaagucuuca

SEQ ID NO: 2616218 - RNA, 19 nt, Artificial Sequence
  Description of Artificial Sequence: Synthetic oligonucleotide
gcgggauacaagaauucag

SEQ ID NO: 2616219 - RNA, 19 nt, Artificial Sequence
  Description of Artificial Sequence: Synthetic oligonucleotide
gaucaucuuaguuguguuu

SEQ ID NO: 2616220 - RNA, 19 nt, Artificial Sequence
  Description of Artificial Sequence: Synthetic oligonucleotide
gacacuccgaggaccucgc

SEQ ID NO: 2616221 - RNA, 19 nt, Artificial Sequence
  Description of Artificial Sequence: Synthetic oligonucleotide
ggaccagcacaggacaucc

SEQ ID NO: 2616222 - RNA, 19 nt, Artificial Sequence
  Description of Artificial Sequence: Synthetic oligonucleotide
uaggggcgggauacaagaa

SEQ ID NO: 2616223 - RNA, 19 nt, Artificial Sequence
  Description of Artificial Sequence: Synthetic oligonucleotide
agcccaguuuucggaaguc

SEQ ID NO: 2616224 - RNA, 19 nt, Artificial Sequence
  Description of Artificial Sequence: Synthetic oligonucleotide
uuccgaugugcgcguugcc

SEQ ID NO: 2616225 - RNA, 19 nt, Artificial Sequence
  Description of Artificial Sequence: Synthetic oligonucleotide
ggcgaagagccucauccac

SEQ ID NO: 2616226 - RNA, 19 nt, Artificial Sequence
  Description of Artificial Sequence: Synthetic oligonucleotide
uggaccagcacaggacauc

SEQ ID NO: 2616227 - RNA, 19 nt, Artificial Sequence
  Description of Artificial Sequence: Synthetic oligonucleotide
gugggguguugauccacgc

SEQ ID NO: 2616228 - RNA, 19 nt, Artificial Sequence
  Description of Artificial Sequence: Synthetic oligonucleotide
ugauccacgccaggugggu

SEQ ID NO: 2616229 - RNA, 19 nt, Artificial Sequence
  Description of Artificial Sequence: Synthetic oligonucleotide
ccgaugugcgcguugccgg

SEQ ID NO: 2616230 - RNA, 19 nt, Artificial Sequence
  Description of Artificial Sequence: Synthetic oligonucleotide
ugcgugggcaagagccgga

SEQ ID NO: 2616231 - RNA, 19 nt, Artificial Sequence
  Description of Artificial Sequence: Synthetic oligonucleotide
cuuccuugaaggcgccguc

SEQ ID NO: 2616232 - RNA, 19 nt, Artificial Sequence
  Description of Artificial Sequence: Synthetic oligonucleotide
gcaagagccggacacgcga

SEQ ID NO: 2616233 - RNA, 19 nt, Artificial Sequence
  Description of Artificial Sequence: Synthetic oligonucleotide
cuccgaggaccucgcagcc

SEQ ID NO: 2616234 - RNA, 19 nt, Artificial Sequence
  Description of Artificial Sequence: Synthetic oligonucleotide
gaugugcgcguugccggag

SEQ ID NO: 2616235 - RNA, 19 nt, Artificial Sequence
  Description of Artificial Sequence: Synthetic oligonucleotide
gaguccacagacacuccga

SEQ ID NO: 2616236 - RNA, 19 nt, Artificial Sequence
  Description of Artificial Sequence: Synthetic oligonucleotide
cauugggcuugaugguguc

SEQ ID NO: 2616237 - RNA, 19 nt, Artificial Sequence
  Description of Artificial Sequence: Synthetic oligonucleotide
guugccggaggccaugacu

SEQ ID NO: 2616238 - RNA, 19 nt, Artificial Sequence
  Description of Artificial Sequence: Synthetic oligonucleotide
cugccgggcuuccagccag

SEQ ID NO: 2616239 - RNA, 19 nt, Artificial Sequence
  Description of Artificial Sequence: Synthetic oligonucleotide
cugcgugggcaagagccgg

SEQ ID NO: 2616240 - RNA, 19 nt, Artificial Sequence
  Description of Artificial Sequence: Synthetic oligonucleotide
aagccuggaccaggcgaag

SEQ ID NO: 2616241 - RNA, 19 nt, Artificial Sequence
  Description of Artificial Sequence: Synthetic oligonucleotide
cuguagucugaaagcuuga

SEQ ID NO: 2616242 - RNA, 19 nt, Artificial Sequence
  Description of Artificial Sequence: Synthetic oligonucleotide
gccuggaccaggcgaagag

SEQ ID NO: 2616243 - RNA, 19 nt, Artificial Sequence
  Description of Artificial Sequence: Synthetic oligonucleotide
ugggcuugauggugucacu

SEQ ID NO: 2616244 - RNA, 19 nt, Artificial Sequence
  Description of Artificial Sequence: Synthetic oligonucleotide
aaggcgccguccaccacug

SEQ ID NO: 2616245 - RNA, 19 nt, Artificial Sequence
  Description of Artificial Sequence: Synthetic oligonucleotide
gagaguccacagacacucc

SEQ ID NO: 2616246 - RNA, 19 nt, Artificial Sequence
  Description of Artificial Sequence: Synthetic oligonucleotide
ggugaacugagaguccaca

SEQ ID NO: 2616247 - RNA, 19 nt, Artificial Sequence
  Description of Artificial Sequence: Synthetic oligonucleotide
augcccucaucaguuuuca

SEQ ID NO: 2616248 - RNA, 19 nt, Artificial Sequence
  Description of Artificial Sequence: Synthetic oligonucleotide
gauccacgccaggugggug

SEQ ID NO: 2616249 - RNA, 19 nt, Artificial Sequence
  Description of Artificial Sequence: Synthetic oligonucleotide
uccgugggguguugaucca

SEQ ID NO: 2616250 - RNA, 19 nt, Artificial Sequence
  Description of Artificial Sequence: Synthetic oligonucleotide
aggccccuguaggcaaugc

SEQ ID NO: 2616251 - RNA, 19 nt, Artificial Sequence
  Description of Artificial Sequence: Synthetic oligonucleotide
gguugcuaaaagcaaugau

SEQ ID NO: 2616252 - RNA, 19 nt, Artificial Sequence
  Description of Artificial Sequence: Synthetic oligonucleotide
uccgaggaccucgcagccc

SEQ ID NO: 2616253 - RNA, 19 nt, Artificial Sequence
  Description of Artificial Sequence: Synthetic oligonucleotide
gaccucgcagcccaguuuu

SEQ ID NO: 2616254 - RNA, 19 nt, Artificial Sequence
  Description of Artificial Sequence: Synthetic oligonucleotide
gaagagccucauccacaga

SEQ ID NO: 2616255 - RNA, 19 nt, Artificial Sequence
  Description of Artificial Sequence: Synthetic oligonucleotide
gcagcccaguuuucggaag

SEQ ID NO: 2616256 - RNA, 19 nt, Artificial Sequence
  Description of Artificial Sequence: Synthetic oligonucleotide
aguuguguuuggagaagua

SEQ ID NO: 2616257 - RNA, 19 nt, Artificial Sequence
  Description of Artificial Sequence: Synthetic oligonucleotide
gugggugaacugagagucc

SEQ ID NO: 2616258 - RNA, 19 nt, Artificial Sequence
  Description of Artificial Sequence: Synthetic oligonucleotide
ccagguaggggcgggauac

SEQ ID NO: 2616259 - RNA, 19 nt, Artificial Sequence
  Description of Artificial Sequence: Synthetic oligonucleotide
gguaggggcgggauacaag

SEQ ID NO: 2616260 - RNA, 19 nt, Artificial Sequence
  Description of Artificial Sequence: Synthetic oligonucleotide
gccucauccacagaucguc

SEQ ID NO: 2616261 - RNA, 19 nt, Artificial Sequence
  Description of Artificial Sequence: Synthetic oligonucleotide
uacccuuggcgucgaugau

SEQ ID NO: 2616262 - RNA, 19 nt, Artificial Sequence
  Description of Artificial Sequence: Synthetic oligonucleotide
gcgguggccgugaaguccg

SEQ ID NO: 2616263 - RNA, 19 nt, Artificial Sequence
  Description of Artificial Sequence: Synthetic oligonucleotide
aggaccucgcagcccaguu

SEQ ID NO: 2616264 - RNA, 19 nt, Artificial Sequence
  Description of Artificial Sequence: Synthetic oligonucleotide
aguccggggccggcuuucc

SEQ ID NO: 2616265 - RNA, 19 nt, Artificial Sequence
  Description of Artificial Sequence: Synthetic oligonucleotide
ggcgggauacaagaauuca

SEQ ID NO: 2616266 - RNA, 19 nt, Artificial Sequence
  Description of Artificial Sequence: Synthetic oligonucleotide
acgccaggugggugaacug

SEQ ID NO: 2616267 - RNA, 19 nt, Artificial Sequence
  Description of Artificial Sequence: Synthetic oligonucleotide
auucaggcucacugauguu

SEQ ID NO: 2616268 - RNA, 19 nt, Artificial Sequence
  Description of Artificial Sequence: Synthetic oligonucleotide
aucugacgaaggauacccu

SEQ ID NO: 2616269 - RNA, 19 nt, Artificial Sequence
  Description of Artificial Sequence: Synthetic oligonucleotide
ggccccuguaggcaaugcc

SEQ ID NO: 2616270 - RNA, 19 nt, Artificial Sequence
  Description of Artificial Sequence: Synthetic oligonucleotide
accacugcgguggccguga

SEQ ID NO: 2616271 - RNA, 19 nt, Artificial Sequence
  Description of Artificial Sequence: Synthetic oligonucleotide
gccggcuuuccgaugugcg

SEQ ID NO: 2616272 - RNA, 19 nt, Artificial Sequence
  Description of Artificial Sequence: Synthetic oligonucleotide
ggguguugauccacgccag

SEQ ID NO: 2616273 - RNA, 19 nt, Artificial Sequence
  Description of Artificial Sequence: Synthetic oligonucleotide
caugacugcgugggcaaga

SEQ ID NO: 2616274 - RNA, 19 nt, Artificial Sequence
  Description of Artificial Sequence: Synthetic oligonucleotide
caagagccggacacgcgaa

SEQ ID NO: 2616275 - RNA, 19 nt, Artificial Sequence
  Description of Artificial Sequence: Synthetic oligonucleotide
cgugggguguugauccacg

SEQ ID NO: 2616276 - RNA, 19 nt, Artificial Sequence
  Description of Artificial Sequence: Synthetic oligonucleotide
ccggcuuuccgaugugcgc

SEQ ID NO: 2616277 - RNA, 19 nt, Artificial Sequence
  Description of Artificial Sequence: Synthetic oligonucleotide
guguugauccacgccaggu

SEQ ID NO: 2616278 - RNA, 19 nt, Artificial Sequence
  Description of Artificial Sequence: Synthetic oligonucleotide
acccuuggcgucgaugaua

SEQ ID NO: 2616279 - RNA, 19 nt, Artificial Sequence
  Description of Artificial Sequence: Synthetic oligonucleotide
gggcaagagccggacacgc

SEQ ID NO: 2616280 - RNA, 19 nt, Artificial Sequence
  Description of Artificial Sequence: Synthetic oligonucleotide
gaccaggcgaagagccuca

SEQ ID NO: 2616281 - RNA, 19 nt, Artificial Sequence
  Description of Artificial Sequence: Synthetic oligonucleotide
ggcaagagccggacacgcg

SEQ ID NO: 2616282 - RNA, 19 nt, Artificial Sequence
  Description of Artificial Sequence: Synthetic oligonucleotide
gacaagcuucuagucacau

SEQ ID NO: 2616283 - RNA, 19 nt, Artificial Sequence
  Description of Artificial Sequence: Synthetic oligonucleotide
cucacugauguuugaucau

SEQ ID NO: 2616284 - RNA, 19 nt, Artificial Sequence
  Description of Artificial Sequence: Synthetic oligonucleotide
gccgugaaguccggggccg

SEQ ID NO: 2616285 - RNA, 19 nt, Artificial Sequence
  Description of Artificial Sequence: Synthetic oligonucleotide
ugccgggcuuccagccagc

SEQ ID NO: 2616286 - RNA, 19 nt, Artificial Sequence
  Description of Artificial Sequence: Synthetic oligonucleotide
uccuuccgugggguguuga

SEQ ID NO: 2616287 - RNA, 19 nt, Artificial Sequence
  Description of Artificial Sequence: Synthetic oligonucleotide
agguaggggcgggauacaa

SEQ ID NO: 2616288 - RNA, 19 nt, Artificial Sequence
  Description of Artificial Sequence: Synthetic oligonucleotide
cacugcgguggccgugaag

SEQ ID NO: 2616289 - RNA, 19 nt, Artificial Sequence
  Description of Artificial Sequence: Synthetic oligonucleotide
agccucauccacagaucgu

SEQ ID NO: 2616290 - RNA, 19 nt, Artificial Sequence
  Description of Artificial Sequence: Synthetic oligonucleotide
guccggggccggcuuuccg

SEQ ID NO: 2616291 - RNA, 19 nt, Artificial Sequence
  Description of Artificial Sequence: Synthetic oligonucleotide
ggaccaggcgaagagccuc

SEQ ID NO: 2616292 - RNA, 19 nt, Artificial Sequence
  Description of Artificial Sequence: Synthetic oligonucleotide
ccucgcagcccaguuuucg

SEQ ID NO: 2616293 - RNA, 19 nt, Artificial Sequence
  Description of Artificial Sequence: Synthetic oligonucleotide
ccaagccucccuccuuccg

SEQ ID NO: 2616294 - RNA, 19 nt, Artificial Sequence
  Description of Artificial Sequence: Synthetic oligonucleotide
cgaaggauacccuuggcgu

SEQ ID NO: 2616295 - RNA, 19 nt, Artificial Sequence
  Description of Artificial Sequence: Synthetic oligonucleotide
cuucccucuguagucugaa

SEQ ID NO: 2616296 - RNA, 19 nt, Artificial Sequence
  Description of Artificial Sequence: Synthetic oligonucleotide
ugucacugccgggcuucca

SEQ ID NO: 2616297 - RNA, 19 nt, Artificial Sequence
  Description of Artificial Sequence: Synthetic oligonucleotide
ccuggaccaggcgaagagc

SEQ ID NO: 2616298 - RNA, 19 nt, Artificial Sequence
  Description of Artificial Sequence: Synthetic oligonucleotide
acacuccgaggaccucgca

SEQ ID NO: 2616299 - RNA, 19 nt, Artificial Sequence
  Description of Artificial Sequence: Synthetic oligonucleotide
gcgccguccaccacugcgg

SEQ ID NO: 2616300 - RNA, 19 nt, Artificial Sequence
  Description of Artificial Sequence: Synthetic oligonucleotide
caagccucccuccuuccgu

SEQ ID NO: 2616301 - RNA, 19 nt, Artificial Sequence
  Description of Artificial Sequence: Synthetic oligonucleotide
cugcgguggccgugaaguc

SEQ ID NO: 2616302 - RNA, 19 nt, Artificial Sequence
  Description of Artificial Sequence: Synthetic oligonucleotide
gaaguccaguggguagaaa

SEQ ID NO: 2616303 - RNA, 19 nt, Artificial Sequence
  Description of Artificial Sequence: Synthetic oligonucleotide
ggccaugacugcgugggca

SEQ ID NO: 2616304 - RNA, 19 nt, Artificial Sequence
  Description of Artificial Sequence: Synthetic oligonucleotide
gucuucagcgugguugcua

SEQ ID NO: 2616305 - RNA, 19 nt, Artificial Sequence
  Description of Artificial Sequence: Synthetic oligonucleotide
auccagguaggggcgggau

SEQ ID NO: 2616306 - RNA, 19 nt, Artificial Sequence
  Description of Artificial Sequence: Synthetic oligonucleotide
uccacgccaggugggugaa

SEQ ID NO: 2616307 - RNA, 19 nt, Artificial Sequence
  Description of Artificial Sequence: Synthetic oligonucleotide
ggcaaugcccucaucaguu

SEQ ID NO: 2616308 - RNA, 19 nt, Artificial Sequence
  Description of Artificial Sequence: Synthetic oligonucleotide
agucuucagcgugguugcu

SEQ ID NO: 2616309 - RNA, 19 nt, Artificial Sequence
  Description of Artificial Sequence: Synthetic oligonucleotide
gccaugacugcgugggcaa

SEQ ID NO: 2616310 - RNA, 19 nt, Artificial Sequence
  Description of Artificial Sequence: Synthetic oligonucleotide
accucgcagcccaguuuuc

SEQ ID NO: 2616311 - RNA, 19 nt, Artificial Sequence
  Description of Artificial Sequence: Synthetic oligonucleotide
aggauacccuuggcgucga

SEQ ID NO: 2616312 - RNA, 19 nt, Artificial Sequence
  Description of Artificial Sequence: Synthetic oligonucleotide
cugugaucugacgaaggau

SEQ ID NO: 2616313 - RNA, 19 nt, Artificial Sequence
  Description of Artificial Sequence: Synthetic oligonucleotide
gguggccgugaaguccggg

SEQ ID NO: 2616314 - RNA, 19 nt, Artificial Sequence
  Description of Artificial Sequence: Synthetic oligonucleotide
gggcgggauacaagaauuc

SEQ ID NO: 2616315 - RNA, 19 nt, Artificial Sequence
  Description of Artificial Sequence: Synthetic oligonucleotide
gugcgcguugccggaggcc

SEQ ID NO: 2616316 - RNA, 19 nt, Artificial Sequence
  Description of Artificial Sequence: Synthetic oligonucleotide
cacgccaggugggugaacu

SEQ ID NO: 2616317 - RNA, 19 nt, Artificial Sequence
  Description of Artificial Sequence: Synthetic oligonucleotide
cugaaagcuugacuuccuu

SEQ ID NO: 2616318 - RNA, 19 nt, Artificial Sequence
  Description of Artificial Sequence: Synthetic oligonucleotide
ccgaggaccucgcagccca

SEQ ID NO: 2616319 - RNA, 19 nt, Artificial Sequence
  Description of Artificial Sequence: Synthetic oligonucleotide
ccuugaaggcgccguccac

SEQ ID NO: 2616320 - RNA, 19 nt, Artificial Sequence
  Description of Artificial Sequence: Synthetic oligonucleotide
cagcccaguuuucggaagu

SEQ ID NO: 2616321 - RNA, 19 nt, Artificial Sequence
  Description of Artificial Sequence: Synthetic oligonucleotide
gcgugguugcuaaaagcaa

SEQ ID NO: 2616322 - RNA, 19 nt, Artificial Sequence
  Description of Artificial Sequence: Synthetic oligonucleotide
cuucagcgugguugcuaaa

SEQ ID NO: 2616323 - RNA, 19 nt, Artificial Sequence
  Description of Artificial Sequence: Synthetic oligonucleotide
gggugaacugagaguccac

SEQ ID NO: 2616324 - RNA, 19 nt, Artificial Sequence
  Description of Artificial Sequence: Synthetic oligonucleotide
caccacugcgguggccgug

SEQ ID NO: 2616325 - RNA, 19 nt, Artificial Sequence
  Description of Artificial Sequence: Synthetic oligonucleotide
cagacacuccgaggaccuc

SEQ ID NO: 2616326 - RNA, 19 nt, Artificial Sequence
  Description of Artificial Sequence: Synthetic oligonucleotide
ggccggcuuuccgaugugc

SEQ ID NO: 2616327 - RNA, 19 nt, Artificial Sequence
  Description of Artificial Sequence: Synthetic oligonucleotide
cuggaccagcacaggacau

SEQ ID NO: 2616328 - RNA, 19 nt, Artificial Sequence
  Description of Artificial Sequence: Synthetic oligonucleotide
gaaguccggggccggcuuu

SEQ ID NO: 2616329 - RNA, 19 nt, Artificial Sequence
  Description of Artificial Sequence: Synthetic oligonucleotide
cgugguugcuaaaagcaau

SEQ ID NO: 2616330 - RNA, 19 nt, Artificial Sequence
  Description of Artificial Sequence: Synthetic oligonucleotide
cuguaggcaaugcccucau

SEQ ID NO: 2616331 - RNA, 19 nt, Artificial Sequence
  Description of Artificial Sequence: Synthetic oligonucleotide
ggggcgggauacaagaauu

SEQ ID NO: 2616332 - RNA, 19 nt, Artificial Sequence
  Description of Artificial Sequence: Synthetic oligonucleotide
accaggcgaagagccucau

SEQ ID NO: 2616333 - RNA, 19 nt, Artificial Sequence
  Description of Artificial Sequence: Synthetic oligonucleotide
ccaugacugcgugggcaag

SEQ ID NO: 2616334 - RNA, 19 nt, Artificial Sequence
  Description of Artificial Sequence: Synthetic oligonucleotide
gaggaccucgcagcccagu

SEQ ID NO: 2616335 - RNA, 19 nt, Artificial Sequence
  Description of Artificial Sequence: Synthetic oligonucleotide
ccgggcuuccagccagcag

SEQ ID NO: 2616336 - RNA, 19 nt, Artificial Sequence
  Description of Artificial Sequence: Synthetic oligonucleotide
cuccuuccgugggguguug

SEQ ID NO: 2616337 - RNA, 19 nt, Artificial Sequence
  Description of Artificial Sequence: Synthetic oligonucleotide
ggcuuuccgaugugcgcgu

SEQ ID NO: 2616338 - RNA, 19 nt, Artificial Sequence
  Description of Artificial Sequence: Synthetic oligonucleotide
ccaggcgaagagccucauc

SEQ ID NO: 2616339 - RNA, 19 nt, Artificial Sequence
  Description of Artificial Sequence: Synthetic oligonucleotide
cagguaggggcgggauaca

SEQ ID NO: 2616340 - RNA, 19 nt, Artificial Sequence
  Description of Artificial Sequence: Synthetic oligonucleotide
ccccuguaggcaaugcccu

SEQ ID NO: 2616341 - RNA, 19 nt, Artificial Sequence
  Description of Artificial Sequence: Synthetic oligonucleotide
gcgugggcaagagccggac

SEQ ID NO: 2616342 - RNA, 19 nt, Artificial Sequence
  Description of Artificial Sequence: Synthetic oligonucleotide
ccgugggguguugauccac

SEQ ID NO: 2616343 - RNA, 19 nt, Artificial Sequence
  Description of Artificial Sequence: Synthetic oligonucleotide
gggccggcuuuccgaugug

SEQ ID NO: 2616344 - RNA, 19 nt, Artificial Sequence
  Description of Artificial Sequence: Synthetic oligonucleotide
cucccuccuuccguggggu

SEQ ID NO: 2616345 - RNA, 19 nt, Artificial Sequence
  Description of Artificial Sequence: Synthetic oligonucleotide
ccgugaaguccggggccgg

SEQ ID NO: 2616346 - RNA, 19 nt, Artificial Sequence
  Description of Artificial Sequence: Synthetic oligonucleotide
ggaccucgcagcccaguuu

SEQ ID NO: 2616347 - RNA, 19 nt, Artificial Sequence
  Description of Artificial Sequence: Synthetic oligonucleotide
ccaugcucaucuguauacu

SEQ ID NO: 2616348 - RNA, 19 nt, Artificial Sequence
  Description of Artificial Sequence: Synthetic oligonucleotide
cgcagcccaguuuucggaa

SEQ ID NO: 2616349 - RNA, 19 nt, Artificial Sequence
  Description of Artificial Sequence: Synthetic oligonucleotide
cgaugugcgcguugccgga

SEQ ID NO: 2616350 - RNA, 19 nt, Artificial Sequence
  Description of Artificial Sequence: Synthetic oligonucleotide
cgccaggugggugaacuga

SEQ ID NO: 2616351 - RNA, 19 nt, Artificial Sequence
  Description of Artificial Sequence: Synthetic oligonucleotide
cguccaccacugcgguggc

SEQ ID NO: 2616352 - RNA, 19 nt, Artificial Sequence
  Description of Artificial Sequence: Synthetic oligonucleotide
cguugccggaggccaugac

SEQ ID NO: 2616353 - RNA, 19 nt, Artificial Sequence
  Description of Artificial Sequence: Synthetic oligonucleotide
cgaggaccucgcagcccag

SEQ ID NO: 2616354 - RNA, 19 nt, Artificial Sequence
  Description of Artificial Sequence: Synthetic oligonucleotide
cgugggcaagagccggaca

SEQ ID NO: 2616355 - RNA, 19 nt, Artificial Sequence
  Description of Artificial Sequence: Synthetic oligonucleotide
gccgggcuuccagccagca

SEQ ID NO: 2616356 - RNA, 19 nt, Artificial Sequence
  Description of Artificial Sequence: Synthetic oligonucleotide
ccuuccgugggguguugau

SEQ ID NO: 2616357 - RNA, 19 nt, Artificial Sequence
  Description of Artificial Sequence: Synthetic oligonucleotide
cgcguugccggaggccaug

SEQ ID NO: 2616358 - RNA, 19 nt, Artificial Sequence
  Description of Artificial Sequence: Synthetic oligonucleotide
ccacgccaggugggugaac

SEQ ID NO: 2616359 - RNA, 19 nt, Artificial Sequence
  Description of Artificial Sequence: Synthetic oligonucleotide
ggauacccuuggcgucgau

SEQ ID NO: 2616360 - RNA, 19 nt, Artificial Sequence
  Description of Artificial Sequence: Synthetic oligonucleotide
ccuuggcgucgaugauaaa

SEQ ID NO: 2616361 - RNA, 19 nt, Artificial Sequence
  Description of Artificial Sequence: Synthetic oligonucleotide
ccggggccggcuuuccgau

SEQ ID NO: 2616362 - RNA, 19 nt, Artificial Sequence
  Description of Artificial Sequence: Synthetic oligonucleotide
gcuuuccgaugugcgcguu

SEQ ID NO: 2616363 - RNA, 19 nt, Artificial Sequence
  Description of Artificial Sequence: Synthetic oligonucleotide
ccuccuuccgugggguguu

SEQ ID NO: 2616364 - RNA, 19 nt, Artificial Sequence
  Description of Artificial Sequence: Synthetic oligonucleotide
ccacugcgguggccgugaa

SEQ ID NO: 2616365 - RNA, 19 nt, Artificial Sequence
  Description of Artificial Sequence: Synthetic oligonucleotide
cgccguccaccacugcggu

SEQ ID NO: 2616366 - RNA, 19 nt, Artificial Sequence
  Description of Artificial Sequence: Synthetic oligonucleotide
gcgcguugccggaggccau

SEQ ID NO: 2616367 - RNA, 19 nt, Artificial Sequence
  Description of Artificial Sequence: Synthetic oligonucleotide
aacuccacuaccuuuuggc

SEQ ID NO: 2616368 - RNA, 19 nt, Artificial Sequence
  Description of Artificial Sequence: Synthetic oligonucleotide
uucuauaugaccuggaucu

SEQ ID NO: 2616369 - RNA, 19 nt, Artificial Sequence
  Description of Artificial Sequence: Synthetic oligonucleotide
auaaucaaccgguugagac

SEQ ID NO: 2616370 - RNA, 19 nt, Artificial Sequence
  Description of Artificial Sequence: Synthetic oligonucleotide
aaggucacuagcugcaugg

SEQ ID NO: 2616371 - RNA, 19 nt, Artificial Sequence
  Description of Artificial Sequence: Synthetic oligonucleotide
aauaaggcuugucagggug

SEQ ID NO: 2616372 - RNA, 19 nt, Artificial Sequence
  Description of Artificial Sequence: Synthetic oligonucleotide
ugucagguaaggcagaggc

SEQ ID NO: 2616373 - RNA, 19 nt, Artificial Sequence
  Description of Artificial Sequence: Synthetic oligonucleotide
aaugacaucuggguuaggg

SEQ ID NO: 2616374 - RNA, 19 nt, Artificial Sequence
  Description of Artificial Sequence: Synthetic oligonucleotide
gaguccuugguuuugacag

SEQ ID NO: 2616375 - RNA, 19 nt, Artificial Sequence
  Description of Artificial Sequence: Synthetic oligonucleotide
ucuagcaaggcucccaacc

SEQ ID NO: 2616376 - RNA, 19 nt, Artificial Sequence
  Description of Artificial Sequence: Synthetic oligonucleotide
cuaugagaggccuuggucc

SEQ ID NO: 2616377 - RNA, 19 nt, Artificial Sequence
  Description of Artificial Sequence: Synthetic oligonucleotide
ugggcugugccucuaaagg

SEQ ID NO: 2616378 - RNA, 19 nt, Artificial Sequence
  Description of Artificial Sequence: Synthetic oligonucleotide
uaccuuuuggcucaugggc

SEQ ID NO: 2616379 - RNA, 19 nt, Artificial Sequence
  Description of Artificial Sequence: Synthetic oligonucleotide
acuaccuuuuggcucaugg

SEQ ID NO: 2616380 - RNA, 19 nt, Artificial Sequence
  Description of Artificial Sequence: Synthetic oligonucleotide
uaugcucuagcugagagga

SEQ ID NO: 2616381 - RNA, 19 nt, Artificial Sequence
  Description of Artificial Sequence: Synthetic oligonucleotide
ugagauuuggccacggccu

SEQ ID NO: 2616382 - RNA, 19 nt, Artificial Sequence
  Description of Artificial Sequence: Synthetic oligonucleotide
gcaucuugcauccugaagg

SEQ ID NO: 2616383 - RNA, 19 nt, Artificial Sequence
  Description of Artificial Sequence: Synthetic oligonucleotide
uuuccuguucuauaugacc

SEQ ID NO: 2616384 - RNA, 19 nt, Artificial Sequence
  Description of Artificial Sequence: Synthetic oligonucleotide
uugauggcaguucaggcug

SEQ ID NO: 2616385 - RNA, 19 nt, Artificial Sequence
  Description of Artificial Sequence: Synthetic oligonucleotide
cucaauaaggcuugucagg

SEQ ID NO: 2616386 - RNA, 19 nt, Artificial Sequence
  Description of Artificial Sequence: Synthetic oligonucleotide
uccaccauggccuggcucg

SEQ ID NO: 2616387 - RNA, 19 nt, Artificial Sequence
  Description of Artificial Sequence: Synthetic oligonucleotide
gagaguuccaccacgaggc

SEQ ID NO: 2616388 - RNA, 19 nt, Artificial Sequence
  Description of Artificial Sequence: Synthetic oligonucleotide
auggcuaugcucuagcuga

SEQ ID NO: 2616389 - RNA, 19 nt, Artificial Sequence
  Description of Artificial Sequence: Synthetic oligonucleotide
aguucaggcugcuuaacuc

SEQ ID NO: 2616390 - RNA, 19 nt, Artificial Sequence
  Description of Artificial Sequence: Synthetic oligonucleotide
gcucucaacgucuugaugg

SEQ ID NO: 2616391 - RNA, 19 nt, Artificial Sequence
  Description of Artificial Sequence: Synthetic oligonucleotide
aaucaaccgguugagacug

SEQ ID NO: 2616392 - RNA, 19 nt, Artificial Sequence
  Description of Artificial Sequence: Synthetic oligonucleotide
gcaacuguccaucagagcc

SEQ ID NO: 2616393 - RNA, 19 nt, Artificial Sequence
  Description of Artificial Sequence: Synthetic oligonucleotide
ucuugcauccugaaggccu

SEQ ID NO: 2616394 - RNA, 19 nt, Artificial Sequence
  Description of Artificial Sequence: Synthetic oligonucleotide
aaggcaguguuccuaucuc

SEQ ID NO: 2616395 - RNA, 19 nt, Artificial Sequence
  Description of Artificial Sequence: Synthetic oligonucleotide
uccuccaaugacaucuggg

SEQ ID NO: 2616396 - RNA, 19 nt, Artificial Sequence
  Description of Artificial Sequence: Synthetic oligonucleotide
uaucaggggacaaaggcuc

SEQ ID NO: 2616397 - RNA, 19 nt, Artificial Sequence
  Description of Artificial Sequence: Synthetic oligonucleotide
ugacaucuggguuagggac

SEQ ID NO: 2616398 - RNA, 19 nt, Artificial Sequence
  Description of Artificial Sequence: Synthetic oligonucleotide
uauaugaccuggaucucca

SEQ ID NO: 2616399 - RNA, 19 nt, Artificial Sequence
  Description of Artificial Sequence: Synthetic oligonucleotide
ucuaugggaaucccugggc

SEQ ID NO: 2616400 - RNA, 19 nt, Artificial Sequence
  Description of Artificial Sequence: Synthetic oligonucleotide
uggagcagccuacaguucc

SEQ ID NO: 2616401 - RNA, 19 nt, Artificial Sequence
  Description of Artificial Sequence: Synthetic oligonucleotide
cuggguuagggacaggucc

SEQ ID NO: 2616402 - RNA, 19 nt, Artificial Sequence
  Description of Artificial Sequence: Synthetic oligonucleotide
gguaucaggggacaaaggc

SEQ ID NO: 2616403 - RNA, 19 nt, Artificial Sequence
  Description of Artificial Sequence: Synthetic oligonucleotide
uaaucaaccgguugagacu

SEQ ID NO: 2616404 - RNA, 19 nt, Artificial Sequence
  Description of Artificial Sequence: Synthetic oligonucleotide
ugcucuagcugagaggagg

SEQ ID NO: 2616405 - RNA, 19 nt, Artificial Sequence
  Description of Artificial Sequence: Synthetic oligonucleotide
uccacuaccuuuuggcuca

SEQ ID NO: 2616406 - RNA, 19 nt, Artificial Sequence
  Description of Artificial Sequence: Synthetic oligonucleotide
acuggagaguuccaccacg

SEQ ID NO: 2616407 - RNA, 19 nt, Artificial Sequence
  Description of Artificial Sequence: Synthetic oligonucleotide
uccaaugacaucuggguua

SEQ ID NO: 2616408 - RNA, 19 nt, Artificial Sequence
  Description of Artificial Sequence: Synthetic oligonucleotide
uaugaccuggaucuccagc

SEQ ID NO: 2616409 - RNA, 19 nt, Artificial Sequence
  Description of Artificial Sequence: Synthetic oligonucleotide
cugagauuuggccacggcc

SEQ ID NO: 2616410 - RNA, 19 nt, Artificial Sequence
  Description of Artificial Sequence: Synthetic oligonucleotide
ucuguggcaucuugcaucc

SEQ ID NO: 2616411 - RNA, 19 nt, Artificial Sequence
  Description of Artificial Sequence: Synthetic oligonucleotide
uguggcaucuugcauccug

SEQ ID NO: 2616412 - RNA, 19 nt, Artificial Sequence
  Description of Artificial Sequence: Synthetic oligonucleotide
ucugggcugagauuuggcc

SEQ ID NO: 2616413 - RNA, 19 nt, Artificial Sequence
  Description of Artificial Sequence: Synthetic oligonucleotide
ugugucuguggcaucuugc

SEQ ID NO: 2616414 - RNA, 19 nt, Artificial Sequence
  Description of Artificial Sequence: Synthetic oligonucleotide
cucauaaucaaccgguuga

SEQ ID NO: 2616415 - RNA, 19 nt, Artificial Sequence
  Description of Artificial Sequence: Synthetic oligonucleotide
ucuggggaaggucacuagc

SEQ ID NO: 2616416 - RNA, 19 nt, Artificial Sequence
  Description of Artificial Sequence: Synthetic oligonucleotide
uguucuauaugaccuggau

SEQ ID NO: 2616417 - RNA, 19 nt, Artificial Sequence
  Description of Artificial Sequence: Synthetic oligonucleotide
ucauaaucaaccgguugag

SEQ ID NO: 2616418 - RNA, 19 nt, Artificial Sequence
  Description of Artificial Sequence: Synthetic oligonucleotide
guugagacuggagaguucc

SEQ ID NO: 2616419 - RNA, 19 nt, Artificial Sequence
  Description of Artificial Sequence: Synthetic oligonucleotide
cucaacgucuugauggcag

SEQ ID NO: 2616420 - RNA, 19 nt, Artificial Sequence
  Description of Artificial Sequence: Synthetic oligonucleotide
guucaggcugcuuaacucc

SEQ ID NO: 2616421 - RNA, 19 nt, Artificial Sequence
  Description of Artificial Sequence: Synthetic oligonucleotide
aacgucuugauggcaguuc

SEQ ID NO: 2616422 - RNA, 19 nt, Artificial Sequence
  Description of Artificial Sequence: Synthetic oligonucleotide
uggcaacuguccaucagag

SEQ ID NO: 2616423 - RNA, 19 nt, Artificial Sequence
  Description of Artificial Sequence: Synthetic oligonucleotide
uguuccuaucucuucuggc

SEQ ID NO: 2616424 - RNA, 19 nt, Artificial Sequence
  Description of Artificial Sequence: Synthetic oligonucleotide
cuaccuuuuggcucauggg

SEQ ID NO: 2616425 - RNA, 19 nt, Artificial Sequence
  Description of Artificial Sequence: Synthetic oligonucleotide
accgguugagacuggagag

SEQ ID NO: 2616426 - RNA, 19 nt, Artificial Sequence
  Description of Artificial Sequence: Synthetic oligonucleotide
uuuggccacggccuuuggg

SEQ ID NO: 2616427 - RNA, 19 nt, Artificial Sequence
  Description of Artificial Sequence: Synthetic oligonucleotide
uaacuccacuaccuuuugg

SEQ ID NO: 2616428 - RNA, 19 nt, Artificial Sequence
  Description of Artificial Sequence: Synthetic oligonucleotide
cuaugcucuagcugagagg

SEQ ID NO: 2616429 - RNA, 19 nt, Artificial Sequence
  Description of Artificial Sequence: Synthetic oligonucleotide
caucuugcauccugaaggc

SEQ ID NO: 2616430 - RNA, 19 nt, Artificial Sequence
  Description of Artificial Sequence: Synthetic oligonucleotide
gagacuggagaguuccacc

SEQ ID NO: 2616431 - RNA, 19 nt, Artificial Sequence
  Description of Artificial Sequence: Synthetic oligonucleotide
cuagcaaggcucccaaccc

SEQ ID NO: 2616432 - RNA, 19 nt, Artificial Sequence
  Description of Artificial Sequence: Synthetic oligonucleotide
aaacccugcuccugucagg

SEQ ID NO: 2616433 - RNA, 19 nt, Artificial Sequence
  Description of Artificial Sequence: Synthetic oligonucleotide
ugcagccucaauaaggcuu

SEQ ID NO: 2616434 - RNA, 19 nt, Artificial Sequence
  Description of Artificial Sequence: Synthetic oligonucleotide
ggagaguuccaccacgagg

SEQ ID NO: 2616435 - RNA, 19 nt, Artificial Sequence
  Description of Artificial Sequence: Synthetic oligonucleotide
gagguaucaggggacaaag

SEQ ID NO: 2616436 - RNA, 19 nt, Artificial Sequence
  Description of Artificial Sequence: Synthetic oligonucleotide
uugacagcuggacucauuu

SEQ ID NO: 2616437 - RNA, 19 nt, Artificial Sequence
  Description of Artificial Sequence: Synthetic oligonucleotide
aguuccaccacgaggccgc

SEQ ID NO: 2616438 - RNA, 19 nt, Artificial Sequence
  Description of Artificial Sequence: Synthetic oligonucleotide
cauccugaaggccuccugg

SEQ ID NO: 2616439 - RNA, 19 nt, Artificial Sequence
  Description of Artificial Sequence: Synthetic oligonucleotide
gucuaugggaaucccuggg

SEQ ID NO: 2616440 - RNA, 19 nt, Artificial Sequence
  Description of Artificial Sequence: Synthetic oligonucleotide
cucccaaccccuuugucag

SEQ ID NO: 2616441 - RNA, 19 nt, Artificial Sequence
  Description of Artificial Sequence: Synthetic oligonucleotide
uuaacuccacuaccuuuug

SEQ ID NO: 2616442 - RNA, 19 nt, Artificial Sequence
  Description of Artificial Sequence: Synthetic oligonucleotide
ggugcucauaaucaaccgg

SEQ ID NO: 2616443 - RNA, 19 nt, Artificial Sequence
  Description of Artificial Sequence: Synthetic oligonucleotide
uaugggaaucccugggcug

SEQ ID NO: 2616444 - RNA, 19 nt, Artificial Sequence
  Description of Artificial Sequence: Synthetic oligonucleotide
guucuauaugaccuggauc

SEQ ID NO: 2616445 - RNA, 19 nt, Artificial Sequence
  Description of Artificial Sequence: Synthetic oligonucleotide
uaugagaggccuugguccu

SEQ ID NO: 2616446 - RNA, 19 nt, Artificial Sequence
  Description of Artificial Sequence: Synthetic oligonucleotide
augggaaucccugggcugc

SEQ ID NO: 2616447 - RNA, 19 nt, Artificial Sequence
  Description of Artificial Sequence: Synthetic oligonucleotide
guuccuaucucuucuggca

SEQ ID NO: 2616448 - RNA, 19 nt, Artificial Sequence
  Description of Artificial Sequence: Synthetic oligonucleotide
ucuggcaacuguccaucag

SEQ ID NO: 2616449 - RNA, 19 nt, Artificial Sequence
  Description of Artificial Sequence: Synthetic oligonucleotide
ugcauggcuaugcucuagc

SEQ ID NO: 2616450 - RNA, 19 nt, Artificial Sequence
  Description of Artificial Sequence: Synthetic oligonucleotide
ucagguaaggcagaggcuu

SEQ ID NO: 2616451 - RNA, 19 nt, Artificial Sequence
  Description of Artificial Sequence: Synthetic oligonucleotide
uugguuuugacagcuggac

SEQ ID NO: 2616452 - RNA, 19 nt, Artificial Sequence
  Description of Artificial Sequence: Synthetic oligonucleotide
cuauaugaccuggaucucc

SEQ ID NO: 2616453 - RNA, 19 nt, Artificial Sequence
  Description of Artificial Sequence: Synthetic oligonucleotide
aaggcucccaaccccuuug

SEQ ID NO: 2616454 - RNA, 19 nt, Artificial Sequence
  Description of Artificial Sequence: Synthetic oligonucleotide
gucuugauggcaguucagg

SEQ ID NO: 2616455 - RNA, 19 nt, Artificial Sequence
  Description of Artificial Sequence: Synthetic oligonucleotide
aaggcucucaacgucuuga

SEQ ID NO: 2616456 - RNA, 19 nt, Artificial Sequence
  Description of Artificial Sequence: Synthetic oligonucleotide
guccaucagagccagaguc

SEQ ID NO: 2616457 - RNA, 19 nt, Artificial Sequence
  Description of Artificial Sequence: Synthetic oligonucleotide
guucccugcaggaaaaccc

SEQ ID NO: 2616458 - RNA, 19 nt, Artificial Sequence
  Description of Artificial Sequence: Synthetic oligonucleotide
ugguuuugacagcuggacu

SEQ ID NO: 2616459 - RNA, 19 nt, Artificial Sequence
  Description of Artificial Sequence: Synthetic oligonucleotide
uggguuagggacaggucca

SEQ ID NO: 2616460 - RNA, 19 nt, Artificial Sequence
  Description of Artificial Sequence: Synthetic oligonucleotide
agaguuccaccacgaggcc

SEQ ID NO: 2616461 - RNA, 19 nt, Artificial Sequence
  Description of Artificial Sequence: Synthetic oligonucleotide
auccugaaggccuccuggg

SEQ ID NO: 2616462 - RNA, 19 nt, Artificial Sequence
  Description of Artificial Sequence: Synthetic oligonucleotide
gaggcuuggccuuccugcg

SEQ ID NO: 2616463 - RNA, 19 nt, Artificial Sequence
  Description of Artificial Sequence: Synthetic oligonucleotide
uggacucauuuccuguucu

SEQ ID NO: 2616464 - RNA, 19 nt, Artificial Sequence
  Description of Artificial Sequence: Synthetic oligonucleotide
uucccugcaggaaaacccu

SEQ ID NO: 2616465 - RNA, 19 nt, Artificial Sequence
  Description of Artificial Sequence: Synthetic oligonucleotide
uggggaaggucacuagcug

SEQ ID NO: 2616466 - RNA, 19 nt, Artificial Sequence
  Description of Artificial Sequence: Synthetic oligonucleotide
augacaucuggguuaggga

SEQ ID NO: 2616467 - RNA, 19 nt, Artificial Sequence
  Description of Artificial Sequence: Synthetic oligonucleotide
uucaggcugcuuaacucca

SEQ ID NO: 2616468 - RNA, 19 nt, Artificial Sequence
  Description of Artificial Sequence: Synthetic oligonucleotide
uugucagggugucacugca

SEQ ID NO: 2616469 - RNA, 19 nt, Artificial Sequence
  Description of Artificial Sequence: Synthetic oligonucleotide
accuggaucuccagcaccc

SEQ ID NO: 2616470 - RNA, 19 nt, Artificial Sequence
  Description of Artificial Sequence: Synthetic oligonucleotide
ucuaaaggcaguguuccua

SEQ ID NO: 2616471 - RNA, 19 nt, Artificial Sequence
  Description of Artificial Sequence: Synthetic oligonucleotide
uccugucaggucuauggga

SEQ ID NO: 2616472 - RNA, 19 nt, Artificial Sequence
  Description of Artificial Sequence: Synthetic oligonucleotide
cucucaacgucuugauggc

SEQ ID NO: 2616473 - RNA, 19 nt, Artificial Sequence
  Description of Artificial Sequence: Synthetic oligonucleotide
aggaaaacccugcuccugu

SEQ ID NO: 2616474 - RNA, 19 nt, Artificial Sequence
  Description of Artificial Sequence: Synthetic oligonucleotide
aguguuccuaucucuucug

SEQ ID NO: 2616475 - RNA, 19 nt, Artificial Sequence
  Description of Artificial Sequence: Synthetic oligonucleotide
ugugccucuaaaggcagug

SEQ ID NO: 2616476 - RNA, 19 nt, Artificial Sequence
  Description of Artificial Sequence: Synthetic oligonucleotide
aaucccugggcugcuauga

SEQ ID NO: 2616477 - RNA, 19 nt, Artificial Sequence
  Description of Artificial Sequence: Synthetic oligonucleotide
ugcguuugaaggccuccag

SEQ ID NO: 2616478 - RNA, 19 nt, Artificial Sequence
  Description of Artificial Sequence: Synthetic oligonucleotide
uuccuaucucuucuggcaa

SEQ ID NO: 2616479 - RNA, 19 nt, Artificial Sequence
  Description of Artificial Sequence: Synthetic oligonucleotide
guuagggacagguccacca

SEQ ID NO: 2616480 - RNA, 19 nt, Artificial Sequence
  Description of Artificial Sequence: Synthetic oligonucleotide
agcccugauccccucuagc

SEQ ID NO: 2616481 - RNA, 19 nt, Artificial Sequence
  Description of Artificial Sequence: Synthetic oligonucleotide
aaaggcucucaacgucuug

SEQ ID NO: 2616482 - RNA, 19 nt, Artificial Sequence
  Description of Artificial Sequence: Synthetic oligonucleotide
guguuccuaucucuucugg

SEQ ID NO: 2616483 - RNA, 19 nt, Artificial Sequence
  Description of Artificial Sequence: Synthetic oligonucleotide
augggcugugccucuaaag

SEQ ID NO: 2616484 - RNA, 19 nt, Artificial Sequence
  Description of Artificial Sequence: Synthetic oligonucleotide
ucuagcugagaggagguau

SEQ ID NO: 2616485 - RNA, 19 nt, Artificial Sequence
  Description of Artificial Sequence: Synthetic oligonucleotide
auccccucuagcaaggcuc

SEQ ID NO: 2616486 - RNA, 19 nt, Artificial Sequence
  Description of Artificial Sequence: Synthetic oligonucleotide
cuuccugcguuugaaggcc

SEQ ID NO: 2616487 - RNA, 19 nt, Artificial Sequence
  Description of Artificial Sequence: Synthetic oligonucleotide
ucuucuggcaacuguccau

SEQ ID NO: 2616488 - RNA, 19 nt, Artificial Sequence
  Description of Artificial Sequence: Synthetic oligonucleotide
cuacaguucccuccagccc

SEQ ID NO: 2616489 - RNA, 19 nt, Artificial Sequence
  Description of Artificial Sequence: Synthetic oligonucleotide
cuagcugagaggagguauc

SEQ ID NO: 2616490 - RNA, 19 nt, Artificial Sequence
  Description of Artificial Sequence: Synthetic oligonucleotide
uggcaguucaggcugcuua

SEQ ID NO: 2616491 - RNA, 19 nt, Artificial Sequence
  Description of Artificial Sequence: Synthetic oligonucleotide
aucagagccagaguccuug

SEQ ID NO: 2616492 - RNA, 19 nt, Artificial Sequence
  Description of Artificial Sequence: Synthetic oligonucleotide
cugggcugcuaugagaggc

SEQ ID NO: 2616493 - RNA, 19 nt, Artificial Sequence
  Description of Artificial Sequence: Synthetic oligonucleotide
guaaggcagaggcuuggcc

SEQ ID NO: 2616494 - RNA, 19 nt, Artificial Sequence
  Description of Artificial Sequence: Synthetic oligonucleotide
uggagaguuccaccacgag

SEQ ID NO: 2616495 - RNA, 19 nt, Artificial Sequence
  Description of Artificial Sequence: Synthetic oligonucleotide
acgucuugauggcaguuca

SEQ ID NO: 2616496 - RNA, 19 nt, Artificial Sequence
  Description of Artificial Sequence: Synthetic oligonucleotide
ugcuaugagaggccuuggu

SEQ ID NO: 2616497 - RNA, 19 nt, Artificial Sequence
  Description of Artificial Sequence: Synthetic oligonucleotide
gcuaugcucuagcugagag

SEQ ID NO: 2616498 - RNA, 19 nt, Artificial Sequence
  Description of Artificial Sequence: Synthetic oligonucleotide
aggucuaugggaaucccug

SEQ ID NO: 2616499 - RNA, 19 nt, Artificial Sequence
  Description of Artificial Sequence: Synthetic oligonucleotide
uagggacagguccaccaug

SEQ ID NO: 2616500 - RNA, 19 nt, Artificial Sequence
  Description of Artificial Sequence: Synthetic oligonucleotide
uuggcucaugggcugugcc

SEQ ID NO: 2616501 - RNA, 19 nt, Artificial Sequence
  Description of Artificial Sequence: Synthetic oligonucleotide
ccucaauaaggcuugucag

SEQ ID NO: 2616502 - RNA, 19 nt, Artificial Sequence
  Description of Artificial Sequence: Synthetic oligonucleotide
uccugaaggccuccugggc

SEQ ID NO: 2616503 - RNA, 19 nt, Artificial Sequence
  Description of Artificial Sequence: Synthetic oligonucleotide
cuccacuaccuuuuggcuc

SEQ ID NO: 2616504 - RNA, 19 nt, Artificial Sequence
  Description of Artificial Sequence: Synthetic oligonucleotide
ugggcugcuaugagaggcc

SEQ ID NO: 2616505 - RNA, 19 nt, Artificial Sequence
  Description of Artificial Sequence: Synthetic oligonucleotide
ugucagggugucacugcag

SEQ ID NO: 2616506 - RNA, 19 nt, Artificial Sequence
  Description of Artificial Sequence: Synthetic oligonucleotide
aucuugcauccugaaggcc

SEQ ID NO: 2616507 - RNA, 19 nt, Artificial Sequence
  Description of Artificial Sequence: Synthetic oligonucleotide
cugauccccucuagcaagg

SEQ ID NO: 2616508 - RNA, 19 nt, Artificial Sequence
  Description of Artificial Sequence: Synthetic oligonucleotide
uuagggacagguccaccau

SEQ ID NO: 2616509 - RNA, 19 nt, Artificial Sequence
  Description of Artificial Sequence: Synthetic oligonucleotide
agggacagguccaccaugg

SEQ ID NO: 2616510 - RNA, 19 nt, Artificial Sequence
  Description of Artificial Sequence: Synthetic oligonucleotide
ccuacaguucccuccagcc

SEQ ID NO: 2616511 - RNA, 19 nt, Artificial Sequence
  Description of Artificial Sequence: Synthetic oligonucleotide
gaaaacccugcuccuguca

SEQ ID NO: 2616512 - RNA, 19 nt, Artificial Sequence
  Description of Artificial Sequence: Synthetic oligonucleotide
agagccagaguccuugguu

SEQ ID NO: 2616513 - RNA, 19 nt, Artificial Sequence
  Description of Artificial Sequence: Synthetic oligonucleotide
ucaacgucuugauggcagu

SEQ ID NO: 2616514 - RNA, 19 nt, Artificial Sequence
  Description of Artificial Sequence: Synthetic oligonucleotide
uccccucuagcaaggcucc

SEQ ID NO: 2616515 - RNA, 19 nt, Artificial Sequence
  Description of Artificial Sequence: Synthetic oligonucleotide
ugccucuaaaggcaguguu

SEQ ID NO: 2616516 - RNA, 19 nt, Artificial Sequence
  Description of Artificial Sequence: Synthetic oligonucleotide
gaguuccaccacgaggccg

SEQ ID NO: 2616517 - RNA, 19 nt, Artificial Sequence
  Description of Artificial Sequence: Synthetic oligonucleotide
aaccccuuugucagguaag

SEQ ID NO: 2616518 - RNA, 19 nt, Artificial Sequence
  Description of Artificial Sequence: Synthetic oligonucleotide
ucuggguuagggacagguc

SEQ ID NO: 2616519 - RNA, 19 nt, Artificial Sequence
  Description of Artificial Sequence: Synthetic oligonucleotide
ggucuaugggaaucccugg

SEQ ID NO: 2616520 - RNA, 19 nt, Artificial Sequence
  Description of Artificial Sequence: Synthetic oligonucleotide
uugucagguaaggcagagg

SEQ ID NO: 2616521 - RNA, 19 nt, Artificial Sequence
  Description of Artificial Sequence: Synthetic oligonucleotide
ugggcccagguccccauag

SEQ ID NO: 2616522 - RNA, 19 nt, Artificial Sequence
  Description of Artificial Sequence: Synthetic oligonucleotide
uccuaucucuucuggcaac

SEQ ID NO: 2616523 - RNA, 19 nt, Artificial Sequence
  Description of Artificial Sequence: Synthetic oligonucleotide
cuugguuuugacagcugga

SEQ ID NO: 2616524 - RNA, 19 nt, Artificial Sequence
  Description of Artificial Sequence: Synthetic oligonucleotide
aucuggguuagggacaggu

SEQ ID NO: 2616525 - RNA, 19 nt, Artificial Sequence
  Description of Artificial Sequence: Synthetic oligonucleotide
ugcuuaacuccacuaccuu

SEQ ID NO: 2616526 - RNA, 19 nt, Artificial Sequence
  Description of Artificial Sequence: Synthetic oligonucleotide
ugucaggucuaugggaauc

SEQ ID NO: 2616527 - RNA, 19 nt, Artificial Sequence
  Description of Artificial Sequence: Synthetic oligonucleotide
gccucaauaaggcuuguca

SEQ ID NO: 2616528 - RNA, 19 nt, Artificial Sequence
  Description of Artificial Sequence: Synthetic oligonucleotide
ugucuguggcaucuugcau

SEQ ID NO: 2616529 - RNA, 19 nt, Artificial Sequence
  Description of Artificial Sequence: Synthetic oligonucleotide
accccuuugucagguaagg

SEQ ID NO: 2616530 - RNA, 19 nt, Artificial Sequence
  Description of Artificial Sequence: Synthetic oligonucleotide
ugauggcaguucaggcugc

SEQ ID NO: 2616531 - RNA, 19 nt, Artificial Sequence
  Description of Artificial Sequence: Synthetic oligonucleotide
gggugcucauaaucaaccg

SEQ ID NO: 2616532 - RNA, 19 nt, Artificial Sequence
  Description of Artificial Sequence: Synthetic oligonucleotide
guuugaaggccuccagguc

SEQ ID NO: 2616533 - RNA, 19 nt, Artificial Sequence
  Description of Artificial Sequence: Synthetic oligonucleotide
uggcuaugcucuagcugag

SEQ ID NO: 2616534 - RNA, 19 nt, Artificial Sequence
  Description of Artificial Sequence: Synthetic oligonucleotide
ucacuagcugcauggcuau

SEQ ID NO: 2616535 - RNA, 19 nt, Artificial Sequence
  Description of Artificial Sequence: Synthetic oligonucleotide
cuugauggcaguucaggcu

SEQ ID NO: 2616536 - RNA, 19 nt, Artificial Sequence
  Description of Artificial Sequence: Synthetic oligonucleotide
gcagccuacaguucccucc

SEQ ID NO: 2616537 - RNA, 19 nt, Artificial Sequence
  Description of Artificial Sequence: Synthetic oligonucleotide
gaaucccugggcugcuaug

SEQ ID NO: 2616538 - RNA, 19 nt, Artificial Sequence
  Description of Artificial Sequence: Synthetic oligonucleotide
ccucuaaaggcaguguucc

SEQ ID NO: 2616539 - RNA, 19 nt, Artificial Sequence
  Description of Artificial Sequence: Synthetic oligonucleotide
aggucacuagcugcauggc

SEQ ID NO: 2616540 - RNA, 19 nt, Artificial Sequence
  Description of Artificial Sequence: Synthetic oligonucleotide
gugucuguggcaucuugca

SEQ ID NO: 2616541 - RNA, 19 nt, Artificial Sequence
  Description of Artificial Sequence: Synthetic oligonucleotide
aggcaguguuccuaucucu

SEQ ID NO: 2616542 - RNA, 19 nt, Artificial Sequence
  Description of Artificial Sequence: Synthetic oligonucleotide
ggggaaggucacuagcugc

SEQ ID NO: 2616543 - RNA, 19 nt, Artificial Sequence
  Description of Artificial Sequence: Synthetic oligonucleotide
ugcucauaaucaaccgguu

SEQ ID NO: 2616544 - RNA, 19 nt, Artificial Sequence
  Description of Artificial Sequence: Synthetic oligonucleotide
accuuuuggcucaugggcu

SEQ ID NO: 2616545 - RNA, 19 nt, Artificial Sequence
  Description of Artificial Sequence: Synthetic oligonucleotide
agcagccuacaguucccuc

SEQ ID NO: 2616546 - RNA, 19 nt, Artificial Sequence
  Description of Artificial Sequence: Synthetic oligonucleotide
cuuaacuccacuaccuuuu

SEQ ID NO: 2616547 - RNA, 19 nt, Artificial Sequence
  Description of Artificial Sequence: Synthetic oligonucleotide
uggcucaugggcugugccu

SEQ ID NO: 2616548 - RNA, 19 nt, Artificial Sequence
  Description of Artificial Sequence: Synthetic oligonucleotide
ggauccuccaaugacaucu

SEQ ID NO: 2616549 - RNA, 19 nt, Artificial Sequence
  Description of Artificial Sequence: Synthetic oligonucleotide
cuucuggcaacuguccauc

SEQ ID NO: 2616550 - RNA, 19 nt, Artificial Sequence
  Description of Artificial Sequence: Synthetic oligonucleotide
gcuaugagaggccuugguc

SEQ ID NO: 2616551 - RNA, 19 nt, Artificial Sequence
  Description of Artificial Sequence: Synthetic oligonucleotide
gcguuugaaggccuccagg

SEQ ID NO: 2616552 - RNA, 19 nt, Artificial Sequence
  Description of Artificial Sequence: Synthetic oligonucleotide
ccugauccccucuagcaag

SEQ ID NO: 2616553 - RNA, 19 nt, Artificial Sequence
  Description of Artificial Sequence: Synthetic oligonucleotide
ggcaucuugcauccugaag

SEQ ID NO: 2616554 - RNA, 19 nt, Artificial Sequence
  Description of Artificial Sequence: Synthetic oligonucleotide
ucuauaugaccuggaucuc

SEQ ID NO: 2616555 - RNA, 19 nt, Artificial Sequence
  Description of Artificial Sequence: Synthetic oligonucleotide
agguaucaggggacaaagg

SEQ ID NO: 2616556 - RNA, 19 nt, Artificial Sequence
  Description of Artificial Sequence: Synthetic oligonucleotide
guuuugacagcuggacuca

SEQ ID NO: 2616557 - RNA, 19 nt, Artificial Sequence
  Description of Artificial Sequence: Synthetic oligonucleotide
uucuggcaacuguccauca

SEQ ID NO: 2616558 - RNA, 19 nt, Artificial Sequence
  Description of Artificial Sequence: Synthetic oligonucleotide
ucaaccgguugagacugga

SEQ ID NO: 2616559 - RNA, 19 nt, Artificial Sequence
  Description of Artificial Sequence: Synthetic oligonucleotide
ucccggugggugcucauaa

SEQ ID NO: 2616560 - RNA, 19 nt, Artificial Sequence
  Description of Artificial Sequence: Synthetic oligonucleotide
cuggcucguucccugcagg

SEQ ID NO: 2616561 - RNA, 19 nt, Artificial Sequence
  Description of Artificial Sequence: Synthetic oligonucleotide
caaccgguugagacuggag

SEQ ID NO: 2616562 - RNA, 19 nt, Artificial Sequence
  Description of Artificial Sequence: Synthetic oligonucleotide
uuuggcucaugggcugugc

SEQ ID NO: 2616563 - RNA, 19 nt, Artificial Sequence
  Description of Artificial Sequence: Synthetic oligonucleotide
ggcugcuuaacuccacuac

SEQ ID NO: 2616564 - RNA, 19 nt, Artificial Sequence
  Description of Artificial Sequence: Synthetic oligonucleotide
cucuggggaaggucacuag

SEQ ID NO: 2616565 - RNA, 19 nt, Artificial Sequence
  Description of Artificial Sequence: Synthetic oligonucleotide
guucccuccagcccugauc

SEQ ID NO: 2616566 - RNA, 19 nt, Artificial Sequence
  Description of Artificial Sequence: Synthetic oligonucleotide
cagguaaggcagaggcuug

SEQ ID NO: 2616567 - RNA, 19 nt, Artificial Sequence
  Description of Artificial Sequence: Synthetic oligonucleotide
gucacuagcugcauggcua

SEQ ID NO: 2616568 - RNA, 19 nt, Artificial Sequence
  Description of Artificial Sequence: Synthetic oligonucleotide
ucucaacgucuugauggca

SEQ ID NO: 2616569 - RNA, 19 nt, Artificial Sequence
  Description of Artificial Sequence: Synthetic oligonucleotide
uaaaggcaguguuccuauc

SEQ ID NO: 2616570 - RNA, 19 nt, Artificial Sequence
  Description of Artificial Sequence: Synthetic oligonucleotide
ccuguucuauaugaccugg

SEQ ID NO: 2616571 - RNA, 19 nt, Artificial Sequence
  Description of Artificial Sequence: Synthetic oligonucleotide
uggcucguucccugcagga

SEQ ID NO: 2616572 - RNA, 19 nt, Artificial Sequence
  Description of Artificial Sequence: Synthetic oligonucleotide
auuuggccacggccuuugg

SEQ ID NO: 2616573 - RNA, 19 nt, Artificial Sequence
  Description of Artificial Sequence: Synthetic oligonucleotide
ucccaaccccuuugucagg

SEQ ID NO: 2616574 - RNA, 19 nt, Artificial Sequence
  Description of Artificial Sequence: Synthetic oligonucleotide
cuggaucuccagcacccac

SEQ ID NO: 2616575 - RNA, 19 nt, Artificial Sequence
  Description of Artificial Sequence: Synthetic oligonucleotide
gugcucauaaucaaccggu

SEQ ID NO: 2616576 - RNA, 19 nt, Artificial Sequence
  Description of Artificial Sequence: Synthetic oligonucleotide
guaucaggggacaaaggcu

SEQ ID NO: 2616577 - RNA, 19 nt, Artificial Sequence
  Description of Artificial Sequence: Synthetic oligonucleotide
gcucuucuuuuccaggaac

SEQ ID NO: 2616578 - RNA, 19 nt, Artificial Sequence
  Description of Artificial Sequence: Synthetic oligonucleotide
uuuuggcucaugggcugug

SEQ ID NO: 2616579 - RNA, 19 nt, Artificial Sequence
  Description of Artificial Sequence: Synthetic oligonucleotide
cacgaggccgcgcacugug

SEQ ID NO: 2616580 - RNA, 19 nt, Artificial Sequence
  Description of Artificial Sequence: Synthetic oligonucleotide
accacgaggccgcgcacug

SEQ ID NO: 2616581 - RNA, 19 nt, Artificial Sequence
  Description of Artificial Sequence: Synthetic oligonucleotide
uggccacggccuuugggga

SEQ ID NO: 2616582 - RNA, 19 nt, Artificial Sequence
  Description of Artificial Sequence: Synthetic oligonucleotide
cauggccuggcucguuccc

SEQ ID NO: 2616583 - RNA, 19 nt, Artificial Sequence
  Description of Artificial Sequence: Synthetic oligonucleotide
gcucccaaccccuuuguca

SEQ ID NO: 2616584 - RNA, 19 nt, Artificial Sequence
  Description of Artificial Sequence: Synthetic oligonucleotide
agcugagaggagguaucag

SEQ ID NO: 2616585 - RNA, 19 nt, Artificial Sequence
  Description of Artificial Sequence: Synthetic oligonucleotide
cugcuuaacuccacuaccu

SEQ ID NO: 2616586 - RNA, 19 nt, Artificial Sequence
  Description of Artificial Sequence: Synthetic oligonucleotide
cugcaggaaaacccugcuc

SEQ ID NO: 2616587 - RNA, 19 nt, Artificial Sequence
  Description of Artificial Sequence: Synthetic oligonucleotide
agccucaauaaggcuuguc

SEQ ID NO: 2616588 - RNA, 19 nt, Artificial Sequence
  Description of Artificial Sequence: Synthetic oligonucleotide
uuccugcguuugaaggccu

SEQ ID NO: 2616589 - RNA, 19 nt, Artificial Sequence
  Description of Artificial Sequence: Synthetic oligonucleotide
gugggugcucauaaucaac

SEQ ID NO: 2616590 - RNA, 19 nt, Artificial Sequence
  Description of Artificial Sequence: Synthetic oligonucleotide
cuaaaggcaguguuccuau

SEQ ID NO: 2616591 - RNA, 19 nt, Artificial Sequence
  Description of Artificial Sequence: Synthetic oligonucleotide
acggccuuuggggauccuc

SEQ ID NO: 2616592 - RNA, 19 nt, Artificial Sequence
  Description of Artificial Sequence: Synthetic oligonucleotide
gaaggccuccaggucccgg

SEQ ID NO: 2616593 - RNA, 19 nt, Artificial Sequence
  Description of Artificial Sequence: Synthetic oligonucleotide
ucaugggcugugccucuaa

SEQ ID NO: 2616594 - RNA, 19 nt, Artificial Sequence
  Description of Artificial Sequence: Synthetic oligonucleotide
caggaaaacccugcuccug

SEQ ID NO: 2616595 - RNA, 19 nt, Artificial Sequence
  Description of Artificial Sequence: Synthetic oligonucleotide
cauaaucaaccgguugaga

SEQ ID NO: 2616596 - RNA, 19 nt, Artificial Sequence
  Description of Artificial Sequence: Synthetic oligonucleotide
cuguucuauaugaccugga

SEQ ID NO: 2616597 - RNA, 19 nt, Artificial Sequence
  Description of Artificial Sequence: Synthetic oligonucleotide
gcagccucaauaaggcuug

SEQ ID NO: 2616598 - RNA, 19 nt, Artificial Sequence
  Description of Artificial Sequence: Synthetic oligonucleotide
cuaugggaaucccugggcu

SEQ ID NO: 2616599 - RNA, 19 nt, Artificial Sequence
  Description of Artificial Sequence: Synthetic oligonucleotide
cagaguccuugguuuugac

SEQ ID NO: 2616600 - RNA, 19 nt, Artificial Sequence
  Description of Artificial Sequence: Synthetic oligonucleotide
uggcaucuugcauccugaa

SEQ ID NO: 2616601 - RNA, 19 nt, Artificial Sequence
  Description of Artificial Sequence: Synthetic oligonucleotide
agcaaggcucccaaccccu

SEQ ID NO: 2616602 - RNA, 19 nt, Artificial Sequence
  Description of Artificial Sequence: Synthetic oligonucleotide
ccaaugacaucuggguuag

SEQ ID NO: 2616603 - RNA, 19 nt, Artificial Sequence
  Description of Artificial Sequence: Synthetic oligonucleotide
gaggagguaucaggggaca

SEQ ID NO: 2616604 - RNA, 19 nt, Artificial Sequence
  Description of Artificial Sequence: Synthetic oligonucleotide
cucuagcaaggcucccaac

SEQ ID NO: 2616605 - RNA, 19 nt, Artificial Sequence
  Description of Artificial Sequence: Synthetic oligonucleotide
aggcuggagcagccuacag

SEQ ID NO: 2616606 - RNA, 19 nt, Artificial Sequence
  Description of Artificial Sequence: Synthetic oligonucleotide
aggcucucaacgucuugau

SEQ ID NO: 2616607 - RNA, 19 nt, Artificial Sequence
  Description of Artificial Sequence: Synthetic oligonucleotide
ggcaacuguccaucagagc

SEQ ID NO: 2616608 - RNA, 19 nt, Artificial Sequence
  Description of Artificial Sequence: Synthetic oligonucleotide
cuggggaaggucacuagcu

SEQ ID NO: 2616609 - RNA, 19 nt, Artificial Sequence
  Description of Artificial Sequence: Synthetic oligonucleotide
aggcugcuuaacuccacua

SEQ ID NO: 2616610 - RNA, 19 nt, Artificial Sequence
  Description of Artificial Sequence: Synthetic oligonucleotide
ccuuuuggcucaugggcug

SEQ ID NO: 2616611 - RNA, 19 nt, Artificial Sequence
  Description of Artificial Sequence: Synthetic oligonucleotide
uccugcguuugaaggccuc

SEQ ID NO: 2616612 - RNA, 19 nt, Artificial Sequence
  Description of Artificial Sequence: Synthetic oligonucleotide
gcuugucagggugucacug

SEQ ID NO: 2616613 - RNA, 19 nt, Artificial Sequence
  Description of Artificial Sequence: Synthetic oligonucleotide
cugcuaugagaggccuugg

SEQ ID NO: 2616614 - RNA, 19 nt, Artificial Sequence
  Description of Artificial Sequence: Synthetic oligonucleotide
caaccccuuugucagguaa

SEQ ID NO: 2616615 - RNA, 19 nt, Artificial Sequence
  Description of Artificial Sequence: Synthetic oligonucleotide
ggugggugcucauaaucaa

SEQ ID NO: 2616616 - RNA, 19 nt, Artificial Sequence
  Description of Artificial Sequence: Synthetic oligonucleotide
gcaguguuccuaucucuuc

SEQ ID NO: 2616617 - RNA, 19 nt, Artificial Sequence
  Description of Artificial Sequence: Synthetic oligonucleotide
augagaggccuugguccuc

SEQ ID NO: 2616618 - RNA, 19 nt, Artificial Sequence
  Description of Artificial Sequence: Synthetic oligonucleotide
ggcucucaacgucuugaug

SEQ ID NO: 2616619 - RNA, 19 nt, Artificial Sequence
  Description of Artificial Sequence: Synthetic oligonucleotide
gggcucuucuuuuccagga

SEQ ID NO: 2616620 - RNA, 19 nt, Artificial Sequence
  Description of Artificial Sequence: Synthetic oligonucleotide
gguccucuggggaagguca

SEQ ID NO: 2616621 - RNA, 19 nt, Artificial Sequence
  Description of Artificial Sequence: Synthetic oligonucleotide
caguguuccuaucucuucu

SEQ ID NO: 2616622 - RNA, 19 nt, Artificial Sequence
  Description of Artificial Sequence: Synthetic oligonucleotide
guggcaucuugcauccuga

SEQ ID NO: 2616623 - RNA, 19 nt, Artificial Sequence
  Description of Artificial Sequence: Synthetic oligonucleotide
ccugucaggucuaugggaa

SEQ ID NO: 2616624 - RNA, 19 nt, Artificial Sequence
  Description of Artificial Sequence: Synthetic oligonucleotide
cucguucccugcaggaaaa

SEQ ID NO: 2616625 - RNA, 19 nt, Artificial Sequence
  Description of Artificial Sequence: Synthetic oligonucleotide
gggaaggucacuagcugca

SEQ ID NO: 2616626 - RNA, 19 nt, Artificial Sequence
  Description of Artificial Sequence: Synthetic oligonucleotide
uggccuuccugcguuugaa

SEQ ID NO: 2616627 - RNA, 19 nt, Artificial Sequence
  Description of Artificial Sequence: Synthetic oligonucleotide
ugguccucuggggaagguc

SEQ ID NO: 2616628 - RNA, 19 nt, Artificial Sequence
  Description of Artificial Sequence: Synthetic oligonucleotide
cugcauggcuaugcucuag

SEQ ID NO: 2616629 - RNA, 19 nt, Artificial Sequence
  Description of Artificial Sequence: Synthetic oligonucleotide
aggcucccaaccccuuugu

SEQ ID NO: 2616630 - RNA, 19 nt, Artificial Sequence
  Description of Artificial Sequence: Synthetic oligonucleotide
gcuggagcagccuacaguu

SEQ ID NO: 2616631 - RNA, 19 nt, Artificial Sequence
  Description of Artificial Sequence: Synthetic oligonucleotide
gcugugccucuaaaggcag

SEQ ID NO: 2616632 - RNA, 19 nt, Artificial Sequence
  Description of Artificial Sequence: Synthetic oligonucleotide
aucaggggacaaaggcucu

SEQ ID NO: 2616633 - RNA, 19 nt, Artificial Sequence
  Description of Artificial Sequence: Synthetic oligonucleotide
ggaaaacccugcuccuguc

SEQ ID NO: 2616634 - RNA, 19 nt, Artificial Sequence
  Description of Artificial Sequence: Synthetic oligonucleotide
ggcaguucaggcugcuuaa

SEQ ID NO: 2616635 - RNA, 19 nt, Artificial Sequence
  Description of Artificial Sequence: Synthetic oligonucleotide
cagcccugauccccucuag

SEQ ID NO: 2616636 - RNA, 19 nt, Artificial Sequence
  Description of Artificial Sequence: Synthetic oligonucleotide
ugcuccugucaggucuaug

SEQ ID NO: 2616637 - RNA, 19 nt, Artificial Sequence
  Description of Artificial Sequence: Synthetic oligonucleotide
aucaaccgguugagacugg

SEQ ID NO: 2616638 - RNA, 19 nt, Artificial Sequence
  Description of Artificial Sequence: Synthetic oligonucleotide
ccuccaaugacaucugggu

SEQ ID NO: 2616639 - RNA, 19 nt, Artificial Sequence
  Description of Artificial Sequence: Synthetic oligonucleotide
gcucguucccugcaggaaa

SEQ ID NO: 2616640 - RNA, 19 nt, Artificial Sequence
  Description of Artificial Sequence: Synthetic oligonucleotide
ccggugggugcucauaauc

SEQ ID NO: 2616641 - RNA, 19 nt, Artificial Sequence
  Description of Artificial Sequence: Synthetic oligonucleotide
ggagcagccuacaguuccc

SEQ ID NO: 2616642 - RNA, 19 nt, Artificial Sequence
  Description of Artificial Sequence: Synthetic oligonucleotide
aggcagaggcuuggccuuc

SEQ ID NO: 2616643 - RNA, 19 nt, Artificial Sequence
  Description of Artificial Sequence: Synthetic oligonucleotide
aggccgcgcacugugucug

SEQ ID NO: 2616644 - RNA, 19 nt, Artificial Sequence
  Description of Artificial Sequence: Synthetic oligonucleotide
ucguucccugcaggaaaac

SEQ ID NO: 2616645 - RNA, 19 nt, Artificial Sequence
  Description of Artificial Sequence: Synthetic oligonucleotide
gccucuaaaggcaguguuc

SEQ ID NO: 2616646 - RNA, 19 nt, Artificial Sequence
  Description of Artificial Sequence: Synthetic oligonucleotide
caauaaggcuugucagggu

SEQ ID NO: 2616647 - RNA, 19 nt, Artificial Sequence
  Description of Artificial Sequence: Synthetic oligonucleotide
gcauccugaaggccuccug

SEQ ID NO: 2616648 - RNA, 19 nt, Artificial Sequence
  Description of Artificial Sequence: Synthetic oligonucleotide
gagauuuggccacggccuu

SEQ ID NO: 2616649 - RNA, 19 nt, Artificial Sequence
  Description of Artificial Sequence: Synthetic oligonucleotide
ugggaaucccugggcugcu

SEQ ID NO: 2616650 - RNA, 19 nt, Artificial Sequence
  Description of Artificial Sequence: Synthetic oligonucleotide
acccaccaugggcucuucu

SEQ ID NO: 2616651 - RNA, 19 nt, Artificial Sequence
  Description of Artificial Sequence: Synthetic oligonucleotide
gguuagggacagguccacc

SEQ ID NO: 2616652 - RNA, 19 nt, Artificial Sequence
  Description of Artificial Sequence: Synthetic oligonucleotide
uugguccucuggggaaggu

SEQ ID NO: 2616653 - RNA, 19 nt, Artificial Sequence
  Description of Artificial Sequence: Synthetic oligonucleotide
cggccuuuggggauccucc

SEQ ID NO: 2616654 - RNA, 19 nt, Artificial Sequence
  Description of Artificial Sequence: Synthetic oligonucleotide
ggagguaucaggggacaaa

SEQ ID NO: 2616655 - RNA, 19 nt, Artificial Sequence
  Description of Artificial Sequence: Synthetic oligonucleotide
aggagguaucaggggacaa

SEQ ID NO: 2616656 - RNA, 19 nt, Artificial Sequence
  Description of Artificial Sequence: Synthetic oligonucleotide
cacugcagcugugcugcug

SEQ ID NO: 2616657 - RNA, 19 nt, Artificial Sequence
  Description of Artificial Sequence: Synthetic oligonucleotide
caggucuaugggaaucccu

SEQ ID NO: 2616658 - RNA, 19 nt, Artificial Sequence
  Description of Artificial Sequence: Synthetic oligonucleotide
augcucuagcugagaggag

SEQ ID NO: 2616659 - RNA, 19 nt, Artificial Sequence
  Description of Artificial Sequence: Synthetic oligonucleotide
gagaggccuugguccucug

SEQ ID NO: 2616660 - RNA, 19 nt, Artificial Sequence
  Description of Artificial Sequence: Synthetic oligonucleotide
caaugacaucuggguuagg

SEQ ID NO: 2616661 - RNA, 19 nt, Artificial Sequence
  Description of Artificial Sequence: Synthetic oligonucleotide
gggcccagguccccauagg

SEQ ID NO: 2616662 - RNA, 19 nt, Artificial Sequence
  Description of Artificial Sequence: Synthetic oligonucleotide
cugcguuugaaggccucca

SEQ ID NO: 2616663 - RNA, 19 nt, Artificial Sequence
  Description of Artificial Sequence: Synthetic oligonucleotide
caugggcugugccucuaaa

SEQ ID NO: 2616664 - RNA, 19 nt, Artificial Sequence
  Description of Artificial Sequence: Synthetic oligonucleotide
agauuuggccacggccuuu

SEQ ID NO: 2616665 - RNA, 19 nt, Artificial Sequence
  Description of Artificial Sequence: Synthetic oligonucleotide
ggucacuagcugcauggcu

SEQ ID NO: 2616666 - RNA, 19 nt, Artificial Sequence
  Description of Artificial Sequence: Synthetic oligonucleotide
gcuuaacuccacuaccuuu

SEQ ID NO: 2616667 - RNA, 19 nt, Artificial Sequence
  Description of Artificial Sequence: Synthetic oligonucleotide
gaggccgcgcacugugucu

SEQ ID NO: 2616668 - RNA, 19 nt, Artificial Sequence
  Description of Artificial Sequence: Synthetic oligonucleotide
ccauggccuggcucguucc

SEQ ID NO: 2616669 - RNA, 19 nt, Artificial Sequence
  Description of Artificial Sequence: Synthetic oligonucleotide
cuccaaugacaucuggguu

SEQ ID NO: 2616670 - RNA, 19 nt, Artificial Sequence
  Description of Artificial Sequence: Synthetic oligonucleotide
ggcucuucuuuuccaggaa

SEQ ID NO: 2616671 - RNA, 19 nt, Artificial Sequence
  Description of Artificial Sequence: Synthetic oligonucleotide
agcacccaccaugggcucu

SEQ ID NO: 2616672 - RNA, 19 nt, Artificial Sequence
  Description of Artificial Sequence: Synthetic oligonucleotide
ccugcguuugaaggccucc

SEQ ID NO: 2616673 - RNA, 19 nt, Artificial Sequence
  Description of Artificial Sequence: Synthetic oligonucleotide
ccagcacccaccaugggcu

SEQ ID NO: 2616674 - RNA, 19 nt, Artificial Sequence
  Description of Artificial Sequence: Synthetic oligonucleotide
cucuaaaggcaguguuccu

SEQ ID NO: 2616675 - RNA, 19 nt, Artificial Sequence
  Description of Artificial Sequence: Synthetic oligonucleotide
guuccaccacgaggccgcg

SEQ ID NO: 2616676 - RNA, 19 nt, Artificial Sequence
  Description of Artificial Sequence: Synthetic oligonucleotide
ggcuggagcagccuacagu

SEQ ID NO: 2616677 - RNA, 19 nt, Artificial Sequence
  Description of Artificial Sequence: Synthetic oligonucleotide
ccuggcucguucccugcag

SEQ ID NO: 2616678 - RNA, 19 nt, Artificial Sequence
  Description of Artificial Sequence: Synthetic oligonucleotide
cccuccagcccugaucccc

SEQ ID NO: 2616679 - RNA, 19 nt, Artificial Sequence
  Description of Artificial Sequence: Synthetic oligonucleotide
cguucccugcaggaaaacc

SEQ ID NO: 2616680 - RNA, 19 nt, Artificial Sequence
  Description of Artificial Sequence: Synthetic oligonucleotide
gccagaguccuugguuuug

SEQ ID NO: 2616681 - RNA, 19 nt, Artificial Sequence
  Description of Artificial Sequence: Synthetic oligonucleotide
ggccuuuggggauccucca

SEQ ID NO: 2616682 - RNA, 19 nt, Artificial Sequence
  Description of Artificial Sequence: Synthetic oligonucleotide
cggugggugcucauaauca

SEQ ID NO: 2616683 - RNA, 19 nt, Artificial Sequence
  Description of Artificial Sequence: Synthetic oligonucleotide
cgucuugauggcaguucag

SEQ ID NO: 2616684 - RNA, 19 nt, Artificial Sequence
  Description of Artificial Sequence: Synthetic oligonucleotide
caucuggguuagggacagg

SEQ ID NO: 2616685 - RNA, 19 nt, Artificial Sequence
  Description of Artificial Sequence: Synthetic oligonucleotide
caggcugcuuaacuccacu

SEQ ID NO: 2616686 - RNA, 19 nt, Artificial Sequence
  Description of Artificial Sequence: Synthetic oligonucleotide
gauggcaguucaggcugcu

SEQ ID NO: 2616687 - RNA, 19 nt, Artificial Sequence
  Description of Artificial Sequence: Synthetic oligonucleotide
cgcgcacugugucuguggc

SEQ ID NO: 2616688 - RNA, 19 nt, Artificial Sequence
  Description of Artificial Sequence: Synthetic oligonucleotide
ccccuuugucagguaaggc

SEQ ID NO: 2616689 - RNA, 19 nt, Artificial Sequence
  Description of Artificial Sequence: Synthetic oligonucleotide
gccuugguccucuggggaa

SEQ ID NO: 2616690 - RNA, 19 nt, Artificial Sequence
  Description of Artificial Sequence: Synthetic oligonucleotide
gggauccuccaaugacauc

SEQ ID NO: 2616691 - RNA, 19 nt, Artificial Sequence
  Description of Artificial Sequence: Synthetic oligonucleotide
ggguuagggacagguccac

SEQ ID NO: 2616692 - RNA, 19 nt, Artificial Sequence
  Description of Artificial Sequence: Synthetic oligonucleotide
caggcuggagcagccuaca

SEQ ID NO: 2616693 - RNA, 19 nt, Artificial Sequence
  Description of Artificial Sequence: Synthetic oligonucleotide
ggcucccaaccccuuuguc

SEQ ID NO: 2616694 - RNA, 19 nt, Artificial Sequence
  Description of Artificial Sequence: Synthetic oligonucleotide
caccaugggcucuucuuuu

SEQ ID NO: 2616695 - RNA, 19 nt, Artificial Sequence
  Description of Artificial Sequence: Synthetic oligonucleotide
ggccuggcucguucccugc

SEQ ID NO: 2616696 - RNA, 19 nt, Artificial Sequence
  Description of Artificial Sequence: Synthetic oligonucleotide
gagcagccuacaguucccu

SEQ ID NO: 2616697 - RNA, 19 nt, Artificial Sequence
  Description of Artificial Sequence: Synthetic oligonucleotide
cuccagcccugauccccuc

SEQ ID NO: 2616698 - RNA, 19 nt, Artificial Sequence
  Description of Artificial Sequence: Synthetic oligonucleotide
cuuuuggcucaugggcugu

SEQ ID NO: 2616699 - RNA, 19 nt, Artificial Sequence
  Description of Artificial Sequence: Synthetic oligonucleotide
auggcaguucaggcugcuu

SEQ ID NO: 2616700 - RNA, 19 nt, Artificial Sequence
  Description of Artificial Sequence: Synthetic oligonucleotide
gcuggacucauuuccuguu

SEQ ID NO: 2616701 - RNA, 19 nt, Artificial Sequence
  Description of Artificial Sequence: Synthetic oligonucleotide
cacuaccuuuuggcucaug

SEQ ID NO: 2616702 - RNA, 19 nt, Artificial Sequence
  Description of Artificial Sequence: Synthetic oligonucleotide
cugucaggucuaugggaau

SEQ ID NO: 2616703 - RNA, 19 nt, Artificial Sequence
  Description of Artificial Sequence: Synthetic oligonucleotide
ggcuaugcucuagcugaga

SEQ ID NO: 2616704 - RNA, 19 nt, Artificial Sequence
  Description of Artificial Sequence: Synthetic oligonucleotide
cucuagcugagaggaggua

SEQ ID NO: 2616705 - RNA, 19 nt, Artificial Sequence
  Description of Artificial Sequence: Synthetic oligonucleotide
ggaaucccugggcugcuau

SEQ ID NO: 2616706 - RNA, 19 nt, Artificial Sequence
  Description of Artificial Sequence: Synthetic oligonucleotide
gugccucuaaaggcagugu

SEQ ID NO: 2616707 - RNA, 19 nt, Artificial Sequence
  Description of Artificial Sequence: Synthetic oligonucleotide
cugugccucuaaaggcagu

SEQ ID NO: 2616708 - RNA, 19 nt, Artificial Sequence
  Description of Artificial Sequence: Synthetic oligonucleotide
gggucugggcugagauuug

SEQ ID NO: 2616709 - RNA, 19 nt, Artificial Sequence
  Description of Artificial Sequence: Synthetic oligonucleotide
acgaggccgcgcacugugu

SEQ ID NO: 2616710 - RNA, 19 nt, Artificial Sequence
  Description of Artificial Sequence: Synthetic oligonucleotide
gcgcacugugucuguggca

SEQ ID NO: 2616711 - RNA, 19 nt, Artificial Sequence
  Description of Artificial Sequence: Synthetic oligonucleotide
ggcaguguuccuaucucuu

SEQ ID NO: 2616712 - RNA, 19 nt, Artificial Sequence
  Description of Artificial Sequence: Synthetic oligonucleotide
ggcucguucccugcaggaa

SEQ ID NO: 2616713 - RNA, 19 nt, Artificial Sequence
  Description of Artificial Sequence: Synthetic oligonucleotide
ccugcaggaaaacccugcu

SEQ ID NO: 2616714 - RNA, 19 nt, Artificial Sequence
  Description of Artificial Sequence: Synthetic oligonucleotide
ccaucagagccagaguccu

SEQ ID NO: 2616715 - RNA, 19 nt, Artificial Sequence
  Description of Artificial Sequence: Synthetic oligonucleotide
ccuuuggggauccuccaau

SEQ ID NO: 2616716 - RNA, 19 nt, Artificial Sequence
  Description of Artificial Sequence: Synthetic oligonucleotide
gccuggcucguucccugca

SEQ ID NO: 2616717 - RNA, 19 nt, Artificial Sequence
  Description of Artificial Sequence: Synthetic oligonucleotide
gccacggccuuuggggauc

SEQ ID NO: 2616718 - RNA, 19 nt, Artificial Sequence
  Description of Artificial Sequence: Synthetic oligonucleotide
caaggcucccaaccccuuu

SEQ ID NO: 2616719 - RNA, 19 nt, Artificial Sequence
  Description of Artificial Sequence: Synthetic oligonucleotide
cccucuagcaaggcuccca

SEQ ID NO: 2616720 - RNA, 19 nt, Artificial Sequence
  Description of Artificial Sequence: Synthetic oligonucleotide
ccuaucucuucuggcaacu

SEQ ID NO: 2616721 - RNA, 19 nt, Artificial Sequence
  Description of Artificial Sequence: Synthetic oligonucleotide
cgaggccgcgcacuguguc

SEQ ID NO: 2616722 - RNA, 19 nt, Artificial Sequence
  Description of Artificial Sequence: Synthetic oligonucleotide
caacgucuugauggcaguu

SEQ ID NO: 2616723 - RNA, 19 nt, Artificial Sequence
  Description of Artificial Sequence: Synthetic oligonucleotide
gucccggugggugcucaua

SEQ ID NO: 2616724 - RNA, 19 nt, Artificial Sequence
  Description of Artificial Sequence: Synthetic oligonucleotide
ccugcuccugucaggucua

SEQ ID NO: 2616725 - RNA, 19 nt, Artificial Sequence
  Description of Artificial Sequence: Synthetic oligonucleotide
ggaaggucacuagcugcau

SEQ ID NO: 2616726 - RNA, 19 nt, Artificial Sequence
  Description of Artificial Sequence: Synthetic oligonucleotide
caccacgaggccgcgcacu

SEQ ID NO: 2616727 - RNA, 19 nt, Artificial Sequence
  Description of Artificial Sequence: Synthetic oligonucleotide
ccaccaugggcucuucuuu

SEQ ID NO: 2616728 - RNA, 19 nt, Artificial Sequence
  Description of Artificial Sequence: Synthetic oligonucleotide
cccaccaugggcucuucuu

SEQ ID NO: 2616729 - RNA, 19 nt, Artificial Sequence
  Description of Artificial Sequence: Synthetic oligonucleotide
ccacggccuuuggggaucc

SEQ ID NO: 2616730 - RNA, 19 nt, Artificial Sequence
  Description of Artificial Sequence: Synthetic oligonucleotide
ccagcccugauccccucua

SEQ ID NO: 2616731 - RNA, 19 nt, Artificial Sequence
  Description of Artificial Sequence: Synthetic oligonucleotide
ccaccacgaggccgcgcac

SEQ ID NO: 2616732 - RNA, 19 nt, Artificial Sequence
  Description of Artificial Sequence: Synthetic oligonucleotide
cgcacugugucuguggcau

SEQ ID NO: 2616733 - RNA, 19 nt, Artificial Sequence
  Description of Artificial Sequence: Synthetic oligonucleotide
ccccucuagcaaggcuccc

SEQ ID NO: 2616734 - RNA, 19 nt, Artificial Sequence
  Description of Artificial Sequence: Synthetic oligonucleotide
ccgguugagacuggagagu

SEQ ID NO: 2616735 - RNA, 19 nt, Artificial Sequence
  Description of Artificial Sequence: Synthetic oligonucleotide
ggccacggccuuuggggau

SEQ ID NO: 2616736 - RNA, 19 nt, Artificial Sequence
  Description of Artificial Sequence: Synthetic oligonucleotide
cccaaccccuuugucaggu

SEQ ID NO: 2616737 - RNA, 19 nt, Artificial Sequence
  Description of Artificial Sequence: Synthetic oligonucleotide
ccaaccccuuugucaggua

SEQ ID NO: 2616738 - RNA, 19 nt, Artificial Sequence
  Description of Artificial Sequence: Synthetic oligonucleotide
gggaaucccugggcugcua

SEQ ID NO: 2616739 - RNA, 19 nt, Artificial Sequence
  Description of Artificial Sequence: Synthetic oligonucleotide
cagccucaauaaggcuugu

SEQ ID NO: 2616740 - RNA, 19 nt, Artificial Sequence
  Description of Artificial Sequence: Synthetic oligonucleotide
cgguugagacuggagaguu

SEQ ID NO: 2616741 - RNA, 19 nt, Artificial Sequence
  Description of Artificial Sequence: Synthetic oligonucleotide
cuguggcaucuugcauccu

SEQ ID NO: 2616742 - RNA, 19 nt, Artificial Sequence
  Description of Artificial Sequence: Synthetic oligonucleotide
ggcugcuaugagaggccuu

SEQ ID NO: 2616743 - RNA, 19 nt, Artificial Sequence
  Description of Artificial Sequence: Synthetic oligonucleotide
gcaaggcucccaaccccuu

SEQ ID NO: 2616744 - RNA, 19 nt, Artificial Sequence
  Description of Artificial Sequence: Synthetic oligonucleotide
cugcuccugucaggucuau

SEQ ID NO: 2616745 - RNA, 19 nt, Artificial Sequence
  Description of Artificial Sequence: Synthetic oligonucleotide
cccggugggugcucauaau

SEQ ID NO: 2616746 - RNA, 19 nt, Artificial Sequence
  Description of Artificial Sequence: Synthetic oligonucleotide
caccauggccuggcucguu

SEQ ID NO: 2616747 - RNA, 19 nt, Artificial Sequence
  Description of Artificial Sequence: Synthetic oligonucleotide
cacggccuuuggggauccu

SEQ ID NO: 2616748 - RNA, 19 nt, Artificial Sequence
  Description of Artificial Sequence: Synthetic oligonucleotide
ccacuaccuuuuggcucau

SEQ ID NO: 2616749 - RNA, 19 nt, Artificial Sequence
  Description of Artificial Sequence: Synthetic oligonucleotide
aguacauucacauggagag

SEQ ID NO: 2616750 - RNA, 19 nt, Artificial Sequence
  Description of Artificial Sequence: Synthetic oligonucleotide
acuacuaaagugcaggugg

SEQ ID NO: 2616751 - RNA, 19 nt, Artificial Sequence
  Description of Artificial Sequence: Synthetic oligonucleotide
ugguauuugaggaugacag

SEQ ID NO: 2616752 - RNA, 19 nt, Artificial Sequence
  Description of Artificial Sequence: Synthetic oligonucleotide
agugcaaucaguccaacgg

SEQ ID NO: 2616753 - RNA, 19 nt, Artificial Sequence
  Description of Artificial Sequence: Synthetic oligonucleotide
auuuccauccuccuggccc

SEQ ID NO: 2616754 - RNA, 19 nt, Artificial Sequence
  Description of Artificial Sequence: Synthetic oligonucleotide
ucauagaggauuuccaucc

SEQ ID NO: 2616755 - RNA, 19 nt, Artificial Sequence
  Description of Artificial Sequence: Synthetic oligonucleotide
uggauuguccccaaggucc

SEQ ID NO: 2616756 - RNA, 19 nt, Artificial Sequence
  Description of Artificial Sequence: Synthetic oligonucleotide
uccacugcaaaccugaagu

SEQ ID NO: 2616757 - RNA, 19 nt, Artificial Sequence
  Description of Artificial Sequence: Synthetic oligonucleotide
agauccugcacauuggccg

SEQ ID NO: 2616758 - RNA, 19 nt, Artificial Sequence
  Description of Artificial Sequence: Synthetic oligonucleotide
aaauagugaagagugccac

SEQ ID NO: 2616759 - RNA, 19 nt, Artificial Sequence
  Description of Artificial Sequence: Synthetic oligonucleotide
aaacuugcaugacauacug

SEQ ID NO: 2616760 - RNA, 19 nt, Artificial Sequence
  Description of Artificial Sequence: Synthetic oligonucleotide
aagagugccacagugagug

SEQ ID NO: 2616761 - RNA, 19 nt, Artificial Sequence
  Description of Artificial Sequence: Synthetic oligonucleotide
acuugcaugacauacugug

SEQ ID NO: 2616762 - RNA, 19 nt, Artificial Sequence
  Description of Artificial Sequence: Synthetic oligonucleotide
ugagaugguagccaggggc

SEQ ID NO: 2616763 - RNA, 19 nt, Artificial Sequence
  Description of Artificial Sequence: Synthetic oligonucleotide
aguccaacggccuccagcc

SEQ ID NO: 2616764 - RNA, 19 nt, Artificial Sequence
  Description of Artificial Sequence: Synthetic oligonucleotide
uugucauggcaacagacag

SEQ ID NO: 2616765 - RNA, 19 nt, Artificial Sequence
  Description of Artificial Sequence: Synthetic oligonucleotide
ggcguuauaaacaagaagc

SEQ ID NO: 2616766 - RNA, 19 nt, Artificial Sequence
  Description of Artificial Sequence: Synthetic oligonucleotide
acagcaauuacucuguuaa

SEQ ID NO: 2616767 - RNA, 19 nt, Artificial Sequence
  Description of Artificial Sequence: Synthetic oligonucleotide
acuuucauagaggauuucc

SEQ ID NO: 2616768 - RNA, 19 nt, Artificial Sequence
  Description of Artificial Sequence: Synthetic oligonucleotide
aagagguaaauagugaaga

SEQ ID NO: 2616769 - RNA, 19 nt, Artificial Sequence
  Description of Artificial Sequence: Synthetic oligonucleotide
acagacagcaauuacucug

SEQ ID NO: 2616770 - RNA, 19 nt, Artificial Sequence
  Description of Artificial Sequence: Synthetic oligonucleotide
acuaaagugcagguggucc

SEQ ID NO: 2616771 - RNA, 19 nt, Artificial Sequence
  Description of Artificial Sequence: Synthetic oligonucleotide
uugcaugacauacuguggc

SEQ ID NO: 2616772 - RNA, 19 nt, Artificial Sequence
  Description of Artificial Sequence: Synthetic oligonucleotide
uaaauagugaagagugcca

SEQ ID NO: 2616773 - RNA, 19 nt, Artificial Sequence
  Description of Artificial Sequence: Synthetic oligonucleotide
guaaauagugaagagugcc

SEQ ID NO: 2616774 - RNA, 19 nt, Artificial Sequence
  Description of Artificial Sequence: Synthetic oligonucleotide
agguaaauagugaagagug

SEQ ID NO: 2616775 - RNA, 19 nt, Artificial Sequence
  Description of Artificial Sequence: Synthetic oligonucleotide
uuggcugaaacuugcauga

SEQ ID NO: 2616776 - RNA, 19 nt, Artificial Sequence
  Description of Artificial Sequence: Synthetic oligonucleotide
agugaagagugccacagug

SEQ ID NO: 2616777 - RNA, 19 nt, Artificial Sequence
  Description of Artificial Sequence: Synthetic oligonucleotide
aauuacucuguuaauggcu

SEQ ID NO: 2616778 - RNA, 19 nt, Artificial Sequence
  Description of Artificial Sequence: Synthetic oligonucleotide
guauuugaggaugacagcc

SEQ ID NO: 2616779 - RNA, 19 nt, Artificial Sequence
  Description of Artificial Sequence: Synthetic oligonucleotide
gcaauuacucuguuaaugg

SEQ ID NO: 2616780 - RNA, 19 nt, Artificial Sequence
  Description of Artificial Sequence: Synthetic oligonucleotide
ucuguuaauggcuuccacu

SEQ ID NO: 2616781 - RNA, 19 nt, Artificial Sequence
  Description of Artificial Sequence: Synthetic oligonucleotide
agaagagguaaauagugaa

SEQ ID NO: 2616782 - RNA, 19 nt, Artificial Sequence
  Description of Artificial Sequence: Synthetic oligonucleotide
aagaagcacaccaugucuc

SEQ ID NO: 2616783 - RNA, 19 nt, Artificial Sequence
  Description of Artificial Sequence: Synthetic oligonucleotide
agagguaaauagugaagag

SEQ ID NO: 2616784 - RNA, 19 nt, Artificial Sequence
  Description of Artificial Sequence: Synthetic oligonucleotide
uccuccacagucuucacca

SEQ ID NO: 2616785 - RNA, 19 nt, Artificial Sequence
  Description of Artificial Sequence: Synthetic oligonucleotide
uaaacaagaagcacaccau

SEQ ID NO: 2616786 - RNA, 19 nt, Artificial Sequence
  Description of Artificial Sequence: Synthetic oligonucleotide
auuggccggucauugaagg

SEQ ID NO: 2616787 - RNA, 19 nt, Artificial Sequence
  Description of Artificial Sequence: Synthetic oligonucleotide
gaagagguaaauagugaag

SEQ ID NO: 2616788 - RNA, 19 nt, Artificial Sequence
  Description of Artificial Sequence: Synthetic oligonucleotide
ugcaaucaguccaacggcc

SEQ ID NO: 2616789 - RNA, 19 nt, Artificial Sequence
  Description of Artificial Sequence: Synthetic oligonucleotide
uauuugaggaugacagcca

SEQ ID NO: 2616790 - RNA, 19 nt, Artificial Sequence
  Description of Artificial Sequence: Synthetic oligonucleotide
agcaauuacucuguuaaug

SEQ ID NO: 2616791 - RNA, 19 nt, Artificial Sequence
  Description of Artificial Sequence: Synthetic oligonucleotide
uccacuuucauagaggauu

SEQ ID NO: 2616792 - RNA, 19 nt, Artificial Sequence
  Description of Artificial Sequence: Synthetic oligonucleotide
cuaggcugcccacaaaucc

SEQ ID NO: 2616793 - RNA, 19 nt, Artificial Sequence
  Description of Artificial Sequence: Synthetic oligonucleotide
uggcagauccugcacauug

SEQ ID NO: 2616794 - RNA, 19 nt, Artificial Sequence
  Description of Artificial Sequence: Synthetic oligonucleotide
auagugaagagugccacag

SEQ ID NO: 2616795 - RNA, 19 nt, Artificial Sequence
  Description of Artificial Sequence: Synthetic oligonucleotide
caauuacucuguuaauggc

SEQ ID NO: 2616796 - RNA, 19 nt, Artificial Sequence
  Description of Artificial Sequence: Synthetic oligonucleotide
cagccgacuacuaaagugc

SEQ ID NO: 2616797 - RNA, 19 nt, Artificial Sequence
  Description of Artificial Sequence: Synthetic oligonucleotide
agcuccgauggauuguccc

SEQ ID NO: 2616798 - RNA, 19 nt, Artificial Sequence
  Description of Artificial Sequence: Synthetic oligonucleotide
caaugcuccaggcagcucc

SEQ ID NO: 2616799 - RNA, 19 nt, Artificial Sequence
  Description of Artificial Sequence: Synthetic oligonucleotide
cuugcaugacauacugugg

SEQ ID NO: 2616800 - RNA, 19 nt, Artificial Sequence
  Description of Artificial Sequence: Synthetic oligonucleotide
cauugaaggggcucguggg

SEQ ID NO: 2616801 - RNA, 19 nt, Artificial Sequence
  Description of Artificial Sequence: Synthetic oligonucleotide
agccacuccacuaacggcc

SEQ ID NO: 2616802 - RNA, 19 nt, Artificial Sequence
  Description of Artificial Sequence: Synthetic oligonucleotide
agacgccaaauccaacgcc

SEQ ID NO: 2616803 - RNA, 19 nt, Artificial Sequence
  Description of Artificial Sequence: Synthetic oligonucleotide
uccacuaacggccuggguu

SEQ ID NO: 2616804 - RNA, 19 nt, Artificial Sequence
  Description of Artificial Sequence: Synthetic oligonucleotide
auagaggauuuccauccuc

SEQ ID NO: 2616805 - RNA, 19 nt, Artificial Sequence
  Description of Artificial Sequence: Synthetic oligonucleotide
auggauuguccccaagguc

SEQ ID NO: 2616806 - RNA, 19 nt, Artificial Sequence
  Description of Artificial Sequence: Synthetic oligonucleotide
aacaagaagcacaccaugu

SEQ ID NO: 2616807 - RNA, 19 nt, Artificial Sequence
  Description of Artificial Sequence: Synthetic oligonucleotide
agagcaaauccucuuggcu

SEQ ID NO: 2616808 - RNA, 19 nt, Artificial Sequence
  Description of Artificial Sequence: Synthetic oligonucleotide
agucuggcaagacuucggg

SEQ ID NO: 2616809 - RNA, 19 nt, Artificial Sequence
  Description of Artificial Sequence: Synthetic oligonucleotide
guuaauggcuuccacuuuc

SEQ ID NO: 2616810 - RNA, 19 nt, Artificial Sequence
  Description of Artificial Sequence: Synthetic oligonucleotide
caagacuucgggcagggug

SEQ ID NO: 2616811 - RNA, 19 nt, Artificial Sequence
  Description of Artificial Sequence: Synthetic oligonucleotide
aggaugacagccaaugcuc

SEQ ID NO: 2616812 - RNA, 19 nt, Artificial Sequence
  Description of Artificial Sequence: Synthetic oligonucleotide
acaccaugucuccaaacag

SEQ ID NO: 2616813 - RNA, 19 nt, Artificial Sequence
  Description of Artificial Sequence: Synthetic oligonucleotide
acuguugacagcagcugcc

SEQ ID NO: 2616814 - RNA, 19 nt, Artificial Sequence
  Description of Artificial Sequence: Synthetic oligonucleotide
ugucauggcaacagacagc

SEQ ID NO: 2616815 - RNA, 19 nt, Artificial Sequence
  Description of Artificial Sequence: Synthetic oligonucleotide
gagaugguagccaggggcg

SEQ ID NO: 2616816 - RNA, 19 nt, Artificial Sequence
  Description of Artificial Sequence: Synthetic oligonucleotide
uagguugucauggcaacag

SEQ ID NO: 2616817 - RNA, 19 nt, Artificial Sequence
  Description of Artificial Sequence: Synthetic oligonucleotide
uccgcacuacuguugacag

SEQ ID NO: 2616818 - RNA, 19 nt, Artificial Sequence
  Description of Artificial Sequence: Synthetic oligonucleotide
caguccagacgccaaaucc

SEQ ID NO: 2616819 - RNA, 19 nt, Artificial Sequence
  Description of Artificial Sequence: Synthetic oligonucleotide
uuaauggcuuccacuuuca

SEQ ID NO: 2616820 - RNA, 19 nt, Artificial Sequence
  Description of Artificial Sequence: Synthetic oligonucleotide
agccaggggcguuauaaac

SEQ ID NO: 2616821 - RNA, 19 nt, Artificial Sequence
  Description of Artificial Sequence: Synthetic oligonucleotide
aaacagaguucgcuucuca

SEQ ID NO: 2616822 - RNA, 19 nt, Artificial Sequence
  Description of Artificial Sequence: Synthetic oligonucleotide
aaccugaaguggcagaguu

SEQ ID NO: 2616823 - RNA, 19 nt, Artificial Sequence
  Description of Artificial Sequence: Synthetic oligonucleotide
ucauggcagauccugcaca

SEQ ID NO: 2616824 - RNA, 19 nt, Artificial Sequence
  Description of Artificial Sequence: Synthetic oligonucleotide
ugcaugacauacuguggcc

SEQ ID NO: 2616825 - RNA, 19 nt, Artificial Sequence
  Description of Artificial Sequence: Synthetic oligonucleotide
cuuucauagaggauuucca

SEQ ID NO: 2616826 - RNA, 19 nt, Artificial Sequence
  Description of Artificial Sequence: Synthetic oligonucleotide
uggccggucauugaagggg

SEQ ID NO: 2616827 - RNA, 19 nt, Artificial Sequence
  Description of Artificial Sequence: Synthetic oligonucleotide
aacagaguucgcuucucau

SEQ ID NO: 2616828 - RNA, 19 nt, Artificial Sequence
  Description of Artificial Sequence: Synthetic oligonucleotide
gagagcaaauccucuuggc

SEQ ID NO: 2616829 - RNA, 19 nt, Artificial Sequence
  Description of Artificial Sequence: Synthetic oligonucleotide
gacgccaaauccaacgccc

SEQ ID NO: 2616830 - RNA, 19 nt, Artificial Sequence
  Description of Artificial Sequence: Synthetic oligonucleotide
cagccaaugcuccaggcag

SEQ ID NO: 2616831 - RNA, 19 nt, Artificial Sequence
  Description of Artificial Sequence: Synthetic oligonucleotide
agcggcuagguugucaugg

SEQ ID NO: 2616832 - RNA, 19 nt, Artificial Sequence
  Description of Artificial Sequence: Synthetic oligonucleotide
cuuccacuuucauagagga

SEQ ID NO: 2616833 - RNA, 19 nt, Artificial Sequence
  Description of Artificial Sequence: Synthetic oligonucleotide
aacggccuggguuugcgcu

SEQ ID NO: 2616834 - RNA, 19 nt, Artificial Sequence
  Description of Artificial Sequence: Synthetic oligonucleotide
ugaaggggcucgugggugg

SEQ ID NO: 2616835 - RNA, 19 nt, Artificial Sequence
  Description of Artificial Sequence: Synthetic oligonucleotide
ccagaagagguaaauagug

SEQ ID NO: 2616836 - RNA, 19 nt, Artificial Sequence
  Description of Artificial Sequence: Synthetic oligonucleotide
uggcagaguucacaguagc

SEQ ID NO: 2616837 - RNA, 19 nt, Artificial Sequence
  Description of Artificial Sequence: Synthetic oligonucleotide
aagacuucgggcaggguga

SEQ ID NO: 2616838 - RNA, 19 nt, Artificial Sequence
  Description of Artificial Sequence: Synthetic oligonucleotide
uacucuguuaauggcuucc

SEQ ID NO: 2616839 - RNA, 19 nt, Artificial Sequence
  Description of Artificial Sequence: Synthetic oligonucleotide
uggagagagcaaauccucu

SEQ ID NO: 2616840 - RNA, 19 nt, Artificial Sequence
  Description of Artificial Sequence: Synthetic oligonucleotide
gugcaggugguccacggcg

SEQ ID NO: 2616841 - RNA, 19 nt, Artificial Sequence
  Description of Artificial Sequence: Synthetic oligonucleotide
uggguuugcgcuccacugc

SEQ ID NO: 2616842 - RNA, 19 nt, Artificial Sequence
  Description of Artificial Sequence: Synthetic oligonucleotide
uauaaacaagaagcacacc

SEQ ID NO: 2616843 - RNA, 19 nt, Artificial Sequence
  Description of Artificial Sequence: Synthetic oligonucleotide
uucugagccacuccacuaa

SEQ ID NO: 2616844 - RNA, 19 nt, Artificial Sequence
  Description of Artificial Sequence: Synthetic oligonucleotide
gucauggcaacagacagca

SEQ ID NO: 2616845 - RNA, 19 nt, Artificial Sequence
  Description of Artificial Sequence: Synthetic oligonucleotide
gugcaaucaguccaacggc

SEQ ID NO: 2616846 - RNA, 19 nt, Artificial Sequence
  Description of Artificial Sequence: Synthetic oligonucleotide
uucacuaggcugcccacaa

SEQ ID NO: 2616847 - RNA, 19 nt, Artificial Sequence
  Description of Artificial Sequence: Synthetic oligonucleotide
uccaacggccuccagccga

SEQ ID NO: 2616848 - RNA, 19 nt, Artificial Sequence
  Description of Artificial Sequence: Synthetic oligonucleotide
caugacauacuguggccug

SEQ ID NO: 2616849 - RNA, 19 nt, Artificial Sequence
  Description of Artificial Sequence: Synthetic oligonucleotide
cucguggguggcaagaguc

SEQ ID NO: 2616850 - RNA, 19 nt, Artificial Sequence
  Description of Artificial Sequence: Synthetic oligonucleotide
augacauacuguggccugc

SEQ ID NO: 2616851 - RNA, 19 nt, Artificial Sequence
  Description of Artificial Sequence: Synthetic oligonucleotide
ccagacgccaaauccaacg

SEQ ID NO: 2616852 - RNA, 19 nt, Artificial Sequence
  Description of Artificial Sequence: Synthetic oligonucleotide
gaguucgcuucucaugcug

SEQ ID NO: 2616853 - RNA, 19 nt, Artificial Sequence
  Description of Artificial Sequence: Synthetic oligonucleotide
acauacuguggccugccca

SEQ ID NO: 2616854 - RNA, 19 nt, Artificial Sequence
  Description of Artificial Sequence: Synthetic oligonucleotide
ugcaaaccugaaguggcag

SEQ ID NO: 2616855 - RNA, 19 nt, Artificial Sequence
  Description of Artificial Sequence: Synthetic oligonucleotide
caguacauucacauggaga

SEQ ID NO: 2616856 - RNA, 19 nt, Artificial Sequence
  Description of Artificial Sequence: Synthetic oligonucleotide
aaagugcaggugguccacg

SEQ ID NO: 2616857 - RNA, 19 nt, Artificial Sequence
  Description of Artificial Sequence: Synthetic oligonucleotide
uuggccggucauugaaggg

SEQ ID NO: 2616858 - RNA, 19 nt, Artificial Sequence
  Description of Artificial Sequence: Synthetic oligonucleotide
auugaaggggcucgugggu

SEQ ID NO: 2616859 - RNA, 19 nt, Artificial Sequence
  Description of Artificial Sequence: Synthetic oligonucleotide
gacuacuaaagugcaggug

SEQ ID NO: 2616860 - RNA, 19 nt, Artificial Sequence
  Description of Artificial Sequence: Synthetic oligonucleotide
uucacaguagcugguauuu

SEQ ID NO: 2616861 - RNA, 19 nt, Artificial Sequence
  Description of Artificial Sequence: Synthetic oligonucleotide
gauggauuguccccaaggu

SEQ ID NO: 2616862 - RNA, 19 nt, Artificial Sequence
  Description of Artificial Sequence: Synthetic oligonucleotide
acagccaaugcuccaggca

SEQ ID NO: 2616863 - RNA, 19 nt, Artificial Sequence
  Description of Artificial Sequence: Synthetic oligonucleotide
aagcacaccaugucuccaa

SEQ ID NO: 2616864 - RNA, 19 nt, Artificial Sequence
  Description of Artificial Sequence: Synthetic oligonucleotide
uuugcgcuccacugcaaac

SEQ ID NO: 2616865 - RNA, 19 nt, Artificial Sequence
  Description of Artificial Sequence: Synthetic oligonucleotide
cagauccugcacauuggcc

SEQ ID NO: 2616866 - RNA, 19 nt, Artificial Sequence
  Description of Artificial Sequence: Synthetic oligonucleotide
caugucuccaaacagaguu

SEQ ID NO: 2616867 - RNA, 19 nt, Artificial Sequence
  Description of Artificial Sequence: Synthetic oligonucleotide
aggggcguuauaaacaaga

SEQ ID NO: 2616868 - RNA, 19 nt, Artificial Sequence
  Description of Artificial Sequence: Synthetic oligonucleotide
cuggguuugcgcuccacug

SEQ ID NO: 2616869 - RNA, 19 nt, Artificial Sequence
  Description of Artificial Sequence: Synthetic oligonucleotide
cagacgccaaauccaacgc

SEQ ID NO: 2616870 - RNA, 19 nt, Artificial Sequence
  Description of Artificial Sequence: Synthetic oligonucleotide
gggcguuauaaacaagaag

SEQ ID NO: 2616871 - RNA, 19 nt, Artificial Sequence
  Description of Artificial Sequence: Synthetic oligonucleotide
cagaagagguaaauaguga

SEQ ID NO: 2616872 - RNA, 19 nt, Artificial Sequence
  Description of Artificial Sequence: Synthetic oligonucleotide
ucguggguggcaagagucc

SEQ ID NO: 2616873 - RNA, 19 nt, Artificial Sequence
  Description of Artificial Sequence: Synthetic oligonucleotide
aagaguccgcacuacuguu

SEQ ID NO: 2616874 - RNA, 19 nt, Artificial Sequence
  Description of Artificial Sequence: Synthetic oligonucleotide
guucgcuucucaugcuggg

SEQ ID NO: 2616875 - RNA, 19 nt, Artificial Sequence
  Description of Artificial Sequence: Synthetic oligonucleotide
cugagccacuccacuaacg

SEQ ID NO: 2616876 - RNA, 19 nt, Artificial Sequence
  Description of Artificial Sequence: Synthetic oligonucleotide
cacaccaugucuccaaaca

SEQ ID NO: 2616877 - RNA, 19 nt, Artificial Sequence
  Description of Artificial Sequence: Synthetic oligonucleotide
uuucugagccacuccacua

SEQ ID NO: 2616878 - RNA, 19 nt, Artificial Sequence
  Description of Artificial Sequence: Synthetic oligonucleotide
uugcgcuccacugcaaacc

SEQ ID NO: 2616879 - RNA, 19 nt, Artificial Sequence
  Description of Artificial Sequence: Synthetic oligonucleotide
gguauuugaggaugacagc

SEQ ID NO: 2616880 - RNA, 19 nt, Artificial Sequence
  Description of Artificial Sequence: Synthetic oligonucleotide
uucaccacaggcgcggcug

SEQ ID NO: 2616881 - RNA, 19 nt, Artificial Sequence
  Description of Artificial Sequence: Synthetic oligonucleotide
cacuacuguugacagcagc

SEQ ID NO: 2616882 - RNA, 19 nt, Artificial Sequence
  Description of Artificial Sequence: Synthetic oligonucleotide
cauuggccggucauugaag

SEQ ID NO: 2616883 - RNA, 19 nt, Artificial Sequence
  Description of Artificial Sequence: Synthetic oligonucleotide
acauuggccggucauugaa

SEQ ID NO: 2616884 - RNA, 19 nt, Artificial Sequence
  Description of Artificial Sequence: Synthetic oligonucleotide
ucugagccacuccacuaac

SEQ ID NO: 2616885 - RNA, 19 nt, Artificial Sequence
  Description of Artificial Sequence: Synthetic oligonucleotide
aguucgcuucucaugcugg

SEQ ID NO: 2616886 - RNA, 19 nt, Artificial Sequence
  Description of Artificial Sequence: Synthetic oligonucleotide
uucgcuucucaugcugggg

SEQ ID NO: 2616887 - RNA, 19 nt, Artificial Sequence
  Description of Artificial Sequence: Synthetic oligonucleotide
cagucuggcaagacuucgg

SEQ ID NO: 2616888 - RNA, 19 nt, Artificial Sequence
  Description of Artificial Sequence: Synthetic oligonucleotide
cuccagccgacuacuaaag

SEQ ID NO: 2616889 - RNA, 19 nt, Artificial Sequence
  Description of Artificial Sequence: Synthetic oligonucleotide
guugucauggcaacagaca

SEQ ID NO: 2616890 - RNA, 19 nt, Artificial Sequence
  Description of Artificial Sequence: Synthetic oligonucleotide
caguccaacggccuccagc

SEQ ID NO: 2616891 - RNA, 19 nt, Artificial Sequence
  Description of Artificial Sequence: Synthetic oligonucleotide
gagguaaauagugaagagu

SEQ ID NO: 2616892 - RNA, 19 nt, Artificial Sequence
  Description of Artificial Sequence: Synthetic oligonucleotide
agcuggugcagucuggcaa

SEQ ID NO: 2616893 - RNA, 19 nt, Artificial Sequence
  Description of Artificial Sequence: Synthetic oligonucleotide
acaaauccuccacagucuu

SEQ ID NO: 2616894 - RNA, 19 nt, Artificial Sequence
  Description of Artificial Sequence: Synthetic oligonucleotide
gagccacuccacuaacggc

SEQ ID NO: 2616895 - RNA, 19 nt, Artificial Sequence
  Description of Artificial Sequence: Synthetic oligonucleotide
acauucacauggagagagc

SEQ ID NO: 2616896 - RNA, 19 nt, Artificial Sequence
  Description of Artificial Sequence: Synthetic oligonucleotide
ccacaaauccuccacaguc

SEQ ID NO: 2616897 - RNA, 19 nt, Artificial Sequence
  Description of Artificial Sequence: Synthetic oligonucleotide
cacaguagcugguauuuga

SEQ ID NO: 2616898 - RNA, 19 nt, Artificial Sequence
  Description of Artificial Sequence: Synthetic oligonucleotide
aaguggcagaguucacagu

SEQ ID NO: 2616899 - RNA, 19 nt, Artificial Sequence
  Description of Artificial Sequence: Synthetic oligonucleotide
gaugacagccaaugcucca

SEQ ID NO: 2616900 - RNA, 19 nt, Artificial Sequence
  Description of Artificial Sequence: Synthetic oligonucleotide
uugaaggggcucgugggug

SEQ ID NO: 2616901 - RNA, 19 nt, Artificial Sequence
  Description of Artificial Sequence: Synthetic oligonucleotide
aguucacaguagcugguau

SEQ ID NO: 2616902 - RNA, 19 nt, Artificial Sequence
  Description of Artificial Sequence: Synthetic oligonucleotide
ccgacuacuaaagugcagg

SEQ ID NO: 2616903 - RNA, 19 nt, Artificial Sequence
  Description of Artificial Sequence: Synthetic oligonucleotide
gucuucaccacaggcgcgg

SEQ ID NO: 2616904 - RNA, 19 nt, Artificial Sequence
  Description of Artificial Sequence: Synthetic oligonucleotide
uguggccugcccauucacu

SEQ ID NO: 2616905 - RNA, 19 nt, Artificial Sequence
  Description of Artificial Sequence: Synthetic oligonucleotide
gguaaauagugaagagugc

SEQ ID NO: 2616906 - RNA, 19 nt, Artificial Sequence
  Description of Artificial Sequence: Synthetic oligonucleotide
aguccagacgccaaaucca

SEQ ID NO: 2616907 - RNA, 19 nt, Artificial Sequence
  Description of Artificial Sequence: Synthetic oligonucleotide
cauucacauggagagagca

SEQ ID NO: 2616908 - RNA, 19 nt, Artificial Sequence
  Description of Artificial Sequence: Synthetic oligonucleotide
augucuccaaacagaguuc

SEQ ID NO: 2616909 - RNA, 19 nt, Artificial Sequence
  Description of Artificial Sequence: Synthetic oligonucleotide
caccaugucuccaaacaga

SEQ ID NO: 2616910 - RNA, 19 nt, Artificial Sequence
  Description of Artificial Sequence: Synthetic oligonucleotide
gcagaguucacaguagcug

SEQ ID NO: 2616911 - RNA, 19 nt, Artificial Sequence
  Description of Artificial Sequence: Synthetic oligonucleotide
uguccagaagagguaaaua

SEQ ID NO: 2616912 - RNA, 19 nt, Artificial Sequence
  Description of Artificial Sequence: Synthetic oligonucleotide
gaguccgcacuacuguuga

SEQ ID NO: 2616913 - RNA, 19 nt, Artificial Sequence
  Description of Artificial Sequence: Synthetic oligonucleotide
cuacuguugacagcagcug

SEQ ID NO: 2616914 - RNA, 19 nt, Artificial Sequence
  Description of Artificial Sequence: Synthetic oligonucleotide
acuaggcugcccacaaauc

SEQ ID NO: 2616915 - RNA, 19 nt, Artificial Sequence
  Description of Artificial Sequence: Synthetic oligonucleotide
uaaagugcaggugguccac

SEQ ID NO: 2616916 - RNA, 19 nt, Artificial Sequence
  Description of Artificial Sequence: Synthetic oligonucleotide
uagugaagagugccacagu

SEQ ID NO: 2616917 - RNA, 19 nt, Artificial Sequence
  Description of Artificial Sequence: Synthetic oligonucleotide
uggccugcccauucacuag

SEQ ID NO: 2616918 - RNA, 19 nt, Artificial Sequence
  Description of Artificial Sequence: Synthetic oligonucleotide
ccagccgacuacuaaagug

SEQ ID NO: 2616919 - RNA, 19 nt, Artificial Sequence
  Description of Artificial Sequence: Synthetic oligonucleotide
aaaccugaaguggcagagu

SEQ ID NO: 2616920 - RNA, 19 nt, Artificial Sequence
  Description of Artificial Sequence: Synthetic oligonucleotide
ugacauacuguggccugcc

SEQ ID NO: 2616921 - RNA, 19 nt, Artificial Sequence
  Description of Artificial Sequence: Synthetic oligonucleotide
gcuuccacuuucauagagg

SEQ ID NO: 2616922 - RNA, 19 nt, Artificial Sequence
  Description of Artificial Sequence: Synthetic oligonucleotide
ugcagucuggcaagacuuc

SEQ ID NO: 2616923 - RNA, 19 nt, Artificial Sequence
  Description of Artificial Sequence: Synthetic oligonucleotide
uuacucuguuaauggcuuc

SEQ ID NO: 2616924 - RNA, 19 nt, Artificial Sequence
  Description of Artificial Sequence: Synthetic oligonucleotide
cuaacggccuggguuugcg

SEQ ID NO: 2616925 - RNA, 19 nt, Artificial Sequence
  Description of Artificial Sequence: Synthetic oligonucleotide
aacuugcaugacauacugu

SEQ ID NO: 2616926 - RNA, 19 nt, Artificial Sequence
  Description of Artificial Sequence: Synthetic oligonucleotide
cauucacuaggcugcccac

SEQ ID NO: 2616927 - RNA, 19 nt, Artificial Sequence
  Description of Artificial Sequence: Synthetic oligonucleotide
cauggcaacagacagcaau

SEQ ID NO: 2616928 - RNA, 19 nt, Artificial Sequence
  Description of Artificial Sequence: Synthetic oligonucleotide
gucuggcaagacuucgggc

SEQ ID NO: 2616929 - RNA, 19 nt, Artificial Sequence
  Description of Artificial Sequence: Synthetic oligonucleotide
acgccaaauccaacgcccc

SEQ ID NO: 2616930 - RNA, 19 nt, Artificial Sequence
  Description of Artificial Sequence: Synthetic oligonucleotide
gacauacuguggccugccc

SEQ ID NO: 2616931 - RNA, 19 nt, Artificial Sequence
  Description of Artificial Sequence: Synthetic oligonucleotide
guagccaggggcguuauaa

SEQ ID NO: 2616932 - RNA, 19 nt, Artificial Sequence
  Description of Artificial Sequence: Synthetic oligonucleotide
caaucaguccaacggccuc

SEQ ID NO: 2616933 - RNA, 19 nt, Artificial Sequence
  Description of Artificial Sequence: Synthetic oligonucleotide
acuaacggccuggguuugc

SEQ ID NO: 2616934 - RNA, 19 nt, Artificial Sequence
  Description of Artificial Sequence: Synthetic oligonucleotide
ucgggcagggugacugcag

SEQ ID NO: 2616935 - RNA, 19 nt, Artificial Sequence
  Description of Artificial Sequence: Synthetic oligonucleotide
ccaaggucccaguacauuc

SEQ ID NO: 2616936 - RNA, 19 nt, Artificial Sequence
  Description of Artificial Sequence: Synthetic oligonucleotide
ucacaguagcugguauuug

SEQ ID NO: 2616937 - RNA, 19 nt, Artificial Sequence
  Description of Artificial Sequence: Synthetic oligonucleotide
cugagcuggugcagucugg

SEQ ID NO: 2616938 - RNA, 19 nt, Artificial Sequence
  Description of Artificial Sequence: Synthetic oligonucleotide
caagaagcacaccaugucu

SEQ ID NO: 2616939 - RNA, 19 nt, Artificial Sequence
  Description of Artificial Sequence: Synthetic oligonucleotide
cuguugacagcagcugccc

SEQ ID NO: 2616940 - RNA, 19 nt, Artificial Sequence
  Description of Artificial Sequence: Synthetic oligonucleotide
cugcccacaaauccuccac

SEQ ID NO: 2616941 - RNA, 19 nt, Artificial Sequence
  Description of Artificial Sequence: Synthetic oligonucleotide
aguccgcacuacuguugac

SEQ ID NO: 2616942 - RNA, 19 nt, Artificial Sequence
  Description of Artificial Sequence: Synthetic oligonucleotide
ggcaacagacagcaauuac

SEQ ID NO: 2616943 - RNA, 19 nt, Artificial Sequence
  Description of Artificial Sequence: Synthetic oligonucleotide
acugcagcggcuagguugu

SEQ ID NO: 2616944 - RNA, 19 nt, Artificial Sequence
  Description of Artificial Sequence: Synthetic oligonucleotide
cuguuaauggcuuccacuu

SEQ ID NO: 2616945 - RNA, 19 nt, Artificial Sequence
  Description of Artificial Sequence: Synthetic oligonucleotide
caaauccuccacagucuuc

SEQ ID NO: 2616946 - RNA, 19 nt, Artificial Sequence
  Description of Artificial Sequence: Synthetic oligonucleotide
agguugucauggcaacaga

SEQ ID NO: 2616947 - RNA, 19 nt, Artificial Sequence
  Description of Artificial Sequence: Synthetic oligonucleotide
agaguucgcuucucaugcu

SEQ ID NO: 2616948 - RNA, 19 nt, Artificial Sequence
  Description of Artificial Sequence: Synthetic oligonucleotide
aggcagcuccgauggauug

SEQ ID NO: 2616949 - RNA, 19 nt, Artificial Sequence
  Description of Artificial Sequence: Synthetic oligonucleotide
uggguggcaagaguccgca

SEQ ID NO: 2616950 - RNA, 19 nt, Artificial Sequence
  Description of Artificial Sequence: Synthetic oligonucleotide
gcuggugcagucuggcaag

SEQ ID NO: 2616951 - RNA, 19 nt, Artificial Sequence
  Description of Artificial Sequence: Synthetic oligonucleotide
agcugcccguccuuggcug

SEQ ID NO: 2616952 - RNA, 19 nt, Artificial Sequence
  Description of Artificial Sequence: Synthetic oligonucleotide
acuguggccugcccauuca

SEQ ID NO: 2616953 - RNA, 19 nt, Artificial Sequence
  Description of Artificial Sequence: Synthetic oligonucleotide
uggcaagacuucgggcagg

SEQ ID NO: 2616954 - RNA, 19 nt, Artificial Sequence
  Description of Artificial Sequence: Synthetic oligonucleotide
gcugcugcccucauggcag

SEQ ID NO: 2616955 - RNA, 19 nt, Artificial Sequence
  Description of Artificial Sequence: Synthetic oligonucleotide
guggcagaguucacaguag

SEQ ID NO: 2616956 - RNA, 19 nt, Artificial Sequence
  Description of Artificial Sequence: Synthetic oligonucleotide
cugguauuugaggaugaca

SEQ ID NO: 2616957 - RNA, 19 nt, Artificial Sequence
  Description of Artificial Sequence: Synthetic oligonucleotide
agaguccgcacuacuguug

SEQ ID NO: 2616958 - RNA, 19 nt, Artificial Sequence
  Description of Artificial Sequence: Synthetic oligonucleotide
gcuagguugucauggcaac

SEQ ID NO: 2616959 - RNA, 19 nt, Artificial Sequence
  Description of Artificial Sequence: Synthetic oligonucleotide
cgauggauuguccccaagg

SEQ ID NO: 2616960 - RNA, 19 nt, Artificial Sequence
  Description of Artificial Sequence: Synthetic oligonucleotide
acuccacuaacggccuggg

SEQ ID NO: 2616961 - RNA, 19 nt, Artificial Sequence
  Description of Artificial Sequence: Synthetic oligonucleotide
auucacuaggcugcccaca

SEQ ID NO: 2616962 - RNA, 19 nt, Artificial Sequence
  Description of Artificial Sequence: Synthetic oligonucleotide
guccccaaggucccaguac

SEQ ID NO: 2616963 - RNA, 19 nt, Artificial Sequence
  Description of Artificial Sequence: Synthetic oligonucleotide
auggcaacagacagcaauu

SEQ ID NO: 2616964 - RNA, 19 nt, Artificial Sequence
  Description of Artificial Sequence: Synthetic oligonucleotide
uagccaggggcguuauaaa

SEQ ID NO: 2616965 - RNA, 19 nt, Artificial Sequence
  Description of Artificial Sequence: Synthetic oligonucleotide
gcuccgauggauugucccc

SEQ ID NO: 2616966 - RNA, 19 nt, Artificial Sequence
  Description of Artificial Sequence: Synthetic oligonucleotide
cacaaauccuccacagucu

SEQ ID NO: 2616967 - RNA, 19 nt, Artificial Sequence
  Description of Artificial Sequence: Synthetic oligonucleotide
acucuguuaauggcuucca

SEQ ID NO: 2616968 - RNA, 19 nt, Artificial Sequence
  Description of Artificial Sequence: Synthetic oligonucleotide
uaacggccuggguuugcgc

SEQ ID NO: 2616969 - RNA, 19 nt, Artificial Sequence
  Description of Artificial Sequence: Synthetic oligonucleotide
cagacagcaauuacucugu

SEQ ID NO: 2616970 - RNA, 19 nt, Artificial Sequence
  Description of Artificial Sequence: Synthetic oligonucleotide
gcguuauaaacaagaagca

SEQ ID NO: 2616971 - RNA, 19 nt, Artificial Sequence
  Description of Artificial Sequence: Synthetic oligonucleotide
ggcagggugacugcagcgg

SEQ ID NO: 2616972 - RNA, 19 nt, Artificial Sequence
  Description of Artificial Sequence: Synthetic oligonucleotide
guccacggcgccccgcagg

SEQ ID NO: 2616973 - RNA, 19 nt, Artificial Sequence
  Description of Artificial Sequence: Synthetic oligonucleotide
gccacagugagugcaauca

SEQ ID NO: 2616974 - RNA, 19 nt, Artificial Sequence
  Description of Artificial Sequence: Synthetic oligonucleotide
caagaguccgcacuacugu

SEQ ID NO: 2616975 - RNA, 19 nt, Artificial Sequence
  Description of Artificial Sequence: Synthetic oligonucleotide
gcaagaguccgcacuacug

SEQ ID NO: 2616976 - RNA, 19 nt, Artificial Sequence
  Description of Artificial Sequence: Synthetic oligonucleotide
gcagucuggcaagacuucg

SEQ ID NO: 2616977 - RNA, 19 nt, Artificial Sequence
  Description of Artificial Sequence: Synthetic oligonucleotide
ccugaaguggcagaguuca

SEQ ID NO: 2616978 - RNA, 19 nt, Artificial Sequence
  Description of Artificial Sequence: Synthetic oligonucleotide
aacggccuccagccgacua

SEQ ID NO: 2616979 - RNA, 19 nt, Artificial Sequence
  Description of Artificial Sequence: Synthetic oligonucleotide
gcugagcuggugcagucug

SEQ ID NO: 2616980 - RNA, 19 nt, Artificial Sequence
  Description of Artificial Sequence: Synthetic oligonucleotide
guuugcgcuccacugcaaa

SEQ ID NO: 2616981 - RNA, 19 nt, Artificial Sequence
  Description of Artificial Sequence: Synthetic oligonucleotide
guccgcacuacuguugaca

SEQ ID NO: 2616982 - RNA, 19 nt, Artificial Sequence
  Description of Artificial Sequence: Synthetic oligonucleotide
agcacaccaugucuccaaa

SEQ ID NO: 2616983 - RNA, 19 nt, Artificial Sequence
  Description of Artificial Sequence: Synthetic oligonucleotide
ugagugcaaucaguccaac

SEQ ID NO: 2616984 - RNA, 19 nt, Artificial Sequence
  Description of Artificial Sequence: Synthetic oligonucleotide
caaacagaguucgcuucuc

SEQ ID NO: 2616985 - RNA, 19 nt, Artificial Sequence
  Description of Artificial Sequence: Synthetic oligonucleotide
uggcaacagacagcaauua

SEQ ID NO: 2616986 - RNA, 19 nt, Artificial Sequence
  Description of Artificial Sequence: Synthetic oligonucleotide
agacuucgggcagggugac

SEQ ID NO: 2616987 - RNA, 19 nt, Artificial Sequence
  Description of Artificial Sequence: Synthetic oligonucleotide
gcaacagacagcaauuacu

SEQ ID NO: 2616988 - RNA, 19 nt, Artificial Sequence
  Description of Artificial Sequence: Synthetic oligonucleotide
ugcagcggcuagguuguca

SEQ ID NO: 2616989 - RNA, 19 nt, Artificial Sequence
  Description of Artificial Sequence: Synthetic oligonucleotide
ugcacauuggccggucauu

SEQ ID NO: 2616990 - RNA, 19 nt, Artificial Sequence
  Description of Artificial Sequence: Synthetic oligonucleotide
cugcaaaccugaaguggca

SEQ ID NO: 2616991 - RNA, 19 nt, Artificial Sequence
  Description of Artificial Sequence: Synthetic oligonucleotide
guggcaagaguccgcacua

SEQ ID NO: 2616992 - RNA, 19 nt, Artificial Sequence
  Description of Artificial Sequence: Synthetic oligonucleotide
cuuggcugcugcccucaug

SEQ ID NO: 2616993 - RNA, 19 nt, Artificial Sequence
  Description of Artificial Sequence: Synthetic oligonucleotide
guggccugcccauucacua

SEQ ID NO: 2616994 - RNA, 19 nt, Artificial Sequence
  Description of Artificial Sequence: Synthetic oligonucleotide
uucgggcagggugacugca

SEQ ID NO: 2616995 - RNA, 19 nt, Artificial Sequence
  Description of Artificial Sequence: Synthetic oligonucleotide
caggggcguuauaaacaag

SEQ ID NO: 2616996 - RNA, 19 nt, Artificial Sequence
  Description of Artificial Sequence: Synthetic oligonucleotide
cauacuguggccugcccau

SEQ ID NO: 2616997 - RNA, 19 nt, Artificial Sequence
  Description of Artificial Sequence: Synthetic oligonucleotide
uccgauggauuguccccaa

SEQ ID NO: 2616998 - RNA, 19 nt, Artificial Sequence
  Description of Artificial Sequence: Synthetic oligonucleotide
guacauucacauggagaga

SEQ ID NO: 2616999 - RNA, 19 nt, Artificial Sequence
  Description of Artificial Sequence: Synthetic oligonucleotide
uuguccccaaggucccagu

SEQ ID NO: 2617000 - RNA, 19 nt, Artificial Sequence
  Description of Artificial Sequence: Synthetic oligonucleotide
cacggcgccccgcaggcac

SEQ ID NO: 2617001 - RNA, 19 nt, Artificial Sequence
  Description of Artificial Sequence: Synthetic oligonucleotide
agccgacuacuaaagugca

SEQ ID NO: 2617002 - RNA, 19 nt, Artificial Sequence
  Description of Artificial Sequence: Synthetic oligonucleotide
gggcagggugacugcagcg

SEQ ID NO: 2617003 - RNA, 19 nt, Artificial Sequence
  Description of Artificial Sequence: Synthetic oligonucleotide
cuagguugucauggcaaca

SEQ ID NO: 2617004 - RNA, 19 nt, Artificial Sequence
  Description of Artificial Sequence: Synthetic oligonucleotide
gcaaaccugaaguggcaga

SEQ ID NO: 2617005 - RNA, 19 nt, Artificial Sequence
  Description of Artificial Sequence: Synthetic oligonucleotide
gguggcaagaguccgcacu

SEQ ID NO: 2617006 - RNA, 19 nt, Artificial Sequence
  Description of Artificial Sequence: Synthetic oligonucleotide
gcacauuggccggucauug

SEQ ID NO: 2617007 - RNA, 19 nt, Artificial Sequence
  Description of Artificial Sequence: Synthetic oligonucleotide
guccaacggccuccagccg

SEQ ID NO: 2617008 - RNA, 19 nt, Artificial Sequence
  Description of Artificial Sequence: Synthetic oligonucleotide
agaugguagccaggggcgu

SEQ ID NO: 2617009 - RNA, 19 nt, Artificial Sequence
  Description of Artificial Sequence: Synthetic oligonucleotide
gugagugcaaucaguccaa

SEQ ID NO: 2617010 - RNA, 19 nt, Artificial Sequence
  Description of Artificial Sequence: Synthetic oligonucleotide
uggcccaguccagacgcca

SEQ ID NO: 2617011 - RNA, 19 nt, Artificial Sequence
  Description of Artificial Sequence: Synthetic oligonucleotide
ggguuugcgcuccacugca

SEQ ID NO: 2617012 - RNA, 19 nt, Artificial Sequence
  Description of Artificial Sequence: Synthetic oligonucleotide
ggcgcggcugagcuggugc

SEQ ID NO: 2617013 - RNA, 19 nt, Artificial Sequence
  Description of Artificial Sequence: Synthetic oligonucleotide
gcagggugacugcagcggc

SEQ ID NO: 2617014 - RNA, 19 nt, Artificial Sequence
  Description of Artificial Sequence: Synthetic oligonucleotide
uggcugaaacuugcaugac

SEQ ID NO: 2617015 - RNA, 19 nt, Artificial Sequence
  Description of Artificial Sequence: Synthetic oligonucleotide
ccacugcaaaccugaagug

SEQ ID NO: 2617016 - RNA, 19 nt, Artificial Sequence
  Description of Artificial Sequence: Synthetic oligonucleotide
gaaggggcucguggguggc

SEQ ID NO: 2617017 - RNA, 19 nt, Artificial Sequence
  Description of Artificial Sequence: Synthetic oligonucleotide
cacauuggccggucauuga

SEQ ID NO: 2617018 - RNA, 19 nt, Artificial Sequence
  Description of Artificial Sequence: Synthetic oligonucleotide
guucacaguagcugguauu

SEQ ID NO: 2617019 - RNA, 19 nt, Artificial Sequence
  Description of Artificial Sequence: Synthetic oligonucleotide
cagcuccgauggauugucc

SEQ ID NO: 2617020 - RNA, 19 nt, Artificial Sequence
  Description of Artificial Sequence: Synthetic oligonucleotide
uggcaagaguccgcacuac

SEQ ID NO: 2617021 - RNA, 19 nt, Artificial Sequence
  Description of Artificial Sequence: Synthetic oligonucleotide
cgcacuacuguugacagca

SEQ ID NO: 2617022 - RNA, 19 nt, Artificial Sequence
  Description of Artificial Sequence: Synthetic oligonucleotide
caaauccucuuggcugcug

SEQ ID NO: 2617023 - RNA, 19 nt, Artificial Sequence
  Description of Artificial Sequence: Synthetic oligonucleotide
guggguggcaagaguccgc

SEQ ID NO: 2617024 - RNA, 19 nt, Artificial Sequence
  Description of Artificial Sequence: Synthetic oligonucleotide
guccagacgccaaauccaa

SEQ ID NO: 2617025 - RNA, 19 nt, Artificial Sequence
  Description of Artificial Sequence: Synthetic oligonucleotide
cugaaacuugcaugacaua

SEQ ID NO: 2617026 - RNA, 19 nt, Artificial Sequence
  Description of Artificial Sequence: Synthetic oligonucleotide
gccaggggcguuauaaaca

SEQ ID NO: 2617027 - RNA, 19 nt, Artificial Sequence
  Description of Artificial Sequence: Synthetic oligonucleotide
ggcuagguugucauggcaa

SEQ ID NO: 2617028 - RNA, 19 nt, Artificial Sequence
  Description of Artificial Sequence: Synthetic oligonucleotide
uggugcagucuggcaagac

SEQ ID NO: 2617029 - RNA, 19 nt, Artificial Sequence
  Description of Artificial Sequence: Synthetic oligonucleotide
ggcugcugcccucauggca

SEQ ID NO: 2617030 - RNA, 19 nt, Artificial Sequence
  Description of Artificial Sequence: Synthetic oligonucleotide
cacuuucauagaggauuuc

SEQ ID NO: 2617031 - RNA, 19 nt, Artificial Sequence
  Description of Artificial Sequence: Synthetic oligonucleotide
cuggcccaguccagacgcc

SEQ ID NO: 2617032 - RNA, 19 nt, Artificial Sequence
  Description of Artificial Sequence: Synthetic oligonucleotide
aguguccagaagagguaaa

SEQ ID NO: 2617033 - RNA, 19 nt, Artificial Sequence
  Description of Artificial Sequence: Synthetic oligonucleotide
cauagaggauuuccauccu

SEQ ID NO: 2617034 - RNA, 19 nt, Artificial Sequence
  Description of Artificial Sequence: Synthetic oligonucleotide
gcacaccaugucuccaaac

SEQ ID NO: 2617035 - RNA, 19 nt, Artificial Sequence
  Description of Artificial Sequence: Synthetic oligonucleotide
ccaggggcguuauaaacaa

SEQ ID NO: 2617036 - RNA, 19 nt, Artificial Sequence
  Description of Artificial Sequence: Synthetic oligonucleotide
ggccggucauugaaggggc

SEQ ID NO: 2617037 - RNA, 19 nt, Artificial Sequence
  Description of Artificial Sequence: Synthetic oligonucleotide
gugcagucuggcaagacuu

SEQ ID NO: 2617038 - RNA, 19 nt, Artificial Sequence
  Description of Artificial Sequence: Synthetic oligonucleotide
cggucauugaaggggcucg

SEQ ID NO: 2617039 - RNA, 19 nt, Artificial Sequence
  Description of Artificial Sequence: Synthetic oligonucleotide
uuccauccuccuggcccag

SEQ ID NO: 2617040 - RNA, 19 nt, Artificial Sequence
  Description of Artificial Sequence: Synthetic oligonucleotide
cacaggcgcggcugagcug

SEQ ID NO: 2617041 - RNA, 19 nt, Artificial Sequence
  Description of Artificial Sequence: Synthetic oligonucleotide
cguccuuggcugaaacuug

SEQ ID NO: 2617042 - RNA, 19 nt, Artificial Sequence
  Description of Artificial Sequence: Synthetic oligonucleotide
aaggggcucguggguggca

SEQ ID NO: 2617043 - RNA, 19 nt, Artificial Sequence
  Description of Artificial Sequence: Synthetic oligonucleotide
cccgcaggcacagccagcc

SEQ ID NO: 2617044 - RNA, 19 nt, Artificial Sequence
  Description of Artificial Sequence: Synthetic oligonucleotide
ggagagagcaaauccucuu

SEQ ID NO: 2617045 - RNA, 19 nt, Artificial Sequence
  Description of Artificial Sequence: Synthetic oligonucleotide
cacuaacggccuggguuug

SEQ ID NO: 2617046 - RNA, 19 nt, Artificial Sequence
  Description of Artificial Sequence: Synthetic oligonucleotide
ccuccagccgacuacuaaa

SEQ ID NO: 2617047 - RNA, 19 nt, Artificial Sequence
  Description of Artificial Sequence: Synthetic oligonucleotide
uccugcacauuggccgguc

SEQ ID NO: 2617048 - RNA, 19 nt, Artificial Sequence
  Description of Artificial Sequence: Synthetic oligonucleotide
cagcggcuagguugucaug

SEQ ID NO: 2617049 - RNA, 19 nt, Artificial Sequence
  Description of Artificial Sequence: Synthetic oligonucleotide
ggggcguuauaaacaagaa

SEQ ID NO: 2617050 - RNA, 19 nt, Artificial Sequence
  Description of Artificial Sequence: Synthetic oligonucleotide
gccgacuacuaaagugcag

SEQ ID NO: 2617051 - RNA, 19 nt, Artificial Sequence
  Description of Artificial Sequence: Synthetic oligonucleotide
guguccagaagagguaaau

SEQ ID NO: 2617052 - RNA, 19 nt, Artificial Sequence
  Description of Artificial Sequence: Synthetic oligonucleotide
cguggguggcaagaguccg

SEQ ID NO: 2617053 - RNA, 19 nt, Artificial Sequence
  Description of Artificial Sequence: Synthetic oligonucleotide
acagccagccugagauggu

SEQ ID NO: 2617054 - RNA, 19 nt, Artificial Sequence
  Description of Artificial Sequence: Synthetic oligonucleotide
ggcucguggguggcaagag

SEQ ID NO: 2617055 - RNA, 19 nt, Artificial Sequence
  Description of Artificial Sequence: Synthetic oligonucleotide
gccccgcaggcacagccag

SEQ ID NO: 2617056 - RNA, 19 nt, Artificial Sequence
  Description of Artificial Sequence: Synthetic oligonucleotide
ccaacggccuccagccgac

SEQ ID NO: 2617057 - RNA, 19 nt, Artificial Sequence
  Description of Artificial Sequence: Synthetic oligonucleotide
ggcaagaguccgcacuacu

SEQ ID NO: 2617058 - RNA, 19 nt, Artificial Sequence
  Description of Artificial Sequence: Synthetic oligonucleotide
gcaugacauacuguggccu

SEQ ID NO: 2617059 - RNA, 19 nt, Artificial Sequence
  Description of Artificial Sequence: Synthetic oligonucleotide
gggugacugcagcggcuag

SEQ ID NO: 2617060 - RNA, 19 nt, Artificial Sequence
  Description of Artificial Sequence: Synthetic oligonucleotide
cgcuccacugcaaaccuga

SEQ ID NO: 2617061 - RNA, 19 nt, Artificial Sequence
  Description of Artificial Sequence: Synthetic oligonucleotide
auccugcacauuggccggu

SEQ ID NO: 2617062 - RNA, 19 nt, Artificial Sequence
  Description of Artificial Sequence: Synthetic oligonucleotide
cagcaauuacucuguuaau

SEQ ID NO: 2617063 - RNA, 19 nt, Artificial Sequence
  Description of Artificial Sequence: Synthetic oligonucleotide
aggggcucguggguggcaa

SEQ ID NO: 2617064 - RNA, 19 nt, Artificial Sequence
  Description of Artificial Sequence: Synthetic oligonucleotide
ccgcacuacuguugacagc

SEQ ID NO: 2617065 - RNA, 19 nt, Artificial Sequence
  Description of Artificial Sequence: Synthetic oligonucleotide
ugguagccaggggcguuau

SEQ ID NO: 2617066 - RNA, 19 nt, Artificial Sequence
  Description of Artificial Sequence: Synthetic oligonucleotide
ccaaacagaguucgcuucu

SEQ ID NO: 2617067 - RNA, 19 nt, Artificial Sequence
  Description of Artificial Sequence: Synthetic oligonucleotide
ggcagaguucacaguagcu

SEQ ID NO: 2617068 - RNA, 19 nt, Artificial Sequence
  Description of Artificial Sequence: Synthetic oligonucleotide
auacuguggccugcccauu

SEQ ID NO: 2617069 - RNA, 19 nt, Artificial Sequence
  Description of Artificial Sequence: Synthetic oligonucleotide
gccuccagccgacuacuaa

SEQ ID NO: 2617070 - RNA, 19 nt, Artificial Sequence
  Description of Artificial Sequence: Synthetic oligonucleotide
gcaaucaguccaacggccu

SEQ ID NO: 2617071 - RNA, 19 nt, Artificial Sequence
  Description of Artificial Sequence: Synthetic oligonucleotide
gcagcggcuagguugucau

SEQ ID NO: 2617072 - RNA, 19 nt, Artificial Sequence
  Description of Artificial Sequence: Synthetic oligonucleotide
gaugguagccaggggcguu

SEQ ID NO: 2617073 - RNA, 19 nt, Artificial Sequence
  Description of Artificial Sequence: Synthetic oligonucleotide
ccgauggauuguccccaag

SEQ ID NO: 2617074 - RNA, 19 nt, Artificial Sequence
  Description of Artificial Sequence: Synthetic oligonucleotide
gcccguccuuggcugaaac

SEQ ID NO: 2617075 - RNA, 19 nt, Artificial Sequence
  Description of Artificial Sequence: Synthetic oligonucleotide
ugcccguccuuggcugaaa

SEQ ID NO: 2617076 - RNA, 19 nt, Artificial Sequence
  Description of Artificial Sequence: Synthetic oligonucleotide
ggggcucguggguggcaag

SEQ ID NO: 2617077 - RNA, 19 nt, Artificial Sequence
  Description of Artificial Sequence: Synthetic oligonucleotide
cagggugacugcagcggcu

SEQ ID NO: 2617078 - RNA, 19 nt, Artificial Sequence
  Description of Artificial Sequence: Synthetic oligonucleotide
cugcacauuggccggucau

SEQ ID NO: 2617079 - RNA, 19 nt, Artificial Sequence
  Description of Artificial Sequence: Synthetic oligonucleotide
ugcugcccucauggcagau

SEQ ID NO: 2617080 - RNA, 19 nt, Artificial Sequence
  Description of Artificial Sequence: Synthetic oligonucleotide
cugcugcccucauggcaga

SEQ ID NO: 2617081 - RNA, 19 nt, Artificial Sequence
  Description of Artificial Sequence: Synthetic oligonucleotide
caggcagcuccgauggauu

SEQ ID NO: 2617082 - RNA, 19 nt, Artificial Sequence
  Description of Artificial Sequence: Synthetic oligonucleotide
ccggucauugaaggggcuc

SEQ ID NO: 2617083 - RNA, 19 nt, Artificial Sequence
  Description of Artificial Sequence: Synthetic oligonucleotide
gguccacggcgccccgcag

SEQ ID NO: 2617084 - RNA, 19 nt, Artificial Sequence
  Description of Artificial Sequence: Synthetic oligonucleotide
gcccauucacuaggcugcc

SEQ ID NO: 2617085 - RNA, 19 nt, Artificial Sequence
  Description of Artificial Sequence: Synthetic oligonucleotide
gugguccacggcgccccgc

SEQ ID NO: 2617086 - RNA, 19 nt, Artificial Sequence
  Description of Artificial Sequence: Synthetic oligonucleotide
ccacuaacggccuggguuu

SEQ ID NO: 2617087 - RNA, 19 nt, Artificial Sequence
  Description of Artificial Sequence: Synthetic oligonucleotide
cuucaccacaggcgcggcu

SEQ ID NO: 2617088 - RNA, 19 nt, Artificial Sequence
  Description of Artificial Sequence: Synthetic oligonucleotide
ggguggcaagaguccgcac

SEQ ID NO: 2617089 - RNA, 19 nt, Artificial Sequence
  Description of Artificial Sequence: Synthetic oligonucleotide
ccacuuucauagaggauuu

SEQ ID NO: 2617090 - RNA, 19 nt, Artificial Sequence
  Description of Artificial Sequence: Synthetic oligonucleotide
gggcucguggguggcaaga

SEQ ID NO: 2617091 - RNA, 19 nt, Artificial Sequence
  Description of Artificial Sequence: Synthetic oligonucleotide
gcugcccguccuuggcuga

SEQ ID NO: 2617092 - RNA, 19 nt, Artificial Sequence
  Description of Artificial Sequence: Synthetic oligonucleotide
gcgcggcugagcuggugca

SEQ ID NO: 2617093 - RNA, 19 nt, Artificial Sequence
  Description of Artificial Sequence: Synthetic oligonucleotide
gcccaguccagacgccaaa

SEQ ID NO: 2617094 - RNA, 19 nt, Artificial Sequence
  Description of Artificial Sequence: Synthetic oligonucleotide
aggcgcggcugagcuggug

SEQ ID NO: 2617095 - RNA, 19 nt, Artificial Sequence
  Description of Artificial Sequence: Synthetic oligonucleotide
gccaaugcuccaggcagcu

SEQ ID NO: 2617096 - RNA, 19 nt, Artificial Sequence
  Description of Artificial Sequence: Synthetic oligonucleotide
ggucauugaaggggcucgu

SEQ ID NO: 2617097 - RNA, 19 nt, Artificial Sequence
  Description of Artificial Sequence: Synthetic oligonucleotide
cuccacuaacggccugggu

SEQ ID NO: 2617098 - RNA, 19 nt, Artificial Sequence
  Description of Artificial Sequence: Synthetic oligonucleotide
cgacuacuaaagugcaggu

SEQ ID NO: 2617099 - RNA, 19 nt, Artificial Sequence
  Description of Artificial Sequence: Synthetic oligonucleotide
cccacaaauccuccacagu

SEQ ID NO: 2617100 - RNA, 19 nt, Artificial Sequence
  Description of Artificial Sequence: Synthetic oligonucleotide
ccguccuuggcugaaacuu

SEQ ID NO: 2617101 - RNA, 19 nt, Artificial Sequence
  Description of Artificial Sequence: Synthetic oligonucleotide
ccacuccacuaacggccug

SEQ ID NO: 2617102 - RNA, 19 nt, Artificial Sequence
  Description of Artificial Sequence: Synthetic oligonucleotide
ggcagcuccgauggauugu

SEQ ID NO: 2617103 - RNA, 19 nt, Artificial Sequence
  Description of Artificial Sequence: Synthetic oligonucleotide
ccccgcaggcacagccagc

SEQ ID NO: 2617104 - RNA, 19 nt, Artificial Sequence
  Description of Artificial Sequence: Synthetic oligonucleotide
gguuugcgcuccacugcaa

SEQ ID NO: 2617105 - RNA, 19 nt, Artificial Sequence
  Description of Artificial Sequence: Synthetic oligonucleotide
ccaugucuccaaacagagu

SEQ ID NO: 2617106 - RNA, 19 nt, Artificial Sequence
  Description of Artificial Sequence: Synthetic oligonucleotide
gacuucgggcagggugacu

SEQ ID NO: 2617107 - RNA, 19 nt, Artificial Sequence
  Description of Artificial Sequence: Synthetic oligonucleotide
acggcgccccgcaggcaca

SEQ ID NO: 2617108 - RNA, 19 nt, Artificial Sequence
  Description of Artificial Sequence: Synthetic oligonucleotide
gguagccaggggcguuaua

SEQ ID NO: 2617109 - RNA, 19 nt, Artificial Sequence
  Description of Artificial Sequence: Synthetic oligonucleotide
ccaaugcuccaggcagcuc

SEQ ID NO: 2617110 - RNA, 19 nt, Artificial Sequence
  Description of Artificial Sequence: Synthetic oligonucleotide
gccacuccacuaacggccu

SEQ ID NO: 2617111 - RNA, 19 nt, Artificial Sequence
  Description of Artificial Sequence: Synthetic oligonucleotide
ggcccaguccagacgccaa

SEQ ID NO: 2617112 - RNA, 19 nt, Artificial Sequence
  Description of Artificial Sequence: Synthetic oligonucleotide
cggcuagguugucauggca

SEQ ID NO: 2617113 - RNA, 19 nt, Artificial Sequence
  Description of Artificial Sequence: Synthetic oligonucleotide
cugcccguccuuggcugaa

SEQ ID NO: 2617114 - RNA, 19 nt, Artificial Sequence
  Description of Artificial Sequence: Synthetic oligonucleotide
gugccacagugagugcaau

SEQ ID NO: 2617115 - RNA, 19 nt, Artificial Sequence
  Description of Artificial Sequence: Synthetic oligonucleotide
cggccuggguuugcgcucc

SEQ ID NO: 2617116 - RNA, 19 nt, Artificial Sequence
  Description of Artificial Sequence: Synthetic oligonucleotide
gcaaauccucuuggcugcu

SEQ ID NO: 2617117 - RNA, 19 nt, Artificial Sequence
  Description of Artificial Sequence: Synthetic oligonucleotide
ccugcccauucacuaggcu

SEQ ID NO: 2617118 - RNA, 19 nt, Artificial Sequence
  Description of Artificial Sequence: Synthetic oligonucleotide
gccuggguuugcgcuccac

SEQ ID NO: 2617119 - RNA, 19 nt, Artificial Sequence
  Description of Artificial Sequence: Synthetic oligonucleotide
cccguccuuggcugaaacu

SEQ ID NO: 2617120 - RNA, 19 nt, Artificial Sequence
  Description of Artificial Sequence: Synthetic oligonucleotide
cugcagcggcuagguuguc

SEQ ID NO: 2617121 - RNA, 19 nt, Artificial Sequence
  Description of Artificial Sequence: Synthetic oligonucleotide
gcggcugagcuggugcagu

SEQ ID NO: 2617122 - RNA, 19 nt, Artificial Sequence
  Description of Artificial Sequence: Synthetic oligonucleotide
cgcggcugagcuggugcag

SEQ ID NO: 2617123 - RNA, 19 nt, Artificial Sequence
  Description of Artificial Sequence: Synthetic oligonucleotide
ggccuggguuugcgcucca

SEQ ID NO: 2617124 - RNA, 19 nt, Artificial Sequence
  Description of Artificial Sequence: Synthetic oligonucleotide
gcaagacuucgggcagggu

SEQ ID NO: 2617125 - RNA, 19 nt, Artificial Sequence
  Description of Artificial Sequence: Synthetic oligonucleotide
cccaaggucccaguacauu

SEQ ID NO: 2617126 - RNA, 19 nt, Artificial Sequence
  Description of Artificial Sequence: Synthetic oligonucleotide
cgccccgcaggcacagcca

SEQ ID NO: 2617127 - RNA, 19 nt, Artificial Sequence
  Description of Artificial Sequence: Synthetic oligonucleotide
gccggucauugaaggggcu

SEQ ID NO: 2617128 - RNA, 19 nt, Artificial Sequence
  Description of Artificial Sequence: Synthetic oligonucleotide
cccaguccagacgccaaau

SEQ ID NO: 2617129 - RNA, 19 nt, Artificial Sequence
  Description of Artificial Sequence: Synthetic oligonucleotide
ggccuccagccgacuacua

SEQ ID NO: 2617130 - RNA, 19 nt, Artificial Sequence
  Description of Artificial Sequence: Synthetic oligonucleotide
caacggccuccagccgacu

SEQ ID NO: 2617131 - RNA, 19 nt, Artificial Sequence
  Description of Artificial Sequence: Synthetic oligonucleotide
caggcgcggcugagcuggu

SEQ ID NO: 2617132 - RNA, 19 nt, Artificial Sequence
  Description of Artificial Sequence: Synthetic oligonucleotide
cggcgccccgcaggcacag

SEQ ID NO: 2617133 - RNA, 19 nt, Artificial Sequence
  Description of Artificial Sequence: Synthetic oligonucleotide
ccacggcgccccgcaggca

SEQ ID NO: 2617134 - RNA, 19 nt, Artificial Sequence
  Description of Artificial Sequence: Synthetic oligonucleotide
aagauuuauuaauacaucc

SEQ ID NO: 2617135 - RNA, 19 nt, Artificial Sequence
  Description of Artificial Sequence: Synthetic oligonucleotide
aaacaaauuaaacaaggac

SEQ ID NO: 2617136 - RNA, 19 nt, Artificial Sequence
  Description of Artificial Sequence: Synthetic oligonucleotide
uuaaacaaauuaaacaagg

SEQ ID NO: 2617137 - RNA, 19 nt, Artificial Sequence
  Description of Artificial Sequence: Synthetic oligonucleotide
uaauacauccaaaagaaag

SEQ ID NO: 2617138 - RNA, 19 nt, Artificial Sequence
  Description of Artificial Sequence: Synthetic oligonucleotide
aaaacaguaauacaguaca

SEQ ID NO: 2617139 - RNA, 19 nt, Artificial Sequence
  Description of Artificial Sequence: Synthetic oligonucleotide
uuaaacaaggaccagauaa

SEQ ID NO: 2617140 - RNA, 19 nt, Artificial Sequence
  Description of Artificial Sequence: Synthetic oligonucleotide
aaugugaaccaucucuucc

SEQ ID NO: 2617141 - RNA, 19 nt, Artificial Sequence
  Description of Artificial Sequence: Synthetic oligonucleotide
uuaaagggaaaucacaacc

SEQ ID NO: 2617142 - RNA, 19 nt, Artificial Sequence
  Description of Artificial Sequence: Synthetic oligonucleotide
auauacagauaauacauac

SEQ ID NO: 2617143 - RNA, 19 nt, Artificial Sequence
  Description of Artificial Sequence: Synthetic oligonucleotide
auacagauaauacauacag

SEQ ID NO: 2617144 - RNA, 19 nt, Artificial Sequence
  Description of Artificial Sequence: Synthetic oligonucleotide
aauguauggcauaugaagc

SEQ ID NO: 2617145 - RNA, 19 nt, Artificial Sequence
  Description of Artificial Sequence: Synthetic oligonucleotide
gaauguauggcauaugaag

SEQ ID NO: 2617146 - RNA, 19 nt, Artificial Sequence
  Description of Artificial Sequence: Synthetic oligonucleotide
cauugagauauauauaugg

SEQ ID NO: 2617147 - RNA, 19 nt, Artificial Sequence
  Description of Artificial Sequence: Synthetic oligonucleotide
auuuugucacacuauauac

SEQ ID NO: 2617148 - RNA, 19 nt, Artificial Sequence
  Description of Artificial Sequence: Synthetic oligonucleotide
uaaaauguaaacuuuguau

SEQ ID NO: 2617149 - RNA, 19 nt, Artificial Sequence
  Description of Artificial Sequence: Synthetic oligonucleotide
uuuauuaauacauccaaaa

SEQ ID NO: 2617150 - RNA, 19 nt, Artificial Sequence
  Description of Artificial Sequence: Synthetic oligonucleotide
acaguaauacaguacauuc

SEQ ID NO: 2617151 - RNA, 19 nt, Artificial Sequence
  Description of Artificial Sequence: Synthetic oligonucleotide
uauauggaaaaugugaacc

SEQ ID NO: 2617152 - RNA, 19 nt, Artificial Sequence
  Description of Artificial Sequence: Synthetic oligonucleotide
uuugucacacuauauacag

SEQ ID NO: 2617153 - RNA, 19 nt, Artificial Sequence
  Description of Artificial Sequence: Synthetic oligonucleotide
aauagcugcucccaguggg

SEQ ID NO: 2617154 - RNA, 19 nt, Artificial Sequence
  Description of Artificial Sequence: Synthetic oligonucleotide
uuuacacaagaaaauauac

SEQ ID NO: 2617155 - RNA, 19 nt, Artificial Sequence
  Description of Artificial Sequence: Synthetic oligonucleotide
ugagauauauauauggaaa

SEQ ID NO: 2617156 - RNA, 19 nt, Artificial Sequence
  Description of Artificial Sequence: Synthetic oligonucleotide
acaaauagcaagauaacac

SEQ ID NO: 2617157 - RNA, 19 nt, Artificial Sequence
  Description of Artificial Sequence: Synthetic oligonucleotide
aguacauucauugagauau

SEQ ID NO: 2617158 - RNA, 19 nt, Artificial Sequence
  Description of Artificial Sequence: Synthetic oligonucleotide
agauaauacauacaguugu

SEQ ID NO: 2617159 - RNA, 19 nt, Artificial Sequence
  Description of Artificial Sequence: Synthetic oligonucleotide
aauagcaagauaacacagc

SEQ ID NO: 2617160 - RNA, 19 nt, Artificial Sequence
  Description of Artificial Sequence: Synthetic oligonucleotide
aaucacaaccaaaagcccc

SEQ ID NO: 2617161 - RNA, 19 nt, Artificial Sequence
  Description of Artificial Sequence: Synthetic oligonucleotide
uacacaagaaaauauacau

SEQ ID NO: 2617162 - RNA, 19 nt, Artificial Sequence
  Description of Artificial Sequence: Synthetic oligonucleotide
uggcauaugaagcauacug

SEQ ID NO: 2617163 - RNA, 19 nt, Artificial Sequence
  Description of Artificial Sequence: Synthetic oligonucleotide
acuauauacagauaauaca

SEQ ID NO: 2617164 - RNA, 19 nt, Artificial Sequence
  Description of Artificial Sequence: Synthetic oligonucleotide
acagauaauacauacaguu

SEQ ID NO: 2617165 - RNA, 19 nt, Artificial Sequence
  Description of Artificial Sequence: Synthetic oligonucleotide
aaaaugcuugguuuguaag

SEQ ID NO: 2617166 - RNA, 19 nt, Artificial Sequence
  Description of Artificial Sequence: Synthetic oligonucleotide
cuuaaacaaauuaaacaag

SEQ ID NO: 2617167 - RNA, 19 nt, Artificial Sequence
  Description of Artificial Sequence: Synthetic oligonucleotide
uguaaguccccuuuaagca

SEQ ID NO: 2617168 - RNA, 19 nt, Artificial Sequence
  Description of Artificial Sequence: Synthetic oligonucleotide
aagauaacacagcaaauaa

SEQ ID NO: 2617169 - RNA, 19 nt, Artificial Sequence
  Description of Artificial Sequence: Synthetic oligonucleotide
aaccuuaaacaaauuaaac

SEQ ID NO: 2617170 - RNA, 19 nt, Artificial Sequence
  Description of Artificial Sequence: Synthetic oligonucleotide
aaugcuugguuuguaaguc

SEQ ID NO: 2617171 - RNA, 19 nt, Artificial Sequence
  Description of Artificial Sequence: Synthetic oligonucleotide
aaagagaacuucuuucaca

SEQ ID NO: 2617172 - RNA, 19 nt, Artificial Sequence
  Description of Artificial Sequence: Synthetic oligonucleotide
auacauaaaauguaaacuu

SEQ ID NO: 2617173 - RNA, 19 nt, Artificial Sequence
  Description of Artificial Sequence: Synthetic oligonucleotide
auaugaagcauacugugug

SEQ ID NO: 2617174 - RNA, 19 nt, Artificial Sequence
  Description of Artificial Sequence: Synthetic oligonucleotide
aauacaguacauucauuga

SEQ ID NO: 2617175 - RNA, 19 nt, Artificial Sequence
  Description of Artificial Sequence: Synthetic oligonucleotide
ugaaagagaacuucuuuca

SEQ ID NO: 2617176 - RNA, 19 nt, Artificial Sequence
  Description of Artificial Sequence: Synthetic oligonucleotide
uuguaaguccccuuuaagc

SEQ ID NO: 2617177 - RNA, 19 nt, Artificial Sequence
  Description of Artificial Sequence: Synthetic oligonucleotide
auauauauggaaaauguga

SEQ ID NO: 2617178 - RNA, 19 nt, Artificial Sequence
  Description of Artificial Sequence: Synthetic oligonucleotide
ucucuuccuguuuaaaggg

SEQ ID NO: 2617179 - RNA, 19 nt, Artificial Sequence
  Description of Artificial Sequence: Synthetic oligonucleotide
aaaugcuugguuuguaagu

SEQ ID NO: 2617180 - RNA, 19 nt, Artificial Sequence
  Description of Artificial Sequence: Synthetic oligonucleotide
auuaauacauccaaaagaa

SEQ ID NO: 2617181 - RNA, 19 nt, Artificial Sequence
  Description of Artificial Sequence: Synthetic oligonucleotide
aaauauacauaaaauguaa

SEQ ID NO: 2617182 - RNA, 19 nt, Artificial Sequence
  Description of Artificial Sequence: Synthetic oligonucleotide
gaaaaugugaaccaucucu

SEQ ID NO: 2617183 - RNA, 19 nt, Artificial Sequence
  Description of Artificial Sequence: Synthetic oligonucleotide
aaaugugaaccaucucuuc

SEQ ID NO: 2617184 - RNA, 19 nt, Artificial Sequence
  Description of Artificial Sequence: Synthetic oligonucleotide
agcaagauaacacagcaaa

SEQ ID NO: 2617185 - RNA, 19 nt, Artificial Sequence
  Description of Artificial Sequence: Synthetic oligonucleotide
gauuuauuaauacauccaa

SEQ ID NO: 2617186 - RNA, 19 nt, Artificial Sequence
  Description of Artificial Sequence: Synthetic oligonucleotide
auagcaagauaacacagca

SEQ ID NO: 2617187 - RNA, 19 nt, Artificial Sequence
  Description of Artificial Sequence: Synthetic oligonucleotide
uauacagauaauacauaca

SEQ ID NO: 2617188 - RNA, 19 nt, Artificial Sequence
  Description of Artificial Sequence: Synthetic oligonucleotide
aaauagcaagauaacacag

SEQ ID NO: 2617189 - RNA, 19 nt, Artificial Sequence
  Description of Artificial Sequence: Synthetic oligonucleotide
aggaccagauaacaaaagg

SEQ ID NO: 2617190 - RNA, 19 nt, Artificial Sequence
  Description of Artificial Sequence: Synthetic oligonucleotide
aguaauacaguacauucau

SEQ ID NO: 2617191 - RNA, 19 nt, Artificial Sequence
  Description of Artificial Sequence: Synthetic oligonucleotide
aaaucacaaccaaaagccc

SEQ ID NO: 2617192 - RNA, 19 nt, Artificial Sequence
  Description of Artificial Sequence: Synthetic oligonucleotide
cacuauauacagauaauac

SEQ ID NO: 2617193 - RNA, 19 nt, Artificial Sequence
  Description of Artificial Sequence: Synthetic oligonucleotide
uuacuucacagcaagauuu

SEQ ID NO: 2617194 - RNA, 19 nt, Artificial Sequence
  Description of Artificial Sequence: Synthetic oligonucleotide
uucacagcaagauuuauua

SEQ ID NO: 2617195 - RNA, 19 nt, Artificial Sequence
  Description of Artificial Sequence: Synthetic oligonucleotide
cacaagaaaauauacauaa

SEQ ID NO: 2617196 - RNA, 19 nt, Artificial Sequence
  Description of Artificial Sequence: Synthetic oligonucleotide
gaccagauaacaaaaggag

SEQ ID NO: 2617197 - RNA, 19 nt, Artificial Sequence
  Description of Artificial Sequence: Synthetic oligonucleotide
uuuguaaguccccuuuaag

SEQ ID NO: 2617198 - RNA, 19 nt, Artificial Sequence
  Description of Artificial Sequence: Synthetic oligonucleotide
uugagauauauauauggaa

SEQ ID NO: 2617199 - RNA, 19 nt, Artificial Sequence
  Description of Artificial Sequence: Synthetic oligonucleotide
cagacaugagagaaaaugc

SEQ ID NO: 2617200 - RNA, 19 nt, Artificial Sequence
  Description of Artificial Sequence: Synthetic oligonucleotide
ggaaaucacaaccaaaagc

SEQ ID NO: 2617201 - RNA, 19 nt, Artificial Sequence
  Description of Artificial Sequence: Synthetic oligonucleotide
uaaacaaggaccagauaac

SEQ ID NO: 2617202 - RNA, 19 nt, Artificial Sequence
  Description of Artificial Sequence: Synthetic oligonucleotide
uuuauacacauauuacauc

SEQ ID NO: 2617203 - RNA, 19 nt, Artificial Sequence
  Description of Artificial Sequence: Synthetic oligonucleotide
uuuaaagggaaaucacaac

SEQ ID NO: 2617204 - RNA, 19 nt, Artificial Sequence
  Description of Artificial Sequence: Synthetic oligonucleotide
aauguaaacuuuguauaca

SEQ ID NO: 2617205 - RNA, 19 nt, Artificial Sequence
  Description of Artificial Sequence: Synthetic oligonucleotide
caugagagaaaaugcuugg

SEQ ID NO: 2617206 - RNA, 19 nt, Artificial Sequence
  Description of Artificial Sequence: Synthetic oligonucleotide
aauuaaacaaggaccagau

SEQ ID NO: 2617207 - RNA, 19 nt, Artificial Sequence
  Description of Artificial Sequence: Synthetic oligonucleotide
aaaaucauuuugucacacu

SEQ ID NO: 2617208 - RNA, 19 nt, Artificial Sequence
  Description of Artificial Sequence: Synthetic oligonucleotide
uccauuauuauuucaucaa

SEQ ID NO: 2617209 - RNA, 19 nt, Artificial Sequence
  Description of Artificial Sequence: Synthetic oligonucleotide
ucauugagauauauauaug

SEQ ID NO: 2617210 - RNA, 19 nt, Artificial Sequence
  Description of Artificial Sequence: Synthetic oligonucleotide
aaaccuuaaacaaauuaaa

SEQ ID NO: 2617211 - RNA, 19 nt, Artificial Sequence
  Description of Artificial Sequence: Synthetic oligonucleotide
ugugccaaggugaaagaga

SEQ ID NO: 2617212 - RNA, 19 nt, Artificial Sequence
  Description of Artificial Sequence: Synthetic oligonucleotide
  modified_base (19)..(19): a, c, u, g, unknown or other
gagaacuucuuucacaaan

SEQ ID NO: 2617213 - RNA, 19 nt, Artificial Sequence
  Description of Artificial Sequence: Synthetic oligonucleotide
auauggaaaaugugaacca

SEQ ID NO: 2617214 - RNA, 19 nt, Artificial Sequence
  Description of Artificial Sequence: Synthetic oligonucleotide
aaaagccccucaucucccc

SEQ ID NO: 2617215 - RNA, 19 nt, Artificial Sequence
  Description of Artificial Sequence: Synthetic oligonucleotide
caaauagcaagauaacaca

SEQ ID NO: 2617216 - RNA, 19 nt, Artificial Sequence
  Description of Artificial Sequence: Synthetic oligonucleotide
acaaggaccagauaacaaa

SEQ ID NO: 2617217 - RNA, 19 nt, Artificial Sequence
  Description of Artificial Sequence: Synthetic oligonucleotide
aacacagcaaauaaauaaa

SEQ ID NO: 2617218 - RNA, 19 nt, Artificial Sequence
  Description of Artificial Sequence: Synthetic oligonucleotide
agaauagcugcucccagug

SEQ ID NO: 2617219 - RNA, 19 nt, Artificial Sequence
  Description of Artificial Sequence: Synthetic oligonucleotide
acaaaaggagaccaaucca

SEQ ID NO: 2617220 - RNA, 19 nt, Artificial Sequence
  Description of Artificial Sequence: Synthetic oligonucleotide
augaagcauacugugugcc

SEQ ID NO: 2617221 - RNA, 19 nt, Artificial Sequence
  Description of Artificial Sequence: Synthetic oligonucleotide
cagauaauacauacaguug

SEQ ID NO: 2617222 - RNA, 19 nt, Artificial Sequence
  Description of Artificial Sequence: Synthetic oligonucleotide
uaacaaaaggagaccaauc

SEQ ID NO: 2617223 - RNA, 19 nt, Artificial Sequence
  Description of Artificial Sequence: Synthetic oligonucleotide
aaggagaccaauccauuau

SEQ ID NO: 2617224 - RNA, 19 nt, Artificial Sequence
  Description of Artificial Sequence: Synthetic oligonucleotide
uacagauaauacauacagu

SEQ ID NO: 2617225 - RNA, 19 nt, Artificial Sequence
  Description of Artificial Sequence: Synthetic oligonucleotide
ugagagaaaaugcuugguu

SEQ ID NO: 2617226 - RNA, 19 nt, Artificial Sequence
  Description of Artificial Sequence: Synthetic oligonucleotide
auguauggcauaugaagca

SEQ ID NO: 2617227 - RNA, 19 nt, Artificial Sequence
  Description of Artificial Sequence: Synthetic oligonucleotide
aaacaaggaccagauaaca

SEQ ID NO: 2617228 - RNA, 19 nt, Artificial Sequence
  Description of Artificial Sequence: Synthetic oligonucleotide
ccagauaacaaaaggagac

SEQ ID NO: 2617229 - RNA, 19 nt, Artificial Sequence
  Description of Artificial Sequence: Synthetic oligonucleotide
uuaauacauccaaaagaaa

SEQ ID NO: 2617230 - RNA, 19 nt, Artificial Sequence
  Description of Artificial Sequence: Synthetic oligonucleotide
aagggcucacacaaauagc

SEQ ID NO: 2617231 - RNA, 19 nt, Artificial Sequence
  Description of Artificial Sequence: Synthetic oligonucleotide
uaaguccccuuuaagcagc

SEQ ID NO: 2617232 - RNA, 19 nt, Artificial Sequence
  Description of Artificial Sequence: Synthetic oligonucleotide
ucuacgcucugcagaauag

SEQ ID NO: 2617233 - RNA, 19 nt, Artificial Sequence
  Description of Artificial Sequence: Synthetic oligonucleotide
agauaacaaaaggagacca

SEQ ID NO: 2617234 - RNA, 19 nt, Artificial Sequence
  Description of Artificial Sequence: Synthetic oligonucleotide
gauaggccuuuccaaaccc

SEQ ID NO: 2617235 - RNA, 19 nt, Artificial Sequence
  Description of Artificial Sequence: Synthetic oligonucleotide
ugaauguauggcauaugaa

SEQ ID NO: 2617236 - RNA, 19 nt, Artificial Sequence
  Description of Artificial Sequence: Synthetic oligonucleotide
aaaggagaccaauccauua

SEQ ID NO: 2617237 - RNA, 19 nt, Artificial Sequence
  Description of Artificial Sequence: Synthetic oligonucleotide
guaaguccccuuuaagcag

SEQ ID NO: 2617238 - RNA, 19 nt, Artificial Sequence
  Description of Artificial Sequence: Synthetic oligonucleotide
cuguuuaaagggaaaucac

SEQ ID NO: 2617239 - RNA, 19 nt, Artificial Sequence
  Description of Artificial Sequence: Synthetic oligonucleotide
accaauccauuauuauuuc

SEQ ID NO: 2617240 - RNA, 19 nt, Artificial Sequence
  Description of Artificial Sequence: Synthetic oligonucleotide
ccuuaaacaaauuaaacaa

SEQ ID NO: 2617241 - RNA, 19 nt, Artificial Sequence
  Description of Artificial Sequence: Synthetic oligonucleotide
  modified_base (16)..(16): a, c, u, g, unknown or other
aacuucuuucacaaanaaa

SEQ ID NO: 2617242 - RNA, 19 nt, Artificial Sequence
  Description of Artificial Sequence: Synthetic oligonucleotide
acaugagagaaaaugcuug

SEQ ID NO: 2617243 - RNA, 19 nt, Artificial Sequence
  Description of Artificial Sequence: Synthetic oligonucleotide
uaaguggcagccgugacac

SEQ ID NO: 2617244 - RNA, 19 nt, Artificial Sequence
  Description of Artificial Sequence: Synthetic oligonucleotide
aaaaugugaaccaucucuu

SEQ ID NO: 2617245 - RNA, 19 nt, Artificial Sequence
  Description of Artificial Sequence: Synthetic oligonucleotide
uguaaacuuuguauacaaa

SEQ ID NO: 2617246 - RNA, 19 nt, Artificial Sequence
  Description of Artificial Sequence: Synthetic oligonucleotide
aucauuuugucacacuaua

SEQ ID NO: 2617247 - RNA, 19 nt, Artificial Sequence
  Description of Artificial Sequence: Synthetic oligonucleotide
aaggugaaagagaacuucu

SEQ ID NO: 2617248 - RNA, 19 nt, Artificial Sequence
  Description of Artificial Sequence: Synthetic oligonucleotide
uacgcucugcagaauagcu

SEQ ID NO: 2617249 - RNA, 19 nt, Artificial Sequence
  Description of Artificial Sequence: Synthetic oligonucleotide
augugaaccaucucuuccu

SEQ ID NO: 2617250 - RNA, 19 nt, Artificial Sequence
  Description of Artificial Sequence: Synthetic oligonucleotide
agaccaauccauuauuauu

SEQ ID NO: 2617251 - RNA, 19 nt, Artificial Sequence
  Description of Artificial Sequence: Synthetic oligonucleotide
acacaaauagcaagauaac

SEQ ID NO: 2617252 - RNA, 19 nt, Artificial Sequence
  Description of Artificial Sequence: Synthetic oligonucleotide
accaaaagccccucaucuc

SEQ ID NO: 2617253 - RNA, 19 nt, Artificial Sequence
  Description of Artificial Sequence: Synthetic oligonucleotide
ugugaaccaucucuuccug

SEQ ID NO: 2617254 - RNA, 19 nt, Artificial Sequence
  Description of Artificial Sequence: Synthetic oligonucleotide
gaaaaugcuugguuuguaa

SEQ ID NO: 2617255 - RNA, 19 nt, Artificial Sequence
  Description of Artificial Sequence: Synthetic oligonucleotide
uccccuuuaagcagcugcc

SEQ ID NO: 2617256 - RNA, 19 nt, Artificial Sequence
  Description of Artificial Sequence: Synthetic oligonucleotide
cugugugccaaggugaaag

SEQ ID NO: 2617257 - RNA, 19 nt, Artificial Sequence
  Description of Artificial Sequence: Synthetic oligonucleotide
gaauagcugcucccagugg

SEQ ID NO: 2617258 - RNA, 19 nt, Artificial Sequence
  Description of Artificial Sequence: Synthetic oligonucleotide
cagcaagauuuauuaauac

SEQ ID NO: 2617259 - RNA, 19 nt, Artificial Sequence
  Description of Artificial Sequence: Synthetic oligonucleotide
cagcaaaccacagccagcg

SEQ ID NO: 2617260 - RNA, 19 nt, Artificial Sequence
  Description of Artificial Sequence: Synthetic oligonucleotide
cagauaacaaaaggagacc

SEQ ID NO: 2617261 - RNA, 19 nt, Artificial Sequence
  Description of Artificial Sequence: Synthetic oligonucleotide
gcauaugaagcauacugug

SEQ ID NO: 2617262 - RNA, 19 nt, Artificial Sequence
  Description of Artificial Sequence: Synthetic oligonucleotide
uuuccaaaccccugccggc

SEQ ID NO: 2617263 - RNA, 19 nt, Artificial Sequence
  Description of Artificial Sequence: Synthetic oligonucleotide
agcagcugcccuccugucc

SEQ ID NO: 2617264 - RNA, 19 nt, Artificial Sequence
  Description of Artificial Sequence: Synthetic oligonucleotide
auggaaaaugugaaccauc

SEQ ID NO: 2617265 - RNA, 19 nt, Artificial Sequence
  Description of Artificial Sequence: Synthetic oligonucleotide
guccccuuuaagcagcugc

SEQ ID NO: 2617266 - RNA, 19 nt, Artificial Sequence
  Description of Artificial Sequence: Synthetic oligonucleotide
agggaaaucacaaccaaaa

SEQ ID NO: 2617267 - RNA, 19 nt, Artificial Sequence
  Description of Artificial Sequence: Synthetic oligonucleotide
  modified_base (17)..(17): a, c, u, g, unknown or other
gaacuucuuucacaaanaa

SEQ ID NO: 2617268 - RNA, 19 nt, Artificial Sequence
  Description of Artificial Sequence: Synthetic oligonucleotide
agacaugagagaaaaugcu

SEQ ID NO: 2617269 - RNA, 19 nt, Artificial Sequence
  Description of Artificial Sequence: Synthetic oligonucleotide
auacauccaaaagaaagaa

SEQ ID NO: 2617270 - RNA, 19 nt, Artificial Sequence
  Description of Artificial Sequence: Synthetic oligonucleotide
ugaaccaucucuuccuguu

SEQ ID NO: 2617271 - RNA, 19 nt, Artificial Sequence
  Description of Artificial Sequence: Synthetic oligonucleotide
uauggaaaaugugaaccau

SEQ ID NO: 2617272 - RNA, 19 nt, Artificial Sequence
  Description of Artificial Sequence: Synthetic oligonucleotide
cauuuugucacacuauaua

SEQ ID NO: 2617273 - RNA, 19 nt, Artificial Sequence
  Description of Artificial Sequence: Synthetic oligonucleotide
aacuaaguggcagccguga

SEQ ID NO: 2617274 - RNA, 19 nt, Artificial Sequence
  Description of Artificial Sequence: Synthetic oligonucleotide
auuuauuaauacauccaaa

SEQ ID NO: 2617275 - RNA, 19 nt, Artificial Sequence
  Description of Artificial Sequence: Synthetic oligonucleotide
ggcucacacaaauagcaag

SEQ ID NO: 2617276 - RNA, 19 nt, Artificial Sequence
  Description of Artificial Sequence: Synthetic oligonucleotide
acaaccaaaagccccucau

SEQ ID NO: 2617277 - RNA, 19 nt, Artificial Sequence
  Description of Artificial Sequence: Synthetic oligonucleotide
gugccuggaacuaaguggc

SEQ ID NO: 2617278 - RNA, 19 nt, Artificial Sequence
  Description of Artificial Sequence: Synthetic oligonucleotide
caaggugaaagagaacuuc

SEQ ID NO: 2617279 - RNA, 19 nt, Artificial Sequence
  Description of Artificial Sequence: Synthetic oligonucleotide
agccgugacacagacauga

SEQ ID NO: 2617280 - RNA, 19 nt, Artificial Sequence
  Description of Artificial Sequence: Synthetic oligonucleotide
caguaauacaguacauuca

SEQ ID NO: 2617281 - RNA, 19 nt, Artificial Sequence
  Description of Artificial Sequence: Synthetic oligonucleotide
ugcagaauagcugcuccca

SEQ ID NO: 2617282 - RNA, 19 nt, Artificial Sequence
  Description of Artificial Sequence: Synthetic oligonucleotide
ugguuuguaaguccccuuu

SEQ ID NO: 2617283 - RNA, 19 nt, Artificial Sequence
  Description of Artificial Sequence: Synthetic oligonucleotide
auaggccuuuccaaacccc

SEQ ID NO: 2617284 - RNA, 19 nt, Artificial Sequence
  Description of Artificial Sequence: Synthetic oligonucleotide
cacaaauagcaagauaaca

SEQ ID NO: 2617285 - RNA, 19 nt, Artificial Sequence
  Description of Artificial Sequence: Synthetic oligonucleotide
caaauuaaacaaggaccag

SEQ ID NO: 2617286 - RNA, 19 nt, Artificial Sequence
  Description of Artificial Sequence: Synthetic oligonucleotide
caaaagccccucaucuccc

SEQ ID NO: 2617287 - RNA, 19 nt, Artificial Sequence
  Description of Artificial Sequence: Synthetic oligonucleotide
accagauaacaaaaggaga

SEQ ID NO: 2617288 - RNA, 19 nt, Artificial Sequence
  Description of Artificial Sequence: Synthetic oligonucleotide
aacaaggaccagauaacaa

SEQ ID NO: 2617289 - RNA, 19 nt, Artificial Sequence
  Description of Artificial Sequence: Synthetic oligonucleotide
uguauggcauaugaagcau

SEQ ID NO: 2617290 - RNA, 19 nt, Artificial Sequence
  Description of Artificial Sequence: Synthetic oligonucleotide
gagagaaaaugcuugguuu

SEQ ID NO: 2617291 - RNA, 19 nt, Artificial Sequence
  Description of Artificial Sequence: Synthetic oligonucleotide
caagauaacacagcaaaua

SEQ ID NO: 2617292 - RNA, 19 nt, Artificial Sequence
  Description of Artificial Sequence: Synthetic oligonucleotide
gggaaaucacaaccaaaag

SEQ ID NO: 2617293 - RNA, 19 nt, Artificial Sequence
  Description of Artificial Sequence: Synthetic oligonucleotide
uagcaagauaacacagcaa

SEQ ID NO: 2617294 - RNA, 19 nt, Artificial Sequence
  Description of Artificial Sequence: Synthetic oligonucleotide
gcaaaccacagccagcgcc

SEQ ID NO: 2617295 - RNA, 19 nt, Artificial Sequence
  Description of Artificial Sequence: Synthetic oligonucleotide
ugugugccaaggugaaaga

SEQ ID NO: 2617296 - RNA, 19 nt, Artificial Sequence
  Description of Artificial Sequence: Synthetic oligonucleotide
auacugugugccaagguga

SEQ ID NO: 2617297 - RNA, 19 nt, Artificial Sequence
  Description of Artificial Sequence: Synthetic oligonucleotide
ccaaaagccccucaucucc

SEQ ID NO: 2617298 - RNA, 19 nt, Artificial Sequence
  Description of Artificial Sequence: Synthetic oligonucleotide
uacauucauugagauauau

SEQ ID NO: 2617299 - RNA, 19 nt, Artificial Sequence
  Description of Artificial Sequence: Synthetic oligonucleotide
uggaacuaaguggcagccg

SEQ ID NO: 2617300 - RNA, 19 nt, Artificial Sequence
  Description of Artificial Sequence: Synthetic oligonucleotide
auaauacauacaguuguuu

SEQ ID NO: 2617301 - RNA, 19 nt, Artificial Sequence
  Description of Artificial Sequence: Synthetic oligonucleotide
accgauaggccuuuccaaa

SEQ ID NO: 2617302 - RNA, 19 nt, Artificial Sequence
  Description of Artificial Sequence: Synthetic oligonucleotide
uccgugcucugaauguaug

SEQ ID NO: 2617303 - RNA, 19 nt, Artificial Sequence
  Description of Artificial Sequence: Synthetic oligonucleotide
acagcaagauuuauuaaua

SEQ ID NO: 2617304 - RNA, 19 nt, Artificial Sequence
  Description of Artificial Sequence: Synthetic oligonucleotide
caaggaccagauaacaaaa

SEQ ID NO: 2617305 - RNA, 19 nt, Artificial Sequence
  Description of Artificial Sequence: Synthetic oligonucleotide
aaaaggagaccaauccauu

SEQ ID NO: 2617306 - RNA, 19 nt, Artificial Sequence
  Description of Artificial Sequence: Synthetic oligonucleotide
aaacaguaauacaguacau

SEQ ID NO: 2617307 - RNA, 19 nt, Artificial Sequence
  Description of Artificial Sequence: Synthetic oligonucleotide
cuggaacuaaguggcagcc

SEQ ID NO: 2617308 - RNA, 19 nt, Artificial Sequence
  Description of Artificial Sequence: Synthetic oligonucleotide
uacugugugccaaggugaa

SEQ ID NO: 2617309 - RNA, 19 nt, Artificial Sequence
  Description of Artificial Sequence: Synthetic oligonucleotide
cugcagaauagcugcuccc

SEQ ID NO: 2617310 - RNA, 19 nt, Artificial Sequence
  Description of Artificial Sequence: Synthetic oligonucleotide
aucacaaccaaaagccccu

SEQ ID NO: 2617311 - RNA, 19 nt, Artificial Sequence
  Description of Artificial Sequence: Synthetic oligonucleotide
agauaacacagcaaauaaa

SEQ ID NO: 2617312 - RNA, 19 nt, Artificial Sequence
  Description of Artificial Sequence: Synthetic oligonucleotide
agcaaaccacagccagcgc

SEQ ID NO: 2617313 - RNA, 19 nt, Artificial Sequence
  Description of Artificial Sequence: Synthetic oligonucleotide
caauccauuauuauuucau

SEQ ID NO: 2617314 - RNA, 19 nt, Artificial Sequence
  Description of Artificial Sequence: Synthetic oligonucleotide
gaccaauccauuauuauuu

SEQ ID NO: 2617315 - RNA, 19 nt, Artificial Sequence
  Description of Artificial Sequence: Synthetic oligonucleotide
auuaaacaaggaccagaua

SEQ ID NO: 2617316 - RNA, 19 nt, Artificial Sequence
  Description of Artificial Sequence: Synthetic oligonucleotide
aaaccacagccagcgccac

SEQ ID NO: 2617317 - RNA, 19 nt, Artificial Sequence
  Description of Artificial Sequence: Synthetic oligonucleotide
augagagaaaaugcuuggu

SEQ ID NO: 2617318 - RNA, 19 nt, Artificial Sequence
  Description of Artificial Sequence: Synthetic oligonucleotide
gugcucugaauguauggca

SEQ ID NO: 2617319 - RNA, 19 nt, Artificial Sequence
  Description of Artificial Sequence: Synthetic oligonucleotide
aggagaccaauccauuauu

SEQ ID NO: 2617320 - RNA, 19 nt, Artificial Sequence
  Description of Artificial Sequence: Synthetic oligonucleotide
gcaagauuuauuaauacau

SEQ ID NO: 2617321 - RNA, 19 nt, Artificial Sequence
  Description of Artificial Sequence: Synthetic oligonucleotide
cuaaguggcagccgugaca

SEQ ID NO: 2617322 - RNA, 19 nt, Artificial Sequence
  Description of Artificial Sequence: Synthetic oligonucleotide
uuccaaaccccugccggcc

SEQ ID NO: 2617323 - RNA, 19 nt, Artificial Sequence
  Description of Artificial Sequence: Synthetic oligonucleotide
cauaugaagcauacugugu
